United States Patent Application Publication US 2018/0305689 A1 - sequence listing, part 124

SEQ ID NO: 1808972 - RNA, 19 nt, Artificial Sequence
  Description of Artificial Sequence: Synthetic oligonucleotide
  Antisense strand to SEQ ID NO: 1808971
auuaugcauaccaguuuca

SEQ ID NO: 1808973 - RNA, 19 nt, Artificial Sequence
  Description of Artificial Sequence: Synthetic oligonucleotide
  Sense strand starting at position 3883 of SEQ ID NO: 1563284
gugcuugcuuuggucugaa

SEQ ID NO: 1808974 - RNA, 19 nt, Artificial Sequence
  Description of Artificial Sequence: Synthetic oligonucleotide
  Antisense strand to SEQ ID NO: 1808973
uucagaccaaagcaagcac

SEQ ID NO: 1808975 - RNA, 19 nt, Artificial Sequence
  Description of Artificial Sequence: Synthetic oligonucleotide
  Sense strand starting at position 3886 of SEQ ID NO: 1563284
cuugcuuuggucugaauau

SEQ ID NO: 1808976 - RNA, 19 nt, Artificial Sequence
  Description of Artificial Sequence: Synthetic oligonucleotide
  Antisense strand to SEQ ID NO: 1808975
auauucagaccaaagcaag

SEQ ID NO: 1808977 - RNA, 19 nt, Artificial Sequence
  Description of Artificial Sequence: Synthetic oligonucleotide
  Sense strand starting at position 3897 of SEQ ID NO: 1563284
cugaauauuuguguugcca

SEQ ID NO: 1808978 - RNA, 19 nt, Artificial Sequence
  Description of Artificial Sequence: Synthetic oligonucleotide
  Antisense strand to SEQ ID NO: 1808977
uggcaacacaaauauucag

SEQ ID NO: 1808979 - RNA, 19 nt, Artificial Sequence
  Description of Artificial Sequence: Synthetic oligonucleotide
  Sense strand starting at position 3929 of SEQ ID NO: 1563284
cugaauuaccaaggugaug

SEQ ID NO: 1808980 - RNA, 19 nt, Artificial Sequence
  Description of Artificial Sequence: Synthetic oligonucleotide
  Antisense strand to SEQ ID NO: 1808979
caucaccuugguaauucag

SEQ ID NO: 1808981 - RNA, 19 nt, Artificial Sequence
  Description of Artificial Sequence: Synthetic oligonucleotide
  Sense strand starting at position 3981 of SEQ ID NO: 1563284
acuagaucaugagagcaga

SEQ ID NO: 1808982 - RNA, 19 nt, Artificial Sequence
  Description of Artificial Sequence: Synthetic oligonucleotide
  Antisense strand to SEQ ID NO: 1808981
ucugcucucaugaucuagu

SEQ ID NO: 1808983 - RNA, 19 nt, Artificial Sequence
  Description of Artificial Sequence: Synthetic oligonucleotide
  Sense strand starting at position 594 of SEQ ID NO: 1563287
augucaauuguauagugua

SEQ ID NO: 1808984 - RNA, 19 nt, Artificial Sequence
  Description of Artificial Sequence: Synthetic oligonucleotide
  Antisense strand to SEQ ID NO: 1808983
uacacuauacaauugacau

SEQ ID NO: 1808985 - RNA, 19 nt, Artificial Sequence
  Description of Artificial Sequence: Synthetic oligonucleotide
  Sense strand starting at position 876 of SEQ ID NO: 1563287
cauagaucuuuagugagaa

SEQ ID NO: 1808986 - RNA, 19 nt, Artificial Sequence
  Description of Artificial Sequence: Synthetic oligonucleotide
  Antisense strand to SEQ ID NO: 1808985
uucucacuaaagaucuaug

SEQ ID NO: 1808987 - RNA, 19 nt, Artificial Sequence
  Description of Artificial Sequence: Synthetic oligonucleotide
  Sense strand starting at position 1009 of SEQ ID NO: 1563287
auguguagguacucucaaa

SEQ ID NO: 1808988 - RNA, 19 nt, Artificial Sequence
  Description of Artificial Sequence: Synthetic oligonucleotide
  Antisense strand to SEQ ID NO: 1808987
uuugagaguaccuacacau

SEQ ID NO: 1808989 - RNA, 19 nt, Artificial Sequence
  Description of Artificial Sequence: Synthetic oligonucleotide
  Sense strand starting at position 1034 of SEQ ID NO: 1563287
uucucagacugaucugaca

SEQ ID NO: 1808990 - RNA, 19 nt, Artificial Sequence
  Description of Artificial Sequence: Synthetic oligonucleotide
  Antisense strand to SEQ ID NO: 1808989
ugucagaucagucugagaa

SEQ ID NO: 1808991 - RNA, 19 nt, Artificial Sequence
  Description of Artificial Sequence: Synthetic oligonucleotide
  Sense strand starting at position 1068 of SEQ ID NO: 1563287
uuaacuuuggugcaaauaa

SEQ ID NO: 1808992 - RNA, 19 nt, Artificial Sequence
  Description of Artificial Sequence: Synthetic oligonucleotide
  Antisense strand to SEQ ID NO: 1808991
uuauuugcaccaaaguuaa

SEQ ID NO: 1808993 - RNA, 19 nt, Artificial Sequence
  Description of Artificial Sequence: Synthetic oligonucleotide
  Sense strand starting at position 1108 of SEQ ID NO: 1563287
ccuaaagaucugcaagucu

SEQ ID NO: 1808994 - RNA, 19 nt, Artificial Sequence
  Description of Artificial Sequence: Synthetic oligonucleotide
  Antisense strand to SEQ ID NO: 1808993
agacuugcagaucuuuagg

SEQ ID NO: 1808995 - RNA, 19 nt, Artificial Sequence
  Description of Artificial Sequence: Synthetic oligonucleotide
  Sense strand starting at position 1213 of SEQ ID NO: 1563287
ggagaaugacgaugaaugu

SEQ ID NO: 1808996 - RNA, 19 nt, Artificial Sequence
  Description of Artificial Sequence: Synthetic oligonucleotide
  Antisense strand to SEQ ID NO: 1808995
acauucaucgucauucucc

SEQ ID NO: 1808997 - RNA, 19 nt, Artificial Sequence
  Description of Artificial Sequence: Synthetic oligonucleotide
  Sense strand starting at position 1219 of SEQ ID NO: 1563287
ugacgaugaauguagugaa

SEQ ID NO: 1808998 - RNA, 19 nt, Artificial Sequence
  Description of Artificial Sequence: Synthetic oligonucleotide
  Antisense strand to SEQ ID NO: 1808997
uucacuacauucaucguca

SEQ ID NO: 1808999 - RNA, 19 nt, Artificial Sequence
  Description of Artificial Sequence: Synthetic oligonucleotide
  Sense strand starting at position 1229 of SEQ ID NO: 1563287
uguagugaaagauguuuaa

SEQ ID NO: 1809000 - RNA, 19 nt, Artificial Sequence
  Description of Artificial Sequence: Synthetic oligonucleotide
  Antisense strand to SEQ ID NO: 1808999
uuaaacaucuuucacuaca

SEQ ID NO: 1809001 - RNA, 19 nt, Artificial Sequence
  Description of Artificial Sequence: Synthetic oligonucleotide
  Sense strand starting at position 1255 of SEQ ID NO: 1563287
ucugaacuacuuugucaug

SEQ ID NO: 1809002 - RNA, 19 nt, Artificial Sequence
  Description of Artificial Sequence: Synthetic oligonucleotide
  Antisense strand to SEQ ID NO: 1809001
caugacaaaguaguucaga

SEQ ID NO: 1809003 - RNA, 19 nt, Artificial Sequence
  Description of Artificial Sequence: Synthetic oligonucleotide
  Sense strand starting at position 1572 of SEQ ID NO: 1563287
agaaguaguacgggacagu

SEQ ID NO: 1809004 - RNA, 19 nt, Artificial Sequence
  Description of Artificial Sequence: Synthetic oligonucleotide
  Antisense strand to SEQ ID NO: 1809003
acugucccguacuacuucu

SEQ ID NO: 1809005 - RNA, 19 nt, Artificial Sequence
  Description of Artificial Sequence: Synthetic oligonucleotide
  Sense strand starting at position 1608 of SEQ ID NO: 1563287
agccuucuccucuagagaa

SEQ ID NO: 1809006 - RNA, 19 nt, Artificial Sequence
  Description of Artificial Sequence: Synthetic oligonucleotide
  Antisense strand to SEQ ID NO: 1809005
uucucuagaggagaaggcu

SEQ ID NO: 1809007 - RNA, 19 nt, Artificial Sequence
  Description of Artificial Sequence: Synthetic oligonucleotide
  Sense strand starting at position 1658 of SEQ ID NO: 1563287
gaagcugaacgcuagucua

SEQ ID NO: 1809008 - RNA, 19 nt, Artificial Sequence
  Description of Artificial Sequence: Synthetic oligonucleotide
  Antisense strand to SEQ ID NO: 1809007
uagacuagcguucagcuuc

SEQ ID NO: 1809009 - RNA, 19 nt, Artificial Sequence
  Description of Artificial Sequence: Synthetic oligonucleotide
  Sense strand starting at position 1703 of SEQ ID NO: 1563287
cuacgagaccucggcagaa

SEQ ID NO: 1809010 - RNA, 19 nt, Artificial Sequence
  Description of Artificial Sequence: Synthetic oligonucleotide
  Antisense strand to SEQ ID NO: 1809009
uucugccgaggucucguag

SEQ ID NO: 1809011 - RNA, 19 nt, Artificial Sequence
  Description of Artificial Sequence: Synthetic oligonucleotide
  Sense strand starting at position 1721 of SEQ ID NO: 1563287
augggaauaucucuuugcu

SEQ ID NO: 1809012 - RNA, 19 nt, Artificial Sequence
  Description of Artificial Sequence: Synthetic oligonucleotide
  Antisense strand to SEQ ID NO: 1809011
agcaaagagauauucccau

SEQ ID NO: 1809013 - RNA, 19 nt, Artificial Sequence
  Description of Artificial Sequence: Synthetic oligonucleotide
  Sense strand starting at position 1723 of SEQ ID NO: 1563287
gggaauaucucuuugcuca

SEQ ID NO: 1809014 - RNA, 19 nt, Artificial Sequence
  Description of Artificial Sequence: Synthetic oligonucleotide
  Antisense strand to SEQ ID NO: 1809013
ugagcaaagagauauuccc

SEQ ID NO: 1809015 - RNA, 19 nt, Artificial Sequence
  Description of Artificial Sequence: Synthetic oligonucleotide
  Sense strand starting at position 1724 of SEQ ID NO: 1563287
ggaauaucucuuugcucau

SEQ ID NO: 1809016 - RNA, 19 nt, Artificial Sequence
  Description of Artificial Sequence: Synthetic oligonucleotide
  Antisense strand to SEQ ID NO: 1809015
augagcaaagagauauucc

SEQ ID NO: 1809017 - RNA, 19 nt, Artificial Sequence
  Description of Artificial Sequence: Synthetic oligonucleotide
  Sense strand starting at position 2134 of SEQ ID NO: 1563287
uccugagauuaacucuguu

SEQ ID NO: 1809018 - RNA, 19 nt, Artificial Sequence
  Description of Artificial Sequence: Synthetic oligonucleotide
  Antisense strand to SEQ ID NO: 1809017
aacagaguuaaucucagga

SEQ ID NO: 1809019 - RNA, 19 nt, Artificial Sequence
  Description of Artificial Sequence: Synthetic oligonucleotide
  Sense strand starting at position 2138 of SEQ ID NO: 1563287
gagauuaacucuguuccga

SEQ ID NO: 1809020 - RNA, 19 nt, Artificial Sequence
  Description of Artificial Sequence: Synthetic oligonucleotide
  Antisense strand to SEQ ID NO: 1809019
ucggaacagaguuaaucuc

SEQ ID NO: 1809021 - RNA, 19 nt, Artificial Sequence
  Description of Artificial Sequence: Synthetic oligonucleotide
  Sense strand starting at position 2223 of SEQ ID NO: 1563287
uucucuuagguugaugcaa

SEQ ID NO: 1809022 - RNA, 19 nt, Artificial Sequence
  Description of Artificial Sequence: Synthetic oligonucleotide
  Antisense strand to SEQ ID NO: 1809021
uugcaucaaccuaagagaa

SEQ ID NO: 1809023 - RNA, 19 nt, Artificial Sequence
  Description of Artificial Sequence: Synthetic oligonucleotide
  Sense strand starting at position 2288 of SEQ ID NO: 1563287
agggaaguccuuugcugac

SEQ ID NO: 1809024 - RNA, 19 nt, Artificial Sequence
  Description of Artificial Sequence: Synthetic oligonucleotide
  Antisense strand to SEQ ID NO: 1809023
gucagcaaaggacuucccu

SEQ ID NO: 1809025 - RNA, 19 nt, Artificial Sequence
  Description of Artificial Sequence: Synthetic oligonucleotide
  Sense strand starting at position 2290 of SEQ ID NO: 1563287
ggaaguccuuugcugacaa

SEQ ID NO: 1809026 - RNA, 19 nt, Artificial Sequence
  Description of Artificial Sequence: Synthetic oligonucleotide
  Antisense strand to SEQ ID NO: 1809025
uugucagcaaaggacuucc

SEQ ID NO: 1809027 - RNA, 19 nt, Artificial Sequence
  Description of Artificial Sequence: Synthetic oligonucleotide
  Sense strand starting at position 2374 of SEQ ID NO: 1563287
cgugcauauuauuugcuaa

SEQ ID NO: 1809028 - RNA, 19 nt, Artificial Sequence
  Description of Artificial Sequence: Synthetic oligonucleotide
  Antisense strand to SEQ ID NO: 1809027
uuagcaaauaauaugcacg

SEQ ID NO: 1809029 - RNA, 19 nt, Artificial Sequence
  Description of Artificial Sequence: Synthetic oligonucleotide
  Sense strand starting at position 2435 of SEQ ID NO: 1563287
ccgagagaagcauaguuaa

SEQ ID NO: 1809030 - RNA, 19 nt, Artificial Sequence
  Description of Artificial Sequence: Synthetic oligonucleotide
  Antisense strand to SEQ ID NO: 1809029
uuaacuaugcuucucucgg

SEQ ID NO: 1809031 - RNA, 19 nt, Artificial Sequence
  Description of Artificial Sequence: Synthetic oligonucleotide
  Sense strand starting at position 2643 of SEQ ID NO: 1563287
uuguaucaucccggaaagg

SEQ ID NO: 1809032 - RNA, 19 nt, Artificial Sequence
  Description of Artificial Sequence: Synthetic oligonucleotide
  Antisense strand to SEQ ID NO: 1809031
ccuuuccgggaugauacaa

SEQ ID NO: 1809033 - RNA, 19 nt, Artificial Sequence
  Description of Artificial Sequence: Synthetic oligonucleotide
  Sense strand starting at position 3066 of SEQ ID NO: 1563287
ugcggugauccgagaucug

SEQ ID NO: 1809034 - RNA, 19 nt, Artificial Sequence
  Description of Artificial Sequence: Synthetic oligonucleotide
  Antisense strand to SEQ ID NO: 1809033
cagaucucggaucaccgca

SEQ ID NO: 1809035 - RNA, 19 nt, Artificial Sequence
  Description of Artificial Sequence: Synthetic oligonucleotide
  Sense strand starting at position 3179 of SEQ ID NO: 1563287
gcuaguuuacaccaugaag

SEQ ID NO: 1809036 - RNA, 19 nt, Artificial Sequence
  Description of Artificial Sequence: Synthetic oligonucleotide
  Antisense strand to SEQ ID NO: 1809035
cuucaugguguaaacuagc

SEQ ID NO: 1809037 - RNA, 19 nt, Artificial Sequence
  Description of Artificial Sequence: Synthetic oligonucleotide
  Sense strand starting at position 3182 of SEQ ID NO: 1563287
aguuuacaccaugaagcau

SEQ ID NO: 1809038 - RNA, 19 nt, Artificial Sequence
  Description of Artificial Sequence: Synthetic oligonucleotide
  Antisense strand to SEQ ID NO: 1809037
augcuucaugguguaaacu

SEQ ID NO: 1809039 - RNA, 19 nt, Artificial Sequence
  Description of Artificial Sequence: Synthetic oligonucleotide
  Sense strand starting at position 3277 of SEQ ID NO: 1563287
auuugcaaucacuguguga

SEQ ID NO: 1809040 - RNA, 19 nt, Artificial Sequence
  Description of Artificial Sequence: Synthetic oligonucleotide
  Antisense strand to SEQ ID NO: 1809039
ucacacagugauugcaaau

SEQ ID NO: 1809041 - RNA, 19 nt, Artificial Sequence
  Description of Artificial Sequence: Synthetic oligonucleotide
  Sense strand starting at position 3302 of SEQ ID NO: 1563287
ggacaccuuguguaaugga

SEQ ID NO: 1809042 - RNA, 19 nt, Artificial Sequence
  Description of Artificial Sequence: Synthetic oligonucleotide
  Antisense strand to SEQ ID NO: 1809041
uccauuacacaaggugucc

SEQ ID NO: 1809043 - RNA, 19 nt, Artificial Sequence
  Description of Artificial Sequence: Synthetic oligonucleotide
  Sense strand starting at position 3311 of SEQ ID NO: 1563287
guguaauggaaugguccaa

SEQ ID NO: 1809044 - RNA, 19 nt, Artificial Sequence
  Description of Artificial Sequence: Synthetic oligonucleotide
  Antisense strand to SEQ ID NO: 1809043
uuggaccauuccauuacac

SEQ ID NO: 1809045 - RNA, 19 nt, Artificial Sequence
  Description of Artificial Sequence: Synthetic oligonucleotide
  Sense strand starting at position 3380 of SEQ ID NO: 1563287
gucauuguuccguuguggu

SEQ ID NO: 1809046 - RNA, 19 nt, Artificial Sequence
  Description of Artificial Sequence: Synthetic oligonucleotide
  Antisense strand to SEQ ID NO: 1809045
accacaacggaacaaugac

SEQ ID NO: 1809047 - RNA, 19 nt, Artificial Sequence
  Description of Artificial Sequence: Synthetic oligonucleotide
  Sense strand starting at position 3382 of SEQ ID NO: 1563287
cauuguuccguugugguga

SEQ ID NO: 1809048 - RNA, 19 nt, Artificial Sequence
  Description of Artificial Sequence: Synthetic oligonucleotide
  Antisense strand to SEQ ID NO: 1809047
ucaccacaacggaacaaug

SEQ ID NO: 1809049 - RNA, 19 nt, Artificial Sequence
  Description of Artificial Sequence: Synthetic oligonucleotide
  Sense strand starting at position 3589 of SEQ ID NO: 1563287
gauucuuagggucagguaa

SEQ ID NO: 1809050 - RNA, 19 nt, Artificial Sequence
  Description of Artificial Sequence: Synthetic oligonucleotide
  Antisense strand to SEQ ID NO: 1809049
uuaccugacccuaagaauc

SEQ ID NO: 1809051 - RNA, 19 nt, Artificial Sequence
  Description of Artificial Sequence: Synthetic oligonucleotide
  Sense strand starting at position 3681 of SEQ ID NO: 1563287
cccuuaaaguaguucucaa

SEQ ID NO: 1809052 - RNA, 19 nt, Artificial Sequence
  Description of Artificial Sequence: Synthetic oligonucleotide
  Antisense strand to SEQ ID NO: 1809051
uugagaacuacuuuaaggg

SEQ ID NO: 1809053 - RNA, 19 nt, Artificial Sequence
  Description of Artificial Sequence: Synthetic oligonucleotide
  Sense strand starting at position 3730 of SEQ ID NO: 1563287
ggaaauguacaguggcauu

SEQ ID NO: 1809054 - RNA, 19 nt, Artificial Sequence
  Description of Artificial Sequence: Synthetic oligonucleotide
  Antisense strand to SEQ ID NO: 1809053
aaugccacuguacauuucc

SEQ ID NO: 1809055 - RNA, 19 nt, Artificial Sequence
  Description of Artificial Sequence: Synthetic oligonucleotide
  Sense strand starting at position 3818 of SEQ ID NO: 1563287
ggcaguucuacaggaugaa

SEQ ID NO: 1809056 - RNA, 19 nt, Artificial Sequence
  Description of Artificial Sequence: Synthetic oligonucleotide
  Antisense strand to SEQ ID NO: 1809055
uucauccuguagaacugcc

SEQ ID NO: 1809057 - RNA, 19 nt, Artificial Sequence
  Description of Artificial Sequence: Synthetic oligonucleotide
  Sense strand starting at position 3819 of SEQ ID NO: 1563287
gcaguucuacaggaugaac

SEQ ID NO: 1809058 - RNA, 19 nt, Artificial Sequence
  Description of Artificial Sequence: Synthetic oligonucleotide
  Antisense strand to SEQ ID NO: 1809057
guucauccuguagaacugc

SEQ ID NO: 1809059 - RNA, 19 nt, Artificial Sequence
  Description of Artificial Sequence: Synthetic oligonucleotide
  Sense strand starting at position 3915 of SEQ ID NO: 1563287
ccuggaucugaaugcuaug

SEQ ID NO: 1809060 - RNA, 19 nt, Artificial Sequence
  Description of Artificial Sequence: Synthetic oligonucleotide
  Antisense strand to SEQ ID NO: 1809059
cauagcauucagauccagg

SEQ ID NO: 1809061 - RNA, 19 nt, Artificial Sequence
  Description of Artificial Sequence: Synthetic oligonucleotide
  Sense strand starting at position 3941 of SEQ ID NO: 1563287
gccagccuugcauaaauaa

SEQ ID NO: 1809062 - RNA, 19 nt, Artificial Sequence
  Description of Artificial Sequence: Synthetic oligonucleotide
  Antisense strand to SEQ ID NO: 1809061
uuauuuaugcaaggcuggc

SEQ ID NO: 1809063 - RNA, 19 nt, Artificial Sequence
  Description of Artificial Sequence: Synthetic oligonucleotide
  Sense strand starting at position 255 of SEQ ID NO: 1563288
uaguaauggcauuggguga

SEQ ID NO: 1809064 - RNA, 19 nt, Artificial Sequence
  Description of Artificial Sequence: Synthetic oligonucleotide
  Antisense strand to SEQ ID NO: 1809063
ucacccaaugccauuacua

SEQ ID NO: 1809065 - RNA, 19 nt, Artificial Sequence
  Description of Artificial Sequence: Synthetic oligonucleotide
  Sense strand starting at position 260 of SEQ ID NO: 1563288
auggcauugggugauucaa

SEQ ID NO: 1809066 - RNA, 19 nt, Artificial Sequence
  Description of Artificial Sequence: Synthetic oligonucleotide
  Antisense strand to SEQ ID NO: 1809065
uugaaucacccaaugccau

SEQ ID NO: 1809067 - RNA, 19 nt, Artificial Sequence
  Description of Artificial Sequence: Synthetic oligonucleotide
  Sense strand starting at position 262 of SEQ ID NO: 1563288
ggcauugggugauucaaag

SEQ ID NO: 1809068 - RNA, 19 nt, Artificial Sequence
  Description of Artificial Sequence: Synthetic oligonucleotide
  Antisense strand to SEQ ID NO: 1809067
cuuugaaucacccaaugcc

SEQ ID NO: 1809069 - RNA, 19 nt, Artificial Sequence
  Description of Artificial Sequence: Synthetic oligonucleotide
  Sense strand starting at position 362 of SEQ ID NO: 1563288
cauuauugagaucguguaa

SEQ ID NO: 1809070 - RNA, 19 nt, Artificial Sequence
  Description of Artificial Sequence: Synthetic oligonucleotide
  Antisense strand to SEQ ID NO: 1809069
uuacacgaucucaauaaug

SEQ ID NO: 1809071 - RNA, 19 nt, Artificial Sequence
  Description of Artificial Sequence: Synthetic oligonucleotide
  Sense strand starting at position 437 of SEQ ID NO: 1563288
cauauaugccugcgugcau

SEQ ID NO: 1809072 - RNA, 19 nt, Artificial Sequence
  Description of Artificial Sequence: Synthetic oligonucleotide
  Antisense strand to SEQ ID NO: 1809071
augcacgcaggcauauaug

SEQ ID NO: 1809073 - RNA, 19 nt, Artificial Sequence
  Description of Artificial Sequence: Synthetic oligonucleotide
  Sense strand starting at position 446 of SEQ ID NO: 1563288
cugcgugcauguguauaua

SEQ ID NO: 1809074 - RNA, 19 nt, Artificial Sequence
  Description of Artificial Sequence: Synthetic oligonucleotide
  Antisense strand to SEQ ID NO: 1809073
uauauacacaugcacgcag

SEQ ID NO: 1809075 - RNA, 19 nt, Artificial Sequence
  Description of Artificial Sequence: Synthetic oligonucleotide
  Sense strand starting at position 449 of SEQ ID NO: 1563288
cgugcauguguauauaacu

SEQ ID NO: 1809076 - RNA, 19 nt, Artificial Sequence
  Description of Artificial Sequence: Synthetic oligonucleotide
  Antisense strand to SEQ ID NO: 1809075
aguuauauacacaugcacg

SEQ ID NO: 1809077 - RNA, 19 nt, Artificial Sequence
  Description of Artificial Sequence: Synthetic oligonucleotide
  Sense strand starting at position 752 of SEQ ID NO: 1563288
gagaaaugcgaguguagac

SEQ ID NO: 1809078 - RNA, 19 nt, Artificial Sequence
  Description of Artificial Sequence: Synthetic oligonucleotide
  Antisense strand to SEQ ID NO: 1809077
gucuacacucgcauuucuc

SEQ ID NO: 1809079 - RNA, 19 nt, Artificial Sequence
  Description of Artificial Sequence: Synthetic oligonucleotide
  Sense strand starting at position 797 of SEQ ID NO: 1563288
cggaguggcuggaaugaaa

SEQ ID NO: 1809080 - RNA, 19 nt, Artificial Sequence
  Description of Artificial Sequence: Synthetic oligonucleotide
  Antisense strand to SEQ ID NO: 1809079
uuucauuccagccacuccg

SEQ ID NO: 1809081 - RNA, 19 nt, Artificial Sequence
  Description of Artificial Sequence: Synthetic oligonucleotide
  Sense strand starting at position 827 of SEQ ID NO: 1563288
cagcgaguguucgaaugug

SEQ ID NO: 1809082 - RNA, 19 nt, Artificial Sequence
  Description of Artificial Sequence: Synthetic oligonucleotide
  Antisense strand to SEQ ID NO: 1809081
cacauucgaacacucgcug

SEQ ID NO: 1809083 - RNA, 19 nt, Artificial Sequence
  Description of Artificial Sequence: Synthetic oligonucleotide
  Sense strand starting at position 830 of SEQ ID NO: 1563288
cgaguguucgaauguggca

SEQ ID NO: 1809084 - RNA, 19 nt, Artificial Sequence
  Description of Artificial Sequence: Synthetic oligonucleotide
  Antisense strand to SEQ ID NO: 1809083
ugccacauucgaacacucg

SEQ ID NO: 1809085 - RNA, 19 nt, Artificial Sequence
  Description of Artificial Sequence: Synthetic oligonucleotide
  Sense strand starting at position 851 of SEQ ID NO: 1563288
gcuggaaccuucgaauauu

SEQ ID NO: 1809086 - RNA, 19 nt, Artificial Sequence
  Description of Artificial Sequence: Synthetic oligonucleotide
  Antisense strand to SEQ ID NO: 1809085
aauauucgaagguuccagc

SEQ ID NO: 1809087 - RNA, 19 nt, Artificial Sequence
  Description of Artificial Sequence: Synthetic oligonucleotide
  Sense strand starting at position 860 of SEQ ID NO: 1563288
uucgaauauuucuggacuu

SEQ ID NO: 1809088 - RNA, 19 nt, Artificial Sequence
  Description of Artificial Sequence: Synthetic oligonucleotide
  Antisense strand to SEQ ID NO: 1809087
aaguccagaaauauucgaa

SEQ ID NO: 1809089 - RNA, 19 nt, Artificial Sequence
  Description of Artificial Sequence: Synthetic oligonucleotide
  Sense strand starting at position 861 of SEQ ID NO: 1563288
ucgaauauuucuggacuuc

SEQ ID NO: 1809090 - RNA, 19 nt, Artificial Sequence
  Description of Artificial Sequence: Synthetic oligonucleotide
  Antisense strand to SEQ ID NO: 1809089
gaaguccagaaauauucga

SEQ ID NO: 1809091 - RNA, 19 nt, Artificial Sequence
  Description of Artificial Sequence: Synthetic oligonucleotide
  Sense strand starting at position 908 of SEQ ID NO: 1563288
gccgaaaggucagauagag

SEQ ID NO: 1809092 - RNA, 19 nt, Artificial Sequence
  Description of Artificial Sequence: Synthetic oligonucleotide
  Antisense strand to SEQ ID NO: 1809091
cucuaucugaccuuucggc

SEQ ID NO: 1809093 - RNA, 19 nt, Artificial Sequence
  Description of Artificial Sequence: Synthetic oligonucleotide
  Sense strand starting at position 918 of SEQ ID NO: 1563288
cagauagagucccggugaa

SEQ ID NO: 1809094 - RNA, 19 nt, Artificial Sequence
  Description of Artificial Sequence: Synthetic oligonucleotide
  Antisense strand to SEQ ID NO: 1809093
uucaccgggacucuaucug

SEQ ID NO: 1809095 - RNA, 19 nt, Artificial Sequence
  Description of Artificial Sequence: Synthetic oligonucleotide
  Sense strand starting at position 931 of SEQ ID NO: 1563288
ggugaagaguuccuucaga

SEQ ID NO: 1809096 - RNA, 19 nt, Artificial Sequence
  Description of Artificial Sequence: Synthetic oligonucleotide
  Antisense strand to SEQ ID NO: 1809095
ucugaaggaacucuucacc

SEQ ID NO: 1809097 - RNA, 19 nt, Artificial Sequence
  Description of Artificial Sequence: Synthetic oligonucleotide
  Sense strand starting at position 1054 of SEQ ID NO: 1563288
accauaggcuuagagaauc

SEQ ID NO: 1809098 - RNA, 19 nt, Artificial Sequence
  Description of Artificial Sequence: Synthetic oligonucleotide
  Antisense strand to SEQ ID NO: 1809097
gauucucuaagccuauggu

SEQ ID NO: 1809099 - RNA, 19 nt, Artificial Sequence
  Description of Artificial Sequence: Synthetic oligonucleotide
  Sense strand starting at position 1196 of SEQ ID NO: 1563288
gagagugagcgacauccaa

SEQ ID NO: 1809100 - RNA, 19 nt, Artificial Sequence
  Description of Artificial Sequence: Synthetic oligonucleotide
  Antisense strand to SEQ ID NO: 1809099
uuggaugucgcucacucuc

SEQ ID NO: 1809101 - RNA, 19 nt, Artificial Sequence
  Description of Artificial Sequence: Synthetic oligonucleotide
  Sense strand starting at position 1204 of SEQ ID NO: 1563288
gcgacauccaagggcaaau

SEQ ID NO: 1809102 - RNA, 19 nt, Artificial Sequence
  Description of Artificial Sequence: Synthetic oligonucleotide
  Antisense strand to SEQ ID NO: 1809101
auuugcccuuggaugucgc

SEQ ID NO: 1809103 - RNA, 19 nt, Artificial Sequence
  Description of Artificial Sequence: Synthetic oligonucleotide
  Sense strand starting at position 1251 of SEQ ID NO: 1563288
ggaagagucccucgcaggu

SEQ ID NO: 1809104 - RNA, 19 nt, Artificial Sequence
  Description of Artificial Sequence: Synthetic oligonucleotide
  Antisense strand to SEQ ID NO: 1809103
accugcgagggacucuucc

SEQ ID NO: 1809105 - RNA, 19 nt, Artificial Sequence
  Description of Artificial Sequence: Synthetic oligonucleotide
  Sense strand starting at position 1306 of SEQ ID NO: 1563288
cgaucaugcgucugggaca

SEQ ID NO: 1809106 - RNA, 19 nt, Artificial Sequence
  Description of Artificial Sequence: Synthetic oligonucleotide
  Antisense strand to SEQ ID NO: 1809105
ugucccagacgcaugaucg

SEQ ID NO: 1809107 - RNA, 19 nt, Artificial Sequence
  Description of Artificial Sequence: Synthetic oligonucleotide
  Sense strand starting at position 1333 of SEQ ID NO: 1563288
cccaccauguuccaugaga

SEQ ID NO: 1809108 - RNA, 19 nt, Artificial Sequence
  Description of Artificial Sequence: Synthetic oligonucleotide
  Antisense strand to SEQ ID NO: 1809107
ucucauggaacaugguggg

SEQ ID NO: 1809109 - RNA, 19 nt, Artificial Sequence
  Description of Artificial Sequence: Synthetic oligonucleotide
  Sense strand starting at position 1338 of SEQ ID NO: 1563288
cauguuccaugagaacaga

SEQ ID NO: 1809110 - RNA, 19 nt, Artificial Sequence
  Description of Artificial Sequence: Synthetic oligonucleotide
  Antisense strand to SEQ ID NO: 1809109
ucuguucucauggaacaug

SEQ ID NO: 1809111 - RNA, 19 nt, Artificial Sequence
  Description of Artificial Sequence: Synthetic oligonucleotide
  Sense strand starting at position 1463 of SEQ ID NO: 1563288
gggcucaggucauuucagu

SEQ ID NO: 1809112 - RNA, 19 nt, Artificial Sequence
  Description of Artificial Sequence: Synthetic oligonucleotide
  Antisense strand to SEQ ID NO: 1809111
acugaaaugaccugagccc

SEQ ID NO: 1809113 - RNA, 19 nt, Artificial Sequence
  Description of Artificial Sequence: Synthetic oligonucleotide
  Sense strand starting at position 2020 of SEQ ID NO: 1563288
ccagaauccugaggugaag

SEQ ID NO: 1809114 - RNA, 19 nt, Artificial Sequence
  Description of Artificial Sequence: Synthetic oligonucleotide
  Antisense strand to SEQ ID NO: 1809113
cuucaccucaggauucugg

SEQ ID NO: 1809115 - RNA, 19 nt, Artificial Sequence
  Description of Artificial Sequence: Synthetic oligonucleotide
  Sense strand starting at position 2722 of SEQ ID NO: 1563288
cauggugaaucucgucuca

SEQ ID NO: 1809116 - RNA, 19 nt, Artificial Sequence
  Description of Artificial Sequence: Synthetic oligonucleotide
  Antisense strand to SEQ ID NO: 1809115
ugagacgagauucaccaug

SEQ ID NO: 1809117 - RNA, 19 nt, Artificial Sequence
  Description of Artificial Sequence: Synthetic oligonucleotide
  Sense strand starting at position 2724 of SEQ ID NO: 1563288
uggugaaucucgucucaac

SEQ ID NO: 1809118 - RNA, 19 nt, Artificial Sequence
  Description of Artificial Sequence: Synthetic oligonucleotide
  Antisense strand to SEQ ID NO: 1809117
guugagacgagauucacca

SEQ ID NO: 1809119 - RNA, 19 nt, Artificial Sequence
  Description of Artificial Sequence: Synthetic oligonucleotide
  Sense strand starting at position 2727 of SEQ ID NO: 1563288
ugaaucucgucucaacuaa

SEQ ID NO: 1809120 - RNA, 19 nt, Artificial Sequence
  Description of Artificial Sequence: Synthetic oligonucleotide
  Antisense strand to SEQ ID NO: 1809119
uuaguugagacgagauuca

SEQ ID NO: 1809121 - RNA, 19 nt, Artificial Sequence
  Description of Artificial Sequence: Synthetic oligonucleotide
  Sense strand starting at position 2944 of SEQ ID NO: 1563288
accucuaucuguuaaaggu

SEQ ID NO: 1809122 - RNA, 19 nt, Artificial Sequence
  Description of Artificial Sequence: Synthetic oligonucleotide
  Antisense strand to SEQ ID NO: 1809121
accuuuaacagauagaggu

SEQ ID NO: 1809123 - RNA, 19 nt, Artificial Sequence
  Description of Artificial Sequence: Synthetic oligonucleotide
  Sense strand starting at position 2960 of SEQ ID NO: 1563288
gguaacaguuguuaauuga

SEQ ID NO: 1809124 - RNA, 19 nt, Artificial Sequence
  Description of Artificial Sequence: Synthetic oligonucleotide
  Antisense strand to SEQ ID NO: 1809123
ucaauuaacaacuguuacc

SEQ ID NO: 1809125 - RNA, 19 nt, Artificial Sequence
  Description of Artificial Sequence: Synthetic oligonucleotide
  Sense strand starting at position 3295 of SEQ ID NO: 1563288
gggaaaccuuauuauauug

SEQ ID NO: 1809126 - RNA, 19 nt, Artificial Sequence
  Description of Artificial Sequence: Synthetic oligonucleotide
  Antisense strand to SEQ ID NO: 1809125
caauauaauaagguuuccc

SEQ ID NO: 1809127 - RNA, 19 nt, Artificial Sequence
  Description of Artificial Sequence: Synthetic oligonucleotide
  Sense strand starting at position 868 of SEQ ID NO: 1563289
gacuaacuguacugagagu

SEQ ID NO: 1809128 - RNA, 19 nt, Artificial Sequence
  Description of Artificial Sequence: Synthetic oligonucleotide
  Antisense strand to SEQ ID NO: 1809127
acucucaguacaguuaguc

SEQ ID NO: 1809129 - RNA, 19 nt, Artificial Sequence
  Description of Artificial Sequence: Synthetic oligonucleotide
  Sense strand starting at position 877 of SEQ ID NO: 1563289
uacugagaguguucgaaug

SEQ ID NO: 1809130 - RNA, 19 nt, Artificial Sequence
  Description of Artificial Sequence: Synthetic oligonucleotide
  Antisense strand to SEQ ID NO: 1809129
cauucgaacacucucagua

SEQ ID NO: 1809131 - RNA, 19 nt, Artificial Sequence
  Description of Artificial Sequence: Synthetic oligonucleotide
  Sense strand starting at position 879 of SEQ ID NO: 1563289
cugagaguguucgaaugug

SEQ ID NO: 1809132 - RNA, 19 nt, Artificial Sequence
  Description of Artificial Sequence: Synthetic oligonucleotide
  Antisense strand to SEQ ID NO: 1809131
cacauucgaacacucucag

SEQ ID NO: 1809133 - RNA, 19 nt, Artificial Sequence
  Description of Artificial Sequence: Synthetic oligonucleotide
  Sense strand starting at position 1970 of SEQ ID NO: 1563289
uaggguaccugggagugau

SEQ ID NO: 1809134 - RNA, 19 nt, Artificial Sequence
  Description of Artificial Sequence: Synthetic oligonucleotide
  Antisense strand to SEQ ID NO: 1809133
aucacucccagguacccua

SEQ ID NO: 1809135 - RNA, 19 nt, Artificial Sequence
  Description of Artificial Sequence: Synthetic oligonucleotide
  Sense strand starting at position 2597 of SEQ ID NO: 1563289
ccuguaaugucagcaccuu

SEQ ID NO: 1809136 - RNA, 19 nt, Artificial Sequence
  Description of Artificial Sequence: Synthetic oligonucleotide
  Antisense strand to SEQ ID NO: 1809135
aaggugcugacauuacagg

SEQ ID NO: 1809137 - RNA, 19 nt, Artificial Sequence
  Description of Artificial Sequence: Synthetic oligonucleotide
  Sense strand starting at position 2620 of SEQ ID NO: 1563289
ggccgaagugucuggauca

SEQ ID NO: 1809138 - RNA, 19 nt, Artificial Sequence
  Description of Artificial Sequence: Synthetic oligonucleotide
  Antisense strand to SEQ ID NO: 1809137
ugauccagacacuucggcc

SEQ ID NO: 1809139 - RNA, 19 nt, Artificial Sequence
  Description of Artificial Sequence: Synthetic oligonucleotide
  Sense strand starting at position 2621 of SEQ ID NO: 1563289
gccgaagugucuggaucac

SEQ ID NO: 1809140 - RNA, 19 nt, Artificial Sequence
  Description of Artificial Sequence: Synthetic oligonucleotide
  Antisense strand to SEQ ID NO: 1809139
gugauccagacacuucggc

SEQ ID NO: 1809141 - RNA, 19 nt, Artificial Sequence
  Description of Artificial Sequence: Synthetic oligonucleotide
  Sense strand starting at position 2940 of SEQ ID NO: 1563289
cuacuuguguuaucucuaa

SEQ ID NO: 1809142 - RNA, 19 nt, Artificial Sequence
  Description of Artificial Sequence: Synthetic oligonucleotide
  Antisense strand to SEQ ID NO: 1809141
uuagagauaacacaaguag

SEQ ID NO: 1809143 - RNA, 19 nt, Artificial Sequence
  Description of Artificial Sequence: Synthetic oligonucleotide
  Sense strand starting at position 2944 of SEQ ID NO: 1563289
uuguguuaucucuaaauuc

SEQ ID NO: 1809144 - RNA, 19 nt, Artificial Sequence
  Description of Artificial Sequence: Synthetic oligonucleotide
  Antisense strand to SEQ ID NO: 1809143
gaauuuagagauaacacaa

SEQ ID NO: 1809145 - RNA, 19 nt, Artificial Sequence
  Description of Artificial Sequence: Synthetic oligonucleotide
  Sense strand starting at position 3046 of SEQ ID NO: 1563289
ugcucaauuuaucacgacu

SEQ ID NO: 1809146 - RNA, 19 nt, Artificial Sequence
  Description of Artificial Sequence: Synthetic oligonucleotide
  Antisense strand to SEQ ID NO: 1809145
agucgugauaaauugagca

SEQ ID NO: 1809147 - RNA, 19 nt, Artificial Sequence
  Description of Artificial Sequence: Synthetic oligonucleotide
  Sense strand starting at position 3129 of SEQ ID NO: 1563289
cucagcucuuaugaugcaa

SEQ ID NO: 1809148 - RNA, 19 nt, Artificial Sequence
  Description of Artificial Sequence: Synthetic oligonucleotide
  Antisense strand to SEQ ID NO: 1809147
uugcaucauaagagcugag

SEQ ID NO: 1809149 - RNA, 19 nt, Artificial Sequence
  Description of Artificial Sequence: Synthetic oligonucleotide
  Sense strand starting at position 3131 of SEQ ID NO: 1563289
cagcucuuaugaugcaagu

SEQ ID NO: 1809150 - RNA, 19 nt, Artificial Sequence
  Description of Artificial Sequence: Synthetic oligonucleotide
  Antisense strand to SEQ ID NO: 1809149
acuugcaucauaagagcug

SEQ ID NO: 1809151 - RNA, 19 nt, Artificial Sequence
  Description of Artificial Sequence: Synthetic oligonucleotide
  Sense strand starting at position 3184 of SEQ ID NO: 1563289
ucuuuaauccagugccuga

SEQ ID NO: 1809152 - RNA, 19 nt, Artificial Sequence
  Description of Artificial Sequence: Synthetic oligonucleotide
  Antisense strand to SEQ ID NO: 1809151
ucaggcacuggauuaaaga

SEQ ID NO: 1809153 - RNA, 19 nt, Artificial Sequence
  Description of Artificial Sequence: Synthetic oligonucleotide
  Sense strand starting at position 3191 of SEQ ID NO: 1563289
uccagugccugaggaguuu

SEQ ID NO: 1809154 - RNA, 19 nt, Artificial Sequence
  Description of Artificial Sequence: Synthetic oligonucleotide
  Antisense strand to SEQ ID NO: 1809153
aaacuccucaggcacugga

SEQ ID NO: 1809155 - RNA, 19 nt, Artificial Sequence
  Description of Artificial Sequence: Synthetic oligonucleotide
  Sense strand starting at position 3233 of SEQ ID NO: 1563289
uuucuugguuuccugauua

SEQ ID NO: 1809156 - RNA, 19 nt, Artificial Sequence
  Description of Artificial Sequence: Synthetic oligonucleotide
  Antisense strand to SEQ ID NO: 1809155
uaaucaggaaaccaagaaa

SEQ ID NO: 1809157 - RNA, 19 nt, Artificial Sequence
  Description of Artificial Sequence: Synthetic oligonucleotide
  Sense strand starting at position 3238 of SEQ ID NO: 1563289
ugguuuccugauuaacgga

SEQ ID NO: 1809158 - RNA, 19 nt, Artificial Sequence
  Description of Artificial Sequence: Synthetic oligonucleotide
  Antisense strand to SEQ ID NO: 1809157
uccguuaaucaggaaacca

SEQ ID NO: 1809159 - RNA, 19 nt, Artificial Sequence
  Description of Artificial Sequence: Synthetic oligonucleotide
  Sense strand starting at position 3374 of SEQ ID NO: 1563289
uguggaacgccuugucaga

SEQ ID NO: 1809160 - RNA, 19 nt, Artificial Sequence
  Description of Artificial Sequence: Synthetic oligonucleotide
  Antisense strand to SEQ ID NO: 1809159
ucugacaaggcguuccaca

SEQ ID NO: 1809161 - RNA, 19 nt, Artificial Sequence
  Description of Artificial Sequence: Synthetic oligonucleotide
  Sense strand starting at position 3626 of SEQ ID NO: 1563289
acuugaauugcuugauaaa

SEQ ID NO: 1809162 - RNA, 19 nt, Artificial Sequence
  Description of Artificial Sequence: Synthetic oligonucleotide
  Antisense strand to SEQ ID NO: 1809161
uuuaucaagcaauucaagu

SEQ ID NO: 1809163 - RNA, 19 nt, Artificial Sequence
  Description of Artificial Sequence: Synthetic oligonucleotide
  Sense strand starting at position 3668 of SEQ ID NO: 1563289
ugguuuaccuuccauggaa

SEQ ID NO: 1809164 - RNA, 19 nt, Artificial Sequence
  Description of Artificial Sequence: Synthetic oligonucleotide
  Antisense strand to SEQ ID NO: 1809163
uuccauggaagguaaacca

SEQ ID NO: 1809165 - RNA, 19 nt, Artificial Sequence
  Description of Artificial Sequence: Synthetic oligonucleotide
  Sense strand starting at position 3688 of SEQ ID NO: 1563289
ggaagacauuauuaagaga

SEQ ID NO: 1809166 - RNA, 19 nt, Artificial Sequence
  Description of Artificial Sequence: Synthetic oligonucleotide
  Antisense strand to SEQ ID NO: 1809165
ucucuuaauaaugucuucc

SEQ ID NO: 1809167 - RNA, 19 nt, Artificial Sequence
  Description of Artificial Sequence: Synthetic oligonucleotide
  Sense strand starting at position 3691 of SEQ ID NO: 1563289
agacauuauuaagagacau

SEQ ID NO: 1809168 - RNA, 19 nt, Artificial Sequence
  Description of Artificial Sequence: Synthetic oligonucleotide
  Antisense strand to SEQ ID NO: 1809167
augucucuuaauaaugucu

SEQ ID NO: 1809169 - RNA, 19 nt, Artificial Sequence
  Description of Artificial Sequence: Synthetic oligonucleotide
  Sense strand starting at position 3713 of SEQ ID NO: 1563289
uguuaauucucucagaaug

SEQ ID NO: 1809170 - RNA, 19 nt, Artificial Sequence
  Description of Artificial Sequence: Synthetic oligonucleotide
  Antisense strand to SEQ ID NO: 1809169
cauucugagagaauuaaca

SEQ ID NO: 1809171 - RNA, 19 nt, Artificial Sequence
  Description of Artificial Sequence: Synthetic oligonucleotide
  Sense strand starting at position 3751 of SEQ ID NO: 1563289
auuccaccguguuaacaaa

SEQ ID NO: 1809172 - RNA, 19 nt, Artificial Sequence
  Description of Artificial Sequence: Synthetic oligonucleotide
  Antisense strand to SEQ ID NO: 1809171
uuuguuaacacgguggaau

SEQ ID NO: 1809173 - RNA, 19 nt, Artificial Sequence
  Description of Artificial Sequence: Synthetic oligonucleotide
  Sense strand starting at position 3817 of SEQ ID NO: 1563289
aaucgaagguuugguaaag

SEQ ID NO: 1809174 - RNA, 19 nt, Artificial Sequence
  Description of Artificial Sequence: Synthetic oligonucleotide
  Antisense strand to SEQ ID NO: 1809173
cuuuaccaaaccuucgauu

SEQ ID NO: 1809175 - RNA, 19 nt, Artificial Sequence
  Description of Artificial Sequence: Synthetic oligonucleotide
  Sense strand starting at position 3856 of SEQ ID NO: 1563289
aagaacuaaguugguaaau

SEQ ID NO: 1809176 - RNA, 19 nt, Artificial Sequence
  Description of Artificial Sequence: Synthetic oligonucleotide
  Antisense strand to SEQ ID NO: 1809175
auuuaccaacuuaguucuu

SEQ ID NO: 1809177 - RNA, 19 nt, Artificial Sequence
  Description of Artificial Sequence: Synthetic oligonucleotide
  Sense strand starting at position 3858 of SEQ ID NO: 1563289
gaacuaaguugguaaauac

SEQ ID NO: 1809178 - RNA, 19 nt, Artificial Sequence
  Description of Artificial Sequence: Synthetic oligonucleotide
  Antisense strand to SEQ ID NO: 1809177
guauuuaccaacuuaguuc

SEQ ID NO: 1809179 - RNA, 19 nt, Artificial Sequence
  Description of Artificial Sequence: Synthetic oligonucleotide
  Sense strand starting at position 3922 of SEQ ID NO: 1563289
ccgugugguauuggagcaa

SEQ ID NO: 1809180 - RNA, 19 nt, Artificial Sequence
  Description of Artificial Sequence: Synthetic oligonucleotide
  Antisense strand to SEQ ID NO: 1809179
uugcuccaauaccacacgg

SEQ ID NO: 1809181 - RNA, 19 nt, Artificial Sequence
  Description of Artificial Sequence: Synthetic oligonucleotide
  Sense strand starting at position 3934 of SEQ ID NO: 1563289
ggagcaaugacagguaaau

SEQ ID NO: 1809182 - RNA, 19 nt, Artificial Sequence
  Description of Artificial Sequence: Synthetic oligonucleotide
  Antisense strand to SEQ ID NO: 1809181
auuuaccugucauugcucc

SEQ ID NO: 1809183 - RNA, 19 nt, Artificial Sequence
  Description of Artificial Sequence: Synthetic oligonucleotide
  Sense strand starting at position 99 of SEQ ID NO: 1563290
gcugaauaugcauaucaua

SEQ ID NO: 1809184 - RNA, 19 nt, Artificial Sequence
  Description of Artificial Sequence: Synthetic oligonucleotide
  Antisense strand to SEQ ID NO: 1809183
uaugauaugcauauucagc

SEQ ID NO: 1809185 - RNA, 19 nt, Artificial Sequence
  Description of Artificial Sequence: Synthetic oligonucleotide
  Sense strand starting at position 228 of SEQ ID NO: 1563290
cuuagaauauuaucgucau

SEQ ID NO: 1809186 - RNA, 19 nt, Artificial Sequence
  Description of Artificial Sequence: Synthetic oligonucleotide
  Antisense strand to SEQ ID NO: 1809185
augacgauaauauucuaag

SEQ ID NO: 1809187 - RNA, 19 nt, Artificial Sequence
  Description of Artificial Sequence: Synthetic oligonucleotide
  Sense strand starting at position 232 of SEQ ID NO: 1563290
gaauauuaucgucauggca

SEQ ID NO: 1809188 - RNA, 19 nt, Artificial Sequence
  Description of Artificial Sequence: Synthetic oligonucleotide
  Antisense strand to SEQ ID NO: 1809187
ugccaugacgauaauauuc

SEQ ID NO: 1809189 - RNA, 19 nt, Artificial Sequence
  Description of Artificial Sequence: Synthetic oligonucleotide
  Sense strand starting at position 887 of SEQ ID NO: 1563290
auugcaaguguagacauaa

SEQ ID NO: 1809190 - RNA, 19 nt, Artificial Sequence
  Description of Artificial Sequence: Synthetic oligonucleotide
  Antisense strand to SEQ ID NO: 1809189
uuaugucuacacuugcaau

SEQ ID NO: 1809191 - RNA, 19 nt, Artificial Sequence
  Description of Artificial Sequence: Synthetic oligonucleotide
  Sense strand starting at position 1009 of SEQ ID NO: 1563290
ccgauuccugcacagacau

SEQ ID NO: 1809192 - RNA, 19 nt, Artificial Sequence
  Description of Artificial Sequence: Synthetic oligonucleotide
  Antisense strand to SEQ ID NO: 1809191
augucugugcaggaaucgg

SEQ ID NO: 1809193 - RNA, 19 nt, Artificial Sequence
  Description of Artificial Sequence: Synthetic oligonucleotide
  Sense strand starting at position 1030 of SEQ ID NO: 1563290
gaggcuauggcugaaaggu

SEQ ID NO: 1809194 - RNA, 19 nt, Artificial Sequence
  Description of Artificial Sequence: Synthetic oligonucleotide
  Antisense strand to SEQ ID NO: 1809193
accuuucagccauagccuc

SEQ ID NO: 1809195 - RNA, 19 nt, Artificial Sequence
  Description of Artificial Sequence: Synthetic oligonucleotide
  Sense strand starting at position 1049 of SEQ ID NO: 1563290
cagauagaaucccagggaa

SEQ ID NO: 1809196 - RNA, 19 nt, Artificial Sequence
  Description of Artificial Sequence: Synthetic oligonucleotide
  Antisense strand to SEQ ID NO: 1809195
uucccugggauucuaucug

SEQ ID NO: 1809197 - RNA, 19 nt, Artificial Sequence
  Description of Artificial Sequence: Synthetic oligonucleotide
  Sense strand starting at position 1278 of SEQ ID NO: 1563290
agagaaagcgucugguaag

SEQ ID NO: 1809198 - RNA, 19 nt, Artificial Sequence
  Description of Artificial Sequence: Synthetic oligonucleotide
  Antisense strand to SEQ ID NO: 1809197
cuuaccagacgcuuucucu

SEQ ID NO: 1809199 - RNA, 19 nt, Artificial Sequence
  Description of Artificial Sequence: Synthetic oligonucleotide
  Sense strand starting at position 1450 of SEQ ID NO: 1563290
cccauagggcugugaucau

SEQ ID NO: 1809200 - RNA, 19 nt, Artificial Sequence
  Description of Artificial Sequence: Synthetic oligonucleotide
  Antisense strand to SEQ ID NO: 1809199
augaucacagcccuauggg

SEQ ID NO: 1809201 - RNA, 19 nt, Artificial Sequence
  Description of Artificial Sequence: Synthetic oligonucleotide
  Sense strand starting at position 1848 of SEQ ID NO: 1563290
gacacuuucccgggcgaaa

SEQ ID NO: 1809202 - RNA, 19 nt, Artificial Sequence
  Description of Artificial Sequence: Synthetic oligonucleotide
  Antisense strand to SEQ ID NO: 1809201
uuucgcccgggaaaguguc

SEQ ID NO: 1809203 - RNA, 19 nt, Artificial Sequence
  Description of Artificial Sequence: Synthetic oligonucleotide
  Sense strand starting at position 1979 of SEQ ID NO: 1563290
uguuguaacuuuguagaaa

SEQ ID NO: 1809204 - RNA, 19 nt, Artificial Sequence
  Description of Artificial Sequence: Synthetic oligonucleotide
  Antisense strand to SEQ ID NO: 1809203
uuucuacaaaguuacaaca

SEQ ID NO: 1809205 - RNA, 19 nt, Artificial Sequence
  Description of Artificial Sequence: Synthetic oligonucleotide
  Sense strand starting at position 1982 of SEQ ID NO: 1563290
uguaacuuuguagaaacuu

SEQ ID NO: 1809206 - RNA, 19 nt, Artificial Sequence
  Description of Artificial Sequence: Synthetic oligonucleotide
  Antisense strand to SEQ ID NO: 1809205
aaguuucuacaaaguuaca

SEQ ID NO: 1809207 - RNA, 19 nt, Artificial Sequence
  Description of Artificial Sequence: Synthetic oligonucleotide
  Sense strand starting at position 2002 of SEQ ID NO: 1563290
ccguuugggaguuauggga

SEQ ID NO: 1809208 - RNA, 19 nt, Artificial Sequence
  Description of Artificial Sequence: Synthetic oligonucleotide
  Antisense strand to SEQ ID NO: 1809207
ucccauaacucccaaacgg

SEQ ID NO: 1809209 - RNA, 19 nt, Artificial Sequence
  Description of Artificial Sequence: Synthetic oligonucleotide
  Sense strand starting at position 2371 of SEQ ID NO: 1563290
aggcaaauauaucuuguga

SEQ ID NO: 1809210 - RNA, 19 nt, Artificial Sequence
  Description of Artificial Sequence: Synthetic oligonucleotide
  Antisense strand to SEQ ID NO: 1809209
ucacaagauauauuugccu

SEQ ID NO: 1809211 - RNA, 19 nt, Artificial Sequence
  Description of Artificial Sequence: Synthetic oligonucleotide
  Sense strand starting at position 2417 of SEQ ID NO: 1563290
uaauauuggccgcauagaa

SEQ ID NO: 1809212 - RNA, 19 nt, Artificial Sequence
  Description of Artificial Sequence: Synthetic oligonucleotide
  Antisense strand to SEQ ID NO: 1809211
uucuaugcggccaauauua

SEQ ID NO: 1809213 - RNA, 19 nt, Artificial Sequence
  Description of Artificial Sequence: Synthetic oligonucleotide
  Sense strand starting at position 2424 of SEQ ID NO: 1563290
ggccgcauagaaugaagua

SEQ ID NO: 1809214 - RNA, 19 nt, Artificial Sequence
  Description of Artificial Sequence: Synthetic oligonucleotide
  Antisense strand to SEQ ID NO: 1809213
uacuucauucuaugcggcc

SEQ ID NO: 1809215 - RNA, 19 nt, Artificial Sequence
  Description of Artificial Sequence: Synthetic oligonucleotide
  Sense strand starting at position 2439 of SEQ ID NO: 1563290
aguaguguuccuccguuau

SEQ ID NO: 1809216 - RNA, 19 nt, Artificial Sequence
  Description of Artificial Sequence: Synthetic oligonucleotide
  Antisense strand to SEQ ID NO: 1809215
auaacggaggaacacuacu

SEQ ID NO: 1809217 - RNA, 19 nt, Artificial Sequence
  Description of Artificial Sequence: Synthetic oligonucleotide
  Sense strand starting at position 2441 of SEQ ID NO: 1563290
uaguguuccuccguuauuu

SEQ ID NO: 1809218 - RNA, 19 nt, Artificial Sequence
  Description of Artificial Sequence: Synthetic oligonucleotide
  Antisense strand to SEQ ID NO: 1809217
aaauaacggaggaacacua

SEQ ID NO: 1809219 - RNA, 19 nt, Artificial Sequence
  Description of Artificial Sequence: Synthetic oligonucleotide
  Sense strand starting at position 2509 of SEQ ID NO: 1563290
auagaauuugcacgcgaag

SEQ ID NO: 1809220 - RNA, 19 nt, Artificial Sequence
  Description of Artificial Sequence: Synthetic oligonucleotide
  Antisense strand to SEQ ID NO: 1809219
cuucgcgugcaaauucuau

SEQ ID NO: 1809221 - RNA, 19 nt, Artificial Sequence
  Description of Artificial Sequence: Synthetic oligonucleotide
  Sense strand starting at position 2949 of SEQ ID NO: 1563290
cuucuugagucgguaauuu

SEQ ID NO: 1809222 - RNA, 19 nt, Artificial Sequence
  Description of Artificial Sequence: Synthetic oligonucleotide
  Antisense strand to SEQ ID NO: 1809221
aaauuaccgacucaagaag

SEQ ID NO: 1809223 - RNA, 19 nt, Artificial Sequence
  Description of Artificial Sequence: Synthetic oligonucleotide
  Sense strand starting at position 2957 of SEQ ID NO: 1563290
gucgguaauuugucuucca

SEQ ID NO: 1809224 - RNA, 19 nt, Artificial Sequence
  Description of Artificial Sequence: Synthetic oligonucleotide
  Antisense strand to SEQ ID NO: 1809223
uggaagacaaauuaccgac

SEQ ID NO: 1809225 - RNA, 19 nt, Artificial Sequence
  Description of Artificial Sequence: Synthetic oligonucleotide
  Sense strand starting at position 2958 of SEQ ID NO: 1563290
ucgguaauuugucuuccaa

SEQ ID NO: 1809226 - RNA, 19 nt, Artificial Sequence
  Description of Artificial Sequence: Synthetic oligonucleotide
  Antisense strand to SEQ ID NO: 1809225
uuggaagacaaauuaccga

SEQ ID NO: 1809227 - RNA, 19 nt, Artificial Sequence
  Description of Artificial Sequence: Synthetic oligonucleotide
  Sense strand starting at position 3005 of SEQ ID NO: 1563290
uaguuuguuggcguaaagu

SEQ ID NO: 1809228 - RNA, 19 nt, Artificial Sequence
  Description of Artificial Sequence: Synthetic oligonucleotide
  Antisense strand to SEQ ID NO: 1809227
acuuuacgccaacaaacua

SEQ ID NO: 1809229 - RNA, 19 nt, Artificial Sequence
  Description of Artificial Sequence: Synthetic oligonucleotide
  Sense strand starting at position 3007 of SEQ ID NO: 1563290
guuuguuggcguaaaguug

SEQ ID NO: 1809230 - RNA, 19 nt, Artificial Sequence
  Description of Artificial Sequence: Synthetic oligonucleotide
  Antisense strand to SEQ ID NO: 1809229
caacuuuacgccaacaaac

SEQ ID NO: 1809231 - RNA, 19 nt, Artificial Sequence
  Description of Artificial Sequence: Synthetic oligonucleotide
  Sense strand starting at position 3092 of SEQ ID NO: 1563290
ugauaaucuguguaguccu

SEQ ID NO: 1809232 - RNA, 19 nt, Artificial Sequence
  Description of Artificial Sequence: Synthetic oligonucleotide
  Antisense strand to SEQ ID NO: 1809231
aggacuacacagauuauca

SEQ ID NO: 1809233 - RNA, 19 nt, Artificial Sequence
  Description of Artificial Sequence: Synthetic oligonucleotide
  Sense strand starting at position 3309 of SEQ ID NO: 1563290
uuguuucgcaaaggaagau

SEQ ID NO: 1809234 - RNA, 19 nt, Artificial Sequence
  Description of Artificial Sequence: Synthetic oligonucleotide
  Antisense strand to SEQ ID NO: 1809233
aucuuccuuugcgaaacaa

SEQ ID NO: 1809235 - RNA, 19 nt, Artificial Sequence
  Description of Artificial Sequence: Synthetic oligonucleotide
  Sense strand starting at position 3310 of SEQ ID NO: 1563290
uguuucgcaaaggaagauu

SEQ ID NO: 1809236 - RNA, 19 nt, Artificial Sequence
  Description of Artificial Sequence: Synthetic oligonucleotide
  Antisense strand to SEQ ID NO: 1809235
aaucuuccuuugcgaaaca

SEQ ID NO: 1809237 - RNA, 19 nt, Artificial Sequence
  Description of Artificial Sequence: Synthetic oligonucleotide
  Sense strand starting at position 3343 of SEQ ID NO: 1563290
uguagaaaugcuuaugaua

SEQ ID NO: 1809238 - RNA, 19 nt, Artificial Sequence
  Description of Artificial Sequence: Synthetic oligonucleotide
  Antisense strand to SEQ ID NO: 1809237
uaucauaagcauuucuaca

SEQ ID NO: 1809239 - RNA, 19 nt, Artificial Sequence
  Description of Artificial Sequence: Synthetic oligonucleotide
  Sense strand starting at position 3399 of SEQ ID NO: 1563290
gaaauucggugugcugaaa

SEQ ID NO: 1809240 - RNA, 19 nt, Artificial Sequence
  Description of Artificial Sequence: Synthetic oligonucleotide
  Antisense strand to SEQ ID NO: 1809239
uuucagcacaccgaauuuc

SEQ ID NO: 1809241 - RNA, 19 nt, Artificial Sequence
  Description of Artificial Sequence: Synthetic oligonucleotide
  Sense strand starting at position 3466 of SEQ ID NO: 1563290
caagucuaguuugugggaa

SEQ ID NO: 1809242 - RNA, 19 nt, Artificial Sequence
  Description of Artificial Sequence: Synthetic oligonucleotide
  Antisense strand to SEQ ID NO: 1809241
uucccacaaacuagacuug

SEQ ID NO: 1809243 - RNA, 19 nt, Artificial Sequence
  Description of Artificial Sequence: Synthetic oligonucleotide
  Sense strand starting at position 3655 of SEQ ID NO: 1563290
uuauaagagcaccaugagu

SEQ ID NO: 1809244 - RNA, 19 nt, Artificial Sequence
  Description of Artificial Sequence: Synthetic oligonucleotide
  Antisense strand to SEQ ID NO: 1809243
acucauggugcucuuauaa

SEQ ID NO: 1809245 - RNA, 19 nt, Artificial Sequence
  Description of Artificial Sequence: Synthetic oligonucleotide
  Sense strand starting at position 3657 of SEQ ID NO: 1563290
auaagagcaccaugaguua

SEQ ID NO: 1809246 - RNA, 19 nt, Artificial Sequence
  Description of Artificial Sequence: Synthetic oligonucleotide
  Antisense strand to SEQ ID NO: 1809245
uaacucauggugcucuuau

SEQ ID NO: 1809247 - RNA, 19 nt, Artificial Sequence
  Description of Artificial Sequence: Synthetic oligonucleotide
  Sense strand starting at position 3660 of SEQ ID NO: 1563290
agagcaccaugaguuagau

SEQ ID NO: 1809248 - RNA, 19 nt, Artificial Sequence
  Description of Artificial Sequence: Synthetic oligonucleotide
  Antisense strand to SEQ ID NO: 1809247
aucuaacucauggugcucu

SEQ ID NO: 1809249 - RNA, 19 nt, Artificial Sequence
  Description of Artificial Sequence: Synthetic oligonucleotide
  Sense strand starting at position 3706 of SEQ ID NO: 1563290
agaaucuuagaguguacau

SEQ ID NO: 1809250 - RNA, 19 nt, Artificial Sequence
  Description of Artificial Sequence: Synthetic oligonucleotide
  Antisense strand to SEQ ID NO: 1809249
auguacacucuaagauucu

SEQ ID NO: 1809251 - RNA, 19 nt, Artificial Sequence
  Description of Artificial Sequence: Synthetic oligonucleotide
  Sense strand starting at position 3740 of SEQ ID NO: 1563290
agguauaacuagcuggaaa

SEQ ID NO: 1809252 - RNA, 19 nt, Artificial Sequence
  Description of Artificial Sequence: Synthetic oligonucleotide
  Antisense strand to SEQ ID NO: 1809251
uuuccagcuaguuauaccu

SEQ ID NO: 1809253 - RNA, 19 nt, Artificial Sequence
  Description of Artificial Sequence: Synthetic oligonucleotide
  Sense strand starting at position 3766 of SEQ ID NO: 1563290
gaaccuaggucucucagau

SEQ ID NO: 1809254 - RNA, 19 nt, Artificial Sequence
  Description of Artificial Sequence: Synthetic oligonucleotide
  Antisense strand to SEQ ID NO: 1809253
aucugagagaccuagguuc

SEQ ID NO: 1809255 - RNA, 19 nt, Artificial Sequence
  Description of Artificial Sequence: Synthetic oligonucleotide
  Sense strand starting at position 3818 of SEQ ID NO: 1563290
cugcuuacugcugugaguu

SEQ ID NO: 1809256 - RNA, 19 nt, Artificial Sequence
  Description of Artificial Sequence: Synthetic oligonucleotide
  Antisense strand to SEQ ID NO: 1809255
aacucacagcaguaagcag

SEQ ID NO: 1809257 - RNA, 19 nt, Artificial Sequence
  Description of Artificial Sequence: Synthetic oligonucleotide
  Sense strand starting at position 3872 of SEQ ID NO: 1563290
aauugauaguauccaggau

SEQ ID NO: 1809258 - RNA, 19 nt, Artificial Sequence
  Description of Artificial Sequence: Synthetic oligonucleotide
  Antisense strand to SEQ ID NO: 1809257
auccuggauacuaucaauu

SEQ ID NO: 1809259 - RNA, 19 nt, Artificial Sequence
  Description of Artificial Sequence: Synthetic oligonucleotide
  Sense strand starting at position 3888 of SEQ ID NO: 1563290
gauaauuggcaacaguuua

SEQ ID NO: 1809260 - RNA, 19 nt, Artificial Sequence
  Description of Artificial Sequence: Synthetic oligonucleotide
  Antisense strand to SEQ ID NO: 1809259
uaaacuguugccaauuauc

SEQ ID NO: 1809261 - RNA, 19 nt, Artificial Sequence
  Description of Artificial Sequence: Synthetic oligonucleotide
  Sense strand starting at position 3969 of SEQ ID NO: 1563290
agaucuuaggcuggucaca

SEQ ID NO: 1809262 - RNA, 19 nt, Artificial Sequence
  Description of Artificial Sequence: Synthetic oligonucleotide
  Antisense strand to SEQ ID NO: 1809261
ugugaccagccuaagaucu

SEQ ID NO: 1809263 - RNA, 19 nt, Artificial Sequence
  Description of Artificial Sequence: Synthetic oligonucleotide
  Sense strand starting at position 3125 of SEQ ID NO: 1563320
gacagugaggcaggaaauu

SEQ ID NO: 1809264 - RNA, 19 nt, Artificial Sequence
  Description of Artificial Sequence: Synthetic oligonucleotide
  Antisense strand to SEQ ID NO: 1809263
aauuuccugccucacuguc

SEQ ID NO: 1809265 - RNA, 19 nt, Artificial Sequence
  Description of Artificial Sequence: Synthetic oligonucleotide
  Sense strand starting at position 3268 of SEQ ID NO: 1563320
aggacaggcuuccuaggau

SEQ ID NO: 1809266 - RNA, 19 nt, Artificial Sequence
  Description of Artificial Sequence: Synthetic oligonucleotide
  Antisense strand to SEQ ID NO: 1809265
auccuaggaagccuguccu

SEQ ID NO: 1809267 - RNA, 19 nt, Artificial Sequence
  Description of Artificial Sequence: Synthetic oligonucleotide
  Sense strand starting at position 3271 of SEQ ID NO: 1563320
acaggcuuccuaggauauu

SEQ ID NO: 1809268 - RNA, 19 nt, Artificial Sequence
  Description of Artificial Sequence: Synthetic oligonucleotide
  Antisense strand to SEQ ID NO: 1809267
aauauccuaggaagccugu

SEQ ID NO: 1809269 - RNA, 19 nt, Artificial Sequence
  Description of Artificial Sequence: Synthetic oligonucleotide
  Sense strand starting at position 3272 of SEQ ID NO: 1563320
caggcuuccuaggauauuu

SEQ ID NO: 1809270 - RNA, 19 nt, Artificial Sequence
  Description of Artificial Sequence: Synthetic oligonucleotide
  Antisense strand to SEQ ID NO: 1809269
aaauauccuaggaagccug

SEQ ID NO: 1809271 - RNA, 19 nt, Artificial Sequence
  Description of Artificial Sequence: Synthetic oligonucleotide
  Sense strand starting at position 3346 of SEQ ID NO: 1563320
aguaguaaguaauucugaa

SEQ ID NO: 1809272 - RNA, 19 nt, Artificial Sequence
  Description of Artificial Sequence: Synthetic oligonucleotide
  Antisense strand to SEQ ID NO: 1809271
uucagaauuacuuacuacu

SEQ ID NO: 1809273 - RNA, 19 nt, Artificial Sequence
  Description of Artificial Sequence: Synthetic oligonucleotide
  Sense strand starting at position 3350 of SEQ ID NO: 1563320
guaaguaauucugaacauu

SEQ ID NO: 1809274 - RNA, 19 nt, Artificial Sequence
  Description of Artificial Sequence: Synthetic oligonucleotide
  Antisense strand to SEQ ID NO: 1809273
aauguucagaauuacuuac

SEQ ID NO: 1809275 - RNA, 19 nt, Artificial Sequence
  Description of Artificial Sequence: Synthetic oligonucleotide
  Sense strand starting at position 3501 of SEQ ID NO: 1563320
ucaaguugagcaggucauu

SEQ ID NO: 1809276 - RNA, 19 nt, Artificial Sequence
  Description of Artificial Sequence: Synthetic oligonucleotide
  Antisense strand to SEQ ID NO: 1809275
aaugaccugcucaacuuga

SEQ ID NO: 1809277 - RNA, 19 nt, Artificial Sequence
  Description of Artificial Sequence: Synthetic oligonucleotide
  Sense strand starting at position 3507 of SEQ ID NO: 1563320
ugagcaggucauuguuguu

SEQ ID NO: 1809278 - RNA, 19 nt, Artificial Sequence
  Description of Artificial Sequence: Synthetic oligonucleotide
  Antisense strand to SEQ ID NO: 1809277
aacaacaaugaccugcuca

SEQ ID NO: 1809279 - RNA, 19 nt, Artificial Sequence
  Description of Artificial Sequence: Synthetic oligonucleotide
  Sense strand starting at position 3598 of SEQ ID NO: 1563320
ugucacaagucauugguuu

SEQ ID NO: 1809280 - RNA, 19 nt, Artificial Sequence
  Description of Artificial Sequence: Synthetic oligonucleotide
  Antisense strand to SEQ ID NO: 1809279
aaaccaaugacuugugaca

SEQ ID NO: 1809281 - RNA, 19 nt, Artificial Sequence
  Description of Artificial Sequence: Synthetic oligonucleotide
  Sense strand starting at position 3599 of SEQ ID NO: 1563320
gucacaagucauugguuua

SEQ ID NO: 1809282 - RNA, 19 nt, Artificial Sequence
  Description of Artificial Sequence: Synthetic oligonucleotide
  Antisense strand to SEQ ID NO: 1809281
uaaaccaaugacuugugac

SEQ ID NO: 1809283 - RNA, 19 nt, Artificial Sequence
  Description of Artificial Sequence: Synthetic oligonucleotide
  Sense strand starting at position 3602 of SEQ ID NO: 1563320
acaagucauugguuuaaau

SEQ ID NO: 1809284 - RNA, 19 nt, Artificial Sequence
  Description of Artificial Sequence: Synthetic oligonucleotide
  Antisense strand to SEQ ID NO: 1809283
auuuaaaccaaugacuugu

SEQ ID NO: 1809285 - RNA, 19 nt, Artificial Sequence
  Description of Artificial Sequence: Synthetic oligonucleotide
  Sense strand starting at position 3610 of SEQ ID NO: 1563320
uugguuuaaaucuggaaga

SEQ ID NO: 1809286 - RNA, 19 nt, Artificial Sequence
  Description of Artificial Sequence: Synthetic oligonucleotide
  Antisense strand to SEQ ID NO: 1809285
ucuuccagauuuaaaccaa

SEQ ID NO: 1809287 - RNA, 19 nt, Artificial Sequence
  Description of Artificial Sequence: Synthetic oligonucleotide
  Sense strand starting at position 3611 of SEQ ID NO: 1563320
ugguuuaaaucuggaagac

SEQ ID NO: 1809288 - RNA, 19 nt, Artificial Sequence
  Description of Artificial Sequence: Synthetic oligonucleotide
  Antisense strand to SEQ ID NO: 1809287
gucuuccagauuuaaacca

SEQ ID NO: 1809289 - RNA, 19 nt, Artificial Sequence
  Description of Artificial Sequence: Synthetic oligonucleotide
  Sense strand starting at position 3692 of SEQ ID NO: 1563320
cagucugaggucuggaguu

SEQ ID NO: 1809290 - RNA, 19 nt, Artificial Sequence
  Description of Artificial Sequence: Synthetic oligonucleotide
  Antisense strand to SEQ ID NO: 1809289
aacuccagaccucagacug

SEQ ID NO: 1809291 - RNA, 19 nt, Artificial Sequence
  Description of Artificial Sequence: Synthetic oligonucleotide
  Sense strand starting at position 3698 of SEQ ID NO: 1563320
gaggucuggaguugcuuua

SEQ ID NO: 1809292 - RNA, 19 nt, Artificial Sequence
  Description of Artificial Sequence: Synthetic oligonucleotide
  Antisense strand to SEQ ID NO: 1809291
uaaagcaacuccagaccuc

SEQ ID NO: 1809293 - RNA, 19 nt, Artificial Sequence
  Description of Artificial Sequence: Synthetic oligonucleotide
  Sense strand starting at position 3731 of SEQ ID NO: 1563320
augcgauguuuggaaaguu

SEQ ID NO: 1809294 - RNA, 19 nt, Artificial Sequence
  Description of Artificial Sequence: Synthetic oligonucleotide
  Antisense strand to SEQ ID NO: 1809293
aacuuuccaaacaucgcau

SEQ ID NO: 1809295 - RNA, 19 nt, Artificial Sequence
  Description of Artificial Sequence: Synthetic oligonucleotide
  Sense strand starting at position 3747 of SEQ ID NO: 1563320
guuauuuauuucuaugccu

SEQ ID NO: 1809296 - RNA, 19 nt, Artificial Sequence
  Description of Artificial Sequence: Synthetic oligonucleotide
  Antisense strand to SEQ ID NO: 1809295
aggcauagaaauaaauaac

SEQ ID NO: 1809297 - RNA, 19 nt, Artificial Sequence
  Description of Artificial Sequence: Synthetic oligonucleotide
  Sense strand starting at position 3778 of SEQ ID NO: 1563320
uugugaaguuaagauaaug

SEQ ID NO: 1809298 - RNA, 19 nt, Artificial Sequence
  Description of Artificial Sequence: Synthetic oligonucleotide
  Antisense strand to SEQ ID NO: 1809297
cauuaucuuaacuucacaa

SEQ ID NO: 1809299 - RNA, 19 nt, Artificial Sequence
  Description of Artificial Sequence: Synthetic oligonucleotide
  Sense strand starting at position 3789 of SEQ ID NO: 1563320
agauaaugauucucuagcu

SEQ ID NO: 1809300 - RNA, 19 nt, Artificial Sequence
  Description of Artificial Sequence: Synthetic oligonucleotide
  Antisense strand to SEQ ID NO: 1809299
agcuagagaaucauuaucu

SEQ ID NO: 1809301 - RNA, 19 nt, Artificial Sequence
  Description of Artificial Sequence: Synthetic oligonucleotide
  Sense strand starting at position 3811 of SEQ ID NO: 1563320
ucccaagguugaucugaga

SEQ ID NO: 1809302 - RNA, 19 nt, Artificial Sequence
  Description of Artificial Sequence: Synthetic oligonucleotide
  Antisense strand to SEQ ID NO: 1809301
ucucagaucaaccuuggga

SEQ ID NO: 1809303 - RNA, 19 nt, Artificial Sequence
  Description of Artificial Sequence: Synthetic oligonucleotide
  Sense strand starting at position 3814 of SEQ ID NO: 1563320
caagguugaucugagaauc

SEQ ID NO: 1809304 - RNA, 19 nt, Artificial Sequence
  Description of Artificial Sequence: Synthetic oligonucleotide
  Antisense strand to SEQ ID NO: 1809303
gauucucagaucaaccuug

SEQ ID NO: 1809305 - RNA, 19 nt, Artificial Sequence
  Description of Artificial Sequence: Synthetic oligonucleotide
  Sense strand starting at position 3835 of SEQ ID NO: 1563320
guaagauaaugggaugaaa

SEQ ID NO: 1809306 - RNA, 19 nt, Artificial Sequence
  Description of Artificial Sequence: Synthetic oligonucleotide
  Antisense strand to SEQ ID NO: 1809305
uuucaucccauuaucuuac

SEQ ID NO: 1809307 - RNA, 19 nt, Artificial Sequence
  Description of Artificial Sequence: Synthetic oligonucleotide
  Sense strand starting at position 3880 of SEQ ID NO: 1563320
acauguauaugauuacauc

SEQ ID NO: 1809308 - RNA, 19 nt, Artificial Sequence
  Description of Artificial Sequence: Synthetic oligonucleotide
  Antisense strand to SEQ ID NO: 1809307
gauguaaucauauacaugu

SEQ ID NO: 1809309 - RNA, 19 nt, Artificial Sequence
  Description of Artificial Sequence: Synthetic oligonucleotide
  Sense strand starting at position 3916 of SEQ ID NO: 1563320
guucuuaaauuauuggaga

SEQ ID NO: 1809310 - RNA, 19 nt, Artificial Sequence
  Description of Artificial Sequence: Synthetic oligonucleotide
  Antisense strand to SEQ ID NO: 1809309
ucuccaauaauuuaagaac

SEQ ID NO: 1809311 - RNA, 19 nt, Artificial Sequence
  Description of Artificial Sequence: Synthetic oligonucleotide
  Sense strand starting at position 3917 of SEQ ID NO: 1563320
uucuuaaauuauuggagag

SEQ ID NO: 1809312 - RNA, 19 nt, Artificial Sequence
  Description of Artificial Sequence: Synthetic oligonucleotide
  Antisense strand to SEQ ID NO: 1809311
cucuccaauaauuuaagaa

SEQ ID NO: 1809313 - RNA, 19 nt, Artificial Sequence
  Description of Artificial Sequence: Synthetic oligonucleotide
  Sense strand starting at position 3919 of SEQ ID NO: 1563320
cuuaaauuauuggagagaa

SEQ ID NO: 1809314 - RNA, 19 nt, Artificial Sequence
  Description of Artificial Sequence: Synthetic oligonucleotide
  Antisense strand to SEQ ID NO: 1809313
uucucuccaauaauuuaag

SEQ ID NO: 1809315 - RNA, 19 nt, Artificial Sequence
  Description of Artificial Sequence: Synthetic oligonucleotide
  Sense strand starting at position 3931 of SEQ ID NO: 1563320
gagagaagccgucagguau

SEQ ID NO: 1809316 - RNA, 19 nt, Artificial Sequence
  Description of Artificial Sequence: Synthetic oligonucleotide
  Antisense strand to SEQ ID NO: 1809315
auaccugacggcuucucuc

SEQ ID NO: 1809317 - RNA, 19 nt, Artificial Sequence
  Description of Artificial Sequence: Synthetic oligonucleotide
  Sense strand starting at position 3970 of SEQ ID NO: 1563320
ggauucugcauguguggau

SEQ ID NO: 1809318 - RNA, 19 nt, Artificial Sequence
  Description of Artificial Sequence: Synthetic oligonucleotide
  Antisense strand to SEQ ID NO: 1809317
auccacacaugcagaaucc

SEQ ID NO: 1809319 - RNA, 19 nt, Artificial Sequence
  Description of Artificial Sequence: Synthetic oligonucleotide
  Sense strand starting at position 3971 of SEQ ID NO: 1563320
gauucugcauguguggauu

SEQ ID NO: 1809320 - RNA, 19 nt, Artificial Sequence
  Description of Artificial Sequence: Synthetic oligonucleotide
  Antisense strand to SEQ ID NO: 1809319
aauccacacaugcagaauc

SEQ ID NO: 1809321 - RNA, 19 nt, Artificial Sequence
  Description of Artificial Sequence: Synthetic oligonucleotide
  Sense strand starting at position 3125 of SEQ ID NO: 1563330
gacagugaggcaggaaauu

SEQ ID NO: 1809322 - RNA, 19 nt, Artificial Sequence
  Description of Artificial Sequence: Synthetic oligonucleotide
  Antisense strand to SEQ ID NO: 1809321
aauuuccugccucacuguc

SEQ ID NO: 1809323 - RNA, 19 nt, Artificial Sequence
  Description of Artificial Sequence: Synthetic oligonucleotide
  Sense strand starting at position 3268 of SEQ ID NO: 1563330
aggacaggcuuccuaggau

SEQ ID NO: 1809324 - RNA, 19 nt, Artificial Sequence
  Description of Artificial Sequence: Synthetic oligonucleotide
  Antisense strand to SEQ ID NO: 1809323
auccuaggaagccuguccu

SEQ ID NO: 1809325 - RNA, 19 nt, Artificial Sequence
  Description of Artificial Sequence: Synthetic oligonucleotide
  Sense strand starting at position 3271 of SEQ ID NO: 1563330
acaggcuuccuaggauauu

SEQ ID NO: 1809326 - RNA, 19 nt, Artificial Sequence
  Description of Artificial Sequence: Synthetic oligonucleotide
  Antisense strand to SEQ ID NO: 1809325
aauauccuaggaagccugu

SEQ ID NO: 1809327 - RNA, 19 nt, Artificial Sequence
  Description of Artificial Sequence: Synthetic oligonucleotide
  Sense strand starting at position 3272 of SEQ ID NO: 1563330
caggcuuccuaggauauuu

SEQ ID NO: 1809328 - RNA, 19 nt, Artificial Sequence
  Description of Artificial Sequence: Synthetic oligonucleotide
  Antisense strand to SEQ ID NO: 1809327
aaauauccuaggaagccug

SEQ ID NO: 1809329 - RNA, 19 nt, Artificial Sequence
  Description of Artificial Sequence: Synthetic oligonucleotide
  Sense strand starting at position 3346 of SEQ ID NO: 1563330
aguaguaaguaauucugaa

SEQ ID NO: 1809330 - RNA, 19 nt, Artificial Sequence
  Description of Artificial Sequence: Synthetic oligonucleotide
  Antisense strand to SEQ ID NO: 1809329
uucagaauuacuuacuacu

SEQ ID NO: 1809331 - RNA, 19 nt, Artificial Sequence
  Description of Artificial Sequence: Synthetic oligonucleotide
  Sense strand starting at position 3350 of SEQ ID NO: 1563330
guaaguaauucugaacauu

SEQ ID NO: 1809332 - RNA, 19 nt, Artificial Sequence
  Description of Artificial Sequence: Synthetic oligonucleotide
  Antisense strand to SEQ ID NO: 1809331
aauguucagaauuacuuac

SEQ ID NO: 1809333 - RNA, 19 nt, Artificial Sequence
  Description of Artificial Sequence: Synthetic oligonucleotide
  Sense strand starting at position 3501 of SEQ ID NO: 1563330
ucaaguugagcaggucauu

SEQ ID NO: 1809334 - RNA, 19 nt, Artificial Sequence
  Description of Artificial Sequence: Synthetic oligonucleotide
  Antisense strand to SEQ ID NO: 1809333
aaugaccugcucaacuuga

SEQ ID NO: 1809335 - RNA, 19 nt, Artificial Sequence
  Description of Artificial Sequence: Synthetic oligonucleotide
  Sense strand starting at position 3507 of SEQ ID NO: 1563330
ugagcaggucauuguuguu

SEQ ID NO: 1809336 - RNA, 19 nt, Artificial Sequence
  Description of Artificial Sequence: Synthetic oligonucleotide
  Antisense strand to SEQ ID NO: 1809335
aacaacaaugaccugcuca

SEQ ID NO: 1809337 - RNA, 19 nt, Artificial Sequence
  Description of Artificial Sequence: Synthetic oligonucleotide
  Sense strand starting at position 3598 of SEQ ID NO: 1563330
ugucacaagucauugguuu

SEQ ID NO: 1809338 - RNA, 19 nt, Artificial Sequence
  Description of Artificial Sequence: Synthetic oligonucleotide
  Antisense strand to SEQ ID NO: 1809337
aaaccaaugacuugugaca

SEQ ID NO: 1809339 - RNA, 19 nt, Artificial Sequence
  Description of Artificial Sequence: Synthetic oligonucleotide
  Sense strand starting at position 3599 of SEQ ID NO: 1563330
gucacaagucauugguuua

SEQ ID NO: 1809340 - RNA, 19 nt, Artificial Sequence
  Description of Artificial Sequence: Synthetic oligonucleotide
  Antisense strand to SEQ ID NO: 1809339
uaaaccaaugacuugugac

SEQ ID NO: 1809341 - RNA, 19 nt, Artificial Sequence
  Description of Artificial Sequence: Synthetic oligonucleotide
  Sense strand starting at position 3602 of SEQ ID NO: 1563330
acaagucauugguuuaaau

SEQ ID NO: 1809342 - RNA, 19 nt, Artificial Sequence
  Description of Artificial Sequence: Synthetic oligonucleotide
  Antisense strand to SEQ ID NO: 1809341
auuuaaaccaaugacuugu

SEQ ID NO: 1809343 - RNA, 19 nt, Artificial Sequence
  Description of Artificial Sequence: Synthetic oligonucleotide
  Sense strand starting at position 3610 of SEQ ID NO: 1563330
uugguuuaaaucuggaaga

SEQ ID NO: 1809344 - RNA, 19 nt, Artificial Sequence
  Description of Artificial Sequence: Synthetic oligonucleotide
  Antisense strand to SEQ ID NO: 1809343
ucuuccagauuuaaaccaa

SEQ ID NO: 1809345 - RNA, 19 nt, Artificial Sequence
  Description of Artificial Sequence: Synthetic oligonucleotide
  Sense strand starting at position 3611 of SEQ ID NO: 1563330
ugguuuaaaucuggaagac

SEQ ID NO: 1809346 - RNA, 19 nt, Artificial Sequence
  Description of Artificial Sequence: Synthetic oligonucleotide
  Antisense strand to SEQ ID NO: 1809345
gucuuccagauuuaaacca

SEQ ID NO: 1809347 - RNA, 19 nt, Artificial Sequence
  Description of Artificial Sequence: Synthetic oligonucleotide
  Sense strand starting at position 3692 of SEQ ID NO: 1563330
cagucugaggucuggaguu

SEQ ID NO: 1809348 - RNA, 19 nt, Artificial Sequence
  Description of Artificial Sequence: Synthetic oligonucleotide
  Antisense strand to SEQ ID NO: 1809347
aacuccagaccucagacug

SEQ ID NO: 1809349 - RNA, 19 nt, Artificial Sequence
  Description of Artificial Sequence: Synthetic oligonucleotide
  Sense strand starting at position 3698 of SEQ ID NO: 1563330
gaggucuggaguugcuuua

SEQ ID NO: 1809350 - RNA, 19 nt, Artificial Sequence
  Description of Artificial Sequence: Synthetic oligonucleotide
  Antisense strand to SEQ ID NO: 1809349
uaaagcaacuccagaccuc

SEQ ID NO: 1809351 - RNA, 19 nt, Artificial Sequence
  Description of Artificial Sequence: Synthetic oligonucleotide
  Sense strand starting at position 3731 of SEQ ID NO: 1563330
augcgauguuuggaaaguu

SEQ ID NO: 1809352 - RNA, 19 nt, Artificial Sequence
  Description of Artificial Sequence: Synthetic oligonucleotide
  Antisense strand to SEQ ID NO: 1809351
aacuuuccaaacaucgcau

SEQ ID NO: 1809353 - RNA, 19 nt, Artificial Sequence
  Description of Artificial Sequence: Synthetic oligonucleotide
  Sense strand starting at position 3747 of SEQ ID NO: 1563330
guuauuuauuucuaugccu

SEQ ID NO: 1809354 - RNA, 19 nt, Artificial Sequence
  Description of Artificial Sequence: Synthetic oligonucleotide
  Antisense strand to SEQ ID NO: 1809353
aggcauagaaauaaauaac

SEQ ID NO: 1809355 - RNA, 19 nt, Artificial Sequence
  Description of Artificial Sequence: Synthetic oligonucleotide
  Sense strand starting at position 3778 of SEQ ID NO: 1563330
uugugaaguuaagauaaug

SEQ ID NO: 1809356 - RNA, 19 nt, Artificial Sequence
  Description of Artificial Sequence: Synthetic oligonucleotide
  Antisense strand to SEQ ID NO: 1809355
cauuaucuuaacuucacaa

SEQ ID NO: 1809357 - RNA, 19 nt, Artificial Sequence
  Description of Artificial Sequence: Synthetic oligonucleotide
  Sense strand starting at position 3789 of SEQ ID NO: 1563330
agauaaugauucucuagcu

SEQ ID NO: 1809358 - RNA, 19 nt, Artificial Sequence
  Description of Artificial Sequence: Synthetic oligonucleotide
  Antisense strand to SEQ ID NO: 1809357
agcuagagaaucauuaucu

SEQ ID NO: 1809359 - RNA, 19 nt, Artificial Sequence
  Description of Artificial Sequence: Synthetic oligonucleotide
  Sense strand starting at position 3811 of SEQ ID NO: 1563330
ucccaagguugaucugaga

SEQ ID NO: 1809360 - RNA, 19 nt, Artificial Sequence
  Description of Artificial Sequence: Synthetic oligonucleotide
  Antisense strand to SEQ ID NO: 1809359
ucucagaucaaccuuggga

SEQ ID NO: 1809361 - RNA, 19 nt, Artificial Sequence
  Description of Artificial Sequence: Synthetic oligonucleotide
  Sense strand starting at position 3814 of SEQ ID NO: 1563330
caagguugaucugagaauc

SEQ ID NO: 1809362 - RNA, 19 nt, Artificial Sequence
  Description of Artificial Sequence: Synthetic oligonucleotide
  Antisense strand to SEQ ID NO: 1809361
gauucucagaucaaccuug

SEQ ID NO: 1809363 - RNA, 19 nt, Artificial Sequence
  Description of Artificial Sequence: Synthetic oligonucleotide
  Sense strand starting at position 3835 of SEQ ID NO: 1563330
guaagauaaugggaugaaa

SEQ ID NO: 1809364 - RNA, 19 nt, Artificial Sequence
  Description of Artificial Sequence: Synthetic oligonucleotide
  Antisense strand to SEQ ID NO: 1809363
uuucaucccauuaucuuac

SEQ ID NO: 1809365 - RNA, 19 nt, Artificial Sequence
  Description of Artificial Sequence: Synthetic oligonucleotide
  Sense strand starting at position 3880 of SEQ ID NO: 1563330
acauguauaugauuacauc

SEQ ID NO: 1809366 - RNA, 19 nt, Artificial Sequence
  Description of Artificial Sequence: Synthetic oligonucleotide
  Antisense strand to SEQ ID NO: 1809365
gauguaaucauauacaugu

SEQ ID NO: 1809367 - RNA, 19 nt, Artificial Sequence
  Description of Artificial Sequence: Synthetic oligonucleotide
  Sense strand starting at position 3916 of SEQ ID NO: 1563330
guucuuaaauuauuggaga

SEQ ID NO: 1809368 - RNA, 19 nt, Artificial Sequence
  Description of Artificial Sequence: Synthetic oligonucleotide
  Antisense strand to SEQ ID NO: 1809367
ucuccaauaauuuaagaac

SEQ ID NO: 1809369 - RNA, 19 nt, Artificial Sequence
  Description of Artificial Sequence: Synthetic oligonucleotide
  Sense strand starting at position 3917 of SEQ ID NO: 1563330
uucuuaaauuauuggagag

SEQ ID NO: 1809370 - RNA, 19 nt, Artificial Sequence
  Description of Artificial Sequence: Synthetic oligonucleotide
  Antisense strand to SEQ ID NO: 1809369
cucuccaauaauuuaagaa

SEQ ID NO: 1809371 - RNA, 19 nt, Artificial Sequence
  Description of Artificial Sequence: Synthetic oligonucleotide
  Sense strand starting at position 3919 of SEQ ID NO: 1563330
cuuaaauuauuggagagaa

SEQ ID NO: 1809372 - RNA, 19 nt, Artificial Sequence
  Description of Artificial Sequence: Synthetic oligonucleotide
  Antisense strand to SEQ ID NO: 1809371
uucucuccaauaauuuaag

SEQ ID NO: 1809373 - RNA, 19 nt, Artificial Sequence
  Description of Artificial Sequence: Synthetic oligonucleotide
  Sense strand starting at position 3931 of SEQ ID NO: 1563330
gagagaagccgucagguau

SEQ ID NO: 1809374 - RNA, 19 nt, Artificial Sequence
  Description of Artificial Sequence: Synthetic oligonucleotide
  Antisense strand to SEQ ID NO: 1809373
auaccugacggcuucucuc

SEQ ID NO: 1809375 - RNA, 19 nt, Artificial Sequence
  Description of Artificial Sequence: Synthetic oligonucleotide
  Sense strand starting at position 3970 of SEQ ID NO: 1563330
ggauucugcauguguggau

SEQ ID NO: 1809376 - RNA, 19 nt, Artificial Sequence
  Description of Artificial Sequence: Synthetic oligonucleotide
  Antisense strand to SEQ ID NO: 1809375
auccacacaugcagaaucc

SEQ ID NO: 1809377 - RNA, 19 nt, Artificial Sequence
  Description of Artificial Sequence: Synthetic oligonucleotide
  Sense strand starting at position 3971 of SEQ ID NO: 1563330
gauucugcauguguggauu

SEQ ID NO: 1809378 - RNA, 19 nt, Artificial Sequence
  Description of Artificial Sequence: Synthetic oligonucleotide
  Antisense strand to SEQ ID NO: 1809377
aauccacacaugcagaauc

SEQ ID NO: 1809379 - RNA, 19 nt, Artificial Sequence
  Description of Artificial Sequence: Synthetic oligonucleotide
  Sense strand starting at position 3125 of SEQ ID NO: 1563340
gacagugaggcaggaaauu

SEQ ID NO: 1809380 - RNA, 19 nt, Artificial Sequence
  Description of Artificial Sequence: Synthetic oligonucleotide
  Antisense strand to SEQ ID NO: 1809379
aauuuccugccucacuguc

SEQ ID NO: 1809381 - RNA, 19 nt, Artificial Sequence
  Description of Artificial Sequence: Synthetic oligonucleotide
  Sense strand starting at position 3268 of SEQ ID NO: 1563340
aggacaggcuuccuaggau

SEQ ID NO: 1809382 - RNA, 19 nt, Artificial Sequence
  Description of Artificial Sequence: Synthetic oligonucleotide
  Antisense strand to SEQ ID NO: 1809381
auccuaggaagccuguccu

SEQ ID NO: 1809383 - RNA, 19 nt, Artificial Sequence
  Description of Artificial Sequence: Synthetic oligonucleotide
  Sense strand starting at position 3271 of SEQ ID NO: 1563340
acaggcuuccuaggauauu

SEQ ID NO: 1809384 - RNA, 19 nt, Artificial Sequence
  Description of Artificial Sequence: Synthetic oligonucleotide
  Antisense strand to SEQ ID NO: 1809383
aauauccuaggaagccugu

SEQ ID NO: 1809385 - RNA, 19 nt, Artificial Sequence
  Description of Artificial Sequence: Synthetic oligonucleotide
  Sense strand starting at position 3272 of SEQ ID NO: 1563340
caggcuuccuaggauauuu

SEQ ID NO: 1809386 - RNA, 19 nt, Artificial Sequence
  Description of Artificial Sequence: Synthetic oligonucleotide
  Antisense strand to SEQ ID NO: 1809385
aaauauccuaggaagccug

SEQ ID NO: 1809387 - RNA, 19 nt, Artificial Sequence
  Description of Artificial Sequence: Synthetic oligonucleotide
  Sense strand starting at position 3346 of SEQ ID NO: 1563340
aguaguaaguaauucugaa

SEQ ID NO: 1809388 - RNA, 19 nt, Artificial Sequence
  Description of Artificial Sequence: Synthetic oligonucleotide
  Antisense strand to SEQ ID NO: 1809387
uucagaauuacuuacuacu

SEQ ID NO: 1809389 - RNA, 19 nt, Artificial Sequence
  Description of Artificial Sequence: Synthetic oligonucleotide
  Sense strand starting at position 3350 of SEQ ID NO: 1563340
guaaguaauucugaacauu

SEQ ID NO: 1809390 - RNA, 19 nt, Artificial Sequence
  Description of Artificial Sequence: Synthetic oligonucleotide
  Antisense strand to SEQ ID NO: 1809389
aauguucagaauuacuuac

SEQ ID NO: 1809391 - RNA, 19 nt, Artificial Sequence
  Description of Artificial Sequence: Synthetic oligonucleotide
  Sense strand starting at position 3501 of SEQ ID NO: 1563340
ucaaguugagcaggucauu

SEQ ID NO: 1809392 - RNA, 19 nt, Artificial Sequence
  Description of Artificial Sequence: Synthetic oligonucleotide
  Antisense strand to SEQ ID NO: 1809391
aaugaccugcucaacuuga

SEQ ID NO: 1809393 - RNA, 19 nt, Artificial Sequence
  Description of Artificial Sequence: Synthetic oligonucleotide
  Sense strand starting at position 3507 of SEQ ID NO: 1563340
ugagcaggucauuguuguu

SEQ ID NO: 1809394 - RNA, 19 nt, Artificial Sequence
  Description of Artificial Sequence: Synthetic oligonucleotide
  Antisense strand to SEQ ID NO: 1809393
aacaacaaugaccugcuca

SEQ ID NO: 1809395 - RNA, 19 nt, Artificial Sequence
  Description of Artificial Sequence: Synthetic oligonucleotide
  Sense strand starting at position 3598 of SEQ ID NO: 1563340
ugucacaagucauugguuu

SEQ ID NO: 1809396 - RNA, 19 nt, Artificial Sequence
  Description of Artificial Sequence: Synthetic oligonucleotide
  Antisense strand to SEQ ID NO: 1809395
aaaccaaugacuugugaca

SEQ ID NO: 1809397 - RNA, 19 nt, Artificial Sequence
  Description of Artificial Sequence: Synthetic oligonucleotide
  Sense strand starting at position 3599 of SEQ ID NO: 1563340
gucacaagucauugguuua

SEQ ID NO: 1809398 - RNA, 19 nt, Artificial Sequence
  Description of Artificial Sequence: Synthetic oligonucleotide
  Antisense strand to SEQ ID NO: 1809397
uaaaccaaugacuugugac

SEQ ID NO: 1809399 - RNA, 19 nt, Artificial Sequence
  Description of Artificial Sequence: Synthetic oligonucleotide
  Sense strand starting at position 3602 of SEQ ID NO: 1563340
acaagucauugguuuaaau

SEQ ID NO: 1809400 - RNA, 19 nt, Artificial Sequence
  Description of Artificial Sequence: Synthetic oligonucleotide
  Antisense strand to SEQ ID NO: 1809399
auuuaaaccaaugacuugu

SEQ ID NO: 1809401 - RNA, 19 nt, Artificial Sequence
  Description of Artificial Sequence: Synthetic oligonucleotide
  Sense strand starting at position 3610 of SEQ ID NO: 1563340
uugguuuaaaucuggaaga

SEQ ID NO: 1809402 - RNA, 19 nt, Artificial Sequence
  Description of Artificial Sequence: Synthetic oligonucleotide
  Antisense strand to SEQ ID NO: 1809401
ucuuccagauuuaaaccaa

SEQ ID NO: 1809403 - RNA, 19 nt, Artificial Sequence
  Description of Artificial Sequence: Synthetic oligonucleotide
  Sense strand starting at position 3611 of SEQ ID NO: 1563340
ugguuuaaaucuggaagac

SEQ ID NO: 1809404 - RNA, 19 nt, Artificial Sequence
  Description of Artificial Sequence: Synthetic oligonucleotide
  Antisense strand to SEQ ID NO: 1809403
gucuuccagauuuaaacca

SEQ ID NO: 1809405 - RNA, 19 nt, Artificial Sequence
  Description of Artificial Sequence: Synthetic oligonucleotide
  Sense strand starting at position 3692 of SEQ ID NO: 1563340
cagucugaggucuggaguu

SEQ ID NO: 1809406 - RNA, 19 nt, Artificial Sequence
  Description of Artificial Sequence: Synthetic oligonucleotide
  Antisense strand to SEQ ID NO: 1809405
aacuccagaccucagacug

SEQ ID NO: 1809407 - RNA, 19 nt, Artificial Sequence
  Description of Artificial Sequence: Synthetic oligonucleotide
  Sense strand starting at position 3698 of SEQ ID NO: 1563340
gaggucuggaguugcuuua

SEQ ID NO: 1809408 - RNA, 19 nt, Artificial Sequence
  Description of Artificial Sequence: Synthetic oligonucleotide
  Antisense strand to SEQ ID NO: 1809407
uaaagcaacuccagaccuc

SEQ ID NO: 1809409 - RNA, 19 nt, Artificial Sequence
  Description of Artificial Sequence: Synthetic oligonucleotide
  Sense strand starting at position 3731 of SEQ ID NO: 1563340
augcgauguuuggaaaguu

SEQ ID NO: 1809410 - RNA, 19 nt, Artificial Sequence
  Description of Artificial Sequence: Synthetic oligonucleotide
  Antisense strand to SEQ ID NO: 1809409
aacuuuccaaacaucgcau

SEQ ID NO: 1809411 - RNA, 19 nt, Artificial Sequence
  Description of Artificial Sequence: Synthetic oligonucleotide
  Sense strand starting at position 3747 of SEQ ID NO: 1563340
guuauuuauuucuaugccu

SEQ ID NO: 1809412 - RNA, 19 nt, Artificial Sequence
  Description of Artificial Sequence: Synthetic oligonucleotide
  Antisense strand to SEQ ID NO: 1809411
aggcauagaaauaaauaac

SEQ ID NO: 1809413 - RNA, 19 nt, Artificial Sequence
  Description of Artificial Sequence: Synthetic oligonucleotide
  Sense strand starting at position 3778 of SEQ ID NO: 1563340
uugugaaguuaagauaaug

SEQ ID NO: 1809414 - RNA, 19 nt, Artificial Sequence
  Description of Artificial Sequence: Synthetic oligonucleotide
  Antisense strand to SEQ ID NO: 1809413
cauuaucuuaacuucacaa

SEQ ID NO: 1809415 - RNA, 19 nt, Artificial Sequence
  Description of Artificial Sequence: Synthetic oligonucleotide
  Sense strand starting at position 3789 of SEQ ID NO: 1563340
agauaaugauucucuagcu

SEQ ID NO: 1809416 - RNA, 19 nt, Artificial Sequence
  Description of Artificial Sequence: Synthetic oligonucleotide
  Antisense strand to SEQ ID NO: 1809415
agcuagagaaucauuaucu

SEQ ID NO: 1809417 - RNA, 19 nt, Artificial Sequence
  Description of Artificial Sequence: Synthetic oligonucleotide
  Sense strand starting at position 3811 of SEQ ID NO: 1563340
ucccaagguugaucugaga

SEQ ID NO: 1809418 - RNA, 19 nt, Artificial Sequence
  Description of Artificial Sequence: Synthetic oligonucleotide
  Antisense strand to SEQ ID NO: 1809417
ucucagaucaaccuuggga

SEQ ID NO: 1809419 - RNA, 19 nt, Artificial Sequence
  Description of Artificial Sequence: Synthetic oligonucleotide
  Sense strand starting at position 3814 of SEQ ID NO: 1563340
caagguugaucugagaauc

SEQ ID NO: 1809420 - RNA, 19 nt, Artificial Sequence
  Description of Artificial Sequence: Synthetic oligonucleotide
  Antisense strand to SEQ ID NO: 1809419
gauucucagaucaaccuug

SEQ ID NO: 1809421 - RNA, 19 nt, Artificial Sequence
  Description of Artificial Sequence: Synthetic oligonucleotide
  Sense strand starting at position 3835 of SEQ ID NO: 1563340
guaagauaaugggaugaaa

SEQ ID NO: 1809422 - RNA, 19 nt, Artificial Sequence
  Description of Artificial Sequence: Synthetic oligonucleotide
  Antisense strand to SEQ ID NO: 1809421
uuucaucccauuaucuuac

SEQ ID NO: 1809423 - RNA, 19 nt, Artificial Sequence
  Description of Artificial Sequence: Synthetic oligonucleotide
  Sense strand starting at position 3880 of SEQ ID NO: 1563340
acauguauaugauuacauc

SEQ ID NO: 1809424 - RNA, 19 nt, Artificial Sequence
  Description of Artificial Sequence: Synthetic oligonucleotide
  Antisense strand to SEQ ID NO: 1809423
gauguaaucauauacaugu

SEQ ID NO: 1809425 - RNA, 19 nt, Artificial Sequence
  Description of Artificial Sequence: Synthetic oligonucleotide
  Sense strand starting at position 3916 of SEQ ID NO: 1563340
guucuuaaauuauuggaga

SEQ ID NO: 1809426 - RNA, 19 nt, Artificial Sequence
  Description of Artificial Sequence: Synthetic oligonucleotide
  Antisense strand to SEQ ID NO: 1809425
ucuccaauaauuuaagaac

SEQ ID NO: 1809427 - RNA, 19 nt, Artificial Sequence
  Description of Artificial Sequence: Synthetic oligonucleotide
  Sense strand starting at position 3917 of SEQ ID NO: 1563340
uucuuaaauuauuggagag

SEQ ID NO: 1809428 - RNA, 19 nt, Artificial Sequence
  Description of Artificial Sequence: Synthetic oligonucleotide
  Antisense strand to SEQ ID NO: 1809427
cucuccaauaauuuaagaa

SEQ ID NO: 1809429 - RNA, 19 nt, Artificial Sequence
  Description of Artificial Sequence: Synthetic oligonucleotide
  Sense strand starting at position 3919 of SEQ ID NO: 1563340
cuuaaauuauuggagagaa

SEQ ID NO: 1809430 - RNA, 19 nt, Artificial Sequence
  Description of Artificial Sequence: Synthetic oligonucleotide
  Antisense strand to SEQ ID NO: 1809429
uucucuccaauaauuuaag

SEQ ID NO: 1809431 - RNA, 19 nt, Artificial Sequence
  Description of Artificial Sequence: Synthetic oligonucleotide
  Sense strand starting at position 3931 of SEQ ID NO: 1563340
gagagaagccgucagguau

SEQ ID NO: 1809432 - RNA, 19 nt, Artificial Sequence
  Description of Artificial Sequence: Synthetic oligonucleotide
  Antisense strand to SEQ ID NO: 1809431
auaccugacggcuucucuc

SEQ ID NO: 1809433 - RNA, 19 nt, Artificial Sequence
  Description of Artificial Sequence: Synthetic oligonucleotide
  Sense strand starting at position 3970 of SEQ ID NO: 1563340
ggauucugcauguguggau

SEQ ID NO: 1809434 - RNA, 19 nt, Artificial Sequence
  Description of Artificial Sequence: Synthetic oligonucleotide
  Antisense strand to SEQ ID NO: 1809433
auccacacaugcagaaucc

SEQ ID NO: 1809435 - RNA, 19 nt, Artificial Sequence
  Description of Artificial Sequence: Synthetic oligonucleotide
  Sense strand starting at position 3971 of SEQ ID NO: 1563340
gauucugcauguguggauu

SEQ ID NO: 1809436 - RNA, 19 nt, Artificial Sequence
  Description of Artificial Sequence: Synthetic oligonucleotide
  Antisense strand to SEQ ID NO: 1809435
aauccacacaugcagaauc

SEQ ID NO: 1809437 - RNA, 19 nt, Artificial Sequence
  Description of Artificial Sequence: Synthetic oligonucleotide
  Sense strand starting at position 3125 of SEQ ID NO: 1563350
gacagugaggcaggaaauu

SEQ ID NO: 1809438 - RNA, 19 nt, Artificial Sequence
  Description of Artificial Sequence: Synthetic oligonucleotide
  Antisense strand to SEQ ID NO: 1809437
aauuuccugccucacuguc

SEQ ID NO: 1809439 - RNA, 19 nt, Artificial Sequence
  Description of Artificial Sequence: Synthetic oligonucleotide
  Sense strand starting at position 3268 of SEQ ID NO: 1563350
aggacaggcuuccuaggau

SEQ ID NO: 1809440 - RNA, 19 nt, Artificial Sequence
  Description of Artificial Sequence: Synthetic oligonucleotide
  Antisense strand to SEQ ID NO: 1809439
auccuaggaagccuguccu

SEQ ID NO: 1809441 - RNA, 19 nt, Artificial Sequence
  Description of Artificial Sequence: Synthetic oligonucleotide
  Sense strand starting at position 3271 of SEQ ID NO: 1563350
acaggcuuccuaggauauu

SEQ ID NO: 1809442 - RNA, 19 nt, Artificial Sequence
  Description of Artificial Sequence: Synthetic oligonucleotide
  Antisense strand to SEQ ID NO: 1809441
aauauccuaggaagccugu

SEQ ID NO: 1809443 - RNA, 19 nt, Artificial Sequence
  Description of Artificial Sequence: Synthetic oligonucleotide
  Sense strand starting at position 3272 of SEQ ID NO: 1563350
caggcuuccuaggauauuu

SEQ ID NO: 1809444 - RNA, 19 nt, Artificial Sequence
  Description of Artificial Sequence: Synthetic oligonucleotide
  Antisense strand to SEQ ID NO: 1809443
aaauauccuaggaagccug

SEQ ID NO: 1809445 - RNA, 19 nt, Artificial Sequence
  Description of Artificial Sequence: Synthetic oligonucleotide
  Sense strand starting at position 3346 of SEQ ID NO: 1563350
aguaguaaguaauucugaa

SEQ ID NO: 1809446 - RNA, 19 nt, Artificial Sequence
  Description of Artificial Sequence: Synthetic oligonucleotide
  Antisense strand to SEQ ID NO: 1809445
uucagaauuacuuacuacu

SEQ ID NO: 1809447 - RNA, 19 nt, Artificial Sequence
  Description of Artificial Sequence: Synthetic oligonucleotide
  Sense strand starting at position 3350 of SEQ ID NO: 1563350
guaaguaauucugaacauu

SEQ ID NO: 1809448 - RNA, 19 nt, Artificial Sequence
  Description of Artificial Sequence: Synthetic oligonucleotide
  Antisense strand to SEQ ID NO: 1809447
aauguucagaauuacuuac

SEQ ID NO: 1809449 - RNA, 19 nt, Artificial Sequence
  Description of Artificial Sequence: Synthetic oligonucleotide
  Sense strand starting at position 3501 of SEQ ID NO: 1563350
ucaaguugagcaggucauu

SEQ ID NO: 1809450 - RNA, 19 nt, Artificial Sequence
  Description of Artificial Sequence: Synthetic oligonucleotide
  Antisense strand to SEQ ID NO: 1809449
aaugaccugcucaacuuga

SEQ ID NO: 1809451 - RNA, 19 nt, Artificial Sequence
  Description of Artificial Sequence: Synthetic oligonucleotide
  Sense strand starting at position 3507 of SEQ ID NO: 1563350
ugagcaggucauuguuguu

SEQ ID NO: 1809452 - RNA, 19 nt, Artificial Sequence
  Description of Artificial Sequence: Synthetic oligonucleotide
  Antisense strand to SEQ ID NO: 1809451
aacaacaaugaccugcuca

SEQ ID NO: 1809453 - RNA, 19 nt, Artificial Sequence
  Description of Artificial Sequence: Synthetic oligonucleotide
  Sense strand starting at position 3598 of SEQ ID NO: 1563350
ugucacaagucauugguuu

SEQ ID NO: 1809454 - RNA, 19 nt, Artificial Sequence
  Description of Artificial Sequence: Synthetic oligonucleotide
  Antisense strand to SEQ ID NO: 1809453
aaaccaaugacuugugaca

SEQ ID NO: 1809455 - RNA, 19 nt, Artificial Sequence
  Description of Artificial Sequence: Synthetic oligonucleotide
  Sense strand starting at position 3599 of SEQ ID NO: 1563350
gucacaagucauugguuua

SEQ ID NO: 1809456 - RNA, 19 nt, Artificial Sequence
  Description of Artificial Sequence: Synthetic oligonucleotide
  Antisense strand to SEQ ID NO: 1809455
uaaaccaaugacuugugac

SEQ ID NO: 1809457 - RNA, 19 nt, Artificial Sequence
  Description of Artificial Sequence: Synthetic oligonucleotide
  Sense strand starting at position 3602 of SEQ ID NO: 1563350
acaagucauugguuuaaau

SEQ ID NO: 1809458 - RNA, 19 nt, Artificial Sequence
  Description of Artificial Sequence: Synthetic oligonucleotide
  Antisense strand to SEQ ID NO: 1809457
auuuaaaccaaugacuugu

SEQ ID NO: 1809459 - RNA, 19 nt, Artificial Sequence
  Description of Artificial Sequence: Synthetic oligonucleotide
  Sense strand starting at position 3610 of SEQ ID NO: 1563350
uugguuuaaaucuggaaga

SEQ ID NO: 1809460 - RNA, 19 nt, Artificial Sequence
  Description of Artificial Sequence: Synthetic oligonucleotide
  Antisense strand to SEQ ID NO: 1809459
ucuuccagauuuaaaccaa

SEQ ID NO: 1809461 - RNA, 19 nt, Artificial Sequence
  Description of Artificial Sequence: Synthetic oligonucleotide
  Sense strand starting at position 3611 of SEQ ID NO: 1563350
ugguuuaaaucuggaagac

SEQ ID NO: 1809462 - RNA, 19 nt, Artificial Sequence
  Description of Artificial Sequence: Synthetic oligonucleotide
  Antisense strand to SEQ ID NO: 1809461
gucuuccagauuuaaacca

SEQ ID NO: 1809463 - RNA, 19 nt, Artificial Sequence
  Description of Artificial Sequence: Synthetic oligonucleotide
  Sense strand starting at position 3692 of SEQ ID NO: 1563350
cagucugaggucuggaguu

SEQ ID NO: 1809464 - RNA, 19 nt, Artificial Sequence
  Description of Artificial Sequence: Synthetic oligonucleotide
  Antisense strand to SEQ ID NO: 1809463
aacuccagaccucagacug

SEQ ID NO: 1809465 - RNA, 19 nt, Artificial Sequence
  Description of Artificial Sequence: Synthetic oligonucleotide
  Sense strand starting at position 3698 of SEQ ID NO: 1563350
gaggucuggaguugcuuua

SEQ ID NO: 1809466 - RNA, 19 nt, Artificial Sequence
  Description of Artificial Sequence: Synthetic oligonucleotide
  Antisense strand to SEQ ID NO: 1809465
uaaagcaacuccagaccuc

SEQ ID NO: 1809467 - RNA, 19 nt, Artificial Sequence
  Description of Artificial Sequence: Synthetic oligonucleotide
  Sense strand starting at position 3731 of SEQ ID NO: 1563350
augcgauguuuggaaaguu

SEQ ID NO: 1809468 - RNA, 19 nt, Artificial Sequence
  Description of Artificial Sequence: Synthetic oligonucleotide
  Antisense strand to SEQ ID NO: 1809467
aacuuuccaaacaucgcau

SEQ ID NO: 1809469 - RNA, 19 nt, Artificial Sequence
  Description of Artificial Sequence: Synthetic oligonucleotide
  Sense strand starting at position 3747 of SEQ ID NO: 1563350
guuauuuauuucuaugccu

SEQ ID NO: 1809470 - RNA, 19 nt, Artificial Sequence
  Description of Artificial Sequence: Synthetic oligonucleotide
  Antisense strand to SEQ ID NO: 1809469
aggcauagaaauaaauaac

SEQ ID NO: 1809471 - RNA, 19 nt, Artificial Sequence
  Description of Artificial Sequence: Synthetic oligonucleotide
  Sense strand starting at position 3778 of SEQ ID NO: 1563350
uugugaaguuaagauaaug

SEQ ID NO: 1809472 - RNA, 19 nt, Artificial Sequence
  Description of Artificial Sequence: Synthetic oligonucleotide
  Antisense strand to SEQ ID NO: 1809471
cauuaucuuaacuucacaa

SEQ ID NO: 1809473 - RNA, 19 nt, Artificial Sequence
  Description of Artificial Sequence: Synthetic oligonucleotide
  Sense strand starting at position 3789 of SEQ ID NO: 1563350
agauaaugauucucuagcu

SEQ ID NO: 1809474 - RNA, 19 nt, Artificial Sequence
  Description of Artificial Sequence: Synthetic oligonucleotide
  Antisense strand to SEQ ID NO: 1809473
agcuagagaaucauuaucu

SEQ ID NO: 1809475 - RNA, 19 nt, Artificial Sequence
  Description of Artificial Sequence: Synthetic oligonucleotide
  Sense strand starting at position 3811 of SEQ ID NO: 1563350
ucccaagguugaucugaga

SEQ ID NO: 1809476 - RNA, 19 nt, Artificial Sequence
  Description of Artificial Sequence: Synthetic oligonucleotide
  Antisense strand to SEQ ID NO: 1809475
ucucagaucaaccuuggga

SEQ ID NO: 1809477 - RNA, 19 nt, Artificial Sequence
  Description of Artificial Sequence: Synthetic oligonucleotide
  Sense strand starting at position 3814 of SEQ ID NO: 1563350
caagguugaucugagaauc

SEQ ID NO: 1809478 - RNA, 19 nt, Artificial Sequence
  Description of Artificial Sequence: Synthetic oligonucleotide
  Antisense strand to SEQ ID NO: 1809477
gauucucagaucaaccuug

SEQ ID NO: 1809479 - RNA, 19 nt, Artificial Sequence
  Description of Artificial Sequence: Synthetic oligonucleotide
  Sense strand starting at position 3835 of SEQ ID NO: 1563350
guaagauaaugggaugaaa

SEQ ID NO: 1809480 - RNA, 19 nt, Artificial Sequence
  Description of Artificial Sequence: Synthetic oligonucleotide
  Antisense strand to SEQ ID NO: 1809479
uuucaucccauuaucuuac

SEQ ID NO: 1809481 - RNA, 19 nt, Artificial Sequence
  Description of Artificial Sequence: Synthetic oligonucleotide
  Sense strand starting at position 3880 of SEQ ID NO: 1563350
acauguauaugauuacauc

SEQ ID NO: 1809482 - RNA, 19 nt, Artificial Sequence
  Description of Artificial Sequence: Synthetic oligonucleotide
  Antisense strand to SEQ ID NO: 1809481
gauguaaucauauacaugu

SEQ ID NO: 1809483 - RNA, 19 nt, Artificial Sequence
  Description of Artificial Sequence: Synthetic oligonucleotide
  Sense strand starting at position 3916 of SEQ ID NO: 1563350
guucuuaaauuauuggaga

SEQ ID NO: 1809484 - RNA, 19 nt, Artificial Sequence
  Description of Artificial Sequence: Synthetic oligonucleotide
  Antisense strand to SEQ ID NO: 1809483
ucuccaauaauuuaagaac

SEQ ID NO: 1809485 - RNA, 19 nt, Artificial Sequence
  Description of Artificial Sequence: Synthetic oligonucleotide
  Sense strand starting at position 3917 of SEQ ID NO: 1563350
uucuuaaauuauuggagag

SEQ ID NO: 1809486 - RNA, 19 nt, Artificial Sequence
  Description of Artificial Sequence: Synthetic oligonucleotide
  Antisense strand to SEQ ID NO: 1809485
cucuccaauaauuuaagaa

SEQ ID NO: 1809487 - RNA, 19 nt, Artificial Sequence
  Description of Artificial Sequence: Synthetic oligonucleotide
  Sense strand starting at position 3919 of SEQ ID NO: 1563350
cuuaaauuauuggagagaa

SEQ ID NO: 1809488 - RNA, 19 nt, Artificial Sequence
  Description of Artificial Sequence: Synthetic oligonucleotide
  Antisense strand to SEQ ID NO: 1809487
uucucuccaauaauuuaag

SEQ ID NO: 1809489 - RNA, 19 nt, Artificial Sequence
  Description of Artificial Sequence: Synthetic oligonucleotide
  Sense strand starting at position 3931 of SEQ ID NO: 1563350
gagagaagccgucagguau

SEQ ID NO: 1809490 - RNA, 19 nt, Artificial Sequence
  Description of Artificial Sequence: Synthetic oligonucleotide
  Antisense strand to SEQ ID NO: 1809489
auaccugacggcuucucuc

SEQ ID NO: 1809491 - RNA, 19 nt, Artificial Sequence
  Description of Artificial Sequence: Synthetic oligonucleotide
  Sense strand starting at position 3970 of SEQ ID NO: 1563350
ggauucugcauguguggau

SEQ ID NO: 1809492 - RNA, 19 nt, Artificial Sequence
  Description of Artificial Sequence: Synthetic oligonucleotide
  Antisense strand to SEQ ID NO: 1809491
auccacacaugcagaaucc

SEQ ID NO: 1809493 - RNA, 19 nt, Artificial Sequence
  Description of Artificial Sequence: Synthetic oligonucleotide
  Sense strand starting at position 3971 of SEQ ID NO: 1563350
gauucugcauguguggauu

SEQ ID NO: 1809494 - RNA, 19 nt, Artificial Sequence
  Description of Artificial Sequence: Synthetic oligonucleotide
  Antisense strand to SEQ ID NO: 1809493
aauccacacaugcagaauc

SEQ ID NO: 1809495 - RNA, 19 nt, Artificial Sequence
  Description of Artificial Sequence: Synthetic oligonucleotide
  Sense strand starting at position 3125 of SEQ ID NO: 1563360
gacagugaggcaggaaauu

SEQ ID NO: 1809496 - RNA, 19 nt, Artificial Sequence
  Description of Artificial Sequence: Synthetic oligonucleotide
  Antisense strand to SEQ ID NO: 1809495
aauuuccugccucacuguc

SEQ ID NO: 1809497 - RNA, 19 nt, Artificial Sequence
  Description of Artificial Sequence: Synthetic oligonucleotide
  Sense strand starting at position 3268 of SEQ ID NO: 1563360
aggacaggcuuccuaggau

SEQ ID NO: 1809498 - RNA, 19 nt, Artificial Sequence
  Description of Artificial Sequence: Synthetic oligonucleotide
  Antisense strand to SEQ ID NO: 1809497
auccuaggaagccuguccu

SEQ ID NO: 1809499 - RNA, 19 nt, Artificial Sequence
  Description of Artificial Sequence: Synthetic oligonucleotide
  Sense strand starting at position 3271 of SEQ ID NO: 1563360
acaggcuuccuaggauauu

SEQ ID NO: 1809500 - RNA, 19 nt, Artificial Sequence
  Description of Artificial Sequence: Synthetic oligonucleotide
  Antisense strand to SEQ ID NO: 1809499
aauauccuaggaagccugu

SEQ ID NO: 1809501 - RNA, 19 nt, Artificial Sequence
  Description of Artificial Sequence: Synthetic oligonucleotide
  Sense strand starting at position 3272 of SEQ ID NO: 1563360
caggcuuccuaggauauuu

SEQ ID NO: 1809502 - RNA, 19 nt, Artificial Sequence
  Description of Artificial Sequence: Synthetic oligonucleotide
  Antisense strand to SEQ ID NO: 1809501
aaauauccuaggaagccug

SEQ ID NO: 1809503 - RNA, 19 nt, Artificial Sequence
  Description of Artificial Sequence: Synthetic oligonucleotide
  Sense strand starting at position 3346 of SEQ ID NO: 1563360
aguaguaaguaauucugaa

SEQ ID NO: 1809504 - RNA, 19 nt, Artificial Sequence
  Description of Artificial Sequence: Synthetic oligonucleotide
  Antisense strand to SEQ ID NO: 1809503
uucagaauuacuuacuacu

SEQ ID NO: 1809505 - RNA, 19 nt, Artificial Sequence
  Description of Artificial Sequence: Synthetic oligonucleotide
  Sense strand starting at position 3350 of SEQ ID NO: 1563360
guaaguaauucugaacauu

SEQ ID NO: 1809506 - RNA, 19 nt, Artificial Sequence
  Description of Artificial Sequence: Synthetic oligonucleotide
  Antisense strand to SEQ ID NO: 1809505
aauguucagaauuacuuac

SEQ ID NO: 1809507 - RNA, 19 nt, Artificial Sequence
  Description of Artificial Sequence: Synthetic oligonucleotide
  Sense strand starting at position 3501 of SEQ ID NO: 1563360
ucaaguugagcaggucauu

SEQ ID NO: 1809508 - RNA, 19 nt, Artificial Sequence
  Description of Artificial Sequence: Synthetic oligonucleotide
  Antisense strand to SEQ ID NO: 1809507
aaugaccugcucaacuuga

SEQ ID NO: 1809509 - RNA, 19 nt, Artificial Sequence
  Description of Artificial Sequence: Synthetic oligonucleotide
  Sense strand starting at position 3507 of SEQ ID NO: 1563360
ugagcaggucauuguuguu

SEQ ID NO: 1809510 - RNA, 19 nt, Artificial Sequence
  Description of Artificial Sequence: Synthetic oligonucleotide
  Antisense strand to SEQ ID NO: 1809509
aacaacaaugaccugcuca

SEQ ID NO: 1809511 - RNA, 19 nt, Artificial Sequence
  Description of Artificial Sequence: Synthetic oligonucleotide
  Sense strand starting at position 3598 of SEQ ID NO: 1563360
ugucacaagucauugguuu

SEQ ID NO: 1809512 - RNA, 19 nt, Artificial Sequence
  Description of Artificial Sequence: Synthetic oligonucleotide
  Antisense strand to SEQ ID NO: 1809511
aaaccaaugacuugugaca

SEQ ID NO: 1809513 - RNA, 19 nt, Artificial Sequence
  Description of Artificial Sequence: Synthetic oligonucleotide
  Sense strand starting at position 3599 of SEQ ID NO: 1563360
gucacaagucauugguuua

SEQ ID NO: 1809514 - RNA, 19 nt, Artificial Sequence
  Description of Artificial Sequence: Synthetic oligonucleotide
  Antisense strand to SEQ ID NO: 1809513
uaaaccaaugacuugugac

SEQ ID NO: 1809515 - RNA, 19 nt, Artificial Sequence
  Description of Artificial Sequence: Synthetic oligonucleotide
  Sense strand starting at position 3602 of SEQ ID NO: 1563360
acaagucauugguuuaaau

SEQ ID NO: 1809516 - RNA, 19 nt, Artificial Sequence
  Description of Artificial Sequence: Synthetic oligonucleotide
  Antisense strand to SEQ ID NO: 1809515
auuuaaaccaaugacuugu

SEQ ID NO: 1809517 - RNA, 19 nt, Artificial Sequence
  Description of Artificial Sequence: Synthetic oligonucleotide
  Sense strand starting at position 3610 of SEQ ID NO: 1563360
uugguuuaaaucuggaaga

SEQ ID NO: 1809518 - RNA, 19 nt, Artificial Sequence
  Description of Artificial Sequence: Synthetic oligonucleotide
  Antisense strand to SEQ ID NO: 1809517
ucuuccagauuuaaaccaa

SEQ ID NO: 1809519 - RNA, 19 nt, Artificial Sequence
  Description of Artificial Sequence: Synthetic oligonucleotide
  Sense strand starting at position 3611 of SEQ ID NO: 1563360
ugguuuaaaucuggaagac

SEQ ID NO: 1809520 - RNA, 19 nt, Artificial Sequence
  Description of Artificial Sequence: Synthetic oligonucleotide
  Antisense strand to SEQ ID NO: 1809519
gucuuccagauuuaaacca

SEQ ID NO: 1809521 - RNA, 19 nt, Artificial Sequence
  Description of Artificial Sequence: Synthetic oligonucleotide
  Sense strand starting at position 3692 of SEQ ID NO: 1563360
cagucugaggucuggaguu

SEQ ID NO: 1809522 - RNA, 19 nt, Artificial Sequence
  Description of Artificial Sequence: Synthetic oligonucleotide
  Antisense strand to SEQ ID NO: 1809521
aacuccagaccucagacug

SEQ ID NO: 1809523 - RNA, 19 nt, Artificial Sequence
  Description of Artificial Sequence: Synthetic oligonucleotide
  Sense strand starting at position 3698 of SEQ ID NO: 1563360
gaggucuggaguugcuuua

SEQ ID NO: 1809524 - RNA, 19 nt, Artificial Sequence
  Description of Artificial Sequence: Synthetic oligonucleotide
  Antisense strand to SEQ ID NO: 1809523
uaaagcaacuccagaccuc

SEQ ID NO: 1809525 - RNA, 19 nt, Artificial Sequence
  Description of Artificial Sequence: Synthetic oligonucleotide
  Sense strand starting at position 3731 of SEQ ID NO: 1563360
augcgauguuuggaaaguu

SEQ ID NO: 1809526 - RNA, 19 nt, Artificial Sequence
  Description of Artificial Sequence: Synthetic oligonucleotide
  Antisense strand to SEQ ID NO: 1809525
aacuuuccaaacaucgcau

SEQ ID NO: 1809527 - RNA, 19 nt, Artificial Sequence
  Description of Artificial Sequence: Synthetic oligonucleotide
  Sense strand starting at position 3747 of SEQ ID NO: 1563360
guuauuuauuucuaugccu

SEQ ID NO: 1809528 - RNA, 19 nt, Artificial Sequence
  Description of Artificial Sequence: Synthetic oligonucleotide
  Antisense strand to SEQ ID NO: 1809527
aggcauagaaauaaauaac

SEQ ID NO: 1809529 - RNA, 19 nt, Artificial Sequence
  Description of Artificial Sequence: Synthetic oligonucleotide
  Sense strand starting at position 3778 of SEQ ID NO: 1563360
uugugaaguuaagauaaug

SEQ ID NO: 1809530 - RNA, 19 nt, Artificial Sequence
  Description of Artificial Sequence: Synthetic oligonucleotide
  Antisense strand to SEQ ID NO: 1809529
cauuaucuuaacuucacaa

SEQ ID NO: 1809531 - RNA, 19 nt, Artificial Sequence
  Description of Artificial Sequence: Synthetic oligonucleotide
  Sense strand starting at position 3789 of SEQ ID NO: 1563360
agauaaugauucucuagcu

SEQ ID NO: 1809532 - RNA, 19 nt, Artificial Sequence
  Description of Artificial Sequence: Synthetic oligonucleotide
  Antisense strand to SEQ ID NO: 1809531
agcuagagaaucauuaucu

SEQ ID NO: 1809533 - RNA, 19 nt, Artificial Sequence
  Description of Artificial Sequence: Synthetic oligonucleotide
  Sense strand starting at position 3811 of SEQ ID NO: 1563360
ucccaagguugaucugaga

SEQ ID NO: 1809534 - RNA, 19 nt, Artificial Sequence
  Description of Artificial Sequence: Synthetic oligonucleotide
  Antisense strand to SEQ ID NO: 1809533
ucucagaucaaccuuggga

SEQ ID NO: 1809535 - RNA, 19 nt, Artificial Sequence
  Description of Artificial Sequence: Synthetic oligonucleotide
  Sense strand starting at position 3814 of SEQ ID NO: 1563360
caagguugaucugagaauc

SEQ ID NO: 1809536 - RNA, 19 nt, Artificial Sequence
  Description of Artificial Sequence: Synthetic oligonucleotide
  Antisense strand to SEQ ID NO: 1809535
gauucucagaucaaccuug

SEQ ID NO: 1809537 - RNA, 19 nt, Artificial Sequence
  Description of Artificial Sequence: Synthetic oligonucleotide
  Sense strand starting at position 3835 of SEQ ID NO: 1563360
guaagauaaugggaugaaa

SEQ ID NO: 1809538 - RNA, 19 nt, Artificial Sequence
  Description of Artificial Sequence: Synthetic oligonucleotide
  Antisense strand to SEQ ID NO: 1809537
uuucaucccauuaucuuac

SEQ ID NO: 1809539 - RNA, 19 nt, Artificial Sequence
  Description of Artificial Sequence: Synthetic oligonucleotide
  Sense strand starting at position 3880 of SEQ ID NO: 1563360
acauguauaugauuacauc

SEQ ID NO: 1809540 - RNA, 19 nt, Artificial Sequence
  Description of Artificial Sequence: Synthetic oligonucleotide
  Antisense strand to SEQ ID NO: 1809539
gauguaaucauauacaugu

SEQ ID NO: 1809541 - RNA, 19 nt, Artificial Sequence
  Description of Artificial Sequence: Synthetic oligonucleotide
  Sense strand starting at position 3916 of SEQ ID NO: 1563360
guucuuaaauuauuggaga

SEQ ID NO: 1809542 - RNA, 19 nt, Artificial Sequence
  Description of Artificial Sequence: Synthetic oligonucleotide
  Antisense strand to SEQ ID NO: 1809541
ucuccaauaauuuaagaac

SEQ ID NO: 1809543 - RNA, 19 nt, Artificial Sequence
  Description of Artificial Sequence: Synthetic oligonucleotide
  Sense strand starting at position 3917 of SEQ ID NO: 1563360
uucuuaaauuauuggagag

SEQ ID NO: 1809544 - RNA, 19 nt, Artificial Sequence
  Description of Artificial Sequence: Synthetic oligonucleotide
  Antisense strand to SEQ ID NO: 1809543
cucuccaauaauuuaagaa

SEQ ID NO: 1809545 - RNA, 19 nt, Artificial Sequence
  Description of Artificial Sequence: Synthetic oligonucleotide
  Sense strand starting at position 3919 of SEQ ID NO: 1563360
cuuaaauuauuggagagaa

SEQ ID NO: 1809546 - RNA, 19 nt, Artificial Sequence
  Description of Artificial Sequence: Synthetic oligonucleotide
  Antisense strand to SEQ ID NO: 1809545
uucucuccaauaauuuaag

SEQ ID NO: 1809547 - RNA, 19 nt, Artificial Sequence
  Description of Artificial Sequence: Synthetic oligonucleotide
  Sense strand starting at position 3931 of SEQ ID NO: 1563360
gagagaagccgucagguau

SEQ ID NO: 1809548 - RNA, 19 nt, Artificial Sequence
  Description of Artificial Sequence: Synthetic oligonucleotide
  Antisense strand to SEQ ID NO: 1809547
auaccugacggcuucucuc

SEQ ID NO: 1809549 - RNA, 19 nt, Artificial Sequence
  Description of Artificial Sequence: Synthetic oligonucleotide
  Sense strand starting at position 3970 of SEQ ID NO: 1563360
ggauucugcauguguggau

SEQ ID NO: 1809550 - RNA, 19 nt, Artificial Sequence
  Description of Artificial Sequence: Synthetic oligonucleotide
  Antisense strand to SEQ ID NO: 1809549
auccacacaugcagaaucc

SEQ ID NO: 1809551 - RNA, 19 nt, Artificial Sequence
  Description of Artificial Sequence: Synthetic oligonucleotide
  Sense strand starting at position 3971 of SEQ ID NO: 1563360
gauucugcauguguggauu

SEQ ID NO: 1809552 - RNA, 19 nt, Artificial Sequence
  Description of Artificial Sequence: Synthetic oligonucleotide
  Antisense strand to SEQ ID NO: 1809551
aauccacacaugcagaauc

SEQ ID NO: 1809553 - RNA, 19 nt, Artificial Sequence
  Description of Artificial Sequence: Synthetic oligonucleotide
  Sense strand starting at position 3125 of SEQ ID NO: 1563370
gacagugaggcaggaaauu

SEQ ID NO: 1809554 - RNA, 19 nt, Artificial Sequence
  Description of Artificial Sequence: Synthetic oligonucleotide
  Antisense strand to SEQ ID NO: 1809553
aauuuccugccucacuguc

SEQ ID NO: 1809555 - RNA, 19 nt, Artificial Sequence
  Description of Artificial Sequence: Synthetic oligonucleotide
  Sense strand starting at position 3268 of SEQ ID NO: 1563370
aggacaggcuuccuaggau

SEQ ID NO: 1809556 - RNA, 19 nt, Artificial Sequence
  Description of Artificial Sequence: Synthetic oligonucleotide
  Antisense strand to SEQ ID NO: 1809555
auccuaggaagccuguccu

SEQ ID NO: 1809557 - RNA, 19 nt, Artificial Sequence
  Description of Artificial Sequence: Synthetic oligonucleotide
  Sense strand starting at position 3271 of SEQ ID NO: 1563370
acaggcuuccuaggauauu

SEQ ID NO: 1809558 - RNA, 19 nt, Artificial Sequence
  Description of Artificial Sequence: Synthetic oligonucleotide
  Antisense strand to SEQ ID NO: 1809557
aauauccuaggaagccugu

SEQ ID NO: 1809559 - RNA, 19 nt, Artificial Sequence
  Description of Artificial Sequence: Synthetic oligonucleotide
  Sense strand starting at position 3272 of SEQ ID NO: 1563370
caggcuuccuaggauauuu

SEQ ID NO: 1809560 - RNA, 19 nt, Artificial Sequence
  Description of Artificial Sequence: Synthetic oligonucleotide
  Antisense strand to SEQ ID NO: 1809559
aaauauccuaggaagccug

SEQ ID NO: 1809561 - RNA, 19 nt, Artificial Sequence
  Description of Artificial Sequence: Synthetic oligonucleotide
  Sense strand starting at position 3346 of SEQ ID NO: 1563370
aguaguaaguaauucugaa

SEQ ID NO: 1809562 - RNA, 19 nt, Artificial Sequence
  Description of Artificial Sequence: Synthetic oligonucleotide
  Antisense strand to SEQ ID NO: 1809561
uucagaauuacuuacuacu

SEQ ID NO: 1809563 - RNA, 19 nt, Artificial Sequence
  Description of Artificial Sequence: Synthetic oligonucleotide
  Sense strand starting at position 3350 of SEQ ID NO: 1563370
guaaguaauucugaacauu

SEQ ID NO: 1809564 - RNA, 19 nt, Artificial Sequence
  Description of Artificial Sequence: Synthetic oligonucleotide
  Antisense strand to SEQ ID NO: 1809563
aauguucagaauuacuuac

SEQ ID NO: 1809565 - RNA, 19 nt, Artificial Sequence
  Description of Artificial Sequence: Synthetic oligonucleotide
  Sense strand starting at position 3501 of SEQ ID NO: 1563370
ucaaguugagcaggucauu

SEQ ID NO: 1809566 - RNA, 19 nt, Artificial Sequence
  Description of Artificial Sequence: Synthetic oligonucleotide
  Antisense strand to SEQ ID NO: 1809565
aaugaccugcucaacuuga

SEQ ID NO: 1809567 - RNA, 19 nt, Artificial Sequence
  Description of Artificial Sequence: Synthetic oligonucleotide
  Sense strand starting at position 3507 of SEQ ID NO: 1563370
ugagcaggucauuguuguu

SEQ ID NO: 1809568 - RNA, 19 nt, Artificial Sequence
  Description of Artificial Sequence: Synthetic oligonucleotide
  Antisense strand to SEQ ID NO: 1809567
aacaacaaugaccugcuca

SEQ ID NO: 1809569 - RNA, 19 nt, Artificial Sequence
  Description of Artificial Sequence: Synthetic oligonucleotide
  Sense strand starting at position 3598 of SEQ ID NO: 1563370
ugucacaagucauugguuu

SEQ ID NO: 1809570 - RNA, 19 nt, Artificial Sequence
  Description of Artificial Sequence: Synthetic oligonucleotide
  Antisense strand to SEQ ID NO: 1809569
aaaccaaugacuugugaca

SEQ ID NO: 1809571 - RNA, 19 nt, Artificial Sequence
  Description of Artificial Sequence: Synthetic oligonucleotide
  Sense strand starting at position 3599 of SEQ ID NO: 1563370
gucacaagucauugguuua

SEQ ID NO: 1809572 - RNA, 19 nt, Artificial Sequence
  Description of Artificial Sequence: Synthetic oligonucleotide
  Antisense strand to SEQ ID NO: 1809571
uaaaccaaugacuugugac

SEQ ID NO: 1809573 - RNA, 19 nt, Artificial Sequence
  Description of Artificial Sequence: Synthetic oligonucleotide
  Sense strand starting at position 3602 of SEQ ID NO: 1563370
acaagucauugguuuaaau

SEQ ID NO: 1809574 - RNA, 19 nt, Artificial Sequence
  Description of Artificial Sequence: Synthetic oligonucleotide
  Antisense strand to SEQ ID NO: 1809573
auuuaaaccaaugacuugu

SEQ ID NO: 1809575 - RNA, 19 nt, Artificial Sequence
  Description of Artificial Sequence: Synthetic oligonucleotide
  Sense strand starting at position 3610 of SEQ ID NO: 1563370
uugguuuaaaucuggaaga

SEQ ID NO: 1809576 - RNA, 19 nt, Artificial Sequence
  Description of Artificial Sequence: Synthetic oligonucleotide
  Antisense strand to SEQ ID NO: 1809575
ucuuccagauuuaaaccaa

SEQ ID NO: 1809577 - RNA, 19 nt, Artificial Sequence
  Description of Artificial Sequence: Synthetic oligonucleotide
  Sense strand starting at position 3611 of SEQ ID NO: 1563370
ugguuuaaaucuggaagac

SEQ ID NO: 1809578 - RNA, 19 nt, Artificial Sequence
  Description of Artificial Sequence: Synthetic oligonucleotide
  Antisense strand to SEQ ID NO: 1809577
gucuuccagauuuaaacca

SEQ ID NO: 1809579 - RNA, 19 nt, Artificial Sequence
  Description of Artificial Sequence: Synthetic oligonucleotide
  Sense strand starting at position 3692 of SEQ ID NO: 1563370
cagucugaggucuggaguu

SEQ ID NO: 1809580 - RNA, 19 nt, Artificial Sequence
  Description of Artificial Sequence: Synthetic oligonucleotide
  Antisense strand to SEQ ID NO: 1809579
aacuccagaccucagacug

SEQ ID NO: 1809581 - RNA, 19 nt, Artificial Sequence
  Description of Artificial Sequence: Synthetic oligonucleotide
  Sense strand starting at position 3698 of SEQ ID NO: 1563370
gaggucuggaguugcuuua

SEQ ID NO: 1809582 - RNA, 19 nt, Artificial Sequence
  Description of Artificial Sequence: Synthetic oligonucleotide
  Antisense strand to SEQ ID NO: 1809581
uaaagcaacuccagaccuc

SEQ ID NO: 1809583 - RNA, 19 nt, Artificial Sequence
  Description of Artificial Sequence: Synthetic oligonucleotide
  Sense strand starting at position 3731 of SEQ ID NO: 1563370
augcgauguuuggaaaguu

SEQ ID NO: 1809584 - RNA, 19 nt, Artificial Sequence
  Description of Artificial Sequence: Synthetic oligonucleotide
  Antisense strand to SEQ ID NO: 1809583
aacuuuccaaacaucgcau

SEQ ID NO: 1809585 - RNA, 19 nt, Artificial Sequence
  Description of Artificial Sequence: Synthetic oligonucleotide
  Sense strand starting at position 3747 of SEQ ID NO: 1563370
guuauuuauuucuaugccu

SEQ ID NO: 1809586 - RNA, 19 nt, Artificial Sequence
  Description of Artificial Sequence: Synthetic oligonucleotide
  Antisense strand to SEQ ID NO: 1809585
aggcauagaaauaaauaac

SEQ ID NO: 1809587 - RNA, 19 nt, Artificial Sequence
  Description of Artificial Sequence: Synthetic oligonucleotide
  Sense strand starting at position 3778 of SEQ ID NO: 1563370
uugugaaguuaagauaaug

SEQ ID NO: 1809588 - RNA, 19 nt, Artificial Sequence
  Description of Artificial Sequence: Synthetic oligonucleotide
  Antisense strand to SEQ ID NO: 1809587
cauuaucuuaacuucacaa

SEQ ID NO: 1809589 - RNA, 19 nt, Artificial Sequence
  Description of Artificial Sequence: Synthetic oligonucleotide
  Sense strand starting at position 3789 of SEQ ID NO: 1563370
agauaaugauucucuagcu

SEQ ID NO: 1809590 - RNA, 19 nt, Artificial Sequence
  Description of Artificial Sequence: Synthetic oligonucleotide
  Antisense strand to SEQ ID NO: 1809589
agcuagagaaucauuaucu

SEQ ID NO: 1809591 - RNA, 19 nt, Artificial Sequence
  Description of Artificial Sequence: Synthetic oligonucleotide
  Sense strand starting at position 3811 of SEQ ID NO: 1563370
ucccaagguugaucugaga

SEQ ID NO: 1809592 - RNA, 19 nt, Artificial Sequence
  Description of Artificial Sequence: Synthetic oligonucleotide
  Antisense strand to SEQ ID NO: 1809591
ucucagaucaaccuuggga

SEQ ID NO: 1809593 - RNA, 19 nt, Artificial Sequence
  Description of Artificial Sequence: Synthetic oligonucleotide
  Sense strand starting at position 3814 of SEQ ID NO: 1563370
caagguugaucugagaauc

SEQ ID NO: 1809594 - RNA, 19 nt, Artificial Sequence
  Description of Artificial Sequence: Synthetic oligonucleotide
  Antisense strand to SEQ ID NO: 1809593
gauucucagaucaaccuug

SEQ ID NO: 1809595 - RNA, 19 nt, Artificial Sequence
  Description of Artificial Sequence: Synthetic oligonucleotide
  Sense strand starting at position 3835 of SEQ ID NO: 1563370
guaagauaaugggaugaaa

SEQ ID NO: 1809596 - RNA, 19 nt, Artificial Sequence
  Description of Artificial Sequence: Synthetic oligonucleotide
  Antisense strand to SEQ ID NO: 1809595
uuucaucccauuaucuuac

SEQ ID NO: 1809597 - RNA, 19 nt, Artificial Sequence
  Description of Artificial Sequence: Synthetic oligonucleotide
  Sense strand starting at position 3880 of SEQ ID NO: 1563370
acauguauaugauuacauc

SEQ ID NO: 1809598 - RNA, 19 nt, Artificial Sequence
  Description of Artificial Sequence: Synthetic oligonucleotide
  Antisense strand to SEQ ID NO: 1809597
gauguaaucauauacaugu

SEQ ID NO: 1809599 - RNA, 19 nt, Artificial Sequence
  Description of Artificial Sequence: Synthetic oligonucleotide
  Sense strand starting at position 3916 of SEQ ID NO: 1563370
guucuuaaauuauuggaga

SEQ ID NO: 1809600 - RNA, 19 nt, Artificial Sequence
  Description of Artificial Sequence: Synthetic oligonucleotide
  Antisense strand to SEQ ID NO: 1809599
ucuccaauaauuuaagaac

SEQ ID NO: 1809601 - RNA, 19 nt, Artificial Sequence
  Description of Artificial Sequence: Synthetic oligonucleotide
  Sense strand starting at position 3917 of SEQ ID NO: 1563370
uucuuaaauuauuggagag

SEQ ID NO: 1809602 - RNA, 19 nt, Artificial Sequence
  Description of Artificial Sequence: Synthetic oligonucleotide
  Antisense strand to SEQ ID NO: 1809601
cucuccaauaauuuaagaa

SEQ ID NO: 1809603 - RNA, 19 nt, Artificial Sequence
  Description of Artificial Sequence: Synthetic oligonucleotide
  Sense strand starting at position 3919 of SEQ ID NO: 1563370
cuuaaauuauuggagagaa

SEQ ID NO: 1809604 - RNA, 19 nt, Artificial Sequence
  Description of Artificial Sequence: Synthetic oligonucleotide
  Antisense strand to SEQ ID NO: 1809603
uucucuccaauaauuuaag

SEQ ID NO: 1809605 - RNA, 19 nt, Artificial Sequence
  Description of Artificial Sequence: Synthetic oligonucleotide
  Sense strand starting at position 3931 of SEQ ID NO: 1563370
gagagaagccgucagguau

SEQ ID NO: 1809606 - RNA, 19 nt, Artificial Sequence
  Description of Artificial Sequence: Synthetic oligonucleotide
  Antisense strand to SEQ ID NO: 1809605
auaccugacggcuucucuc

SEQ ID NO: 1809607 - RNA, 19 nt, Artificial Sequence
  Description of Artificial Sequence: Synthetic oligonucleotide
  Sense strand starting at position 3970 of SEQ ID NO: 1563370
ggauucugcauguguggau

SEQ ID NO: 1809608 - RNA, 19 nt, Artificial Sequence
  Description of Artificial Sequence: Synthetic oligonucleotide
  Antisense strand to SEQ ID NO: 1809607
auccacacaugcagaaucc

SEQ ID NO: 1809609 - RNA, 19 nt, Artificial Sequence
  Description of Artificial Sequence: Synthetic oligonucleotide
  Sense strand starting at position 3971 of SEQ ID NO: 1563370
gauucugcauguguggauu

SEQ ID NO: 1809610 - RNA, 19 nt, Artificial Sequence
  Description of Artificial Sequence: Synthetic oligonucleotide
  Antisense strand to SEQ ID NO: 1809609
aauccacacaugcagaauc

SEQ ID NO: 1809611 - RNA, 19 nt, Artificial Sequence
  Description of Artificial Sequence: Synthetic oligonucleotide
  Sense strand starting at position 3125 of SEQ ID NO: 1563380
gacagugaggcaggaaauu

SEQ ID NO: 1809612 - RNA, 19 nt, Artificial Sequence
  Description of Artificial Sequence: Synthetic oligonucleotide
  Antisense strand to SEQ ID NO: 1809611
aauuuccugccucacuguc

SEQ ID NO: 1809613 - RNA, 19 nt, Artificial Sequence
  Description of Artificial Sequence: Synthetic oligonucleotide
  Sense strand starting at position 3268 of SEQ ID NO: 1563380
aggacaggcuuccuaggau

SEQ ID NO: 1809614 - RNA, 19 nt, Artificial Sequence
  Description of Artificial Sequence: Synthetic oligonucleotide
  Antisense strand to SEQ ID NO: 1809613
auccuaggaagccuguccu

SEQ ID NO: 1809615 - RNA, 19 nt, Artificial Sequence
  Description of Artificial Sequence: Synthetic oligonucleotide
  Sense strand starting at position 3271 of SEQ ID NO: 1563380
acaggcuuccuaggauauu

SEQ ID NO: 1809616 - RNA, 19 nt, Artificial Sequence
  Description of Artificial Sequence: Synthetic oligonucleotide
  Antisense strand to SEQ ID NO: 1809615
aauauccuaggaagccugu

SEQ ID NO: 1809617 - RNA, 19 nt, Artificial Sequence
  Description of Artificial Sequence: Synthetic oligonucleotide
  Sense strand starting at position 3272 of SEQ ID NO: 1563380
caggcuuccuaggauauuu

SEQ ID NO: 1809618 - RNA, 19 nt, Artificial Sequence
  Description of Artificial Sequence: Synthetic oligonucleotide
  Antisense strand to SEQ ID NO: 1809617
aaauauccuaggaagccug

SEQ ID NO: 1809619 - RNA, 19 nt, Artificial Sequence
  Description of Artificial Sequence: Synthetic oligonucleotide
  Sense strand starting at position 3346 of SEQ ID NO: 1563380
aguaguaaguaauucugaa

SEQ ID NO: 1809620 - RNA, 19 nt, Artificial Sequence
  Description of Artificial Sequence: Synthetic oligonucleotide
  Antisense strand to SEQ ID NO: 1809619
uucagaauuacuuacuacu

SEQ ID NO: 1809621 - RNA, 19 nt, Artificial Sequence
  Description of Artificial Sequence: Synthetic oligonucleotide
  Sense strand starting at position 3350 of SEQ ID NO: 1563380
guaaguaauucugaacauu

SEQ ID NO: 1809622 - RNA, 19 nt, Artificial Sequence
  Description of Artificial Sequence: Synthetic oligonucleotide
  Antisense strand to SEQ ID NO: 1809621
aauguucagaauuacuuac

SEQ ID NO: 1809623 - RNA, 19 nt, Artificial Sequence
  Description of Artificial Sequence: Synthetic oligonucleotide
  Sense strand starting at position 3501 of SEQ ID NO: 1563380
ucaaguugagcaggucauu

SEQ ID NO: 1809624 - RNA, 19 nt, Artificial Sequence
  Description of Artificial Sequence: Synthetic oligonucleotide
  Antisense strand to SEQ ID NO: 1809623
aaugaccugcucaacuuga

SEQ ID NO: 1809625 - RNA, 19 nt, Artificial Sequence
  Description of Artificial Sequence: Synthetic oligonucleotide
  Sense strand starting at position 3507 of SEQ ID NO: 1563380
ugagcaggucauuguuguu

SEQ ID NO: 1809626 - RNA, 19 nt, Artificial Sequence
  Description of Artificial Sequence: Synthetic oligonucleotide
  Antisense strand to SEQ ID NO: 1809625
aacaacaaugaccugcuca

SEQ ID NO: 1809627 - RNA, 19 nt, Artificial Sequence
  Description of Artificial Sequence: Synthetic oligonucleotide
  Sense strand starting at position 3598 of SEQ ID NO: 1563380
ugucacaagucauugguuu

SEQ ID NO: 1809628 - RNA, 19 nt, Artificial Sequence
  Description of Artificial Sequence: Synthetic oligonucleotide
  Antisense strand to SEQ ID NO: 1809627
aaaccaaugacuugugaca

SEQ ID NO: 1809629 - RNA, 19 nt, Artificial Sequence
  Description of Artificial Sequence: Synthetic oligonucleotide
  Sense strand starting at position 3599 of SEQ ID NO: 1563380
gucacaagucauugguuua

SEQ ID NO: 1809630 - RNA, 19 nt, Artificial Sequence
  Description of Artificial Sequence: Synthetic oligonucleotide
  Antisense strand to SEQ ID NO: 1809629
uaaaccaaugacuugugac

SEQ ID NO: 1809631 - RNA, 19 nt, Artificial Sequence
  Description of Artificial Sequence: Synthetic oligonucleotide
  Sense strand starting at position 3602 of SEQ ID NO: 1563380
acaagucauugguuuaaau

SEQ ID NO: 1809632 - RNA, 19 nt, Artificial Sequence
  Description of Artificial Sequence: Synthetic oligonucleotide
  Antisense strand to SEQ ID NO: 1809631
auuuaaaccaaugacuugu

SEQ ID NO: 1809633 - RNA, 19 nt, Artificial Sequence
  Description of Artificial Sequence: Synthetic oligonucleotide
  Sense strand starting at position 3610 of SEQ ID NO: 1563380
uugguuuaaaucuggaaga

SEQ ID NO: 1809634 - RNA, 19 nt, Artificial Sequence
  Description of Artificial Sequence: Synthetic oligonucleotide
  Antisense strand to SEQ ID NO: 1809633
ucuuccagauuuaaaccaa

SEQ ID NO: 1809635 - RNA, 19 nt, Artificial Sequence
  Description of Artificial Sequence: Synthetic oligonucleotide
  Sense strand starting at position 3611 of SEQ ID NO: 1563380
ugguuuaaaucuggaagac

SEQ ID NO: 1809636 - RNA, 19 nt, Artificial Sequence
  Description of Artificial Sequence: Synthetic oligonucleotide
  Antisense strand to SEQ ID NO: 1809635
gucuuccagauuuaaacca

SEQ ID NO: 1809637 - RNA, 19 nt, Artificial Sequence
  Description of Artificial Sequence: Synthetic oligonucleotide
  Sense strand starting at position 3692 of SEQ ID NO: 1563380
cagucugaggucuggaguu

SEQ ID NO: 1809638 - RNA, 19 nt, Artificial Sequence
  Description of Artificial Sequence: Synthetic oligonucleotide
  Antisense strand to SEQ ID NO: 1809637
aacuccagaccucagacug

SEQ ID NO: 1809639 - RNA, 19 nt, Artificial Sequence
  Description of Artificial Sequence: Synthetic oligonucleotide
  Sense strand starting at position 3698 of SEQ ID NO: 1563380
gaggucuggaguugcuuua

SEQ ID NO: 1809640 - RNA, 19 nt, Artificial Sequence
  Description of Artificial Sequence: Synthetic oligonucleotide
  Antisense strand to SEQ ID NO: 1809639
uaaagcaacuccagaccuc

SEQ ID NO: 1809641 - RNA, 19 nt, Artificial Sequence
  Description of Artificial Sequence: Synthetic oligonucleotide
  Sense strand starting at position 3731 of SEQ ID NO: 1563380
augcgauguuuggaaaguu

SEQ ID NO: 1809642 - RNA, 19 nt, Artificial Sequence
  Description of Artificial Sequence: Synthetic oligonucleotide
  Antisense strand to SEQ ID NO: 1809641
aacuuuccaaacaucgcau

SEQ ID NO: 1809643 - RNA, 19 nt, Artificial Sequence
  Description of Artificial Sequence: Synthetic oligonucleotide
  Sense strand starting at position 3747 of SEQ ID NO: 1563380
guuauuuauuucuaugccu

SEQ ID NO: 1809644 - RNA, 19 nt, Artificial Sequence
  Description of Artificial Sequence: Synthetic oligonucleotide
  Antisense strand to SEQ ID NO: 1809643
aggcauagaaauaaauaac

SEQ ID NO: 1809645 - RNA, 19 nt, Artificial Sequence
  Description of Artificial Sequence: Synthetic oligonucleotide
  Sense strand starting at position 3778 of SEQ ID NO: 1563380
uugugaaguuaagauaaug

SEQ ID NO: 1809646 - RNA, 19 nt, Artificial Sequence
  Description of Artificial Sequence: Synthetic oligonucleotide
  Antisense strand to SEQ ID NO: 1809645
cauuaucuuaacuucacaa

SEQ ID NO: 1809647 - RNA, 19 nt, Artificial Sequence
  Description of Artificial Sequence: Synthetic oligonucleotide
  Sense strand starting at position 3789 of SEQ ID NO: 1563380
agauaaugauucucuagcu

SEQ ID NO: 1809648 - RNA, 19 nt, Artificial Sequence
  Description of Artificial Sequence: Synthetic oligonucleotide
  Antisense strand to SEQ ID NO: 1809647
agcuagagaaucauuaucu

SEQ ID NO: 1809649 - RNA, 19 nt, Artificial Sequence
  Description of Artificial Sequence: Synthetic oligonucleotide
  Sense strand starting at position 3811 of SEQ ID NO: 1563380
ucccaagguugaucugaga

SEQ ID NO: 1809650 - RNA, 19 nt, Artificial Sequence
  Description of Artificial Sequence: Synthetic oligonucleotide
  Antisense strand to SEQ ID NO: 1809649
ucucagaucaaccuuggga

SEQ ID NO: 1809651 - RNA, 19 nt, Artificial Sequence
  Description of Artificial Sequence: Synthetic oligonucleotide
  Sense strand starting at position 3814 of SEQ ID NO: 1563380
caagguugaucugagaauc

SEQ ID NO: 1809652 - RNA, 19 nt, Artificial Sequence
  Description of Artificial Sequence: Synthetic oligonucleotide
  Antisense strand to SEQ ID NO: 1809651
gauucucagaucaaccuug

SEQ ID NO: 1809653 - RNA, 19 nt, Artificial Sequence
  Description of Artificial Sequence: Synthetic oligonucleotide
  Sense strand starting at position 3835 of SEQ ID NO: 1563380
guaagauaaugggaugaaa

SEQ ID NO: 1809654 - RNA, 19 nt, Artificial Sequence
  Description of Artificial Sequence: Synthetic oligonucleotide
  Antisense strand to SEQ ID NO: 1809653
uuucaucccauuaucuuac

SEQ ID NO: 1809655 - RNA, 19 nt, Artificial Sequence
  Description of Artificial Sequence: Synthetic oligonucleotide
  Sense strand starting at position 3880 of SEQ ID NO: 1563380
acauguauaugauuacauc

SEQ ID NO: 1809656 - RNA, 19 nt, Artificial Sequence
  Description of Artificial Sequence: Synthetic oligonucleotide
  Antisense strand to SEQ ID NO: 1809655
gauguaaucauauacaugu

SEQ ID NO: 1809657 - RNA, 19 nt, Artificial Sequence
  Description of Artificial Sequence: Synthetic oligonucleotide
  Sense strand starting at position 3916 of SEQ ID NO: 1563380
guucuuaaauuauuggaga

SEQ ID NO: 1809658 - RNA, 19 nt, Artificial Sequence
  Description of Artificial Sequence: Synthetic oligonucleotide
  Antisense strand to SEQ ID NO: 1809657
ucuccaauaauuuaagaac

SEQ ID NO: 1809659 - RNA, 19 nt, Artificial Sequence
  Description of Artificial Sequence: Synthetic oligonucleotide
  Sense strand starting at position 3917 of SEQ ID NO: 1563380
uucuuaaauuauuggagag

SEQ ID NO: 1809660 - RNA, 19 nt, Artificial Sequence
  Description of Artificial Sequence: Synthetic oligonucleotide
  Antisense strand to SEQ ID NO: 1809659
cucuccaauaauuuaagaa

SEQ ID NO: 1809661 - RNA, 19 nt, Artificial Sequence
  Description of Artificial Sequence: Synthetic oligonucleotide
  Sense strand starting at position 3919 of SEQ ID NO: 1563380
cuuaaauuauuggagagaa

SEQ ID NO: 1809662 - RNA, 19 nt, Artificial Sequence
  Description of Artificial Sequence: Synthetic oligonucleotide
  Antisense strand to SEQ ID NO: 1809661
uucucuccaauaauuuaag

SEQ ID NO: 1809663 - RNA, 19 nt, Artificial Sequence
  Description of Artificial Sequence: Synthetic oligonucleotide
  Sense strand starting at position 3931 of SEQ ID NO: 1563380
gagagaagccgucagguau

SEQ ID NO: 1809664 - RNA, 19 nt, Artificial Sequence
  Description of Artificial Sequence: Synthetic oligonucleotide
  Antisense strand to SEQ ID NO: 1809663
auaccugacggcuucucuc

SEQ ID NO: 1809665 - RNA, 19 nt, Artificial Sequence
  Description of Artificial Sequence: Synthetic oligonucleotide
  Sense strand starting at position 3970 of SEQ ID NO: 1563380
ggauucugcauguguggau

SEQ ID NO: 1809666 - RNA, 19 nt, Artificial Sequence
  Description of Artificial Sequence: Synthetic oligonucleotide
  Antisense strand to SEQ ID NO: 1809665
auccacacaugcagaaucc

SEQ ID NO: 1809667 - RNA, 19 nt, Artificial Sequence
  Description of Artificial Sequence: Synthetic oligonucleotide
  Sense strand starting at position 3971 of SEQ ID NO: 1563380
gauucugcauguguggauu

SEQ ID NO: 1809668 - RNA, 19 nt, Artificial Sequence
  Description of Artificial Sequence: Synthetic oligonucleotide
  Antisense strand to SEQ ID NO: 1809667
aauccacacaugcagaauc

SEQ ID NO: 1809669 - RNA, 19 nt, Artificial Sequence
  Description of Artificial Sequence: Synthetic oligonucleotide
  Sense strand starting at position 3125 of SEQ ID NO: 1563390
gacagugaggcaggaaauu

SEQ ID NO: 1809670 - RNA, 19 nt, Artificial Sequence
  Description of Artificial Sequence: Synthetic oligonucleotide
  Antisense strand to SEQ ID NO: 1809669
aauuuccugccucacuguc

SEQ ID NO: 1809671 - RNA, 19 nt, Artificial Sequence
  Description of Artificial Sequence: Synthetic oligonucleotide
  Sense strand starting at position 3268 of SEQ ID NO: 1563390
aggacaggcuuccuaggau

SEQ ID NO: 1809672 - RNA, 19 nt, Artificial Sequence
  Description of Artificial Sequence: Synthetic oligonucleotide
  Antisense strand to SEQ ID NO: 1809671
auccuaggaagccuguccu

SEQ ID NO: 1809673 - RNA, 19 nt, Artificial Sequence
  Description of Artificial Sequence: Synthetic oligonucleotide
  Sense strand starting at position 3271 of SEQ ID NO: 1563390
acaggcuuccuaggauauu

SEQ ID NO: 1809674 - RNA, 19 nt, Artificial Sequence
  Description of Artificial Sequence: Synthetic oligonucleotide
  Antisense strand to SEQ ID NO: 1809673
aauauccuaggaagccugu

SEQ ID NO: 1809675 - RNA, 19 nt, Artificial Sequence
  Description of Artificial Sequence: Synthetic oligonucleotide
  Sense strand starting at position 3272 of SEQ ID NO: 1563390
caggcuuccuaggauauuu

SEQ ID NO: 1809676 - RNA, 19 nt, Artificial Sequence
  Description of Artificial Sequence: Synthetic oligonucleotide
  Antisense strand to SEQ ID NO: 1809675
aaauauccuaggaagccug

SEQ ID NO: 1809677 - RNA, 19 nt, Artificial Sequence
  Description of Artificial Sequence: Synthetic oligonucleotide
  Sense strand starting at position 3346 of SEQ ID NO: 1563390
aguaguaaguaauucugaa

SEQ ID NO: 1809678 - RNA, 19 nt, Artificial Sequence
  Description of Artificial Sequence: Synthetic oligonucleotide
  Antisense strand to SEQ ID NO: 1809677
uucagaauuacuuacuacu

SEQ ID NO: 1809679 - RNA, 19 nt, Artificial Sequence
  Description of Artificial Sequence: Synthetic oligonucleotide
  Sense strand starting at position 3350 of SEQ ID NO: 1563390
guaaguaauucugaacauu

SEQ ID NO: 1809680 - RNA, 19 nt, Artificial Sequence
  Description of Artificial Sequence: Synthetic oligonucleotide
  Antisense strand to SEQ ID NO: 1809679
aauguucagaauuacuuac

SEQ ID NO: 1809681 - RNA, 19 nt, Artificial Sequence
  Description of Artificial Sequence: Synthetic oligonucleotide
  Sense strand starting at position 3501 of SEQ ID NO: 1563390
ucaaguugagcaggucauu

SEQ ID NO: 1809682 - RNA, 19 nt, Artificial Sequence
  Description of Artificial Sequence: Synthetic oligonucleotide
  Antisense strand to SEQ ID NO: 1809681
aaugaccugcucaacuuga

SEQ ID NO: 1809683 - RNA, 19 nt, Artificial Sequence
  Description of Artificial Sequence: Synthetic oligonucleotide
  Sense strand starting at position 3507 of SEQ ID NO: 1563390
ugagcaggucauuguuguu

SEQ ID NO: 1809684 - RNA, 19 nt, Artificial Sequence
  Description of Artificial Sequence: Synthetic oligonucleotide
  Antisense strand to SEQ ID NO: 1809683
aacaacaaugaccugcuca

SEQ ID NO: 1809685 - RNA, 19 nt, Artificial Sequence
  Description of Artificial Sequence: Synthetic oligonucleotide
  Sense strand starting at position 3598 of SEQ ID NO: 1563390
ugucacaagucauugguuu

SEQ ID NO: 1809686 - RNA, 19 nt, Artificial Sequence
  Description of Artificial Sequence: Synthetic oligonucleotide
  Antisense strand to SEQ ID NO: 1809685
aaaccaaugacuugugaca

SEQ ID NO: 1809687 - RNA, 19 nt, Artificial Sequence
  Description of Artificial Sequence: Synthetic oligonucleotide
  Sense strand starting at position 3599 of SEQ ID NO: 1563390
gucacaagucauugguuua

SEQ ID NO: 1809688 - RNA, 19 nt, Artificial Sequence
  Description of Artificial Sequence: Synthetic oligonucleotide
  Antisense strand to SEQ ID NO: 1809687
uaaaccaaugacuugugac

SEQ ID NO: 1809689 - RNA, 19 nt, Artificial Sequence
  Description of Artificial Sequence: Synthetic oligonucleotide
  Sense strand starting at position 3602 of SEQ ID NO: 1563390
acaagucauugguuuaaau

SEQ ID NO: 1809690 - RNA, 19 nt, Artificial Sequence
  Description of Artificial Sequence: Synthetic oligonucleotide
  Antisense strand to SEQ ID NO: 1809689
auuuaaaccaaugacuugu

SEQ ID NO: 1809691 - RNA, 19 nt, Artificial Sequence
  Description of Artificial Sequence: Synthetic oligonucleotide
  Sense strand starting at position 3610 of SEQ ID NO: 1563390
uugguuuaaaucuggaaga

SEQ ID NO: 1809692 - RNA, 19 nt, Artificial Sequence
  Description of Artificial Sequence: Synthetic oligonucleotide
  Antisense strand to SEQ ID NO: 1809691
ucuuccagauuuaaaccaa

SEQ ID NO: 1809693 - RNA, 19 nt, Artificial Sequence
  Description of Artificial Sequence: Synthetic oligonucleotide
  Sense strand starting at position 3611 of SEQ ID NO: 1563390
ugguuuaaaucuggaagac

SEQ ID NO: 1809694 - RNA, 19 nt, Artificial Sequence
  Description of Artificial Sequence: Synthetic oligonucleotide
  Antisense strand to SEQ ID NO: 1809693
gucuuccagauuuaaacca

SEQ ID NO: 1809695 - RNA, 19 nt, Artificial Sequence
  Description of Artificial Sequence: Synthetic oligonucleotide
  Sense strand starting at position 3692 of SEQ ID NO: 1563390
cagucugaggucuggaguu

SEQ ID NO: 1809696 - RNA, 19 nt, Artificial Sequence
  Description of Artificial Sequence: Synthetic oligonucleotide
  Antisense strand to SEQ ID NO: 1809695
aacuccagaccucagacug

SEQ ID NO: 1809697 - RNA, 19 nt, Artificial Sequence
  Description of Artificial Sequence: Synthetic oligonucleotide
  Sense strand starting at position 3698 of SEQ ID NO: 1563390
gaggucuggaguugcuuua

SEQ ID NO: 1809698 - RNA, 19 nt, Artificial Sequence
  Description of Artificial Sequence: Synthetic oligonucleotide
  Antisense strand to SEQ ID NO: 1809697
uaaagcaacuccagaccuc

SEQ ID NO: 1809699 - RNA, 19 nt, Artificial Sequence
  Description of Artificial Sequence: Synthetic oligonucleotide
  Sense strand starting at position 3731 of SEQ ID NO: 1563390
augcgauguuuggaaaguu

SEQ ID NO: 1809700 - RNA, 19 nt, Artificial Sequence
  Description of Artificial Sequence: Synthetic oligonucleotide
  Antisense strand to SEQ ID NO: 1809699
aacuuuccaaacaucgcau

SEQ ID NO: 1809701 - RNA, 19 nt, Artificial Sequence
  Description of Artificial Sequence: Synthetic oligonucleotide
  Sense strand starting at position 3747 of SEQ ID NO: 1563390
guuauuuauuucuaugccu

SEQ ID NO: 1809702 - RNA, 19 nt, Artificial Sequence
  Description of Artificial Sequence: Synthetic oligonucleotide
  Antisense strand to SEQ ID NO: 1809701
aggcauagaaauaaauaac

SEQ ID NO: 1809703 - RNA, 19 nt, Artificial Sequence
  Description of Artificial Sequence: Synthetic oligonucleotide
  Sense strand starting at position 3778 of SEQ ID NO: 1563390
uugugaaguuaagauaaug

SEQ ID NO: 1809704 - RNA, 19 nt, Artificial Sequence
  Description of Artificial Sequence: Synthetic oligonucleotide
  Antisense strand to SEQ ID NO: 1809703
cauuaucuuaacuucacaa

SEQ ID NO: 1809705 - RNA, 19 nt, Artificial Sequence
  Description of Artificial Sequence: Synthetic oligonucleotide
  Sense strand starting at position 3789 of SEQ ID NO: 1563390
agauaaugauucucuagcu

SEQ ID NO: 1809706 - RNA, 19 nt, Artificial Sequence
  Description of Artificial Sequence: Synthetic oligonucleotide
  Antisense strand to SEQ ID NO: 1809705
agcuagagaaucauuaucu

SEQ ID NO: 1809707 - RNA, 19 nt, Artificial Sequence
  Description of Artificial Sequence: Synthetic oligonucleotide
  Sense strand starting at position 3811 of SEQ ID NO: 1563390
ucccaagguugaucugaga

SEQ ID NO: 1809708 - RNA, 19 nt, Artificial Sequence
  Description of Artificial Sequence: Synthetic oligonucleotide
  Antisense strand to SEQ ID NO: 1809707
ucucagaucaaccuuggga

SEQ ID NO: 1809709 - RNA, 19 nt, Artificial Sequence
  Description of Artificial Sequence: Synthetic oligonucleotide
  Sense strand starting at position 3814 of SEQ ID NO: 1563390
caagguugaucugagaauc

SEQ ID NO: 1809710 - RNA, 19 nt, Artificial Sequence
  Description of Artificial Sequence: Synthetic oligonucleotide
  Antisense strand to SEQ ID NO: 1809709
gauucucagaucaaccuug

SEQ ID NO: 1809711 - RNA, 19 nt, Artificial Sequence
  Description of Artificial Sequence: Synthetic oligonucleotide
  Sense strand starting at position 3835 of SEQ ID NO: 1563390
guaagauaaugggaugaaa

SEQ ID NO: 1809712 - RNA, 19 nt, Artificial Sequence
  Description of Artificial Sequence: Synthetic oligonucleotide
  Antisense strand to SEQ ID NO: 1809711
uuucaucccauuaucuuac

SEQ ID NO: 1809713 - RNA, 19 nt, Artificial Sequence
  Description of Artificial Sequence: Synthetic oligonucleotide
  Sense strand starting at position 3880 of SEQ ID NO: 1563390
acauguauaugauuacauc

SEQ ID NO: 1809714 - RNA, 19 nt, Artificial Sequence
  Description of Artificial Sequence: Synthetic oligonucleotide
  Antisense strand to SEQ ID NO: 1809713
gauguaaucauauacaugu

SEQ ID NO: 1809715 - RNA, 19 nt, Artificial Sequence
  Description of Artificial Sequence: Synthetic oligonucleotide
  Sense strand starting at position 3916 of SEQ ID NO: 1563390
guucuuaaauuauuggaga

SEQ ID NO: 1809716 - RNA, 19 nt, Artificial Sequence
  Description of Artificial Sequence: Synthetic oligonucleotide
  Antisense strand to SEQ ID NO: 1809715
ucuccaauaauuuaagaac

SEQ ID NO: 1809717 - RNA, 19 nt, Artificial Sequence
  Description of Artificial Sequence: Synthetic oligonucleotide
  Sense strand starting at position 3917 of SEQ ID NO: 1563390
uucuuaaauuauuggagag

SEQ ID NO: 1809718 - RNA, 19 nt, Artificial Sequence
  Description of Artificial Sequence: Synthetic oligonucleotide
  Antisense strand to SEQ ID NO: 1809717
cucuccaauaauuuaagaa

SEQ ID NO: 1809719 - RNA, 19 nt, Artificial Sequence
  Description of Artificial Sequence: Synthetic oligonucleotide
  Sense strand starting at position 3919 of SEQ ID NO: 1563390
cuuaaauuauuggagagaa

SEQ ID NO: 1809720 - RNA, 19 nt, Artificial Sequence
  Description of Artificial Sequence: Synthetic oligonucleotide
  Antisense strand to SEQ ID NO: 1809719
uucucuccaauaauuuaag

SEQ ID NO: 1809721 - RNA, 19 nt, Artificial Sequence
  Description of Artificial Sequence: Synthetic oligonucleotide
  Sense strand starting at position 3931 of SEQ ID NO: 1563390
gagagaagccgucagguau

SEQ ID NO: 1809722 - RNA, 19 nt, Artificial Sequence
  Description of Artificial Sequence: Synthetic oligonucleotide
  Antisense strand to SEQ ID NO: 1809721
auaccugacggcuucucuc

SEQ ID NO: 1809723 - RNA, 19 nt, Artificial Sequence
  Description of Artificial Sequence: Synthetic oligonucleotide
  Sense strand starting at position 3970 of SEQ ID NO: 1563390
ggauucugcauguguggau

SEQ ID NO: 1809724 - RNA, 19 nt, Artificial Sequence
  Description of Artificial Sequence: Synthetic oligonucleotide
  Antisense strand to SEQ ID NO: 1809723
auccacacaugcagaaucc

SEQ ID NO: 1809725 - RNA, 19 nt, Artificial Sequence
  Description of Artificial Sequence: Synthetic oligonucleotide
  Sense strand starting at position 3971 of SEQ ID NO: 1563390
gauucugcauguguggauu

SEQ ID NO: 1809726 - RNA, 19 nt, Artificial Sequence
  Description of Artificial Sequence: Synthetic oligonucleotide
  Antisense strand to SEQ ID NO: 1809725
aauccacacaugcagaauc

SEQ ID NO: 1809727 - RNA, 19 nt, Artificial Sequence
  Description of Artificial Sequence: Synthetic oligonucleotide
  Sense strand starting at position 3125 of SEQ ID NO: 1563400
gacagugaggcaggaaauu

SEQ ID NO: 1809728 - RNA, 19 nt, Artificial Sequence
  Description of Artificial Sequence: Synthetic oligonucleotide
  Antisense strand to SEQ ID NO: 1809727
aauuuccugccucacuguc

SEQ ID NO: 1809729 - RNA, 19 nt, Artificial Sequence
  Description of Artificial Sequence: Synthetic oligonucleotide
  Sense strand starting at position 3268 of SEQ ID NO: 1563400
aggacaggcuuccuaggau

SEQ ID NO: 1809730 - RNA, 19 nt, Artificial Sequence
  Description of Artificial Sequence: Synthetic oligonucleotide
  Antisense strand to SEQ ID NO: 1809729
auccuaggaagccuguccu

SEQ ID NO: 1809731 - RNA, 19 nt, Artificial Sequence
  Description of Artificial Sequence: Synthetic oligonucleotide
  Sense strand starting at position 3271 of SEQ ID NO: 1563400
acaggcuuccuaggauauu

SEQ ID NO: 1809732 - RNA, 19 nt, Artificial Sequence
  Description of Artificial Sequence: Synthetic oligonucleotide
  Antisense strand to SEQ ID NO: 1809731
aauauccuaggaagccugu

SEQ ID NO: 1809733 - RNA, 19 nt, Artificial Sequence
  Description of Artificial Sequence: Synthetic oligonucleotide
  Sense strand starting at position 3272 of SEQ ID NO: 1563400
caggcuuccuaggauauuu

SEQ ID NO: 1809734 - RNA, 19 nt, Artificial Sequence
  Description of Artificial Sequence: Synthetic oligonucleotide
  Antisense strand to SEQ ID NO: 1809733
aaauauccuaggaagccug

SEQ ID NO: 1809735 - RNA, 19 nt, Artificial Sequence
  Description of Artificial Sequence: Synthetic oligonucleotide
  Sense strand starting at position 3346 of SEQ ID NO: 1563400
aguaguaaguaauucugaa

SEQ ID NO: 1809736 - RNA, 19 nt, Artificial Sequence
  Description of Artificial Sequence: Synthetic oligonucleotide
  Antisense strand to SEQ ID NO: 1809735
uucagaauuacuuacuacu

SEQ ID NO: 1809737 - RNA, 19 nt, Artificial Sequence
  Description of Artificial Sequence: Synthetic oligonucleotide
  Sense strand starting at position 3350 of SEQ ID NO: 1563400
guaaguaauucugaacauu

SEQ ID NO: 1809738 - RNA, 19 nt, Artificial Sequence
  Description of Artificial Sequence: Synthetic oligonucleotide
  Antisense strand to SEQ ID NO: 1809737
aauguucagaauuacuuac

SEQ ID NO: 1809739 - RNA, 19 nt, Artificial Sequence
  Description of Artificial Sequence: Synthetic oligonucleotide
  Sense strand starting at position 3501 of SEQ ID NO: 1563400
ucaaguugagcaggucauu

SEQ ID NO: 1809740 - RNA, 19 nt, Artificial Sequence
  Description of Artificial Sequence: Synthetic oligonucleotide
  Antisense strand to SEQ ID NO: 1809739
aaugaccugcucaacuuga

SEQ ID NO: 1809741 - RNA, 19 nt, Artificial Sequence
  Description of Artificial Sequence: Synthetic oligonucleotide
  Sense strand starting at position 3507 of SEQ ID NO: 1563400
ugagcaggucauuguuguu

SEQ ID NO: 1809742 - RNA, 19 nt, Artificial Sequence
  Description of Artificial Sequence: Synthetic oligonucleotide
  Antisense strand to SEQ ID NO: 1809741
aacaacaaugaccugcuca

SEQ ID NO: 1809743 - RNA, 19 nt, Artificial Sequence
  Description of Artificial Sequence: Synthetic oligonucleotide
  Sense strand starting at position 3598 of SEQ ID NO: 1563400
ugucacaagucauugguuu

SEQ ID NO: 1809744 - RNA, 19 nt, Artificial Sequence
  Description of Artificial Sequence: Synthetic oligonucleotide
  Antisense strand to SEQ ID NO: 1809743
aaaccaaugacuugugaca

SEQ ID NO: 1809745 - RNA, 19 nt, Artificial Sequence
  Description of Artificial Sequence: Synthetic oligonucleotide
  Sense strand starting at position 3599 of SEQ ID NO: 1563400
gucacaagucauugguuua

SEQ ID NO: 1809746 - RNA, 19 nt, Artificial Sequence
  Description of Artificial Sequence: Synthetic oligonucleotide
  Antisense strand to SEQ ID NO: 1809745
uaaaccaaugacuugugac

SEQ ID NO: 1809747 - RNA, 19 nt, Artificial Sequence
  Description of Artificial Sequence: Synthetic oligonucleotide
  Sense strand starting at position 3602 of SEQ ID NO: 1563400
acaagucauugguuuaaau

SEQ ID NO: 1809748 - RNA, 19 nt, Artificial Sequence
  Description of Artificial Sequence: Synthetic oligonucleotide
  Antisense strand to SEQ ID NO: 1809747
auuuaaaccaaugacuugu

SEQ ID NO: 1809749 - RNA, 19 nt, Artificial Sequence
  Description of Artificial Sequence: Synthetic oligonucleotide
  Sense strand starting at position 3610 of SEQ ID NO: 1563400
uugguuuaaaucuggaaga

SEQ ID NO: 1809750 - RNA, 19 nt, Artificial Sequence
  Description of Artificial Sequence: Synthetic oligonucleotide
  Antisense strand to SEQ ID NO: 1809749
ucuuccagauuuaaaccaa

SEQ ID NO: 1809751 - RNA, 19 nt, Artificial Sequence
  Description of Artificial Sequence: Synthetic oligonucleotide
  Sense strand starting at position 3611 of SEQ ID NO: 1563400
ugguuuaaaucuggaagac

SEQ ID NO: 1809752 - RNA, 19 nt, Artificial Sequence
  Description of Artificial Sequence: Synthetic oligonucleotide
  Antisense strand to SEQ ID NO: 1809751
gucuuccagauuuaaacca

SEQ ID NO: 1809753 - RNA, 19 nt, Artificial Sequence
  Description of Artificial Sequence: Synthetic oligonucleotide
  Sense strand starting at position 3692 of SEQ ID NO: 1563400
cagucugaggucuggaguu

SEQ ID NO: 1809754 - RNA, 19 nt, Artificial Sequence
  Description of Artificial Sequence: Synthetic oligonucleotide
  Antisense strand to SEQ ID NO: 1809753
aacuccagaccucagacug

SEQ ID NO: 1809755 - RNA, 19 nt, Artificial Sequence
  Description of Artificial Sequence: Synthetic oligonucleotide
  Sense strand starting at position 3698 of SEQ ID NO: 1563400
gaggucuggaguugcuuua

SEQ ID NO: 1809756 - RNA, 19 nt, Artificial Sequence
  Description of Artificial Sequence: Synthetic oligonucleotide
  Antisense strand to SEQ ID NO: 1809755
uaaagcaacuccagaccuc

SEQ ID NO: 1809757 - RNA, 19 nt, Artificial Sequence
  Description of Artificial Sequence: Synthetic oligonucleotide
  Sense strand starting at position 3731 of SEQ ID NO: 1563400
augcgauguuuggaaaguu

SEQ ID NO: 1809758 - RNA, 19 nt, Artificial Sequence
  Description of Artificial Sequence: Synthetic oligonucleotide
  Antisense strand to SEQ ID NO: 1809757
aacuuuccaaacaucgcau

SEQ ID NO: 1809759 - RNA, 19 nt, Artificial Sequence
  Description of Artificial Sequence: Synthetic oligonucleotide
  Sense strand starting at position 3747 of SEQ ID NO: 1563400
guuauuuauuucuaugccu

SEQ ID NO: 1809760 - RNA, 19 nt, Artificial Sequence
  Description of Artificial Sequence: Synthetic oligonucleotide
  Antisense strand to SEQ ID NO: 1809759
aggcauagaaauaaauaac

SEQ ID NO: 1809761 - RNA, 19 nt, Artificial Sequence
  Description of Artificial Sequence: Synthetic oligonucleotide
  Sense strand starting at position 3778 of SEQ ID NO: 1563400
uugugaaguuaagauaaug

SEQ ID NO: 1809762 - RNA, 19 nt, Artificial Sequence
  Description of Artificial Sequence: Synthetic oligonucleotide
  Antisense strand to SEQ ID NO: 1809761
cauuaucuuaacuucacaa

SEQ ID NO: 1809763 - RNA, 19 nt, Artificial Sequence
  Description of Artificial Sequence: Synthetic oligonucleotide
  Sense strand starting at position 3789 of SEQ ID NO: 1563400
agauaaugauucucuagcu

SEQ ID NO: 1809764 - RNA, 19 nt, Artificial Sequence
  Description of Artificial Sequence: Synthetic oligonucleotide
  Antisense strand to SEQ ID NO: 1809763
agcuagagaaucauuaucu

SEQ ID NO: 1809765 - RNA, 19 nt, Artificial Sequence
  Description of Artificial Sequence: Synthetic oligonucleotide
  Sense strand starting at position 3811 of SEQ ID NO: 1563400
ucccaagguugaucugaga

SEQ ID NO: 1809766 - RNA, 19 nt, Artificial Sequence
  Description of Artificial Sequence: Synthetic oligonucleotide
  Antisense strand to SEQ ID NO: 1809765
ucucagaucaaccuuggga

SEQ ID NO: 1809767 - RNA, 19 nt, Artificial Sequence
  Description of Artificial Sequence: Synthetic oligonucleotide
  Sense strand starting at position 3814 of SEQ ID NO: 1563400
caagguugaucugagaauc

SEQ ID NO: 1809768 - RNA, 19 nt, Artificial Sequence
  Description of Artificial Sequence: Synthetic oligonucleotide
  Antisense strand to SEQ ID NO: 1809767
gauucucagaucaaccuug

SEQ ID NO: 1809769 - RNA, 19 nt, Artificial Sequence
  Description of Artificial Sequence: Synthetic oligonucleotide
  Sense strand starting at position 3835 of SEQ ID NO: 1563400
guaagauaaugggaugaaa

SEQ ID NO: 1809770 - RNA, 19 nt, Artificial Sequence
  Description of Artificial Sequence: Synthetic oligonucleotide
  Antisense strand to SEQ ID NO: 1809769
uuucaucccauuaucuuac

SEQ ID NO: 1809771 - RNA, 19 nt, Artificial Sequence
  Description of Artificial Sequence: Synthetic oligonucleotide
  Sense strand starting at position 3880 of SEQ ID NO: 1563400
acauguauaugauuacauc

SEQ ID NO: 1809772 - RNA, 19 nt, Artificial Sequence
  Description of Artificial Sequence: Synthetic oligonucleotide
  Antisense strand to SEQ ID NO: 1809771
gauguaaucauauacaugu

SEQ ID NO: 1809773 - RNA, 19 nt, Artificial Sequence
  Description of Artificial Sequence: Synthetic oligonucleotide
  Sense strand starting at position 3916 of SEQ ID NO: 1563400
guucuuaaauuauuggaga

SEQ ID NO: 1809774 - RNA, 19 nt, Artificial Sequence
  Description of Artificial Sequence: Synthetic oligonucleotide
  Antisense strand to SEQ ID NO: 1809773
ucuccaauaauuuaagaac

SEQ ID NO: 1809775 - RNA, 19 nt, Artificial Sequence
  Description of Artificial Sequence: Synthetic oligonucleotide
  Sense strand starting at position 3917 of SEQ ID NO: 1563400
uucuuaaauuauuggagag

SEQ ID NO: 1809776 - RNA, 19 nt, Artificial Sequence
  Description of Artificial Sequence: Synthetic oligonucleotide
  Antisense strand to SEQ ID NO: 1809775
cucuccaauaauuuaagaa

SEQ ID NO: 1809777 - RNA, 19 nt, Artificial Sequence
  Description of Artificial Sequence: Synthetic oligonucleotide
  Sense strand starting at position 3919 of SEQ ID NO: 1563400
cuuaaauuauuggagagaa

SEQ ID NO: 1809778 - RNA, 19 nt, Artificial Sequence
  Description of Artificial Sequence: Synthetic oligonucleotide
  Antisense strand to SEQ ID NO: 1809777
uucucuccaauaauuuaag

SEQ ID NO: 1809779 - RNA, 19 nt, Artificial Sequence
  Description of Artificial Sequence: Synthetic oligonucleotide
  Sense strand starting at position 3931 of SEQ ID NO: 1563400
gagagaagccgucagguau

SEQ ID NO: 1809780 - RNA, 19 nt, Artificial Sequence
  Description of Artificial Sequence: Synthetic oligonucleotide
  Antisense strand to SEQ ID NO: 1809779
auaccugacggcuucucuc

SEQ ID NO: 1809781 - RNA, 19 nt, Artificial Sequence
  Description of Artificial Sequence: Synthetic oligonucleotide
  Sense strand starting at position 3970 of SEQ ID NO: 1563400
ggauucugcauguguggau

SEQ ID NO: 1809782 - RNA, 19 nt, Artificial Sequence
  Description of Artificial Sequence: Synthetic oligonucleotide
  Antisense strand to SEQ ID NO: 1809781
auccacacaugcagaaucc

SEQ ID NO: 1809783 - RNA, 19 nt, Artificial Sequence
  Description of Artificial Sequence: Synthetic oligonucleotide
  Sense strand starting at position 3971 of SEQ ID NO: 1563400
gauucugcauguguggauu

SEQ ID NO: 1809784 - RNA, 19 nt, Artificial Sequence
  Description of Artificial Sequence: Synthetic oligonucleotide
  Antisense strand to SEQ ID NO: 1809783
aauccacacaugcagaauc

SEQ ID NO: 1809785 - RNA, 19 nt, Artificial Sequence
  Description of Artificial Sequence: Synthetic oligonucleotide
  Sense strand starting at position 3125 of SEQ ID NO: 1563411
gacagugaggcaggaaauu

SEQ ID NO: 1809786 - RNA, 19 nt, Artificial Sequence
  Description of Artificial Sequence: Synthetic oligonucleotide
  Antisense strand to SEQ ID NO: 1809785
aauuuccugccucacuguc

SEQ ID NO: 1809787 - RNA, 19 nt, Artificial Sequence
  Description of Artificial Sequence: Synthetic oligonucleotide
  Sense strand starting at position 3268 of SEQ ID NO: 1563411
aggacaggcuuccuaggau

SEQ ID NO: 1809788 - RNA, 19 nt, Artificial Sequence
  Description of Artificial Sequence: Synthetic oligonucleotide
  Antisense strand to SEQ ID NO: 1809787
auccuaggaagccuguccu

SEQ ID NO: 1809789 - RNA, 19 nt, Artificial Sequence
  Description of Artificial Sequence: Synthetic oligonucleotide
  Sense strand starting at position 3271 of SEQ ID NO: 1563411
acaggcuuccuaggauauu

SEQ ID NO: 1809790 - RNA, 19 nt, Artificial Sequence
  Description of Artificial Sequence: Synthetic oligonucleotide
  Antisense strand to SEQ ID NO: 1809789
aauauccuaggaagccugu

SEQ ID NO: 1809791 - RNA, 19 nt, Artificial Sequence
  Description of Artificial Sequence: Synthetic oligonucleotide
  Sense strand starting at position 3272 of SEQ ID NO: 1563411
caggcuuccuaggauauuu

SEQ ID NO: 1809792 - RNA, 19 nt, Artificial Sequence
  Description of Artificial Sequence: Synthetic oligonucleotide
  Antisense strand to SEQ ID NO: 1809791
aaauauccuaggaagccug

SEQ ID NO: 1809793 - RNA, 19 nt, Artificial Sequence
  Description of Artificial Sequence: Synthetic oligonucleotide
  Sense strand starting at position 3346 of SEQ ID NO: 1563411
aguaguaaguaauucugaa

SEQ ID NO: 1809794 - RNA, 19 nt, Artificial Sequence
  Description of Artificial Sequence: Synthetic oligonucleotide
  Antisense strand to SEQ ID NO: 1809793
uucagaauuacuuacuacu

SEQ ID NO: 1809795 - RNA, 19 nt, Artificial Sequence
  Description of Artificial Sequence: Synthetic oligonucleotide
  Sense strand starting at position 3350 of SEQ ID NO: 1563411
guaaguaauucugaacauu

SEQ ID NO: 1809796 - RNA, 19 nt, Artificial Sequence
  Description of Artificial Sequence: Synthetic oligonucleotide
  Antisense strand to SEQ ID NO: 1809795
aauguucagaauuacuuac

SEQ ID NO: 1809797 - RNA, 19 nt, Artificial Sequence
  Description of Artificial Sequence: Synthetic oligonucleotide
  Sense strand starting at position 3501 of SEQ ID NO: 1563411
ucaaguugagcaggucauu

SEQ ID NO: 1809798 - RNA, 19 nt, Artificial Sequence
  Description of Artificial Sequence: Synthetic oligonucleotide
  Antisense strand to SEQ ID NO: 1809797
aaugaccugcucaacuuga

SEQ ID NO: 1809799 - RNA, 19 nt, Artificial Sequence
  Description of Artificial Sequence: Synthetic oligonucleotide
  Sense strand starting at position 3507 of SEQ ID NO: 1563411
ugagcaggucauuguuguu

SEQ ID NO: 1809800 - RNA, 19 nt, Artificial Sequence
  Description of Artificial Sequence: Synthetic oligonucleotide
  Antisense strand to SEQ ID NO: 1809799
aacaacaaugaccugcuca

SEQ ID NO: 1809801 - RNA, 19 nt, Artificial Sequence
  Description of Artificial Sequence: Synthetic oligonucleotide
  Sense strand starting at position 3598 of SEQ ID NO: 1563411
ugucacaagucauugguuu

SEQ ID NO: 1809802 - RNA, 19 nt, Artificial Sequence
  Description of Artificial Sequence: Synthetic oligonucleotide
  Antisense strand to SEQ ID NO: 1809801
aaaccaaugacuugugaca

SEQ ID NO: 1809803 - RNA, 19 nt, Artificial Sequence
  Description of Artificial Sequence: Synthetic oligonucleotide
  Sense strand starting at position 3599 of SEQ ID NO: 1563411
gucacaagucauugguuua

SEQ ID NO: 1809804 - RNA, 19 nt, Artificial Sequence
  Description of Artificial Sequence: Synthetic oligonucleotide
  Antisense strand to SEQ ID NO: 1809803
uaaaccaaugacuugugac

SEQ ID NO: 1809805 - RNA, 19 nt, Artificial Sequence
  Description of Artificial Sequence: Synthetic oligonucleotide
  Sense strand starting at position 3602 of SEQ ID NO: 1563411
acaagucauugguuuaaau

SEQ ID NO: 1809806 - RNA, 19 nt, Artificial Sequence
  Description of Artificial Sequence: Synthetic oligonucleotide
  Antisense strand to SEQ ID NO: 1809805
auuuaaaccaaugacuugu

SEQ ID NO: 1809807 - RNA, 19 nt, Artificial Sequence
  Description of Artificial Sequence: Synthetic oligonucleotide
  Sense strand starting at position 3610 of SEQ ID NO: 1563411
uugguuuaaaucuggaaga

SEQ ID NO: 1809808 - RNA, 19 nt, Artificial Sequence
  Description of Artificial Sequence: Synthetic oligonucleotide
  Antisense strand to SEQ ID NO: 1809807
ucuuccagauuuaaaccaa

SEQ ID NO: 1809809 - RNA, 19 nt, Artificial Sequence
  Description of Artificial Sequence: Synthetic oligonucleotide
  Sense strand starting at position 3611 of SEQ ID NO: 1563411
ugguuuaaaucuggaagac

SEQ ID NO: 1809810 - RNA, 19 nt, Artificial Sequence
  Description of Artificial Sequence: Synthetic oligonucleotide
  Antisense strand to SEQ ID NO: 1809809
gucuuccagauuuaaacca

SEQ ID NO: 1809811 - RNA, 19 nt, Artificial Sequence
  Description of Artificial Sequence: Synthetic oligonucleotide
  Sense strand starting at position 3692 of SEQ ID NO: 1563411
cagucugaggucuggaguu

SEQ ID NO: 1809812 - RNA, 19 nt, Artificial Sequence
  Description of Artificial Sequence: Synthetic oligonucleotide
  Antisense strand to SEQ ID NO: 1809811
aacuccagaccucagacug

SEQ ID NO: 1809813 - RNA, 19 nt, Artificial Sequence
  Description of Artificial Sequence: Synthetic oligonucleotide
  Sense strand starting at position 3698 of SEQ ID NO: 1563411
gaggucuggaguugcuuua

SEQ ID NO: 1809814 - RNA, 19 nt, Artificial Sequence
  Description of Artificial Sequence: Synthetic oligonucleotide
  Antisense strand to SEQ ID NO: 1809813
uaaagcaacuccagaccuc

SEQ ID NO: 1809815 - RNA, 19 nt, Artificial Sequence
  Description of Artificial Sequence: Synthetic oligonucleotide
  Sense strand starting at position 3731 of SEQ ID NO: 1563411
augcgauguuuggaaaguu

SEQ ID NO: 1809816 - RNA, 19 nt, Artificial Sequence
  Description of Artificial Sequence: Synthetic oligonucleotide
  Antisense strand to SEQ ID NO: 1809815
aacuuuccaaacaucgcau

SEQ ID NO: 1809817 - RNA, 19 nt, Artificial Sequence
  Description of Artificial Sequence: Synthetic oligonucleotide
  Sense strand starting at position 3747 of SEQ ID NO: 1563411
guuauuuauuucuaugccu

SEQ ID NO: 1809818 - RNA, 19 nt, Artificial Sequence
  Description of Artificial Sequence: Synthetic oligonucleotide
  Antisense strand to SEQ ID NO: 1809817
aggcauagaaauaaauaac

SEQ ID NO: 1809819 - RNA, 19 nt, Artificial Sequence
  Description of Artificial Sequence: Synthetic oligonucleotide
  Sense strand starting at position 3778 of SEQ ID NO: 1563411
uugugaaguuaagauaaug

SEQ ID NO: 1809820 - RNA, 19 nt, Artificial Sequence
  Description of Artificial Sequence: Synthetic oligonucleotide
  Antisense strand to SEQ ID NO: 1809819
cauuaucuuaacuucacaa

SEQ ID NO: 1809821 - RNA, 19 nt, Artificial Sequence
  Description of Artificial Sequence: Synthetic oligonucleotide
  Sense strand starting at position 3789 of SEQ ID NO: 1563411
agauaaugauucucuagcu

SEQ ID NO: 1809822 - RNA, 19 nt, Artificial Sequence
  Description of Artificial Sequence: Synthetic oligonucleotide
  Antisense strand to SEQ ID NO: 1809821
agcuagagaaucauuaucu

SEQ ID NO: 1809823 - RNA, 19 nt, Artificial Sequence
  Description of Artificial Sequence: Synthetic oligonucleotide
  Sense strand starting at position 3811 of SEQ ID NO: 1563411
ucccaagguugaucugaga

SEQ ID NO: 1809824 - RNA, 19 nt, Artificial Sequence
  Description of Artificial Sequence: Synthetic oligonucleotide
  Antisense strand to SEQ ID NO: 1809823
ucucagaucaaccuuggga

SEQ ID NO: 1809825 - RNA, 19 nt, Artificial Sequence
  Description of Artificial Sequence: Synthetic oligonucleotide
  Sense strand starting at position 3814 of SEQ ID NO: 1563411
caagguugaucugagaauc

SEQ ID NO: 1809826 - RNA, 19 nt, Artificial Sequence
  Description of Artificial Sequence: Synthetic oligonucleotide
  Antisense strand to SEQ ID NO: 1809825
gauucucagaucaaccuug

SEQ ID NO: 1809827 - RNA, 19 nt, Artificial Sequence
  Description of Artificial Sequence: Synthetic oligonucleotide
  Sense strand starting at position 3835 of SEQ ID NO: 1563411
guaagauaaugggaugaaa

SEQ ID NO: 1809828 - RNA, 19 nt, Artificial Sequence
  Description of Artificial Sequence: Synthetic oligonucleotide
  Antisense strand to SEQ ID NO: 1809827
uuucaucccauuaucuuac

SEQ ID NO: 1809829 - RNA, 19 nt, Artificial Sequence
  Description of Artificial Sequence: Synthetic oligonucleotide
  Sense strand starting at position 3880 of SEQ ID NO: 1563411
acauguauaugauuacauc

SEQ ID NO: 1809830 - RNA, 19 nt, Artificial Sequence
  Description of Artificial Sequence: Synthetic oligonucleotide
  Antisense strand to SEQ ID NO: 1809829
gauguaaucauauacaugu

SEQ ID NO: 1809831 - RNA, 19 nt, Artificial Sequence
  Description of Artificial Sequence: Synthetic oligonucleotide
  Sense strand starting at position 3916 of SEQ ID NO: 1563411
guucuuaaauuauuggaga

SEQ ID NO: 1809832 - RNA, 19 nt, Artificial Sequence
  Description of Artificial Sequence: Synthetic oligonucleotide
  Antisense strand to SEQ ID NO: 1809831
ucuccaauaauuuaagaac

SEQ ID NO: 1809833 - RNA, 19 nt, Artificial Sequence
  Description of Artificial Sequence: Synthetic oligonucleotide
  Sense strand starting at position 3917 of SEQ ID NO: 1563411
uucuuaaauuauuggagag

SEQ ID NO: 1809834 - RNA, 19 nt, Artificial Sequence
  Description of Artificial Sequence: Synthetic oligonucleotide
  Antisense strand to SEQ ID NO: 1809833
cucuccaauaauuuaagaa

SEQ ID NO: 1809835 - RNA, 19 nt, Artificial Sequence
  Description of Artificial Sequence: Synthetic oligonucleotide
  Sense strand starting at position 3919 of SEQ ID NO: 1563411
cuuaaauuauuggagagaa

SEQ ID NO: 1809836 - RNA, 19 nt, Artificial Sequence
  Description of Artificial Sequence: Synthetic oligonucleotide
  Antisense strand to SEQ ID NO: 1809835
uucucuccaauaauuuaag

SEQ ID NO: 1809837 - RNA, 19 nt, Artificial Sequence
  Description of Artificial Sequence: Synthetic oligonucleotide
  Sense strand starting at position 3931 of SEQ ID NO: 1563411
gagagaagccgucagguau

SEQ ID NO: 1809838 - RNA, 19 nt, Artificial Sequence
  Description of Artificial Sequence: Synthetic oligonucleotide
  Antisense strand to SEQ ID NO: 1809837
auaccugacggcuucucuc

SEQ ID NO: 1809839 - RNA, 19 nt, Artificial Sequence
  Description of Artificial Sequence: Synthetic oligonucleotide
  Sense strand starting at position 3970 of SEQ ID NO: 1563411
ggauucugcauguguggau

SEQ ID NO: 1809840 - RNA, 19 nt, Artificial Sequence
  Description of Artificial Sequence: Synthetic oligonucleotide
  Antisense strand to SEQ ID NO: 1809839
auccacacaugcagaaucc

SEQ ID NO: 1809841 - RNA, 19 nt, Artificial Sequence
  Description of Artificial Sequence: Synthetic oligonucleotide
  Sense strand starting at position 3971 of SEQ ID NO: 1563411
gauucugcauguguggauu

SEQ ID NO: 1809842 - RNA, 19 nt, Artificial Sequence
  Description of Artificial Sequence: Synthetic oligonucleotide
  Antisense strand to SEQ ID NO: 1809841
aauccacacaugcagaauc

SEQ ID NO: 1809843 - RNA, 19 nt, Artificial Sequence
  Description of Artificial Sequence: Synthetic oligonucleotide
  Sense strand starting at position 3125 of SEQ ID NO: 1563421
gacagugaggcaggaaauu

SEQ ID NO: 1809844 - RNA, 19 nt, Artificial Sequence
  Description of Artificial Sequence: Synthetic oligonucleotide
  Antisense strand to SEQ ID NO: 1809843
aauuuccugccucacuguc

SEQ ID NO: 1809845 - RNA, 19 nt, Artificial Sequence
  Description of Artificial Sequence: Synthetic oligonucleotide
  Sense strand starting at position 3268 of SEQ ID NO: 1563421
aggacaggcuuccuaggau

SEQ ID NO: 1809846 - RNA, 19 nt, Artificial Sequence
  Description of Artificial Sequence: Synthetic oligonucleotide
  Antisense strand to SEQ ID NO: 1809845
auccuaggaagccuguccu

SEQ ID NO: 1809847 - RNA, 19 nt, Artificial Sequence
  Description of Artificial Sequence: Synthetic oligonucleotide
  Sense strand starting at position 3271 of SEQ ID NO: 1563421
acaggcuuccuaggauauu

SEQ ID NO: 1809848 - RNA, 19 nt, Artificial Sequence
  Description of Artificial Sequence: Synthetic oligonucleotide
  Antisense strand to SEQ ID NO: 1809847
aauauccuaggaagccugu

SEQ ID NO: 1809849 - RNA, 19 nt, Artificial Sequence
  Description of Artificial Sequence: Synthetic oligonucleotide
  Sense strand starting at position 3272 of SEQ ID NO: 1563421
caggcuuccuaggauauuu

SEQ ID NO: 1809850 - RNA, 19 nt, Artificial Sequence
  Description of Artificial Sequence: Synthetic oligonucleotide
  Antisense strand to SEQ ID NO: 1809849
aaauauccuaggaagccug

SEQ ID NO: 1809851 - RNA, 19 nt, Artificial Sequence
  Description of Artificial Sequence: Synthetic oligonucleotide
  Sense strand starting at position 3346 of SEQ ID NO: 1563421
aguaguaaguaauucugaa

SEQ ID NO: 1809852 - RNA, 19 nt, Artificial Sequence
  Description of Artificial Sequence: Synthetic oligonucleotide
  Antisense strand to SEQ ID NO: 1809851
uucagaauuacuuacuacu

SEQ ID NO: 1809853 - RNA, 19 nt, Artificial Sequence
  Description of Artificial Sequence: Synthetic oligonucleotide
  Sense strand starting at position 3350 of SEQ ID NO: 1563421
guaaguaauucugaacauu

SEQ ID NO: 1809854 - RNA, 19 nt, Artificial Sequence
  Description of Artificial Sequence: Synthetic oligonucleotide
  Antisense strand to SEQ ID NO: 1809853
aauguucagaauuacuuac

SEQ ID NO: 1809855 - RNA, 19 nt, Artificial Sequence
  Description of Artificial Sequence: Synthetic oligonucleotide
  Sense strand starting at position 3501 of SEQ ID NO: 1563421
ucaaguugagcaggucauu

SEQ ID NO: 1809856 - RNA, 19 nt, Artificial Sequence
  Description of Artificial Sequence: Synthetic oligonucleotide
  Antisense strand to SEQ ID NO: 1809855
aaugaccugcucaacuuga

SEQ ID NO: 1809857 - RNA, 19 nt, Artificial Sequence
  Description of Artificial Sequence: Synthetic oligonucleotide
  Sense strand starting at position 3507 of SEQ ID NO: 1563421
ugagcaggucauuguuguu

SEQ ID NO: 1809858 - RNA, 19 nt, Artificial Sequence
  Description of Artificial Sequence: Synthetic oligonucleotide
  Antisense strand to SEQ ID NO: 1809857
aacaacaaugaccugcuca

SEQ ID NO: 1809859 - RNA, 19 nt, Artificial Sequence
  Description of Artificial Sequence: Synthetic oligonucleotide
  Sense strand starting at position 3598 of SEQ ID NO: 1563421
ugucacaagucauugguuu

SEQ ID NO: 1809860 - RNA, 19 nt, Artificial Sequence
  Description of Artificial Sequence: Synthetic oligonucleotide
  Antisense strand to SEQ ID NO: 1809859
aaaccaaugacuugugaca

SEQ ID NO: 1809861 - RNA, 19 nt, Artificial Sequence
  Description of Artificial Sequence: Synthetic oligonucleotide
  Sense strand starting at position 3599 of SEQ ID NO: 1563421
gucacaagucauugguuua

SEQ ID NO: 1809862 - RNA, 19 nt, Artificial Sequence
  Description of Artificial Sequence: Synthetic oligonucleotide
  Antisense strand to SEQ ID NO: 1809861
uaaaccaaugacuugugac

SEQ ID NO: 1809863 - RNA, 19 nt, Artificial Sequence
  Description of Artificial Sequence: Synthetic oligonucleotide
  Sense strand starting at position 3602 of SEQ ID NO: 1563421
acaagucauugguuuaaau

SEQ ID NO: 1809864 - RNA, 19 nt, Artificial Sequence
  Description of Artificial Sequence: Synthetic oligonucleotide
  Antisense strand to SEQ ID NO: 1809863
auuuaaaccaaugacuugu

SEQ ID NO: 1809865 - RNA, 19 nt, Artificial Sequence
  Description of Artificial Sequence: Synthetic oligonucleotide
  Sense strand starting at position 3610 of SEQ ID NO: 1563421
uugguuuaaaucuggaaga

SEQ ID NO: 1809866 - RNA, 19 nt, Artificial Sequence
  Description of Artificial Sequence: Synthetic oligonucleotide
  Antisense strand to SEQ ID NO: 1809865
ucuuccagauuuaaaccaa

SEQ ID NO: 1809867 - RNA, 19 nt, Artificial Sequence
  Description of Artificial Sequence: Synthetic oligonucleotide
  Sense strand starting at position 3611 of SEQ ID NO: 1563421
ugguuuaaaucuggaagac

SEQ ID NO: 1809868 - RNA, 19 nt, Artificial Sequence
  Description of Artificial Sequence: Synthetic oligonucleotide
  Antisense strand to SEQ ID NO: 1809867
gucuuccagauuuaaacca

SEQ ID NO: 1809869 - RNA, 19 nt, Artificial Sequence
  Description of Artificial Sequence: Synthetic oligonucleotide
  Sense strand starting at position 3692 of SEQ ID NO: 1563421
cagucugaggucuggaguu

SEQ ID NO: 1809870 - RNA, 19 nt, Artificial Sequence
  Description of Artificial Sequence: Synthetic oligonucleotide
  Antisense strand to SEQ ID NO: 1809869
aacuccagaccucagacug

SEQ ID NO: 1809871 - RNA, 19 nt, Artificial Sequence
  Description of Artificial Sequence: Synthetic oligonucleotide
  Sense strand starting at position 3698 of SEQ ID NO: 1563421
gaggucuggaguugcuuua

SEQ ID NO: 1809872 - RNA, 19 nt, Artificial Sequence
  Description of Artificial Sequence: Synthetic oligonucleotide
  Antisense strand to SEQ ID NO: 1809871
uaaagcaacuccagaccuc

SEQ ID NO: 1809873 - RNA, 19 nt, Artificial Sequence
  Description of Artificial Sequence: Synthetic oligonucleotide
  Sense strand starting at position 3731 of SEQ ID NO: 1563421
augcgauguuuggaaaguu

SEQ ID NO: 1809874 - RNA, 19 nt, Artificial Sequence
  Description of Artificial Sequence: Synthetic oligonucleotide
  Antisense strand to SEQ ID NO: 1809873
aacuuuccaaacaucgcau

SEQ ID NO: 1809875 - RNA, 19 nt, Artificial Sequence
  Description of Artificial Sequence: Synthetic oligonucleotide
  Sense strand starting at position 3747 of SEQ ID NO: 1563421
guuauuuauuucuaugccu

SEQ ID NO: 1809876 - RNA, 19 nt, Artificial Sequence
  Description of Artificial Sequence: Synthetic oligonucleotide
  Antisense strand to SEQ ID NO: 1809875
aggcauagaaauaaauaac

SEQ ID NO: 1809877 - RNA, 19 nt, Artificial Sequence
  Description of Artificial Sequence: Synthetic oligonucleotide
  Sense strand starting at position 3778 of SEQ ID NO: 1563421
uugugaaguuaagauaaug

SEQ ID NO: 1809878 - RNA, 19 nt, Artificial Sequence
  Description of Artificial Sequence: Synthetic oligonucleotide
  Antisense strand to SEQ ID NO: 1809877
cauuaucuuaacuucacaa

SEQ ID NO: 1809879 - RNA, 19 nt, Artificial Sequence
  Description of Artificial Sequence: Synthetic oligonucleotide
  Sense strand starting at position 3789 of SEQ ID NO: 1563421
agauaaugauucucuagcu

SEQ ID NO: 1809880 - RNA, 19 nt, Artificial Sequence
  Description of Artificial Sequence: Synthetic oligonucleotide
  Antisense strand to SEQ ID NO: 1809879
agcuagagaaucauuaucu

SEQ ID NO: 1809881 - RNA, 19 nt, Artificial Sequence
  Description of Artificial Sequence: Synthetic oligonucleotide
  Sense strand starting at position 3811 of SEQ ID NO: 1563421
ucccaagguugaucugaga

SEQ ID NO: 1809882 - RNA, 19 nt, Artificial Sequence
  Description of Artificial Sequence: Synthetic oligonucleotide
  Antisense strand to SEQ ID NO: 1809881
ucucagaucaaccuuggga

SEQ ID NO: 1809883 - RNA, 19 nt, Artificial Sequence
  Description of Artificial Sequence: Synthetic oligonucleotide
  Sense strand starting at position 3814 of SEQ ID NO: 1563421
caagguugaucugagaauc

SEQ ID NO: 1809884 - RNA, 19 nt, Artificial Sequence
  Description of Artificial Sequence: Synthetic oligonucleotide
  Antisense strand to SEQ ID NO: 1809883
gauucucagaucaaccuug

SEQ ID NO: 1809885 - RNA, 19 nt, Artificial Sequence
  Description of Artificial Sequence: Synthetic oligonucleotide
  Sense strand starting at position 3835 of SEQ ID NO: 1563421
guaagauaaugggaugaaa

SEQ ID NO: 1809886 - RNA, 19 nt, Artificial Sequence
  Description of Artificial Sequence: Synthetic oligonucleotide
  Antisense strand to SEQ ID NO: 1809885
uuucaucccauuaucuuac

SEQ ID NO: 1809887 - RNA, 19 nt, Artificial Sequence
  Description of Artificial Sequence: Synthetic oligonucleotide
  Sense strand starting at position 3880 of SEQ ID NO: 1563421
acauguauaugauuacauc

SEQ ID NO: 1809888 - RNA, 19 nt, Artificial Sequence
  Description of Artificial Sequence: Synthetic oligonucleotide
  Antisense strand to SEQ ID NO: 1809887
gauguaaucauauacaugu

SEQ ID NO: 1809889 - RNA, 19 nt, Artificial Sequence
  Description of Artificial Sequence: Synthetic oligonucleotide
  Sense strand starting at position 3916 of SEQ ID NO: 1563421
guucuuaaauuauuggaga

SEQ ID NO: 1809890 - RNA, 19 nt, Artificial Sequence
  Description of Artificial Sequence: Synthetic oligonucleotide
  Antisense strand to SEQ ID NO: 1809889
ucuccaauaauuuaagaac

SEQ ID NO: 1809891 - RNA, 19 nt, Artificial Sequence
  Description of Artificial Sequence: Synthetic oligonucleotide
  Sense strand starting at position 3917 of SEQ ID NO: 1563421
uucuuaaauuauuggagag

SEQ ID NO: 1809892 - RNA, 19 nt, Artificial Sequence
  Description of Artificial Sequence: Synthetic oligonucleotide
  Antisense strand to SEQ ID NO: 1809891
cucuccaauaauuuaagaa

SEQ ID NO: 1809893 - RNA, 19 nt, Artificial Sequence
  Description of Artificial Sequence: Synthetic oligonucleotide
  Sense strand starting at position 3919 of SEQ ID NO: 1563421
cuuaaauuauuggagagaa

SEQ ID NO: 1809894 - RNA, 19 nt, Artificial Sequence
  Description of Artificial Sequence: Synthetic oligonucleotide
  Antisense strand to SEQ ID NO: 1809893
uucucuccaauaauuuaag

SEQ ID NO: 1809895 - RNA, 19 nt, Artificial Sequence
  Description of Artificial Sequence: Synthetic oligonucleotide
  Sense strand starting at position 3931 of SEQ ID NO: 1563421
gagagaagccgucagguau

SEQ ID NO: 1809896 - RNA, 19 nt, Artificial Sequence
  Description of Artificial Sequence: Synthetic oligonucleotide
  Antisense strand to SEQ ID NO: 1809895
auaccugacggcuucucuc

SEQ ID NO: 1809897 - RNA, 19 nt, Artificial Sequence
  Description of Artificial Sequence: Synthetic oligonucleotide
  Sense strand starting at position 3970 of SEQ ID NO: 1563421
ggauucugcauguguggau

SEQ ID NO: 1809898 - RNA, 19 nt, Artificial Sequence
  Description of Artificial Sequence: Synthetic oligonucleotide
  Antisense strand to SEQ ID NO: 1809897
auccacacaugcagaaucc

SEQ ID NO: 1809899 - RNA, 19 nt, Artificial Sequence
  Description of Artificial Sequence: Synthetic oligonucleotide
  Sense strand starting at position 3971 of SEQ ID NO: 1563421
gauucugcauguguggauu

SEQ ID NO: 1809900 - RNA, 19 nt, Artificial Sequence
  Description of Artificial Sequence: Synthetic oligonucleotide
  Antisense strand to SEQ ID NO: 1809899
aauccacacaugcagaauc

SEQ ID NO: 1809901 - RNA, 19 nt, Artificial Sequence
  Description of Artificial Sequence: Synthetic oligonucleotide
  Sense strand starting at position 381 of SEQ ID NO: 1563422
ucugaaucaucgggucuga

SEQ ID NO: 1809902 - RNA, 19 nt, Artificial Sequence
  Description of Artificial Sequence: Synthetic oligonucleotide
  Antisense strand to SEQ ID NO: 1809901
ucagacccgaugauucaga

SEQ ID NO: 1809903 - RNA, 19 nt, Artificial Sequence
  Description of Artificial Sequence: Synthetic oligonucleotide
  Sense strand starting at position 391 of SEQ ID NO: 1563422
cgggucugaucucauucua

SEQ ID NO: 1809904 - RNA, 19 nt, Artificial Sequence
  Description of Artificial Sequence: Synthetic oligonucleotide
  Antisense strand to SEQ ID NO: 1809903
uagaaugagaucagacccg

SEQ ID NO: 1809905 - RNA, 19 nt, Artificial Sequence
  Description of Artificial Sequence: Synthetic oligonucleotide
  Sense strand starting at position 398 of SEQ ID NO: 1563422
gaucucauucuaugguguu

SEQ ID NO: 1809906 - RNA, 19 nt, Artificial Sequence
  Description of Artificial Sequence: Synthetic oligonucleotide
  Antisense strand to SEQ ID NO: 1809905
aacaccauagaaugagauc

SEQ ID NO: 1809907 - RNA, 19 nt, Artificial Sequence
  Description of Artificial Sequence: Synthetic oligonucleotide
  Sense strand starting at position 399 of SEQ ID NO: 1563422
aucucauucuaugguguuu

SEQ ID NO: 1809908 - RNA, 19 nt, Artificial Sequence
  Description of Artificial Sequence: Synthetic oligonucleotide
  Antisense strand to SEQ ID NO: 1809907
aaacaccauagaaugagau

SEQ ID NO: 1809909 - RNA, 19 nt, Artificial Sequence
  Description of Artificial Sequence: Synthetic oligonucleotide
  Sense strand starting at position 691 of SEQ ID NO: 1563422
cgcaaauggcaucgaugau

SEQ ID NO: 1809910 - RNA, 19 nt, Artificial Sequence
  Description of Artificial Sequence: Synthetic oligonucleotide
  Antisense strand to SEQ ID NO: 1809909
aucaucgaugccauuugcg

SEQ ID NO: 1809911 - RNA, 19 nt, Artificial Sequence
  Description of Artificial Sequence: Synthetic oligonucleotide
  Sense strand starting at position 692 of SEQ ID NO: 1563422
gcaaauggcaucgaugauc

SEQ ID NO: 1809912 - RNA, 19 nt, Artificial Sequence
  Description of Artificial Sequence: Synthetic oligonucleotide
  Antisense strand to SEQ ID NO: 1809911
gaucaucgaugccauuugc

SEQ ID NO: 1809913 - RNA, 19 nt, Artificial Sequence
  Description of Artificial Sequence: Synthetic oligonucleotide
  Sense strand starting at position 697 of SEQ ID NO: 1563422
uggcaucgaugaucucaga

SEQ ID NO: 1809914 - RNA, 19 nt, Artificial Sequence
  Description of Artificial Sequence: Synthetic oligonucleotide
  Antisense strand to SEQ ID NO: 1809913
ucugagaucaucgaugcca

SEQ ID NO: 1809915 - RNA, 19 nt, Artificial Sequence
  Description of Artificial Sequence: Synthetic oligonucleotide
  Sense strand starting at position 700 of SEQ ID NO: 1563422
caucgaugaucucagaucu

SEQ ID NO: 1809916 - RNA, 19 nt, Artificial Sequence
  Description of Artificial Sequence: Synthetic oligonucleotide
  Antisense strand to SEQ ID NO: 1809915
agaucugagaucaucgaug

SEQ ID NO: 1809917 - RNA, 19 nt, Artificial Sequence
  Description of Artificial Sequence: Synthetic oligonucleotide
  Sense strand starting at position 772 of SEQ ID NO: 1563422
ucauuagagaauugggcuu

SEQ ID NO: 1809918 - RNA, 19 nt, Artificial Sequence
  Description of Artificial Sequence: Synthetic oligonucleotide
  Antisense strand to SEQ ID NO: 1809917
aagcccaauucucuaauga

SEQ ID NO: 1809919 - RNA, 19 nt, Artificial Sequence
  Description of Artificial Sequence: Synthetic oligonucleotide
  Sense strand starting at position 1246 of SEQ ID NO: 1563422
ggaggguugucccagaggu

SEQ ID NO: 1809920 - RNA, 19 nt, Artificial Sequence
  Description of Artificial Sequence: Synthetic oligonucleotide
  Antisense strand to SEQ ID NO: 1809919
accucugggacaacccucc

SEQ ID NO: 1809921 - RNA, 19 nt, Artificial Sequence
  Description of Artificial Sequence: Synthetic oligonucleotide
  Sense strand starting at position 1321 of SEQ ID NO: 1563422
uggauguggucguugugau

SEQ ID NO: 1809922 - RNA, 19 nt, Artificial Sequence
  Description of Artificial Sequence: Synthetic oligonucleotide
  Antisense strand to SEQ ID NO: 1809921
aucacaacgaccacaucca

SEQ ID NO: 1809923 - RNA, 19 nt, Artificial Sequence
  Description of Artificial Sequence: Synthetic oligonucleotide
  Sense strand starting at position 1322 of SEQ ID NO: 1563422
ggauguggucguugugaua

SEQ ID NO: 1809924 - RNA, 19 nt, Artificial Sequence
  Description of Artificial Sequence: Synthetic oligonucleotide
  Antisense strand to SEQ ID NO: 1809923
uaucacaacgaccacaucc

SEQ ID NO: 1809925 - RNA, 19 nt, Artificial Sequence
  Description of Artificial Sequence: Synthetic oligonucleotide
  Sense strand starting at position 474 of SEQ ID NO: 1563423
ccagcuuacgaauauuaac

SEQ ID NO: 1809926 - RNA, 19 nt, Artificial Sequence
  Description of Artificial Sequence: Synthetic oligonucleotide
  Antisense strand to SEQ ID NO: 1809925
guuaauauucguaagcugg

SEQ ID NO: 1809927 - RNA, 19 nt, Artificial Sequence
  Description of Artificial Sequence: Synthetic oligonucleotide
  Sense strand starting at position 524 of SEQ ID NO: 1563423
gagugccuugcacaagagu

SEQ ID NO: 1809928 - RNA, 19 nt, Artificial Sequence
  Description of Artificial Sequence: Synthetic oligonucleotide
  Antisense strand to SEQ ID NO: 1809927
acucuugugcaaggcacuc

SEQ ID NO: 1809929 - RNA, 19 nt, Artificial Sequence
  Description of Artificial Sequence: Synthetic oligonucleotide
  Sense strand starting at position 533 of SEQ ID NO: 1563423
gcacaagaguguguaaaug

SEQ ID NO: 1809930 - RNA, 19 nt, Artificial Sequence
  Description of Artificial Sequence: Synthetic oligonucleotide
  Antisense strand to SEQ ID NO: 1809929
cauuuacacacucuugugc

SEQ ID NO: 1809931 - RNA, 19 nt, Artificial Sequence
  Description of Artificial Sequence: Synthetic oligonucleotide
  Sense strand starting at position 570 of SEQ ID NO: 1563423
acauaugagucuuuaagcu

SEQ ID NO: 1809932 - RNA, 19 nt, Artificial Sequence
  Description of Artificial Sequence: Synthetic oligonucleotide
  Antisense strand to SEQ ID NO: 1809931
agcuuaaagacucauaugu

SEQ ID NO: 1809933 - RNA, 19 nt, Artificial Sequence
  Description of Artificial Sequence: Synthetic oligonucleotide
  Sense strand starting at position 781 of SEQ ID NO: 1563423
cuagcugaucagcaauacu

SEQ ID NO: 1809934 - RNA, 19 nt, Artificial Sequence
  Description of Artificial Sequence: Synthetic oligonucleotide
  Antisense strand to SEQ ID NO: 1809933
aguauugcugaucagcuag

SEQ ID NO: 1809935 - RNA, 19 nt, Artificial Sequence
  Description of Artificial Sequence: Synthetic oligonucleotide
  Sense strand starting at position 888 of SEQ ID NO: 1563423
uacauucccguuugggaua

SEQ ID NO: 1809936 - RNA, 19 nt, Artificial Sequence
  Description of Artificial Sequence: Synthetic oligonucleotide
  Antisense strand to SEQ ID NO: 1809935
uaucccaaacgggaaugua

SEQ ID NO: 1809937 - RNA, 19 nt, Artificial Sequence
  Description of Artificial Sequence: Synthetic oligonucleotide
  Sense strand starting at position 934 of SEQ ID NO: 1563423
gaguuucucgccuacugga

SEQ ID NO: 1809938 - RNA, 19 nt, Artificial Sequence
  Description of Artificial Sequence: Synthetic oligonucleotide
  Antisense strand to SEQ ID NO: 1809937
uccaguaggcgagaaacuc

SEQ ID NO: 1809939 - RNA, 19 nt, Artificial Sequence
  Description of Artificial Sequence: Synthetic oligonucleotide
  Sense strand starting at position 939 of SEQ ID NO: 1563423
ucucgccuacuggaaauau

SEQ ID NO: 1809940 - RNA, 19 nt, Artificial Sequence
  Description of Artificial Sequence: Synthetic oligonucleotide
  Antisense strand to SEQ ID NO: 1809939
auauuuccaguaggcgaga

SEQ ID NO: 1809941 - RNA, 19 nt, Artificial Sequence
  Description of Artificial Sequence: Synthetic oligonucleotide
  Sense strand starting at position 1067 of SEQ ID NO: 1563423
guugguucucagggaauug

SEQ ID NO: 1809942 - RNA, 19 nt, Artificial Sequence
  Description of Artificial Sequence: Synthetic oligonucleotide
  Antisense strand to SEQ ID NO: 1809941
caauucccugagaaccaac

SEQ ID NO: 1809943 - RNA, 19 nt, Artificial Sequence
  Description of Artificial Sequence: Synthetic oligonucleotide
  Sense strand starting at position 1068 of SEQ ID NO: 1563423
uugguucucagggaauugu

SEQ ID NO: 1809944 - RNA, 19 nt, Artificial Sequence
  Description of Artificial Sequence: Synthetic oligonucleotide
  Antisense strand to SEQ ID NO: 1809943
acaauucccugagaaccaa

SEQ ID NO: 1809945 - RNA, 19 nt, Artificial Sequence
  Description of Artificial Sequence: Synthetic oligonucleotide
  Sense strand starting at position 1641 of SEQ ID NO: 1563423
gguucuuguggcuacuaaa

SEQ ID NO: 1809946 - RNA, 19 nt, Artificial Sequence
  Description of Artificial Sequence: Synthetic oligonucleotide
  Antisense strand to SEQ ID NO: 1809945
uuuaguagccacaagaacc

SEQ ID NO: 1809947 - RNA, 19 nt, Artificial Sequence
  Description of Artificial Sequence: Synthetic oligonucleotide
  Sense strand starting at position 1783 of SEQ ID NO: 1563423
uuggguucccugggaggau

SEQ ID NO: 1809948 - RNA, 19 nt, Artificial Sequence
  Description of Artificial Sequence: Synthetic oligonucleotide
  Antisense strand to SEQ ID NO: 1809947
auccucccagggaacccaa

SEQ ID NO: 1809949 - RNA, 19 nt, Artificial Sequence
  Description of Artificial Sequence: Synthetic oligonucleotide
  Sense strand starting at position 1848 of SEQ ID NO: 1563423
cuuguauucguggugcuua

SEQ ID NO: 1809950 - RNA, 19 nt, Artificial Sequence
  Description of Artificial Sequence: Synthetic oligonucleotide
  Antisense strand to SEQ ID NO: 1809949
uaagcaccacgaauacaag

SEQ ID NO: 1809951 - RNA, 19 nt, Artificial Sequence
  Description of Artificial Sequence: Synthetic oligonucleotide
  Sense strand starting at position 1893 of SEQ ID NO: 1563423
ggucaauaguuacuccuca

SEQ ID NO: 1809952 - RNA, 19 nt, Artificial Sequence
  Description of Artificial Sequence: Synthetic oligonucleotide
  Antisense strand to SEQ ID NO: 1809951
ugaggaguaacuauugacc

SEQ ID NO: 1809953 - RNA, 19 nt, Artificial Sequence
  Description of Artificial Sequence: Synthetic oligonucleotide
  Sense strand starting at position 1938 of SEQ ID NO: 1563423
gcaucauguggguaggcaa

SEQ ID NO: 1809954 - RNA, 19 nt, Artificial Sequence
  Description of Artificial Sequence: Synthetic oligonucleotide
  Antisense strand to SEQ ID NO: 1809953
uugccuacccacaugaugc

SEQ ID NO: 1809955 - RNA, 19 nt, Artificial Sequence
  Description of Artificial Sequence: Synthetic oligonucleotide
  Sense strand starting at position 1971 of SEQ ID NO: 1563423
caaguacgugucuugugua

SEQ ID NO: 1809956 - RNA, 19 nt, Artificial Sequence
  Description of Artificial Sequence: Synthetic oligonucleotide
  Antisense strand to SEQ ID NO: 1809955
uacacaagacacguacuug

SEQ ID NO: 1809957 - RNA, 19 nt, Artificial Sequence
  Description of Artificial Sequence: Synthetic oligonucleotide
  Sense strand starting at position 1977 of SEQ ID NO: 1563423
cgugucuuguguacuagga

SEQ ID NO: 1809958 - RNA, 19 nt, Artificial Sequence
  Description of Artificial Sequence: Synthetic oligonucleotide
  Antisense strand to SEQ ID NO: 1809957
uccuaguacacaagacacg

SEQ ID NO: 1809959 - RNA, 19 nt, Artificial Sequence
  Description of Artificial Sequence: Synthetic oligonucleotide
  Sense strand starting at position 2070 of SEQ ID NO: 1563423
ccugguuaugcuuacauua

SEQ ID NO: 1809960 - RNA, 19 nt, Artificial Sequence
  Description of Artificial Sequence: Synthetic oligonucleotide
  Antisense strand to SEQ ID NO: 1809959
uaauguaagcauaaccagg

SEQ ID NO: 1809961 - RNA, 19 nt, Artificial Sequence
  Description of Artificial Sequence: Synthetic oligonucleotide
  Sense strand starting at position 2356 of SEQ ID NO: 1563423
uggauugcacuuuacaaua

SEQ ID NO: 1809962 - RNA, 19 nt, Artificial Sequence
  Description of Artificial Sequence: Synthetic oligonucleotide
  Antisense strand to SEQ ID NO: 1809961
uauuguaaagugcaaucca

SEQ ID NO: 1809963 - RNA, 19 nt, Artificial Sequence
  Description of Artificial Sequence: Synthetic oligonucleotide
  Sense strand starting at position 2367 of SEQ ID NO: 1563423
uuacaauagcauggucaga

SEQ ID NO: 1809964 - RNA, 19 nt, Artificial Sequence
  Description of Artificial Sequence: Synthetic oligonucleotide
  Antisense strand to SEQ ID NO: 1809963
ucugaccaugcuauuguaa

SEQ ID NO: 1809965 - RNA, 19 nt, Artificial Sequence
  Description of Artificial Sequence: Synthetic oligonucleotide
  Sense strand starting at position 2369 of SEQ ID NO: 1563423
acaauagcauggucagagu

SEQ ID NO: 1809966 - RNA, 19 nt, Artificial Sequence
  Description of Artificial Sequence: Synthetic oligonucleotide
  Antisense strand to SEQ ID NO: 1809965
acucugaccaugcuauugu

SEQ ID NO: 1809967 - RNA, 19 nt, Artificial Sequence
  Description of Artificial Sequence: Synthetic oligonucleotide
  Sense strand starting at position 2408 of SEQ ID NO: 1563423
aguugagaaagauguugga

SEQ ID NO: 1809968 - RNA, 19 nt, Artificial Sequence
  Description of Artificial Sequence: Synthetic oligonucleotide
  Antisense strand to SEQ ID NO: 1809967
uccaacaucuuucucaacu

SEQ ID NO: 1809969 - RNA, 19 nt, Artificial Sequence
  Description of Artificial Sequence: Synthetic oligonucleotide
  Sense strand starting at position 2554 of SEQ ID NO: 1563423
gcuagaagagugggaagua

SEQ ID NO: 1809970 - RNA, 19 nt, Artificial Sequence
  Description of Artificial Sequence: Synthetic oligonucleotide
  Antisense strand to SEQ ID NO: 1809969
uacuucccacucuucuagc

SEQ ID NO: 1809971 - RNA, 19 nt, Artificial Sequence
  Description of Artificial Sequence: Synthetic oligonucleotide
  Sense strand starting at position 2645 of SEQ ID NO: 1563423
guccaugacacguaaaguc

SEQ ID NO: 1809972 - RNA, 19 nt, Artificial Sequence
  Description of Artificial Sequence: Synthetic oligonucleotide
  Antisense strand to SEQ ID NO: 1809971
gacuuuacgugucauggac

SEQ ID NO: 1809973 - RNA, 19 nt, Artificial Sequence
  Description of Artificial Sequence: Synthetic oligonucleotide
  Sense strand starting at position 2654 of SEQ ID NO: 1563423
acguaaagucccugaagga

SEQ ID NO: 1809974 - RNA, 19 nt, Artificial Sequence
  Description of Artificial Sequence: Synthetic oligonucleotide
  Antisense strand to SEQ ID NO: 1809973
uccuucagggacuuuacgu

SEQ ID NO: 1809975 - RNA, 19 nt, Artificial Sequence
  Description of Artificial Sequence: Synthetic oligonucleotide
  Sense strand starting at position 2655 of SEQ ID NO: 1563423
cguaaagucccugaaggau

SEQ ID NO: 1809976 - RNA, 19 nt, Artificial Sequence
  Description of Artificial Sequence: Synthetic oligonucleotide
  Antisense strand to SEQ ID NO: 1809975
auccuucagggacuuuacg

SEQ ID NO: 1809977 - RNA, 19 nt, Artificial Sequence
  Description of Artificial Sequence: Synthetic oligonucleotide
  Sense strand starting at position 2788 of SEQ ID NO: 1563423
gaugaaaccuguuugucuu

SEQ ID NO: 1809978 - RNA, 19 nt, Artificial Sequence
  Description of Artificial Sequence: Synthetic oligonucleotide
  Antisense strand to SEQ ID NO: 1809977
aagacaaacagguuucauc

SEQ ID NO: 1809979 - RNA, 19 nt, Artificial Sequence
  Description of Artificial Sequence: Synthetic oligonucleotide
  Sense strand starting at position 2827 of SEQ ID NO: 1563423
agguaagagcauugcugaa

SEQ ID NO: 1809980 - RNA, 19 nt, Artificial Sequence
  Description of Artificial Sequence: Synthetic oligonucleotide
  Antisense strand to SEQ ID NO: 1809979
uucagcaaugcucuuaccu

SEQ ID NO: 1809981 - RNA, 19 nt, Artificial Sequence
  Description of Artificial Sequence: Synthetic oligonucleotide
  Sense strand starting at position 2829 of SEQ ID NO: 1563423
guaagagcauugcugaaga

SEQ ID NO: 1809982 - RNA, 19 nt, Artificial Sequence
  Description of Artificial Sequence: Synthetic oligonucleotide
  Antisense strand to SEQ ID NO: 1809981
ucuucagcaaugcucuuac

SEQ ID NO: 1809983 - RNA, 19 nt, Artificial Sequence
  Description of Artificial Sequence: Synthetic oligonucleotide
  Sense strand starting at position 2831 of SEQ ID NO: 1563423
aagagcauugcugaagauu

SEQ ID NO: 1809984 - RNA, 19 nt, Artificial Sequence
  Description of Artificial Sequence: Synthetic oligonucleotide
  Antisense strand to SEQ ID NO: 1809983
aaucuucagcaaugcucuu

SEQ ID NO: 1809985 - RNA, 19 nt, Artificial Sequence
  Description of Artificial Sequence: Synthetic oligonucleotide
  Sense strand starting at position 2842 of SEQ ID NO: 1563423
ugaagauuaucaucugguu

SEQ ID NO: 1809986 - RNA, 19 nt, Artificial Sequence
  Description of Artificial Sequence: Synthetic oligonucleotide
  Antisense strand to SEQ ID NO: 1809985
aaccagaugauaaucuuca

SEQ ID NO: 1809987 - RNA, 19 nt, Artificial Sequence
  Description of Artificial Sequence: Synthetic oligonucleotide
  Sense strand starting at position 2847 of SEQ ID NO: 1563423
auuaucaucugguuaacag

SEQ ID NO: 1809988 - RNA, 19 nt, Artificial Sequence
  Description of Artificial Sequence: Synthetic oligonucleotide
  Antisense strand to SEQ ID NO: 1809987
cuguuaaccagaugauaau

SEQ ID NO: 1809989 - RNA, 19 nt, Artificial Sequence
  Description of Artificial Sequence: Synthetic oligonucleotide
  Sense strand starting at position 2868 of SEQ ID NO: 1563423
ucgguugagggcuaucuau

SEQ ID NO: 1809990 - RNA, 19 nt, Artificial Sequence
  Description of Artificial Sequence: Synthetic oligonucleotide
  Antisense strand to SEQ ID NO: 1809989
auagauagcccucaaccga

SEQ ID NO: 1809991 - RNA, 19 nt, Artificial Sequence
  Description of Artificial Sequence: Synthetic oligonucleotide
  Sense strand starting at position 2874 of SEQ ID NO: 1563423
gagggcuaucuaugucuca

SEQ ID NO: 1809992 - RNA, 19 nt, Artificial Sequence
  Description of Artificial Sequence: Synthetic oligonucleotide
  Antisense strand to SEQ ID NO: 1809991
ugagacauagauagcccuc

SEQ ID NO: 1809993 - RNA, 19 nt, Artificial Sequence
  Description of Artificial Sequence: Synthetic oligonucleotide
  Sense strand starting at position 2875 of SEQ ID NO: 1563423
agggcuaucuaugucucaa

SEQ ID NO: 1809994 - RNA, 19 nt, Artificial Sequence
  Description of Artificial Sequence: Synthetic oligonucleotide
  Antisense strand to SEQ ID NO: 1809993
uugagacauagauagcccu

SEQ ID NO: 1809995 - RNA, 19 nt, Artificial Sequence
  Description of Artificial Sequence: Synthetic oligonucleotide
  Sense strand starting at position 2897 of SEQ ID NO: 1563423
guaacacaacuguguuaau

SEQ ID NO: 1809996 - RNA, 19 nt, Artificial Sequence
  Description of Artificial Sequence: Synthetic oligonucleotide
  Antisense strand to SEQ ID NO: 1809995
auuaacacaguuguguuac

SEQ ID NO: 1809997 - RNA, 19 nt, Artificial Sequence
  Description of Artificial Sequence: Synthetic oligonucleotide
  Sense strand starting at position 2992 of SEQ ID NO: 1563423
aggcuaugagucugaaauc

SEQ ID NO: 1809998 - RNA, 19 nt, Artificial Sequence
  Description of Artificial Sequence: Synthetic oligonucleotide
  Antisense strand to SEQ ID NO: 1809997
gauuucagacucauagccu

SEQ ID NO: 1809999 - RNA, 19 nt, Artificial Sequence
  Description of Artificial Sequence: Synthetic oligonucleotide
  Sense strand starting at position 3010 of SEQ ID NO: 1563423
caagguuuccgugagguug

SEQ ID NO: 1810000 - RNA, 19 nt, Artificial Sequence
  Description of Artificial Sequence: Synthetic oligonucleotide
  Antisense strand to SEQ ID NO: 1809999
caaccucacggaaaccuug

SEQ ID NO: 1810001 - RNA, 19 nt, Artificial Sequence
  Description of Artificial Sequence: Synthetic oligonucleotide
  Sense strand starting at position 3042 of SEQ ID NO: 1563423
agcucugagggagaguuua

SEQ ID NO: 1810002 - RNA, 19 nt, Artificial Sequence
  Description of Artificial Sequence: Synthetic oligonucleotide
  Antisense strand to SEQ ID NO: 1810001
uaaacucucccucagagcu

SEQ ID NO: 1810003 - RNA, 19 nt, Artificial Sequence
  Description of Artificial Sequence: Synthetic oligonucleotide
  Sense strand starting at position 3240 of SEQ ID NO: 1563423
ccuguaggaccucaucuua

SEQ ID NO: 1810004 - RNA, 19 nt, Artificial Sequence
  Description of Artificial Sequence: Synthetic oligonucleotide
  Antisense strand to SEQ ID NO: 1810003
uaagaugagguccuacagg

SEQ ID NO: 1810005 - RNA, 19 nt, Artificial Sequence
  Description of Artificial Sequence: Synthetic oligonucleotide
  Sense strand starting at position 712 of SEQ ID NO: 1563424
guggauuuccggugaggug

SEQ ID NO: 1810006 - RNA, 19 nt, Artificial Sequence
  Description of Artificial Sequence: Synthetic oligonucleotide
  Antisense strand to SEQ ID NO: 1810005
caccucaccggaaauccac

SEQ ID NO: 1810007 - RNA, 19 nt, Artificial Sequence
  Description of Artificial Sequence: Synthetic oligonucleotide
  Sense strand starting at position 737 of SEQ ID NO: 1563424
cucugaaacccuugcuaag

SEQ ID NO: 1810008 - RNA, 19 nt, Artificial Sequence
  Description of Artificial Sequence: Synthetic oligonucleotide
  Antisense strand to SEQ ID NO: 1810007
cuuagcaaggguuucagag

SEQ ID NO: 1810009 - RNA, 19 nt, Artificial Sequence
  Description of Artificial Sequence: Synthetic oligonucleotide
  Sense strand starting at position 825 of SEQ ID NO: 1563424
ggcuauugagugugggaaa

SEQ ID NO: 1810010 - RNA, 19 nt, Artificial Sequence
  Description of Artificial Sequence: Synthetic oligonucleotide
  Antisense strand to SEQ ID NO: 1810009
uuucccacacucaauagcc

SEQ ID NO: 1810011 - RNA, 19 nt, Artificial Sequence
  Description of Artificial Sequence: Synthetic oligonucleotide
  Sense strand starting at position 885 of SEQ ID NO: 1563424
guugucuguauugcuguua

SEQ ID NO: 1810012 - RNA, 19 nt, Artificial Sequence
  Description of Artificial Sequence: Synthetic oligonucleotide
  Antisense strand to SEQ ID NO: 1810011
uaacagcaauacagacaac

SEQ ID NO: 1810013 - RNA, 19 nt, Artificial Sequence
  Description of Artificial Sequence: Synthetic oligonucleotide
  Sense strand starting at position 897 of SEQ ID NO: 1563424
gcuguuaauuaacccagaa

SEQ ID NO: 1810014 - RNA, 19 nt, Artificial Sequence
  Description of Artificial Sequence: Synthetic oligonucleotide
  Antisense strand to SEQ ID NO: 1810013
uucuggguuaauuaacagc

SEQ ID NO: 1810015 - RNA, 19 nt, Artificial Sequence
  Description of Artificial Sequence: Synthetic oligonucleotide
  Sense strand starting at position 952 of SEQ ID NO: 1563424
gaugacauuucgccagugu

SEQ ID NO: 1810016 - RNA, 19 nt, Artificial Sequence
  Description of Artificial Sequence: Synthetic oligonucleotide
  Antisense strand to SEQ ID NO: 1810015
acacuggcgaaaugucauc

SEQ ID NO: 1810017 - RNA, 19 nt, Artificial Sequence
  Description of Artificial Sequence: Synthetic oligonucleotide
  Sense strand starting at position 953 of SEQ ID NO: 1563424
augacauuucgccaguguu

SEQ ID NO: 1810018 - RNA, 19 nt, Artificial Sequence
  Description of Artificial Sequence: Synthetic oligonucleotide
  Antisense strand to SEQ ID NO: 1810017
aacacuggcgaaaugucau

SEQ ID NO: 1810019 - RNA, 19 nt, Artificial Sequence
  Description of Artificial Sequence: Synthetic oligonucleotide
  Sense strand starting at position 966 of SEQ ID NO: 1563424
aguguuucucuguaaagaa

SEQ ID NO: 1810020 - RNA, 19 nt, Artificial Sequence
  Description of Artificial Sequence: Synthetic oligonucleotide
  Antisense strand to SEQ ID NO: 1810019
uucuuuacagagaaacacu

SEQ ID NO: 1810021 - RNA, 19 nt, Artificial Sequence
  Description of Artificial Sequence: Synthetic oligonucleotide
  Sense strand starting at position 1080 of SEQ ID NO: 1563424
cccuaauaugucgagauua

SEQ ID NO: 1810022 - RNA, 19 nt, Artificial Sequence
  Description of Artificial Sequence: Synthetic oligonucleotide
  Antisense strand to SEQ ID NO: 1810021
uaaucucgacauauuaggg

SEQ ID NO: 1810023 - RNA, 19 nt, Artificial Sequence
  Description of Artificial Sequence: Synthetic oligonucleotide
  Sense strand starting at position 1475 of SEQ ID NO: 1563424
gcacuuugaucuccaauga

SEQ ID NO: 1810024 - RNA, 19 nt, Artificial Sequence
  Description of Artificial Sequence: Synthetic oligonucleotide
  Antisense strand to SEQ ID NO: 1810023
ucauuggagaucaaagugc

SEQ ID NO: 1810025 - RNA, 19 nt, Artificial Sequence
  Description of Artificial Sequence: Synthetic oligonucleotide
  Sense strand starting at position 1494 of SEQ ID NO: 1563424
guggaaagcugaccauauu

SEQ ID NO: 1810026 - RNA, 19 nt, Artificial Sequence
  Description of Artificial Sequence: Synthetic oligonucleotide
  Antisense strand to SEQ ID NO: 1810025
aauauggucagcuuuccac

SEQ ID NO: 1810027 - RNA, 19 nt, Artificial Sequence
  Description of Artificial Sequence: Synthetic oligonucleotide
  Sense strand starting at position 1571 of SEQ ID NO: 1563424
acaggaauugcgggaguaa

SEQ ID NO: 1810028 - RNA, 19 nt, Artificial Sequence
  Description of Artificial Sequence: Synthetic oligonucleotide
  Antisense strand to SEQ ID NO: 1810027
uuacucccgcaauuccugu

SEQ ID NO: 1810029 - RNA, 19 nt, Artificial Sequence
  Description of Artificial Sequence: Synthetic oligonucleotide
  Sense strand starting at position 1572 of SEQ ID NO: 1563424
caggaauugcgggaguaag

SEQ ID NO: 1810030 - RNA, 19 nt, Artificial Sequence
  Description of Artificial Sequence: Synthetic oligonucleotide
  Antisense strand to SEQ ID NO: 1810029
cuuacucccgcaauuccug

SEQ ID NO: 1810031 - RNA, 19 nt, Artificial Sequence
  Description of Artificial Sequence: Synthetic oligonucleotide
  Sense strand starting at position 1898 of SEQ ID NO: 1563424
gccgccuggauuugggaaa

SEQ ID NO: 1810032 - RNA, 19 nt, Artificial Sequence
  Description of Artificial Sequence: Synthetic oligonucleotide
  Antisense strand to SEQ ID NO: 1810031
uuucccaaauccaggcggc

SEQ ID NO: 1810033 - RNA, 19 nt, Artificial Sequence
  Description of Artificial Sequence: Synthetic oligonucleotide
  Sense strand starting at position 1952 of SEQ ID NO: 1563424
cuguguugucccgcuuuau

SEQ ID NO: 1810034 - RNA, 19 nt, Artificial Sequence
  Description of Artificial Sequence: Synthetic oligonucleotide
  Antisense strand to SEQ ID NO: 1810033
auaaagcgggacaacacag

SEQ ID NO: 1810035 - RNA, 19 nt, Artificial Sequence
  Description of Artificial Sequence: Synthetic oligonucleotide
  Sense strand starting at position 1953 of SEQ ID NO: 1563424
uguguugucccgcuuuaug

SEQ ID NO: 1810036 - RNA, 19 nt, Artificial Sequence
  Description of Artificial Sequence: Synthetic oligonucleotide
  Antisense strand to SEQ ID NO: 1810035
cauaaagcgggacaacaca

SEQ ID NO: 1810037 - RNA, 19 nt, Artificial Sequence
  Description of Artificial Sequence: Synthetic oligonucleotide
  Sense strand starting at position 1955 of SEQ ID NO: 1563424
uguugucccgcuuuaugua

SEQ ID NO: 1810038 - RNA, 19 nt, Artificial Sequence
  Description of Artificial Sequence: Synthetic oligonucleotide
  Antisense strand to SEQ ID NO: 1810037
uacauaaagcgggacaaca

SEQ ID NO: 1810039 - RNA, 19 nt, Artificial Sequence
  Description of Artificial Sequence: Synthetic oligonucleotide
  Sense strand starting at position 2024 of SEQ ID NO: 1563424
gccacaaugagaugaugua

SEQ ID NO: 1810040 - RNA, 19 nt, Artificial Sequence
  Description of Artificial Sequence: Synthetic oligonucleotide
  Antisense strand to SEQ ID NO: 1810039
uacaucaucucauuguggc

SEQ ID NO: 1810041 - RNA, 19 nt, Artificial Sequence
  Description of Artificial Sequence: Synthetic oligonucleotide
  Sense strand starting at position 2130 of SEQ ID NO: 1563424
gaggaaguuugggauuucu

SEQ ID NO: 1810042 - RNA, 19 nt, Artificial Sequence
  Description of Artificial Sequence: Synthetic oligonucleotide
  Antisense strand to SEQ ID NO: 1810041
agaaaucccaaacuuccuc

SEQ ID NO: 1810043 - RNA, 19 nt, Artificial Sequence
  Description of Artificial Sequence: Synthetic oligonucleotide
  Sense strand starting at position 2178 of SEQ ID NO: 1563424
cuguaaauggauugguuaa

SEQ ID NO: 1810044 - RNA, 19 nt, Artificial Sequence
  Description of Artificial Sequence: Synthetic oligonucleotide
  Antisense strand to SEQ ID NO: 1810043
uuaaccaauccauuuacag

SEQ ID NO: 1810045 - RNA, 19 nt, Artificial Sequence
  Description of Artificial Sequence: Synthetic oligonucleotide
  Sense strand starting at position 2179 of SEQ ID NO: 1563424
uguaaauggauugguuaaa

SEQ ID NO: 1810046 - RNA, 19 nt, Artificial Sequence
  Description of Artificial Sequence: Synthetic oligonucleotide
  Antisense strand to SEQ ID NO: 1810045
uuuaaccaauccauuuaca

SEQ ID NO: 1810047 - RNA, 19 nt, Artificial Sequence
  Description of Artificial Sequence: Synthetic oligonucleotide
  Sense strand starting at position 2180 of SEQ ID NO: 1563424
guaaauggauugguuaaau

SEQ ID NO: 1810048 - RNA, 19 nt, Artificial Sequence
  Description of Artificial Sequence: Synthetic oligonucleotide
  Antisense strand to SEQ ID NO: 1810047
auuuaaccaauccauuuac

SEQ ID NO: 1810049 - RNA, 19 nt, Artificial Sequence
  Description of Artificial Sequence: Synthetic oligonucleotide
  Sense strand starting at position 2461 of SEQ ID NO: 1563424
acaaauuuguacuaaaggu

SEQ ID NO: 1810050 - RNA, 19 nt, Artificial Sequence
  Description of Artificial Sequence: Synthetic oligonucleotide
  Antisense strand to SEQ ID NO: 1810049
accuuuaguacaaauuugu

SEQ ID NO: 1810051 - RNA, 19 nt, Artificial Sequence
  Description of Artificial Sequence: Synthetic oligonucleotide
  Sense strand starting at position 2573 of SEQ ID NO: 1563424
aggucuguuacauauguaa

SEQ ID NO: 1810052 - RNA, 19 nt, Artificial Sequence
  Description of Artificial Sequence: Synthetic oligonucleotide
  Antisense strand to SEQ ID NO: 1810051
uuacauauguaacagaccu

SEQ ID NO: 1810053 - RNA, 19 nt, Artificial Sequence
  Description of Artificial Sequence: Synthetic oligonucleotide
  Sense strand starting at position 2624 of SEQ ID NO: 1563424
accaaucaccgagguauua

SEQ ID NO: 1810054 - RNA, 19 nt, Artificial Sequence
  Description of Artificial Sequence: Synthetic oligonucleotide
  Antisense strand to SEQ ID NO: 1810053
uaauaccucggugauuggu

SEQ ID NO: 1810055 - RNA, 19 nt, Artificial Sequence
  Description of Artificial Sequence: Synthetic oligonucleotide
  Sense strand starting at position 2822 of SEQ ID NO: 1563424
uuugguucuccagagccaa

SEQ ID NO: 1810056 - RNA, 19 nt, Artificial Sequence
  Description of Artificial Sequence: Synthetic oligonucleotide
  Antisense strand to SEQ ID NO: 1810055
uuggcucuggagaaccaaa

SEQ ID NO: 1810057 - RNA, 19 nt, Artificial Sequence
  Description of Artificial Sequence: Synthetic oligonucleotide
  Sense strand starting at position 3052 of SEQ ID NO: 1563424
uguauuuggaguuguauua

SEQ ID NO: 1810058 - RNA, 19 nt, Artificial Sequence
  Description of Artificial Sequence: Synthetic oligonucleotide
  Antisense strand to SEQ ID NO: 1810057
uaauacaacuccaaauaca

SEQ ID NO: 1810059 - RNA, 19 nt, Artificial Sequence
  Description of Artificial Sequence: Synthetic oligonucleotide
  Sense strand starting at position 3065 of SEQ ID NO: 1563424
guauuaaugggacguaaca

SEQ ID NO: 1810060 - RNA, 19 nt, Artificial Sequence
  Description of Artificial Sequence: Synthetic oligonucleotide
  Antisense strand to SEQ ID NO: 1810059
uguuacgucccauuaauac

SEQ ID NO: 1810061 - RNA, 19 nt, Artificial Sequence
  Description of Artificial Sequence: Synthetic oligonucleotide
  Sense strand starting at position 3097 of SEQ ID NO: 1563424
uugcacuagacagguuaga

SEQ ID NO: 1810062 - RNA, 19 nt, Artificial Sequence
  Description of Artificial Sequence: Synthetic oligonucleotide
  Antisense strand to SEQ ID NO: 1810061
ucuaaccugucuagugcaa

SEQ ID NO: 1810063 - RNA, 19 nt, Artificial Sequence
  Description of Artificial Sequence: Synthetic oligonucleotide
  Sense strand starting at position 3313 of SEQ ID NO: 1563424
uaguuaugaguacaaagcu

SEQ ID NO: 1810064 - RNA, 19 nt, Artificial Sequence
  Description of Artificial Sequence: Synthetic oligonucleotide
  Antisense strand to SEQ ID NO: 1810063
agcuuuguacucauaacua

SEQ ID NO: 1810065 - RNA, 19 nt, Artificial Sequence
  Description of Artificial Sequence: Synthetic oligonucleotide
  Sense strand starting at position 3320 of SEQ ID NO: 1563424
gaguacaaagcuuaaaguu

SEQ ID NO: 1810066 - RNA, 19 nt, Artificial Sequence
  Description of Artificial Sequence: Synthetic oligonucleotide
  Antisense strand to SEQ ID NO: 1810065
aacuuuaagcuuuguacuc

SEQ ID NO: 1810067 - RNA, 19 nt, Artificial Sequence
  Description of Artificial Sequence: Synthetic oligonucleotide
  Sense strand starting at position 3439 of SEQ ID NO: 1563424
gaaugugcacucuaguuua

SEQ ID NO: 1810068 - RNA, 19 nt, Artificial Sequence
  Description of Artificial Sequence: Synthetic oligonucleotide
  Antisense strand to SEQ ID NO: 1810067
uaaacuagagugcacauuc

SEQ ID NO: 1810069 - RNA, 19 nt, Artificial Sequence
  Description of Artificial Sequence: Synthetic oligonucleotide
  Sense strand starting at position 3560 of SEQ ID NO: 1563424
ucuaaagaggagugaaguu

SEQ ID NO: 1810070 - RNA, 19 nt, Artificial Sequence
  Description of Artificial Sequence: Synthetic oligonucleotide
  Antisense strand to SEQ ID NO: 1810069
aacuucacuccucuuuaga

SEQ ID NO: 1810071 - RNA, 19 nt, Artificial Sequence
  Description of Artificial Sequence: Synthetic oligonucleotide
  Sense strand starting at position 3590 of SEQ ID NO: 1563424
ggcuuacucaauuggauga

SEQ ID NO: 1810072 - RNA, 19 nt, Artificial Sequence
  Description of Artificial Sequence: Synthetic oligonucleotide
  Antisense strand to SEQ ID NO: 1810071
ucauccaauugaguaagcc

SEQ ID NO: 1810073 - RNA, 19 nt, Artificial Sequence
  Description of Artificial Sequence: Synthetic oligonucleotide
  Sense strand starting at position 3628 of SEQ ID NO: 1563424
ggaguugcuggucaugaau

SEQ ID NO: 1810074 - RNA, 19 nt, Artificial Sequence
  Description of Artificial Sequence: Synthetic oligonucleotide
  Antisense strand to SEQ ID NO: 1810073
auucaugaccagcaacucc

SEQ ID NO: 1810075 - RNA, 19 nt, Artificial Sequence
  Description of Artificial Sequence: Synthetic oligonucleotide
  Sense strand starting at position 3675 of SEQ ID NO: 1563424
ggcuuugagacaugaaaua

SEQ ID NO: 1810076 - RNA, 19 nt, Artificial Sequence
  Description of Artificial Sequence: Synthetic oligonucleotide
  Antisense strand to SEQ ID NO: 1810075
uauuucaugucucaaagcc

SEQ ID NO: 1810077 - RNA, 19 nt, Artificial Sequence
  Description of Artificial Sequence: Synthetic oligonucleotide
  Sense strand starting at position 3693 of SEQ ID NO: 1563424
aaaugcucccagggagaua

SEQ ID NO: 1810078 - RNA, 19 nt, Artificial Sequence
  Description of Artificial Sequence: Synthetic oligonucleotide
  Antisense strand to SEQ ID NO: 1810077
uaucucccugggagcauuu

SEQ ID NO: 1810079 - RNA, 19 nt, Artificial Sequence
  Description of Artificial Sequence: Synthetic oligonucleotide
  Sense strand starting at position 3729 of SEQ ID NO: 1563424
gugagucaucuacauauaa

SEQ ID NO: 1810080 - RNA, 19 nt, Artificial Sequence
  Description of Artificial Sequence: Synthetic oligonucleotide
  Antisense strand to SEQ ID NO: 1810079
uuauauguagaugacucac

SEQ ID NO: 1810081 - RNA, 19 nt, Artificial Sequence
  Description of Artificial Sequence: Synthetic oligonucleotide
  Sense strand starting at position 3847 of SEQ ID NO: 1563424
uuuaauaacugggcaauaa

SEQ ID NO: 1810082 - RNA, 19 nt, Artificial Sequence
  Description of Artificial Sequence: Synthetic oligonucleotide
  Antisense strand to SEQ ID NO: 1810081
uuauugcccaguuauuaaa

SEQ ID NO: 1810083 - RNA, 19 nt, Artificial Sequence
  Description of Artificial Sequence: Synthetic oligonucleotide
  Sense strand starting at position 3933 of SEQ ID NO: 1563424
agugaagcccauuaaccuu

SEQ ID NO: 1810084 - RNA, 19 nt, Artificial Sequence
  Description of Artificial Sequence: Synthetic oligonucleotide
  Antisense strand to SEQ ID NO: 1810083
aagguuaaugggcuucacu

SEQ ID NO: 1810085 - RNA, 19 nt, Artificial Sequence
  Description of Artificial Sequence: Synthetic oligonucleotide
  Sense strand starting at position 864 of SEQ ID NO: 1563425
cugacauagucaguauguu

SEQ ID NO: 1810086 - RNA, 19 nt, Artificial Sequence
  Description of Artificial Sequence: Synthetic oligonucleotide
  Antisense strand to SEQ ID NO: 1810085
aacauacugacuaugucag

SEQ ID NO: 1810087 - RNA, 19 nt, Artificial Sequence
  Description of Artificial Sequence: Synthetic oligonucleotide
  Sense strand starting at position 865 of SEQ ID NO: 1563425
ugacauagucaguauguug

SEQ ID NO: 1810088 - RNA, 19 nt, Artificial Sequence
  Description of Artificial Sequence: Synthetic oligonucleotide
  Antisense strand to SEQ ID NO: 1810087
caacauacugacuauguca

SEQ ID NO: 1810089 - RNA, 19 nt, Artificial Sequence
  Description of Artificial Sequence: Synthetic oligonucleotide
  Sense strand starting at position 2847 of SEQ ID NO: 1563425
cugcucaguggugaucuau

SEQ ID NO: 1810090 - RNA, 19 nt, Artificial Sequence
  Description of Artificial Sequence: Synthetic oligonucleotide
  Antisense strand to SEQ ID NO: 1810089
auagaucaccacugagcag

SEQ ID NO: 1810091 - RNA, 19 nt, Artificial Sequence
  Description of Artificial Sequence: Synthetic oligonucleotide
  Sense strand starting at position 2862 of SEQ ID NO: 1563425
cuauuugugugucuggaag

SEQ ID NO: 1810092 - RNA, 19 nt, Artificial Sequence
  Description of Artificial Sequence: Synthetic oligonucleotide
  Antisense strand to SEQ ID NO: 1810091
cuuccagacacacaaauag

SEQ ID NO: 1810093 - RNA, 19 nt, Artificial Sequence
  Description of Artificial Sequence: Synthetic oligonucleotide
  Sense strand starting at position 2882 of SEQ ID NO: 1563425
gggucaaauccacgggaca

SEQ ID NO: 1810094 - RNA, 19 nt, Artificial Sequence
  Description of Artificial Sequence: Synthetic oligonucleotide
  Antisense strand to SEQ ID NO: 1810093
ugucccguggauuugaccc

SEQ ID NO: 1810095 - RNA, 19 nt, Artificial Sequence
  Description of Artificial Sequence: Synthetic oligonucleotide
  Sense strand starting at position 3097 of SEQ ID NO: 1563425
uuggcacucauguggaaac

SEQ ID NO: 1810096 - RNA, 19 nt, Artificial Sequence
  Description of Artificial Sequence: Synthetic oligonucleotide
  Antisense strand to SEQ ID NO: 1810095
guuuccacaugagugccaa

SEQ ID NO: 1810097 - RNA, 19 nt, Artificial Sequence
  Description of Artificial Sequence: Synthetic oligonucleotide
  Sense strand starting at position 3211 of SEQ ID NO: 1563425
aguugcauagaaggauuaa

SEQ ID NO: 1810098 - RNA, 19 nt, Artificial Sequence
  Description of Artificial Sequence: Synthetic oligonucleotide
  Antisense strand to SEQ ID NO: 1810097
uuaauccuucuaugcaacu

SEQ ID NO: 1810099 - RNA, 19 nt, Artificial Sequence
  Description of Artificial Sequence: Synthetic oligonucleotide
  Sense strand starting at position 3365 of SEQ ID NO: 1563425
ccgacuugaucauuacauc

SEQ ID NO: 1810100 - RNA, 19 nt, Artificial Sequence
  Description of Artificial Sequence: Synthetic oligonucleotide
  Antisense strand to SEQ ID NO: 1810099
gauguaaugaucaagucgg

SEQ ID NO: 1810101 - RNA, 19 nt, Artificial Sequence
  Description of Artificial Sequence: Synthetic oligonucleotide
  Sense strand starting at position 3437 of SEQ ID NO: 1563425
guuaucauacaucaguuaa

SEQ ID NO: 1810102 - RNA, 19 nt, Artificial Sequence
  Description of Artificial Sequence: Synthetic oligonucleotide
  Antisense strand to SEQ ID NO: 1810101
uuaacugauguaugauaac

SEQ ID NO: 1810103 - RNA, 19 nt, Artificial Sequence
  Description of Artificial Sequence: Synthetic oligonucleotide
  Sense strand starting at position 3503 of SEQ ID NO: 1563425
guaccuccaguuuauuauu

SEQ ID NO: 1810104 - RNA, 19 nt, Artificial Sequence
  Description of Artificial Sequence: Synthetic oligonucleotide
  Antisense strand to SEQ ID NO: 1810103
aauaauaaacuggagguac

SEQ ID NO: 1810105 - RNA, 19 nt, Artificial Sequence
  Description of Artificial Sequence: Synthetic oligonucleotide
  Sense strand starting at position 3588 of SEQ ID NO: 1563425
uuguuaacaccuggaauag

SEQ ID NO: 1810106 - RNA, 19 nt, Artificial Sequence
  Description of Artificial Sequence: Synthetic oligonucleotide
  Antisense strand to SEQ ID NO: 1810105
cuauuccagguguuaacaa

SEQ ID NO: 1810107 - RNA, 19 nt, Artificial Sequence
  Description of Artificial Sequence: Synthetic oligonucleotide
  Sense strand starting at position 3615 of SEQ ID NO: 1563425
cagacauaacccgguuagu

SEQ ID NO: 1810108 - RNA, 19 nt, Artificial Sequence
  Description of Artificial Sequence: Synthetic oligonucleotide
  Antisense strand to SEQ ID NO: 1810107
acuaaccggguuaugucug

SEQ ID NO: 1810109 - RNA, 19 nt, Artificial Sequence
  Description of Artificial Sequence: Synthetic oligonucleotide
  Sense strand starting at position 3618 of SEQ ID NO: 1563425
acauaacccgguuagugau

SEQ ID NO: 1810110 - RNA, 19 nt, Artificial Sequence
  Description of Artificial Sequence: Synthetic oligonucleotide
  Antisense strand to SEQ ID NO: 1810109
aucacuaaccggguuaugu

SEQ ID NO: 1810111 - RNA, 19 nt, Artificial Sequence
  Description of Artificial Sequence: Synthetic oligonucleotide
  Sense strand starting at position 3689 of SEQ ID NO: 1563425
aggcuaaaguucuuaccuu

SEQ ID NO: 1810112 - RNA, 19 nt, Artificial Sequence
  Description of Artificial Sequence: Synthetic oligonucleotide
  Antisense strand to SEQ ID NO: 1810111
aagguaagaacuuuagccu

SEQ ID NO: 1810113 - RNA, 19 nt, Artificial Sequence
  Description of Artificial Sequence: Synthetic oligonucleotide
  Sense strand starting at position 3725 of SEQ ID NO: 1563425
gagaguaaagugcauguga

SEQ ID NO: 1810114 - RNA, 19 nt, Artificial Sequence
  Description of Artificial Sequence: Synthetic oligonucleotide
  Antisense strand to SEQ ID NO: 1810113
ucacaugcacuuuacucuc

SEQ ID NO: 1810115 - RNA, 19 nt, Artificial Sequence
  Description of Artificial Sequence: Synthetic oligonucleotide
  Sense strand starting at position 3738 of SEQ ID NO: 1563425
augugacccugucuuagga

SEQ ID NO: 1810116 - RNA, 19 nt, Artificial Sequence
  Description of Artificial Sequence: Synthetic oligonucleotide
  Antisense strand to SEQ ID NO: 1810115
uccuaagacagggucacau

SEQ ID NO: 1810117 - RNA, 19 nt, Artificial Sequence
  Description of Artificial Sequence: Synthetic oligonucleotide
  Sense strand starting at position 3802 of SEQ ID NO: 1563425
ggccuauuauccucagauc

SEQ ID NO: 1810118 - RNA, 19 nt, Artificial Sequence
  Description of Artificial Sequence: Synthetic oligonucleotide
  Antisense strand to SEQ ID NO: 1810117
gaucugaggauaauaggcc

SEQ ID NO: 1810119 - RNA, 19 nt, Artificial Sequence
  Description of Artificial Sequence: Synthetic oligonucleotide
  Sense strand starting at position 3832 of SEQ ID NO: 1563425
ggaaguccuaacugacuga

SEQ ID NO: 1810120 - RNA, 19 nt, Artificial Sequence
  Description of Artificial Sequence: Synthetic oligonucleotide
  Antisense strand to SEQ ID NO: 1810119
ucagucaguuaggacuucc

SEQ ID NO: 1810121 - RNA, 19 nt, Artificial Sequence
  Description of Artificial Sequence: Synthetic oligonucleotide
  Sense strand starting at position 3836 of SEQ ID NO: 1563425
guccuaacugacugagaga

SEQ ID NO: 1810122 - RNA, 19 nt, Artificial Sequence
  Description of Artificial Sequence: Synthetic oligonucleotide
  Antisense strand to SEQ ID NO: 1810121
ucucucagucaguuaggac

SEQ ID NO: 1810123 - RNA, 19 nt, Artificial Sequence
  Description of Artificial Sequence: Synthetic oligonucleotide
  Sense strand starting at position 863 of SEQ ID NO: 1563426
cugacauagucaguauguu

SEQ ID NO: 1810124 - RNA, 19 nt, Artificial Sequence
  Description of Artificial Sequence: Synthetic oligonucleotide
  Antisense strand to SEQ ID NO: 1810123
aacauacugacuaugucag

SEQ ID NO: 1810125 - RNA, 19 nt, Artificial Sequence
  Description of Artificial Sequence: Synthetic oligonucleotide
  Sense strand starting at position 864 of SEQ ID NO: 1563426
ugacauagucaguauguug

SEQ ID NO: 1810126 - RNA, 19 nt, Artificial Sequence
  Description of Artificial Sequence: Synthetic oligonucleotide
  Antisense strand to SEQ ID NO: 1810125
caacauacugacuauguca

SEQ ID NO: 1810127 - RNA, 19 nt, Artificial Sequence
  Description of Artificial Sequence: Synthetic oligonucleotide
  Sense strand starting at position 2846 of SEQ ID NO: 1563426
cugcucaguggugaucuau

SEQ ID NO: 1810128 - RNA, 19 nt, Artificial Sequence
  Description of Artificial Sequence: Synthetic oligonucleotide
  Antisense strand to SEQ ID NO: 1810127
auagaucaccacugagcag

SEQ ID NO: 1810129 - RNA, 19 nt, Artificial Sequence
  Description of Artificial Sequence: Synthetic oligonucleotide
  Sense strand starting at position 2854 of SEQ ID NO: 1563426
uggugaucuauuugugugu

SEQ ID NO: 1810130 - RNA, 19 nt, Artificial Sequence
  Description of Artificial Sequence: Synthetic oligonucleotide
  Antisense strand to SEQ ID NO: 1810129
acacacaaauagaucacca

SEQ ID NO: 1810131 - RNA, 19 nt, Artificial Sequence
  Description of Artificial Sequence: Synthetic oligonucleotide
  Sense strand starting at position 2861 of SEQ ID NO: 1563426
cuauuugugugucuggaag

SEQ ID NO: 1810132 - RNA, 19 nt, Artificial Sequence
  Description of Artificial Sequence: Synthetic oligonucleotide
  Antisense strand to SEQ ID NO: 1810131
cuuccagacacacaaauag

SEQ ID NO: 1810133 - RNA, 19 nt, Artificial Sequence
  Description of Artificial Sequence: Synthetic oligonucleotide
  Sense strand starting at position 3096 of SEQ ID NO: 1563426
uuggcacucauguggaaac

SEQ ID NO: 1810134 - RNA, 19 nt, Artificial Sequence
  Description of Artificial Sequence: Synthetic oligonucleotide
  Antisense strand to SEQ ID NO: 1810133
guuuccacaugagugccaa

SEQ ID NO: 1810135 - RNA, 19 nt, Artificial Sequence
  Description of Artificial Sequence: Synthetic oligonucleotide
  Sense strand starting at position 3098 of SEQ ID NO: 1563426
ggcacucauguggaaacua

SEQ ID NO: 1810136 - RNA, 19 nt, Artificial Sequence
  Description of Artificial Sequence: Synthetic oligonucleotide
  Antisense strand to SEQ ID NO: 1810135
uaguuuccacaugagugcc

SEQ ID NO: 1810137 - RNA, 19 nt, Artificial Sequence
  Description of Artificial Sequence: Synthetic oligonucleotide
  Sense strand starting at position 3210 of SEQ ID NO: 1563426
aguugcauagaaggauuaa

SEQ ID NO: 1810138 - RNA, 19 nt, Artificial Sequence
  Description of Artificial Sequence: Synthetic oligonucleotide
  Antisense strand to SEQ ID NO: 1810137
uuaauccuucuaugcaacu

SEQ ID NO: 1810139 - RNA, 19 nt, Artificial Sequence
  Description of Artificial Sequence: Synthetic oligonucleotide
  Sense strand starting at position 3364 of SEQ ID NO: 1563426
ccgacuugaucauuacauc

SEQ ID NO: 1810140 - RNA, 19 nt, Artificial Sequence
  Description of Artificial Sequence: Synthetic oligonucleotide
  Antisense strand to SEQ ID NO: 1810139
gauguaaugaucaagucgg

SEQ ID NO: 1810141 - RNA, 19 nt, Artificial Sequence
  Description of Artificial Sequence: Synthetic oligonucleotide
  Sense strand starting at position 3436 of SEQ ID NO: 1563426
guuaucauacaucaguuaa

SEQ ID NO: 1810142 - RNA, 19 nt, Artificial Sequence
  Description of Artificial Sequence: Synthetic oligonucleotide
  Antisense strand to SEQ ID NO: 1810141
uuaacugauguaugauaac

SEQ ID NO: 1810143 - RNA, 19 nt, Artificial Sequence
  Description of Artificial Sequence: Synthetic oligonucleotide
  Sense strand starting at position 3502 of SEQ ID NO: 1563426
guaccuccaguuuauuauu

SEQ ID NO: 1810144 - RNA, 19 nt, Artificial Sequence
  Description of Artificial Sequence: Synthetic oligonucleotide
  Antisense strand to SEQ ID NO: 1810143
aauaauaaacuggagguac

SEQ ID NO: 1810145 - RNA, 19 nt, Artificial Sequence
  Description of Artificial Sequence: Synthetic oligonucleotide
  Sense strand starting at position 3587 of SEQ ID NO: 1563426
uuguuaacaccuggaauag

SEQ ID NO: 1810146 - RNA, 19 nt, Artificial Sequence
  Description of Artificial Sequence: Synthetic oligonucleotide
  Antisense strand to SEQ ID NO: 1810145
cuauuccagguguuaacaa

SEQ ID NO: 1810147 - RNA, 19 nt, Artificial Sequence
  Description of Artificial Sequence: Synthetic oligonucleotide
  Sense strand starting at position 3614 of SEQ ID NO: 1563426
cagacauaacccgguuagu

SEQ ID NO: 1810148 - RNA, 19 nt, Artificial Sequence
  Description of Artificial Sequence: Synthetic oligonucleotide
  Antisense strand to SEQ ID NO: 1810147
acuaaccggguuaugucug

SEQ ID NO: 1810149 - RNA, 19 nt, Artificial Sequence
  Description of Artificial Sequence: Synthetic oligonucleotide
  Sense strand starting at position 3617 of SEQ ID NO: 1563426
acauaacccgguuagugau

SEQ ID NO: 1810150 - RNA, 19 nt, Artificial Sequence
  Description of Artificial Sequence: Synthetic oligonucleotide
  Antisense strand to SEQ ID NO: 1810149
aucacuaaccggguuaugu

SEQ ID NO: 1810151 - RNA, 19 nt, Artificial Sequence
  Description of Artificial Sequence: Synthetic oligonucleotide
  Sense strand starting at position 3688 of SEQ ID NO: 1563426
aggcuaaaguucuuaccuu

SEQ ID NO: 1810152 - RNA, 19 nt, Artificial Sequence
  Description of Artificial Sequence: Synthetic oligonucleotide
  Antisense strand to SEQ ID NO: 1810151
aagguaagaacuuuagccu

SEQ ID NO: 1810153 - RNA, 19 nt, Artificial Sequence
  Description of Artificial Sequence: Synthetic oligonucleotide
  Sense strand starting at position 3724 of SEQ ID NO: 1563426
gagaguaaagugcauguga

SEQ ID NO: 1810154 - RNA, 19 nt, Artificial Sequence
  Description of Artificial Sequence: Synthetic oligonucleotide
  Antisense strand to SEQ ID NO: 1810153
ucacaugcacuuuacucuc

SEQ ID NO: 1810155 - RNA, 19 nt, Artificial Sequence
  Description of Artificial Sequence: Synthetic oligonucleotide
  Sense strand starting at position 3737 of SEQ ID NO: 1563426
augugacccugucuuagga

SEQ ID NO: 1810156 - RNA, 19 nt, Artificial Sequence
  Description of Artificial Sequence: Synthetic oligonucleotide
  Antisense strand to SEQ ID NO: 1810155
uccuaagacagggucacau

SEQ ID NO: 1810157 - RNA, 19 nt, Artificial Sequence
  Description of Artificial Sequence: Synthetic oligonucleotide
  Sense strand starting at position 3801 of SEQ ID NO: 1563426
ggccuauuauccucagauc

SEQ ID NO: 1810158 - RNA, 19 nt, Artificial Sequence
  Description of Artificial Sequence: Synthetic oligonucleotide
  Antisense strand to SEQ ID NO: 1810157
gaucugaggauaauaggcc

SEQ ID NO: 1810159 - RNA, 19 nt, Artificial Sequence
  Description of Artificial Sequence: Synthetic oligonucleotide
  Sense strand starting at position 3831 of SEQ ID NO: 1563426
ggaaguccuaacugauuga

SEQ ID NO: 1810160 - RNA, 19 nt, Artificial Sequence
  Description of Artificial Sequence: Synthetic oligonucleotide
  Antisense strand to SEQ ID NO: 1810159
ucaaucaguuaggacuucc

SEQ ID NO: 1810161 - RNA, 19 nt, Artificial Sequence
  Description of Artificial Sequence: Synthetic oligonucleotide
  Sense strand starting at position 3834 of SEQ ID NO: 1563426
aguccuaacugauugagag

SEQ ID NO: 1810162 - RNA, 19 nt, Artificial Sequence
  Description of Artificial Sequence: Synthetic oligonucleotide
  Antisense strand to SEQ ID NO: 1810161
cucucaaucaguuaggacu

SEQ ID NO: 1810163 - RNA, 19 nt, Artificial Sequence
  Description of Artificial Sequence: Synthetic oligonucleotide
  Sense strand starting at position 3835 of SEQ ID NO: 1563426
guccuaacugauugagaga

SEQ ID NO: 1810164 - RNA, 19 nt, Artificial Sequence
  Description of Artificial Sequence: Synthetic oligonucleotide
  Antisense strand to SEQ ID NO: 1810163
ucucucaaucaguuaggac

SEQ ID NO: 1810165 - RNA, 19 nt, Artificial Sequence
  Description of Artificial Sequence: Synthetic oligonucleotide
  Sense strand starting at position 864 of SEQ ID NO: 1563427
cugacauagucaguauguu

SEQ ID NO: 1810166 - RNA, 19 nt, Artificial Sequence
  Description of Artificial Sequence: Synthetic oligonucleotide
  Antisense strand to SEQ ID NO: 1810165
aacauacugacuaugucag

SEQ ID NO: 1810167 - RNA, 19 nt, Artificial Sequence
  Description of Artificial Sequence: Synthetic oligonucleotide
  Sense strand starting at position 865 of SEQ ID NO: 1563427
ugacauagucaguauguug

SEQ ID NO: 1810168 - RNA, 19 nt, Artificial Sequence
  Description of Artificial Sequence: Synthetic oligonucleotide
  Antisense strand to SEQ ID NO: 1810167
caacauacugacuauguca

SEQ ID NO: 1810169 - RNA, 19 nt, Artificial Sequence
  Description of Artificial Sequence: Synthetic oligonucleotide
  Sense strand starting at position 2847 of SEQ ID NO: 1563427
cugcucaguggugaucuau

SEQ ID NO: 1810170 - RNA, 19 nt, Artificial Sequence
  Description of Artificial Sequence: Synthetic oligonucleotide
  Antisense strand to SEQ ID NO: 1810169
auagaucaccacugagcag

SEQ ID NO: 1810171 - RNA, 19 nt, Artificial Sequence
  Description of Artificial Sequence: Synthetic oligonucleotide
  Sense strand starting at position 2862 of SEQ ID NO: 1563427
cuauuugugugucuggaag

SEQ ID NO: 1810172 - RNA, 19 nt, Artificial Sequence
  Description of Artificial Sequence: Synthetic oligonucleotide
  Antisense strand to SEQ ID NO: 1810171
cuuccagacacacaaauag

SEQ ID NO: 1810173 - RNA, 19 nt, Artificial Sequence
  Description of Artificial Sequence: Synthetic oligonucleotide
  Sense strand starting at position 2882 of SEQ ID NO: 1563427
gggucaaauccacgggaca

SEQ ID NO: 1810174 - RNA, 19 nt, Artificial Sequence
  Description of Artificial Sequence: Synthetic oligonucleotide
  Antisense strand to SEQ ID NO: 1810173
ugucccguggauuugaccc

SEQ ID NO: 1810175 - RNA, 19 nt, Artificial Sequence
  Description of Artificial Sequence: Synthetic oligonucleotide
  Sense strand starting at position 3097 of SEQ ID NO: 1563427
uuggcacucauguggaaac

SEQ ID NO: 1810176 - RNA, 19 nt, Artificial Sequence
  Description of Artificial Sequence: Synthetic oligonucleotide
  Antisense strand to SEQ ID NO: 1810175
guuuccacaugagugccaa

SEQ ID NO: 1810177 - RNA, 19 nt, Artificial Sequence
  Description of Artificial Sequence: Synthetic oligonucleotide
  Sense strand starting at position 3211 of SEQ ID NO: 1563427
aguugcauagaaggauuaa

SEQ ID NO: 1810178 - RNA, 19 nt, Artificial Sequence
  Description of Artificial Sequence: Synthetic oligonucleotide
  Antisense strand to SEQ ID NO: 1810177
uuaauccuucuaugcaacu

SEQ ID NO: 1810179 - RNA, 19 nt, Artificial Sequence
  Description of Artificial Sequence: Synthetic oligonucleotide
  Sense strand starting at position 3365 of SEQ ID NO: 1563427
ccgacuugaucauuacauc

SEQ ID NO: 1810180 - RNA, 19 nt, Artificial Sequence
  Description of Artificial Sequence: Synthetic oligonucleotide
  Antisense strand to SEQ ID NO: 1810179
gauguaaugaucaagucgg

SEQ ID NO: 1810181 - RNA, 19 nt, Artificial Sequence
  Description of Artificial Sequence: Synthetic oligonucleotide
  Sense strand starting at position 3437 of SEQ ID NO: 1563427
guuaucauacaucaguuaa

SEQ ID NO: 1810182 - RNA, 19 nt, Artificial Sequence
  Description of Artificial Sequence: Synthetic oligonucleotide
  Antisense strand to SEQ ID NO: 1810181
uuaacugauguaugauaac

SEQ ID NO: 1810183 - RNA, 19 nt, Artificial Sequence
  Description of Artificial Sequence: Synthetic oligonucleotide
  Sense strand starting at position 3503 of SEQ ID NO: 1563427
guaccuccaguuuauuauu

SEQ ID NO: 1810184 - RNA, 19 nt, Artificial Sequence
  Description of Artificial Sequence: Synthetic oligonucleotide
  Antisense strand to SEQ ID NO: 1810183
aauaauaaacuggagguac

SEQ ID NO: 1810185 - RNA, 19 nt, Artificial Sequence
  Description of Artificial Sequence: Synthetic oligonucleotide
  Sense strand starting at position 3588 of SEQ ID NO: 1563427
uuguuaacaccuggaauag

SEQ ID NO: 1810186 - RNA, 19 nt, Artificial Sequence
  Description of Artificial Sequence: Synthetic oligonucleotide
  Antisense strand to SEQ ID NO: 1810185
cuauuccagguguuaacaa

SEQ ID NO: 1810187 - RNA, 19 nt, Artificial Sequence
  Description of Artificial Sequence: Synthetic oligonucleotide
  Sense strand starting at position 3615 of SEQ ID NO: 1563427
cagacauaacccgguuagu

SEQ ID NO: 1810188 - RNA, 19 nt, Artificial Sequence
  Description of Artificial Sequence: Synthetic oligonucleotide
  Antisense strand to SEQ ID NO: 1810187
acuaaccggguuaugucug

SEQ ID NO: 1810189 - RNA, 19 nt, Artificial Sequence
  Description of Artificial Sequence: Synthetic oligonucleotide
  Sense strand starting at position 3618 of SEQ ID NO: 1563427
acauaacccgguuagugau

SEQ ID NO: 1810190 - RNA, 19 nt, Artificial Sequence
  Description of Artificial Sequence: Synthetic oligonucleotide
  Antisense strand to SEQ ID NO: 1810189
aucacuaaccggguuaugu

SEQ ID NO: 1810191 - RNA, 19 nt, Artificial Sequence
  Description of Artificial Sequence: Synthetic oligonucleotide
  Sense strand starting at position 3689 of SEQ ID NO: 1563427
aggcuaaaguucuuaccuu

SEQ ID NO: 1810192 - RNA, 19 nt, Artificial Sequence
  Description of Artificial Sequence: Synthetic oligonucleotide
  Antisense strand to SEQ ID NO: 1810191
aagguaagaacuuuagccu

SEQ ID NO: 1810193 - RNA, 19 nt, Artificial Sequence
  Description of Artificial Sequence: Synthetic oligonucleotide
  Sense strand starting at position 3725 of SEQ ID NO: 1563427
gagaguaaagugcauguga

SEQ ID NO: 1810194 - RNA, 19 nt, Artificial Sequence
  Description of Artificial Sequence: Synthetic oligonucleotide
  Antisense strand to SEQ ID NO: 1810193
ucacaugcacuuuacucuc

SEQ ID NO: 1810195 - RNA, 19 nt, Artificial Sequence
  Description of Artificial Sequence: Synthetic oligonucleotide
  Sense strand starting at position 3738 of SEQ ID NO: 1563427
augugacccugucuuagga

SEQ ID NO: 1810196 - RNA, 19 nt, Artificial Sequence
  Description of Artificial Sequence: Synthetic oligonucleotide
  Antisense strand to SEQ ID NO: 1810195
uccuaagacagggucacau

SEQ ID NO: 1810197 - RNA, 19 nt, Artificial Sequence
  Description of Artificial Sequence: Synthetic oligonucleotide
  Sense strand starting at position 3802 of SEQ ID NO: 1563427
ggccuauuauccucagauc

SEQ ID NO: 1810198 - RNA, 19 nt, Artificial Sequence
  Description of Artificial Sequence: Synthetic oligonucleotide
  Antisense strand to SEQ ID NO: 1810197
gaucugaggauaauaggcc

SEQ ID NO: 1810199 - RNA, 19 nt, Artificial Sequence
  Description of Artificial Sequence: Synthetic oligonucleotide
  Sense strand starting at position 3832 of SEQ ID NO: 1563427
ggaaguccuaacugacuga

SEQ ID NO: 1810200 - RNA, 19 nt, Artificial Sequence
  Description of Artificial Sequence: Synthetic oligonucleotide
  Antisense strand to SEQ ID NO: 1810199
ucagucaguuaggacuucc

SEQ ID NO: 1810201 - RNA, 19 nt, Artificial Sequence
  Description of Artificial Sequence: Synthetic oligonucleotide
  Sense strand starting at position 3836 of SEQ ID NO: 1563427
guccuaacugacugagaga

SEQ ID NO: 1810202 - RNA, 19 nt, Artificial Sequence
  Description of Artificial Sequence: Synthetic oligonucleotide
  Antisense strand to SEQ ID NO: 1810201
ucucucagucaguuaggac

SEQ ID NO: 1810203 - RNA, 19 nt, Artificial Sequence
  Description of Artificial Sequence: Synthetic oligonucleotide
  Sense strand starting at position 863 of SEQ ID NO: 1563428
cugacauagucaguauguu

SEQ ID NO: 1810204 - RNA, 19 nt, Artificial Sequence
  Description of Artificial Sequence: Synthetic oligonucleotide
  Antisense strand to SEQ ID NO: 1810203
aacauacugacuaugucag

SEQ ID NO: 1810205 - RNA, 19 nt, Artificial Sequence
  Description of Artificial Sequence: Synthetic oligonucleotide
  Sense strand starting at position 864 of SEQ ID NO: 1563428
ugacauagucaguauguug

SEQ ID NO: 1810206 - RNA, 19 nt, Artificial Sequence
  Description of Artificial Sequence: Synthetic oligonucleotide
  Antisense strand to SEQ ID NO: 1810205
caacauacugacuauguca

SEQ ID NO: 1810207 - RNA, 19 nt, Artificial Sequence
  Description of Artificial Sequence: Synthetic oligonucleotide
  Sense strand starting at position 2846 of SEQ ID NO: 1563428
cugcucaguggugaucuau

SEQ ID NO: 1810208 - RNA, 19 nt, Artificial Sequence
  Description of Artificial Sequence: Synthetic oligonucleotide
  Antisense strand to SEQ ID NO: 1810207
auagaucaccacugagcag

SEQ ID NO: 1810209 - RNA, 19 nt, Artificial Sequence
  Description of Artificial Sequence: Synthetic oligonucleotide
  Sense strand starting at position 2854 of SEQ ID NO: 1563428
uggugaucuauuugugugu

SEQ ID NO: 1810210 - RNA, 19 nt, Artificial Sequence
  Description of Artificial Sequence: Synthetic oligonucleotide
  Antisense strand to SEQ ID NO: 1810209
acacacaaauagaucacca

SEQ ID NO: 1810211 - RNA, 19 nt, Artificial Sequence
  Description of Artificial Sequence: Synthetic oligonucleotide
  Sense strand starting at position 2861 of SEQ ID NO: 1563428
cuauuugugugucuggaag

SEQ ID NO: 1810212 - RNA, 19 nt, Artificial Sequence
  Description of Artificial Sequence: Synthetic oligonucleotide
  Antisense strand to SEQ ID NO: 1810211
cuuccagacacacaaauag

SEQ ID NO: 1810213 - RNA, 19 nt, Artificial Sequence
  Description of Artificial Sequence: Synthetic oligonucleotide
  Sense strand starting at position 3096 of SEQ ID NO: 1563428
uuggcacucauguggaaac

SEQ ID NO: 1810214 - RNA, 19 nt, Artificial Sequence
  Description of Artificial Sequence: Synthetic oligonucleotide
  Antisense strand to SEQ ID NO: 1810213
guuuccacaugagugccaa

SEQ ID NO: 1810215 - RNA, 19 nt, Artificial Sequence
  Description of Artificial Sequence: Synthetic oligonucleotide
  Sense strand starting at position 3098 of SEQ ID NO: 1563428
ggcacucauguggaaacua

SEQ ID NO: 1810216 - RNA, 19 nt, Artificial Sequence
  Description of Artificial Sequence: Synthetic oligonucleotide
  Antisense strand to SEQ ID NO: 1810215
uaguuuccacaugagugcc

SEQ ID NO: 1810217 - RNA, 19 nt, Artificial Sequence
  Description of Artificial Sequence: Synthetic oligonucleotide
  Sense strand starting at position 3210 of SEQ ID NO: 1563428
aguugcauagaaggauuaa

SEQ ID NO: 1810218 - RNA, 19 nt, Artificial Sequence
  Description of Artificial Sequence: Synthetic oligonucleotide
  Antisense strand to SEQ ID NO: 1810217
uuaauccuucuaugcaacu

SEQ ID NO: 1810219 - RNA, 19 nt, Artificial Sequence
  Description of Artificial Sequence: Synthetic oligonucleotide
  Sense strand starting at position 3364 of SEQ ID NO: 1563428
ccgacuugaucauuacauc

SEQ ID NO: 1810220 - RNA, 19 nt, Artificial Sequence
  Description of Artificial Sequence: Synthetic oligonucleotide
  Antisense strand to SEQ ID NO: 1810219
gauguaaugaucaagucgg

SEQ ID NO: 1810221 - RNA, 19 nt, Artificial Sequence
  Description of Artificial Sequence: Synthetic oligonucleotide
  Sense strand starting at position 3436 of SEQ ID NO: 1563428
guuaucauacaucaguuaa

SEQ ID NO: 1810222 - RNA, 19 nt, Artificial Sequence
  Description of Artificial Sequence: Synthetic oligonucleotide
  Antisense strand to SEQ ID NO: 1810221
uuaacugauguaugauaac

SEQ ID NO: 1810223 - RNA, 19 nt, Artificial Sequence
  Description of Artificial Sequence: Synthetic oligonucleotide
  Sense strand starting at position 3502 of SEQ ID NO: 1563428
guaccuccaguuuauuauu

SEQ ID NO: 1810224 - RNA, 19 nt, Artificial Sequence
  Description of Artificial Sequence: Synthetic oligonucleotide
  Antisense strand to SEQ ID NO: 1810223
aauaauaaacuggagguac

SEQ ID NO: 1810225 - RNA, 19 nt, Artificial Sequence
  Description of Artificial Sequence: Synthetic oligonucleotide
  Sense strand starting at position 3587 of SEQ ID NO: 1563428
uuguuaacaccuggaauag

SEQ ID NO: 1810226 - RNA, 19 nt, Artificial Sequence
  Description of Artificial Sequence: Synthetic oligonucleotide
  Antisense strand to SEQ ID NO: 1810225
cuauuccagguguuaacaa

SEQ ID NO: 1810227 - RNA, 19 nt, Artificial Sequence
  Description of Artificial Sequence: Synthetic oligonucleotide
  Sense strand starting at position 3614 of SEQ ID NO: 1563428
cagacauaacccgguuagu

SEQ ID NO: 1810228 - RNA, 19 nt, Artificial Sequence
  Description of Artificial Sequence: Synthetic oligonucleotide
  Antisense strand to SEQ ID NO: 1810227
acuaaccggguuaugucug

SEQ ID NO: 1810229 - RNA, 19 nt, Artificial Sequence
  Description of Artificial Sequence: Synthetic oligonucleotide
  Sense strand starting at position 3617 of SEQ ID NO: 1563428
acauaacccgguuagugau

SEQ ID NO: 1810230 - RNA, 19 nt, Artificial Sequence
  Description of Artificial Sequence: Synthetic oligonucleotide
  Antisense strand to SEQ ID NO: 1810229
aucacuaaccggguuaugu

SEQ ID NO: 1810231 - RNA, 19 nt, Artificial Sequence
  Description of Artificial Sequence: Synthetic oligonucleotide
  Sense strand starting at position 3688 of SEQ ID NO: 1563428
aggcuaaaguucuuaccuu

SEQ ID NO: 1810232 - RNA, 19 nt, Artificial Sequence
  Description of Artificial Sequence: Synthetic oligonucleotide
  Antisense strand to SEQ ID NO: 1810231
aagguaagaacuuuagccu

SEQ ID NO: 1810233 - RNA, 19 nt, Artificial Sequence
  Description of Artificial Sequence: Synthetic oligonucleotide
  Sense strand starting at position 3724 of SEQ ID NO: 1563428
gagaguaaagugcauguga

SEQ ID NO: 1810234 - RNA, 19 nt, Artificial Sequence
  Description of Artificial Sequence: Synthetic oligonucleotide
  Antisense strand to SEQ ID NO: 1810233
ucacaugcacuuuacucuc

SEQ ID NO: 1810235 - RNA, 19 nt, Artificial Sequence
  Description of Artificial Sequence: Synthetic oligonucleotide
  Sense strand starting at position 3737 of SEQ ID NO: 1563428
augugacccugucuuagga

SEQ ID NO: 1810236 - RNA, 19 nt, Artificial Sequence
  Description of Artificial Sequence: Synthetic oligonucleotide
  Antisense strand to SEQ ID NO: 1810235
uccuaagacagggucacau

SEQ ID NO: 1810237 - RNA, 19 nt, Artificial Sequence
  Description of Artificial Sequence: Synthetic oligonucleotide
  Sense strand starting at position 3801 of SEQ ID NO: 1563428
ggccuauuauccucagauc

SEQ ID NO: 1810238 - RNA, 19 nt, Artificial Sequence
  Description of Artificial Sequence: Synthetic oligonucleotide
  Antisense strand to SEQ ID NO: 1810237
gaucugaggauaauaggcc

SEQ ID NO: 1810239 - RNA, 19 nt, Artificial Sequence
  Description of Artificial Sequence: Synthetic oligonucleotide
  Sense strand starting at position 3831 of SEQ ID NO: 1563428
ggaaguccuaacugauuga

SEQ ID NO: 1810240 - RNA, 19 nt, Artificial Sequence
  Description of Artificial Sequence: Synthetic oligonucleotide
  Antisense strand to SEQ ID NO: 1810239
ucaaucaguuaggacuucc

SEQ ID NO: 1810241 - RNA, 19 nt, Artificial Sequence
  Description of Artificial Sequence: Synthetic oligonucleotide
  Sense strand starting at position 3834 of SEQ ID NO: 1563428
aguccuaacugauugagag

SEQ ID NO: 1810242 - RNA, 19 nt, Artificial Sequence
  Description of Artificial Sequence: Synthetic oligonucleotide
  Antisense strand to SEQ ID NO: 1810241
cucucaaucaguuaggacu

SEQ ID NO: 1810243 - RNA, 19 nt, Artificial Sequence
  Description of Artificial Sequence: Synthetic oligonucleotide
  Sense strand starting at position 3835 of SEQ ID NO: 1563428
guccuaacugauugagaga

SEQ ID NO: 1810244 - RNA, 19 nt, Artificial Sequence
  Description of Artificial Sequence: Synthetic oligonucleotide
  Antisense strand to SEQ ID NO: 1810243
ucucucaaucaguuaggac

SEQ ID NO: 1810245 - RNA, 19 nt, Artificial Sequence
  Description of Artificial Sequence: Synthetic oligonucleotide
  Sense strand starting at position 1 of SEQ ID NO: 1563429
auaucacauguuuaacagu

SEQ ID NO: 1810246 - RNA, 19 nt, Artificial Sequence
  Description of Artificial Sequence: Synthetic oligonucleotide
  Antisense strand to SEQ ID NO: 1810245
acuguuaaacaugugauau

SEQ ID NO: 1810247 - RNA, 19 nt, Artificial Sequence
  Description of Artificial Sequence: Synthetic oligonucleotide
  Sense strand starting at position 4 of SEQ ID NO: 1563429
ucacauguuuaacagugaa

SEQ ID NO: 1810248 - RNA, 19 nt, Artificial Sequence
  Description of Artificial Sequence: Synthetic oligonucleotide
  Antisense strand to SEQ ID NO: 1810247
uucacuguuaaacauguga

SEQ ID NO: 1810249 - RNA, 19 nt, Artificial Sequence
  Description of Artificial Sequence: Synthetic oligonucleotide
  Sense strand starting at position 396 of SEQ ID NO: 1563429
aaucguagcucagcuuuau

SEQ ID NO: 1810250 - RNA, 19 nt, Artificial Sequence
  Description of Artificial Sequence: Synthetic oligonucleotide
  Antisense strand to SEQ ID NO: 1810249
auaaagcugagcuacgauu

SEQ ID NO: 1810251 - RNA, 19 nt, Artificial Sequence
  Description of Artificial Sequence: Synthetic oligonucleotide
  Sense strand starting at position 803 of SEQ ID NO: 1563429
guguuuggguguucugaga

SEQ ID NO: 1810252 - RNA, 19 nt, Artificial Sequence
  Description of Artificial Sequence: Synthetic oligonucleotide
  Antisense strand to SEQ ID NO: 1810251
ucucagaacacccaaacac

SEQ ID NO: 1810253 - RNA, 19 nt, Artificial Sequence
  Description of Artificial Sequence: Synthetic oligonucleotide
  Sense strand starting at position 814 of SEQ ID NO: 1563429
uucugagaucucuagcuuu

SEQ ID NO: 1810254 - RNA, 19 nt, Artificial Sequence
  Description of Artificial Sequence: Synthetic oligonucleotide
  Antisense strand to SEQ ID NO: 1810253
aaagcuagagaucucagaa

SEQ ID NO: 1810255 - RNA, 19 nt, Artificial Sequence
  Description of Artificial Sequence: Synthetic oligonucleotide
  Sense strand starting at position 1031 of SEQ ID NO: 1563429
cgagaaaggcaucgugaug

SEQ ID NO: 1810256 - RNA, 19 nt, Artificial Sequence
  Description of Artificial Sequence: Synthetic oligonucleotide
  Antisense strand to SEQ ID NO: 1810255
caucacgaugccuuucucg

SEQ ID NO: 1810257 - RNA, 19 nt, Artificial Sequence
  Description of Artificial Sequence: Synthetic oligonucleotide
  Sense strand starting at position 1072 of SEQ ID NO: 1563429
ggugccaucuccuaggauu

SEQ ID NO: 1810258 - RNA, 19 nt, Artificial Sequence
  Description of Artificial Sequence: Synthetic oligonucleotide
  Antisense strand to SEQ ID NO: 1810257
aauccuaggagauggcacc

SEQ ID NO: 1810259 - RNA, 19 nt, Artificial Sequence
  Description of Artificial Sequence: Synthetic oligonucleotide
  Sense strand starting at position 1157 of SEQ ID NO: 1563429
ccacccagcugucuugauu

SEQ ID NO: 1810260 - RNA, 19 nt, Artificial Sequence
  Description of Artificial Sequence: Synthetic oligonucleotide
  Antisense strand to SEQ ID NO: 1810259
aaucaagacagcugggugg

SEQ ID NO: 1810261 - RNA, 19 nt, Artificial Sequence
  Description of Artificial Sequence: Synthetic oligonucleotide
  Sense strand starting at position 3069 of SEQ ID NO: 1563429
ccgauccaaucgucccaua

SEQ ID NO: 1810262 - RNA, 19 nt, Artificial Sequence
  Description of Artificial Sequence: Synthetic oligonucleotide
  Antisense strand to SEQ ID NO: 1810261
uaugggacgauuggaucgg

SEQ ID NO: 1810263 - RNA, 19 nt, Artificial Sequence
  Description of Artificial Sequence: Synthetic oligonucleotide
  Sense strand starting at position 3135 of SEQ ID NO: 1563429
gcuugaaccuuacaguugu

SEQ ID NO: 1810264 - RNA, 19 nt, Artificial Sequence
  Description of Artificial Sequence: Synthetic oligonucleotide
  Antisense strand to SEQ ID NO: 1810263
acaacuguaagguucaagc

SEQ ID NO: 1810265 - RNA, 19 nt, Artificial Sequence
  Description of Artificial Sequence: Synthetic oligonucleotide
  Sense strand starting at position 3163 of SEQ ID NO: 1563429
auuccuuccucaggaaaug

SEQ ID NO: 1810266 - RNA, 19 nt, Artificial Sequence
  Description of Artificial Sequence: Synthetic oligonucleotide
  Antisense strand to SEQ ID NO: 1810265
cauuuccugaggaaggaau

SEQ ID NO: 1810267 - RNA, 19 nt, Artificial Sequence
  Description of Artificial Sequence: Synthetic oligonucleotide
  Sense strand starting at position 3317 of SEQ ID NO: 1563429
gugcauuucuuccuggcua

SEQ ID NO: 1810268 - RNA, 19 nt, Artificial Sequence
  Description of Artificial Sequence: Synthetic oligonucleotide
  Antisense strand to SEQ ID NO: 1810267
uagccaggaagaaaugcac

SEQ ID NO: 1810269 - RNA, 19 nt, Artificial Sequence
  Description of Artificial Sequence: Synthetic oligonucleotide
  Sense strand starting at position 3318 of SEQ ID NO: 1563429
ugcauuucuuccuggcuau

SEQ ID NO: 1810270 - RNA, 19 nt, Artificial Sequence
  Description of Artificial Sequence: Synthetic oligonucleotide
  Antisense strand to SEQ ID NO: 1810269
auagccaggaagaaaugca

SEQ ID NO: 1810271 - RNA, 19 nt, Artificial Sequence
  Description of Artificial Sequence: Synthetic oligonucleotide
  Sense strand starting at position 3319 of SEQ ID NO: 1563429
gcauuucuuccuggcuaua

SEQ ID NO: 1810272 - RNA, 19 nt, Artificial Sequence
  Description of Artificial Sequence: Synthetic oligonucleotide
  Antisense strand to SEQ ID NO: 1810271
uauagccaggaagaaaugc

SEQ ID NO: 1810273 - RNA, 19 nt, Artificial Sequence
  Description of Artificial Sequence: Synthetic oligonucleotide
  Sense strand starting at position 3412 of SEQ ID NO: 1563429
agccgucuucccugguaau

SEQ ID NO: 1810274 - RNA, 19 nt, Artificial Sequence
  Description of Artificial Sequence: Synthetic oligonucleotide
  Antisense strand to SEQ ID NO: 1810273
auuaccagggaagacggcu

SEQ ID NO: 1810275 - RNA, 19 nt, Artificial Sequence
  Description of Artificial Sequence: Synthetic oligonucleotide
  Sense strand starting at position 3413 of SEQ ID NO: 1563429
gccgucuucccugguaaug

SEQ ID NO: 1810276 - RNA, 19 nt, Artificial Sequence
  Description of Artificial Sequence: Synthetic oligonucleotide
  Antisense strand to SEQ ID NO: 1810275
cauuaccagggaagacggc

SEQ ID NO: 1810277 - RNA, 19 nt, Artificial Sequence
  Description of Artificial Sequence: Synthetic oligonucleotide
  Sense strand starting at position 3423 of SEQ ID NO: 1563429
cugguaaugcucuucgucu

SEQ ID NO: 1810278 - RNA, 19 nt, Artificial Sequence
  Description of Artificial Sequence: Synthetic oligonucleotide
  Antisense strand to SEQ ID NO: 1810277
agacgaagagcauuaccag

SEQ ID NO: 1810279 - RNA, 19 nt, Artificial Sequence
  Description of Artificial Sequence: Synthetic oligonucleotide
  Sense strand starting at position 3425 of SEQ ID NO: 1563429
gguaaugcucuucgucuca

SEQ ID NO: 1810280 - RNA, 19 nt, Artificial Sequence
  Description of Artificial Sequence: Synthetic oligonucleotide
  Antisense strand to SEQ ID NO: 1810279
ugagacgaagagcauuacc

SEQ ID NO: 1810281 - RNA, 19 nt, Artificial Sequence
  Description of Artificial Sequence: Synthetic oligonucleotide
  Sense strand starting at position 3434 of SEQ ID NO: 1563429
cuucgucucagucagucau

SEQ ID NO: 1810282 - RNA, 19 nt, Artificial Sequence
  Description of Artificial Sequence: Synthetic oligonucleotide
  Antisense strand to SEQ ID NO: 1810281
augacugacugagacgaag

SEQ ID NO: 1810283 - RNA, 19 nt, Artificial Sequence
  Description of Artificial Sequence: Synthetic oligonucleotide
  Sense strand starting at position 3601 of SEQ ID NO: 1563429
agcuuuaaccuauguaugu

SEQ ID NO: 1810284 - RNA, 19 nt, Artificial Sequence
  Description of Artificial Sequence: Synthetic oligonucleotide
  Antisense strand to SEQ ID NO: 1810283
acauacauagguuaaagcu

SEQ ID NO: 1810285 - RNA, 19 nt, Artificial Sequence
  Description of Artificial Sequence: Synthetic oligonucleotide
  Sense strand starting at position 3611 of SEQ ID NO: 1563429
uauguaugucugugccaca

SEQ ID NO: 1810286 - RNA, 19 nt, Artificial Sequence
  Description of Artificial Sequence: Synthetic oligonucleotide
  Antisense strand to SEQ ID NO: 1810285
uguggcacagacauacaua

SEQ ID NO: 1810287 - RNA, 19 nt, Artificial Sequence
  Description of Artificial Sequence: Synthetic oligonucleotide
  Sense strand starting at position 3612 of SEQ ID NO: 1563429
auguaugucugugccacau

SEQ ID NO: 1810288 - RNA, 19 nt, Artificial Sequence
  Description of Artificial Sequence: Synthetic oligonucleotide
  Antisense strand to SEQ ID NO: 1810287
auguggcacagacauacau

SEQ ID NO: 1810289 - RNA, 19 nt, Artificial Sequence
  Description of Artificial Sequence: Synthetic oligonucleotide
  Sense strand starting at position 3806 of SEQ ID NO: 1563429
ugccucugcugcucuaaga

SEQ ID NO: 1810290 - RNA, 19 nt, Artificial Sequence
  Description of Artificial Sequence: Synthetic oligonucleotide
  Antisense strand to SEQ ID NO: 1810289
ucuuagagcagcagaggca

SEQ ID NO: 1810291 - RNA, 19 nt, Artificial Sequence
  Description of Artificial Sequence: Synthetic oligonucleotide
  Sense strand starting at position 206 of SEQ ID NO: 1563430
guuaaucugucucuuguuu

SEQ ID NO: 1810292 - RNA, 19 nt, Artificial Sequence
  Description of Artificial Sequence: Synthetic oligonucleotide
  Antisense strand to SEQ ID NO: 1810291
aaacaagagacagauuaac

SEQ ID NO: 1810293 - RNA, 19 nt, Artificial Sequence
  Description of Artificial Sequence: Synthetic oligonucleotide
  Sense strand starting at position 320 of SEQ ID NO: 1563430
uuuaaagcaccuuggauau

SEQ ID NO: 1810294 - RNA, 19 nt, Artificial Sequence
  Description of Artificial Sequence: Synthetic oligonucleotide
  Antisense strand to SEQ ID NO: 1810293
auauccaaggugcuuuaaa

SEQ ID NO: 1810295 - RNA, 19 nt, Artificial Sequence
  Description of Artificial Sequence: Synthetic oligonucleotide
  Sense strand starting at position 788 of SEQ ID NO: 1563430
ugaggauuguuucuggugu

SEQ ID NO: 1810296 - RNA, 19 nt, Artificial Sequence
  Description of Artificial Sequence: Synthetic oligonucleotide
  Antisense strand to SEQ ID NO: 1810295
acaccagaaacaauccuca

SEQ ID NO: 1810297 - RNA, 19 nt, Artificial Sequence
  Description of Artificial Sequence: Synthetic oligonucleotide
  Sense strand starting at position 878 of SEQ ID NO: 1563430
agcugugcugucuccacua

SEQ ID NO: 1810298 - RNA, 19 nt, Artificial Sequence
  Description of Artificial Sequence: Synthetic oligonucleotide
  Antisense strand to SEQ ID NO: 1810297
uaguggagacagcacagcu

SEQ ID NO: 1810299 - RNA, 19 nt, Artificial Sequence
  Description of Artificial Sequence: Synthetic oligonucleotide
  Sense strand starting at position 1045 of SEQ ID NO: 1563430
guaagaauguauuagugag

SEQ ID NO: 1810300 - RNA, 19 nt, Artificial Sequence
  Description of Artificial Sequence: Synthetic oligonucleotide
  Antisense strand to SEQ ID NO: 1810299
cucacuaauacauucuuac

SEQ ID NO: 1810301 - RNA, 19 nt, Artificial Sequence
  Description of Artificial Sequence: Synthetic oligonucleotide
  Sense strand starting at position 1095 of SEQ ID NO: 1563430
ucagaaaucaggugccugu

SEQ ID NO: 1810302 - RNA, 19 nt, Artificial Sequence
  Description of Artificial Sequence: Synthetic oligonucleotide
  Antisense strand to SEQ ID NO: 1810301
acaggcaccugauuucuga

SEQ ID NO: 1810303 - RNA, 19 nt, Artificial Sequence
  Description of Artificial Sequence: Synthetic oligonucleotide
  Sense strand starting at position 1120 of SEQ ID NO: 1563430
agcacaucucaguacggau

SEQ ID NO: 1810304 - RNA, 19 nt, Artificial Sequence
  Description of Artificial Sequence: Synthetic oligonucleotide
  Antisense strand to SEQ ID NO: 1810303
auccguacugagaugugcu

SEQ ID NO: 1810305 - RNA, 19 nt, Artificial Sequence
  Description of Artificial Sequence: Synthetic oligonucleotide
  Sense strand starting at position 1140 of SEQ ID NO: 1563430
uugccacauuuccaguauu

SEQ ID NO: 1810306 - RNA, 19 nt, Artificial Sequence
  Description of Artificial Sequence: Synthetic oligonucleotide
  Antisense strand to SEQ ID NO: 1810305
aauacuggaaauguggcaa

SEQ ID NO: 1810307 - RNA, 19 nt, Artificial Sequence
  Description of Artificial Sequence: Synthetic oligonucleotide
  Sense strand starting at position 1235 of SEQ ID NO: 1563430
agagacaccuucucaguga

SEQ ID NO: 1810308 - RNA, 19 nt, Artificial Sequence
  Description of Artificial Sequence: Synthetic oligonucleotide
  Antisense strand to SEQ ID NO: 1810307
ucacugagaaggugucucu

SEQ ID NO: 1810309 - RNA, 19 nt, Artificial Sequence
  Description of Artificial Sequence: Synthetic oligonucleotide
  Sense strand starting at position 1236 of SEQ ID NO: 1563430
gagacaccuucucagugau

SEQ ID NO: 1810310 - RNA, 19 nt, Artificial Sequence
  Description of Artificial Sequence: Synthetic oligonucleotide
  Antisense strand to SEQ ID NO: 1810309
aucacugagaaggugucuc

SEQ ID NO: 1810311 - RNA, 19 nt, Artificial Sequence
  Description of Artificial Sequence: Synthetic oligonucleotide
  Sense strand starting at position 1284 of SEQ ID NO: 1563430
aagaguacuuaccugauga

SEQ ID NO: 1810312 - RNA, 19 nt, Artificial Sequence
  Description of Artificial Sequence: Synthetic oligonucleotide
  Antisense strand to SEQ ID NO: 1810311
ucaucagguaaguacucuu

SEQ ID NO: 1810313 - RNA, 19 nt, Artificial Sequence
  Description of Artificial Sequence: Synthetic oligonucleotide
  Sense strand starting at position 1297 of SEQ ID NO: 1563430
ugaugaucuuguucuauga

SEQ ID NO: 1810314 - RNA, 19 nt, Artificial Sequence
  Description of Artificial Sequence: Synthetic oligonucleotide
  Antisense strand to SEQ ID NO: 1810313
ucauagaacaagaucauca

SEQ ID NO: 1810315 - RNA, 19 nt, Artificial Sequence
  Description of Artificial Sequence: Synthetic oligonucleotide
  Sense strand starting at position 1299 of SEQ ID NO: 1563430
augaucuuguucuaugaag

SEQ ID NO: 1810316 - RNA, 19 nt, Artificial Sequence
  Description of Artificial Sequence: Synthetic oligonucleotide
  Antisense strand to SEQ ID NO: 1810315
cuucauagaacaagaucau

SEQ ID NO: 1810317 - RNA, 19 nt, Artificial Sequence
  Description of Artificial Sequence: Synthetic oligonucleotide
  Sense strand starting at position 1301 of SEQ ID NO: 1563430
gaucuuguucuaugaaguu

SEQ ID NO: 1810318 - RNA, 19 nt, Artificial Sequence
  Description of Artificial Sequence: Synthetic oligonucleotide
  Antisense strand to SEQ ID NO: 1810317
aacuucauagaacaagauc

SEQ ID NO: 1810319 - RNA, 19 nt, Artificial Sequence
  Description of Artificial Sequence: Synthetic oligonucleotide
  Sense strand starting at position 1407 of SEQ ID NO: 1563430
gggaacuuugcagggugaa

SEQ ID NO: 1810320 - RNA, 19 nt, Artificial Sequence
  Description of Artificial Sequence: Synthetic oligonucleotide
  Antisense strand to SEQ ID NO: 1810319
uucacccugcaaaguuccc

SEQ ID NO: 1810321 - RNA, 19 nt, Artificial Sequence
  Description of Artificial Sequence: Synthetic oligonucleotide
  Sense strand starting at position 1408 of SEQ ID NO: 1563430
ggaacuuugcagggugaag

SEQ ID NO: 1810322 - RNA, 19 nt, Artificial Sequence
  Description of Artificial Sequence: Synthetic oligonucleotide
  Antisense strand to SEQ ID NO: 1810321
cuucacccugcaaaguucc

SEQ ID NO: 1810323 - RNA, 19 nt, Artificial Sequence
  Description of Artificial Sequence: Synthetic oligonucleotide
  Sense strand starting at position 1420 of SEQ ID NO: 1563430
ggugaaggaaauggucaau

SEQ ID NO: 1810324 - RNA, 19 nt, Artificial Sequence
  Description of Artificial Sequence: Synthetic oligonucleotide
  Antisense strand to SEQ ID NO: 1810323
auugaccauuuccuucacc

SEQ ID NO: 1810325 - RNA, 19 nt, Artificial Sequence
  Description of Artificial Sequence: Synthetic oligonucleotide
  Sense strand starting at position 1449 of SEQ ID NO: 1563430
ggauaaugguuacaggagu

SEQ ID NO: 1810326 - RNA, 19 nt, Artificial Sequence
  Description of Artificial Sequence: Synthetic oligonucleotide
  Antisense strand to SEQ ID NO: 1810325
acuccuguaaccauuaucc

SEQ ID NO: 1810327 - RNA, 19 nt, Artificial Sequence
  Description of Artificial Sequence: Synthetic oligonucleotide
  Sense strand starting at position 1455 of SEQ ID NO: 1563430
ugguuacaggaguguauaa

SEQ ID NO: 1810328 - RNA, 19 nt, Artificial Sequence
  Description of Artificial Sequence: Synthetic oligonucleotide
  Antisense strand to SEQ ID NO: 1810327
uuauacacuccuguaacca

SEQ ID NO: 1810329 - RNA, 19 nt, Artificial Sequence
  Description of Artificial Sequence: Synthetic oligonucleotide
  Sense strand starting at position 1457 of SEQ ID NO: 1563430
guuacaggaguguauaauu

SEQ ID NO: 1810330 - RNA, 19 nt, Artificial Sequence
  Description of Artificial Sequence: Synthetic oligonucleotide
  Antisense strand to SEQ ID NO: 1810329
aauuauacacuccuguaac

SEQ ID NO: 1810331 - RNA, 19 nt, Artificial Sequence
  Description of Artificial Sequence: Synthetic oligonucleotide
  Sense strand starting at position 1477 of SEQ ID NO: 1563430
gucaaaucccgucgauuug

SEQ ID NO: 1810332 - RNA, 19 nt, Artificial Sequence
  Description of Artificial Sequence: Synthetic oligonucleotide
  Antisense strand to SEQ ID NO: 1810331
caaaucgacgggauuugac

SEQ ID NO: 1810333 - RNA, 19 nt, Artificial Sequence
  Description of Artificial Sequence: Synthetic oligonucleotide
  Sense strand starting at position 2366 of SEQ ID NO: 1563430
ggguuugugcaauggucca

SEQ ID NO: 1810334 - RNA, 19 nt, Artificial Sequence
  Description of Artificial Sequence: Synthetic oligonucleotide
  Antisense strand to SEQ ID NO: 1810333
uggaccauugcacaaaccc

SEQ ID NO: 1810335 - RNA, 19 nt, Artificial Sequence
  Description of Artificial Sequence: Synthetic oligonucleotide
  Sense strand starting at position 2631 of SEQ ID NO: 1563430
gucacaaacgcuuguggau

SEQ ID NO: 1810336 - RNA, 19 nt, Artificial Sequence
  Description of Artificial Sequence: Synthetic oligonucleotide
  Antisense strand to SEQ ID NO: 1810335
auccacaagcguuugugac

SEQ ID NO: 1810337 - RNA, 19 nt, Artificial Sequence
  Description of Artificial Sequence: Synthetic oligonucleotide
  Sense strand starting at position 2767 of SEQ ID NO: 1563430
ccaguaagguucccuagaa

SEQ ID NO: 1810338 - RNA, 19 nt, Artificial Sequence
  Description of Artificial Sequence: Synthetic oligonucleotide
  Antisense strand to SEQ ID NO: 1810337
uucuagggaaccuuacugg

SEQ ID NO: 1810339 - RNA, 19 nt, Artificial Sequence
  Description of Artificial Sequence: Synthetic oligonucleotide
  Sense strand starting at position 2768 of SEQ ID NO: 1563430
caguaagguucccuagaac

SEQ ID NO: 1810340 - RNA, 19 nt, Artificial Sequence
  Description of Artificial Sequence: Synthetic oligonucleotide
  Antisense strand to SEQ ID NO: 1810339
guucuagggaaccuuacug

SEQ ID NO: 1810341 - RNA, 19 nt, Artificial Sequence
  Description of Artificial Sequence: Synthetic oligonucleotide
  Sense strand starting at position 2842 of SEQ ID NO: 1563430
ggcuuccaagagugacuuu

SEQ ID NO: 1810342 - RNA, 19 nt, Artificial Sequence
  Description of Artificial Sequence: Synthetic oligonucleotide
  Antisense strand to SEQ ID NO: 1810341
aaagucacucuuggaagcc

SEQ ID NO: 1810343 - RNA, 19 nt, Artificial Sequence
  Description of Artificial Sequence: Synthetic oligonucleotide
  Sense strand starting at position 3181 of SEQ ID NO: 1563430
ucacucuucgggugacuca

SEQ ID NO: 1810344 - RNA, 19 nt, Artificial Sequence
  Description of Artificial Sequence: Synthetic oligonucleotide
  Antisense strand to SEQ ID NO: 1810343
ugagucacccgaagaguga

SEQ ID NO: 1810345 - RNA, 19 nt, Artificial Sequence
  Description of Artificial Sequence: Synthetic oligonucleotide
  Sense strand starting at position 3603 of SEQ ID NO: 1563430
uuaggaaagugguggaaau

SEQ ID NO: 1810346 - RNA, 19 nt, Artificial Sequence
  Description of Artificial Sequence: Synthetic oligonucleotide
  Antisense strand to SEQ ID NO: 1810345
auuuccaccacuuuccuaa

SEQ ID NO: 1810347 - RNA, 19 nt, Artificial Sequence
  Description of Artificial Sequence: Synthetic oligonucleotide
  Sense strand starting at position 3604 of SEQ ID NO: 1563430
uaggaaagugguggaaauu

SEQ ID NO: 1810348 - RNA, 19 nt, Artificial Sequence
  Description of Artificial Sequence: Synthetic oligonucleotide
  Antisense strand to SEQ ID NO: 1810347
aauuuccaccacuuuccua

SEQ ID NO: 1810349 - RNA, 19 nt, Artificial Sequence
  Description of Artificial Sequence: Synthetic oligonucleotide
  Sense strand starting at position 3614 of SEQ ID NO: 1563430
guggaaauuucgcauaacc

SEQ ID NO: 1810350 - RNA, 19 nt, Artificial Sequence
  Description of Artificial Sequence: Synthetic oligonucleotide
  Antisense strand to SEQ ID NO: 1810349
gguuaugcgaaauuuccac

SEQ ID NO: 1810351 - RNA, 19 nt, Artificial Sequence
  Description of Artificial Sequence: Synthetic oligonucleotide
  Sense strand starting at position 3623 of SEQ ID NO: 1563430
ucgcauaaccagugugaga

SEQ ID NO: 1810352 - RNA, 19 nt, Artificial Sequence
  Description of Artificial Sequence: Synthetic oligonucleotide
  Antisense strand to SEQ ID NO: 1810351
ucucacacugguuaugcga

SEQ ID NO: 1810353 - RNA, 19 nt, Artificial Sequence
  Description of Artificial Sequence: Synthetic oligonucleotide
  Sense strand starting at position 3625 of SEQ ID NO: 1563430
gcauaaccagugugagaug

SEQ ID NO: 1810354 - RNA, 19 nt, Artificial Sequence
  Description of Artificial Sequence: Synthetic oligonucleotide
  Antisense strand to SEQ ID NO: 1810353
caucucacacugguuaugc

SEQ ID NO: 1810355 - RNA, 19 nt, Artificial Sequence
  Description of Artificial Sequence: Synthetic oligonucleotide
  Sense strand starting at position 3630 of SEQ ID NO: 1563430
accagugugagaugcuaga

SEQ ID NO: 1810356 - RNA, 19 nt, Artificial Sequence
  Description of Artificial Sequence: Synthetic oligonucleotide
  Antisense strand to SEQ ID NO: 1810355
ucuagcaucucacacuggu

SEQ ID NO: 1810357 - RNA, 19 nt, Artificial Sequence
  Description of Artificial Sequence: Synthetic oligonucleotide
  Sense strand starting at position 3636 of SEQ ID NO: 1563430
gugagaugcuagagcgaca

SEQ ID NO: 1810358 - RNA, 19 nt, Artificial Sequence
  Description of Artificial Sequence: Synthetic oligonucleotide
  Antisense strand to SEQ ID NO: 1810357
ugucgcucuagcaucucac

SEQ ID NO: 1810359 - RNA, 19 nt, Artificial Sequence
  Description of Artificial Sequence: Synthetic oligonucleotide
  Sense strand starting at position 3641 of SEQ ID NO: 1563430
augcuagagcgacaaguua

SEQ ID NO: 1810360 - RNA, 19 nt, Artificial Sequence
  Description of Artificial Sequence: Synthetic oligonucleotide
  Antisense strand to SEQ ID NO: 1810359
uaacuugucgcucuagcau

SEQ ID NO: 1810361 - RNA, 19 nt, Artificial Sequence
  Description of Artificial Sequence: Synthetic oligonucleotide
  Sense strand starting at position 3672 of SEQ ID NO: 1563430
ugaagaccuaguggaguuu

SEQ ID NO: 1810362 - RNA, 19 nt, Artificial Sequence
  Description of Artificial Sequence: Synthetic oligonucleotide
  Antisense strand to SEQ ID NO: 1810361
aaacuccacuaggucuuca

SEQ ID NO: 1810363 - RNA, 19 nt, Artificial Sequence
  Description of Artificial Sequence: Synthetic oligonucleotide
  Sense strand starting at position 3690 of SEQ ID NO: 1563430
uagaaaccaucaucgugua

SEQ ID NO: 1810364 - RNA, 19 nt, Artificial Sequence
  Description of Artificial Sequence: Synthetic oligonucleotide
  Antisense strand to SEQ ID NO: 1810363
uacacgaugaugguuucua

SEQ ID NO: 1810365 - RNA, 19 nt, Artificial Sequence
  Description of Artificial Sequence: Synthetic oligonucleotide
  Sense strand starting at position 3705 of SEQ ID NO: 1563430
uguagugguguccagcuau

SEQ ID NO: 1810366 - RNA, 19 nt, Artificial Sequence
  Description of Artificial Sequence: Synthetic oligonucleotide
  Antisense strand to SEQ ID NO: 1810365
auagcuggacaccacuaca

SEQ ID NO: 1810367 - RNA, 19 nt, Artificial Sequence
  Description of Artificial Sequence: Synthetic oligonucleotide
  Sense strand starting at position 3737 of SEQ ID NO: 1563430
cuggcaagguaucuacaga

SEQ ID NO: 1810368 - RNA, 19 nt, Artificial Sequence
  Description of Artificial Sequence: Synthetic oligonucleotide
  Antisense strand to SEQ ID NO: 1810367
ucuguagauaccuugccag

SEQ ID NO: 1810369 - RNA, 19 nt, Artificial Sequence
  Description of Artificial Sequence: Synthetic oligonucleotide
  Sense strand starting at position 3867 of SEQ ID NO: 1563430
gcucuaguccuagaggaca

SEQ ID NO: 1810370 - RNA, 19 nt, Artificial Sequence
  Description of Artificial Sequence: Synthetic oligonucleotide
  Antisense strand to SEQ ID NO: 1810369
uguccucuaggacuagagc

SEQ ID NO: 1810371 - RNA, 19 nt, Artificial Sequence
  Description of Artificial Sequence: Synthetic oligonucleotide
  Sense strand starting at position 26 of SEQ ID NO: 1563431
ugaggauuguuucuggugu

SEQ ID NO: 1810372 - RNA, 19 nt, Artificial Sequence
  Description of Artificial Sequence: Synthetic oligonucleotide
  Antisense strand to SEQ ID NO: 1810371
acaccagaaacaauccuca

SEQ ID NO: 1810373 - RNA, 19 nt, Artificial Sequence
  Description of Artificial Sequence: Synthetic oligonucleotide
  Sense strand starting at position 116 of SEQ ID NO: 1563431
agcugugcugucuccacua

SEQ ID NO: 1810374 - RNA, 19 nt, Artificial Sequence
  Description of Artificial Sequence: Synthetic oligonucleotide
  Antisense strand to SEQ ID NO: 1810373
uaguggagacagcacagcu

SEQ ID NO: 1810375 - RNA, 19 nt, Artificial Sequence
  Description of Artificial Sequence: Synthetic oligonucleotide
  Sense strand starting at position 333 of SEQ ID NO: 1563431
ucagaaaucaggugccugu

SEQ ID NO: 1810376 - RNA, 19 nt, Artificial Sequence
  Description of Artificial Sequence: Synthetic oligonucleotide
  Antisense strand to SEQ ID NO: 1810375
acaggcaccugauuucuga

SEQ ID NO: 1810377 - RNA, 19 nt, Artificial Sequence
  Description of Artificial Sequence: Synthetic oligonucleotide
  Sense strand starting at position 358 of SEQ ID NO: 1563431
agcacaucucaguacggau

SEQ ID NO: 1810378 - RNA, 19 nt, Artificial Sequence
  Description of Artificial Sequence: Synthetic oligonucleotide
  Antisense strand to SEQ ID NO: 1810377
auccguacugagaugugcu

SEQ ID NO: 1810379 - RNA, 19 nt, Artificial Sequence
  Description of Artificial Sequence: Synthetic oligonucleotide
  Sense strand starting at position 378 of SEQ ID NO: 1563431
uugccacauuuccaguauu

SEQ ID NO: 1810380 - RNA, 19 nt, Artificial Sequence
  Description of Artificial Sequence: Synthetic oligonucleotide
  Antisense strand to SEQ ID NO: 1810379
aauacuggaaauguggcaa

SEQ ID NO: 1810381 - RNA, 19 nt, Artificial Sequence
  Description of Artificial Sequence: Synthetic oligonucleotide
  Sense strand starting at position 473 of SEQ ID NO: 1563431
agagacaccuucucaguga

SEQ ID NO: 1810382 - RNA, 19 nt, Artificial Sequence
  Description of Artificial Sequence: Synthetic oligonucleotide
  Antisense strand to SEQ ID NO: 1810381
ucacugagaaggugucucu

SEQ ID NO: 1810383 - RNA, 19 nt, Artificial Sequence
  Description of Artificial Sequence: Synthetic oligonucleotide
  Sense strand starting at position 522 of SEQ ID NO: 1563431
aagaguacuuaccugauga

SEQ ID NO: 1810384 - RNA, 19 nt, Artificial Sequence
  Description of Artificial Sequence: Synthetic oligonucleotide
  Antisense strand to SEQ ID NO: 1810383
ucaucagguaaguacucuu

SEQ ID NO: 1810385 - RNA, 19 nt, Artificial Sequence
  Description of Artificial Sequence: Synthetic oligonucleotide
  Sense strand starting at position 535 of SEQ ID NO: 1563431
ugaugaucuuguucuauga

SEQ ID NO: 1810386 - RNA, 19 nt, Artificial Sequence
  Description of Artificial Sequence: Synthetic oligonucleotide
  Antisense strand to SEQ ID NO: 1810385
ucauagaacaagaucauca

SEQ ID NO: 1810387 - RNA, 19 nt, Artificial Sequence
  Description of Artificial Sequence: Synthetic oligonucleotide
  Sense strand starting at position 539 of SEQ ID NO: 1563431
gaucuuguucuaugaaguu

SEQ ID NO: 1810388 - RNA, 19 nt, Artificial Sequence
  Description of Artificial Sequence: Synthetic oligonucleotide
  Antisense strand to SEQ ID NO: 1810387
aacuucauagaacaagauc

SEQ ID NO: 1810389 - RNA, 19 nt, Artificial Sequence
  Description of Artificial Sequence: Synthetic oligonucleotide
  Sense strand starting at position 645 of SEQ ID NO: 1563431
gggaacuuugcagggugaa

SEQ ID NO: 1810390 - RNA, 19 nt, Artificial Sequence
  Description of Artificial Sequence: Synthetic oligonucleotide
  Antisense strand to SEQ ID NO: 1810389
uucacccugcaaaguuccc

SEQ ID NO: 1810391 - RNA, 19 nt, Artificial Sequence
  Description of Artificial Sequence: Synthetic oligonucleotide
  Sense strand starting at position 646 of SEQ ID NO: 1563431
ggaacuuugcagggugaag

SEQ ID NO: 1810392 - RNA, 19 nt, Artificial Sequence
  Description of Artificial Sequence: Synthetic oligonucleotide
  Antisense strand to SEQ ID NO: 1810391
cuucacccugcaaaguucc

SEQ ID NO: 1810393 - RNA, 19 nt, Artificial Sequence
  Description of Artificial Sequence: Synthetic oligonucleotide
  Sense strand starting at position 658 of SEQ ID NO: 1563431
ggugaaggaaauggucaau

SEQ ID NO: 1810394 - RNA, 19 nt, Artificial Sequence
  Description of Artificial Sequence: Synthetic oligonucleotide
  Antisense strand to SEQ ID NO: 1810393
auugaccauuuccuucacc

SEQ ID NO: 1810395 - RNA, 19 nt, Artificial Sequence
  Description of Artificial Sequence: Synthetic oligonucleotide
  Sense strand starting at position 687 of SEQ ID NO: 1563431
ggauaaugguuacaggagu

SEQ ID NO: 1810396 - RNA, 19 nt, Artificial Sequence
  Description of Artificial Sequence: Synthetic oligonucleotide
  Antisense strand to SEQ ID NO: 1810395
acuccuguaaccauuaucc

SEQ ID NO: 1810397 - RNA, 19 nt, Artificial Sequence
  Description of Artificial Sequence: Synthetic oligonucleotide
  Sense strand starting at position 693 of SEQ ID NO: 1563431
ugguuacaggaguguauaa

SEQ ID NO: 1810398 - RNA, 19 nt, Artificial Sequence
  Description of Artificial Sequence: Synthetic oligonucleotide
  Antisense strand to SEQ ID NO: 1810397
uuauacacuccuguaacca

SEQ ID NO: 1810399 - RNA, 19 nt, Artificial Sequence
  Description of Artificial Sequence: Synthetic oligonucleotide
  Sense strand starting at position 695 of SEQ ID NO: 1563431
guuacaggaguguauaauu

SEQ ID NO: 1810400 - RNA, 19 nt, Artificial Sequence
  Description of Artificial Sequence: Synthetic oligonucleotide
  Antisense strand to SEQ ID NO: 1810399
aauuauacacuccuguaac

SEQ ID NO: 1810401 - RNA, 19 nt, Artificial Sequence
  Description of Artificial Sequence: Synthetic oligonucleotide
  Sense strand starting at position 715 of SEQ ID NO: 1563431
gucaaaucccgucgauuug

SEQ ID NO: 1810402 - RNA, 19 nt, Artificial Sequence
  Description of Artificial Sequence: Synthetic oligonucleotide
  Antisense strand to SEQ ID NO: 1810401
caaaucgacgggauuugac

SEQ ID NO: 1810403 - RNA, 19 nt, Artificial Sequence
  Description of Artificial Sequence: Synthetic oligonucleotide
  Sense strand starting at position 1604 of SEQ ID NO: 1563431
ggguuugugcaauggucca

SEQ ID NO: 1810404 - RNA, 19 nt, Artificial Sequence
  Description of Artificial Sequence: Synthetic oligonucleotide
  Antisense strand to SEQ ID NO: 1810403
uggaccauugcacaaaccc

SEQ ID NO: 1810405 - RNA, 19 nt, Artificial Sequence
  Description of Artificial Sequence: Synthetic oligonucleotide
  Sense strand starting at position 1869 of SEQ ID NO: 1563431
gucacaaacgcuuguggau

SEQ ID NO: 1810406 - RNA, 19 nt, Artificial Sequence
  Description of Artificial Sequence: Synthetic oligonucleotide
  Antisense strand to SEQ ID NO: 1810405
auccacaagcguuugugac

SEQ ID NO: 1810407 - RNA, 19 nt, Artificial Sequence
  Description of Artificial Sequence: Synthetic oligonucleotide
  Sense strand starting at position 2005 of SEQ ID NO: 1563431
ccaguaagguucccuagaa

SEQ ID NO: 1810408 - RNA, 19 nt, Artificial Sequence
  Description of Artificial Sequence: Synthetic oligonucleotide
  Antisense strand to SEQ ID NO: 1810407
uucuagggaaccuuacugg

SEQ ID NO: 1810409 - RNA, 19 nt, Artificial Sequence
  Description of Artificial Sequence: Synthetic oligonucleotide
  Sense strand starting at position 2006 of SEQ ID NO: 1563431
caguaagguucccuagaac

SEQ ID NO: 1810410 - RNA, 19 nt, Artificial Sequence
  Description of Artificial Sequence: Synthetic oligonucleotide
  Antisense strand to SEQ ID NO: 1810409
guucuagggaaccuuacug

SEQ ID NO: 1810411 - RNA, 19 nt, Artificial Sequence
  Description of Artificial Sequence: Synthetic oligonucleotide
  Sense strand starting at position 2080 of SEQ ID NO: 1563431
ggcuuccaagagugacuuu

SEQ ID NO: 1810412 - RNA, 19 nt, Artificial Sequence
  Description of Artificial Sequence: Synthetic oligonucleotide
  Antisense strand to SEQ ID NO: 1810411
aaagucacucuuggaagcc

SEQ ID NO: 1810413 - RNA, 19 nt, Artificial Sequence
  Description of Artificial Sequence: Synthetic oligonucleotide
  Sense strand starting at position 2419 of SEQ ID NO: 1563431
ucacucuucgggugacuca

SEQ ID NO: 1810414 - RNA, 19 nt, Artificial Sequence
  Description of Artificial Sequence: Synthetic oligonucleotide
  Antisense strand to SEQ ID NO: 1810413
ugagucacccgaagaguga

SEQ ID NO: 1810415 - RNA, 19 nt, Artificial Sequence
  Description of Artificial Sequence: Synthetic oligonucleotide
  Sense strand starting at position 2842 of SEQ ID NO: 1563431
uaggaaagugguggaaauu

SEQ ID NO: 1810416 - RNA, 19 nt, Artificial Sequence
  Description of Artificial Sequence: Synthetic oligonucleotide
  Antisense strand to SEQ ID NO: 1810415
aauuuccaccacuuuccua

SEQ ID NO: 1810417 - RNA, 19 nt, Artificial Sequence
  Description of Artificial Sequence: Synthetic oligonucleotide
  Sense strand starting at position 2852 of SEQ ID NO: 1563431
guggaaauuucgcauaacc

SEQ ID NO: 1810418 - RNA, 19 nt, Artificial Sequence
  Description of Artificial Sequence: Synthetic oligonucleotide
  Antisense strand to SEQ ID NO: 1810417
gguuaugcgaaauuuccac

SEQ ID NO: 1810419 - RNA, 19 nt, Artificial Sequence
  Description of Artificial Sequence: Synthetic oligonucleotide
  Sense strand starting at position 2861 of SEQ ID NO: 1563431
ucgcauaaccagugugaga

SEQ ID NO: 1810420 - RNA, 19 nt, Artificial Sequence
  Description of Artificial Sequence: Synthetic oligonucleotide
  Antisense strand to SEQ ID NO: 1810419
ucucacacugguuaugcga

SEQ ID NO: 1810421 - RNA, 19 nt, Artificial Sequence
  Description of Artificial Sequence: Synthetic oligonucleotide
  Sense strand starting at position 2863 of SEQ ID NO: 1563431
gcauaaccagugugagaug

SEQ ID NO: 1810422 - RNA, 19 nt, Artificial Sequence
  Description of Artificial Sequence: Synthetic oligonucleotide
  Antisense strand to SEQ ID NO: 1810421
caucucacacugguuaugc

SEQ ID NO: 1810423 - RNA, 19 nt, Artificial Sequence
  Description of Artificial Sequence: Synthetic oligonucleotide
  Sense strand starting at position 2868 of SEQ ID NO: 1563431
accagugugagaugcuaga

SEQ ID NO: 1810424 - RNA, 19 nt, Artificial Sequence
  Description of Artificial Sequence: Synthetic oligonucleotide
  Antisense strand to SEQ ID NO: 1810423
ucuagcaucucacacuggu

SEQ ID NO: 1810425 - RNA, 19 nt, Artificial Sequence
  Description of Artificial Sequence: Synthetic oligonucleotide
  Sense strand starting at position 2874 of SEQ ID NO: 1563431
gugagaugcuagagcgaca

SEQ ID NO: 1810426 - RNA, 19 nt, Artificial Sequence
  Description of Artificial Sequence: Synthetic oligonucleotide
  Antisense strand to SEQ ID NO: 1810425
ugucgcucuagcaucucac

SEQ ID NO: 1810427 - RNA, 19 nt, Artificial Sequence
  Description of Artificial Sequence: Synthetic oligonucleotide
  Sense strand starting at position 2879 of SEQ ID NO: 1563431
augcuagagcgacaaguua

SEQ ID NO: 1810428 - RNA, 19 nt, Artificial Sequence
  Description of Artificial Sequence: Synthetic oligonucleotide
  Antisense strand to SEQ ID NO: 1810427
uaacuugucgcucuagcau

SEQ ID NO: 1810429 - RNA, 19 nt, Artificial Sequence
  Description of Artificial Sequence: Synthetic oligonucleotide
  Sense strand starting at position 2910 of SEQ ID NO: 1563431
ugaagaccuaguggaguuu

SEQ ID NO: 1810430 - RNA, 19 nt, Artificial Sequence
  Description of Artificial Sequence: Synthetic oligonucleotide
  Antisense strand to SEQ ID NO: 1810429
aaacuccacuaggucuuca

SEQ ID NO: 1810431 - RNA, 19 nt, Artificial Sequence
  Description of Artificial Sequence: Synthetic oligonucleotide
  Sense strand starting at position 2928 of SEQ ID NO: 1563431
uagaaaccaucaucgugua

SEQ ID NO: 1810432 - RNA, 19 nt, Artificial Sequence
  Description of Artificial Sequence: Synthetic oligonucleotide
  Antisense strand to SEQ ID NO: 1810431
uacacgaugaugguuucua

SEQ ID NO: 1810433 - RNA, 19 nt, Artificial Sequence
  Description of Artificial Sequence: Synthetic oligonucleotide
  Sense strand starting at position 2943 of SEQ ID NO: 1563431
uguagugguguccagcuau

SEQ ID NO: 1810434 - RNA, 19 nt, Artificial Sequence
  Description of Artificial Sequence: Synthetic oligonucleotide
  Antisense strand to SEQ ID NO: 1810433
auagcuggacaccacuaca

SEQ ID NO: 1810435 - RNA, 19 nt, Artificial Sequence
  Description of Artificial Sequence: Synthetic oligonucleotide
  Sense strand starting at position 2975 of SEQ ID NO: 1563431
cuggcaagguaucuacaga

SEQ ID NO: 1810436 - RNA, 19 nt, Artificial Sequence
  Description of Artificial Sequence: Synthetic oligonucleotide
  Antisense strand to SEQ ID NO: 1810435
ucuguagauaccuugccag

SEQ ID NO: 1810437 - RNA, 19 nt, Artificial Sequence
  Description of Artificial Sequence: Synthetic oligonucleotide
  Sense strand starting at position 3105 of SEQ ID NO: 1563431
gcucuaguccuagaggaca

SEQ ID NO: 1810438 - RNA, 19 nt, Artificial Sequence
  Description of Artificial Sequence: Synthetic oligonucleotide
  Antisense strand to SEQ ID NO: 1810437
uguccucuaggacuagagc

SEQ ID NO: 1810439 - RNA, 19 nt, Artificial Sequence
  Description of Artificial Sequence: Synthetic oligonucleotide
  Sense strand starting at position 3454 of SEQ ID NO: 1563431
gguagugagccugaaacua

SEQ ID NO: 1810440 - RNA, 19 nt, Artificial Sequence
  Description of Artificial Sequence: Synthetic oligonucleotide
  Antisense strand to SEQ ID NO: 1810439
uaguuucaggcucacuacc

SEQ ID NO: 1810441 - RNA, 19 nt, Artificial Sequence
  Description of Artificial Sequence: Synthetic oligonucleotide
  Sense strand starting at position 3462 of SEQ ID NO: 1563431
gccugaaacuaauagauga

SEQ ID NO: 1810442 - RNA, 19 nt, Artificial Sequence
  Description of Artificial Sequence: Synthetic oligonucleotide
  Antisense strand to SEQ ID NO: 1810441
ucaucuauuaguuucaggc

SEQ ID NO: 1810443 - RNA, 19 nt, Artificial Sequence
  Description of Artificial Sequence: Synthetic oligonucleotide
  Sense strand starting at position 3470 of SEQ ID NO: 1563431
cuaauagaugacugugaca

SEQ ID NO: 1810444 - RNA, 19 nt, Artificial Sequence
  Description of Artificial Sequence: Synthetic oligonucleotide
  Antisense strand to SEQ ID NO: 1810443
ugucacagucaucuauuag

SEQ ID NO: 1810445 - RNA, 19 nt, Artificial Sequence
  Description of Artificial Sequence: Synthetic oligonucleotide
  Sense strand starting at position 3475 of SEQ ID NO: 1563431
agaugacugugacaaggaa

SEQ ID NO: 1810446 - RNA, 19 nt, Artificial Sequence
  Description of Artificial Sequence: Synthetic oligonucleotide
  Antisense strand to SEQ ID NO: 1810445
uuccuugucacagucaucu

SEQ ID NO: 1810447 - RNA, 19 nt, Artificial Sequence
  Description of Artificial Sequence: Synthetic oligonucleotide
  Sense strand starting at position 3509 of SEQ ID NO: 1563431
gaacaaaugucagugccuu

SEQ ID NO: 1810448 - RNA, 19 nt, Artificial Sequence
  Description of Artificial Sequence: Synthetic oligonucleotide
  Antisense strand to SEQ ID NO: 1810447
aaggcacugacauuuguuc

SEQ ID NO: 1810449 - RNA, 19 nt, Artificial Sequence
  Description of Artificial Sequence: Synthetic oligonucleotide
  Sense strand starting at position 3621 of SEQ ID NO: 1563431
uggugacuuaccuggacaa

SEQ ID NO: 1810450 - RNA, 19 nt, Artificial Sequence
  Description of Artificial Sequence: Synthetic oligonucleotide
  Antisense strand to SEQ ID NO: 1810449
uuguccagguaagucacca

SEQ ID NO: 1810451 - RNA, 19 nt, Artificial Sequence
  Description of Artificial Sequence: Synthetic oligonucleotide
  Sense strand starting at position 327 of SEQ ID NO: 1563432
ugaggauuguuucuggugu

SEQ ID NO: 1810452 - RNA, 19 nt, Artificial Sequence
  Description of Artificial Sequence: Synthetic oligonucleotide
  Antisense strand to SEQ ID NO: 1810451
acaccagaaacaauccuca

SEQ ID NO: 1810453 - RNA, 19 nt, Artificial Sequence
  Description of Artificial Sequence: Synthetic oligonucleotide
  Sense strand starting at position 417 of SEQ ID NO: 1563432
agcugugcugucuccacua

SEQ ID NO: 1810454 - RNA, 19 nt, Artificial Sequence
  Description of Artificial Sequence: Synthetic oligonucleotide
  Antisense strand to SEQ ID NO: 1810453
uaguggagacagcacagcu

SEQ ID NO: 1810455 - RNA, 19 nt, Artificial Sequence
  Description of Artificial Sequence: Synthetic oligonucleotide
  Sense strand starting at position 634 of SEQ ID NO: 1563432
ucagaaaucaggugccugu

SEQ ID NO: 1810456 - RNA, 19 nt, Artificial Sequence
  Description of Artificial Sequence: Synthetic oligonucleotide
  Antisense strand to SEQ ID NO: 1810455
acaggcaccugauuucuga

SEQ ID NO: 1810457 - RNA, 19 nt, Artificial Sequence
  Description of Artificial Sequence: Synthetic oligonucleotide
  Sense strand starting at position 659 of SEQ ID NO: 1563432
agcacaucucaguacggau

SEQ ID NO: 1810458 - RNA, 19 nt, Artificial Sequence
  Description of Artificial Sequence: Synthetic oligonucleotide
  Antisense strand to SEQ ID NO: 1810457
auccguacugagaugugcu

SEQ ID NO: 1810459 - RNA, 19 nt, Artificial Sequence
  Description of Artificial Sequence: Synthetic oligonucleotide
  Sense strand starting at position 679 of SEQ ID NO: 1563432
uugccacauuuccaguauu

SEQ ID NO: 1810460 - RNA, 19 nt, Artificial Sequence
  Description of Artificial Sequence: Synthetic oligonucleotide
  Antisense strand to SEQ ID NO: 1810459
aauacuggaaauguggcaa

SEQ ID NO: 1810461 - RNA, 19 nt, Artificial Sequence
  Description of Artificial Sequence: Synthetic oligonucleotide
  Sense strand starting at position 774 of SEQ ID NO: 1563432
agagacaccuucucaguga

SEQ ID NO: 1810462 - RNA, 19 nt, Artificial Sequence
  Description of Artificial Sequence: Synthetic oligonucleotide
  Antisense strand to SEQ ID NO: 1810461
ucacugagaaggugucucu

SEQ ID NO: 1810463 - RNA, 19 nt, Artificial Sequence
  Description of Artificial Sequence: Synthetic oligonucleotide
  Sense strand starting at position 823 of SEQ ID NO: 1563432
aagaguacuuaccugauga

SEQ ID NO: 1810464 - RNA, 19 nt, Artificial Sequence
  Description of Artificial Sequence: Synthetic oligonucleotide
  Antisense strand to SEQ ID NO: 1810463
ucaucagguaaguacucuu

SEQ ID NO: 1810465 - RNA, 19 nt, Artificial Sequence
  Description of Artificial Sequence: Synthetic oligonucleotide
  Sense strand starting at position 836 of SEQ ID NO: 1563432
ugaugaucuuguucuauga

SEQ ID NO: 1810466 - RNA, 19 nt, Artificial Sequence
  Description of Artificial Sequence: Synthetic oligonucleotide
  Antisense strand to SEQ ID NO: 1810465
ucauagaacaagaucauca

SEQ ID NO: 1810467 - RNA, 19 nt, Artificial Sequence
  Description of Artificial Sequence: Synthetic oligonucleotide
  Sense strand starting at position 840 of SEQ ID NO: 1563432
gaucuuguucuaugaaguu

SEQ ID NO: 1810468 - RNA, 19 nt, Artificial Sequence
  Description of Artificial Sequence: Synthetic oligonucleotide
  Antisense strand to SEQ ID NO: 1810467
aacuucauagaacaagauc

SEQ ID NO: 1810469 - RNA, 19 nt, Artificial Sequence
  Description of Artificial Sequence: Synthetic oligonucleotide
  Sense strand starting at position 946 of SEQ ID NO: 1563432
gggaacuuugcagggugaa

SEQ ID NO: 1810470 - RNA, 19 nt, Artificial Sequence
  Description of Artificial Sequence: Synthetic oligonucleotide
  Antisense strand to SEQ ID NO: 1810469
uucacccugcaaaguuccc

SEQ ID NO: 1810471 - RNA, 19 nt, Artificial Sequence
  Description of Artificial Sequence: Synthetic oligonucleotide
  Sense strand starting at position 947 of SEQ ID NO: 1563432
ggaacuuugcagggugaag

SEQ ID NO: 1810472 - RNA, 19 nt, Artificial Sequence
  Description of Artificial Sequence: Synthetic oligonucleotide
  Antisense strand to SEQ ID NO: 1810471
cuucacccugcaaaguucc

SEQ ID NO: 1810473 - RNA, 19 nt, Artificial Sequence
  Description of Artificial Sequence: Synthetic oligonucleotide
  Sense strand starting at position 959 of SEQ ID NO: 1563432
ggugaaggaaauggucaau

SEQ ID NO: 1810474 - RNA, 19 nt, Artificial Sequence
  Description of Artificial Sequence: Synthetic oligonucleotide
  Antisense strand to SEQ ID NO: 1810473
auugaccauuuccuucacc

SEQ ID NO: 1810475 - RNA, 19 nt, Artificial Sequence
  Description of Artificial Sequence: Synthetic oligonucleotide
  Sense strand starting at position 988 of SEQ ID NO: 1563432
ggauaaugguuacaggagu

SEQ ID NO: 1810476 - RNA, 19 nt, Artificial Sequence
  Description of Artificial Sequence: Synthetic oligonucleotide
  Antisense strand to SEQ ID NO: 1810475
acuccuguaaccauuaucc

SEQ ID NO: 1810477 - RNA, 19 nt, Artificial Sequence
  Description of Artificial Sequence: Synthetic oligonucleotide
  Sense strand starting at position 994 of SEQ ID NO: 1563432
ugguuacaggaguguauaa

SEQ ID NO: 1810478 - RNA, 19 nt, Artificial Sequence
  Description of Artificial Sequence: Synthetic oligonucleotide
  Antisense strand to SEQ ID NO: 1810477
uuauacacuccuguaacca

SEQ ID NO: 1810479 - RNA, 19 nt, Artificial Sequence
  Description of Artificial Sequence: Synthetic oligonucleotide
  Sense strand starting at position 996 of SEQ ID NO: 1563432
guuacaggaguguauaauu

SEQ ID NO: 1810480 - RNA, 19 nt, Artificial Sequence
  Description of Artificial Sequence: Synthetic oligonucleotide
  Antisense strand to SEQ ID NO: 1810479
aauuauacacuccuguaac

SEQ ID NO: 1810481 - RNA, 19 nt, Artificial Sequence
  Description of Artificial Sequence: Synthetic oligonucleotide
  Sense strand starting at position 1016 of SEQ ID NO: 1563432
gucaaaucccgucgauuug

SEQ ID NO: 1810482 - RNA, 19 nt, Artificial Sequence
  Description of Artificial Sequence: Synthetic oligonucleotide
  Antisense strand to SEQ ID NO: 1810481
caaaucgacgggauuugac

SEQ ID NO: 1810483 - RNA, 19 nt, Artificial Sequence
  Description of Artificial Sequence: Synthetic oligonucleotide
  Sense strand starting at position 1905 of SEQ ID NO: 1563432
ggguuugugcaauggucca

SEQ ID NO: 1810484 - RNA, 19 nt, Artificial Sequence
  Description of Artificial Sequence: Synthetic oligonucleotide
  Antisense strand to SEQ ID NO: 1810483
uggaccauugcacaaaccc

SEQ ID NO: 1810485 - RNA, 19 nt, Artificial Sequence
  Description of Artificial Sequence: Synthetic oligonucleotide
  Sense strand starting at position 2170 of SEQ ID NO: 1563432
gucacaaacgcuuguggau

SEQ ID NO: 1810486 - RNA, 19 nt, Artificial Sequence
  Description of Artificial Sequence: Synthetic oligonucleotide
  Antisense strand to SEQ ID NO: 1810485
auccacaagcguuugugac

SEQ ID NO: 1810487 - RNA, 19 nt, Artificial Sequence
  Description of Artificial Sequence: Synthetic oligonucleotide
  Sense strand starting at position 2306 of SEQ ID NO: 1563432
ccaguaagguucccuagaa

SEQ ID NO: 1810488 - RNA, 19 nt, Artificial Sequence
  Description of Artificial Sequence: Synthetic oligonucleotide
  Antisense strand to SEQ ID NO: 1810487
uucuagggaaccuuacugg

SEQ ID NO: 1810489 - RNA, 19 nt, Artificial Sequence
  Description of Artificial Sequence: Synthetic oligonucleotide
  Sense strand starting at position 2307 of SEQ ID NO: 1563432
caguaagguucccuagaac

SEQ ID NO: 1810490 - RNA, 19 nt, Artificial Sequence
  Description of Artificial Sequence: Synthetic oligonucleotide
  Antisense strand to SEQ ID NO: 1810489
guucuagggaaccuuacug

SEQ ID NO: 1810491 - RNA, 19 nt, Artificial Sequence
  Description of Artificial Sequence: Synthetic oligonucleotide
  Sense strand starting at position 2381 of SEQ ID NO: 1563432
ggcuuccaagagugacuuu

SEQ ID NO: 1810492 - RNA, 19 nt, Artificial Sequence
  Description of Artificial Sequence: Synthetic oligonucleotide
  Antisense strand to SEQ ID NO: 1810491
aaagucacucuuggaagcc

SEQ ID NO: 1810493 - RNA, 19 nt, Artificial Sequence
  Description of Artificial Sequence: Synthetic oligonucleotide
  Sense strand starting at position 2720 of SEQ ID NO: 1563432
ucacucuucgggugacuca

SEQ ID NO: 1810494 - RNA, 19 nt, Artificial Sequence
  Description of Artificial Sequence: Synthetic oligonucleotide
  Antisense strand to SEQ ID NO: 1810493
ugagucacccgaagaguga

SEQ ID NO: 1810495 - RNA, 19 nt, Artificial Sequence
  Description of Artificial Sequence: Synthetic oligonucleotide
  Sense strand starting at position 3143 of SEQ ID NO: 1563432
uaggaaagugguggaaauu

SEQ ID NO: 1810496 - RNA, 19 nt, Artificial Sequence
  Description of Artificial Sequence: Synthetic oligonucleotide
  Antisense strand to SEQ ID NO: 1810495
aauuuccaccacuuuccua

SEQ ID NO: 1810497 - RNA, 19 nt, Artificial Sequence
  Description of Artificial Sequence: Synthetic oligonucleotide
  Sense strand starting at position 3153 of SEQ ID NO: 1563432
guggaaauuucgcauaacc

SEQ ID NO: 1810498 - RNA, 19 nt, Artificial Sequence
  Description of Artificial Sequence: Synthetic oligonucleotide
  Antisense strand to SEQ ID NO: 1810497
gguuaugcgaaauuuccac

SEQ ID NO: 1810499 - RNA, 19 nt, Artificial Sequence
  Description of Artificial Sequence: Synthetic oligonucleotide
  Sense strand starting at position 3162 of SEQ ID NO: 1563432
ucgcauaaccagugugaga

SEQ ID NO: 1810500 - RNA, 19 nt, Artificial Sequence
  Description of Artificial Sequence: Synthetic oligonucleotide
  Antisense strand to SEQ ID NO: 1810499
ucucacacugguuaugcga

SEQ ID NO: 1810501 - RNA, 19 nt, Artificial Sequence
  Description of Artificial Sequence: Synthetic oligonucleotide
  Sense strand starting at position 3164 of SEQ ID NO: 1563432
gcauaaccagugugagaug

SEQ ID NO: 1810502 - RNA, 19 nt, Artificial Sequence
  Description of Artificial Sequence: Synthetic oligonucleotide
  Antisense strand to SEQ ID NO: 1810501
caucucacacugguuaugc

SEQ ID NO: 1810503 - RNA, 19 nt, Artificial Sequence
  Description of Artificial Sequence: Synthetic oligonucleotide
  Sense strand starting at position 3169 of SEQ ID NO: 1563432
accagugugagaugcuaga

SEQ ID NO: 1810504 - RNA, 19 nt, Artificial Sequence
  Description of Artificial Sequence: Synthetic oligonucleotide
  Antisense strand to SEQ ID NO: 1810503
ucuagcaucucacacuggu

SEQ ID NO: 1810505 - RNA, 19 nt, Artificial Sequence
  Description of Artificial Sequence: Synthetic oligonucleotide
  Sense strand starting at position 3175 of SEQ ID NO: 1563432
gugagaugcuagagcgaca

SEQ ID NO: 1810506 - RNA, 19 nt, Artificial Sequence
  Description of Artificial Sequence: Synthetic oligonucleotide
  Antisense strand to SEQ ID NO: 1810505
ugucgcucuagcaucucac

SEQ ID NO: 1810507 - RNA, 19 nt, Artificial Sequence
  Description of Artificial Sequence: Synthetic oligonucleotide
  Sense strand starting at position 3180 of SEQ ID NO: 1563432
augcuagagcgacaaguua

SEQ ID NO: 1810508 - RNA, 19 nt, Artificial Sequence
  Description of Artificial Sequence: Synthetic oligonucleotide
  Antisense strand to SEQ ID NO: 1810507
uaacuugucgcucuagcau

SEQ ID NO: 1810509 - RNA, 19 nt, Artificial Sequence
  Description of Artificial Sequence: Synthetic oligonucleotide
  Sense strand starting at position 3211 of SEQ ID NO: 1563432
ugaagaccuaguggaguuu

SEQ ID NO: 1810510 - RNA, 19 nt, Artificial Sequence
  Description of Artificial Sequence: Synthetic oligonucleotide
  Antisense strand to SEQ ID NO: 1810509
aaacuccacuaggucuuca

SEQ ID NO: 1810511 - RNA, 19 nt, Artificial Sequence
  Description of Artificial Sequence: Synthetic oligonucleotide
  Sense strand starting at position 3229 of SEQ ID NO: 1563432
uagaaaccaucaucgugua

SEQ ID NO: 1810512 - RNA, 19 nt, Artificial Sequence
  Description of Artificial Sequence: Synthetic oligonucleotide
  Antisense strand to SEQ ID NO: 1810511
uacacgaugaugguuucua

SEQ ID NO: 1810513 - RNA, 19 nt, Artificial Sequence
  Description of Artificial Sequence: Synthetic oligonucleotide
  Sense strand starting at position 3244 of SEQ ID NO: 1563432
uguagugguguccagcuau

SEQ ID NO: 1810514 - RNA, 19 nt, Artificial Sequence
  Description of Artificial Sequence: Synthetic oligonucleotide
  Antisense strand to SEQ ID NO: 1810513
auagcuggacaccacuaca

SEQ ID NO: 1810515 - RNA, 19 nt, Artificial Sequence
  Description of Artificial Sequence: Synthetic oligonucleotide
  Sense strand starting at position 3276 of SEQ ID NO: 1563432
cuggcaagguaucuacaga

SEQ ID NO: 1810516 - RNA, 19 nt, Artificial Sequence
  Description of Artificial Sequence: Synthetic oligonucleotide
  Antisense strand to SEQ ID NO: 1810515
ucuguagauaccuugccag

SEQ ID NO: 1810517 - RNA, 19 nt, Artificial Sequence
  Description of Artificial Sequence: Synthetic oligonucleotide
  Sense strand starting at position 3406 of SEQ ID NO: 1563432
gcucuaguccuagaggaca

SEQ ID NO: 1810518 - RNA, 19 nt, Artificial Sequence
  Description of Artificial Sequence: Synthetic oligonucleotide
  Antisense strand to SEQ ID NO: 1810517
uguccucuaggacuagagc

SEQ ID NO: 1810519 - RNA, 19 nt, Artificial Sequence
  Description of Artificial Sequence: Synthetic oligonucleotide
  Sense strand starting at position 3755 of SEQ ID NO: 1563432
gguagugagccugaaacua

SEQ ID NO: 1810520 - RNA, 19 nt, Artificial Sequence
  Description of Artificial Sequence: Synthetic oligonucleotide
  Antisense strand to SEQ ID NO: 1810519
uaguuucaggcucacuacc

SEQ ID NO: 1810521 - RNA, 19 nt, Artificial Sequence
  Description of Artificial Sequence: Synthetic oligonucleotide
  Sense strand starting at position 3763 of SEQ ID NO: 1563432
gccugaaacuaauagauga

SEQ ID NO: 1810522 - RNA, 19 nt, Artificial Sequence
  Description of Artificial Sequence: Synthetic oligonucleotide
  Antisense strand to SEQ ID NO: 1810521
ucaucuauuaguuucaggc

SEQ ID NO: 1810523 - RNA, 19 nt, Artificial Sequence
  Description of Artificial Sequence: Synthetic oligonucleotide
  Sense strand starting at position 3771 of SEQ ID NO: 1563432
cuaauagaugacugugaca

SEQ ID NO: 1810524 - RNA, 19 nt, Artificial Sequence
  Description of Artificial Sequence: Synthetic oligonucleotide
  Antisense strand to SEQ ID NO: 1810523
ugucacagucaucuauuag

SEQ ID NO: 1810525 - RNA, 19 nt, Artificial Sequence
  Description of Artificial Sequence: Synthetic oligonucleotide
  Sense strand starting at position 3776 of SEQ ID NO: 1563432
agaugacugugacaaggaa

SEQ ID NO: 1810526 - RNA, 19 nt, Artificial Sequence
  Description of Artificial Sequence: Synthetic oligonucleotide
  Antisense strand to SEQ ID NO: 1810525
uuccuugucacagucaucu

SEQ ID NO: 1810527 - RNA, 19 nt, Artificial Sequence
  Description of Artificial Sequence: Synthetic oligonucleotide
  Sense strand starting at position 3810 of SEQ ID NO: 1563432
gaacaaaugucagugccuu

SEQ ID NO: 1810528 - RNA, 19 nt, Artificial Sequence
  Description of Artificial Sequence: Synthetic oligonucleotide
  Antisense strand to SEQ ID NO: 1810527
aaggcacugacauuuguuc

SEQ ID NO: 1810529 - RNA, 19 nt, Artificial Sequence
  Description of Artificial Sequence: Synthetic oligonucleotide
  Sense strand starting at position 3922 of SEQ ID NO: 1563432
uggugacuuaccuggacaa

SEQ ID NO: 1810530 - RNA, 19 nt, Artificial Sequence
  Description of Artificial Sequence: Synthetic oligonucleotide
  Antisense strand to SEQ ID NO: 1810529
uuguccagguaagucacca

SEQ ID NO: 1810531 - RNA, 19 nt, Artificial Sequence
  Description of Artificial Sequence: Synthetic oligonucleotide
  Sense strand starting at position 84 of SEQ ID NO: 1563433
agcccucugcuugagacaa

SEQ ID NO: 1810532 - RNA, 19 nt, Artificial Sequence
  Description of Artificial Sequence: Synthetic oligonucleotide
  Antisense strand to SEQ ID NO: 1810531
uugucucaagcagagggcu

SEQ ID NO: 1810533 - RNA, 19 nt, Artificial Sequence
  Description of Artificial Sequence: Synthetic oligonucleotide
  Sense strand starting at position 496 of SEQ ID NO: 1563433
uguuccuaucuuuagacua

SEQ ID NO: 1810534 - RNA, 19 nt, Artificial Sequence
  Description of Artificial Sequence: Synthetic oligonucleotide
  Antisense strand to SEQ ID NO: 1810533
uagucuaaagauaggaaca

SEQ ID NO: 1810535 - RNA, 19 nt, Artificial Sequence
  Description of Artificial Sequence: Synthetic oligonucleotide
  Sense strand starting at position 501 of SEQ ID NO: 1563433
cuaucuuuagacuaguggu

SEQ ID NO: 1810536 - RNA, 19 nt, Artificial Sequence
  Description of Artificial Sequence: Synthetic oligonucleotide
  Antisense strand to SEQ ID NO: 1810535
accacuagucuaaagauag

SEQ ID NO: 1810537 - RNA, 19 nt, Artificial Sequence
  Description of Artificial Sequence: Synthetic oligonucleotide
  Sense strand starting at position 511 of SEQ ID NO: 1563433
acuagugguacacagaguu

SEQ ID NO: 1810538 - RNA, 19 nt, Artificial Sequence
  Description of Artificial Sequence: Synthetic oligonucleotide
  Antisense strand to SEQ ID NO: 1810537
aacucuguguaccacuagu

SEQ ID NO: 1810539 - RNA, 19 nt, Artificial Sequence
  Description of Artificial Sequence: Synthetic oligonucleotide
  Sense strand starting at position 715 of SEQ ID NO: 1563433
gauaauguggccuacugaa

SEQ ID NO: 1810540 - RNA, 19 nt, Artificial Sequence
  Description of Artificial Sequence: Synthetic oligonucleotide
  Antisense strand to SEQ ID NO: 1810539
uucaguaggccacauuauc

SEQ ID NO: 1810541 - RNA, 19 nt, Artificial Sequence
  Description of Artificial Sequence: Synthetic oligonucleotide
  Sense strand starting at position 768 of SEQ ID NO: 1563433
cgcuaugcaccugaaauaa

SEQ ID NO: 1810542 - RNA, 19 nt, Artificial Sequence
  Description of Artificial Sequence: Synthetic oligonucleotide
  Antisense strand to SEQ ID NO: 1810541
uuauuucaggugcauagcg

SEQ ID NO: 1810543 - RNA, 19 nt, Artificial Sequence
  Description of Artificial Sequence: Synthetic oligonucleotide
  Sense strand starting at position 1075 of SEQ ID NO: 1563433
agugucaaauccuuauuag

SEQ ID NO: 1810544 - RNA, 19 nt, Artificial Sequence
  Description of Artificial Sequence: Synthetic oligonucleotide
  Antisense strand to SEQ ID NO: 1810543
cuaauaaggauuugacacu

SEQ ID NO: 1810545 - RNA, 19 nt, Artificial Sequence
  Description of Artificial Sequence: Synthetic oligonucleotide
  Sense strand starting at position 1076 of SEQ ID NO: 1563433
gugucaaauccuuauuagg

SEQ ID NO: 1810546 - RNA, 19 nt, Artificial Sequence
  Description of Artificial Sequence: Synthetic oligonucleotide
  Antisense strand to SEQ ID NO: 1810545
ccuaauaaggauuugacac

SEQ ID NO: 1810547 - RNA, 19 nt, Artificial Sequence
  Description of Artificial Sequence: Synthetic oligonucleotide
  Sense strand starting at position 1078 of SEQ ID NO: 1563433
gucaaauccuuauuaggug

SEQ ID NO: 1810548 - RNA, 19 nt, Artificial Sequence
  Description of Artificial Sequence: Synthetic oligonucleotide
  Antisense strand to SEQ ID NO: 1810547
caccuaauaaggauuugac

SEQ ID NO: 1810549 - RNA, 19 nt, Artificial Sequence
  Description of Artificial Sequence: Synthetic oligonucleotide
  Sense strand starting at position 1084 of SEQ ID NO: 1563433
uccuuauuaggugauuaug

SEQ ID NO: 1810550 - RNA, 19 nt, Artificial Sequence
  Description of Artificial Sequence: Synthetic oligonucleotide
  Antisense strand to SEQ ID NO: 1810549
cauaaucaccuaauaagga

SEQ ID NO: 1810551 - RNA, 19 nt, Artificial Sequence
  Description of Artificial Sequence: Synthetic oligonucleotide
  Sense strand starting at position 1086 of SEQ ID NO: 1563433
cuuauuaggugauuaugga

SEQ ID NO: 1810552 - RNA, 19 nt, Artificial Sequence
  Description of Artificial Sequence: Synthetic oligonucleotide
  Antisense strand to SEQ ID NO: 1810551
uccauaaucaccuaauaag

SEQ ID NO: 1810553 - RNA, 19 nt, Artificial Sequence
  Description of Artificial Sequence: Synthetic oligonucleotide
  Sense strand starting at position 1112 of SEQ ID NO: 1563433
cuugguuaccuuuaaaguu

SEQ ID NO: 1810554 - RNA, 19 nt, Artificial Sequence
  Description of Artificial Sequence: Synthetic oligonucleotide
  Antisense strand to SEQ ID NO: 1810553
aacuuuaaagguaaccaag

SEQ ID NO: 1810555 - RNA, 19 nt, Artificial Sequence
  Description of Artificial Sequence: Synthetic oligonucleotide
  Sense strand starting at position 1315 of SEQ ID NO: 1563433
gaggauuccucagccaucu

SEQ ID NO: 1810556 - RNA, 19 nt, Artificial Sequence
  Description of Artificial Sequence: Synthetic oligonucleotide
  Antisense strand to SEQ ID NO: 1810555
agauggcugaggaauccuc

SEQ ID NO: 1810557 - RNA, 19 nt, Artificial Sequence
  Description of Artificial Sequence: Synthetic oligonucleotide
  Sense strand starting at position 1579 of SEQ ID NO: 1563433
ggcggaguggugcugguau

SEQ ID NO: 1810558 - RNA, 19 nt, Artificial Sequence
  Description of Artificial Sequence: Synthetic oligonucleotide
  Antisense strand to SEQ ID NO: 1810557
auaccagcaccacuccgcc

SEQ ID NO: 1810559 - RNA, 19 nt, Artificial Sequence
  Description of Artificial Sequence: Synthetic oligonucleotide
  Sense strand starting at position 2081 of SEQ ID NO: 1563433
agaaccagggcuuguuauu

SEQ ID NO: 1810560 - RNA, 19 nt, Artificial Sequence
  Description of Artificial Sequence: Synthetic oligonucleotide
  Antisense strand to SEQ ID NO: 1810559
aauaacaagcccugguucu

SEQ ID NO: 1810561 - RNA, 19 nt, Artificial Sequence
  Description of Artificial Sequence: Synthetic oligonucleotide
  Sense strand starting at position 2093 of SEQ ID NO: 1563433
uguuauugucaauagcaca

SEQ ID NO: 1810562 - RNA, 19 nt, Artificial Sequence
  Description of Artificial Sequence: Synthetic oligonucleotide
  Antisense strand to SEQ ID NO: 1810561
ugugcuauugacaauaaca

SEQ ID NO: 1810563 - RNA, 19 nt, Artificial Sequence
  Description of Artificial Sequence: Synthetic oligonucleotide
  Sense strand starting at position 2661 of SEQ ID NO: 1563433
gagugagcuagcugggaaa

SEQ ID NO: 1810564 - RNA, 19 nt, Artificial Sequence
  Description of Artificial Sequence: Synthetic oligonucleotide
  Antisense strand to SEQ ID NO: 1810563
uuucccagcuagcucacuc

SEQ ID NO: 1810565 - RNA, 19 nt, Artificial Sequence
  Description of Artificial Sequence: Synthetic oligonucleotide
  Sense strand starting at position 2725 of SEQ ID NO: 1563433
cguaaggguccgggagaau

SEQ ID NO: 1810566 - RNA, 19 nt, Artificial Sequence
  Description of Artificial Sequence: Synthetic oligonucleotide
  Antisense strand to SEQ ID NO: 1810565
auucucccggacccuuacg

SEQ ID NO: 1810567 - RNA, 19 nt, Artificial Sequence
  Description of Artificial Sequence: Synthetic oligonucleotide
  Sense strand starting at position 2845 of SEQ ID NO: 1563433
agaggaaugucccuauguu

SEQ ID NO: 1810568 - RNA, 19 nt, Artificial Sequence
  Description of Artificial Sequence: Synthetic oligonucleotide
  Antisense strand to SEQ ID NO: 1810567
aacauagggacauuccucu

SEQ ID NO: 1810569 - RNA, 19 nt, Artificial Sequence
  Description of Artificial Sequence: Synthetic oligonucleotide
  Sense strand starting at position 2846 of SEQ ID NO: 1563433
gaggaaugucccuauguua

SEQ ID NO: 1810570 - RNA, 19 nt, Artificial Sequence
  Description of Artificial Sequence: Synthetic oligonucleotide
  Antisense strand to SEQ ID NO: 1810569
uaacauagggacauuccuc

SEQ ID NO: 1810571 - RNA, 19 nt, Artificial Sequence
  Description of Artificial Sequence: Synthetic oligonucleotide
  Sense strand starting at position 2849 of SEQ ID NO: 1563433
gaaugucccuauguuaaga

SEQ ID NO: 1810572 - RNA, 19 nt, Artificial Sequence
  Description of Artificial Sequence: Synthetic oligonucleotide
  Antisense strand to SEQ ID NO: 1810571
ucuuaacauagggacauuc

SEQ ID NO: 1810573 - RNA, 19 nt, Artificial Sequence
  Description of Artificial Sequence: Synthetic oligonucleotide
  Sense strand starting at position 2887 of SEQ ID NO: 1563433
gagcuaagauaggaagaaa

SEQ ID NO: 1810574 - RNA, 19 nt, Artificial Sequence
  Description of Artificial Sequence: Synthetic oligonucleotide
  Antisense strand to SEQ ID NO: 1810573
uuucuuccuaucuuagcuc

SEQ ID NO: 1810575 - RNA, 19 nt, Artificial Sequence
  Description of Artificial Sequence: Synthetic oligonucleotide
  Sense strand starting at position 2927 of SEQ ID NO: 1563433
gguauaaauuguuucucuu

SEQ ID NO: 1810576 - RNA, 19 nt, Artificial Sequence
  Description of Artificial Sequence: Synthetic oligonucleotide
  Antisense strand to SEQ ID NO: 1810575
aagagaaacaauuuauacc

SEQ ID NO: 1810577 - RNA, 19 nt, Artificial Sequence
  Description of Artificial Sequence: Synthetic oligonucleotide
  Sense strand starting at position 3030 of SEQ ID NO: 1563433
ucuuacuaccaggagcauu

SEQ ID NO: 1810578 - RNA, 19 nt, Artificial Sequence
  Description of Artificial Sequence: Synthetic oligonucleotide
  Antisense strand to SEQ ID NO: 1810577
aaugcuccugguaguaaga

SEQ ID NO: 1810579 - RNA, 19 nt, Artificial Sequence
  Description of Artificial Sequence: Synthetic oligonucleotide
  Sense strand starting at position 3076 of SEQ ID NO: 1563433
uguauucuaaggcgaagaa

SEQ ID NO: 1810580 - RNA, 19 nt, Artificial Sequence
  Description of Artificial Sequence: Synthetic oligonucleotide
  Antisense strand to SEQ ID NO: 1810579
uucuucgccuuagaauaca

SEQ ID NO: 1810581 - RNA, 19 nt, Artificial Sequence
  Description of Artificial Sequence: Synthetic oligonucleotide
  Sense strand starting at position 3077 of SEQ ID NO: 1563433
guauucuaaggcgaagaaa

SEQ ID NO: 1810582 - RNA, 19 nt, Artificial Sequence
  Description of Artificial Sequence: Synthetic oligonucleotide
  Antisense strand to SEQ ID NO: 1810581
uuucuucgccuuagaauac

SEQ ID NO: 1810583 - RNA, 19 nt, Artificial Sequence
  Description of Artificial Sequence: Synthetic oligonucleotide
  Sense strand starting at position 3353 of SEQ ID NO: 1563433
uugguuaaauuagcaacaa

SEQ ID NO: 1810584 - RNA, 19 nt, Artificial Sequence
  Description of Artificial Sequence: Synthetic oligonucleotide
  Antisense strand to SEQ ID NO: 1810583
uuguugcuaauuuaaccaa

SEQ ID NO: 1810585 - RNA, 19 nt, Artificial Sequence
  Description of Artificial Sequence: Synthetic oligonucleotide
  Sense strand starting at position 3417 of SEQ ID NO: 1563433
gcauucucagagggaggua

SEQ ID NO: 1810586 - RNA, 19 nt, Artificial Sequence
  Description of Artificial Sequence: Synthetic oligonucleotide
  Antisense strand to SEQ ID NO: 1810585
uaccucccucugagaaugc

SEQ ID NO: 1810587 - RNA, 19 nt, Artificial Sequence
  Description of Artificial Sequence: Synthetic oligonucleotide
  Sense strand starting at position 3458 of SEQ ID NO: 1563433
ugccaaccuguugaucauu

SEQ ID NO: 1810588 - RNA, 19 nt, Artificial Sequence
  Description of Artificial Sequence: Synthetic oligonucleotide
  Antisense strand to SEQ ID NO: 1810587
aaugaucaacagguuggca

SEQ ID NO: 1810589 - RNA, 19 nt, Artificial Sequence
  Description of Artificial Sequence: Synthetic oligonucleotide
  Sense strand starting at position 3493 of SEQ ID NO: 1563433
ucaguuagcauguauggua

SEQ ID NO: 1810590 - RNA, 19 nt, Artificial Sequence
  Description of Artificial Sequence: Synthetic oligonucleotide
  Antisense strand to SEQ ID NO: 1810589
uaccauacaugcuaacuga

SEQ ID NO: 1810591 - RNA, 19 nt, Artificial Sequence
  Description of Artificial Sequence: Synthetic oligonucleotide
  Sense strand starting at position 3661 of SEQ ID NO: 1563433
uacagagauuauguuuaug

SEQ ID NO: 1810592 - RNA, 19 nt, Artificial Sequence
  Description of Artificial Sequence: Synthetic oligonucleotide
  Antisense strand to SEQ ID NO: 1810591
cauaaacauaaucucugua

SEQ ID NO: 1810593 - RNA, 19 nt, Artificial Sequence
  Description of Artificial Sequence: Synthetic oligonucleotide
  Sense strand starting at position 3663 of SEQ ID NO: 1563433
cagagauuauguuuaugcu

SEQ ID NO: 1810594 - RNA, 19 nt, Artificial Sequence
  Description of Artificial Sequence: Synthetic oligonucleotide
  Antisense strand to SEQ ID NO: 1810593
agcauaaacauaaucucug

SEQ ID NO: 1810595 - RNA, 19 nt, Artificial Sequence
  Description of Artificial Sequence: Synthetic oligonucleotide
  Sense strand starting at position 3825 of SEQ ID NO: 1563433
ggaugucuggcugggagua

SEQ ID NO: 1810596 - RNA, 19 nt, Artificial Sequence
  Description of Artificial Sequence: Synthetic oligonucleotide
  Antisense strand to SEQ ID NO: 1810595
uacucccagccagacaucc

SEQ ID NO: 1810597 - RNA, 19 nt, Artificial Sequence
  Description of Artificial Sequence: Synthetic oligonucleotide
  Sense strand starting at position 3826 of SEQ ID NO: 1563433
gaugucuggcugggaguaa

SEQ ID NO: 1810598 - RNA, 19 nt, Artificial Sequence
  Description of Artificial Sequence: Synthetic oligonucleotide
  Antisense strand to SEQ ID NO: 1810597
uuacucccagccagacauc

SEQ ID NO: 1810599 - RNA, 19 nt, Artificial Sequence
  Description of Artificial Sequence: Synthetic oligonucleotide
  Sense strand starting at position 3896 of SEQ ID NO: 1563433
uacucuguaggcgaucaua

SEQ ID NO: 1810600 - RNA, 19 nt, Artificial Sequence
  Description of Artificial Sequence: Synthetic oligonucleotide
  Antisense strand to SEQ ID NO: 1810599
uaugaucgccuacagagua

SEQ ID NO: 1810601 - RNA, 19 nt, Artificial Sequence
  Description of Artificial Sequence: Synthetic oligonucleotide
  Sense strand starting at position 3899 of SEQ ID NO: 1563433
ucuguaggcgaucauagau

SEQ ID NO: 1810602 - RNA, 19 nt, Artificial Sequence
  Description of Artificial Sequence: Synthetic oligonucleotide
  Antisense strand to SEQ ID NO: 1810601
aucuaugaucgccuacaga

SEQ ID NO: 1810603 - RNA, 19 nt, Artificial Sequence
  Description of Artificial Sequence: Synthetic oligonucleotide
  Sense strand starting at position 3959 of SEQ ID NO: 1563433
gggugacaggauugugagu

SEQ ID NO: 1810604 - RNA, 19 nt, Artificial Sequence
  Description of Artificial Sequence: Synthetic oligonucleotide
  Antisense strand to SEQ ID NO: 1810603
acucacaauccugucaccc

SEQ ID NO: 1810605 - RNA, 19 nt, Artificial Sequence
  Description of Artificial Sequence: Synthetic oligonucleotide
  Sense strand starting at position 3964 of SEQ ID NO: 1563433
acaggauugugaguggagu

SEQ ID NO: 1810606 - RNA, 19 nt, Artificial Sequence
  Description of Artificial Sequence: Synthetic oligonucleotide
  Antisense strand to SEQ ID NO: 1810605
acuccacucacaauccugu

SEQ ID NO: 1810607 - RNA, 19 nt, Artificial Sequence
  Description of Artificial Sequence: Synthetic oligonucleotide
  Sense strand starting at position 3965 of SEQ ID NO: 1563433
caggauugugaguggagua

SEQ ID NO: 1810608 - RNA, 19 nt, Artificial Sequence
  Description of Artificial Sequence: Synthetic oligonucleotide
  Antisense strand to SEQ ID NO: 1810607
uacuccacucacaauccug

SEQ ID NO: 1810609 - RNA, 19 nt, Artificial Sequence
  Description of Artificial Sequence: Synthetic oligonucleotide
  Sense strand starting at position 3966 of SEQ ID NO: 1563433
aggauugugaguggaguaa

SEQ ID NO: 1810610 - RNA, 19 nt, Artificial Sequence
  Description of Artificial Sequence: Synthetic oligonucleotide
  Antisense strand to SEQ ID NO: 1810609
uuacuccacucacaauccu

SEQ ID NO: 1810611 - RNA, 19 nt, Artificial Sequence
  Description of Artificial Sequence: Synthetic oligonucleotide
  Sense strand starting at position 361 of SEQ ID NO: 1563434
ucaagcuuccuagacaugu

SEQ ID NO: 1810612 - RNA, 19 nt, Artificial Sequence
  Description of Artificial Sequence: Synthetic oligonucleotide
  Antisense strand to SEQ ID NO: 1810611
acaugucuaggaagcuuga

SEQ ID NO: 1810613 - RNA, 19 nt, Artificial Sequence
  Description of Artificial Sequence: Synthetic oligonucleotide
  Sense strand starting at position 370 of SEQ ID NO: 1563434
cuagacauguuguuaacaa

SEQ ID NO: 1810614 - RNA, 19 nt, Artificial Sequence
  Description of Artificial Sequence: Synthetic oligonucleotide
  Antisense strand to SEQ ID NO: 1810613
uuguuaacaacaugucuag

SEQ ID NO: 1810615 - RNA, 19 nt, Artificial Sequence
  Description of Artificial Sequence: Synthetic oligonucleotide
  Sense strand starting at position 766 of SEQ ID NO: 1563434
gauccagaugacugugaca

SEQ ID NO: 1810616 - RNA, 19 nt, Artificial Sequence
  Description of Artificial Sequence: Synthetic oligonucleotide
  Antisense strand to SEQ ID NO: 1810615
ugucacagucaucuggauc

SEQ ID NO: 1810617 - RNA, 19 nt, Artificial Sequence
  Description of Artificial Sequence: Synthetic oligonucleotide
  Sense strand starting at position 768 of SEQ ID NO: 1563434
uccagaugacugugacauc

SEQ ID NO: 1810618 - RNA, 19 nt, Artificial Sequence
  Description of Artificial Sequence: Synthetic oligonucleotide
  Antisense strand to SEQ ID NO: 1810617
gaugucacagucaucugga

SEQ ID NO: 1810619 - RNA, 19 nt, Artificial Sequence
  Description of Artificial Sequence: Synthetic oligonucleotide
  Sense strand starting at position 1181 of SEQ ID NO: 1563434
aguacuaucucacuuauga

SEQ ID NO: 1810620 - RNA, 19 nt, Artificial Sequence
  Description of Artificial Sequence: Synthetic oligonucleotide
  Antisense strand to SEQ ID NO: 1810619
ucauaagugagauaguacu

SEQ ID NO: 1810621 - RNA, 19 nt, Artificial Sequence
  Description of Artificial Sequence: Synthetic oligonucleotide
  Sense strand starting at position 1197 of SEQ ID NO: 1563434
ugaucugaaucagucacaa

SEQ ID NO: 1810622 - RNA, 19 nt, Artificial Sequence
  Description of Artificial Sequence: Synthetic oligonucleotide
  Antisense strand to SEQ ID NO: 1810621
uugugacugauucagauca

SEQ ID NO: 1810623 - RNA, 19 nt, Artificial Sequence
  Description of Artificial Sequence: Synthetic oligonucleotide
  Sense strand starting at position 1351 of SEQ ID NO: 1563434
cgcaucacaggugaauaaa

SEQ ID NO: 1810624 - RNA, 19 nt, Artificial Sequence
  Description of Artificial Sequence: Synthetic oligonucleotide
  Antisense strand to SEQ ID NO: 1810623
uuuauucaccugugaugcg

SEQ ID NO: 1810625 - RNA, 19 nt, Artificial Sequence
  Description of Artificial Sequence: Synthetic oligonucleotide
  Sense strand starting at position 1361 of SEQ ID NO: 1563434
gugaauaaaggcuguaacu

SEQ ID NO: 1810626 - RNA, 19 nt, Artificial Sequence
  Description of Artificial Sequence: Synthetic oligonucleotide
  Antisense strand to SEQ ID NO: 1810625
aguuacagccuuuauucac

SEQ ID NO: 1810627 - RNA, 19 nt, Artificial Sequence
  Description of Artificial Sequence: Synthetic oligonucleotide
  Sense strand starting at position 1419 of SEQ ID NO: 1563434
cuagcacaacauugagaau

SEQ ID NO: 1810628 - RNA, 19 nt, Artificial Sequence
  Description of Artificial Sequence: Synthetic oligonucleotide
  Antisense strand to SEQ ID NO: 1810627
auucucaauguugugcuag

SEQ ID NO: 1810629 - RNA, 19 nt, Artificial Sequence
  Description of Artificial Sequence: Synthetic oligonucleotide
  Sense strand starting at position 1470 of SEQ ID NO: 1563434
uaggucuugugacccauaa

SEQ ID NO: 1810630 - RNA, 19 nt, Artificial Sequence
  Description of Artificial Sequence: Synthetic oligonucleotide
  Antisense strand to SEQ ID NO: 1810629
uuaugggucacaagaccua

SEQ ID NO: 1810631 - RNA, 19 nt, Artificial Sequence
  Description of Artificial Sequence: Synthetic oligonucleotide
  Sense strand starting at position 1593 of SEQ ID NO: 1563434
auccguuguguucuucuau

SEQ ID NO: 1810632 - RNA, 19 nt, Artificial Sequence
  Description of Artificial Sequence: Synthetic oligonucleotide
  Antisense strand to SEQ ID NO: 1810631
auagaagaacacaacggau

SEQ ID NO: 1810633 - RNA, 19 nt, Artificial Sequence
  Description of Artificial Sequence: Synthetic oligonucleotide
  Sense strand starting at position 1596 of SEQ ID NO: 1563434
cguuguguucuucuaucua

SEQ ID NO: 1810634 - RNA, 19 nt, Artificial Sequence
  Description of Artificial Sequence: Synthetic oligonucleotide
  Antisense strand to SEQ ID NO: 1810633
uagauagaagaacacaacg

SEQ ID NO: 1810635 - RNA, 19 nt, Artificial Sequence
  Description of Artificial Sequence: Synthetic oligonucleotide
  Sense strand starting at position 1624 of SEQ ID NO: 1563434
cugucuaaagcagaggauu

SEQ ID NO: 1810636 - RNA, 19 nt, Artificial Sequence
  Description of Artificial Sequence: Synthetic oligonucleotide
  Antisense strand to SEQ ID NO: 1810635
aauccucugcuuuagacag

SEQ ID NO: 1810637 - RNA, 19 nt, Artificial Sequence
  Description of Artificial Sequence: Synthetic oligonucleotide
  Sense strand starting at position 1732 of SEQ ID NO: 1563434
caccuuccgggaugauaga

SEQ ID NO: 1810638 - RNA, 19 nt, Artificial Sequence
  Description of Artificial Sequence: Synthetic oligonucleotide
  Antisense strand to SEQ ID NO: 1810637
ucuaucaucccggaaggug

SEQ ID NO: 1810639 - RNA, 19 nt, Artificial Sequence
  Description of Artificial Sequence: Synthetic oligonucleotide
  Sense strand starting at position 1846 of SEQ ID NO: 1563434
cgaucucagaguuauacag

SEQ ID NO: 1810640 - RNA, 19 nt, Artificial Sequence
  Description of Artificial Sequence: Synthetic oligonucleotide
  Antisense strand to SEQ ID NO: 1810639
cuguauaacucugagaucg

SEQ ID NO: 1810641 - RNA, 19 nt, Artificial Sequence
  Description of Artificial Sequence: Synthetic oligonucleotide
  Sense strand starting at position 1875 of SEQ ID NO: 1563434
cuggguuauucucuaauaa

SEQ ID NO: 1810642 - RNA, 19 nt, Artificial Sequence
  Description of Artificial Sequence: Synthetic oligonucleotide
  Antisense strand to SEQ ID NO: 1810641
uuauuagagaauaacccag

SEQ ID NO: 1810643 - RNA, 19 nt, Artificial Sequence
  Description of Artificial Sequence: Synthetic oligonucleotide
  Sense strand starting at position 1876 of SEQ ID NO: 1563434
uggguuauucucuaauaau

SEQ ID NO: 1810644 - RNA, 19 nt, Artificial Sequence
  Description of Artificial Sequence: Synthetic oligonucleotide
  Antisense strand to SEQ ID NO: 1810643
auuauuagagaauaaccca

SEQ ID NO: 1810645 - RNA, 19 nt, Artificial Sequence
  Description of Artificial Sequence: Synthetic oligonucleotide
  Sense strand starting at position 1924 of SEQ ID NO: 1563434
uagguuguucuauaccaag

SEQ ID NO: 1810646 - RNA, 19 nt, Artificial Sequence
  Description of Artificial Sequence: Synthetic oligonucleotide
  Antisense strand to SEQ ID NO: 1810645
cuugguauagaacaaccua

SEQ ID NO: 1810647 - RNA, 19 nt, Artificial Sequence
  Description of Artificial Sequence: Synthetic oligonucleotide
  Sense strand starting at position 2234 of SEQ ID NO: 1563434
gcuugacuagauuagcuau

SEQ ID NO: 1810648 - RNA, 19 nt, Artificial Sequence
  Description of Artificial Sequence: Synthetic oligonucleotide
  Antisense strand to SEQ ID NO: 1810647
auagcuaaucuagucaagc

SEQ ID NO: 1810649 - RNA, 19 nt, Artificial Sequence
  Description of Artificial Sequence: Synthetic oligonucleotide
  Sense strand starting at position 2237 of SEQ ID NO: 1563434
ugacuagauuagcuaucua

SEQ ID NO: 1810650 - RNA, 19 nt, Artificial Sequence
  Description of Artificial Sequence: Synthetic oligonucleotide
  Antisense strand to SEQ ID NO: 1810649
uagauagcuaaucuaguca

SEQ ID NO: 1810651 - RNA, 19 nt, Artificial Sequence
  Description of Artificial Sequence: Synthetic oligonucleotide
  Sense strand starting at position 2290 of SEQ ID NO: 1563434
guucuuugucuugagagac

SEQ ID NO: 1810652 - RNA, 19 nt, Artificial Sequence
  Description of Artificial Sequence: Synthetic oligonucleotide
  Antisense strand to SEQ ID NO: 1810651
gucucucaagacaaagaac

SEQ ID NO: 1810653 - RNA, 19 nt, Artificial Sequence
  Description of Artificial Sequence: Synthetic oligonucleotide
  Sense strand starting at position 2294 of SEQ ID NO: 1563434
uuugucuugagagacaagu

SEQ ID NO: 1810654 - RNA, 19 nt, Artificial Sequence
  Description of Artificial Sequence: Synthetic oligonucleotide
  Antisense strand to SEQ ID NO: 1810653
acuugucucucaagacaaa

SEQ ID NO: 1810655 - RNA, 19 nt, Artificial Sequence
  Description of Artificial Sequence: Synthetic oligonucleotide
  Sense strand starting at position 2296 of SEQ ID NO: 1563434
ugucuugagagacaaguuu

SEQ ID NO: 1810656 - RNA, 19 nt, Artificial Sequence
  Description of Artificial Sequence: Synthetic oligonucleotide
  Antisense strand to SEQ ID NO: 1810655
aaacuugucucucaagaca

SEQ ID NO: 1810657 - RNA, 19 nt, Artificial Sequence
  Description of Artificial Sequence: Synthetic oligonucleotide
  Sense strand starting at position 2350 of SEQ ID NO: 1563434
cacuguugugaaugggaua

SEQ ID NO: 1810658 - RNA, 19 nt, Artificial Sequence
  Description of Artificial Sequence: Synthetic oligonucleotide
  Antisense strand to SEQ ID NO: 1810657
uaucccauucacaacagug

SEQ ID NO: 1810659 - RNA, 19 nt, Artificial Sequence
  Description of Artificial Sequence: Synthetic oligonucleotide
  Sense strand starting at position 2351 of SEQ ID NO: 1563434
acuguugugaaugggauau

SEQ ID NO: 1810660 - RNA, 19 nt, Artificial Sequence
  Description of Artificial Sequence: Synthetic oligonucleotide
  Antisense strand to SEQ ID NO: 1810659
auaucccauucacaacagu

SEQ ID NO: 1810661 - RNA, 19 nt, Artificial Sequence
  Description of Artificial Sequence: Synthetic oligonucleotide
  Sense strand starting at position 2550 of SEQ ID NO: 1563434
ggagcuauuuaauaauacu

SEQ ID NO: 1810662 - RNA, 19 nt, Artificial Sequence
  Description of Artificial Sequence: Synthetic oligonucleotide
  Antisense strand to SEQ ID NO: 1810661
aguauuauuaaauagcucc

SEQ ID NO: 1810663 - RNA, 19 nt, Artificial Sequence
  Description of Artificial Sequence: Synthetic oligonucleotide
  Sense strand starting at position 2812 of SEQ ID NO: 1563434
cgccuaauucucuaagacu

SEQ ID NO: 1810664 - RNA, 19 nt, Artificial Sequence
  Description of Artificial Sequence: Synthetic oligonucleotide
  Antisense strand to SEQ ID NO: 1810663
agucuuagagaauuaggcg

SEQ ID NO: 1810665 - RNA, 19 nt, Artificial Sequence
  Description of Artificial Sequence: Synthetic oligonucleotide
  Sense strand starting at position 2845 of SEQ ID NO: 1563434
acccgacauggcuacuaau

SEQ ID NO: 1810666 - RNA, 19 nt, Artificial Sequence
  Description of Artificial Sequence: Synthetic oligonucleotide
  Antisense strand to SEQ ID NO: 1810665
auuaguagccaugucgggu

SEQ ID NO: 1810667 - RNA, 19 nt, Artificial Sequence
  Description of Artificial Sequence: Synthetic oligonucleotide
  Sense strand starting at position 2870 of SEQ ID NO: 1563434
gggucacauccuuacaguu

SEQ ID NO: 1810668 - RNA, 19 nt, Artificial Sequence
  Description of Artificial Sequence: Synthetic oligonucleotide
  Antisense strand to SEQ ID NO: 1810667
aacuguaaggaugugaccc

SEQ ID NO: 1810669 - RNA, 19 nt, Artificial Sequence
  Description of Artificial Sequence: Synthetic oligonucleotide
  Sense strand starting at position 3029 of SEQ ID NO: 1563434
ugauguuaugauuagucca

SEQ ID NO: 1810670 - RNA, 19 nt, Artificial Sequence
  Description of Artificial Sequence: Synthetic oligonucleotide
  Antisense strand to SEQ ID NO: 1810669
uggacuaaucauaacauca

SEQ ID NO: 1810671 - RNA, 19 nt, Artificial Sequence
  Description of Artificial Sequence: Synthetic oligonucleotide
  Sense strand starting at position 3099 of SEQ ID NO: 1563434
cuguccuaccaggacuaua

SEQ ID NO: 1810672 - RNA, 19 nt, Artificial Sequence
  Description of Artificial Sequence: Synthetic oligonucleotide
  Antisense strand to SEQ ID NO: 1810671
uauaguccugguaggacag

SEQ ID NO: 1810673 - RNA, 19 nt, Artificial Sequence
  Description of Artificial Sequence: Synthetic oligonucleotide
  Sense strand starting at position 3218 of SEQ ID NO: 1563434
acuacauaggcuuauuagu

SEQ ID NO: 1810674 - RNA, 19 nt, Artificial Sequence
  Description of Artificial Sequence: Synthetic oligonucleotide
  Antisense strand to SEQ ID NO: 1810673
acuaauaagccuauguagu

SEQ ID NO: 1810675 - RNA, 19 nt, Artificial Sequence
  Description of Artificial Sequence: Synthetic oligonucleotide
  Sense strand starting at position 3265 of SEQ ID NO: 1563434
auucucaauguguauaauc

SEQ ID NO: 1810676 - RNA, 19 nt, Artificial Sequence
  Description of Artificial Sequence: Synthetic oligonucleotide
  Antisense strand to SEQ ID NO: 1810675
gauuauacacauugagaau

SEQ ID NO: 1810677 - RNA, 19 nt, Artificial Sequence
  Description of Artificial Sequence: Synthetic oligonucleotide
  Sense strand starting at position 3267 of SEQ ID NO: 1563434
ucucaauguguauaaucau

SEQ ID NO: 1810678 - RNA, 19 nt, Artificial Sequence
  Description of Artificial Sequence: Synthetic oligonucleotide
  Antisense strand to SEQ ID NO: 1810677
augauuauacacauugaga

SEQ ID NO: 1810679 - RNA, 19 nt, Artificial Sequence
  Description of Artificial Sequence: Synthetic oligonucleotide
  Sense strand starting at position 3380 of SEQ ID NO: 1563434
cacuguaguggacaucuau

SEQ ID NO: 1810680 - RNA, 19 nt, Artificial Sequence
  Description of Artificial Sequence: Synthetic oligonucleotide
  Antisense strand to SEQ ID NO: 1810679
auagauguccacuacagug

SEQ ID NO: 1810681 - RNA, 19 nt, Artificial Sequence
  Description of Artificial Sequence: Synthetic oligonucleotide
  Sense strand starting at position 3422 of SEQ ID NO: 1563434
acgugacuugauuaugaug

SEQ ID NO: 1810682 - RNA, 19 nt, Artificial Sequence
  Description of Artificial Sequence: Synthetic oligonucleotide
  Antisense strand to SEQ ID NO: 1810681
caucauaaucaagucacgu

SEQ ID NO: 1810683 - RNA, 19 nt, Artificial Sequence
  Description of Artificial Sequence: Synthetic oligonucleotide
  Sense strand starting at position 3464 of SEQ ID NO: 1563434
cuuuacuguguuuagaaag

SEQ ID NO: 1810684 - RNA, 19 nt, Artificial Sequence
  Description of Artificial Sequence: Synthetic oligonucleotide
  Antisense strand to SEQ ID NO: 1810683
cuuucuaaacacaguaaag

SEQ ID NO: 1810685 - RNA, 19 nt, Artificial Sequence
  Description of Artificial Sequence: Synthetic oligonucleotide
  Sense strand starting at position 3824 of SEQ ID NO: 1563434
ugcacucauuuauaaggaa

SEQ ID NO: 1810686 - RNA, 19 nt, Artificial Sequence
  Description of Artificial Sequence: Synthetic oligonucleotide
  Antisense strand to SEQ ID NO: 1810685
uuccuuauaaaugagugca

SEQ ID NO: 1810687 - RNA, 19 nt, Artificial Sequence
  Description of Artificial Sequence: Synthetic oligonucleotide
  Sense strand starting at position 3827 of SEQ ID NO: 1563434
acucauuuauaaggaauag

SEQ ID NO: 1810688 - RNA, 19 nt, Artificial Sequence
  Description of Artificial Sequence: Synthetic oligonucleotide
  Antisense strand to SEQ ID NO: 1810687
cuauuccuuauaaaugagu

SEQ ID NO: 1810689 - RNA, 19 nt, Artificial Sequence
  Description of Artificial Sequence: Synthetic oligonucleotide
  Sense strand starting at position 3982 of SEQ ID NO: 1563434
uuuaccuuccgugaaacua

SEQ ID NO: 1810690 - RNA, 19 nt, Artificial Sequence
  Description of Artificial Sequence: Synthetic oligonucleotide
  Antisense strand to SEQ ID NO: 1810689
uaguuucacggaagguaaa

SEQ ID NO: 1810691 - RNA, 19 nt, Artificial Sequence
  Description of Artificial Sequence: Synthetic oligonucleotide
  Sense strand starting at position 71 of SEQ ID NO: 1563435
cugcuuucucggccacagu

SEQ ID NO: 1810692 - RNA, 19 nt, Artificial Sequence
  Description of Artificial Sequence: Synthetic oligonucleotide
  Antisense strand to SEQ ID NO: 1810691
acuguggccgagaaagcag

SEQ ID NO: 1810693 - RNA, 19 nt, Artificial Sequence
  Description of Artificial Sequence: Synthetic oligonucleotide
  Sense strand starting at position 537 of SEQ ID NO: 1563435
gggcuccugcguagaaguu

SEQ ID NO: 1810694 - RNA, 19 nt, Artificial Sequence
  Description of Artificial Sequence: Synthetic oligonucleotide
  Antisense strand to SEQ ID NO: 1810693
aacuucuacgcaggagccc

SEQ ID NO: 1810695 - RNA, 19 nt, Artificial Sequence
  Description of Artificial Sequence: Synthetic oligonucleotide
  Sense strand starting at position 844 of SEQ ID NO: 1563435
gcacgagucacucucguuu

SEQ ID NO: 1810696 - RNA, 19 nt, Artificial Sequence
  Description of Artificial Sequence: Synthetic oligonucleotide
  Antisense strand to SEQ ID NO: 1810695
aaacgagagugacucgugc

SEQ ID NO: 1810697 - RNA, 19 nt, Artificial Sequence
  Description of Artificial Sequence: Synthetic oligonucleotide
  Sense strand starting at position 1001 of SEQ ID NO: 1563435
gugauugagucugauuuag

SEQ ID NO: 1810698 - RNA, 19 nt, Artificial Sequence
  Description of Artificial Sequence: Synthetic oligonucleotide
  Antisense strand to SEQ ID NO: 1810697
cuaaaucagacucaaucac

SEQ ID NO: 1810699 - RNA, 19 nt, Artificial Sequence
  Description of Artificial Sequence: Synthetic oligonucleotide
  Sense strand starting at position 1013 of SEQ ID NO: 1563435
gauuuagucugugauuuac

SEQ ID NO: 1810700 - RNA, 19 nt, Artificial Sequence
  Description of Artificial Sequence: Synthetic oligonucleotide
  Antisense strand to SEQ ID NO: 1810699
guaaaucacagacuaaauc

SEQ ID NO: 1810701 - RNA, 19 nt, Artificial Sequence
  Description of Artificial Sequence: Synthetic oligonucleotide
  Sense strand starting at position 1015 of SEQ ID NO: 1563435
uuuagucugugauuuacuc

SEQ ID NO: 1810702 - RNA, 19 nt, Artificial Sequence
  Description of Artificial Sequence: Synthetic oligonucleotide
  Antisense strand to SEQ ID NO: 1810701
gaguaaaucacagacuaaa

SEQ ID NO: 1810703 - RNA, 19 nt, Artificial Sequence
  Description of Artificial Sequence: Synthetic oligonucleotide
  Sense strand starting at position 1101 of SEQ ID NO: 1563435
cagccugggcucugggaua

SEQ ID NO: 1810704 - RNA, 19 nt, Artificial Sequence
  Description of Artificial Sequence: Synthetic oligonucleotide
  Antisense strand to SEQ ID NO: 1810703
uaucccagagcccaggcug

SEQ ID NO: 1810705 - RNA, 19 nt, Artificial Sequence
  Description of Artificial Sequence: Synthetic oligonucleotide
  Sense strand starting at position 2049 of SEQ ID NO: 1563435
cagccucuuccagggaguu

SEQ ID NO: 1810706 - RNA, 19 nt, Artificial Sequence
  Description of Artificial Sequence: Synthetic oligonucleotide
  Antisense strand to SEQ ID NO: 1810705
aacucccuggaagaggcug

SEQ ID NO: 1810707 - RNA, 19 nt, Artificial Sequence
  Description of Artificial Sequence: Synthetic oligonucleotide
  Sense strand starting at position 2050 of SEQ ID NO: 1563435
agccucuuccagggaguua

SEQ ID NO: 1810708 - RNA, 19 nt, Artificial Sequence
  Description of Artificial Sequence: Synthetic oligonucleotide
  Antisense strand to SEQ ID NO: 1810707
uaacucccuggaagaggcu

SEQ ID NO: 1810709 - RNA, 19 nt, Artificial Sequence
  Description of Artificial Sequence: Synthetic oligonucleotide
  Sense strand starting at position 2098 of SEQ ID NO: 1563435
cacagaguuuccgugacug

SEQ ID NO: 1810710 - RNA, 19 nt, Artificial Sequence
  Description of Artificial Sequence: Synthetic oligonucleotide
  Antisense strand to SEQ ID NO: 1810709
cagucacggaaacucugug

SEQ ID NO: 1810711 - RNA, 19 nt, Artificial Sequence
  Description of Artificial Sequence: Synthetic oligonucleotide
  Sense strand starting at position 2118 of SEQ ID NO: 1563435
gugaaaccucucuggagga

SEQ ID NO: 1810712 - RNA, 19 nt, Artificial Sequence
  Description of Artificial Sequence: Synthetic oligonucleotide
  Antisense strand to SEQ ID NO: 1810711
uccuccagagagguuucac

SEQ ID NO: 1810713 - RNA, 19 nt, Artificial Sequence
  Description of Artificial Sequence: Synthetic oligonucleotide
  Sense strand starting at position 2271 of SEQ ID NO: 1563435
gggucagugcuccauagau

SEQ ID NO: 1810714 - RNA, 19 nt, Artificial Sequence
  Description of Artificial Sequence: Synthetic oligonucleotide
  Antisense strand to SEQ ID NO: 1810713
aucuauggagcacugaccc

SEQ ID NO: 1810715 - RNA, 19 nt, Artificial Sequence
  Description of Artificial Sequence: Synthetic oligonucleotide
  Sense strand starting at position 2273 of SEQ ID NO: 1563435
gucagugcuccauagauug

SEQ ID NO: 1810716 - RNA, 19 nt, Artificial Sequence
  Description of Artificial Sequence: Synthetic oligonucleotide
  Antisense strand to SEQ ID NO: 1810715
caaucuauggagcacugac

SEQ ID NO: 1810717 - RNA, 19 nt, Artificial Sequence
  Description of Artificial Sequence: Synthetic oligonucleotide
  Sense strand starting at position 2311 of SEQ ID NO: 1563435
uugaguugaucuuugcaug

SEQ ID NO: 1810718 - RNA, 19 nt, Artificial Sequence
  Description of Artificial Sequence: Synthetic oligonucleotide
  Antisense strand to SEQ ID NO: 1810717
caugcaaagaucaacucaa

SEQ ID NO: 1810719 - RNA, 19 nt, Artificial Sequence
  Description of Artificial Sequence: Synthetic oligonucleotide
  Sense strand starting at position 2312 of SEQ ID NO: 1563435
ugaguugaucuuugcauga

SEQ ID NO: 1810720 - RNA, 19 nt, Artificial Sequence
  Description of Artificial Sequence: Synthetic oligonucleotide
  Antisense strand to SEQ ID NO: 1810719
ucaugcaaagaucaacuca

SEQ ID NO: 1810721 - RNA, 19 nt, Artificial Sequence
  Description of Artificial Sequence: Synthetic oligonucleotide
  Sense strand starting at position 2316 of SEQ ID NO: 1563435
uugaucuuugcaugauugu

SEQ ID NO: 1810722 - RNA, 19 nt, Artificial Sequence
  Description of Artificial Sequence: Synthetic oligonucleotide
  Antisense strand to SEQ ID NO: 1810721
acaaucaugcaaagaucaa

SEQ ID NO: 1810723 - RNA, 19 nt, Artificial Sequence
  Description of Artificial Sequence: Synthetic oligonucleotide
  Sense strand starting at position 2317 of SEQ ID NO: 1563435
ugaucuuugcaugauugua

SEQ ID NO: 1810724 - RNA, 19 nt, Artificial Sequence
  Description of Artificial Sequence: Synthetic oligonucleotide
  Antisense strand to SEQ ID NO: 1810723
uacaaucaugcaaagauca

SEQ ID NO: 1810725 - RNA, 19 nt, Artificial Sequence
  Description of Artificial Sequence: Synthetic oligonucleotide
  Sense strand starting at position 2319 of SEQ ID NO: 1563435
aucuuugcaugauuguaaa

SEQ ID NO: 1810726 - RNA, 19 nt, Artificial Sequence
  Description of Artificial Sequence: Synthetic oligonucleotide
  Antisense strand to SEQ ID NO: 1810725
uuuacaaucaugcaaagau

SEQ ID NO: 1810727 - RNA, 19 nt, Artificial Sequence
  Description of Artificial Sequence: Synthetic oligonucleotide
  Sense strand starting at position 2347 of SEQ ID NO: 1563435
gagaaauaagucugcagag

SEQ ID NO: 1810728 - RNA, 19 nt, Artificial Sequence
  Description of Artificial Sequence: Synthetic oligonucleotide
  Antisense strand to SEQ ID NO: 1810727
cucugcagacuuauuucuc

SEQ ID NO: 1810729 - RNA, 19 nt, Artificial Sequence
  Description of Artificial Sequence: Synthetic oligonucleotide
  Sense strand starting at position 2604 of SEQ ID NO: 1563435
ucaagucugccuugagaua

SEQ ID NO: 1810730 - RNA, 19 nt, Artificial Sequence
  Description of Artificial Sequence: Synthetic oligonucleotide
  Antisense strand to SEQ ID NO: 1810729
uaucucaaggcagacuuga

SEQ ID NO: 1810731 - RNA, 19 nt, Artificial Sequence
  Description of Artificial Sequence: Synthetic oligonucleotide
  Sense strand starting at position 2605 of SEQ ID NO: 1563435
caagucugccuugagauau

SEQ ID NO: 1810732 - RNA, 19 nt, Artificial Sequence
  Description of Artificial Sequence: Synthetic oligonucleotide
  Antisense strand to SEQ ID NO: 1810731
auaucucaaggcagacuug

SEQ ID NO: 1810733 - RNA, 19 nt, Artificial Sequence
  Description of Artificial Sequence: Synthetic oligonucleotide
  Sense strand starting at position 2782 of SEQ ID NO: 1563435
augaacuugcuaugugaua

SEQ ID NO: 1810734 - RNA, 19 nt, Artificial Sequence
  Description of Artificial Sequence: Synthetic oligonucleotide
  Antisense strand to SEQ ID NO: 1810733
uaucacauagcaaguucau

SEQ ID NO: 1810735 - RNA, 19 nt, Artificial Sequence
  Description of Artificial Sequence: Synthetic oligonucleotide
  Sense strand starting at position 2783 of SEQ ID NO: 1563435
ugaacuugcuaugugauag

SEQ ID NO: 1810736 - RNA, 19 nt, Artificial Sequence
  Description of Artificial Sequence: Synthetic oligonucleotide
  Antisense strand to SEQ ID NO: 1810735
cuaucacauagcaaguuca

SEQ ID NO: 1810737 - RNA, 19 nt, Artificial Sequence
  Description of Artificial Sequence: Synthetic oligonucleotide
  Sense strand starting at position 2794 of SEQ ID NO: 1563435
ugugauagacauugcuuua

SEQ ID NO: 1810738 - RNA, 19 nt, Artificial Sequence
  Description of Artificial Sequence: Synthetic oligonucleotide
  Antisense strand to SEQ ID NO: 1810737
uaaagcaaugucuaucaca

SEQ ID NO: 1810739 - RNA, 19 nt, Artificial Sequence
  Description of Artificial Sequence: Synthetic oligonucleotide
  Sense strand starting at position 2797 of SEQ ID NO: 1563435
gauagacauugcuuuaggu

SEQ ID NO: 1810740 - RNA, 19 nt, Artificial Sequence
  Description of Artificial Sequence: Synthetic oligonucleotide
  Antisense strand to SEQ ID NO: 1810739
accuaaagcaaugucuauc

SEQ ID NO: 1810741 - RNA, 19 nt, Artificial Sequence
  Description of Artificial Sequence: Synthetic oligonucleotide
  Sense strand starting at position 2868 of SEQ ID NO: 1563435
ggguuaucugcauggauga

SEQ ID NO: 1810742 - RNA, 19 nt, Artificial Sequence
  Description of Artificial Sequence: Synthetic oligonucleotide
  Antisense strand to SEQ ID NO: 1810741
ucauccaugcagauaaccc

SEQ ID NO: 1810743 - RNA, 19 nt, Artificial Sequence
  Description of Artificial Sequence: Synthetic oligonucleotide
  Sense strand starting at position 2869 of SEQ ID NO: 1563435
gguuaucugcauggaugau

SEQ ID NO: 1810744 - RNA, 19 nt, Artificial Sequence
  Description of Artificial Sequence: Synthetic oligonucleotide
  Antisense strand to SEQ ID NO: 1810743
aucauccaugcagauaacc

SEQ ID NO: 1810745 - RNA, 19 nt, Artificial Sequence
  Description of Artificial Sequence: Synthetic oligonucleotide
  Sense strand starting at position 2870 of SEQ ID NO: 1563435
guuaucugcauggaugauu

SEQ ID NO: 1810746 - RNA, 19 nt, Artificial Sequence
  Description of Artificial Sequence: Synthetic oligonucleotide
  Antisense strand to SEQ ID NO: 1810745
aaucauccaugcagauaac

SEQ ID NO: 1810747 - RNA, 19 nt, Artificial Sequence
  Description of Artificial Sequence: Synthetic oligonucleotide
  Sense strand starting at position 2925 of SEQ ID NO: 1563435
aaaggugggcgugaggauu

SEQ ID NO: 1810748 - RNA, 19 nt, Artificial Sequence
  Description of Artificial Sequence: Synthetic oligonucleotide
  Antisense strand to SEQ ID NO: 1810747
aauccucacgcccaccuuu

SEQ ID NO: 1810749 - RNA, 19 nt, Artificial Sequence
  Description of Artificial Sequence: Synthetic oligonucleotide
  Sense strand starting at position 3006 of SEQ ID NO: 1563435
gugaauaagcuaugauaua

SEQ ID NO: 1810750 - RNA, 19 nt, Artificial Sequence
  Description of Artificial Sequence: Synthetic oligonucleotide
  Antisense strand to SEQ ID NO: 1810749
uauaucauagcuuauucac

SEQ ID NO: 1810751 - RNA, 19 nt, Artificial Sequence
  Description of Artificial Sequence: Synthetic oligonucleotide
  Sense strand starting at position 3089 of SEQ ID NO: 1563435
caacgaucacaugguagaa

SEQ ID NO: 1810752 - RNA, 19 nt, Artificial Sequence
  Description of Artificial Sequence: Synthetic oligonucleotide
  Antisense strand to SEQ ID NO: 1810751
uucuaccaugugaucguug

SEQ ID NO: 1810753 - RNA, 19 nt, Artificial Sequence
  Description of Artificial Sequence: Synthetic oligonucleotide
  Sense strand starting at position 3117 of SEQ ID NO: 1563435
uacagaaugccauguauag

SEQ ID NO: 1810754 - RNA, 19 nt, Artificial Sequence
  Description of Artificial Sequence: Synthetic oligonucleotide
  Antisense strand to SEQ ID NO: 1810753
cuauacauggcauucugua

SEQ ID NO: 1810755 - RNA, 19 nt, Artificial Sequence
  Description of Artificial Sequence: Synthetic oligonucleotide
  Sense strand starting at position 3260 of SEQ ID NO: 1563435
uugcuucucgggcaagaag

SEQ ID NO: 1810756 - RNA, 19 nt, Artificial Sequence
  Description of Artificial Sequence: Synthetic oligonucleotide
  Antisense strand to SEQ ID NO: 1810755
cuucuugcccgagaagcaa

SEQ ID NO: 1810757 - RNA, 19 nt, Artificial Sequence
  Description of Artificial Sequence: Synthetic oligonucleotide
  Sense strand starting at position 3306 of SEQ ID NO: 1563435
ggaacuucuugaucuuaag

SEQ ID NO: 1810758 - RNA, 19 nt, Artificial Sequence
  Description of Artificial Sequence: Synthetic oligonucleotide
  Antisense strand to SEQ ID NO: 1810757
cuuaagaucaagaaguucc

SEQ ID NO: 1810759 - RNA, 19 nt, Artificial Sequence
  Description of Artificial Sequence: Synthetic oligonucleotide
  Sense strand starting at position 3352 of SEQ ID NO: 1563435
gcacaucagucacuuuaug

SEQ ID NO: 1810760 - RNA, 19 nt, Artificial Sequence
  Description of Artificial Sequence: Synthetic oligonucleotide
  Antisense strand to SEQ ID NO: 1810759
cauaaagugacugaugugc

SEQ ID NO: 1810761 - RNA, 19 nt, Artificial Sequence
  Description of Artificial Sequence: Synthetic oligonucleotide
  Sense strand starting at position 3452 of SEQ ID NO: 1563435
ucucauuaccagugggcaa

SEQ ID NO: 1810762 - RNA, 19 nt, Artificial Sequence
  Description of Artificial Sequence: Synthetic oligonucleotide
  Antisense strand to SEQ ID NO: 1810761
uugcccacugguaaugaga

SEQ ID NO: 1810763 - RNA, 19 nt, Artificial Sequence
  Description of Artificial Sequence: Synthetic oligonucleotide
  Sense strand starting at position 3479 of SEQ ID NO: 1563435
guaauuugcuucucccaag

SEQ ID NO: 1810764 - RNA, 19 nt, Artificial Sequence
  Description of Artificial Sequence: Synthetic oligonucleotide
  Antisense strand to SEQ ID NO: 1810763
cuugggagaagcaaauuac

SEQ ID NO: 1810765 - RNA, 19 nt, Artificial Sequence
  Description of Artificial Sequence: Synthetic oligonucleotide
  Sense strand starting at position 3653 of SEQ ID NO: 1563435
aggcuagggccuggaauua

SEQ ID NO: 1810766 - RNA, 19 nt, Artificial Sequence
  Description of Artificial Sequence: Synthetic oligonucleotide
  Antisense strand to SEQ ID NO: 1810765
uaauuccaggcccuagccu

SEQ ID NO: 1810767 - RNA, 19 nt, Artificial Sequence
  Description of Artificial Sequence: Synthetic oligonucleotide
  Sense strand starting at position 3833 of SEQ ID NO: 1563435
caggaaggauuccagaaac

SEQ ID NO: 1810768 - RNA, 19 nt, Artificial Sequence
  Description of Artificial Sequence: Synthetic oligonucleotide
  Antisense strand to SEQ ID NO: 1810767
guuucuggaauccuuccug

SEQ ID NO: 1810769 - RNA, 19 nt, Artificial Sequence
  Description of Artificial Sequence: Synthetic oligonucleotide
  Sense strand starting at position 3935 of SEQ ID NO: 1563435
agugcugaccugugaagag

SEQ ID NO: 1810770 - RNA, 19 nt, Artificial Sequence
  Description of Artificial Sequence: Synthetic oligonucleotide
  Antisense strand to SEQ ID NO: 1810769
cucuucacaggucagcacu

SEQ ID NO: 1810771 - RNA, 19 nt, Artificial Sequence
  Description of Artificial Sequence: Synthetic oligonucleotide
  Sense strand starting at position 231 of SEQ ID NO: 1563436
uucuaaaggacauguggau

SEQ ID NO: 1810772 - RNA, 19 nt, Artificial Sequence
  Description of Artificial Sequence: Synthetic oligonucleotide
  Antisense strand to SEQ ID NO: 1810771
auccacauguccuuuagaa

SEQ ID NO: 1810773 - RNA, 19 nt, Artificial Sequence
  Description of Artificial Sequence: Synthetic oligonucleotide
  Sense strand starting at position 288 of SEQ ID NO: 1563436
uaguauuguguugauguua

SEQ ID NO: 1810774 - RNA, 19 nt, Artificial Sequence
  Description of Artificial Sequence: Synthetic oligonucleotide
  Antisense strand to SEQ ID NO: 1810773
uaacaucaacacaauacua

SEQ ID NO: 1810775 - RNA, 19 nt, Artificial Sequence
  Description of Artificial Sequence: Synthetic oligonucleotide
  Sense strand starting at position 308 of SEQ ID NO: 1563436
guuuccgugguguuguaau

SEQ ID NO: 1810776 - RNA, 19 nt, Artificial Sequence
  Description of Artificial Sequence: Synthetic oligonucleotide
  Antisense strand to SEQ ID NO: 1810775
auuacaacaccacggaaac

SEQ ID NO: 1810777 - RNA, 19 nt, Artificial Sequence
  Description of Artificial Sequence: Synthetic oligonucleotide
  Sense strand starting at position 329 of SEQ ID NO: 1563436
guuauagaagacugccuuu

SEQ ID NO: 1810778 - RNA, 19 nt, Artificial Sequence
  Description of Artificial Sequence: Synthetic oligonucleotide
  Antisense strand to SEQ ID NO: 1810777
aaaggcagucuucuauaac

SEQ ID NO: 1810779 - RNA, 19 nt, Artificial Sequence
  Description of Artificial Sequence: Synthetic oligonucleotide
  Sense strand starting at position 332 of SEQ ID NO: 1563436
auagaagacugccuuuauu

SEQ ID NO: 1810780 - RNA, 19 nt, Artificial Sequence
  Description of Artificial Sequence: Synthetic oligonucleotide
  Antisense strand to SEQ ID NO: 1810779
aauaaaggcagucuucuau

SEQ ID NO: 1810781 - RNA, 19 nt, Artificial Sequence
  Description of Artificial Sequence: Synthetic oligonucleotide
  Sense strand starting at position 380 of SEQ ID NO: 1563436
ggugacauguguccuaaag

SEQ ID NO: 1810782 - RNA, 19 nt, Artificial Sequence
  Description of Artificial Sequence: Synthetic oligonucleotide
  Antisense strand to SEQ ID NO: 1810781
cuuuaggacacaugucacc

SEQ ID NO: 1810783 - RNA, 19 nt, Artificial Sequence
  Description of Artificial Sequence: Synthetic oligonucleotide
  Sense strand starting at position 390 of SEQ ID NO: 1563436
guccuaaagucagcaacau

SEQ ID NO: 1810784 - RNA, 19 nt, Artificial Sequence
  Description of Artificial Sequence: Synthetic oligonucleotide
  Antisense strand to SEQ ID NO: 1810783
auguugcugacuuuaggac

SEQ ID NO: 1810785 - RNA, 19 nt, Artificial Sequence
  Description of Artificial Sequence: Synthetic oligonucleotide
  Sense strand starting at position 666 of SEQ ID NO: 1563436
uuaguuaaugaaggcauau

SEQ ID NO: 1810786 - RNA, 19 nt, Artificial Sequence
  Description of Artificial Sequence: Synthetic oligonucleotide
  Antisense strand to SEQ ID NO: 1810785
auaugccuucauuaacuaa

SEQ ID NO: 1810787 - RNA, 19 nt, Artificial Sequence
  Description of Artificial Sequence: Synthetic oligonucleotide
  Sense strand starting at position 746 of SEQ ID NO: 1563436
cacuacauaugagaugaga

SEQ ID NO: 1810788 - RNA, 19 nt, Artificial Sequence
  Description of Artificial Sequence: Synthetic oligonucleotide
  Antisense strand to SEQ ID NO: 1810787
ucucaucucauauguagug

SEQ ID NO: 1810789 - RNA, 19 nt, Artificial Sequence
  Description of Artificial Sequence: Synthetic oligonucleotide
  Sense strand starting at position 762 of SEQ ID NO: 1563436
agaaaugucucagugacuu

SEQ ID NO: 1810790 - RNA, 19 nt, Artificial Sequence
  Description of Artificial Sequence: Synthetic oligonucleotide
  Antisense strand to SEQ ID NO: 1810789
aagucacugagacauuucu

SEQ ID NO: 1810791 - RNA, 19 nt, Artificial Sequence
  Description of Artificial Sequence: Synthetic oligonucleotide
  Sense strand starting at position 766 of SEQ ID NO: 1563436
augucucagugacuugaua

SEQ ID NO: 1810792 - RNA, 19 nt, Artificial Sequence
  Description of Artificial Sequence: Synthetic oligonucleotide
  Antisense strand to SEQ ID NO: 1810791
uaucaagucacugagacau

SEQ ID NO: 1810793 - RNA, 19 nt, Artificial Sequence
  Description of Artificial Sequence: Synthetic oligonucleotide
  Sense strand starting at position 827 of SEQ ID NO: 1563436
guguacuaccuuugaauau

SEQ ID NO: 1810794 - RNA, 19 nt, Artificial Sequence
  Description of Artificial Sequence: Synthetic oligonucleotide
  Antisense strand to SEQ ID NO: 1810793
auauucaaagguaguacac

SEQ ID NO: 1810795 - RNA, 19 nt, Artificial Sequence
  Description of Artificial Sequence: Synthetic oligonucleotide
  Sense strand starting at position 860 of SEQ ID NO: 1563436
uuaugauauggauguuuga

SEQ ID NO: 1810796 - RNA, 19 nt, Artificial Sequence
  Description of Artificial Sequence: Synthetic oligonucleotide
  Antisense strand to SEQ ID NO: 1810795
ucaaacauccauaucauaa

SEQ ID NO: 1810797 - RNA, 19 nt, Artificial Sequence
  Description of Artificial Sequence: Synthetic oligonucleotide
  Sense strand starting at position 947 of SEQ ID NO: 1563436
ugaccuaugcaagaaaugu

SEQ ID NO: 1810798 - RNA, 19 nt, Artificial Sequence
  Description of Artificial Sequence: Synthetic oligonucleotide
  Antisense strand to SEQ ID NO: 1810797
acauuucuugcauagguca

SEQ ID NO: 1810799 - RNA, 19 nt, Artificial Sequence
  Description of Artificial Sequence: Synthetic oligonucleotide
  Sense strand starting at position 1028 of SEQ ID NO: 1563436
gcgcaagacaaagaauguu

SEQ ID NO: 1810800 - RNA, 19 nt, Artificial Sequence
  Description of Artificial Sequence: Synthetic oligonucleotide
  Antisense strand to SEQ ID NO: 1810799
aacauucuuugucuugcgc

SEQ ID NO: 1810801 - RNA, 19 nt, Artificial Sequence
  Description of Artificial Sequence: Synthetic oligonucleotide
  Sense strand starting at position 1040 of SEQ ID NO: 1563436
gaauguuugagcgagucua

SEQ ID NO: 1810802 - RNA, 19 nt, Artificial Sequence
  Description of Artificial Sequence: Synthetic oligonucleotide
  Antisense strand to SEQ ID NO: 1810801
uagacucgcucaaacauuc

SEQ ID NO: 1810803 - RNA, 19 nt, Artificial Sequence
  Description of Artificial Sequence: Synthetic oligonucleotide
  Sense strand starting at position 1252 of SEQ ID NO: 1563436
uggaaaggacugugauugu

SEQ ID NO: 1810804 - RNA, 19 nt, Artificial Sequence
  Description of Artificial Sequence: Synthetic oligonucleotide
  Antisense strand to SEQ ID NO: 1810803
acaaucacaguccuuucca

SEQ ID NO: 1810805 - RNA, 19 nt, Artificial Sequence
  Description of Artificial Sequence: Synthetic oligonucleotide
  Sense strand starting at position 1310 of SEQ ID NO: 1563436
agcuguguugucccugcaa

SEQ ID NO: 1810806 - RNA, 19 nt, Artificial Sequence
  Description of Artificial Sequence: Synthetic oligonucleotide
  Antisense strand to SEQ ID NO: 1810805
uugcagggacaacacagcu

SEQ ID NO: 1810807 - RNA, 19 nt, Artificial Sequence
  Description of Artificial Sequence: Synthetic oligonucleotide
  Sense strand starting at position 1378 of SEQ ID NO: 1563436
caguguggcaauuagugaa

SEQ ID NO: 1810808 - RNA, 19 nt, Artificial Sequence
  Description of Artificial Sequence: Synthetic oligonucleotide
  Antisense strand to SEQ ID NO: 1810807
uucacuaauugccacacug

SEQ ID NO: 1810809 - RNA, 19 nt, Artificial Sequence
  Description of Artificial Sequence: Synthetic oligonucleotide
  Sense strand starting at position 1382 of SEQ ID NO: 1563436
guggcaauuagugaaagag

SEQ ID NO: 1810810 - RNA, 19 nt, Artificial Sequence
  Description of Artificial Sequence: Synthetic oligonucleotide
  Antisense strand to SEQ ID NO: 1810809
cucuuucacuaauugccac

SEQ ID NO: 1810811 - RNA, 19 nt, Artificial Sequence
  Description of Artificial Sequence: Synthetic oligonucleotide
  Sense strand starting at position 1549 of SEQ ID NO: 1563436
acugaaugcuuguuuaaac

SEQ ID NO: 1810812 - RNA, 19 nt, Artificial Sequence
  Description of Artificial Sequence: Synthetic oligonucleotide
  Antisense strand to SEQ ID NO: 1810811
guuuaaacaagcauucagu

SEQ ID NO: 1810813 - RNA, 19 nt, Artificial Sequence
  Description of Artificial Sequence: Synthetic oligonucleotide
  Sense strand starting at position 1550 of SEQ ID NO: 1563436
cugaaugcuuguuuaaacu

SEQ ID NO: 1810814 - RNA, 19 nt, Artificial Sequence
  Description of Artificial Sequence: Synthetic oligonucleotide
  Antisense strand to SEQ ID NO: 1810813
aguuuaaacaagcauucag

SEQ ID NO: 1810815 - RNA, 19 nt, Artificial Sequence
  Description of Artificial Sequence: Synthetic oligonucleotide
  Sense strand starting at position 1568 of SEQ ID NO: 1563436
ucccacuugucucugauau

SEQ ID NO: 1810816 - RNA, 19 nt, Artificial Sequence
  Description of Artificial Sequence: Synthetic oligonucleotide
  Antisense strand to SEQ ID NO: 1810815
auaucagagacaaguggga

SEQ ID NO: 1810817 - RNA, 19 nt, Artificial Sequence
  Description of Artificial Sequence: Synthetic oligonucleotide
  Sense strand starting at position 1569 of SEQ ID NO: 1563436
cccacuugucucugauaug

SEQ ID NO: 1810818 - RNA, 19 nt, Artificial Sequence
  Description of Artificial Sequence: Synthetic oligonucleotide
  Antisense strand to SEQ ID NO: 1810817
cauaucagagacaaguggg

SEQ ID NO: 1810819 - RNA, 19 nt, Artificial Sequence
  Description of Artificial Sequence: Synthetic oligonucleotide
  Sense strand starting at position 1580 of SEQ ID NO: 1563436
cugauaugguaagcuagaa

SEQ ID NO: 1810820 - RNA, 19 nt, Artificial Sequence
  Description of Artificial Sequence: Synthetic oligonucleotide
  Antisense strand to SEQ ID NO: 1810819
uucuagcuuaccauaucag

SEQ ID NO: 1810821 - RNA, 19 nt, Artificial Sequence
  Description of Artificial Sequence: Synthetic oligonucleotide
  Sense strand starting at position 1623 of SEQ ID NO: 1563436
ggaucagcgcucucgugau

SEQ ID NO: 1810822 - RNA, 19 nt, Artificial Sequence
  Description of Artificial Sequence: Synthetic oligonucleotide
  Antisense strand to SEQ ID NO: 1810821
aucacgagagcgcugaucc

SEQ ID NO: 1810823 - RNA, 19 nt, Artificial Sequence
  Description of Artificial Sequence: Synthetic oligonucleotide
  Sense strand starting at position 1625 of SEQ ID NO: 1563436
aucagcgcucucgugauaa

SEQ ID NO: 1810824 - RNA, 19 nt, Artificial Sequence
  Description of Artificial Sequence: Synthetic oligonucleotide
  Antisense strand to SEQ ID NO: 1810823
uuaucacgagagcgcugau

SEQ ID NO: 1810825 - RNA, 19 nt, Artificial Sequence
  Description of Artificial Sequence: Synthetic oligonucleotide
  Sense strand starting at position 1914 of SEQ ID NO: 1563436
ucaaguccgauuugugcua

SEQ ID NO: 1810826 - RNA, 19 nt, Artificial Sequence
  Description of Artificial Sequence: Synthetic oligonucleotide
  Antisense strand to SEQ ID NO: 1810825
uagcacaaaucggacuuga

SEQ ID NO: 1810827 - RNA, 19 nt, Artificial Sequence
  Description of Artificial Sequence: Synthetic oligonucleotide
  Sense strand starting at position 2037 of SEQ ID NO: 1563436
cuacgaaacugucucuuau

SEQ ID NO: 1810828 - RNA, 19 nt, Artificial Sequence
  Description of Artificial Sequence: Synthetic oligonucleotide
  Antisense strand to SEQ ID NO: 1810827
auaagagacaguuucguag

SEQ ID NO: 1810829 - RNA, 19 nt, Artificial Sequence
  Description of Artificial Sequence: Synthetic oligonucleotide
  Sense strand starting at position 2039 of SEQ ID NO: 1563436
acgaaacugucucuuauua

SEQ ID NO: 1810830 - RNA, 19 nt, Artificial Sequence
  Description of Artificial Sequence: Synthetic oligonucleotide
  Antisense strand to SEQ ID NO: 1810829
uaauaagagacaguuucgu

SEQ ID NO: 1810831 - RNA, 19 nt, Artificial Sequence
  Description of Artificial Sequence: Synthetic oligonucleotide
  Sense strand starting at position 2060 of SEQ ID NO: 1563436
auaguuuaugguuacacau

SEQ ID NO: 1810832 - RNA, 19 nt, Artificial Sequence
  Description of Artificial Sequence: Synthetic oligonucleotide
  Antisense strand to SEQ ID NO: 1810831
auguguaaccauaaacuau

SEQ ID NO: 1810833 - RNA, 19 nt, Artificial Sequence
  Description of Artificial Sequence: Synthetic oligonucleotide
  Sense strand starting at position 2121 of SEQ ID NO: 1563436
aaaguacauuaucugggau

SEQ ID NO: 1810834 - RNA, 19 nt, Artificial Sequence
  Description of Artificial Sequence: Synthetic oligonucleotide
  Antisense strand to SEQ ID NO: 1810833
aucccagauaauguacuuu

SEQ ID NO: 1810835 - RNA, 19 nt, Artificial Sequence
  Description of Artificial Sequence: Synthetic oligonucleotide
  Sense strand starting at position 2124 of SEQ ID NO: 1563436
guacauuaucugggauccu

SEQ ID NO: 1810836 - RNA, 19 nt, Artificial Sequence
  Description of Artificial Sequence: Synthetic oligonucleotide
  Antisense strand to SEQ ID NO: 1810835
aggaucccagauaauguac

SEQ ID NO: 1810837 - RNA, 19 nt, Artificial Sequence
  Description of Artificial Sequence: Synthetic oligonucleotide
  Sense strand starting at position 2662 of SEQ ID NO: 1563436
uacugaugagauuguaaac

SEQ ID NO: 1810838 - RNA, 19 nt, Artificial Sequence
  Description of Artificial Sequence: Synthetic oligonucleotide
  Antisense strand to SEQ ID NO: 1810837
guuuacaaucucaucagua

SEQ ID NO: 1810839 - RNA, 19 nt, Artificial Sequence
  Description of Artificial Sequence: Synthetic oligonucleotide
  Sense strand starting at position 2868 of SEQ ID NO: 1563436
auaagauauuggccaagua

SEQ ID NO: 1810840 - RNA, 19 nt, Artificial Sequence
  Description of Artificial Sequence: Synthetic oligonucleotide
  Antisense strand to SEQ ID NO: 1810839
uacuuggccaauaucuuau

SEQ ID NO: 1810841 - RNA, 19 nt, Artificial Sequence
  Description of Artificial Sequence: Synthetic oligonucleotide
  Sense strand starting at position 2888 of SEQ ID NO: 1563436
augagaacguaugcauacu

SEQ ID NO: 1810842 - RNA, 19 nt, Artificial Sequence
  Description of Artificial Sequence: Synthetic oligonucleotide
  Antisense strand to SEQ ID NO: 1810841
aguaugcauacguucucau

SEQ ID NO: 1810843 - RNA, 19 nt, Artificial Sequence
  Description of Artificial Sequence: Synthetic oligonucleotide
  Sense strand starting at position 2889 of SEQ ID NO: 1563436
ugagaacguaugcauacuu

SEQ ID NO: 1810844 - RNA, 19 nt, Artificial Sequence
  Description of Artificial Sequence: Synthetic oligonucleotide
  Antisense strand to SEQ ID NO: 1810843
aaguaugcauacguucuca

SEQ ID NO: 1810845 - RNA, 19 nt, Artificial Sequence
  Description of Artificial Sequence: Synthetic oligonucleotide
  Sense strand starting at position 3241 of SEQ ID NO: 1563436
auuguuuagcaagaacuca

SEQ ID NO: 1810846 - RNA, 19 nt, Artificial Sequence
  Description of Artificial Sequence: Synthetic oligonucleotide
  Antisense strand to SEQ ID NO: 1810845
ugaguucuugcuaaacaau

SEQ ID NO: 1810847 - RNA, 19 nt, Artificial Sequence
  Description of Artificial Sequence: Synthetic oligonucleotide
  Sense strand starting at position 3381 of SEQ ID NO: 1563436
uacauaagauguuucgaua

SEQ ID NO: 1810848 - RNA, 19 nt, Artificial Sequence
  Description of Artificial Sequence: Synthetic oligonucleotide
  Antisense strand to SEQ ID NO: 1810847
uaucgaaacaucuuaugua

SEQ ID NO: 1810849 - RNA, 19 nt, Artificial Sequence
  Description of Artificial Sequence: Synthetic oligonucleotide
  Sense strand starting at position 3394 of SEQ ID NO: 1563436
ucgauacaugcauaugaug

SEQ ID NO: 1810850 - RNA, 19 nt, Artificial Sequence
  Description of Artificial Sequence: Synthetic oligonucleotide
  Antisense strand to SEQ ID NO: 1810849
caucauaugcauguaucga

SEQ ID NO: 1810851 - RNA, 19 nt, Artificial Sequence
  Description of Artificial Sequence: Synthetic oligonucleotide
  Sense strand starting at position 391 of SEQ ID NO: 1563437
aguuaauagucucuugaga

SEQ ID NO: 1810852 - RNA, 19 nt, Artificial Sequence
  Description of Artificial Sequence: Synthetic oligonucleotide
  Antisense strand to SEQ ID NO: 1810851
ucucaagagacuauuaacu

SEQ ID NO: 1810853 - RNA, 19 nt, Artificial Sequence
  Description of Artificial Sequence: Synthetic oligonucleotide
  Sense strand starting at position 534 of SEQ ID NO: 1563437
gggugauuacuccagguac

SEQ ID NO: 1810854 - RNA, 19 nt, Artificial Sequence
  Description of Artificial Sequence: Synthetic oligonucleotide
  Antisense strand to SEQ ID NO: 1810853
guaccuggaguaaucaccc

SEQ ID NO: 1810855 - RNA, 19 nt, Artificial Sequence
  Description of Artificial Sequence: Synthetic oligonucleotide
  Sense strand starting at position 1070 of SEQ ID NO: 1563437
agaggaaauucugcccacu

SEQ ID NO: 1810856 - RNA, 19 nt, Artificial Sequence
  Description of Artificial Sequence: Synthetic oligonucleotide
  Antisense strand to SEQ ID NO: 1810855
agugggcagaauuuccucu

SEQ ID NO: 1810857 - RNA, 19 nt, Artificial Sequence
  Description of Artificial Sequence: Synthetic oligonucleotide
  Sense strand starting at position 1073 of SEQ ID NO: 1563437
ggaaauucugcccacuuua

SEQ ID NO: 1810858 - RNA, 19 nt, Artificial Sequence
  Description of Artificial Sequence: Synthetic oligonucleotide
  Antisense strand to SEQ ID NO: 1810857
uaaagugggcagaauuucc

SEQ ID NO: 1810859 - RNA, 19 nt, Artificial Sequence
  Description of Artificial Sequence: Synthetic oligonucleotide
  Sense strand starting at position 1122 of SEQ ID NO: 1563437
auuaacuuucuugaugguu

SEQ ID NO: 1810860 - RNA, 19 nt, Artificial Sequence
  Description of Artificial Sequence: Synthetic oligonucleotide
  Antisense strand to SEQ ID NO: 1810859
aaccaucaagaaaguuaau

SEQ ID NO: 1810861 - RNA, 19 nt, Artificial Sequence
  Description of Artificial Sequence: Synthetic oligonucleotide
  Sense strand starting at position 1125 of SEQ ID NO: 1563437
aacuuucuugaugguuaga

SEQ ID NO: 1810862 - RNA, 19 nt, Artificial Sequence
  Description of Artificial Sequence: Synthetic oligonucleotide
  Antisense strand to SEQ ID NO: 1810861
ucuaaccaucaagaaaguu

SEQ ID NO: 1810863 - RNA, 19 nt, Artificial Sequence
  Description of Artificial Sequence: Synthetic oligonucleotide
  Sense strand starting at position 1128 of SEQ ID NO: 1563437
uuucuugaugguuagaucu

SEQ ID NO: 1810864 - RNA, 19 nt, Artificial Sequence
  Description of Artificial Sequence: Synthetic oligonucleotide
  Antisense strand to SEQ ID NO: 1810863
agaucuaaccaucaagaaa

SEQ ID NO: 1810865 - RNA, 19 nt, Artificial Sequence
  Description of Artificial Sequence: Synthetic oligonucleotide
  Sense strand starting at position 1135 of SEQ ID NO: 1563437
augguuagaucuguacuaa

SEQ ID NO: 1810866 - RNA, 19 nt, Artificial Sequence
  Description of Artificial Sequence: Synthetic oligonucleotide
  Antisense strand to SEQ ID NO: 1810865
uuaguacagaucuaaccau

SEQ ID NO: 1810867 - RNA, 19 nt, Artificial Sequence
  Description of Artificial Sequence: Synthetic oligonucleotide
  Sense strand starting at position 1136 of SEQ ID NO: 1563437
ugguuagaucuguacuaaa

SEQ ID NO: 1810868 - RNA, 19 nt, Artificial Sequence
  Description of Artificial Sequence: Synthetic oligonucleotide
  Antisense strand to SEQ ID NO: 1810867
uuuaguacagaucuaacca

SEQ ID NO: 1810869 - RNA, 19 nt, Artificial Sequence
  Description of Artificial Sequence: Synthetic oligonucleotide
  Sense strand starting at position 1190 of SEQ ID NO: 1563437
ggcuguguccauuccguau

SEQ ID NO: 1810870 - RNA, 19 nt, Artificial Sequence
  Description of Artificial Sequence: Synthetic oligonucleotide
  Antisense strand to SEQ ID NO: 1810869
auacggaauggacacagcc

SEQ ID NO: 1810871 - RNA, 19 nt, Artificial Sequence
  Description of Artificial Sequence: Synthetic oligonucleotide
  Sense strand starting at position 1217 of SEQ ID NO: 1563437
ucuauuacccguuauauag

SEQ ID NO: 1810872 - RNA, 19 nt, Artificial Sequence
  Description of Artificial Sequence: Synthetic oligonucleotide
  Antisense strand to SEQ ID NO: 1810871
cuauauaacggguaauaga

SEQ ID NO: 1810873 - RNA, 19 nt, Artificial Sequence
  Description of Artificial Sequence: Synthetic oligonucleotide
  Sense strand starting at position 1302 of SEQ ID NO: 1563437
ggaguuaucaggcacuuua

SEQ ID NO: 1810874 - RNA, 19 nt, Artificial Sequence
  Description of Artificial Sequence: Synthetic oligonucleotide
  Antisense strand to SEQ ID NO: 1810873
uaaagugccugauaacucc

SEQ ID NO: 1810875 - RNA, 19 nt, Artificial Sequence
  Description of Artificial Sequence: Synthetic oligonucleotide
  Sense strand starting at position 1422 of SEQ ID NO: 1563437
uuucuaaacccagguugaa

SEQ ID NO: 1810876 - RNA, 19 nt, Artificial Sequence
  Description of Artificial Sequence: Synthetic oligonucleotide
  Antisense strand to SEQ ID NO: 1810875
uucaaccuggguuuagaaa

SEQ ID NO: 1810877 - RNA, 19 nt, Artificial Sequence
  Description of Artificial Sequence: Synthetic oligonucleotide
  Sense strand starting at position 2073 of SEQ ID NO: 1563437
cgaguugcuaacgcgaaua

SEQ ID NO: 1810878 - RNA, 19 nt, Artificial Sequence
  Description of Artificial Sequence: Synthetic oligonucleotide
  Antisense strand to SEQ ID NO: 1810877
uauucgcguuagcaacucg

SEQ ID NO: 1810879 - RNA, 19 nt, Artificial Sequence
  Description of Artificial Sequence: Synthetic oligonucleotide
  Sense strand starting at position 2112 of SEQ ID NO: 1563437
guguuaccagaguaacuga

SEQ ID NO: 1810880 - RNA, 19 nt, Artificial Sequence
  Description of Artificial Sequence: Synthetic oligonucleotide
  Antisense strand to SEQ ID NO: 1810879
ucaguuacucugguaacac

SEQ ID NO: 1810881 - RNA, 19 nt, Artificial Sequence
  Description of Artificial Sequence: Synthetic oligonucleotide
  Sense strand starting at position 2291 of SEQ ID NO: 1563437
guaaacuggccuuauaauu

SEQ ID NO: 1810882 - RNA, 19 nt, Artificial Sequence
  Description of Artificial Sequence: Synthetic oligonucleotide
  Antisense strand to SEQ ID NO: 1810881
aauuauaaggccaguuuac

SEQ ID NO: 1810883 - RNA, 19 nt, Artificial Sequence
  Description of Artificial Sequence: Synthetic oligonucleotide
  Sense strand starting at position 2371 of SEQ ID NO: 1563437
cuauuaaggcagcaagaua

SEQ ID NO: 1810884 - RNA, 19 nt, Artificial Sequence
  Description of Artificial Sequence: Synthetic oligonucleotide
  Antisense strand to SEQ ID NO: 1810883
uaucuugcugccuuaauag

SEQ ID NO: 1810885 - RNA, 19 nt, Artificial Sequence
  Description of Artificial Sequence: Synthetic oligonucleotide
  Sense strand starting at position 2441 of SEQ ID NO: 1563437
gaggucuuuacgucagcgu

SEQ ID NO: 1810886 - RNA, 19 nt, Artificial Sequence
  Description of Artificial Sequence: Synthetic oligonucleotide
  Antisense strand to SEQ ID NO: 1810885
acgcugacguaaagaccuc

SEQ ID NO: 1810887 - RNA, 19 nt, Artificial Sequence
  Description of Artificial Sequence: Synthetic oligonucleotide
  Sense strand starting at position 2448 of SEQ ID NO: 1563437
uuacgucagcguuucugaa

SEQ ID NO: 1810888 - RNA, 19 nt, Artificial Sequence
  Description of Artificial Sequence: Synthetic oligonucleotide
  Antisense strand to SEQ ID NO: 1810887
uucagaaacgcugacguaa

SEQ ID NO: 1810889 - RNA, 19 nt, Artificial Sequence
  Description of Artificial Sequence: Synthetic oligonucleotide
  Sense strand starting at position 2449 of SEQ ID NO: 1563437
uacgucagcguuucugaau

SEQ ID NO: 1810890 - RNA, 19 nt, Artificial Sequence
  Description of Artificial Sequence: Synthetic oligonucleotide
  Antisense strand to SEQ ID NO: 1810889
auucagaaacgcugacgua

SEQ ID NO: 1810891 - RNA, 19 nt, Artificial Sequence
  Description of Artificial Sequence: Synthetic oligonucleotide
  Sense strand starting at position 2516 of SEQ ID NO: 1563437
ucaguagcgauggauacaa

SEQ ID NO: 1810892 - RNA, 19 nt, Artificial Sequence
  Description of Artificial Sequence: Synthetic oligonucleotide
  Antisense strand to SEQ ID NO: 1810891
uuguauccaucgcuacuga

SEQ ID NO: 1810893 - RNA, 19 nt, Artificial Sequence
  Description of Artificial Sequence: Synthetic oligonucleotide
  Sense strand starting at position 2518 of SEQ ID NO: 1563437
aguagcgauggauacaaua

SEQ ID NO: 1810894 - RNA, 19 nt, Artificial Sequence
  Description of Artificial Sequence: Synthetic oligonucleotide
  Antisense strand to SEQ ID NO: 1810893
uauuguauccaucgcuacu

SEQ ID NO: 1810895 - RNA, 19 nt, Artificial Sequence
  Description of Artificial Sequence: Synthetic oligonucleotide
  Sense strand starting at position 2568 of SEQ ID NO: 1563437
uagaucuguguugacauaa

SEQ ID NO: 1810896 - RNA, 19 nt, Artificial Sequence
  Description of Artificial Sequence: Synthetic oligonucleotide
  Antisense strand to SEQ ID NO: 1810895
uuaugucaacacagaucua

SEQ ID NO: 1810897 - RNA, 19 nt, Artificial Sequence
  Description of Artificial Sequence: Synthetic oligonucleotide
  Sense strand starting at position 2744 of SEQ ID NO: 1563437
ugaagcaaggucuaaguau

SEQ ID NO: 1810898 - RNA, 19 nt, Artificial Sequence
  Description of Artificial Sequence: Synthetic oligonucleotide
  Antisense strand to SEQ ID NO: 1810897
auacuuagaccuugcuuca

SEQ ID NO: 1810899 - RNA, 19 nt, Artificial Sequence
  Description of Artificial Sequence: Synthetic oligonucleotide
  Sense strand starting at position 2752 of SEQ ID NO: 1563437
ggucuaaguaucuguauuu

SEQ ID NO: 1810900 - RNA, 19 nt, Artificial Sequence
  Description of Artificial Sequence: Synthetic oligonucleotide
  Antisense strand to SEQ ID NO: 1810899
aaauacagauacuuagacc

SEQ ID NO: 1810901 - RNA, 19 nt, Artificial Sequence
  Description of Artificial Sequence: Synthetic oligonucleotide
  Sense strand starting at position 2753 of SEQ ID NO: 1563437
gucuaaguaucuguauuua

SEQ ID NO: 1810902 - RNA, 19 nt, Artificial Sequence
  Description of Artificial Sequence: Synthetic oligonucleotide
  Antisense strand to SEQ ID NO: 1810901
uaaauacagauacuuagac

SEQ ID NO: 1810903 - RNA, 19 nt, Artificial Sequence
  Description of Artificial Sequence: Synthetic oligonucleotide
  Sense strand starting at position 2839 of SEQ ID NO: 1563437
uuaggaaccuuguuaacug

SEQ ID NO: 1810904 - RNA, 19 nt, Artificial Sequence
  Description of Artificial Sequence: Synthetic oligonucleotide
  Antisense strand to SEQ ID NO: 1810903
caguuaacaagguuccuaa

SEQ ID NO: 1810905 - RNA, 19 nt, Artificial Sequence
  Description of Artificial Sequence: Synthetic oligonucleotide
  Sense strand starting at position 2869 of SEQ ID NO: 1563437
ucauuugugaaaugguguu

SEQ ID NO: 1810906 - RNA, 19 nt, Artificial Sequence
  Description of Artificial Sequence: Synthetic oligonucleotide
  Antisense strand to SEQ ID NO: 1810905
aacaccauuucacaaauga

SEQ ID NO: 1810907 - RNA, 19 nt, Artificial Sequence
  Description of Artificial Sequence: Synthetic oligonucleotide
  Sense strand starting at position 2879 of SEQ ID NO: 1563437
aaugguguugcucaggaga

SEQ ID NO: 1810908 - RNA, 19 nt, Artificial Sequence
  Description of Artificial Sequence: Synthetic oligonucleotide
  Antisense strand to SEQ ID NO: 1810907
ucuccugagcaacaccauu

SEQ ID NO: 1810909 - RNA, 19 nt, Artificial Sequence
  Description of Artificial Sequence: Synthetic oligonucleotide
  Sense strand starting at position 2882 of SEQ ID NO: 1563437
gguguugcucaggagauag

SEQ ID NO: 1810910 - RNA, 19 nt, Artificial Sequence
  Description of Artificial Sequence: Synthetic oligonucleotide
  Antisense strand to SEQ ID NO: 1810909
cuaucuccugagcaacacc

SEQ ID NO: 1810911 - RNA, 19 nt, Artificial Sequence
  Description of Artificial Sequence: Synthetic oligonucleotide
  Sense strand starting at position 2907 of SEQ ID NO: 1563437
cacgucuucgcugcuagau

SEQ ID NO: 1810912 - RNA, 19 nt, Artificial Sequence
  Description of Artificial Sequence: Synthetic oligonucleotide
  Antisense strand to SEQ ID NO: 1810911
aucuagcagcgaagacgug

SEQ ID NO: 1810913 - RNA, 19 nt, Artificial Sequence
  Description of Artificial Sequence: Synthetic oligonucleotide
  Sense strand starting at position 2908 of SEQ ID NO: 1563437
acgucuucgcugcuagaug

SEQ ID NO: 1810914 - RNA, 19 nt, Artificial Sequence
  Description of Artificial Sequence: Synthetic oligonucleotide
  Antisense strand to SEQ ID NO: 1810913
caucuagcagcgaagacgu

SEQ ID NO: 1810915 - RNA, 19 nt, Artificial Sequence
  Description of Artificial Sequence: Synthetic oligonucleotide
  Sense strand starting at position 3097 of SEQ ID NO: 1563437
uuagucauucuugaacagu

SEQ ID NO: 1810916 - RNA, 19 nt, Artificial Sequence
  Description of Artificial Sequence: Synthetic oligonucleotide
  Antisense strand to SEQ ID NO: 1810915
acuguucaagaaugacuaa

SEQ ID NO: 1810917 - RNA, 19 nt, Artificial Sequence
  Description of Artificial Sequence: Synthetic oligonucleotide
  Sense strand starting at position 3100 of SEQ ID NO: 1563437
gucauucuugaacaguaaa

SEQ ID NO: 1810918 - RNA, 19 nt, Artificial Sequence
  Description of Artificial Sequence: Synthetic oligonucleotide
  Antisense strand to SEQ ID NO: 1810917
uuuacuguucaagaaugac

SEQ ID NO: 1810919 - RNA, 19 nt, Artificial Sequence
  Description of Artificial Sequence: Synthetic oligonucleotide
  Sense strand starting at position 3275 of SEQ ID NO: 1563437
agcagaaguggugauuauu

SEQ ID NO: 1810920 - RNA, 19 nt, Artificial Sequence
  Description of Artificial Sequence: Synthetic oligonucleotide
  Antisense strand to SEQ ID NO: 1810919
aauaaucaccacuucugcu

SEQ ID NO: 1810921 - RNA, 19 nt, Artificial Sequence
  Description of Artificial Sequence: Synthetic oligonucleotide
  Sense strand starting at position 3350 of SEQ ID NO: 1563437
ucuauagaucuugguuuaa

SEQ ID NO: 1810922 - RNA, 19 nt, Artificial Sequence
  Description of Artificial Sequence: Synthetic oligonucleotide
  Antisense strand to SEQ ID NO: 1810921
uuaaaccaagaucuauaga

SEQ ID NO: 1810923 - RNA, 19 nt, Artificial Sequence
  Description of Artificial Sequence: Synthetic oligonucleotide
  Sense strand starting at position 3362 of SEQ ID NO: 1563437
gguuuaacaagugggagau

SEQ ID NO: 1810924 - RNA, 19 nt, Artificial Sequence
  Description of Artificial Sequence: Synthetic oligonucleotide
  Antisense strand to SEQ ID NO: 1810923
aucucccacuuguuaaacc

SEQ ID NO: 1810925 - RNA, 19 nt, Artificial Sequence
  Description of Artificial Sequence: Synthetic oligonucleotide
  Sense strand starting at position 3368 of SEQ ID NO: 1563437
acaagugggagaugugaau

SEQ ID NO: 1810926 - RNA, 19 nt, Artificial Sequence
  Description of Artificial Sequence: Synthetic oligonucleotide
  Antisense strand to SEQ ID NO: 1810925
auucacaucucccacuugu

SEQ ID NO: 1810927 - RNA, 19 nt, Artificial Sequence
  Description of Artificial Sequence: Synthetic oligonucleotide
  Sense strand starting at position 3626 of SEQ ID NO: 1563437
uggacuucuguguauaauc

SEQ ID NO: 1810928 - RNA, 19 nt, Artificial Sequence
  Description of Artificial Sequence: Synthetic oligonucleotide
  Antisense strand to SEQ ID NO: 1810927
gauuauacacagaagucca

SEQ ID NO: 1810929 - RNA, 19 nt, Artificial Sequence
  Description of Artificial Sequence: Synthetic oligonucleotide
  Sense strand starting at position 3764 of SEQ ID NO: 1563437
auccauuguccuuaguaac

SEQ ID NO: 1810930 - RNA, 19 nt, Artificial Sequence
  Description of Artificial Sequence: Synthetic oligonucleotide
  Antisense strand to SEQ ID NO: 1810929
guuacuaaggacaauggau

SEQ ID NO: 1810931 - RNA, 19 nt, Artificial Sequence
  Description of Artificial Sequence: Synthetic oligonucleotide
  Sense strand starting at position 68 of SEQ ID NO: 1563438
aguguugcaagauagagau

SEQ ID NO: 1810932 - RNA, 19 nt, Artificial Sequence
  Description of Artificial Sequence: Synthetic oligonucleotide
  Antisense strand to SEQ ID NO: 1810931
aucucuaucuugcaacacu

SEQ ID NO: 1810933 - RNA, 19 nt, Artificial Sequence
  Description of Artificial Sequence: Synthetic oligonucleotide
  Sense strand starting at position 198 of SEQ ID NO: 1563438
ggacucauguuccucaguu

SEQ ID NO: 1810934 - RNA, 19 nt, Artificial Sequence
  Description of Artificial Sequence: Synthetic oligonucleotide
  Antisense strand to SEQ ID NO: 1810933
aacugaggaacaugagucc

SEQ ID NO: 1810935 - RNA, 19 nt, Artificial Sequence
  Description of Artificial Sequence: Synthetic oligonucleotide
  Sense strand starting at position 199 of SEQ ID NO: 1563438
gacucauguuccucaguug

SEQ ID NO: 1810936 - RNA, 19 nt, Artificial Sequence
  Description of Artificial Sequence: Synthetic oligonucleotide
  Antisense strand to SEQ ID NO: 1810935
caacugaggaacaugaguc

SEQ ID NO: 1810937 - RNA, 19 nt, Artificial Sequence
  Description of Artificial Sequence: Synthetic oligonucleotide
  Sense strand starting at position 351 of SEQ ID NO: 1563438
gcuguauucugaguaauaa

SEQ ID NO: 1810938 - RNA, 19 nt, Artificial Sequence
  Description of Artificial Sequence: Synthetic oligonucleotide
  Antisense strand to SEQ ID NO: 1810937
uuauuacucagaauacagc

SEQ ID NO: 1810939 - RNA, 19 nt, Artificial Sequence
  Description of Artificial Sequence: Synthetic oligonucleotide
  Sense strand starting at position 352 of SEQ ID NO: 1563438
cuguauucugaguaauaaa

SEQ ID NO: 1810940 - RNA, 19 nt, Artificial Sequence
  Description of Artificial Sequence: Synthetic oligonucleotide
  Antisense strand to SEQ ID NO: 1810939
uuuauuacucagaauacag

SEQ ID NO: 1810941 - RNA, 19 nt, Artificial Sequence
  Description of Artificial Sequence: Synthetic oligonucleotide
  Sense strand starting at position 466 of SEQ ID NO: 1563438
aaagaaaccugagaaggaa

SEQ ID NO: 1810942 - RNA, 19 nt, Artificial Sequence
  Description of Artificial Sequence: Synthetic oligonucleotide
  Antisense strand to SEQ ID NO: 1810941
uuccuucucagguuucuuu

SEQ ID NO: 1810943 - RNA, 19 nt, Artificial Sequence
  Description of Artificial Sequence: Synthetic oligonucleotide
  Sense strand starting at position 878 of SEQ ID NO: 1563438
auaaaugaccucugugaua

SEQ ID NO: 1810944 - RNA, 19 nt, Artificial Sequence
  Description of Artificial Sequence: Synthetic oligonucleotide
  Antisense strand to SEQ ID NO: 1810943
uaucacagaggucauuuau

SEQ ID NO: 1810945 - RNA, 19 nt, Artificial Sequence
  Description of Artificial Sequence: Synthetic oligonucleotide
  Sense strand starting at position 1002 of SEQ ID NO: 1563438
auugauuaguuacugcaua

SEQ ID NO: 1810946 - RNA, 19 nt, Artificial Sequence
  Description of Artificial Sequence: Synthetic oligonucleotide
  Antisense strand to SEQ ID NO: 1810945
uaugcaguaacuaaucaau

SEQ ID NO: 1810947 - RNA, 19 nt, Artificial Sequence
  Description of Artificial Sequence: Synthetic oligonucleotide
  Sense strand starting at position 1007 of SEQ ID NO: 1563438
uuaguuacugcauaacuga

SEQ ID NO: 1810948 - RNA, 19 nt, Artificial Sequence
  Description of Artificial Sequence: Synthetic oligonucleotide
  Antisense strand to SEQ ID NO: 1810947
ucaguuaugcaguaacuaa

SEQ ID NO: 1810949 - RNA, 19 nt, Artificial Sequence
  Description of Artificial Sequence: Synthetic oligonucleotide
  Sense strand starting at position 1010 of SEQ ID NO: 1563438
guuacugcauaacugaaau

SEQ ID NO: 1810950 - RNA, 19 nt, Artificial Sequence
  Description of Artificial Sequence: Synthetic oligonucleotide
  Antisense strand to SEQ ID NO: 1810949
auuucaguuaugcaguaac

SEQ ID NO: 1810951 - RNA, 19 nt, Artificial Sequence
  Description of Artificial Sequence: Synthetic oligonucleotide
  Sense strand starting at position 1041 of SEQ ID NO: 1563438
ugggcaaguuaucuuaaca

SEQ ID NO: 1810952 - RNA, 19 nt, Artificial Sequence
  Description of Artificial Sequence: Synthetic oligonucleotide
  Antisense strand to SEQ ID NO: 1810951
uguuaagauaacuugccca

SEQ ID NO: 1810953 - RNA, 19 nt, Artificial Sequence
  Description of Artificial Sequence: Synthetic oligonucleotide
  Sense strand starting at position 1085 of SEQ ID NO: 1563438
gugugaaaugaugguccuu

SEQ ID NO: 1810954 - RNA, 19 nt, Artificial Sequence
  Description of Artificial Sequence: Synthetic oligonucleotide
  Antisense strand to SEQ ID NO: 1810953
aaggaccaucauuucacac

SEQ ID NO: 1810955 - RNA, 19 nt, Artificial Sequence
  Description of Artificial Sequence: Synthetic oligonucleotide
  Sense strand starting at position 1189 of SEQ ID NO: 1563438
ucuuucugccuuuagaagu

SEQ ID NO: 1810956 - RNA, 19 nt, Artificial Sequence
  Description of Artificial Sequence: Synthetic oligonucleotide
  Antisense strand to SEQ ID NO: 1810955
acuucuaaaggcagaaaga

SEQ ID NO: 1810957 - RNA, 19 nt, Artificial Sequence
  Description of Artificial Sequence: Synthetic oligonucleotide
  Sense strand starting at position 1216 of SEQ ID NO: 1563438
uccugaaacgcccagauaa

SEQ ID NO: 1810958 - RNA, 19 nt, Artificial Sequence
  Description of Artificial Sequence: Synthetic oligonucleotide
  Antisense strand to SEQ ID NO: 1810957
uuaucugggcguuucagga

SEQ ID NO: 1810959 - RNA, 19 nt, Artificial Sequence
  Description of Artificial Sequence: Synthetic oligonucleotide
  Sense strand starting at position 1253 of SEQ ID NO: 1563438
uuugaagacuuucuuagua

SEQ ID NO: 1810960 - RNA, 19 nt, Artificial Sequence
  Description of Artificial Sequence: Synthetic oligonucleotide
  Antisense strand to SEQ ID NO: 1810959
uacuaagaaagucuucaaa

SEQ ID NO: 1810961 - RNA, 19 nt, Artificial Sequence
  Description of Artificial Sequence: Synthetic oligonucleotide
  Sense strand starting at position 1427 of SEQ ID NO: 1563438
uggcauauuugccuuugua

SEQ ID NO: 1810962 - RNA, 19 nt, Artificial Sequence
  Description of Artificial Sequence: Synthetic oligonucleotide
  Antisense strand to SEQ ID NO: 1810961
uacaaaggcaaauaugcca

SEQ ID NO: 1810963 - RNA, 19 nt, Artificial Sequence
  Description of Artificial Sequence: Synthetic oligonucleotide
  Sense strand starting at position 1462 of SEQ ID NO: 1563438
guagcagguguacaauaaa

SEQ ID NO: 1810964 - RNA, 19 nt, Artificial Sequence
  Description of Artificial Sequence: Synthetic oligonucleotide
  Antisense strand to SEQ ID NO: 1810963
uuuauuguacaccugcuac

SEQ ID NO: 1810965 - RNA, 19 nt, Artificial Sequence
  Description of Artificial Sequence: Synthetic oligonucleotide
  Sense strand starting at position 1483 of SEQ ID NO: 1563438
cugguuaaauuguuccaau

SEQ ID NO: 1810966 - RNA, 19 nt, Artificial Sequence
  Description of Artificial Sequence: Synthetic oligonucleotide
  Antisense strand to SEQ ID NO: 1810965
auuggaacaauuuaaccag

SEQ ID NO: 1810967 - RNA, 19 nt, Artificial Sequence
  Description of Artificial Sequence: Synthetic oligonucleotide
  Sense strand starting at position 1484 of SEQ ID NO: 1563438
ugguuaaauuguuccaauc

SEQ ID NO: 1810968 - RNA, 19 nt, Artificial Sequence
  Description of Artificial Sequence: Synthetic oligonucleotide
  Antisense strand to SEQ ID NO: 1810967
gauuggaacaauuuaacca

SEQ ID NO: 1810969 - RNA, 19 nt, Artificial Sequence
  Description of Artificial Sequence: Synthetic oligonucleotide
  Sense strand starting at position 1574 of SEQ ID NO: 1563438
auuauucugccaugaagaa

SEQ ID NO: 1810970 - RNA, 19 nt, Artificial Sequence
  Description of Artificial Sequence: Synthetic oligonucleotide
  Antisense strand to SEQ ID NO: 1810969
uucuucauggcagaauaau

SEQ ID NO: 1810971 - RNA, 19 nt, Artificial Sequence
  Description of Artificial Sequence: Synthetic oligonucleotide
  Sense strand starting at position 1778 of SEQ ID NO: 1563438
agccaccugcuaugauuaa

SEQ ID NO: 1810972 - RNA, 19 nt, Artificial Sequence
  Description of Artificial Sequence: Synthetic oligonucleotide
  Antisense strand to SEQ ID NO: 1810971
uuaaucauagcagguggcu

SEQ ID NO: 1810973 - RNA, 19 nt, Artificial Sequence
  Description of Artificial Sequence: Synthetic oligonucleotide
  Sense strand starting at position 1807 of SEQ ID NO: 1563438
cagcuacuagaauguagaa

SEQ ID NO: 1810974 - RNA, 19 nt, Artificial Sequence
  Description of Artificial Sequence: Synthetic oligonucleotide
  Antisense strand to SEQ ID NO: 1810973
uucuacauucuaguagcug

SEQ ID NO: 1810975 - RNA, 19 nt, Artificial Sequence
  Description of Artificial Sequence: Synthetic oligonucleotide
  Sense strand starting at position 2052 of SEQ ID NO: 1563438
auuagcagguuuguagaaa

SEQ ID NO: 1810976 - RNA, 19 nt, Artificial Sequence
  Description of Artificial Sequence: Synthetic oligonucleotide
  Antisense strand to SEQ ID NO: 1810975
uuucuacaaaccugcuaau

SEQ ID NO: 1810977 - RNA, 19 nt, Artificial Sequence
  Description of Artificial Sequence: Synthetic oligonucleotide
  Sense strand starting at position 2182 of SEQ ID NO: 1563438
auuggaauguugucaggau

SEQ ID NO: 1810978 - RNA, 19 nt, Artificial Sequence
  Description of Artificial Sequence: Synthetic oligonucleotide
  Antisense strand to SEQ ID NO: 1810977
auccugacaacauuccaau

SEQ ID NO: 1810979 - RNA, 19 nt, Artificial Sequence
  Description of Artificial Sequence: Synthetic oligonucleotide
  Sense strand starting at position 2221 of SEQ ID NO: 1563438
ucaguaaacugucugcaaa

SEQ ID NO: 1810980 - RNA, 19 nt, Artificial Sequence
  Description of Artificial Sequence: Synthetic oligonucleotide
  Antisense strand to SEQ ID NO: 1810979
uuugcagacaguuuacuga

SEQ ID NO: 1810981 - RNA, 19 nt, Artificial Sequence
  Description of Artificial Sequence: Synthetic oligonucleotide
  Sense strand starting at position 2222 of SEQ ID NO: 1563438
caguaaacugucugcaaag

SEQ ID NO: 1810982 - RNA, 19 nt, Artificial Sequence
  Description of Artificial Sequence: Synthetic oligonucleotide
  Antisense strand to SEQ ID NO: 1810981
cuuugcagacaguuuacug

SEQ ID NO: 1810983 - RNA, 19 nt, Artificial Sequence
  Description of Artificial Sequence: Synthetic oligonucleotide
  Sense strand starting at position 2477 of SEQ ID NO: 1563438
aggcacuauguuggucaaa

SEQ ID NO: 1810984 - RNA, 19 nt, Artificial Sequence
  Description of Artificial Sequence: Synthetic oligonucleotide
  Antisense strand to SEQ ID NO: 1810983
uuugaccaacauagugccu

SEQ ID NO: 1810985 - RNA, 19 nt, Artificial Sequence
  Description of Artificial Sequence: Synthetic oligonucleotide
  Sense strand starting at position 2526 of SEQ ID NO: 1563438
gcucaagugggucauacaa

SEQ ID NO: 1810986 - RNA, 19 nt, Artificial Sequence
  Description of Artificial Sequence: Synthetic oligonucleotide
  Antisense strand to SEQ ID NO: 1810985
uuguaugacccacuugagc

SEQ ID NO: 1810987 - RNA, 19 nt, Artificial Sequence
  Description of Artificial Sequence: Synthetic oligonucleotide
  Sense strand starting at position 2564 of SEQ ID NO: 1563438
aaugcauuguaguuuaaug

SEQ ID NO: 1810988 - RNA, 19 nt, Artificial Sequence
  Description of Artificial Sequence: Synthetic oligonucleotide
  Antisense strand to SEQ ID NO: 1810987
cauuaaacuacaaugcauu

SEQ ID NO: 1810989 - RNA, 19 nt, Artificial Sequence
  Description of Artificial Sequence: Synthetic oligonucleotide
  Sense strand starting at position 2746 of SEQ ID NO: 1563438
caguuuaaauguuuaggaa

SEQ ID NO: 1810990 - RNA, 19 nt, Artificial Sequence
  Description of Artificial Sequence: Synthetic oligonucleotide
  Antisense strand to SEQ ID NO: 1810989
uuccuaaacauuuaaacug

SEQ ID NO: 1810991 - RNA, 19 nt, Artificial Sequence
  Description of Artificial Sequence: Synthetic oligonucleotide
  Sense strand starting at position 2753 of SEQ ID NO: 1563438
aauguuuaggaauacguga

SEQ ID NO: 1810992 - RNA, 19 nt, Artificial Sequence
  Description of Artificial Sequence: Synthetic oligonucleotide
  Antisense strand to SEQ ID NO: 1810991
ucacguauuccuaaacauu

SEQ ID NO: 1810993 - RNA, 19 nt, Artificial Sequence
  Description of Artificial Sequence: Synthetic oligonucleotide
  Sense strand starting at position 2758 of SEQ ID NO: 1563438
uuaggaauacgugauggua

SEQ ID NO: 1810994 - RNA, 19 nt, Artificial Sequence
  Description of Artificial Sequence: Synthetic oligonucleotide
  Antisense strand to SEQ ID NO: 1810993
uaccaucacguauuccuaa

SEQ ID NO: 1810995 - RNA, 19 nt, Artificial Sequence
  Description of Artificial Sequence: Synthetic oligonucleotide
  Sense strand starting at position 2761 of SEQ ID NO: 1563438
ggaauacgugaugguauac

SEQ ID NO: 1810996 - RNA, 19 nt, Artificial Sequence
  Description of Artificial Sequence: Synthetic oligonucleotide
  Antisense strand to SEQ ID NO: 1810995
guauaccaucacguauucc

SEQ ID NO: 1810997 - RNA, 19 nt, Artificial Sequence
  Description of Artificial Sequence: Synthetic oligonucleotide
  Sense strand starting at position 3106 of SEQ ID NO: 1563438
accacauccggucagaauu

SEQ ID NO: 1810998 - RNA, 19 nt, Artificial Sequence
  Description of Artificial Sequence: Synthetic oligonucleotide
  Antisense strand to SEQ ID NO: 1810997
aauucugaccggauguggu

SEQ ID NO: 1810999 - RNA, 19 nt, Artificial Sequence
  Description of Artificial Sequence: Synthetic oligonucleotide
  Sense strand starting at position 3309 of SEQ ID NO: 1563438
aacugauagcuucggaaac

SEQ ID NO: 1811000 - RNA, 19 nt, Artificial Sequence
  Description of Artificial Sequence: Synthetic oligonucleotide
  Antisense strand to SEQ ID NO: 1810999
guuuccgaagcuaucaguu

SEQ ID NO: 1811001 - RNA, 19 nt, Artificial Sequence
  Description of Artificial Sequence: Synthetic oligonucleotide
  Sense strand starting at position 3340 of SEQ ID NO: 1563438
acacauaaguagguauaau

SEQ ID NO: 1811002 - RNA, 19 nt, Artificial Sequence
  Description of Artificial Sequence: Synthetic oligonucleotide
  Antisense strand to SEQ ID NO: 1811001
auuauaccuacuuaugugu

SEQ ID NO: 1811003 - RNA, 19 nt, Artificial Sequence
  Description of Artificial Sequence: Synthetic oligonucleotide
  Sense strand starting at position 3427 of SEQ ID NO: 1563438
cuaacuuaguggucccaaa

SEQ ID NO: 1811004 - RNA, 19 nt, Artificial Sequence
  Description of Artificial Sequence: Synthetic oligonucleotide
  Antisense strand to SEQ ID NO: 1811003
uuugggaccacuaaguuag

SEQ ID NO: 1811005 - RNA, 19 nt, Artificial Sequence
  Description of Artificial Sequence: Synthetic oligonucleotide
  Sense strand starting at position 3468 of SEQ ID NO: 1563438
cugccaugggcucaugaau

SEQ ID NO: 1811006 - RNA, 19 nt, Artificial Sequence
  Description of Artificial Sequence: Synthetic oligonucleotide
  Antisense strand to SEQ ID NO: 1811005
auucaugagcccauggcag

SEQ ID NO: 1811007 - RNA, 19 nt, Artificial Sequence
  Description of Artificial Sequence: Synthetic oligonucleotide
  Sense strand starting at position 3522 of SEQ ID NO: 1563438
auaaguguaugucucauau

SEQ ID NO: 1811008 - RNA, 19 nt, Artificial Sequence
  Description of Artificial Sequence: Synthetic oligonucleotide
  Antisense strand to SEQ ID NO: 1811007
auaugagacauacacuuau

SEQ ID NO: 1811009 - RNA, 19 nt, Artificial Sequence
  Description of Artificial Sequence: Synthetic oligonucleotide
  Sense strand starting at position 3652 of SEQ ID NO: 1563438
uuauguagacaucaguuua

SEQ ID NO: 1811010 - RNA, 19 nt, Artificial Sequence
  Description of Artificial Sequence: Synthetic oligonucleotide
  Antisense strand to SEQ ID NO: 1811009
uaaacugaugucuacauaa

SEQ ID NO: 1811011 - RNA, 19 nt, Artificial Sequence
  Description of Artificial Sequence: Synthetic oligonucleotide
  Sense strand starting at position 1204 of SEQ ID NO: 1563439
gcauaaugaugacuacaug

SEQ ID NO: 1811012 - RNA, 19 nt, Artificial Sequence
  Description of Artificial Sequence: Synthetic oligonucleotide
  Antisense strand to SEQ ID NO: 1811011
cauguagucaucauuaugc

SEQ ID NO: 1811013 - RNA, 19 nt, Artificial Sequence
  Description of Artificial Sequence: Synthetic oligonucleotide
  Sense strand starting at position 1220 of SEQ ID NO: 1563439
auguucuuucuaugucaca

SEQ ID NO: 1811014 - RNA, 19 nt, Artificial Sequence
  Description of Artificial Sequence: Synthetic oligonucleotide
  Antisense strand to SEQ ID NO: 1811013
ugugacauagaaagaacau

SEQ ID NO: 1811015 - RNA, 19 nt, Artificial Sequence
  Description of Artificial Sequence: Synthetic oligonucleotide
  Sense strand starting at position 1236 of SEQ ID NO: 1563439
acauaagagcauugccuaa

SEQ ID NO: 1811016 - RNA, 19 nt, Artificial Sequence
  Description of Artificial Sequence: Synthetic oligonucleotide
  Antisense strand to SEQ ID NO: 1811015
uuaggcaaugcucuuaugu

SEQ ID NO: 1811017 - RNA, 19 nt, Artificial Sequence
  Description of Artificial Sequence: Synthetic oligonucleotide
  Sense strand starting at position 1238 of SEQ ID NO: 1563439
auaagagcauugccuaaua

SEQ ID NO: 1811018 - RNA, 19 nt, Artificial Sequence
  Description of Artificial Sequence: Synthetic oligonucleotide
  Antisense strand to SEQ ID NO: 1811017
uauuaggcaaugcucuuau

SEQ ID NO: 1811019 - RNA, 19 nt, Artificial Sequence
  Description of Artificial Sequence: Synthetic oligonucleotide
  Sense strand starting at position 1256 of SEQ ID NO: 1563439
agaucuaucgaaggaucau

SEQ ID NO: 1811020 - RNA, 19 nt, Artificial Sequence
  Description of Artificial Sequence: Synthetic oligonucleotide
  Antisense strand to SEQ ID NO: 1811019
augauccuucgauagaucu

SEQ ID NO: 1811021 - RNA, 19 nt, Artificial Sequence
  Description of Artificial Sequence: Synthetic oligonucleotide
  Sense strand starting at position 1366 of SEQ ID NO: 1563439
agguaauaauugucauucu

SEQ ID NO: 1811022 - RNA, 19 nt, Artificial Sequence
  Description of Artificial Sequence: Synthetic oligonucleotide
  Antisense strand to SEQ ID NO: 1811021
agaaugacaauuauuaccu

SEQ ID NO: 1811023 - RNA, 19 nt, Artificial Sequence
  Description of Artificial Sequence: Synthetic oligonucleotide
  Sense strand starting at position 1375 of SEQ ID NO: 1563439
uugucauucuaccugguau

SEQ ID NO: 1811024 - RNA, 19 nt, Artificial Sequence
  Description of Artificial Sequence: Synthetic oligonucleotide
  Antisense strand to SEQ ID NO: 1811023
auaccagguagaaugacaa

SEQ ID NO: 1811025 - RNA, 19 nt, Artificial Sequence
  Description of Artificial Sequence: Synthetic oligonucleotide
  Sense strand starting at position 1388 of SEQ ID NO: 1563439
ugguauguugcucacauag

SEQ ID NO: 1811026 - RNA, 19 nt, Artificial Sequence
  Description of Artificial Sequence: Synthetic oligonucleotide
  Antisense strand to SEQ ID NO: 1811025
cuaugugagcaacauacca

SEQ ID NO: 1811027 - RNA, 19 nt, Artificial Sequence
  Description of Artificial Sequence: Synthetic oligonucleotide
  Sense strand starting at position 1553 of SEQ ID NO: 1563439
acuauauugucacuuugac

SEQ ID NO: 1811028 - RNA, 19 nt, Artificial Sequence
  Description of Artificial Sequence: Synthetic oligonucleotide
  Antisense strand to SEQ ID NO: 1811027
gucaaagugacaauauagu

SEQ ID NO: 1811029 - RNA, 19 nt, Artificial Sequence
  Description of Artificial Sequence: Synthetic oligonucleotide
  Sense strand starting at position 1658 of SEQ ID NO: 1563439
aguagagugaccugagagu

SEQ ID NO: 1811030 - RNA, 19 nt, Artificial Sequence
  Description of Artificial Sequence: Synthetic oligonucleotide
  Antisense strand to SEQ ID NO: 1811029
acucucaggucacucuacu

SEQ ID NO: 1811031 - RNA, 19 nt, Artificial Sequence
  Description of Artificial Sequence: Synthetic oligonucleotide
  Sense strand starting at position 1677 of SEQ ID NO: 1563439
ccauaacucugcuuguuga

SEQ ID NO: 1811032 - RNA, 19 nt, Artificial Sequence
  Description of Artificial Sequence: Synthetic oligonucleotide
  Antisense strand to SEQ ID NO: 1811031
ucaacaagcagaguuaugg

SEQ ID NO: 1811033 - RNA, 19 nt, Artificial Sequence
  Description of Artificial Sequence: Synthetic oligonucleotide
  Sense strand starting at position 1724 of SEQ ID NO: 1563439
ggacauuggaguuaauugu

SEQ ID NO: 1811034 - RNA, 19 nt, Artificial Sequence
  Description of Artificial Sequence: Synthetic oligonucleotide
  Antisense strand to SEQ ID NO: 1811033
acaauuaacuccaaugucc

SEQ ID NO: 1811035 - RNA, 19 nt, Artificial Sequence
  Description of Artificial Sequence: Synthetic oligonucleotide
  Sense strand starting at position 1755 of SEQ ID NO: 1563439
gccagcagaagugauuaau

SEQ ID NO: 1811036 - RNA, 19 nt, Artificial Sequence
  Description of Artificial Sequence: Synthetic oligonucleotide
  Antisense strand to SEQ ID NO: 1811035
auuaaucacuucugcuggc

SEQ ID NO: 1811037 - RNA, 19 nt, Artificial Sequence
  Description of Artificial Sequence: Synthetic oligonucleotide
  Sense strand starting at position 1773 of SEQ ID NO: 1563439
ugagaugaguaacauaaua

SEQ ID NO: 1811038 - RNA, 19 nt, Artificial Sequence
  Description of Artificial Sequence: Synthetic oligonucleotide
  Antisense strand to SEQ ID NO: 1811037
uauuauguuacucaucuca

SEQ ID NO: 1811039 - RNA, 19 nt, Artificial Sequence
  Description of Artificial Sequence: Synthetic oligonucleotide
  Sense strand starting at position 1805 of SEQ ID NO: 1563439
ggaagagauucugacauaa

SEQ ID NO: 1811040 - RNA, 19 nt, Artificial Sequence
  Description of Artificial Sequence: Synthetic oligonucleotide
  Antisense strand to SEQ ID NO: 1811039
uuaugucagaaucucuucc

SEQ ID NO: 1811041 - RNA, 19 nt, Artificial Sequence
  Description of Artificial Sequence: Synthetic oligonucleotide
  Sense strand starting at position 1830 of SEQ ID NO: 1563439
agaaauaauugacagcaga

SEQ ID NO: 1811042 - RNA, 19 nt, Artificial Sequence
  Description of Artificial Sequence: Synthetic oligonucleotide
  Antisense strand to SEQ ID NO: 1811041
ucugcugucaauuauuucu

SEQ ID NO: 1811043 - RNA, 19 nt, Artificial Sequence
  Description of Artificial Sequence: Synthetic oligonucleotide
  Sense strand starting at position 1848 of SEQ ID NO: 1563439
auaagacagucagaaauuu

SEQ ID NO: 1811044 - RNA, 19 nt, Artificial Sequence
  Description of Artificial Sequence: Synthetic oligonucleotide
  Antisense strand to SEQ ID NO: 1811043
aaauuucugacugucuuau

SEQ ID NO: 1811045 - RNA, 19 nt, Artificial Sequence
  Description of Artificial Sequence: Synthetic oligonucleotide
  Sense strand starting at position 1856 of SEQ ID NO: 1563439
gucagaaauuuguaauagu

SEQ ID NO: 1811046 - RNA, 19 nt, Artificial Sequence
  Description of Artificial Sequence: Synthetic oligonucleotide
  Antisense strand to SEQ ID NO: 1811045
acuauuacaaauuucugac

SEQ ID NO: 1811047 - RNA, 19 nt, Artificial Sequence
  Description of Artificial Sequence: Synthetic oligonucleotide
  Sense strand starting at position 1859 of SEQ ID NO: 1563439
agaaauuuguaauagucca

SEQ ID NO: 1811048 - RNA, 19 nt, Artificial Sequence
  Description of Artificial Sequence: Synthetic oligonucleotide
  Antisense strand to SEQ ID NO: 1811047
uggacuauuacaaauuucu

SEQ ID NO: 1811049 - RNA, 19 nt, Artificial Sequence
  Description of Artificial Sequence: Synthetic oligonucleotide
  Sense strand starting at position 1864 of SEQ ID NO: 1563439
uuuguaauaguccaagaug

SEQ ID NO: 1811050 - RNA, 19 nt, Artificial Sequence
  Description of Artificial Sequence: Synthetic oligonucleotide
  Antisense strand to SEQ ID NO: 1811049
caucuuggacuauuacaaa

SEQ ID NO: 1811051 - RNA, 19 nt, Artificial Sequence
  Description of Artificial Sequence: Synthetic oligonucleotide
  Sense strand starting at position 2056 of SEQ ID NO: 1563439
cgcacaucauaccuugauu

SEQ ID NO: 1811052 - RNA, 19 nt, Artificial Sequence
  Description of Artificial Sequence: Synthetic oligonucleotide
  Antisense strand to SEQ ID NO: 1811051
aaucaagguaugaugugcg

SEQ ID NO: 1811053 - RNA, 19 nt, Artificial Sequence
  Description of Artificial Sequence: Synthetic oligonucleotide
  Sense strand starting at position 2205 of SEQ ID NO: 1563439
ucaucuugguaagcaauau

SEQ ID NO: 1811054 - RNA, 19 nt, Artificial Sequence
  Description of Artificial Sequence: Synthetic oligonucleotide
  Antisense strand to SEQ ID NO: 1811053
auauugcuuaccaagauga

SEQ ID NO: 1811055 - RNA, 19 nt, Artificial Sequence
  Description of Artificial Sequence: Synthetic oligonucleotide
  Sense strand starting at position 2290 of SEQ ID NO: 1563439
ucuaaaucuccagggcuua

SEQ ID NO: 1811056 - RNA, 19 nt, Artificial Sequence
  Description of Artificial Sequence: Synthetic oligonucleotide
  Antisense strand to SEQ ID NO: 1811055
uaagcccuggagauuuaga

SEQ ID NO: 1811057 - RNA, 19 nt, Artificial Sequence
  Description of Artificial Sequence: Synthetic oligonucleotide
  Sense strand starting at position 2342 of SEQ ID NO: 1563439
uacugcacuggucagagaa

SEQ ID NO: 1811058 - RNA, 19 nt, Artificial Sequence
  Description of Artificial Sequence: Synthetic oligonucleotide
  Antisense strand to SEQ ID NO: 1811057
uucucugaccagugcagua

SEQ ID NO: 1811059 - RNA, 19 nt, Artificial Sequence
  Description of Artificial Sequence: Synthetic oligonucleotide
  Sense strand starting at position 2357 of SEQ ID NO: 1563439
agaacagugugcuccucaa

SEQ ID NO: 1811060 - RNA, 19 nt, Artificial Sequence
  Description of Artificial Sequence: Synthetic oligonucleotide
  Antisense strand to SEQ ID NO: 1811059
uugaggagcacacuguucu

SEQ ID NO: 1811061 - RNA, 19 nt, Artificial Sequence
  Description of Artificial Sequence: Synthetic oligonucleotide
  Sense strand starting at position 2386 of SEQ ID NO: 1563439
gacuccauacugugaaaga

SEQ ID NO: 1811062 - RNA, 19 nt, Artificial Sequence
  Description of Artificial Sequence: Synthetic oligonucleotide
  Antisense strand to SEQ ID NO: 1811061
ucuuucacaguauggaguc

SEQ ID NO: 1811063 - RNA, 19 nt, Artificial Sequence
  Description of Artificial Sequence: Synthetic oligonucleotide
  Sense strand starting at position 2415 of SEQ ID NO: 1563439
uugcauuuguaccauaaga

SEQ ID NO: 1811064 - RNA, 19 nt, Artificial Sequence
  Description of Artificial Sequence: Synthetic oligonucleotide
  Antisense strand to SEQ ID NO: 1811063
ucuuaugguacaaaugcaa

SEQ ID NO: 1811065 - RNA, 19 nt, Artificial Sequence
  Description of Artificial Sequence: Synthetic oligonucleotide
  Sense strand starting at position 2431 of SEQ ID NO: 1563439
agaaaugucucugcucuuu

SEQ ID NO: 1811066 - RNA, 19 nt, Artificial Sequence
  Description of Artificial Sequence: Synthetic oligonucleotide
  Antisense strand to SEQ ID NO: 1811065
aaagagcagagacauuucu

SEQ ID NO: 1811067 - RNA, 19 nt, Artificial Sequence
  Description of Artificial Sequence: Synthetic oligonucleotide
  Sense strand starting at position 2442 of SEQ ID NO: 1563439
ugcucuuuggcugagaggu

SEQ ID NO: 1811068 - RNA, 19 nt, Artificial Sequence
  Description of Artificial Sequence: Synthetic oligonucleotide
  Antisense strand to SEQ ID NO: 1811067
accucucagccaaagagca

SEQ ID NO: 1811069 - RNA, 19 nt, Artificial Sequence
  Description of Artificial Sequence: Synthetic oligonucleotide
  Sense strand starting at position 2468 of SEQ ID NO: 1563439
aaaggaauggcuggaaguu

SEQ ID NO: 1811070 - RNA, 19 nt, Artificial Sequence
  Description of Artificial Sequence: Synthetic oligonucleotide
  Antisense strand to SEQ ID NO: 1811069
aacuuccagccauuccuuu

SEQ ID NO: 1811071 - RNA, 19 nt, Artificial Sequence
  Description of Artificial Sequence: Synthetic oligonucleotide
  Sense strand starting at position 2478 of SEQ ID NO: 1563439
cuggaaguuugcucaagga

SEQ ID NO: 1811072 - RNA, 19 nt, Artificial Sequence
  Description of Artificial Sequence: Synthetic oligonucleotide
  Antisense strand to SEQ ID NO: 1811071
uccuugagcaaacuuccag

SEQ ID NO: 1811073 - RNA, 19 nt, Artificial Sequence
  Description of Artificial Sequence: Synthetic oligonucleotide
  Sense strand starting at position 2482 of SEQ ID NO: 1563439
aaguuugcucaaggacuuu

SEQ ID NO: 1811074 - RNA, 19 nt, Artificial Sequence
  Description of Artificial Sequence: Synthetic oligonucleotide
  Antisense strand to SEQ ID NO: 1811073
aaaguccuugagcaaacuu

SEQ ID NO: 1811075 - RNA, 19 nt, Artificial Sequence
  Description of Artificial Sequence: Synthetic oligonucleotide
  Sense strand starting at position 2557 of SEQ ID NO: 1563439
augugacucuaccuaauag

SEQ ID NO: 1811076 - RNA, 19 nt, Artificial Sequence
  Description of Artificial Sequence: Synthetic oligonucleotide
  Antisense strand to SEQ ID NO: 1811075
cuauuagguagagucacau

SEQ ID NO: 1811077 - RNA, 19 nt, Artificial Sequence
  Description of Artificial Sequence: Synthetic oligonucleotide
  Sense strand starting at position 2605 of SEQ ID NO: 1563439
gcaauauuagaugggcuuu

SEQ ID NO: 1811078 - RNA, 19 nt, Artificial Sequence
  Description of Artificial Sequence: Synthetic oligonucleotide
  Antisense strand to SEQ ID NO: 1811077
aaagcccaucuaauauugc

SEQ ID NO: 1811079 - RNA, 19 nt, Artificial Sequence
  Description of Artificial Sequence: Synthetic oligonucleotide
  Sense strand starting at position 3040 of SEQ ID NO: 1563439
acgccuaauucuguacaag

SEQ ID NO: 1811080 - RNA, 19 nt, Artificial Sequence
  Description of Artificial Sequence: Synthetic oligonucleotide
  Antisense strand to SEQ ID NO: 1811079
cuuguacagaauuaggcgu

SEQ ID NO: 1811081 - RNA, 19 nt, Artificial Sequence
  Description of Artificial Sequence: Synthetic oligonucleotide
  Sense strand starting at position 3202 of SEQ ID NO: 1563439
ugaaauguauaugccaaga

SEQ ID NO: 1811082 - RNA, 19 nt, Artificial Sequence
  Description of Artificial Sequence: Synthetic oligonucleotide
  Antisense strand to SEQ ID NO: 1811081
ucuuggcauauacauuuca

SEQ ID NO: 1811083 - RNA, 19 nt, Artificial Sequence
  Description of Artificial Sequence: Synthetic oligonucleotide
  Sense strand starting at position 3286 of SEQ ID NO: 1563439
caaacaagaguuuaugugu

SEQ ID NO: 1811084 - RNA, 19 nt, Artificial Sequence
  Description of Artificial Sequence: Synthetic oligonucleotide
  Antisense strand to SEQ ID NO: 1811083
acacauaaacucuuguuug

SEQ ID NO: 1811085 - RNA, 19 nt, Artificial Sequence
  Description of Artificial Sequence: Synthetic oligonucleotide
  Sense strand starting at position 3364 of SEQ ID NO: 1563439
gcauauauuccaugucuau

SEQ ID NO: 1811086 - RNA, 19 nt, Artificial Sequence
  Description of Artificial Sequence: Synthetic oligonucleotide
  Antisense strand to SEQ ID NO: 1811085
auagacauggaauauaugc

SEQ ID NO: 1811087 - RNA, 19 nt, Artificial Sequence
  Description of Artificial Sequence: Synthetic oligonucleotide
  Sense strand starting at position 3411 of SEQ ID NO: 1563439
uguauaaugcuacauugaa

SEQ ID NO: 1811088 - RNA, 19 nt, Artificial Sequence
  Description of Artificial Sequence: Synthetic oligonucleotide
  Antisense strand to SEQ ID NO: 1811087
uucaauguagcauuauaca

SEQ ID NO: 1811089 - RNA, 19 nt, Artificial Sequence
  Description of Artificial Sequence: Synthetic oligonucleotide
  Sense strand starting at position 3535 of SEQ ID NO: 1563439
aggcucucagaauguuauu

SEQ ID NO: 1811090 - RNA, 19 nt, Artificial Sequence
  Description of Artificial Sequence: Synthetic oligonucleotide
  Antisense strand to SEQ ID NO: 1811089
aauaacauucugagagccu

SEQ ID NO: 1811091 - RNA, 19 nt, Artificial Sequence
  Description of Artificial Sequence: Synthetic oligonucleotide
  Sense strand starting at position 20 of SEQ ID NO: 1563440
acuuguguccuggacuaug

SEQ ID NO: 1811092 - RNA, 19 nt, Artificial Sequence
  Description of Artificial Sequence: Synthetic oligonucleotide
  Antisense strand to SEQ ID NO: 1811091
cauaguccaggacacaagu

SEQ ID NO: 1811093 - RNA, 19 nt, Artificial Sequence
  Description of Artificial Sequence: Synthetic oligonucleotide
  Sense strand starting at position 161 of SEQ ID NO: 1563440
aguagagauuccucaauca

SEQ ID NO: 1811094 - RNA, 19 nt, Artificial Sequence
  Description of Artificial Sequence: Synthetic oligonucleotide
  Antisense strand to SEQ ID NO: 1811093
ugauugaggaaucucuacu

SEQ ID NO: 1811095 - RNA, 19 nt, Artificial Sequence
  Description of Artificial Sequence: Synthetic oligonucleotide
  Sense strand starting at position 328 of SEQ ID NO: 1563440
uugguugaguaagcaaaga

SEQ ID NO: 1811096 - RNA, 19 nt, Artificial Sequence
  Description of Artificial Sequence: Synthetic oligonucleotide
  Antisense strand to SEQ ID NO: 1811095
ucuuugcuuacucaaccaa

SEQ ID NO: 1811097 - RNA, 19 nt, Artificial Sequence
  Description of Artificial Sequence: Synthetic oligonucleotide
  Sense strand starting at position 333 of SEQ ID NO: 1563440
ugaguaagcaaagaugucu

SEQ ID NO: 1811098 - RNA, 19 nt, Artificial Sequence
  Description of Artificial Sequence: Synthetic oligonucleotide
  Antisense strand to SEQ ID NO: 1811097
agacaucuuugcuuacuca

SEQ ID NO: 1811099 - RNA, 19 nt, Artificial Sequence
  Description of Artificial Sequence: Synthetic oligonucleotide
  Sense strand starting at position 344 of SEQ ID NO: 1563440
agaugucuuugauuaauac

SEQ ID NO: 1811100 - RNA, 19 nt, Artificial Sequence
  Description of Artificial Sequence: Synthetic oligonucleotide
  Antisense strand to SEQ ID NO: 1811099
guauuaaucaaagacaucu

SEQ ID NO: 1811101 - RNA, 19 nt, Artificial Sequence
  Description of Artificial Sequence: Synthetic oligonucleotide
  Sense strand starting at position 397 of SEQ ID NO: 1563440
uuuguuuggucaccaaauc

SEQ ID NO: 1811102 - RNA, 19 nt, Artificial Sequence
  Description of Artificial Sequence: Synthetic oligonucleotide
  Antisense strand to SEQ ID NO: 1811101
gauuuggugaccaaacaaa

SEQ ID NO: 1811103 - RNA, 19 nt, Artificial Sequence
  Description of Artificial Sequence: Synthetic oligonucleotide
  Sense strand starting at position 398 of SEQ ID NO: 1563440
uuguuuggucaccaaaucu

SEQ ID NO: 1811104 - RNA, 19 nt, Artificial Sequence
  Description of Artificial Sequence: Synthetic oligonucleotide
  Antisense strand to SEQ ID NO: 1811103
agauuuggugaccaaacaa

SEQ ID NO: 1811105 - RNA, 19 nt, Artificial Sequence
  Description of Artificial Sequence: Synthetic oligonucleotide
  Sense strand starting at position 471 of SEQ ID NO: 1563440
gacaaagggucuuugguac

SEQ ID NO: 1811106 - RNA, 19 nt, Artificial Sequence
  Description of Artificial Sequence: Synthetic oligonucleotide
  Antisense strand to SEQ ID NO: 1811105
guaccaaagacccuuuguc

SEQ ID NO: 1811107 - RNA, 19 nt, Artificial Sequence
  Description of Artificial Sequence: Synthetic oligonucleotide
  Sense strand starting at position 939 of SEQ ID NO: 1563440
cauggacuguguguugaua

SEQ ID NO: 1811108 - RNA, 19 nt, Artificial Sequence
  Description of Artificial Sequence: Synthetic oligonucleotide
  Antisense strand to SEQ ID NO: 1811107
uaucaacacacaguccaug

SEQ ID NO: 1811109 - RNA, 19 nt, Artificial Sequence
  Description of Artificial Sequence: Synthetic oligonucleotide
  Sense strand starting at position 950 of SEQ ID NO: 1563440
uguugauaggcuuaaauuc

SEQ ID NO: 1811110 - RNA, 19 nt, Artificial Sequence
  Description of Artificial Sequence: Synthetic oligonucleotide
  Antisense strand to SEQ ID NO: 1811109
gaauuuaagccuaucaaca

SEQ ID NO: 1811111 - RNA, 19 nt, Artificial Sequence
  Description of Artificial Sequence: Synthetic oligonucleotide
  Sense strand starting at position 1361 of SEQ ID NO: 1563440
auuguaggcuuucuauaaa

SEQ ID NO: 1811112 - RNA, 19 nt, Artificial Sequence
  Description of Artificial Sequence: Synthetic oligonucleotide
  Antisense strand to SEQ ID NO: 1811111
uuuauagaaagccuacaau

SEQ ID NO: 1811113 - RNA, 19 nt, Artificial Sequence
  Description of Artificial Sequence: Synthetic oligonucleotide
  Sense strand starting at position 1477 of SEQ ID NO: 1563440
aaggaaauguuggauuuag

SEQ ID NO: 1811114 - RNA, 19 nt, Artificial Sequence
  Description of Artificial Sequence: Synthetic oligonucleotide
  Antisense strand to SEQ ID NO: 1811113
cuaaauccaacauuuccuu

SEQ ID NO: 1811115 - RNA, 19 nt, Artificial Sequence
  Description of Artificial Sequence: Synthetic oligonucleotide
  Sense strand starting at position 1722 of SEQ ID NO: 1563440
aauagaugucccgaugcag

SEQ ID NO: 1811116 - RNA, 19 nt, Artificial Sequence
  Description of Artificial Sequence: Synthetic oligonucleotide
  Antisense strand to SEQ ID NO: 1811115
cugcaucgggacaucuauu

SEQ ID NO: 1811117 - RNA, 19 nt, Artificial Sequence
  Description of Artificial Sequence: Synthetic oligonucleotide
  Sense strand starting at position 1760 of SEQ ID NO: 1563440
cgaggaaaguccuuccaaa

SEQ ID NO: 1811118 - RNA, 19 nt, Artificial Sequence
  Description of Artificial Sequence: Synthetic oligonucleotide
  Antisense strand to SEQ ID NO: 1811117
uuuggaaggacuuuccucg

SEQ ID NO: 1811119 - RNA, 19 nt, Artificial Sequence
  Description of Artificial Sequence: Synthetic oligonucleotide
  Sense strand starting at position 2051 of SEQ ID NO: 1563440
ccagguuucucuuugagga

SEQ ID NO: 1811120 - RNA, 19 nt, Artificial Sequence
  Description of Artificial Sequence: Synthetic oligonucleotide
  Antisense strand to SEQ ID NO: 1811119
uccucaaagagaaaccugg

SEQ ID NO: 1811121 - RNA, 19 nt, Artificial Sequence
  Description of Artificial Sequence: Synthetic oligonucleotide
  Sense strand starting at position 2278 of SEQ ID NO: 1563440
aggaaagguccaugcagga

SEQ ID NO: 1811122 - RNA, 19 nt, Artificial Sequence
  Description of Artificial Sequence: Synthetic oligonucleotide
  Antisense strand to SEQ ID NO: 1811121
uccugcauggaccuuuccu

SEQ ID NO: 1811123 - RNA, 19 nt, Artificial Sequence
  Description of Artificial Sequence: Synthetic oligonucleotide
  Sense strand starting at position 2374 of SEQ ID NO: 1563440
guuuaucugucccuaugga

SEQ ID NO: 1811124 - RNA, 19 nt, Artificial Sequence
  Description of Artificial Sequence: Synthetic oligonucleotide
  Antisense strand to SEQ ID NO: 1811123
uccauagggacagauaaac

SEQ ID NO: 1811125 - RNA, 19 nt, Artificial Sequence
  Description of Artificial Sequence: Synthetic oligonucleotide
  Sense strand starting at position 2375 of SEQ ID NO: 1563440
uuuaucugucccuauggau

SEQ ID NO: 1811126 - RNA, 19 nt, Artificial Sequence
  Description of Artificial Sequence: Synthetic oligonucleotide
  Antisense strand to SEQ ID NO: 1811125
auccauagggacagauaaa

SEQ ID NO: 1811127 - RNA, 19 nt, Artificial Sequence
  Description of Artificial Sequence: Synthetic oligonucleotide
  Sense strand starting at position 2473 of SEQ ID NO: 1563440
uuaccauauuugccuguga

SEQ ID NO: 1811128 - RNA, 19 nt, Artificial Sequence
  Description of Artificial Sequence: Synthetic oligonucleotide
  Antisense strand to SEQ ID NO: 1811127
ucacaggcaaauaugguaa

SEQ ID NO: 1811129 - RNA, 19 nt, Artificial Sequence
  Description of Artificial Sequence: Synthetic oligonucleotide
  Sense strand starting at position 2503 of SEQ ID NO: 1563440
guuagcuugcuugccauua

SEQ ID NO: 1811130 - RNA, 19 nt, Artificial Sequence
  Description of Artificial Sequence: Synthetic oligonucleotide
  Antisense strand to SEQ ID NO: 1811129
uaauggcaagcaagcuaac

SEQ ID NO: 1811131 - RNA, 19 nt, Artificial Sequence
  Description of Artificial Sequence: Synthetic oligonucleotide
  Sense strand starting at position 2797 of SEQ ID NO: 1563440
gauugccuuccucaggaua

SEQ ID NO: 1811132 - RNA, 19 nt, Artificial Sequence
  Description of Artificial Sequence: Synthetic oligonucleotide
  Antisense strand to SEQ ID NO: 1811131
uauccugaggaaggcaauc

SEQ ID NO: 1811133 - RNA, 19 nt, Artificial Sequence
  Description of Artificial Sequence: Synthetic oligonucleotide
  Sense strand starting at position 2839 of SEQ ID NO: 1563440
aguagauggaagugcuaau

SEQ ID NO: 1811134 - RNA, 19 nt, Artificial Sequence
  Description of Artificial Sequence: Synthetic oligonucleotide
  Antisense strand to SEQ ID NO: 1811133
auuagcacuuccaucuacu

SEQ ID NO: 1811135 - RNA, 19 nt, Artificial Sequence
  Description of Artificial Sequence: Synthetic oligonucleotide
  Sense strand starting at position 3047 of SEQ ID NO: 1563440
ugcuaaagauuggugggaa

SEQ ID NO: 1811136 - RNA, 19 nt, Artificial Sequence
  Description of Artificial Sequence: Synthetic oligonucleotide
  Antisense strand to SEQ ID NO: 1811135
uucccaccaaucuuuagca

SEQ ID NO: 1811137 - RNA, 19 nt, Artificial Sequence
  Description of Artificial Sequence: Synthetic oligonucleotide
  Sense strand starting at position 3270 of SEQ ID NO: 1563440
gagucuucugcagagugaa

SEQ ID NO: 1811138 - RNA, 19 nt, Artificial Sequence
  Description of Artificial Sequence: Synthetic oligonucleotide
  Antisense strand to SEQ ID NO: 1811137
uucacucugcagaagacuc

SEQ ID NO: 1811139 - RNA, 19 nt, Artificial Sequence
  Description of Artificial Sequence: Synthetic oligonucleotide
  Sense strand starting at position 3342 of SEQ ID NO: 1563440
uggugucaggugugauaaa

SEQ ID NO: 1811140 - RNA, 19 nt, Artificial Sequence
  Description of Artificial Sequence: Synthetic oligonucleotide
  Antisense strand to SEQ ID NO: 1811139
uuuaucacaccugacacca

SEQ ID NO: 1811141 - RNA, 19 nt, Artificial Sequence
  Description of Artificial Sequence: Synthetic oligonucleotide
  Sense strand starting at position 3427 of SEQ ID NO: 1563440
gcaguaucagacugcaaac

SEQ ID NO: 1811142 - RNA, 19 nt, Artificial Sequence
  Description of Artificial Sequence: Synthetic oligonucleotide
  Antisense strand to SEQ ID NO: 1811141
guuugcagucugauacugc

SEQ ID NO: 1811143 - RNA, 19 nt, Artificial Sequence
  Description of Artificial Sequence: Synthetic oligonucleotide
  Sense strand starting at position 3429 of SEQ ID NO: 1563440
aguaucagacugcaaacau

SEQ ID NO: 1811144 - RNA, 19 nt, Artificial Sequence
  Description of Artificial Sequence: Synthetic oligonucleotide
  Antisense strand to SEQ ID NO: 1811143
auguuugcagucugauacu

SEQ ID NO: 1811145 - RNA, 19 nt, Artificial Sequence
  Description of Artificial Sequence: Synthetic oligonucleotide
  Sense strand starting at position 3476 of SEQ ID NO: 1563440
uuuauaguguuugcagaag

SEQ ID NO: 1811146 - RNA, 19 nt, Artificial Sequence
  Description of Artificial Sequence: Synthetic oligonucleotide
  Antisense strand to SEQ ID NO: 1811145
cuucugcaaacacuauaaa

SEQ ID NO: 1811147 - RNA, 19 nt, Artificial Sequence
  Description of Artificial Sequence: Synthetic oligonucleotide
  Sense strand starting at position 3530 of SEQ ID NO: 1563440
gaaagucccuaguuagaga

SEQ ID NO: 1811148 - RNA, 19 nt, Artificial Sequence
  Description of Artificial Sequence: Synthetic oligonucleotide
  Antisense strand to SEQ ID NO: 1811147
ucucuaacuagggacuuuc

SEQ ID NO: 1811149 - RNA, 19 nt, Artificial Sequence
  Description of Artificial Sequence: Synthetic oligonucleotide
  Sense strand starting at position 3541 of SEQ ID NO: 1563440
guuagagauuaauugguga

SEQ ID NO: 1811150 - RNA, 19 nt, Artificial Sequence
  Description of Artificial Sequence: Synthetic oligonucleotide
  Antisense strand to SEQ ID NO: 1811149
ucaccaauuaaucucuaac

SEQ ID NO: 1811151 - RNA, 19 nt, Artificial Sequence
  Description of Artificial Sequence: Synthetic oligonucleotide
  Sense strand starting at position 3760 of SEQ ID NO: 1563440
ugaccaucauggcuaaguu

SEQ ID NO: 1811152 - RNA, 19 nt, Artificial Sequence
  Description of Artificial Sequence: Synthetic oligonucleotide
  Antisense strand to SEQ ID NO: 1811151
aacuuagccaugaugguca

SEQ ID NO: 1811153 - RNA, 19 nt, Artificial Sequence
  Description of Artificial Sequence: Synthetic oligonucleotide
  Sense strand starting at position 3812 of SEQ ID NO: 1563440
acaucaagcucauugagga

SEQ ID NO: 1811154 - RNA, 19 nt, Artificial Sequence
  Description of Artificial Sequence: Synthetic oligonucleotide
  Antisense strand to SEQ ID NO: 1811153
uccucaaugagcuugaugu

SEQ ID NO: 1811155 - RNA, 19 nt, Artificial Sequence
  Description of Artificial Sequence: Synthetic oligonucleotide
  Sense strand starting at position 3865 of SEQ ID NO: 1563440
cucuaauuacagugagauc

SEQ ID NO: 1811156 - RNA, 19 nt, Artificial Sequence
  Description of Artificial Sequence: Synthetic oligonucleotide
  Antisense strand to SEQ ID NO: 1811155
gaucucacuguaauuagag

SEQ ID NO: 1811157 - RNA, 19 nt, Artificial Sequence
  Description of Artificial Sequence: Synthetic oligonucleotide
  Sense strand starting at position 3887 of SEQ ID NO: 1563440
uggcauaccguugaugacu

SEQ ID NO: 1811158 - RNA, 19 nt, Artificial Sequence
  Description of Artificial Sequence: Synthetic oligonucleotide
  Antisense strand to SEQ ID NO: 1811157
agucaucaacgguaugcca

SEQ ID NO: 1811159 - RNA, 19 nt, Artificial Sequence
  Description of Artificial Sequence: Synthetic oligonucleotide
  Sense strand starting at position 3892 of SEQ ID NO: 1563440
uaccguugaugacugugaa

SEQ ID NO: 1811160 - RNA, 19 nt, Artificial Sequence
  Description of Artificial Sequence: Synthetic oligonucleotide
  Antisense strand to SEQ ID NO: 1811159
uucacagucaucaacggua

SEQ ID NO: 1811161 - RNA, 19 nt, Artificial Sequence
  Description of Artificial Sequence: Synthetic oligonucleotide
  Sense strand starting at position 3895 of SEQ ID NO: 1563440
cguugaugacugugaacac

SEQ ID NO: 1811162 - RNA, 19 nt, Artificial Sequence
  Description of Artificial Sequence: Synthetic oligonucleotide
  Antisense strand to SEQ ID NO: 1811161
guguucacagucaucaacg

SEQ ID NO: 1811163 - RNA, 19 nt, Artificial Sequence
  Description of Artificial Sequence: Synthetic oligonucleotide
  Sense strand starting at position 3924 of SEQ ID NO: 1563440
cccucaagugaauguaguu

SEQ ID NO: 1811164 - RNA, 19 nt, Artificial Sequence
  Description of Artificial Sequence: Synthetic oligonucleotide
  Antisense strand to SEQ ID NO: 1811163
aacuacauucacuugaggg

SEQ ID NO: 1811165 - RNA, 19 nt, Artificial Sequence
  Description of Artificial Sequence: Synthetic oligonucleotide
  Sense strand starting at position 3936 of SEQ ID NO: 1563440
uguaguucaccagggagau

SEQ ID NO: 1811166 - RNA, 19 nt, Artificial Sequence
  Description of Artificial Sequence: Synthetic oligonucleotide
  Antisense strand to SEQ ID NO: 1811165
aucucccuggugaacuaca

SEQ ID NO: 1811167 - RNA, 19 nt, Artificial Sequence
  Description of Artificial Sequence: Synthetic oligonucleotide
  Sense strand starting at position 3937 of SEQ ID NO: 1563440
guaguucaccagggagauu

SEQ ID NO: 1811168 - RNA, 19 nt, Artificial Sequence
  Description of Artificial Sequence: Synthetic oligonucleotide
  Antisense strand to SEQ ID NO: 1811167
aaucucccuggugaacuac

SEQ ID NO: 1811169 - RNA, 19 nt, Artificial Sequence
  Description of Artificial Sequence: Synthetic oligonucleotide
  Sense strand starting at position 3982 of SEQ ID NO: 1563440
gaaagacugcaguauguuc

SEQ ID NO: 1811170 - RNA, 19 nt, Artificial Sequence
  Description of Artificial Sequence: Synthetic oligonucleotide
  Antisense strand to SEQ ID NO: 1811169
gaacauacugcagucuuuc

SEQ ID NO: 1811171 - RNA, 19 nt, Artificial Sequence
  Description of Artificial Sequence: Synthetic oligonucleotide
  Sense strand starting at position 9 of SEQ ID NO: 1563441
ggguuuaccggcucgugau

SEQ ID NO: 1811172 - RNA, 19 nt, Artificial Sequence
  Description of Artificial Sequence: Synthetic oligonucleotide
  Antisense strand to SEQ ID NO: 1811171
aucacgagccgguaaaccc

SEQ ID NO: 1811173 - RNA, 19 nt, Artificial Sequence
  Description of Artificial Sequence: Synthetic oligonucleotide
  Sense strand starting at position 744 of SEQ ID NO: 1563441
ggacucagaucaucugcuu

SEQ ID NO: 1811174 - RNA, 19 nt, Artificial Sequence
  Description of Artificial Sequence: Synthetic oligonucleotide
  Antisense strand to SEQ ID NO: 1811173
aagcagaugaucugagucc

SEQ ID NO: 1811175 - RNA, 19 nt, Artificial Sequence
  Description of Artificial Sequence: Synthetic oligonucleotide
  Sense strand starting at position 816 of SEQ ID NO: 1563441
cauguagacugacugcuaa

SEQ ID NO: 1811176 - RNA, 19 nt, Artificial Sequence
  Description of Artificial Sequence: Synthetic oligonucleotide
  Antisense strand to SEQ ID NO: 1811175
uuagcagucagucuacaug

SEQ ID NO: 1811177 - RNA, 19 nt, Artificial Sequence
  Description of Artificial Sequence: Synthetic oligonucleotide
  Sense strand starting at position 910 of SEQ ID NO: 1563441
ucuacuuaguaagugacau

SEQ ID NO: 1811178 - RNA, 19 nt, Artificial Sequence
  Description of Artificial Sequence: Synthetic oligonucleotide
  Antisense strand to SEQ ID NO: 1811177
augucacuuacuaaguaga

SEQ ID NO: 1811179 - RNA, 19 nt, Artificial Sequence
  Description of Artificial Sequence: Synthetic oligonucleotide
  Sense strand starting at position 984 of SEQ ID NO: 1563441
gccuuuaacugggcacuua

SEQ ID NO: 1811180 - RNA, 19 nt, Artificial Sequence
  Description of Artificial Sequence: Synthetic oligonucleotide
  Antisense strand to SEQ ID NO: 1811179
uaagugcccaguuaaaggc

SEQ ID NO: 1811181 - RNA, 19 nt, Artificial Sequence
  Description of Artificial Sequence: Synthetic oligonucleotide
  Sense strand starting at position 985 of SEQ ID NO: 1563441
ccuuuaacugggcacuuaa

SEQ ID NO: 1811182 - RNA, 19 nt, Artificial Sequence
  Description of Artificial Sequence: Synthetic oligonucleotide
  Antisense strand to SEQ ID NO: 1811181
uuaagugcccaguuaaagg

SEQ ID NO: 1811183 - RNA, 19 nt, Artificial Sequence
  Description of Artificial Sequence: Synthetic oligonucleotide
  Sense strand starting at position 1037 of SEQ ID NO: 1563441
cucugucauccuuacggca

SEQ ID NO: 1811184 - RNA, 19 nt, Artificial Sequence
  Description of Artificial Sequence: Synthetic oligonucleotide
  Antisense strand to SEQ ID NO: 1811183
ugccguaaggaugacagag

SEQ ID NO: 1811185 - RNA, 19 nt, Artificial Sequence
  Description of Artificial Sequence: Synthetic oligonucleotide
  Sense strand starting at position 1175 of SEQ ID NO: 1563441
guaucucuuguagaacucu

SEQ ID NO: 1811186 - RNA, 19 nt, Artificial Sequence
  Description of Artificial Sequence: Synthetic oligonucleotide
  Antisense strand to SEQ ID NO: 1811185
agaguucuacaagagauac

SEQ ID NO: 1811187 - RNA, 19 nt, Artificial Sequence
  Description of Artificial Sequence: Synthetic oligonucleotide
  Sense strand starting at position 1184 of SEQ ID NO: 1563441
guagaacucuuuccuguaa

SEQ ID NO: 1811188 - RNA, 19 nt, Artificial Sequence
  Description of Artificial Sequence: Synthetic oligonucleotide
  Antisense strand to SEQ ID NO: 1811187
uuacaggaaagaguucuac

SEQ ID NO: 1811189 - RNA, 19 nt, Artificial Sequence
  Description of Artificial Sequence: Synthetic oligonucleotide
  Sense strand starting at position 1309 of SEQ ID NO: 1563441
cgccuagacccuugaucaa

SEQ ID NO: 1811190 - RNA, 19 nt, Artificial Sequence
  Description of Artificial Sequence: Synthetic oligonucleotide
  Antisense strand to SEQ ID NO: 1811189
uugaucaagggucuaggcg

SEQ ID NO: 1811191 - RNA, 19 nt, Artificial Sequence
  Description of Artificial Sequence: Synthetic oligonucleotide
  Sense strand starting at position 2373 of SEQ ID NO: 1563441
uagaguuacugguuccuaa

SEQ ID NO: 1811192 - RNA, 19 nt, Artificial Sequence
  Description of Artificial Sequence: Synthetic oligonucleotide
  Antisense strand to SEQ ID NO: 1811191
uuaggaaccaguaacucua

SEQ ID NO: 1811193 - RNA, 19 nt, Artificial Sequence
  Description of Artificial Sequence: Synthetic oligonucleotide
  Sense strand starting at position 2409 of SEQ ID NO: 1563441
agcaaauugagguauuagu

SEQ ID NO: 1811194 - RNA, 19 nt, Artificial Sequence
  Description of Artificial Sequence: Synthetic oligonucleotide
  Antisense strand to SEQ ID NO: 1811193
acuaauaccucaauuugcu

SEQ ID NO: 1811195 - RNA, 19 nt, Artificial Sequence
  Description of Artificial Sequence: Synthetic oligonucleotide
  Sense strand starting at position 2416 of SEQ ID NO: 1563441
ugagguauuagugaaacgu

SEQ ID NO: 1811196 - RNA, 19 nt, Artificial Sequence
  Description of Artificial Sequence: Synthetic oligonucleotide
  Antisense strand to SEQ ID NO: 1811195
acguuucacuaauaccuca

SEQ ID NO: 1811197 - RNA, 19 nt, Artificial Sequence
  Description of Artificial Sequence: Synthetic oligonucleotide
  Sense strand starting at position 2516 of SEQ ID NO: 1563441
gccuguuuagggcaacaca

SEQ ID NO: 1811198 - RNA, 19 nt, Artificial Sequence
  Description of Artificial Sequence: Synthetic oligonucleotide
  Antisense strand to SEQ ID NO: 1811197
uguguugcccuaaacaggc

SEQ ID NO: 1811199 - RNA, 19 nt, Artificial Sequence
  Description of Artificial Sequence: Synthetic oligonucleotide
  Sense strand starting at position 2600 of SEQ ID NO: 1563441
guuagacgauaauuaucua

SEQ ID NO: 1811200 - RNA, 19 nt, Artificial Sequence
  Description of Artificial Sequence: Synthetic oligonucleotide
  Antisense strand to SEQ ID NO: 1811199
uagauaauuaucgucuaac

SEQ ID NO: 1811201 - RNA, 19 nt, Artificial Sequence
  Description of Artificial Sequence: Synthetic oligonucleotide
  Sense strand starting at position 2603 of SEQ ID NO: 1563441
agacgauaauuaucuagua

SEQ ID NO: 1811202 - RNA, 19 nt, Artificial Sequence
  Description of Artificial Sequence: Synthetic oligonucleotide
  Antisense strand to SEQ ID NO: 1811201
uacuagauaauuaucgucu

SEQ ID NO: 1811203 - RNA, 19 nt, Artificial Sequence
  Description of Artificial Sequence: Synthetic oligonucleotide
  Sense strand starting at position 2604 of SEQ ID NO: 1563441
gacgauaauuaucuaguau

SEQ ID NO: 1811204 - RNA, 19 nt, Artificial Sequence
  Description of Artificial Sequence: Synthetic oligonucleotide
  Antisense strand to SEQ ID NO: 1811203
auacuagauaauuaucguc

SEQ ID NO: 1811205 - RNA, 19 nt, Artificial Sequence
  Description of Artificial Sequence: Synthetic oligonucleotide
  Sense strand starting at position 2665 of SEQ ID NO: 1563441
ugauuuaaguuccaaagaa

SEQ ID NO: 1811206 - RNA, 19 nt, Artificial Sequence
  Description of Artificial Sequence: Synthetic oligonucleotide
  Antisense strand to SEQ ID NO: 1811205
uucuuuggaacuuaaauca

SEQ ID NO: 1811207 - RNA, 19 nt, Artificial Sequence
  Description of Artificial Sequence: Synthetic oligonucleotide
  Sense strand starting at position 2695 of SEQ ID NO: 1563441
gucagaaggcacugggauu

SEQ ID NO: 1811208 - RNA, 19 nt, Artificial Sequence
  Description of Artificial Sequence: Synthetic oligonucleotide
  Antisense strand to SEQ ID NO: 1811207
aaucccagugccuucugac

SEQ ID NO: 1811209 - RNA, 19 nt, Artificial Sequence
  Description of Artificial Sequence: Synthetic oligonucleotide
  Sense strand starting at position 2710 of SEQ ID NO: 1563441
gauugucaacuccaaguga

SEQ ID NO: 1811210 - RNA, 19 nt, Artificial Sequence
  Description of Artificial Sequence: Synthetic oligonucleotide
  Antisense strand to SEQ ID NO: 1811209
ucacuuggaguugacaauc

SEQ ID NO: 1811211 - RNA, 19 nt, Artificial Sequence
  Description of Artificial Sequence: Synthetic oligonucleotide
  Sense strand starting at position 2758 of SEQ ID NO: 1563441
ugagcuuucugagcuugga

SEQ ID NO: 1811212 - RNA, 19 nt, Artificial Sequence
  Description of Artificial Sequence: Synthetic oligonucleotide
  Antisense strand to SEQ ID NO: 1811211
uccaagcucagaaagcuca

SEQ ID NO: 1811213 - RNA, 19 nt, Artificial Sequence
  Description of Artificial Sequence: Synthetic oligonucleotide
  Sense strand starting at position 2908 of SEQ ID NO: 1563441
uuagcaguuugaucuuaag

SEQ ID NO: 1811214 - RNA, 19 nt, Artificial Sequence
  Description of Artificial Sequence: Synthetic oligonucleotide
  Antisense strand to SEQ ID NO: 1811213
cuuaagaucaaacugcuaa

SEQ ID NO: 1811215 - RNA, 19 nt, Artificial Sequence
  Description of Artificial Sequence: Synthetic oligonucleotide
  Sense strand starting at position 2914 of SEQ ID NO: 1563441
guuugaucuuaagcaaccu

SEQ ID NO: 1811216 - RNA, 19 nt, Artificial Sequence
  Description of Artificial Sequence: Synthetic oligonucleotide
  Antisense strand to SEQ ID NO: 1811215
agguugcuuaagaucaaac

SEQ ID NO: 1811217 - RNA, 19 nt, Artificial Sequence
  Description of Artificial Sequence: Synthetic oligonucleotide
  Sense strand starting at position 2932 of SEQ ID NO: 1563441
uuaauuugaucucaggcaa

SEQ ID NO: 1811218 - RNA, 19 nt, Artificial Sequence
  Description of Artificial Sequence: Synthetic oligonucleotide
  Antisense strand to SEQ ID NO: 1811217
uugccugagaucaaauuaa

SEQ ID NO: 1811219 - RNA, 19 nt, Artificial Sequence
  Description of Artificial Sequence: Synthetic oligonucleotide
  Sense strand starting at position 2987 of SEQ ID NO: 1563441
agaagaggauaucaauaac

SEQ ID NO: 1811220 - RNA, 19 nt, Artificial Sequence
  Description of Artificial Sequence: Synthetic oligonucleotide
  Antisense strand to SEQ ID NO: 1811219
guuauugauauccucuucu

SEQ ID NO: 1811221 - RNA, 19 nt, Artificial Sequence
  Description of Artificial Sequence: Synthetic oligonucleotide
  Sense strand starting at position 3133 of SEQ ID NO: 1563441
ucaguuauauucuugggca

SEQ ID NO: 1811222 - RNA, 19 nt, Artificial Sequence
  Description of Artificial Sequence: Synthetic oligonucleotide
  Antisense strand to SEQ ID NO: 1811221
ugcccaagaauauaacuga

SEQ ID NO: 1811223 - RNA, 19 nt, Artificial Sequence
  Description of Artificial Sequence: Synthetic oligonucleotide
  Sense strand starting at position 3135 of SEQ ID NO: 1563441
aguuauauucuugggcaag

SEQ ID NO: 1811224 - RNA, 19 nt, Artificial Sequence
  Description of Artificial Sequence: Synthetic oligonucleotide
  Antisense strand to SEQ ID NO: 1811223
cuugcccaagaauauaacu

SEQ ID NO: 1811225 - RNA, 19 nt, Artificial Sequence
  Description of Artificial Sequence: Synthetic oligonucleotide
  Sense strand starting at position 3137 of SEQ ID NO: 1563441
uuauauucuugggcaaggu

SEQ ID NO: 1811226 - RNA, 19 nt, Artificial Sequence
  Description of Artificial Sequence: Synthetic oligonucleotide
  Antisense strand to SEQ ID NO: 1811225
accuugcccaagaauauaa

SEQ ID NO: 1811227 - RNA, 19 nt, Artificial Sequence
  Description of Artificial Sequence: Synthetic oligonucleotide
  Sense strand starting at position 3138 of SEQ ID NO: 1563441
uauauucuugggcaaggua

SEQ ID NO: 1811228 - RNA, 19 nt, Artificial Sequence
  Description of Artificial Sequence: Synthetic oligonucleotide
  Antisense strand to SEQ ID NO: 1811227
uaccuugcccaagaauaua

SEQ ID NO: 1811229 - RNA, 19 nt, Artificial Sequence
  Description of Artificial Sequence: Synthetic oligonucleotide
  Sense strand starting at position 3207 of SEQ ID NO: 1563441
gugagcauaccauggaguu

SEQ ID NO: 1811230 - RNA, 19 nt, Artificial Sequence
  Description of Artificial Sequence: Synthetic oligonucleotide
  Antisense strand to SEQ ID NO: 1811229
aacuccaugguaugcucac

SEQ ID NO: 1811231 - RNA, 19 nt, Artificial Sequence
  Description of Artificial Sequence: Synthetic oligonucleotide
  Sense strand starting at position 3400 of SEQ ID NO: 1563441
cucuaugucccuugaaugu

SEQ ID NO: 1811232 - RNA, 19 nt, Artificial Sequence
  Description of Artificial Sequence: Synthetic oligonucleotide
  Antisense strand to SEQ ID NO: 1811231
acauucaagggacauagag

SEQ ID NO: 1811233 - RNA, 19 nt, Artificial Sequence
  Description of Artificial Sequence: Synthetic oligonucleotide
  Sense strand starting at position 3461 of SEQ ID NO: 1563441
acacuuggaugauaaauaa

SEQ ID NO: 1811234 - RNA, 19 nt, Artificial Sequence
  Description of Artificial Sequence: Synthetic oligonucleotide
  Antisense strand to SEQ ID NO: 1811233
uuauuuaucauccaagugu

SEQ ID NO: 1811235 - RNA, 19 nt, Artificial Sequence
  Description of Artificial Sequence: Synthetic oligonucleotide
  Sense strand starting at position 3578 of SEQ ID NO: 1563441
aguuauaacuucuugaagu

SEQ ID NO: 1811236 - RNA, 19 nt, Artificial Sequence
  Description of Artificial Sequence: Synthetic oligonucleotide
  Antisense strand to SEQ ID NO: 1811235
acuucaagaaguuauaacu

SEQ ID NO: 1811237 - RNA, 19 nt, Artificial Sequence
  Description of Artificial Sequence: Synthetic oligonucleotide
  Sense strand starting at position 3647 of SEQ ID NO: 1563441
acagauuacuguguuaauu

SEQ ID NO: 1811238 - RNA, 19 nt, Artificial Sequence
  Description of Artificial Sequence: Synthetic oligonucleotide
  Antisense strand to SEQ ID NO: 1811237
aauuaacacaguaaucugu

SEQ ID NO: 1811239 - RNA, 19 nt, Artificial Sequence
  Description of Artificial Sequence: Synthetic oligonucleotide
  Sense strand starting at position 3658 of SEQ ID NO: 1563441
uguuaauuagaacacaguu

SEQ ID NO: 1811240 - RNA, 19 nt, Artificial Sequence
  Description of Artificial Sequence: Synthetic oligonucleotide
  Antisense strand to SEQ ID NO: 1811239
aacuguguucuaauuaaca

SEQ ID NO: 1811241 - RNA, 19 nt, Artificial Sequence
  Description of Artificial Sequence: Synthetic oligonucleotide
  Sense strand starting at position 3673 of SEQ ID NO: 1563441
aguuauuagugguucuuaa

SEQ ID NO: 1811242 - RNA, 19 nt, Artificial Sequence
  Description of Artificial Sequence: Synthetic oligonucleotide
  Antisense strand to SEQ ID NO: 1811241
uuaagaaccacuaauaacu

SEQ ID NO: 1811243 - RNA, 19 nt, Artificial Sequence
  Description of Artificial Sequence: Synthetic oligonucleotide
  Sense strand starting at position 3767 of SEQ ID NO: 1563441
ccuguuauuagcgacuuga

SEQ ID NO: 1811244 - RNA, 19 nt, Artificial Sequence
  Description of Artificial Sequence: Synthetic oligonucleotide
  Antisense strand to SEQ ID NO: 1811243
ucaagucgcuaauaacagg

SEQ ID NO: 1811245 - RNA, 19 nt, Artificial Sequence
  Description of Artificial Sequence: Synthetic oligonucleotide
  Sense strand starting at position 3958 of SEQ ID NO: 1563441
uaacuagagaguugguagu

SEQ ID NO: 1811246 - RNA, 19 nt, Artificial Sequence
  Description of Artificial Sequence: Synthetic oligonucleotide
  Antisense strand to SEQ ID NO: 1811245
acuaccaacucucuaguua

SEQ ID NO: 1811247 - RNA, 19 nt, Artificial Sequence
  Description of Artificial Sequence: Synthetic oligonucleotide
  Sense strand starting at position 3968 of SEQ ID NO: 1563441
guugguaguucucugaaac

SEQ ID NO: 1811248 - RNA, 19 nt, Artificial Sequence
  Description of Artificial Sequence: Synthetic oligonucleotide
  Antisense strand to SEQ ID NO: 1811247
guuucagagaacuaccaac

SEQ ID NO: 1811249 - RNA, 19 nt, Artificial Sequence
  Description of Artificial Sequence: Synthetic oligonucleotide
  Sense strand starting at position 3969 of SEQ ID NO: 1563441
uugguaguucucugaaacu

SEQ ID NO: 1811250 - RNA, 19 nt, Artificial Sequence
  Description of Artificial Sequence: Synthetic oligonucleotide
  Antisense strand to SEQ ID NO: 1811249
aguuucagagaacuaccaa

SEQ ID NO: 1811251 - RNA, 19 nt, Artificial Sequence
  Description of Artificial Sequence: Synthetic oligonucleotide
  Sense strand starting at position 74 of SEQ ID NO: 1563442
gacagaccagauugucuuu

SEQ ID NO: 1811252 - RNA, 19 nt, Artificial Sequence
  Description of Artificial Sequence: Synthetic oligonucleotide
  Antisense strand to SEQ ID NO: 1811251
aaagacaaucuggucuguc

SEQ ID NO: 1811253 - RNA, 19 nt, Artificial Sequence
  Description of Artificial Sequence: Synthetic oligonucleotide
  Sense strand starting at position 165 of SEQ ID NO: 1563442
augauugucuguucuuuaa

SEQ ID NO: 1811254 - RNA, 19 nt, Artificial Sequence
  Description of Artificial Sequence: Synthetic oligonucleotide
  Antisense strand to SEQ ID NO: 1811253
uuaaagaacagacaaucau

SEQ ID NO: 1811255 - RNA, 19 nt, Artificial Sequence
  Description of Artificial Sequence: Synthetic oligonucleotide
  Sense strand starting at position 169 of SEQ ID NO: 1563442
uugucuguucuuuaagcca

SEQ ID NO: 1811256 - RNA, 19 nt, Artificial Sequence
  Description of Artificial Sequence: Synthetic oligonucleotide
  Antisense strand to SEQ ID NO: 1811255
uggcuuaaagaacagacaa

SEQ ID NO: 1811257 - RNA, 19 nt, Artificial Sequence
  Description of Artificial Sequence: Synthetic oligonucleotide
  Sense strand starting at position 340 of SEQ ID NO: 1563442
gugauaucccauuguuggu

SEQ ID NO: 1811258 - RNA, 19 nt, Artificial Sequence
  Description of Artificial Sequence: Synthetic oligonucleotide
  Antisense strand to SEQ ID NO: 1811257
accaacaaugggauaucac

SEQ ID NO: 1811259 - RNA, 19 nt, Artificial Sequence
  Description of Artificial Sequence: Synthetic oligonucleotide
  Sense strand starting at position 349 of SEQ ID NO: 1563442
cauuguuggucgucucaua

SEQ ID NO: 1811260 - RNA, 19 nt, Artificial Sequence
  Description of Artificial Sequence: Synthetic oligonucleotide
  Antisense strand to SEQ ID NO: 1811259
uaugagacgaccaacaaug

SEQ ID NO: 1811261 - RNA, 19 nt, Artificial Sequence
  Description of Artificial Sequence: Synthetic oligonucleotide
  Sense strand starting at position 446 of SEQ ID NO: 1563442
aacacucgcugugugaaga

SEQ ID NO: 1811262 - RNA, 19 nt, Artificial Sequence
  Description of Artificial Sequence: Synthetic oligonucleotide
  Antisense strand to SEQ ID NO: 1811261
ucuucacacagcgaguguu

SEQ ID NO: 1811263 - RNA, 19 nt, Artificial Sequence
  Description of Artificial Sequence: Synthetic oligonucleotide
  Sense strand starting at position 578 of SEQ ID NO: 1563442
ggugccauuuccucacaca

SEQ ID NO: 1811264 - RNA, 19 nt, Artificial Sequence
  Description of Artificial Sequence: Synthetic oligonucleotide
  Antisense strand to SEQ ID NO: 1811263
ugugugaggaaauggcacc

SEQ ID NO: 1811265 - RNA, 19 nt, Artificial Sequence
  Description of Artificial Sequence: Synthetic oligonucleotide
  Sense strand starting at position 611 of SEQ ID NO: 1563442
gcaugauuauucuucugau

SEQ ID NO: 1811266 - RNA, 19 nt, Artificial Sequence
  Description of Artificial Sequence: Synthetic oligonucleotide
  Antisense strand to SEQ ID NO: 1811265
aucagaagaauaaucaugc

SEQ ID NO: 1811267 - RNA, 19 nt, Artificial Sequence
  Description of Artificial Sequence: Synthetic oligonucleotide
  Sense strand starting at position 621 of SEQ ID NO: 1563442
ucuucugaugagugaccaa

SEQ ID NO: 1811268 - RNA, 19 nt, Artificial Sequence
  Description of Artificial Sequence: Synthetic oligonucleotide
  Antisense strand to SEQ ID NO: 1811267
uuggucacucaucagaaga

SEQ ID NO: 1811269 - RNA, 19 nt, Artificial Sequence
  Description of Artificial Sequence: Synthetic oligonucleotide
  Sense strand starting at position 662 of SEQ ID NO: 1563442
uggauuacuucugauggag

SEQ ID NO: 1811270 - RNA, 19 nt, Artificial Sequence
  Description of Artificial Sequence: Synthetic oligonucleotide
  Antisense strand to SEQ ID NO: 1811269
cuccaucagaaguaaucca

SEQ ID NO: 1811271 - RNA, 19 nt, Artificial Sequence
  Description of Artificial Sequence: Synthetic oligonucleotide
  Sense strand starting at position 704 of SEQ ID NO: 1563442
ggccacuuccaucgggaua

SEQ ID NO: 1811272 - RNA, 19 nt, Artificial Sequence
  Description of Artificial Sequence: Synthetic oligonucleotide
  Antisense strand to SEQ ID NO: 1811271
uaucccgauggaaguggcc

SEQ ID NO: 1811273 - RNA, 19 nt, Artificial Sequence
  Description of Artificial Sequence: Synthetic oligonucleotide
  Sense strand starting at position 705 of SEQ ID NO: 1563442
gccacuuccaucgggauaa

SEQ ID NO: 1811274 - RNA, 19 nt, Artificial Sequence
  Description of Artificial Sequence: Synthetic oligonucleotide
  Antisense strand to SEQ ID NO: 1811273
uuaucccgauggaaguggc

SEQ ID NO: 1811275 - RNA, 19 nt, Artificial Sequence
  Description of Artificial Sequence: Synthetic oligonucleotide
  Sense strand starting at position 716 of SEQ ID NO: 1563442
cgggauaaauggcuacagu

SEQ ID NO: 1811276 - RNA, 19 nt, Artificial Sequence
  Description of Artificial Sequence: Synthetic oligonucleotide
  Antisense strand to SEQ ID NO: 1811275
acuguagccauuuaucccg

SEQ ID NO: 1811277 - RNA, 19 nt, Artificial Sequence
  Description of Artificial Sequence: Synthetic oligonucleotide
  Sense strand starting at position 731 of SEQ ID NO: 1563442
cagugaauguuugccucuu

SEQ ID NO: 1811278 - RNA, 19 nt, Artificial Sequence
  Description of Artificial Sequence: Synthetic oligonucleotide
  Antisense strand to SEQ ID NO: 1811277
aagaggcaaacauucacug

SEQ ID NO: 1811279 - RNA, 19 nt, Artificial Sequence
  Description of Artificial Sequence: Synthetic oligonucleotide
  Sense strand starting at position 732 of SEQ ID NO: 1563442
agugaauguuugccucuuu

SEQ ID NO: 1811280 - RNA, 19 nt, Artificial Sequence
  Description of Artificial Sequence: Synthetic oligonucleotide
  Antisense strand to SEQ ID NO: 1811279
aaagaggcaaacauucacu

SEQ ID NO: 1811281 - RNA, 19 nt, Artificial Sequence
  Description of Artificial Sequence: Synthetic oligonucleotide
  Sense strand starting at position 814 of SEQ ID NO: 1563442
aacuguguguauguggaau

SEQ ID NO: 1811282 - RNA, 19 nt, Artificial Sequence
  Description of Artificial Sequence: Synthetic oligonucleotide
  Antisense strand to SEQ ID NO: 1811281
auuccacauacacacaguu

SEQ ID NO: 1811283 - RNA, 19 nt, Artificial Sequence
  Description of Artificial Sequence: Synthetic oligonucleotide
  Sense strand starting at position 834 of SEQ ID NO: 1563442
ccuaguaggaacugaugua

SEQ ID NO: 1811284 - RNA, 19 nt, Artificial Sequence
  Description of Artificial Sequence: Synthetic oligonucleotide
  Antisense strand to SEQ ID NO: 1811283
uacaucaguuccuacuagg

SEQ ID NO: 1811285 - RNA, 19 nt, Artificial Sequence
  Description of Artificial Sequence: Synthetic oligonucleotide
  Sense strand starting at position 985 of SEQ ID NO: 1563442
ggucauuaagugcaagaca

SEQ ID NO: 1811286 - RNA, 19 nt, Artificial Sequence
  Description of Artificial Sequence: Synthetic oligonucleotide
  Antisense strand to SEQ ID NO: 1811285
ugucuugcacuuaaugacc

SEQ ID NO: 1811287 - RNA, 19 nt, Artificial Sequence
  Description of Artificial Sequence: Synthetic oligonucleotide
  Sense strand starting at position 1000 of SEQ ID NO: 1563442
gacagcaaagcugguuaau

SEQ ID NO: 1811288 - RNA, 19 nt, Artificial Sequence
  Description of Artificial Sequence: Synthetic oligonucleotide
  Antisense strand to SEQ ID NO: 1811287
auuaaccagcuuugcuguc

SEQ ID NO: 1811289 - RNA, 19 nt, Artificial Sequence
  Description of Artificial Sequence: Synthetic oligonucleotide
  Sense strand starting at position 1077 of SEQ ID NO: 1563442
uggucuuaucaguaacaca

SEQ ID NO: 1811290 - RNA, 19 nt, Artificial Sequence
  Description of Artificial Sequence: Synthetic oligonucleotide
  Antisense strand to SEQ ID NO: 1811289
uguguuacugauaagacca

SEQ ID NO: 1811291 - RNA, 19 nt, Artificial Sequence
  Description of Artificial Sequence: Synthetic oligonucleotide
  Sense strand starting at position 1109 of SEQ ID NO: 1563442
caguuugguucugcuaauc

SEQ ID NO: 1811292 - RNA, 19 nt, Artificial Sequence
  Description of Artificial Sequence: Synthetic oligonucleotide
  Antisense strand to SEQ ID NO: 1811291
gauuagcagaaccaaacug

SEQ ID NO: 1811293 - RNA, 19 nt, Artificial Sequence
  Description of Artificial Sequence: Synthetic oligonucleotide
  Sense strand starting at position 1238 of SEQ ID NO: 1563442
gcuccauucgaagggagaa

SEQ ID NO: 1811294 - RNA, 19 nt, Artificial Sequence
  Description of Artificial Sequence: Synthetic oligonucleotide
  Antisense strand to SEQ ID NO: 1811293
uucucccuucgaauggagc

SEQ ID NO: 1811295 - RNA, 19 nt, Artificial Sequence
  Description of Artificial Sequence: Synthetic oligonucleotide
  Sense strand starting at position 1308 of SEQ ID NO: 1563442
ucccauuguccucagcuua

SEQ ID NO: 1811296 - RNA, 19 nt, Artificial Sequence
  Description of Artificial Sequence: Synthetic oligonucleotide
  Antisense strand to SEQ ID NO: 1811295
uaagcugaggacaauggga

SEQ ID NO: 1811297 - RNA, 19 nt, Artificial Sequence
  Description of Artificial Sequence: Synthetic oligonucleotide
  Sense strand starting at position 1321 of SEQ ID NO: 1563442
agcuuaauucuggguaggu

SEQ ID NO: 1811298 - RNA, 19 nt, Artificial Sequence
  Description of Artificial Sequence: Synthetic oligonucleotide
  Antisense strand to SEQ ID NO: 1811297
accuacccagaauuaagcu

SEQ ID NO: 1811299 - RNA, 19 nt, Artificial Sequence
  Description of Artificial Sequence: Synthetic oligonucleotide
  Sense strand starting at position 1322 of SEQ ID NO: 1563442
gcuuaauucuggguagguc

SEQ ID NO: 1811300 - RNA, 19 nt, Artificial Sequence
  Description of Artificial Sequence: Synthetic oligonucleotide
  Antisense strand to SEQ ID NO: 1811299
gaccuacccagaauuaagc

SEQ ID NO: 1811301 - RNA, 19 nt, Artificial Sequence
  Description of Artificial Sequence: Synthetic oligonucleotide
  Sense strand starting at position 1323 of SEQ ID NO: 1563442
cuuaauucuggguagguca

SEQ ID NO: 1811302 - RNA, 19 nt, Artificial Sequence
  Description of Artificial Sequence: Synthetic oligonucleotide
  Antisense strand to SEQ ID NO: 1811301
ugaccuacccagaauuaag

SEQ ID NO: 1811303 - RNA, 19 nt, Artificial Sequence
  Description of Artificial Sequence: Synthetic oligonucleotide
  Sense strand starting at position 1504 of SEQ ID NO: 1563442
cggguacacgcgcuuagaa

SEQ ID NO: 1811304 - RNA, 19 nt, Artificial Sequence
  Description of Artificial Sequence: Synthetic oligonucleotide
  Antisense strand to SEQ ID NO: 1811303
uucuaagcgcguguacccg

SEQ ID NO: 1811305 - RNA, 19 nt, Artificial Sequence
  Description of Artificial Sequence: Synthetic oligonucleotide
  Sense strand starting at position 2057 of SEQ ID NO: 1563442
cguacucagccaugcauau

SEQ ID NO: 1811306 - RNA, 19 nt, Artificial Sequence
  Description of Artificial Sequence: Synthetic oligonucleotide
  Antisense strand to SEQ ID NO: 1811305
auaugcauggcugaguacg

SEQ ID NO: 1811307 - RNA, 19 nt, Artificial Sequence
  Description of Artificial Sequence: Synthetic oligonucleotide
  Sense strand starting at position 2095 of SEQ ID NO: 1563442
ucucgcauucucgaagaca

SEQ ID NO: 1811308 - RNA, 19 nt, Artificial Sequence
  Description of Artificial Sequence: Synthetic oligonucleotide
  Antisense strand to SEQ ID NO: 1811307
ugucuucgagaaugcgaga

SEQ ID NO: 1811309 - RNA, 19 nt, Artificial Sequence
  Description of Artificial Sequence: Synthetic oligonucleotide
  Sense strand starting at position 2603 of SEQ ID NO: 1563442
gcagguguccgcugagaga

SEQ ID NO: 1811310 - RNA, 19 nt, Artificial Sequence
  Description of Artificial Sequence: Synthetic oligonucleotide
  Antisense strand to SEQ ID NO: 1811309
ucucucagcggacaccugc

SEQ ID NO: 1811311 - RNA, 19 nt, Artificial Sequence
  Description of Artificial Sequence: Synthetic oligonucleotide
  Sense strand starting at position 2676 of SEQ ID NO: 1563442
agcagcugcgugagaagua

SEQ ID NO: 1811312 - RNA, 19 nt, Artificial Sequence
  Description of Artificial Sequence: Synthetic oligonucleotide
  Antisense strand to SEQ ID NO: 1811311
uacuucucacgcagcugcu

SEQ ID NO: 1811313 - RNA, 19 nt, Artificial Sequence
  Description of Artificial Sequence: Synthetic oligonucleotide
  Sense strand starting at position 3085 of SEQ ID NO: 1563442
guggaaucacgagaaagcu

SEQ ID NO: 1811314 - RNA, 19 nt, Artificial Sequence
  Description of Artificial Sequence: Synthetic oligonucleotide
  Antisense strand to SEQ ID NO: 1811313
agcuuucucgugauuccac

SEQ ID NO: 1811315 - RNA, 19 nt, Artificial Sequence
  Description of Artificial Sequence: Synthetic oligonucleotide
  Sense strand starting at position 3093 of SEQ ID NO: 1563442
acgagaaagcucuguggga

SEQ ID NO: 1811316 - RNA, 19 nt, Artificial Sequence
  Description of Artificial Sequence: Synthetic oligonucleotide
  Antisense strand to SEQ ID NO: 1811315
ucccacagagcuuucucgu

SEQ ID NO: 1811317 - RNA, 19 nt, Artificial Sequence
  Description of Artificial Sequence: Synthetic oligonucleotide
  Sense strand starting at position 3227 of SEQ ID NO: 1563442
cgggaaauugcuggagaag

SEQ ID NO: 1811318 - RNA, 19 nt, Artificial Sequence
  Description of Artificial Sequence: Synthetic oligonucleotide
  Antisense strand to SEQ ID NO: 1811317
cuucuccagcaauuucccg

SEQ ID NO: 1811319 - RNA, 19 nt, Artificial Sequence
  Description of Artificial Sequence: Synthetic oligonucleotide
  Sense strand starting at position 3467 of SEQ ID NO: 1563442
ggcguaguugugggaaaga

SEQ ID NO: 1811320 - RNA, 19 nt, Artificial Sequence
  Description of Artificial Sequence: Synthetic oligonucleotide
  Antisense strand to SEQ ID NO: 1811319
ucuuucccacaacuacgcc

SEQ ID NO: 1811321 - RNA, 19 nt, Artificial Sequence
  Description of Artificial Sequence: Synthetic oligonucleotide
  Sense strand starting at position 3500 of SEQ ID NO: 1563442
ugguuaagugcugggagga

SEQ ID NO: 1811322 - RNA, 19 nt, Artificial Sequence
  Description of Artificial Sequence: Synthetic oligonucleotide
  Antisense strand to SEQ ID NO: 1811321
uccucccagcacuuaacca

SEQ ID NO: 1811323 - RNA, 19 nt, Artificial Sequence
  Description of Artificial Sequence: Synthetic oligonucleotide
  Sense strand starting at position 3572 of SEQ ID NO: 1563442
gguggagaugcuggugaaa

SEQ ID NO: 1811324 - RNA, 19 nt, Artificial Sequence
  Description of Artificial Sequence: Synthetic oligonucleotide
  Antisense strand to SEQ ID NO: 1811323
uuucaccagcaucuccacc

SEQ ID NO: 1811325 - RNA, 19 nt, Artificial Sequence
  Description of Artificial Sequence: Synthetic oligonucleotide
  Sense strand starting at position 3867 of SEQ ID NO: 1563442
gaggaaccgucucuuuaac

SEQ ID NO: 1811326 - RNA, 19 nt, Artificial Sequence
  Description of Artificial Sequence: Synthetic oligonucleotide
  Antisense strand to SEQ ID NO: 1811325
guuaaagagacgguuccuc

SEQ ID NO: 1811327 - RNA, 19 nt, Artificial Sequence
  Description of Artificial Sequence: Synthetic oligonucleotide
  Sense strand starting at position 3869 of SEQ ID NO: 1563442
ggaaccgucucuuuaacgu

SEQ ID NO: 1811328 - RNA, 19 nt, Artificial Sequence
  Description of Artificial Sequence: Synthetic oligonucleotide
  Antisense strand to SEQ ID NO: 1811327
acguuaaagagacgguucc

SEQ ID NO: 1811329 - RNA, 19 nt, Artificial Sequence
  Description of Artificial Sequence: Synthetic oligonucleotide
  Sense strand starting at position 3962 of SEQ ID NO: 1563442
gcccaacuucccuggcaaa

SEQ ID NO: 1811330 - RNA, 19 nt, Artificial Sequence
  Description of Artificial Sequence: Synthetic oligonucleotide
  Antisense strand to SEQ ID NO: 1811329
uuugccagggaaguugggc

SEQ ID NO: 1811331 - RNA, 19 nt, Artificial Sequence
  Description of Artificial Sequence: Synthetic oligonucleotide
  Sense strand starting at position 162 of SEQ ID NO: 1563443
gccucagucaccuagaggu

SEQ ID NO: 1811332 - RNA, 19 nt, Artificial Sequence
  Description of Artificial Sequence: Synthetic oligonucleotide
  Antisense strand to SEQ ID NO: 1811331
accucuaggugacugaggc

SEQ ID NO: 1811333 - RNA, 19 nt, Artificial Sequence
  Description of Artificial Sequence: Synthetic oligonucleotide
  Sense strand starting at position 164 of SEQ ID NO: 1563443
cucagucaccuagagguua

SEQ ID NO: 1811334 - RNA, 19 nt, Artificial Sequence
  Description of Artificial Sequence: Synthetic oligonucleotide
  Antisense strand to SEQ ID NO: 1811333
uaaccucuaggugacugag

SEQ ID NO: 1811335 - RNA, 19 nt, Artificial Sequence
  Description of Artificial Sequence: Synthetic oligonucleotide
  Sense strand starting at position 322 of SEQ ID NO: 1563443
acacauguaugugcaaaua

SEQ ID NO: 1811336 - RNA, 19 nt, Artificial Sequence
  Description of Artificial Sequence: Synthetic oligonucleotide
  Antisense strand to SEQ ID NO: 1811335
uauuugcacauacaugugu

SEQ ID NO: 1811337 - RNA, 19 nt, Artificial Sequence
  Description of Artificial Sequence: Synthetic oligonucleotide
  Sense strand starting at position 384 of SEQ ID NO: 1563443
ccaggcuucucacugagau

SEQ ID NO: 1811338 - RNA, 19 nt, Artificial Sequence
  Description of Artificial Sequence: Synthetic oligonucleotide
  Antisense strand to SEQ ID NO: 1811337
aucucagugagaagccugg

SEQ ID NO: 1811339 - RNA, 19 nt, Artificial Sequence
  Description of Artificial Sequence: Synthetic oligonucleotide
  Sense strand starting at position 385 of SEQ ID NO: 1563443
caggcuucucacugagauc

SEQ ID NO: 1811340 - RNA, 19 nt, Artificial Sequence
  Description of Artificial Sequence: Synthetic oligonucleotide
  Antisense strand to SEQ ID NO: 1811339
gaucucagugagaagccug

SEQ ID NO: 1811341 - RNA, 19 nt, Artificial Sequence
  Description of Artificial Sequence: Synthetic oligonucleotide
  Sense strand starting at position 507 of SEQ ID NO: 1563443
uguguugccaaaggaaacu

SEQ ID NO: 1811342 - RNA, 19 nt, Artificial Sequence
  Description of Artificial Sequence: Synthetic oligonucleotide
  Antisense strand to SEQ ID NO: 1811341
aguuuccuuuggcaacaca

SEQ ID NO: 1811343 - RNA, 19 nt, Artificial Sequence
  Description of Artificial Sequence: Synthetic oligonucleotide
  Sense strand starting at position 513 of SEQ ID NO: 1563443
gccaaaggaaacuguguua

SEQ ID NO: 1811344 - RNA, 19 nt, Artificial Sequence
  Description of Artificial Sequence: Synthetic oligonucleotide
  Antisense strand to SEQ ID NO: 1811343
uaacacaguuuccuuuggc

SEQ ID NO: 1811345 - RNA, 19 nt, Artificial Sequence
  Description of Artificial Sequence: Synthetic oligonucleotide
  Sense strand starting at position 516 of SEQ ID NO: 1563443
aaaggaaacuguguuauac

SEQ ID NO: 1811346 - RNA, 19 nt, Artificial Sequence
  Description of Artificial Sequence: Synthetic oligonucleotide
  Antisense strand to SEQ ID NO: 1811345
guauaacacaguuuccuuu

SEQ ID NO: 1811347 - RNA, 19 nt, Artificial Sequence
  Description of Artificial Sequence: Synthetic oligonucleotide
  Sense strand starting at position 518 of SEQ ID NO: 1563443
aggaaacuguguuauacac

SEQ ID NO: 1811348 - RNA, 19 nt, Artificial Sequence
  Description of Artificial Sequence: Synthetic oligonucleotide
  Antisense strand to SEQ ID NO: 1811347
guguauaacacaguuuccu

SEQ ID NO: 1811349 - RNA, 19 nt, Artificial Sequence
  Description of Artificial Sequence: Synthetic oligonucleotide
  Sense strand starting at position 602 of SEQ ID NO: 1563443
aggcguugucugcgcauuu

SEQ ID NO: 1811350 - RNA, 19 nt, Artificial Sequence
  Description of Artificial Sequence: Synthetic oligonucleotide
  Antisense strand to SEQ ID NO: 1811349
aaaugcgcagacaacgccu

SEQ ID NO: 1811351 - RNA, 19 nt, Artificial Sequence
  Description of Artificial Sequence: Synthetic oligonucleotide
  Sense strand starting at position 618 of SEQ ID NO: 1563443
uuugguacauugucacuua

SEQ ID NO: 1811352 - RNA, 19 nt, Artificial Sequence
  Description of Artificial Sequence: Synthetic oligonucleotide
  Antisense strand to SEQ ID NO: 1811351
uaagugacaauguaccaaa

SEQ ID NO: 1811353 - RNA, 19 nt, Artificial Sequence
  Description of Artificial Sequence: Synthetic oligonucleotide
  Sense strand starting at position 1178 of SEQ ID NO: 1563443
ccauguggucagugcuaug

SEQ ID NO: 1811354 - RNA, 19 nt, Artificial Sequence
  Description of Artificial Sequence: Synthetic oligonucleotide
  Antisense strand to SEQ ID NO: 1811353
cauagcacugaccacaugg

SEQ ID NO: 1811355 - RNA, 19 nt, Artificial Sequence
  Description of Artificial Sequence: Synthetic oligonucleotide
  Sense strand starting at position 1183 of SEQ ID NO: 1563443
uggucagugcuaugacaga

SEQ ID NO: 1811356 - RNA, 19 nt, Artificial Sequence
  Description of Artificial Sequence: Synthetic oligonucleotide
  Antisense strand to SEQ ID NO: 1811355
ucugucauagcacugacca

SEQ ID NO: 1811357 - RNA, 19 nt, Artificial Sequence
  Description of Artificial Sequence: Synthetic oligonucleotide
  Sense strand starting at position 1188 of SEQ ID NO: 1563443
agugcuaugacagagguca

SEQ ID NO: 1811358 - RNA, 19 nt, Artificial Sequence
  Description of Artificial Sequence: Synthetic oligonucleotide
  Antisense strand to SEQ ID NO: 1811357
ugaccucugucauagcacu

SEQ ID NO: 1811359 - RNA, 19 nt, Artificial Sequence
  Description of Artificial Sequence: Synthetic oligonucleotide
  Sense strand starting at position 1420 of SEQ ID NO: 1563443
gagcccacaucguugauau

SEQ ID NO: 1811360 - RNA, 19 nt, Artificial Sequence
  Description of Artificial Sequence: Synthetic oligonucleotide
  Antisense strand to SEQ ID NO: 1811359
auaucaacgaugugggcuc

SEQ ID NO: 1811361 - RNA, 19 nt, Artificial Sequence
  Description of Artificial Sequence: Synthetic oligonucleotide
  Sense strand starting at position 1421 of SEQ ID NO: 1563443
agcccacaucguugauauc

SEQ ID NO: 1811362 - RNA, 19 nt, Artificial Sequence
  Description of Artificial Sequence: Synthetic oligonucleotide
  Antisense strand to SEQ ID NO: 1811361
gauaucaacgaugugggcu

SEQ ID NO: 1811363 - RNA, 19 nt, Artificial Sequence
  Description of Artificial Sequence: Synthetic oligonucleotide
  Sense strand starting at position 1445 of SEQ ID NO: 1563443
ucagcucuguccucaggau

SEQ ID NO: 1811364 - RNA, 19 nt, Artificial Sequence
  Description of Artificial Sequence: Synthetic oligonucleotide
  Antisense strand to SEQ ID NO: 1811363
auccugaggacagagcuga

SEQ ID NO: 1811365 - RNA, 19 nt, Artificial Sequence
  Description of Artificial Sequence: Synthetic oligonucleotide
  Sense strand starting at position 1577 of SEQ ID NO: 1563443
gucccaaucugagcugaga

SEQ ID NO: 1811366 - RNA, 19 nt, Artificial Sequence
  Description of Artificial Sequence: Synthetic oligonucleotide
  Antisense strand to SEQ ID NO: 1811365
ucucagcucagauugggac

SEQ ID NO: 1811367 - RNA, 19 nt, Artificial Sequence
  Description of Artificial Sequence: Synthetic oligonucleotide
  Sense strand starting at position 1986 of SEQ ID NO: 1563443
guacguggcaccuaauaga

SEQ ID NO: 1811368 - RNA, 19 nt, Artificial Sequence
  Description of Artificial Sequence: Synthetic oligonucleotide
  Antisense strand to SEQ ID NO: 1811367
ucuauuaggugccacguac

SEQ ID NO: 1811369 - RNA, 19 nt, Artificial Sequence
  Description of Artificial Sequence: Synthetic oligonucleotide
  Sense strand starting at position 2000 of SEQ ID NO: 1563443
auagaacagucagaaauag

SEQ ID NO: 1811370 - RNA, 19 nt, Artificial Sequence
  Description of Artificial Sequence: Synthetic oligonucleotide
  Antisense strand to SEQ ID NO: 1811369
cuauuucugacuguucuau

SEQ ID NO: 1811371 - RNA, 19 nt, Artificial Sequence
  Description of Artificial Sequence: Synthetic oligonucleotide
  Sense strand starting at position 2128 of SEQ ID NO: 1563443
ucuaguacgcucuaugauu

SEQ ID NO: 1811372 - RNA, 19 nt, Artificial Sequence
  Description of Artificial Sequence: Synthetic oligonucleotide
  Antisense strand to SEQ ID NO: 1811371
aaucauagagcguacuaga

SEQ ID NO: 1811373 - RNA, 19 nt, Artificial Sequence
  Description of Artificial Sequence: Synthetic oligonucleotide
  Sense strand starting at position 2189 of SEQ ID NO: 1563443
ggccaaagcugccugguau

SEQ ID NO: 1811374 - RNA, 19 nt, Artificial Sequence
  Description of Artificial Sequence: Synthetic oligonucleotide
  Antisense strand to SEQ ID NO: 1811373
auaccaggcagcuuuggcc

SEQ ID NO: 1811375 - RNA, 19 nt, Artificial Sequence
  Description of Artificial Sequence: Synthetic oligonucleotide
  Sense strand starting at position 2190 of SEQ ID NO: 1563443
gccaaagcugccugguauu

SEQ ID NO: 1811376 - RNA, 19 nt, Artificial Sequence
  Description of Artificial Sequence: Synthetic oligonucleotide
  Antisense strand to SEQ ID NO: 1811375
aauaccaggcagcuuuggc

SEQ ID NO: 1811377 - RNA, 19 nt, Artificial Sequence
  Description of Artificial Sequence: Synthetic oligonucleotide
  Sense strand starting at position 2365 of SEQ ID NO: 1563443
aucuaugcucgcucagcau

SEQ ID NO: 1811378 - RNA, 19 nt, Artificial Sequence
  Description of Artificial Sequence: Synthetic oligonucleotide
  Antisense strand to SEQ ID NO: 1811377
augcugagcgagcauagau

SEQ ID NO: 1811379 - RNA, 19 nt, Artificial Sequence
  Description of Artificial Sequence: Synthetic oligonucleotide
  Sense strand starting at position 2476 of SEQ ID NO: 1563443
gucucuacuuccucucuga

SEQ ID NO: 1811380 - RNA, 19 nt, Artificial Sequence
  Description of Artificial Sequence: Synthetic oligonucleotide
  Antisense strand to SEQ ID NO: 1811379
ucagagaggaaguagagac

SEQ ID NO: 1811381 - RNA, 19 nt, Artificial Sequence
  Description of Artificial Sequence: Synthetic oligonucleotide
  Sense strand starting at position 2697 of SEQ ID NO: 1563443
cucugaaucccguggugca

SEQ ID NO: 1811382 - RNA, 19 nt, Artificial Sequence
  Description of Artificial Sequence: Synthetic oligonucleotide
  Antisense strand to SEQ ID NO: 1811381
ugcaccacgggauucagag

SEQ ID NO: 1811383 - RNA, 19 nt, Artificial Sequence
  Description of Artificial Sequence: Synthetic oligonucleotide
  Sense strand starting at position 2987 of SEQ ID NO: 1563443
cugccuucugaagaagucu

SEQ ID NO: 1811384 - RNA, 19 nt, Artificial Sequence
  Description of Artificial Sequence: Synthetic oligonucleotide
  Antisense strand to SEQ ID NO: 1811383
agacuucuucagaaggcag

SEQ ID NO: 1811385 - RNA, 19 nt, Artificial Sequence
  Description of Artificial Sequence: Synthetic oligonucleotide
  Sense strand starting at position 3045 of SEQ ID NO: 1563443
gcacucuugugaccacacu

SEQ ID NO: 1811386 - RNA, 19 nt, Artificial Sequence
  Description of Artificial Sequence: Synthetic oligonucleotide
  Antisense strand to SEQ ID NO: 1811385
aguguggucacaagagugc

SEQ ID NO: 1811387 - RNA, 19 nt, Artificial Sequence
  Description of Artificial Sequence: Synthetic oligonucleotide
  Sense strand starting at position 3062 of SEQ ID NO: 1563443
cugccaucggaaugaucuu

SEQ ID NO: 1811388 - RNA, 19 nt, Artificial Sequence
  Description of Artificial Sequence: Synthetic oligonucleotide
  Antisense strand to SEQ ID NO: 1811387
aagaucauuccgauggcag

SEQ ID NO: 1811389 - RNA, 19 nt, Artificial Sequence
  Description of Artificial Sequence: Synthetic oligonucleotide
  Sense strand starting at position 3069 of SEQ ID NO: 1563443
cggaaugaucuugguacag

SEQ ID NO: 1811390 - RNA, 19 nt, Artificial Sequence
  Description of Artificial Sequence: Synthetic oligonucleotide
  Antisense strand to SEQ ID NO: 1811389
cuguaccaagaucauuccg

SEQ ID NO: 1811391 - RNA, 19 nt, Artificial Sequence
  Description of Artificial Sequence: Synthetic oligonucleotide
  Sense strand starting at position 3300 of SEQ ID NO: 1563443
cucagagccuuugucaguu

SEQ ID NO: 1811392 - RNA, 19 nt, Artificial Sequence
  Description of Artificial Sequence: Synthetic oligonucleotide
  Antisense strand to SEQ ID NO: 1811391
aacugacaaaggcucugag

SEQ ID NO: 1811393 - RNA, 19 nt, Artificial Sequence
  Description of Artificial Sequence: Synthetic oligonucleotide
  Sense strand starting at position 3304 of SEQ ID NO: 1563443
gagccuuugucaguuguga

SEQ ID NO: 1811394 - RNA, 19 nt, Artificial Sequence
  Description of Artificial Sequence: Synthetic oligonucleotide
  Antisense strand to SEQ ID NO: 1811393
ucacaacugacaaaggcuc

SEQ ID NO: 1811395 - RNA, 19 nt, Artificial Sequence
  Description of Artificial Sequence: Synthetic oligonucleotide
  Sense strand starting at position 3306 of SEQ ID NO: 1563443
gccuuugucaguugugaug

SEQ ID NO: 1811396 - RNA, 19 nt, Artificial Sequence
  Description of Artificial Sequence: Synthetic oligonucleotide
  Antisense strand to SEQ ID NO: 1811395
caucacaacugacaaaggc

SEQ ID NO: 1811397 - RNA, 19 nt, Artificial Sequence
  Description of Artificial Sequence: Synthetic oligonucleotide
  Sense strand starting at position 3328 of SEQ ID NO: 1563443
ugcauuguguccucuuaaa

SEQ ID NO: 1811398 - RNA, 19 nt, Artificial Sequence
  Description of Artificial Sequence: Synthetic oligonucleotide
  Antisense strand to SEQ ID NO: 1811397
uuuaagaggacacaaugca

SEQ ID NO: 1811399 - RNA, 19 nt, Artificial Sequence
  Description of Artificial Sequence: Synthetic oligonucleotide
  Sense strand starting at position 3421 of SEQ ID NO: 1563443
gcaaucaagugagacugaa

SEQ ID NO: 1811400 - RNA, 19 nt, Artificial Sequence
  Description of Artificial Sequence: Synthetic oligonucleotide
  Antisense strand to SEQ ID NO: 1811399
uucagucucacuugauugc

SEQ ID NO: 1811401 - RNA, 19 nt, Artificial Sequence
  Description of Artificial Sequence: Synthetic oligonucleotide
  Sense strand starting at position 3620 of SEQ ID NO: 1563443
gacagaccagauugucuuu

SEQ ID NO: 1811402 - RNA, 19 nt, Artificial Sequence
  Description of Artificial Sequence: Synthetic oligonucleotide
  Antisense strand to SEQ ID NO: 1811401
aaagacaaucuggucuguc

SEQ ID NO: 1811403 - RNA, 19 nt, Artificial Sequence
  Description of Artificial Sequence: Synthetic oligonucleotide
  Sense strand starting at position 3711 of SEQ ID NO: 1563443
augauugucuguucuuuaa

SEQ ID NO: 1811404 - RNA, 19 nt, Artificial Sequence
  Description of Artificial Sequence: Synthetic oligonucleotide
  Antisense strand to SEQ ID NO: 1811403
uuaaagaacagacaaucau

SEQ ID NO: 1811405 - RNA, 19 nt, Artificial Sequence
  Description of Artificial Sequence: Synthetic oligonucleotide
  Sense strand starting at position 3715 of SEQ ID NO: 1563443
uugucuguucuuuaagcca

SEQ ID NO: 1811406 - RNA, 19 nt, Artificial Sequence
  Description of Artificial Sequence: Synthetic oligonucleotide
  Antisense strand to SEQ ID NO: 1811405
uggcuuaaagaacagacaa

SEQ ID NO: 1811407 - RNA, 19 nt, Artificial Sequence
  Description of Artificial Sequence: Synthetic oligonucleotide
  Sense strand starting at position 3886 of SEQ ID NO: 1563443
gugauaucccauuguuggu

SEQ ID NO: 1811408 - RNA, 19 nt, Artificial Sequence
  Description of Artificial Sequence: Synthetic oligonucleotide
  Antisense strand to SEQ ID NO: 1811407
accaacaaugggauaucac

SEQ ID NO: 1811409 - RNA, 19 nt, Artificial Sequence
  Description of Artificial Sequence: Synthetic oligonucleotide
  Sense strand starting at position 3895 of SEQ ID NO: 1563443
cauuguuggucgucucaua

SEQ ID NO: 1811410 - RNA, 19 nt, Artificial Sequence
  Description of Artificial Sequence: Synthetic oligonucleotide
  Antisense strand to SEQ ID NO: 1811409
uaugagacgaccaacaaug

SEQ ID NO: 1811411 - RNA, 19 nt, Artificial Sequence
  Description of Artificial Sequence: Synthetic oligonucleotide
  Sense strand starting at position 107 of SEQ ID NO: 1563444
gacagaccagauugucuuu

SEQ ID NO: 1811412 - RNA, 19 nt, Artificial Sequence
  Description of Artificial Sequence: Synthetic oligonucleotide
  Antisense strand to SEQ ID NO: 1811411
aaagacaaucuggucuguc

SEQ ID NO: 1811413 - RNA, 19 nt, Artificial Sequence
  Description of Artificial Sequence: Synthetic oligonucleotide
  Sense strand starting at position 198 of SEQ ID NO: 1563444
augauugucuguucuuuaa

SEQ ID NO: 1811414 - RNA, 19 nt, Artificial Sequence
  Description of Artificial Sequence: Synthetic oligonucleotide
  Antisense strand to SEQ ID NO: 1811413
uuaaagaacagacaaucau

SEQ ID NO: 1811415 - RNA, 19 nt, Artificial Sequence
  Description of Artificial Sequence: Synthetic oligonucleotide
  Sense strand starting at position 202 of SEQ ID NO: 1563444
uugucuguucuuuaagcca

SEQ ID NO: 1811416 - RNA, 19 nt, Artificial Sequence
  Description of Artificial Sequence: Synthetic oligonucleotide
  Antisense strand to SEQ ID NO: 1811415
uggcuuaaagaacagacaa

SEQ ID NO: 1811417 - RNA, 19 nt, Artificial Sequence
  Description of Artificial Sequence: Synthetic oligonucleotide
  Sense strand starting at position 224 of SEQ ID NO: 1563444
ccuuuaugguccuuuguuu

SEQ ID NO: 1811418 - RNA, 19 nt, Artificial Sequence
  Description of Artificial Sequence: Synthetic oligonucleotide
  Antisense strand to SEQ ID NO: 1811417
aaacaaaggaccauaaagg

SEQ ID NO: 1811419 - RNA, 19 nt, Artificial Sequence
  Description of Artificial Sequence: Synthetic oligonucleotide
  Sense strand starting at position 291 of SEQ ID NO: 1563444
gcacgaguuugccauuuga

SEQ ID NO: 1811420 - RNA, 19 nt, Artificial Sequence
  Description of Artificial Sequence: Synthetic oligonucleotide
  Antisense strand to SEQ ID NO: 1811419
ucaaauggcaaacucgugc

SEQ ID NO: 1811421 - RNA, 19 nt, Artificial Sequence
  Description of Artificial Sequence: Synthetic oligonucleotide
  Sense strand starting at position 373 of SEQ ID NO: 1563444
gugauaucccauuguuggu

SEQ ID NO: 1811422 - RNA, 19 nt, Artificial Sequence
  Description of Artificial Sequence: Synthetic oligonucleotide
  Antisense strand to SEQ ID NO: 1811421
accaacaaugggauaucac

SEQ ID NO: 1811423 - RNA, 19 nt, Artificial Sequence
  Description of Artificial Sequence: Synthetic oligonucleotide
  Sense strand starting at position 382 of SEQ ID NO: 1563444
cauuguuggucgucucaua

SEQ ID NO: 1811424 - RNA, 19 nt, Artificial Sequence
  Description of Artificial Sequence: Synthetic oligonucleotide
  Antisense strand to SEQ ID NO: 1811423
uaugagacgaccaacaaug

SEQ ID NO: 1811425 - RNA, 19 nt, Artificial Sequence
  Description of Artificial Sequence: Synthetic oligonucleotide
  Sense strand starting at position 479 of SEQ ID NO: 1563444
aacacucgcugugugaaga

SEQ ID NO: 1811426 - RNA, 19 nt, Artificial Sequence
  Description of Artificial Sequence: Synthetic oligonucleotide
  Antisense strand to SEQ ID NO: 1811425
ucuucacacagcgaguguu

SEQ ID NO: 1811427 - RNA, 19 nt, Artificial Sequence
  Description of Artificial Sequence: Synthetic oligonucleotide
  Sense strand starting at position 611 of SEQ ID NO: 1563444
ggugccauuuccucacaca

SEQ ID NO: 1811428 - RNA, 19 nt, Artificial Sequence
  Description of Artificial Sequence: Synthetic oligonucleotide
  Antisense strand to SEQ ID NO: 1811427
ugugugaggaaauggcacc

SEQ ID NO: 1811429 - RNA, 19 nt, Artificial Sequence
  Description of Artificial Sequence: Synthetic oligonucleotide
  Sense strand starting at position 644 of SEQ ID NO: 1563444
gcaugauuauucuucugau

SEQ ID NO: 1811430 - RNA, 19 nt, Artificial Sequence
  Description of Artificial Sequence: Synthetic oligonucleotide
  Antisense strand to SEQ ID NO: 1811429
aucagaagaauaaucaugc

SEQ ID NO: 1811431 - RNA, 19 nt, Artificial Sequence
  Description of Artificial Sequence: Synthetic oligonucleotide
  Sense strand starting at position 648 of SEQ ID NO: 1563444
gauuauucuucugaugagu

SEQ ID NO: 1811432 - RNA, 19 nt, Artificial Sequence
  Description of Artificial Sequence: Synthetic oligonucleotide
  Antisense strand to SEQ ID NO: 1811431
acucaucagaagaauaauc

SEQ ID NO: 1811433 - RNA, 19 nt, Artificial Sequence
  Description of Artificial Sequence: Synthetic oligonucleotide
  Sense strand starting at position 654 of SEQ ID NO: 1563444
ucuucugaugagugaccaa

SEQ ID NO: 1811434 - RNA, 19 nt, Artificial Sequence
  Description of Artificial Sequence: Synthetic oligonucleotide
  Antisense strand to SEQ ID NO: 1811433
uuggucacucaucagaaga

SEQ ID NO: 1811435 - RNA, 19 nt, Artificial Sequence
  Description of Artificial Sequence: Synthetic oligonucleotide
  Sense strand starting at position 737 of SEQ ID NO: 1563444
ggccacuuccaucgggaua

SEQ ID NO: 1811436 - RNA, 19 nt, Artificial Sequence
  Description of Artificial Sequence: Synthetic oligonucleotide
  Antisense strand to SEQ ID NO: 1811435
uaucccgauggaaguggcc

SEQ ID NO: 1811437 - RNA, 19 nt, Artificial Sequence
  Description of Artificial Sequence: Synthetic oligonucleotide
  Sense strand starting at position 738 of SEQ ID NO: 1563444
gccacuuccaucgggauaa

SEQ ID NO: 1811438 - RNA, 19 nt, Artificial Sequence
  Description of Artificial Sequence: Synthetic oligonucleotide
  Antisense strand to SEQ ID NO: 1811437
uuaucccgauggaaguggc

SEQ ID NO: 1811439 - RNA, 19 nt, Artificial Sequence
  Description of Artificial Sequence: Synthetic oligonucleotide
  Sense strand starting at position 749 of SEQ ID NO: 1563444
cgggauaaauggcuacagu

SEQ ID NO: 1811440 - RNA, 19 nt, Artificial Sequence
  Description of Artificial Sequence: Synthetic oligonucleotide
  Antisense strand to SEQ ID NO: 1811439
acuguagccauuuaucccg

SEQ ID NO: 1811441 - RNA, 19 nt, Artificial Sequence
  Description of Artificial Sequence: Synthetic oligonucleotide
  Sense strand starting at position 764 of SEQ ID NO: 1563444
cagugaauguuugccucuu

SEQ ID NO: 1811442 - RNA, 19 nt, Artificial Sequence
  Description of Artificial Sequence: Synthetic oligonucleotide
  Antisense strand to SEQ ID NO: 1811441
aagaggcaaacauucacug

SEQ ID NO: 1811443 - RNA, 19 nt, Artificial Sequence
  Description of Artificial Sequence: Synthetic oligonucleotide
  Sense strand starting at position 765 of SEQ ID NO: 1563444
agugaauguuugccucuuu

SEQ ID NO: 1811444 - RNA, 19 nt, Artificial Sequence
  Description of Artificial Sequence: Synthetic oligonucleotide
  Antisense strand to SEQ ID NO: 1811443
aaagaggcaaacauucacu

SEQ ID NO: 1811445 - RNA, 19 nt, Artificial Sequence
  Description of Artificial Sequence: Synthetic oligonucleotide
  Sense strand starting at position 860 of SEQ ID NO: 1563444
ccuaguaggaacugaugua

SEQ ID NO: 1811446 - RNA, 19 nt, Artificial Sequence
  Description of Artificial Sequence: Synthetic oligonucleotide
  Antisense strand to SEQ ID NO: 1811445
uacaucaguuccuacuagg

SEQ ID NO: 1811447 - RNA, 19 nt, Artificial Sequence
  Description of Artificial Sequence: Synthetic oligonucleotide
  Sense strand starting at position 1026 of SEQ ID NO: 1563444
gucagcaaagcugguuaau

SEQ ID NO: 1811448 - RNA, 19 nt, Artificial Sequence
  Description of Artificial Sequence: Synthetic oligonucleotide
  Antisense strand to SEQ ID NO: 1811447
auuaaccagcuuugcugac

SEQ ID NO: 1811449 - RNA, 19 nt, Artificial Sequence
  Description of Artificial Sequence: Synthetic oligonucleotide
  Sense strand starting at position 1038 of SEQ ID NO: 1563444
gguuaauggcccuaggaag

SEQ ID NO: 1811450 - RNA, 19 nt, Artificial Sequence
  Description of Artificial Sequence: Synthetic oligonucleotide
  Antisense strand to SEQ ID NO: 1811449
cuuccuagggccauuaacc

SEQ ID NO: 1811451 - RNA, 19 nt, Artificial Sequence
  Description of Artificial Sequence: Synthetic oligonucleotide
  Sense strand starting at position 1100 of SEQ ID NO: 1563444
cgguccuaagaguaacaca

SEQ ID NO: 1811452 - RNA, 19 nt, Artificial Sequence
  Description of Artificial Sequence: Synthetic oligonucleotide
  Antisense strand to SEQ ID NO: 1811451
uguguuacucuuaggaccg

SEQ ID NO: 1811453 - RNA, 19 nt, Artificial Sequence
  Description of Artificial Sequence: Synthetic oligonucleotide
  Sense strand starting at position 1134 of SEQ ID NO: 1563444
cgguuugguucugcuaauc

SEQ ID NO: 1811454 - RNA, 19 nt, Artificial Sequence
  Description of Artificial Sequence: Synthetic oligonucleotide
  Antisense strand to SEQ ID NO: 1811453
gauuagcagaaccaaaccg

SEQ ID NO: 1811455 - RNA, 19 nt, Artificial Sequence
  Description of Artificial Sequence: Synthetic oligonucleotide
  Sense strand starting at position 1170 of SEQ ID NO: 1563444
cacaucugucugggucaca

SEQ ID NO: 1811456 - RNA, 19 nt, Artificial Sequence
  Description of Artificial Sequence: Synthetic oligonucleotide
  Antisense strand to SEQ ID NO: 1811455
ugugacccagacagaugug

SEQ ID NO: 1811457 - RNA, 19 nt, Artificial Sequence
  Description of Artificial Sequence: Synthetic oligonucleotide
  Sense strand starting at position 1233 of SEQ ID NO: 1563444
gucacauuccuacagcuga

SEQ ID NO: 1811458 - RNA, 19 nt, Artificial Sequence
  Description of Artificial Sequence: Synthetic oligonucleotide
  Antisense strand to SEQ ID NO: 1811457
ucagcuguaggaaugugac

SEQ ID NO: 1811459 - RNA, 19 nt, Artificial Sequence
  Description of Artificial Sequence: Synthetic oligonucleotide
  Sense strand starting at position 1290 of SEQ ID NO: 1563444
ucccauugucaucggacga

SEQ ID NO: 1811460 - RNA, 19 nt, Artificial Sequence
  Description of Artificial Sequence: Synthetic oligonucleotide
  Antisense strand to SEQ ID NO: 1811459
ucguccgaugacaauggga

SEQ ID NO: 1811461 - RNA, 19 nt, Artificial Sequence
  Description of Artificial Sequence: Synthetic oligonucleotide
  Sense strand starting at position 1341 of SEQ ID NO: 1563444
gcuuaauucugguuagguc

SEQ ID NO: 1811462 - RNA, 19 nt, Artificial Sequence
  Description of Artificial Sequence: Synthetic oligonucleotide
  Antisense strand to SEQ ID NO: 1811461
gaccuaaccagaauuaagc

SEQ ID NO: 1811463 - RNA, 19 nt, Artificial Sequence
  Description of Artificial Sequence: Synthetic oligonucleotide
  Sense strand starting at position 1342 of SEQ ID NO: 1563444
cuuaauucugguuagguca

SEQ ID NO: 1811464 - RNA, 19 nt, Artificial Sequence
  Description of Artificial Sequence: Synthetic oligonucleotide
  Antisense strand to SEQ ID NO: 1811463
ugaccuaaccagaauuaag

SEQ ID NO: 1811465 - RNA, 19 nt, Artificial Sequence
  Description of Artificial Sequence: Synthetic oligonucleotide
  Sense strand starting at position 1511 of SEQ ID NO: 1563444
cggguacacgcgcuuagaa

SEQ ID NO: 1811466 - RNA, 19 nt, Artificial Sequence
  Description of Artificial Sequence: Synthetic oligonucleotide
  Antisense strand to SEQ ID NO: 1811465
uucuaagcgcguguacccg

SEQ ID NO: 1811467 - RNA, 19 nt, Artificial Sequence
  Description of Artificial Sequence: Synthetic oligonucleotide
  Sense strand starting at position 1636 of SEQ ID NO: 1563444
gcaaguaccgucugcaaga

SEQ ID NO: 1811468 - RNA, 19 nt, Artificial Sequence
  Description of Artificial Sequence: Synthetic oligonucleotide
  Antisense strand to SEQ ID NO: 1811467
ucuugcagacgguacuugc

SEQ ID NO: 1811469 - RNA, 19 nt, Artificial Sequence
  Description of Artificial Sequence: Synthetic oligonucleotide
  Sense strand starting at position 1863 of SEQ ID NO: 1563444
gcucgugucagggcuguaa

SEQ ID NO: 1811470 - RNA, 19 nt, Artificial Sequence
  Description of Artificial Sequence: Synthetic oligonucleotide
  Antisense strand to SEQ ID NO: 1811469
uuacagcccugacacgagc

SEQ ID NO: 1811471 - RNA, 19 nt, Artificial Sequence
  Description of Artificial Sequence: Synthetic oligonucleotide
  Sense strand starting at position 1867 of SEQ ID NO: 1563444
gugucagggcuguaaggua

SEQ ID NO: 1811472 - RNA, 19 nt, Artificial Sequence
  Description of Artificial Sequence: Synthetic oligonucleotide
  Antisense strand to SEQ ID NO: 1811471
uaccuuacagcccugacac

SEQ ID NO: 1811473 - RNA, 19 nt, Artificial Sequence
  Description of Artificial Sequence: Synthetic oligonucleotide
  Sense strand starting at position 1984 of SEQ ID NO: 1563444
guacgugugcgcguaauca

SEQ ID NO: 1811474 - RNA, 19 nt, Artificial Sequence
  Description of Artificial Sequence: Synthetic oligonucleotide
  Antisense strand to SEQ ID NO: 1811473
ugauuacgcgcacacguac

SEQ ID NO: 1811475 - RNA, 19 nt, Artificial Sequence
  Description of Artificial Sequence: Synthetic oligonucleotide
  Sense strand starting at position 1992 of SEQ ID NO: 1563444
gcgcguaaucacgcacgua

SEQ ID NO: 1811476 - RNA, 19 nt, Artificial Sequence
  Description of Artificial Sequence: Synthetic oligonucleotide
  Antisense strand to SEQ ID NO: 1811475
uacgugcgugauuacgcgc

SEQ ID NO: 1811477 - RNA, 19 nt, Artificial Sequence
  Description of Artificial Sequence: Synthetic oligonucleotide
  Sense strand starting at position 2936 of SEQ ID NO: 1563444
guuggaucgggcugagaga

SEQ ID NO: 1811478 - RNA, 19 nt, Artificial Sequence
  Description of Artificial Sequence: Synthetic oligonucleotide
  Antisense strand to SEQ ID NO: 1811477
ucucucagcccgauccaac

SEQ ID NO: 1811479 - RNA, 19 nt, Artificial Sequence
  Description of Artificial Sequence: Synthetic oligonucleotide
  Sense strand starting at position 3098 of SEQ ID NO: 1563444
gggucugagcgaagccauu

SEQ ID NO: 1811480 - RNA, 19 nt, Artificial Sequence
  Description of Artificial Sequence: Synthetic oligonucleotide
  Antisense strand to SEQ ID NO: 1811479
aauggcuucgcucagaccc

SEQ ID NO: 1811481 - RNA, 19 nt, Artificial Sequence
  Description of Artificial Sequence: Synthetic oligonucleotide
  Sense strand starting at position 3190 of SEQ ID NO: 1563444
gagagaaaccgcugaggau

SEQ ID NO: 1811482 - RNA, 19 nt, Artificial Sequence
  Description of Artificial Sequence: Synthetic oligonucleotide
  Antisense strand to SEQ ID NO: 1811481
auccucagcgguuucucuc

SEQ ID NO: 1811483 - RNA, 19 nt, Artificial Sequence
  Description of Artificial Sequence: Synthetic oligonucleotide
  Sense strand starting at position 3424 of SEQ ID NO: 1563444
guggaaucacgagaaagcu

SEQ ID NO: 1811484 - RNA, 19 nt, Artificial Sequence
  Description of Artificial Sequence: Synthetic oligonucleotide
  Antisense strand to SEQ ID NO: 1811483
agcuuucucgugauuccac

SEQ ID NO: 1811485 - RNA, 19 nt, Artificial Sequence
  Description of Artificial Sequence: Synthetic oligonucleotide
  Sense strand starting at position 3432 of SEQ ID NO: 1563444
acgagaaagcucuguggga

SEQ ID NO: 1811486 - RNA, 19 nt, Artificial Sequence
  Description of Artificial Sequence: Synthetic oligonucleotide
  Antisense strand to SEQ ID NO: 1811485
ucccacagagcuuucucgu

SEQ ID NO: 1811487 - RNA, 19 nt, Artificial Sequence
  Description of Artificial Sequence: Synthetic oligonucleotide
  Sense strand starting at position 3861 of SEQ ID NO: 1563444
ggcguaguugugggaaaga

SEQ ID NO: 1811488 - RNA, 19 nt, Artificial Sequence
  Description of Artificial Sequence: Synthetic oligonucleotide
  Antisense strand to SEQ ID NO: 1811487
ucuuucccacaacuacgcc

SEQ ID NO: 1811489 - RNA, 19 nt, Artificial Sequence
  Description of Artificial Sequence: Synthetic oligonucleotide
  Sense strand starting at position 3876 of SEQ ID NO: 1563444
aagagcugugggcggaaau

SEQ ID NO: 1811490 - RNA, 19 nt, Artificial Sequence
  Description of Artificial Sequence: Synthetic oligonucleotide
  Antisense strand to SEQ ID NO: 1811489
auuuccgcccacagcucuu

SEQ ID NO: 1811491 - RNA, 19 nt, Artificial Sequence
  Description of Artificial Sequence: Synthetic oligonucleotide
  Sense strand starting at position 11 of SEQ ID NO: 1563445
cugaauucuccacgacgca

SEQ ID NO: 1811492 - RNA, 19 nt, Artificial Sequence
  Description of Artificial Sequence: Synthetic oligonucleotide
  Antisense strand to SEQ ID NO: 1811491
ugcgucguggagaauucag

SEQ ID NO: 1811493 - RNA, 19 nt, Artificial Sequence
  Description of Artificial Sequence: Synthetic oligonucleotide
  Sense strand starting at position 144 of SEQ ID NO: 1563445
ggagacuccugagccuaau

SEQ ID NO: 1811494 - RNA, 19 nt, Artificial Sequence
  Description of Artificial Sequence: Synthetic oligonucleotide
  Antisense strand to SEQ ID NO: 1811493
auuaggcucaggagucucc

SEQ ID NO: 1811495 - RNA, 19 nt, Artificial Sequence
  Description of Artificial Sequence: Synthetic oligonucleotide
  Sense strand starting at position 912 of SEQ ID NO: 1563445
ccaucuuccuccucgaaag

SEQ ID NO: 1811496 - RNA, 19 nt, Artificial Sequence
  Description of Artificial Sequence: Synthetic oligonucleotide
  Antisense strand to SEQ ID NO: 1811495
cuuucgaggaggaagaugg

SEQ ID NO: 1811497 - RNA, 19 nt, Artificial Sequence
  Description of Artificial Sequence: Synthetic oligonucleotide
  Sense strand starting at position 1234 of SEQ ID NO: 1563445
gcugcucucaucugcggaa

SEQ ID NO: 1811498 - RNA, 19 nt, Artificial Sequence
  Description of Artificial Sequence: Synthetic oligonucleotide
  Antisense strand to SEQ ID NO: 1811497
uuccgcagaugagagcagc

SEQ ID NO: 1811499 - RNA, 19 nt, Artificial Sequence
  Description of Artificial Sequence: Synthetic oligonucleotide
  Sense strand starting at position 1235 of SEQ ID NO: 1563445
cugcucucaucugcggaau

SEQ ID NO: 1811500 - RNA, 19 nt, Artificial Sequence
  Description of Artificial Sequence: Synthetic oligonucleotide
  Antisense strand to SEQ ID NO: 1811499
auuccgcagaugagagcag

SEQ ID NO: 1811501 - RNA, 19 nt, Artificial Sequence
  Description of Artificial Sequence: Synthetic oligonucleotide
  Sense strand starting at position 1237 of SEQ ID NO: 1563445
gcucucaucugcggaauca

SEQ ID NO: 1811502 - RNA, 19 nt, Artificial Sequence
  Description of Artificial Sequence: Synthetic oligonucleotide
  Antisense strand to SEQ ID NO: 1811501
ugauuccgcagaugagagc

SEQ ID NO: 1811503 - RNA, 19 nt, Artificial Sequence
  Description of Artificial Sequence: Synthetic oligonucleotide
  Sense strand starting at position 1554 of SEQ ID NO: 1563445
guucgucagccagguagaa

SEQ ID NO: 1811504 - RNA, 19 nt, Artificial Sequence
  Description of Artificial Sequence: Synthetic oligonucleotide
  Antisense strand to SEQ ID NO: 1811503
uucuaccuggcugacgaac

SEQ ID NO: 1811505 - RNA, 19 nt, Artificial Sequence
  Description of Artificial Sequence: Synthetic oligonucleotide
  Sense strand starting at position 1568 of SEQ ID NO: 1563445
uagaaugaguaguccacaa

SEQ ID NO: 1811506 - RNA, 19 nt, Artificial Sequence
  Description of Artificial Sequence: Synthetic oligonucleotide
  Antisense strand to SEQ ID NO: 1811505
uuguggacuacucauucua

SEQ ID NO: 1811507 - RNA, 19 nt, Artificial Sequence
  Description of Artificial Sequence: Synthetic oligonucleotide
  Sense strand starting at position 2121 of SEQ ID NO: 1563445
cgaggugccugagcuuuaa

SEQ ID NO: 1811508 - RNA, 19 nt, Artificial Sequence
  Description of Artificial Sequence: Synthetic oligonucleotide
  Antisense strand to SEQ ID NO: 1811507
uuaaagcucaggcaccucg

SEQ ID NO: 1811509 - RNA, 19 nt, Artificial Sequence
  Description of Artificial Sequence: Synthetic oligonucleotide
  Sense strand starting at position 2125 of SEQ ID NO: 1563445
gugccugagcuuuaaccaa

SEQ ID NO: 1811510 - RNA, 19 nt, Artificial Sequence
  Description of Artificial Sequence: Synthetic oligonucleotide
  Antisense strand to SEQ ID NO: 1811509
uugguuaaagcucaggcac

SEQ ID NO: 1811511 - RNA, 19 nt, Artificial Sequence
  Description of Artificial Sequence: Synthetic oligonucleotide
  Sense strand starting at position 2418 of SEQ ID NO: 1563445
ggaggucucauuggaaagu

SEQ ID NO: 1811512 - RNA, 19 nt, Artificial Sequence
  Description of Artificial Sequence: Synthetic oligonucleotide
  Antisense strand to SEQ ID NO: 1811511
acuuuccaaugagaccucc

SEQ ID NO: 1811513 - RNA, 19 nt, Artificial Sequence
  Description of Artificial Sequence: Synthetic oligonucleotide
  Sense strand starting at position 2419 of SEQ ID NO: 1563445
gaggucucauuggaaagua

SEQ ID NO: 1811514 - RNA, 19 nt, Artificial Sequence
  Description of Artificial Sequence: Synthetic oligonucleotide
  Antisense strand to SEQ ID NO: 1811513
uacuuuccaaugagaccuc

SEQ ID NO: 1811515 - RNA, 19 nt, Artificial Sequence
  Description of Artificial Sequence: Synthetic oligonucleotide
  Sense strand starting at position 2567 of SEQ ID NO: 1563445
cuguguuccgauugguuaa

SEQ ID NO: 1811516 - RNA, 19 nt, Artificial Sequence
  Description of Artificial Sequence: Synthetic oligonucleotide
  Antisense strand to SEQ ID NO: 1811515
uuaaccaaucggaacacag

SEQ ID NO: 1811517 - RNA, 19 nt, Artificial Sequence
  Description of Artificial Sequence: Synthetic oligonucleotide
  Sense strand starting at position 2568 of SEQ ID NO: 1563445
uguguuccgauugguuaaa

SEQ ID NO: 1811518 - RNA, 19 nt, Artificial Sequence
  Description of Artificial Sequence: Synthetic oligonucleotide
  Antisense strand to SEQ ID NO: 1811517
uuuaaccaaucggaacaca

SEQ ID NO: 1811519 - RNA, 19 nt, Artificial Sequence
  Description of Artificial Sequence: Synthetic oligonucleotide
  Sense strand starting at position 3337 of SEQ ID NO: 1563445
caggguugcccucggguaa

SEQ ID NO: 1811520 - RNA, 19 nt, Artificial Sequence
  Description of Artificial Sequence: Synthetic oligonucleotide
  Antisense strand to SEQ ID NO: 1811519
uuacccgagggcaacccug

SEQ ID NO: 1811521 - RNA, 19 nt, Artificial Sequence
  Description of Artificial Sequence: Synthetic oligonucleotide
  Sense strand starting at position 3338 of SEQ ID NO: 1563445
aggguugcccucggguaau

SEQ ID NO: 1811522 - RNA, 19 nt, Artificial Sequence
  Description of Artificial Sequence: Synthetic oligonucleotide
  Antisense strand to SEQ ID NO: 1811521
auuacccgagggcaacccu

SEQ ID NO: 1811523 - RNA, 19 nt, Artificial Sequence
  Description of Artificial Sequence: Synthetic oligonucleotide
  Sense strand starting at position 3374 of SEQ ID NO: 1563445
gaaauagaaguccacguua

SEQ ID NO: 1811524 - RNA, 19 nt, Artificial Sequence
  Description of Artificial Sequence: Synthetic oligonucleotide
  Antisense strand to SEQ ID NO: 1811523
uaacguggacuucuauuuc

SEQ ID NO: 1811525 - RNA, 19 nt, Artificial Sequence
  Description of Artificial Sequence: Synthetic oligonucleotide
  Sense strand starting at position 3376 of SEQ ID NO: 1563445
aauagaaguccacguuaga

SEQ ID NO: 1811526 - RNA, 19 nt, Artificial Sequence
  Description of Artificial Sequence: Synthetic oligonucleotide
  Antisense strand to SEQ ID NO: 1811525
ucuaacguggacuucuauu

SEQ ID NO: 1811527 - RNA, 19 nt, Artificial Sequence
  Description of Artificial Sequence: Synthetic oligonucleotide
  Sense strand starting at position 3920 of SEQ ID NO: 1563445
uucucuuaggaggguuaga

SEQ ID NO: 1811528 - RNA, 19 nt, Artificial Sequence
  Description of Artificial Sequence: Synthetic oligonucleotide
  Antisense strand to SEQ ID NO: 1811527
ucuaacccuccuaagagaa

SEQ ID NO: 1811529 - RNA, 19 nt, Artificial Sequence
  Description of Artificial Sequence: Synthetic oligonucleotide
  Sense strand starting at position 3936 of SEQ ID NO: 1563445
agagauaccgcauguguuu

SEQ ID NO: 1811530 - RNA, 19 nt, Artificial Sequence
  Description of Artificial Sequence: Synthetic oligonucleotide
  Antisense strand to SEQ ID NO: 1811529
aaacacaugcgguaucucu

SEQ ID NO: 1811531 - RNA, 19 nt, Artificial Sequence
  Description of Artificial Sequence: Synthetic oligonucleotide
  Sense strand starting at position 145 of SEQ ID NO: 1563446
ggagacuccugagccuaau

SEQ ID NO: 1811532 - RNA, 19 nt, Artificial Sequence
  Description of Artificial Sequence: Synthetic oligonucleotide
  Antisense strand to SEQ ID NO: 1811531
auuaggcucaggagucucc

SEQ ID NO: 1811533 - RNA, 19 nt, Artificial Sequence
  Description of Artificial Sequence: Synthetic oligonucleotide
  Sense strand starting at position 298 of SEQ ID NO: 1563446
ggaaguugaugagccuaga

SEQ ID NO: 1811534 - RNA, 19 nt, Artificial Sequence
  Description of Artificial Sequence: Synthetic oligonucleotide
  Antisense strand to SEQ ID NO: 1811533
ucuaggcucaucaacuucc

SEQ ID NO: 1811535 - RNA, 19 nt, Artificial Sequence
  Description of Artificial Sequence: Synthetic oligonucleotide
  Sense strand starting at position 566 of SEQ ID NO: 1563446
acaggugugugcuggaaga

SEQ ID NO: 1811536 - RNA, 19 nt, Artificial Sequence
  Description of Artificial Sequence: Synthetic oligonucleotide
  Antisense strand to SEQ ID NO: 1811535
ucuuccagcacacaccugu

SEQ ID NO: 1811537 - RNA, 19 nt, Artificial Sequence
  Description of Artificial Sequence: Synthetic oligonucleotide
  Sense strand starting at position 568 of SEQ ID NO: 1563446
aggugugugcuggaagaga

SEQ ID NO: 1811538 - RNA, 19 nt, Artificial Sequence
  Description of Artificial Sequence: Synthetic oligonucleotide
  Antisense strand to SEQ ID NO: 1811537
ucucuuccagcacacaccu

SEQ ID NO: 1811539 - RNA, 19 nt, Artificial Sequence
  Description of Artificial Sequence: Synthetic oligonucleotide
  Sense strand starting at position 2122 of SEQ ID NO: 1563446
cgaggugccugagcuuuaa

SEQ ID NO: 1811540 - RNA, 19 nt, Artificial Sequence
  Description of Artificial Sequence: Synthetic oligonucleotide
  Antisense strand to SEQ ID NO: 1811539
uuaaagcucaggcaccucg

SEQ ID NO: 1811541 - RNA, 19 nt, Artificial Sequence
  Description of Artificial Sequence: Synthetic oligonucleotide
  Sense strand starting at position 2126 of SEQ ID NO: 1563446
gugccugagcuuuaaccaa

SEQ ID NO: 1811542 - RNA, 19 nt, Artificial Sequence
  Description of Artificial Sequence: Synthetic oligonucleotide
  Antisense strand to SEQ ID NO: 1811541
uugguuaaagcucaggcac

SEQ ID NO: 1811543 - RNA, 19 nt, Artificial Sequence
  Description of Artificial Sequence: Synthetic oligonucleotide
  Sense strand starting at position 2376 of SEQ ID NO: 1563446
gagaguaaaugucgugaug

SEQ ID NO: 1811544 - RNA, 19 nt, Artificial Sequence
  Description of Artificial Sequence: Synthetic oligonucleotide
  Antisense strand to SEQ ID NO: 1811543
caucacgacauuuacucuc

SEQ ID NO: 1811545 - RNA, 19 nt, Artificial Sequence
  Description of Artificial Sequence: Synthetic oligonucleotide
  Sense strand starting at position 2378 of SEQ ID NO: 1563446
gaguaaaugucgugaugca

SEQ ID NO: 1811546 - RNA, 19 nt, Artificial Sequence
  Description of Artificial Sequence: Synthetic oligonucleotide
  Antisense strand to SEQ ID NO: 1811545
ugcaucacgacauuuacuc

SEQ ID NO: 1811547 - RNA, 19 nt, Artificial Sequence
  Description of Artificial Sequence: Synthetic oligonucleotide
  Sense strand starting at position 2379 of SEQ ID NO: 1563446
aguaaaugucgugaugcac

SEQ ID NO: 1811548 - RNA, 19 nt, Artificial Sequence
  Description of Artificial Sequence: Synthetic oligonucleotide
  Antisense strand to SEQ ID NO: 1811547
gugcaucacgacauuuacu

SEQ ID NO: 1811549 - RNA, 19 nt, Artificial Sequence
  Description of Artificial Sequence: Synthetic oligonucleotide
  Sense strand starting at position 2419 of SEQ ID NO: 1563446
ggaggucucauuggaaagu

SEQ ID NO: 1811550 - RNA, 19 nt, Artificial Sequence
  Description of Artificial Sequence: Synthetic oligonucleotide
  Antisense strand to SEQ ID NO: 1811549
acuuuccaaugagaccucc

SEQ ID NO: 1811551 - RNA, 19 nt, Artificial Sequence
  Description of Artificial Sequence: Synthetic oligonucleotide
  Sense strand starting at position 2420 of SEQ ID NO: 1563446
gaggucucauuggaaagua

SEQ ID NO: 1811552 - RNA, 19 nt, Artificial Sequence
  Description of Artificial Sequence: Synthetic oligonucleotide
  Antisense strand to SEQ ID NO: 1811551
uacuuuccaaugagaccuc

SEQ ID NO: 1811553 - RNA, 19 nt, Artificial Sequence
  Description of Artificial Sequence: Synthetic oligonucleotide
  Sense strand starting at position 2568 of SEQ ID NO: 1563446
cuguguuccgauugguuaa

SEQ ID NO: 1811554 - RNA, 19 nt, Artificial Sequence
  Description of Artificial Sequence: Synthetic oligonucleotide
  Antisense strand to SEQ ID NO: 1811553
uuaaccaaucggaacacag

SEQ ID NO: 1811555 - RNA, 19 nt, Artificial Sequence
  Description of Artificial Sequence: Synthetic oligonucleotide
  Sense strand starting at position 2569 of SEQ ID NO: 1563446
uguguuccgauugguuaaa

SEQ ID NO: 1811556 - RNA, 19 nt, Artificial Sequence
  Description of Artificial Sequence: Synthetic oligonucleotide
  Antisense strand to SEQ ID NO: 1811555
uuuaaccaaucggaacaca

SEQ ID NO: 1811557 - RNA, 19 nt, Artificial Sequence
  Description of Artificial Sequence: Synthetic oligonucleotide
  Sense strand starting at position 3338 of SEQ ID NO: 1563446
caggguugcccucggguaa

SEQ ID NO: 1811558 - RNA, 19 nt, Artificial Sequence
  Description of Artificial Sequence: Synthetic oligonucleotide
  Antisense strand to SEQ ID NO: 1811557
uuacccgagggcaacccug

SEQ ID NO: 1811559 - RNA, 19 nt, Artificial Sequence
  Description of Artificial Sequence: Synthetic oligonucleotide
  Sense strand starting at position 3339 of SEQ ID NO: 1563446
aggguugcccucggguaau

SEQ ID NO: 1811560 - RNA, 19 nt, Artificial Sequence
  Description of Artificial Sequence: Synthetic oligonucleotide
  Antisense strand to SEQ ID NO: 1811559
auuacccgagggcaacccu

SEQ ID NO: 1811561 - RNA, 19 nt, Artificial Sequence
  Description of Artificial Sequence: Synthetic oligonucleotide
  Sense strand starting at position 3375 of SEQ ID NO: 1563446
gaaauagaaguccacguua

SEQ ID NO: 1811562 - RNA, 19 nt, Artificial Sequence
  Description of Artificial Sequence: Synthetic oligonucleotide
  Antisense strand to SEQ ID NO: 1811561
uaacguggacuucuauuuc

SEQ ID NO: 1811563 - RNA, 19 nt, Artificial Sequence
  Description of Artificial Sequence: Synthetic oligonucleotide
  Sense strand starting at position 3377 of SEQ ID NO: 1563446
aauagaaguccacguuaga

SEQ ID NO: 1811564 - RNA, 19 nt, Artificial Sequence
  Description of Artificial Sequence: Synthetic oligonucleotide
  Antisense strand to SEQ ID NO: 1811563
ucuaacguggacuucuauu

SEQ ID NO: 1811565 - RNA, 19 nt, Artificial Sequence
  Description of Artificial Sequence: Synthetic oligonucleotide
  Sense strand starting at position 3921 of SEQ ID NO: 1563446
uucucuuaggaggguuaga

SEQ ID NO: 1811566 - RNA, 19 nt, Artificial Sequence
  Description of Artificial Sequence: Synthetic oligonucleotide
  Antisense strand to SEQ ID NO: 1811565
ucuaacccuccuaagagaa

SEQ ID NO: 1811567 - RNA, 19 nt, Artificial Sequence
  Description of Artificial Sequence: Synthetic oligonucleotide
  Sense strand starting at position 3937 of SEQ ID NO: 1563446
agagauaccgcauguguuu

SEQ ID NO: 1811568 - RNA, 19 nt, Artificial Sequence
  Description of Artificial Sequence: Synthetic oligonucleotide
  Antisense strand to SEQ ID NO: 1811567
aaacacaugcgguaucucu

SEQ ID NO: 1811569 - RNA, 19 nt, Artificial Sequence
  Description of Artificial Sequence: Synthetic oligonucleotide
  Sense strand starting at position 11 of SEQ ID NO: 1563447
cugaauucuccacgacgca

SEQ ID NO: 1811570 - RNA, 19 nt, Artificial Sequence
  Description of Artificial Sequence: Synthetic oligonucleotide
  Antisense strand to SEQ ID NO: 1811569
ugcgucguggagaauucag

SEQ ID NO: 1811571 - RNA, 19 nt, Artificial Sequence
  Description of Artificial Sequence: Synthetic oligonucleotide
  Sense strand starting at position 144 of SEQ ID NO: 1563447
ggagacuccugagccuaau

SEQ ID NO: 1811572 - RNA, 19 nt, Artificial Sequence
  Description of Artificial Sequence: Synthetic oligonucleotide
  Antisense strand to SEQ ID NO: 1811571
auuaggcucaggagucucc

SEQ ID NO: 1811573 - RNA, 19 nt, Artificial Sequence
  Description of Artificial Sequence: Synthetic oligonucleotide
  Sense strand starting at position 912 of SEQ ID NO: 1563447
ccaucuuccuccucgaaag

SEQ ID NO: 1811574 - RNA, 19 nt, Artificial Sequence
  Description of Artificial Sequence: Synthetic oligonucleotide
  Antisense strand to SEQ ID NO: 1811573
cuuucgaggaggaagaugg

SEQ ID NO: 1811575 - RNA, 19 nt, Artificial Sequence
  Description of Artificial Sequence: Synthetic oligonucleotide
  Sense strand starting at position 1234 of SEQ ID NO: 1563447
gcugcucucaucugcggaa

SEQ ID NO: 1811576 - RNA, 19 nt, Artificial Sequence
  Description of Artificial Sequence: Synthetic oligonucleotide
  Antisense strand to SEQ ID NO: 1811575
uuccgcagaugagagcagc

SEQ ID NO: 1811577 - RNA, 19 nt, Artificial Sequence
  Description of Artificial Sequence: Synthetic oligonucleotide
  Sense strand starting at position 1235 of SEQ ID NO: 1563447
cugcucucaucugcggaau

SEQ ID NO: 1811578 - RNA, 19 nt, Artificial Sequence
  Description of Artificial Sequence: Synthetic oligonucleotide
  Antisense strand to SEQ ID NO: 1811577
auuccgcagaugagagcag

SEQ ID NO: 1811579 - RNA, 19 nt, Artificial Sequence
  Description of Artificial Sequence: Synthetic oligonucleotide
  Sense strand starting at position 1237 of SEQ ID NO: 1563447
gcucucaucugcggaauca

SEQ ID NO: 1811580 - RNA, 19 nt, Artificial Sequence
  Description of Artificial Sequence: Synthetic oligonucleotide
  Antisense strand to SEQ ID NO: 1811579
ugauuccgcagaugagagc

SEQ ID NO: 1811581 - RNA, 19 nt, Artificial Sequence
  Description of Artificial Sequence: Synthetic oligonucleotide
  Sense strand starting at position 1554 of SEQ ID NO: 1563447
guucgucagccagguagaa

SEQ ID NO: 1811582 - RNA, 19 nt, Artificial Sequence
  Description of Artificial Sequence: Synthetic oligonucleotide
  Antisense strand to SEQ ID NO: 1811581
uucuaccuggcugacgaac

SEQ ID NO: 1811583 - RNA, 19 nt, Artificial Sequence
  Description of Artificial Sequence: Synthetic oligonucleotide
  Sense strand starting at position 1568 of SEQ ID NO: 1563447
uagaaugaguaguccacaa

SEQ ID NO: 1811584 - RNA, 19 nt, Artificial Sequence
  Description of Artificial Sequence: Synthetic oligonucleotide
  Antisense strand to SEQ ID NO: 1811583
uuguggacuacucauucua

SEQ ID NO: 1811585 - RNA, 19 nt, Artificial Sequence
  Description of Artificial Sequence: Synthetic oligonucleotide
  Sense strand starting at position 2121 of SEQ ID NO: 1563447
cgaggugccugagcuuuaa

SEQ ID NO: 1811586 - RNA, 19 nt, Artificial Sequence
  Description of Artificial Sequence: Synthetic oligonucleotide
  Antisense strand to SEQ ID NO: 1811585
uuaaagcucaggcaccucg

SEQ ID NO: 1811587 - RNA, 19 nt, Artificial Sequence
  Description of Artificial Sequence: Synthetic oligonucleotide
  Sense strand starting at position 2125 of SEQ ID NO: 1563447
gugccugagcuuuaaccaa

SEQ ID NO: 1811588 - RNA, 19 nt, Artificial Sequence
  Description of Artificial Sequence: Synthetic oligonucleotide
  Antisense strand to SEQ ID NO: 1811587
uugguuaaagcucaggcac

SEQ ID NO: 1811589 - RNA, 19 nt, Artificial Sequence
  Description of Artificial Sequence: Synthetic oligonucleotide
  Sense strand starting at position 2418 of SEQ ID NO: 1563447
ggaggucucauuggaaagu

SEQ ID NO: 1811590 - RNA, 19 nt, Artificial Sequence
  Description of Artificial Sequence: Synthetic oligonucleotide
  Antisense strand to SEQ ID NO: 1811589
acuuuccaaugagaccucc

SEQ ID NO: 1811591 - RNA, 19 nt, Artificial Sequence
  Description of Artificial Sequence: Synthetic oligonucleotide
  Sense strand starting at position 2419 of SEQ ID NO: 1563447
gaggucucauuggaaagua

SEQ ID NO: 1811592 - RNA, 19 nt, Artificial Sequence
  Description of Artificial Sequence: Synthetic oligonucleotide
  Antisense strand to SEQ ID NO: 1811591
uacuuuccaaugagaccuc

SEQ ID NO: 1811593 - RNA, 19 nt, Artificial Sequence
  Description of Artificial Sequence: Synthetic oligonucleotide
  Sense strand starting at position 2567 of SEQ ID NO: 1563447
cuguguuccgauugguuaa

SEQ ID NO: 1811594 - RNA, 19 nt, Artificial Sequence
  Description of Artificial Sequence: Synthetic oligonucleotide
  Antisense strand to SEQ ID NO: 1811593
uuaaccaaucggaacacag

SEQ ID NO: 1811595 - RNA, 19 nt, Artificial Sequence
  Description of Artificial Sequence: Synthetic oligonucleotide
  Sense strand starting at position 2568 of SEQ ID NO: 1563447
uguguuccgauugguuaaa

SEQ ID NO: 1811596 - RNA, 19 nt, Artificial Sequence
  Description of Artificial Sequence: Synthetic oligonucleotide
  Antisense strand to SEQ ID NO: 1811595
uuuaaccaaucggaacaca

SEQ ID NO: 1811597 - RNA, 19 nt, Artificial Sequence
  Description of Artificial Sequence: Synthetic oligonucleotide
  Sense strand starting at position 3337 of SEQ ID NO: 1563447
caggguugcccucggguaa

SEQ ID NO: 1811598 - RNA, 19 nt, Artificial Sequence
  Description of Artificial Sequence: Synthetic oligonucleotide
  Antisense strand to SEQ ID NO: 1811597
uuacccgagggcaacccug

SEQ ID NO: 1811599 - RNA, 19 nt, Artificial Sequence
  Description of Artificial Sequence: Synthetic oligonucleotide
  Sense strand starting at position 3338 of SEQ ID NO: 1563447
aggguugcccucggguaau

SEQ ID NO: 1811600 - RNA, 19 nt, Artificial Sequence
  Description of Artificial Sequence: Synthetic oligonucleotide
  Antisense strand to SEQ ID NO: 1811599
auuacccgagggcaacccu

SEQ ID NO: 1811601 - RNA, 19 nt, Artificial Sequence
  Description of Artificial Sequence: Synthetic oligonucleotide
  Sense strand starting at position 3374 of SEQ ID NO: 1563447
gaaauagaaguccacguua

SEQ ID NO: 1811602 - RNA, 19 nt, Artificial Sequence
  Description of Artificial Sequence: Synthetic oligonucleotide
  Antisense strand to SEQ ID NO: 1811601
uaacguggacuucuauuuc

SEQ ID NO: 1811603 - RNA, 19 nt, Artificial Sequence
  Description of Artificial Sequence: Synthetic oligonucleotide
  Sense strand starting at position 3376 of SEQ ID NO: 1563447
aauagaaguccacguuaga

SEQ ID NO: 1811604 - RNA, 19 nt, Artificial Sequence
  Description of Artificial Sequence: Synthetic oligonucleotide
  Antisense strand to SEQ ID NO: 1811603
ucuaacguggacuucuauu

SEQ ID NO: 1811605 - RNA, 19 nt, Artificial Sequence
  Description of Artificial Sequence: Synthetic oligonucleotide
  Sense strand starting at position 3920 of SEQ ID NO: 1563447
uucucuuaggaggguuaga

SEQ ID NO: 1811606 - RNA, 19 nt, Artificial Sequence
  Description of Artificial Sequence: Synthetic oligonucleotide
  Antisense strand to SEQ ID NO: 1811605
ucuaacccuccuaagagaa

SEQ ID NO: 1811607 - RNA, 19 nt, Artificial Sequence
  Description of Artificial Sequence: Synthetic oligonucleotide
  Sense strand starting at position 3936 of SEQ ID NO: 1563447
agagauaccgcauguguuu

SEQ ID NO: 1811608 - RNA, 19 nt, Artificial Sequence
  Description of Artificial Sequence: Synthetic oligonucleotide
  Antisense strand to SEQ ID NO: 1811607
aaacacaugcgguaucucu

SEQ ID NO: 1811609 - RNA, 19 nt, Artificial Sequence
  Description of Artificial Sequence: Synthetic oligonucleotide
  Sense strand starting at position 145 of SEQ ID NO: 1563448
ggagacuccugagccuaau

SEQ ID NO: 1811610 - RNA, 19 nt, Artificial Sequence
  Description of Artificial Sequence: Synthetic oligonucleotide
  Antisense strand to SEQ ID NO: 1811609
auuaggcucaggagucucc

SEQ ID NO: 1811611 - RNA, 19 nt, Artificial Sequence
  Description of Artificial Sequence: Synthetic oligonucleotide
  Sense strand starting at position 298 of SEQ ID NO: 1563448
ggaaguugaugagccuaga

SEQ ID NO: 1811612 - RNA, 19 nt, Artificial Sequence
  Description of Artificial Sequence: Synthetic oligonucleotide
  Antisense strand to SEQ ID NO: 1811611
ucuaggcucaucaacuucc

SEQ ID NO: 1811613 - RNA, 19 nt, Artificial Sequence
  Description of Artificial Sequence: Synthetic oligonucleotide
  Sense strand starting at position 566 of SEQ ID NO: 1563448
acaggugugugcuggaaga

SEQ ID NO: 1811614 - RNA, 19 nt, Artificial Sequence
  Description of Artificial Sequence: Synthetic oligonucleotide
  Antisense strand to SEQ ID NO: 1811613
ucuuccagcacacaccugu

SEQ ID NO: 1811615 - RNA, 19 nt, Artificial Sequence
  Description of Artificial Sequence: Synthetic oligonucleotide
  Sense strand starting at position 568 of SEQ ID NO: 1563448
aggugugugcuggaagaga

SEQ ID NO: 1811616 - RNA, 19 nt, Artificial Sequence
  Description of Artificial Sequence: Synthetic oligonucleotide
  Antisense strand to SEQ ID NO: 1811615
ucucuuccagcacacaccu

SEQ ID NO: 1811617 - RNA, 19 nt, Artificial Sequence
  Description of Artificial Sequence: Synthetic oligonucleotide
  Sense strand starting at position 2122 of SEQ ID NO: 1563448
cgaggugccugagcuuuaa

SEQ ID NO: 1811618 - RNA, 19 nt, Artificial Sequence
  Description of Artificial Sequence: Synthetic oligonucleotide
  Antisense strand to SEQ ID NO: 1811617
uuaaagcucaggcaccucg

SEQ ID NO: 1811619 - RNA, 19 nt, Artificial Sequence
  Description of Artificial Sequence: Synthetic oligonucleotide
  Sense strand starting at position 2126 of SEQ ID NO: 1563448
gugccugagcuuuaaccaa

SEQ ID NO: 1811620 - RNA, 19 nt, Artificial Sequence
  Description of Artificial Sequence: Synthetic oligonucleotide
  Antisense strand to SEQ ID NO: 1811619
uugguuaaagcucaggcac

SEQ ID NO: 1811621 - RNA, 19 nt, Artificial Sequence
  Description of Artificial Sequence: Synthetic oligonucleotide
  Sense strand starting at position 2376 of SEQ ID NO: 1563448
gagaguaaaugucgugaug

SEQ ID NO: 1811622 - RNA, 19 nt, Artificial Sequence
  Description of Artificial Sequence: Synthetic oligonucleotide
  Antisense strand to SEQ ID NO: 1811621
caucacgacauuuacucuc

SEQ ID NO: 1811623 - RNA, 19 nt, Artificial Sequence
  Description of Artificial Sequence: Synthetic oligonucleotide
  Sense strand starting at position 2378 of SEQ ID NO: 1563448
gaguaaaugucgugaugca

SEQ ID NO: 1811624 - RNA, 19 nt, Artificial Sequence
  Description of Artificial Sequence: Synthetic oligonucleotide
  Antisense strand to SEQ ID NO: 1811623
ugcaucacgacauuuacuc

SEQ ID NO: 1811625 - RNA, 19 nt, Artificial Sequence
  Description of Artificial Sequence: Synthetic oligonucleotide
  Sense strand starting at position 2379 of SEQ ID NO: 1563448
aguaaaugucgugaugcac

SEQ ID NO: 1811626 - RNA, 19 nt, Artificial Sequence
  Description of Artificial Sequence: Synthetic oligonucleotide
  Antisense strand to SEQ ID NO: 1811625
gugcaucacgacauuuacu

SEQ ID NO: 1811627 - RNA, 19 nt, Artificial Sequence
  Description of Artificial Sequence: Synthetic oligonucleotide
  Sense strand starting at position 2419 of SEQ ID NO: 1563448
ggaggucucauuggaaagu

SEQ ID NO: 1811628 - RNA, 19 nt, Artificial Sequence
  Description of Artificial Sequence: Synthetic oligonucleotide
  Antisense strand to SEQ ID NO: 1811627
acuuuccaaugagaccucc

SEQ ID NO: 1811629 - RNA, 19 nt, Artificial Sequence
  Description of Artificial Sequence: Synthetic oligonucleotide
  Sense strand starting at position 2420 of SEQ ID NO: 1563448
gaggucucauuggaaagua

SEQ ID NO: 1811630 - RNA, 19 nt, Artificial Sequence
  Description of Artificial Sequence: Synthetic oligonucleotide
  Antisense strand to SEQ ID NO: 1811629
uacuuuccaaugagaccuc

SEQ ID NO: 1811631 - RNA, 19 nt, Artificial Sequence
  Description of Artificial Sequence: Synthetic oligonucleotide
  Sense strand starting at position 2568 of SEQ ID NO: 1563448
cuguguuccgauugguuaa

SEQ ID NO: 1811632 - RNA, 19 nt, Artificial Sequence
  Description of Artificial Sequence: Synthetic oligonucleotide
  Antisense strand to SEQ ID NO: 1811631
uuaaccaaucggaacacag

SEQ ID NO: 1811633 - RNA, 19 nt, Artificial Sequence
  Description of Artificial Sequence: Synthetic oligonucleotide
  Sense strand starting at position 2569 of SEQ ID NO: 1563448
uguguuccgauugguuaaa

SEQ ID NO: 1811634 - RNA, 19 nt, Artificial Sequence
  Description of Artificial Sequence: Synthetic oligonucleotide
  Antisense strand to SEQ ID NO: 1811633
uuuaaccaaucggaacaca

SEQ ID NO: 1811635 - RNA, 19 nt, Artificial Sequence
  Description of Artificial Sequence: Synthetic oligonucleotide
  Sense strand starting at position 3338 of SEQ ID NO: 1563448
caggguugcccucggguaa

SEQ ID NO: 1811636 - RNA, 19 nt, Artificial Sequence
  Description of Artificial Sequence: Synthetic oligonucleotide
  Antisense strand to SEQ ID NO: 1811635
uuacccgagggcaacccug

SEQ ID NO: 1811637 - RNA, 19 nt, Artificial Sequence
  Description of Artificial Sequence: Synthetic oligonucleotide
  Sense strand starting at position 3339 of SEQ ID NO: 1563448
aggguugcccucggguaau

SEQ ID NO: 1811638 - RNA, 19 nt, Artificial Sequence
  Description of Artificial Sequence: Synthetic oligonucleotide
  Antisense strand to SEQ ID NO: 1811637
auuacccgagggcaacccu

SEQ ID NO: 1811639 - RNA, 19 nt, Artificial Sequence
  Description of Artificial Sequence: Synthetic oligonucleotide
  Sense strand starting at position 3375 of SEQ ID NO: 1563448
gaaauagaaguccacguua

SEQ ID NO: 1811640 - RNA, 19 nt, Artificial Sequence
  Description of Artificial Sequence: Synthetic oligonucleotide
  Antisense strand to SEQ ID NO: 1811639
uaacguggacuucuauuuc

SEQ ID NO: 1811641 - RNA, 19 nt, Artificial Sequence
  Description of Artificial Sequence: Synthetic oligonucleotide
  Sense strand starting at position 3377 of SEQ ID NO: 1563448
aauagaaguccacguuaga

SEQ ID NO: 1811642 - RNA, 19 nt, Artificial Sequence
  Description of Artificial Sequence: Synthetic oligonucleotide
  Antisense strand to SEQ ID NO: 1811641
ucuaacguggacuucuauu

SEQ ID NO: 1811643 - RNA, 19 nt, Artificial Sequence
  Description of Artificial Sequence: Synthetic oligonucleotide
  Sense strand starting at position 3921 of SEQ ID NO: 1563448
uucucuuaggaggguuaga

SEQ ID NO: 1811644 - RNA, 19 nt, Artificial Sequence
  Description of Artificial Sequence: Synthetic oligonucleotide
  Antisense strand to SEQ ID NO: 1811643
ucuaacccuccuaagagaa

SEQ ID NO: 1811645 - RNA, 19 nt, Artificial Sequence
  Description of Artificial Sequence: Synthetic oligonucleotide
  Sense strand starting at position 3937 of SEQ ID NO: 1563448
agagauaccgcauguguuu

SEQ ID NO: 1811646 - RNA, 19 nt, Artificial Sequence
  Description of Artificial Sequence: Synthetic oligonucleotide
  Antisense strand to SEQ ID NO: 1811645
aaacacaugcgguaucucu

SEQ ID NO: 1811647 - RNA, 19 nt, Artificial Sequence
  Description of Artificial Sequence: Synthetic oligonucleotide
  Sense strand starting at position 148 of SEQ ID NO: 1563449
aggagcuugcuuuagaaag

SEQ ID NO: 1811648 - RNA, 19 nt, Artificial Sequence
  Description of Artificial Sequence: Synthetic oligonucleotide
  Antisense strand to SEQ ID NO: 1811647
cuuucuaaagcaagcuccu

SEQ ID NO: 1811649 - RNA, 19 nt, Artificial Sequence
  Description of Artificial Sequence: Synthetic oligonucleotide
  Sense strand starting at position 224 of SEQ ID NO: 1563449
cugcaugaauuuccuugua

SEQ ID NO: 1811650 - RNA, 19 nt, Artificial Sequence
  Description of Artificial Sequence: Synthetic oligonucleotide
  Antisense strand to SEQ ID NO: 1811649
uacaaggaaauucaugcag

SEQ ID NO: 1811651 - RNA, 19 nt, Artificial Sequence
  Description of Artificial Sequence: Synthetic oligonucleotide
  Sense strand starting at position 379 of SEQ ID NO: 1563449
aggaaagauaguuguucua

SEQ ID NO: 1811652 - RNA, 19 nt, Artificial Sequence
  Description of Artificial Sequence: Synthetic oligonucleotide
  Antisense strand to SEQ ID NO: 1811651
uagaacaacuaucuuuccu

SEQ ID NO: 1811653 - RNA, 19 nt, Artificial Sequence
  Description of Artificial Sequence: Synthetic oligonucleotide
  Sense strand starting at position 381 of SEQ ID NO: 1563449
gaaagauaguuguucuaag

SEQ ID NO: 1811654 - RNA, 19 nt, Artificial Sequence
  Description of Artificial Sequence: Synthetic oligonucleotide
  Antisense strand to SEQ ID NO: 1811653
cuuagaacaacuaucuuuc

SEQ ID NO: 1811655 - RNA, 19 nt, Artificial Sequence
  Description of Artificial Sequence: Synthetic oligonucleotide
  Sense strand starting at position 382 of SEQ ID NO: 1563449
aaagauaguuguucuaaga

SEQ ID NO: 1811656 - RNA, 19 nt, Artificial Sequence
  Description of Artificial Sequence: Synthetic oligonucleotide
  Antisense strand to SEQ ID NO: 1811655
ucuuagaacaacuaucuuu

SEQ ID NO: 1811657 - RNA, 19 nt, Artificial Sequence
  Description of Artificial Sequence: Synthetic oligonucleotide
  Sense strand starting at position 705 of SEQ ID NO: 1563449
augauauucucuuuaggga

SEQ ID NO: 1811658 - RNA, 19 nt, Artificial Sequence
  Description of Artificial Sequence: Synthetic oligonucleotide
  Antisense strand to SEQ ID NO: 1811657
ucccuaaagagaauaucau

SEQ ID NO: 1811659 - RNA, 19 nt, Artificial Sequence
  Description of Artificial Sequence: Synthetic oligonucleotide
  Sense strand starting at position 960 of SEQ ID NO: 1563449
agggcauuuaguugcuuau

SEQ ID NO: 1811660 - RNA, 19 nt, Artificial Sequence
  Description of Artificial Sequence: Synthetic oligonucleotide
  Antisense strand to SEQ ID NO: 1811659
auaagcaacuaaaugcccu

SEQ ID NO: 1811661 - RNA, 19 nt, Artificial Sequence
  Description of Artificial Sequence: Synthetic oligonucleotide
  Sense strand starting at position 1364 of SEQ ID NO: 1563449
agagacauauccuuucgau

SEQ ID NO: 1811662 - RNA, 19 nt, Artificial Sequence
  Description of Artificial Sequence: Synthetic oligonucleotide
  Antisense strand to SEQ ID NO: 1811661
aucgaaaggauaugucucu

SEQ ID NO: 1811663 - RNA, 19 nt, Artificial Sequence
  Description of Artificial Sequence: Synthetic oligonucleotide
  Sense strand starting at position 1775 of SEQ ID NO: 1563449
guuugagugaggcaaggaa

SEQ ID NO: 1811664 - RNA, 19 nt, Artificial Sequence
  Description of Artificial Sequence: Synthetic oligonucleotide
  Antisense strand to SEQ ID NO: 1811663
uuccuugccucacucaaac

SEQ ID NO: 1811665 - RNA, 19 nt, Artificial Sequence
  Description of Artificial Sequence: Synthetic oligonucleotide
  Sense strand starting at position 1849 of SEQ ID NO: 1563449
gggaucaucucaccuuaac

SEQ ID NO: 1811666 - RNA, 19 nt, Artificial Sequence
  Description of Artificial Sequence: Synthetic oligonucleotide
  Antisense strand to SEQ ID NO: 1811665
guuaaggugagaugauccc

SEQ ID NO: 1811667 - RNA, 19 nt, Artificial Sequence
  Description of Artificial Sequence: Synthetic oligonucleotide
  Sense strand starting at position 2192 of SEQ ID NO: 1563449
gggagucuuagucaucaga

SEQ ID NO: 1811668 - RNA, 19 nt, Artificial Sequence
  Description of Artificial Sequence: Synthetic oligonucleotide
  Antisense strand to SEQ ID NO: 1811667
ucugaugacuaagacuccc

SEQ ID NO: 1811669 - RNA, 19 nt, Artificial Sequence
  Description of Artificial Sequence: Synthetic oligonucleotide
  Sense strand starting at position 2195 of SEQ ID NO: 1563449
agucuuagucaucagaaug

SEQ ID NO: 1811670 - RNA, 19 nt, Artificial Sequence
  Description of Artificial Sequence: Synthetic oligonucleotide
  Antisense strand to SEQ ID NO: 1811669
cauucugaugacuaagacu

SEQ ID NO: 1811671 - RNA, 19 nt, Artificial Sequence
  Description of Artificial Sequence: Synthetic oligonucleotide
  Sense strand starting at position 2528 of SEQ ID NO: 1563449
agaggugaguaauucuaca

SEQ ID NO: 1811672 - RNA, 19 nt, Artificial Sequence
  Description of Artificial Sequence: Synthetic oligonucleotide
  Antisense strand to SEQ ID NO: 1811671
uguagaauuacucaccucu

SEQ ID NO: 1811673 - RNA, 19 nt, Artificial Sequence
  Description of Artificial Sequence: Synthetic oligonucleotide
  Sense strand starting at position 2848 of SEQ ID NO: 1563449
guguuugaaugauuugcuu

SEQ ID NO: 1811674 - RNA, 19 nt, Artificial Sequence
  Description of Artificial Sequence: Synthetic oligonucleotide
  Antisense strand to SEQ ID NO: 1811673
aagcaaaucauucaaacac

SEQ ID NO: 1811675 - RNA, 19 nt, Artificial Sequence
  Description of Artificial Sequence: Synthetic oligonucleotide
  Sense strand starting at position 2856 of SEQ ID NO: 1563449
augauuugcuuuccuaugu

SEQ ID NO: 1811676 - RNA, 19 nt, Artificial Sequence
  Description of Artificial Sequence: Synthetic oligonucleotide
  Antisense strand to SEQ ID NO: 1811675
acauaggaaagcaaaucau

SEQ ID NO: 1811677 - RNA, 19 nt, Artificial Sequence
  Description of Artificial Sequence: Synthetic oligonucleotide
  Sense strand starting at position 3102 of SEQ ID NO: 1563449
gccuauauuucuuuaaggu

SEQ ID NO: 1811678 - RNA, 19 nt, Artificial Sequence
  Description of Artificial Sequence: Synthetic oligonucleotide
  Antisense strand to SEQ ID NO: 1811677
accuuaaagaaauauaggc

SEQ ID NO: 1811679 - RNA, 19 nt, Artificial Sequence
  Description of Artificial Sequence: Synthetic oligonucleotide
  Sense strand starting at position 3119 of SEQ ID NO: 1563449
guguauguucaggaacaga

SEQ ID NO: 1811680 - RNA, 19 nt, Artificial Sequence
  Description of Artificial Sequence: Synthetic oligonucleotide
  Antisense strand to SEQ ID NO: 1811679
ucuguuccugaacauacac

SEQ ID NO: 1811681 - RNA, 19 nt, Artificial Sequence
  Description of Artificial Sequence: Synthetic oligonucleotide
  Sense strand starting at position 3350 of SEQ ID NO: 1563449
aauaaagcgguuuaauaag

SEQ ID NO: 1811682 - RNA, 19 nt, Artificial Sequence
  Description of Artificial Sequence: Synthetic oligonucleotide
  Antisense strand to SEQ ID NO: 1811681
cuuauuaaaccgcuuuauu

SEQ ID NO: 1811683 - RNA, 19 nt, Artificial Sequence
  Description of Artificial Sequence: Synthetic oligonucleotide
  Sense strand starting at position 3699 of SEQ ID NO: 1563449
cugucaguugugcuuaagu

SEQ ID NO: 1811684 - RNA, 19 nt, Artificial Sequence
  Description of Artificial Sequence: Synthetic oligonucleotide
  Antisense strand to SEQ ID NO: 1811683
acuuaagcacaacugacag

SEQ ID NO: 1811685 - RNA, 19 nt, Artificial Sequence
  Description of Artificial Sequence: Synthetic oligonucleotide
  Sense strand starting at position 147 of SEQ ID NO: 1563450
aggagcuugcuuuagaaag

SEQ ID NO: 1811686 - RNA, 19 nt, Artificial Sequence
  Description of Artificial Sequence: Synthetic oligonucleotide
  Antisense strand to SEQ ID NO: 1811685
cuuucuaaagcaagcuccu

SEQ ID NO: 1811687 - RNA, 19 nt, Artificial Sequence
  Description of Artificial Sequence: Synthetic oligonucleotide
  Sense strand starting at position 223 of SEQ ID NO: 1563450
cugcaugaauuuccuugua

SEQ ID NO: 1811688 - RNA, 19 nt, Artificial Sequence
  Description of Artificial Sequence: Synthetic oligonucleotide
  Antisense strand to SEQ ID NO: 1811687
uacaaggaaauucaugcag

SEQ ID NO: 1811689 - RNA, 19 nt, Artificial Sequence
  Description of Artificial Sequence: Synthetic oligonucleotide
  Sense strand starting at position 378 of SEQ ID NO: 1563450
aggaaagauaguuguucua

SEQ ID NO: 1811690 - RNA, 19 nt, Artificial Sequence
  Description of Artificial Sequence: Synthetic oligonucleotide
  Antisense strand to SEQ ID NO: 1811689
uagaacaacuaucuuuccu

SEQ ID NO: 1811691 - RNA, 19 nt, Artificial Sequence
  Description of Artificial Sequence: Synthetic oligonucleotide
  Sense strand starting at position 380 of SEQ ID NO: 1563450
gaaagauaguuguucuaag

SEQ ID NO: 1811692 - RNA, 19 nt, Artificial Sequence
  Description of Artificial Sequence: Synthetic oligonucleotide
  Antisense strand to SEQ ID NO: 1811691
cuuagaacaacuaucuuuc

SEQ ID NO: 1811693 - RNA, 19 nt, Artificial Sequence
  Description of Artificial Sequence: Synthetic oligonucleotide
  Sense strand starting at position 381 of SEQ ID NO: 1563450
aaagauaguuguucuaaga

SEQ ID NO: 1811694 - RNA, 19 nt, Artificial Sequence
  Description of Artificial Sequence: Synthetic oligonucleotide
  Antisense strand to SEQ ID NO: 1811693
ucuuagaacaacuaucuuu

SEQ ID NO: 1811695 - RNA, 19 nt, Artificial Sequence
  Description of Artificial Sequence: Synthetic oligonucleotide
  Sense strand starting at position 704 of SEQ ID NO: 1563450
augauauucucuuuaggga

SEQ ID NO: 1811696 - RNA, 19 nt, Artificial Sequence
  Description of Artificial Sequence: Synthetic oligonucleotide
  Antisense strand to SEQ ID NO: 1811695
ucccuaaagagaauaucau

SEQ ID NO: 1811697 - RNA, 19 nt, Artificial Sequence
  Description of Artificial Sequence: Synthetic oligonucleotide
  Sense strand starting at position 959 of SEQ ID NO: 1563450
agggcauuuaguugcuuau

SEQ ID NO: 1811698 - RNA, 19 nt, Artificial Sequence
  Description of Artificial Sequence: Synthetic oligonucleotide
  Antisense strand to SEQ ID NO: 1811697
auaagcaacuaaaugcccu

SEQ ID NO: 1811699 - RNA, 19 nt, Artificial Sequence
  Description of Artificial Sequence: Synthetic oligonucleotide
  Sense strand starting at position 1363 of SEQ ID NO: 1563450
agagacauauccuuucgau

SEQ ID NO: 1811700 - RNA, 19 nt, Artificial Sequence
  Description of Artificial Sequence: Synthetic oligonucleotide
  Antisense strand to SEQ ID NO: 1811699
aucgaaaggauaugucucu

SEQ ID NO: 1811701 - RNA, 19 nt, Artificial Sequence
  Description of Artificial Sequence: Synthetic oligonucleotide
  Sense strand starting at position 1430 of SEQ ID NO: 1563450
cugacuguaugauugauga

SEQ ID NO: 1811702 - RNA, 19 nt, Artificial Sequence
  Description of Artificial Sequence: Synthetic oligonucleotide
  Antisense strand to SEQ ID NO: 1811701
ucaucaaucauacagucag

SEQ ID NO: 1811703 - RNA, 19 nt, Artificial Sequence
  Description of Artificial Sequence: Synthetic oligonucleotide
  Sense strand starting at position 1458 of SEQ ID NO: 1563450
ggcggaccucuagagacau

SEQ ID NO: 1811704 - RNA, 19 nt, Artificial Sequence
  Description of Artificial Sequence: Synthetic oligonucleotide
  Antisense strand to SEQ ID NO: 1811703
augucucuagagguccgcc

SEQ ID NO: 1811705 - RNA, 19 nt, Artificial Sequence
  Description of Artificial Sequence: Synthetic oligonucleotide
  Sense strand starting at position 1774 of SEQ ID NO: 1563450
guuugagugaggcaaggaa

SEQ ID NO: 1811706 - RNA, 19 nt, Artificial Sequence
  Description of Artificial Sequence: Synthetic oligonucleotide
  Antisense strand to SEQ ID NO: 1811705
uuccuugccucacucaaac

SEQ ID NO: 1811707 - RNA, 19 nt, Artificial Sequence
  Description of Artificial Sequence: Synthetic oligonucleotide
  Sense strand starting at position 1848 of SEQ ID NO: 1563450
gggaucaucucaccuuaac

SEQ ID NO: 1811708 - RNA, 19 nt, Artificial Sequence
  Description of Artificial Sequence: Synthetic oligonucleotide
  Antisense strand to SEQ ID NO: 1811707
guuaaggugagaugauccc

SEQ ID NO: 1811709 - RNA, 19 nt, Artificial Sequence
  Description of Artificial Sequence: Synthetic oligonucleotide
  Sense strand starting at position 2191 of SEQ ID NO: 1563450
gggagucuuagucaucaga

SEQ ID NO: 1811710 - RNA, 19 nt, Artificial Sequence
  Description of Artificial Sequence: Synthetic oligonucleotide
  Antisense strand to SEQ ID NO: 1811709
ucugaugacuaagacuccc

SEQ ID NO: 1811711 - RNA, 19 nt, Artificial Sequence
  Description of Artificial Sequence: Synthetic oligonucleotide
  Sense strand starting at position 2194 of SEQ ID NO: 1563450
agucuuagucaucagaaug

SEQ ID NO: 1811712 - RNA, 19 nt, Artificial Sequence
  Description of Artificial Sequence: Synthetic oligonucleotide
  Antisense strand to SEQ ID NO: 1811711
cauucugaugacuaagacu

SEQ ID NO: 1811713 - RNA, 19 nt, Artificial Sequence
  Description of Artificial Sequence: Synthetic oligonucleotide
  Sense strand starting at position 2527 of SEQ ID NO: 1563450
agaggugaguaauucuaca

SEQ ID NO: 1811714 - RNA, 19 nt, Artificial Sequence
  Description of Artificial Sequence: Synthetic oligonucleotide
  Antisense strand to SEQ ID NO: 1811713
uguagaauuacucaccucu

SEQ ID NO: 1811715 - RNA, 19 nt, Artificial Sequence
  Description of Artificial Sequence: Synthetic oligonucleotide
  Sense strand starting at position 2847 of SEQ ID NO: 1563450
guguuugaaugauuugcuu

SEQ ID NO: 1811716 - RNA, 19 nt, Artificial Sequence
  Description of Artificial Sequence: Synthetic oligonucleotide
  Antisense strand to SEQ ID NO: 1811715
aagcaaaucauucaaacac

SEQ ID NO: 1811717 - RNA, 19 nt, Artificial Sequence
  Description of Artificial Sequence: Synthetic oligonucleotide
  Sense strand starting at position 2855 of SEQ ID NO: 1563450
augauuugcuuuccuaugu

SEQ ID NO: 1811718 - RNA, 19 nt, Artificial Sequence
  Description of Artificial Sequence: Synthetic oligonucleotide
  Antisense strand to SEQ ID NO: 1811717
acauaggaaagcaaaucau

SEQ ID NO: 1811719 - RNA, 19 nt, Artificial Sequence
  Description of Artificial Sequence: Synthetic oligonucleotide
  Sense strand starting at position 3101 of SEQ ID NO: 1563450
gccuauauuucuuuaaggu

SEQ ID NO: 1811720 - RNA, 19 nt, Artificial Sequence
  Description of Artificial Sequence: Synthetic oligonucleotide
  Antisense strand to SEQ ID NO: 1811719
accuuaaagaaauauaggc

SEQ ID NO: 1811721 - RNA, 19 nt, Artificial Sequence
  Description of Artificial Sequence: Synthetic oligonucleotide
  Sense strand starting at position 3118 of SEQ ID NO: 1563450
guguauguucaggaacaga

SEQ ID NO: 1811722 - RNA, 19 nt, Artificial Sequence
  Description of Artificial Sequence: Synthetic oligonucleotide
  Antisense strand to SEQ ID NO: 1811721
ucuguuccugaacauacac

SEQ ID NO: 1811723 - RNA, 19 nt, Artificial Sequence
  Description of Artificial Sequence: Synthetic oligonucleotide
  Sense strand starting at position 3349 of SEQ ID NO: 1563450
aauaaagcgguuuaauaag

SEQ ID NO: 1811724 - RNA, 19 nt, Artificial Sequence
  Description of Artificial Sequence: Synthetic oligonucleotide
  Antisense strand to SEQ ID NO: 1811723
cuuauuaaaccgcuuuauu

SEQ ID NO: 1811725 - RNA, 19 nt, Artificial Sequence
  Description of Artificial Sequence: Synthetic oligonucleotide
  Sense strand starting at position 3698 of SEQ ID NO: 1563450
cugucaguugugcuuaagu

SEQ ID NO: 1811726 - RNA, 19 nt, Artificial Sequence
  Description of Artificial Sequence: Synthetic oligonucleotide
  Antisense strand to SEQ ID NO: 1811725
acuuaagcacaacugacag

SEQ ID NO: 1811727 - RNA, 19 nt, Artificial Sequence
  Description of Artificial Sequence: Synthetic oligonucleotide
  Sense strand starting at position 148 of SEQ ID NO: 1563451
aggagcuugcuuuagaaag

SEQ ID NO: 1811728 - RNA, 19 nt, Artificial Sequence
  Description of Artificial Sequence: Synthetic oligonucleotide
  Antisense strand to SEQ ID NO: 1811727
cuuucuaaagcaagcuccu

SEQ ID NO: 1811729 - RNA, 19 nt, Artificial Sequence
  Description of Artificial Sequence: Synthetic oligonucleotide
  Sense strand starting at position 224 of SEQ ID NO: 1563451
cugcaugaauuuccuugua

SEQ ID NO: 1811730 - RNA, 19 nt, Artificial Sequence
  Description of Artificial Sequence: Synthetic oligonucleotide
  Antisense strand to SEQ ID NO: 1811729
uacaaggaaauucaugcag

SEQ ID NO: 1811731 - RNA, 19 nt, Artificial Sequence
  Description of Artificial Sequence: Synthetic oligonucleotide
  Sense strand starting at position 379 of SEQ ID NO: 1563451
aggaaagauaguuguucua

SEQ ID NO: 1811732 - RNA, 19 nt, Artificial Sequence
  Description of Artificial Sequence: Synthetic oligonucleotide
  Antisense strand to SEQ ID NO: 1811731
uagaacaacuaucuuuccu

SEQ ID NO: 1811733 - RNA, 19 nt, Artificial Sequence
  Description of Artificial Sequence: Synthetic oligonucleotide
  Sense strand starting at position 381 of SEQ ID NO: 1563451
gaaagauaguuguucuaag

SEQ ID NO: 1811734 - RNA, 19 nt, Artificial Sequence
  Description of Artificial Sequence: Synthetic oligonucleotide
  Antisense strand to SEQ ID NO: 1811733
cuuagaacaacuaucuuuc

SEQ ID NO: 1811735 - RNA, 19 nt, Artificial Sequence
  Description of Artificial Sequence: Synthetic oligonucleotide
  Sense strand starting at position 382 of SEQ ID NO: 1563451
aaagauaguuguucuaaga

SEQ ID NO: 1811736 - RNA, 19 nt, Artificial Sequence
  Description of Artificial Sequence: Synthetic oligonucleotide
  Antisense strand to SEQ ID NO: 1811735
ucuuagaacaacuaucuuu

SEQ ID NO: 1811737 - RNA, 19 nt, Artificial Sequence
  Description of Artificial Sequence: Synthetic oligonucleotide
  Sense strand starting at position 705 of SEQ ID NO: 1563451
augauauucucuuuaggga

SEQ ID NO: 1811738 - RNA, 19 nt, Artificial Sequence
  Description of Artificial Sequence: Synthetic oligonucleotide
  Antisense strand to SEQ ID NO: 1811737
ucccuaaagagaauaucau

SEQ ID NO: 1811739 - RNA, 19 nt, Artificial Sequence
  Description of Artificial Sequence: Synthetic oligonucleotide
  Sense strand starting at position 960 of SEQ ID NO: 1563451
agggcauuuaguugcuuau

SEQ ID NO: 1811740 - RNA, 19 nt, Artificial Sequence
  Description of Artificial Sequence: Synthetic oligonucleotide
  Antisense strand to SEQ ID NO: 1811739
auaagcaacuaaaugcccu

SEQ ID NO: 1811741 - RNA, 19 nt, Artificial Sequence
  Description of Artificial Sequence: Synthetic oligonucleotide
  Sense strand starting at position 1364 of SEQ ID NO: 1563451
agagacauauccuuucgau

SEQ ID NO: 1811742 - RNA, 19 nt, Artificial Sequence
  Description of Artificial Sequence: Synthetic oligonucleotide
  Antisense strand to SEQ ID NO: 1811741
aucgaaaggauaugucucu

SEQ ID NO: 1811743 - RNA, 19 nt, Artificial Sequence
  Description of Artificial Sequence: Synthetic oligonucleotide
  Sense strand starting at position 1775 of SEQ ID NO: 1563451
guuugagugaggcaaggaa

SEQ ID NO: 1811744 - RNA, 19 nt, Artificial Sequence
  Description of Artificial Sequence: Synthetic oligonucleotide
  Antisense strand to SEQ ID NO: 1811743
uuccuugccucacucaaac

SEQ ID NO: 1811745 - RNA, 19 nt, Artificial Sequence
  Description of Artificial Sequence: Synthetic oligonucleotide
  Sense strand starting at position 1849 of SEQ ID NO: 1563451
gggaucaucucaccuuaac

SEQ ID NO: 1811746 - RNA, 19 nt, Artificial Sequence
  Description of Artificial Sequence: Synthetic oligonucleotide
  Antisense strand to SEQ ID NO: 1811745
guuaaggugagaugauccc

SEQ ID NO: 1811747 - RNA, 19 nt, Artificial Sequence
  Description of Artificial Sequence: Synthetic oligonucleotide
  Sense strand starting at position 2192 of SEQ ID NO: 1563451
gggagucuuagucaucaga

SEQ ID NO: 1811748 - RNA, 19 nt, Artificial Sequence
  Description of Artificial Sequence: Synthetic oligonucleotide
  Antisense strand to SEQ ID NO: 1811747
ucugaugacuaagacuccc

SEQ ID NO: 1811749 - RNA, 19 nt, Artificial Sequence
  Description of Artificial Sequence: Synthetic oligonucleotide
  Sense strand starting at position 2195 of SEQ ID NO: 1563451
agucuuagucaucagaaug

SEQ ID NO: 1811750 - RNA, 19 nt, Artificial Sequence
  Description of Artificial Sequence: Synthetic oligonucleotide
  Antisense strand to SEQ ID NO: 1811749
cauucugaugacuaagacu

SEQ ID NO: 1811751 - RNA, 19 nt, Artificial Sequence
  Description of Artificial Sequence: Synthetic oligonucleotide
  Sense strand starting at position 2528 of SEQ ID NO: 1563451
agaggugaguaauucuaca

SEQ ID NO: 1811752 - RNA, 19 nt, Artificial Sequence
  Description of Artificial Sequence: Synthetic oligonucleotide
  Antisense strand to SEQ ID NO: 1811751
uguagaauuacucaccucu

SEQ ID NO: 1811753 - RNA, 19 nt, Artificial Sequence
  Description of Artificial Sequence: Synthetic oligonucleotide
  Sense strand starting at position 2848 of SEQ ID NO: 1563451
guguuugaaugauuugcuu

SEQ ID NO: 1811754 - RNA, 19 nt, Artificial Sequence
  Description of Artificial Sequence: Synthetic oligonucleotide
  Antisense strand to SEQ ID NO: 1811753
aagcaaaucauucaaacac

SEQ ID NO: 1811755 - RNA, 19 nt, Artificial Sequence
  Description of Artificial Sequence: Synthetic oligonucleotide
  Sense strand starting at position 2856 of SEQ ID NO: 1563451
augauuugcuuuccuaugu

SEQ ID NO: 1811756 - RNA, 19 nt, Artificial Sequence
  Description of Artificial Sequence: Synthetic oligonucleotide
  Antisense strand to SEQ ID NO: 1811755
acauaggaaagcaaaucau

SEQ ID NO: 1811757 - RNA, 19 nt, Artificial Sequence
  Description of Artificial Sequence: Synthetic oligonucleotide
  Sense strand starting at position 3102 of SEQ ID NO: 1563451
gccuauauuucuuuaaggu

SEQ ID NO: 1811758 - RNA, 19 nt, Artificial Sequence
  Description of Artificial Sequence: Synthetic oligonucleotide
  Antisense strand to SEQ ID NO: 1811757
accuuaaagaaauauaggc

SEQ ID NO: 1811759 - RNA, 19 nt, Artificial Sequence
  Description of Artificial Sequence: Synthetic oligonucleotide
  Sense strand starting at position 3119 of SEQ ID NO: 1563451
guguauguucaggaacaga

SEQ ID NO: 1811760 - RNA, 19 nt, Artificial Sequence
  Description of Artificial Sequence: Synthetic oligonucleotide
  Antisense strand to SEQ ID NO: 1811759
ucuguuccugaacauacac

SEQ ID NO: 1811761 - RNA, 19 nt, Artificial Sequence
  Description of Artificial Sequence: Synthetic oligonucleotide
  Sense strand starting at position 3350 of SEQ ID NO: 1563451
aauaaagcgguuuaauaag

SEQ ID NO: 1811762 - RNA, 19 nt, Artificial Sequence
  Description of Artificial Sequence: Synthetic oligonucleotide
  Antisense strand to SEQ ID NO: 1811761
cuuauuaaaccgcuuuauu

SEQ ID NO: 1811763 - RNA, 19 nt, Artificial Sequence
  Description of Artificial Sequence: Synthetic oligonucleotide
  Sense strand starting at position 3699 of SEQ ID NO: 1563451
cugucaguugugcuuaagu

SEQ ID NO: 1811764 - RNA, 19 nt, Artificial Sequence
  Description of Artificial Sequence: Synthetic oligonucleotide
  Antisense strand to SEQ ID NO: 1811763
acuuaagcacaacugacag

SEQ ID NO: 1811765 - RNA, 19 nt, Artificial Sequence
  Description of Artificial Sequence: Synthetic oligonucleotide
  Sense strand starting at position 147 of SEQ ID NO: 1563452
aggagcuugcuuuagaaag

SEQ ID NO: 1811766 - RNA, 19 nt, Artificial Sequence
  Description of Artificial Sequence: Synthetic oligonucleotide
  Antisense strand to SEQ ID NO: 1811765
cuuucuaaagcaagcuccu

SEQ ID NO: 1811767 - RNA, 19 nt, Artificial Sequence
  Description of Artificial Sequence: Synthetic oligonucleotide
  Sense strand starting at position 223 of SEQ ID NO: 1563452
cugcaugaauuuccuugua

SEQ ID NO: 1811768 - RNA, 19 nt, Artificial Sequence
  Description of Artificial Sequence: Synthetic oligonucleotide
  Antisense strand to SEQ ID NO: 1811767
uacaaggaaauucaugcag

SEQ ID NO: 1811769 - RNA, 19 nt, Artificial Sequence
  Description of Artificial Sequence: Synthetic oligonucleotide
  Sense strand starting at position 378 of SEQ ID NO: 1563452
aggaaagauaguuguucua

SEQ ID NO: 1811770 - RNA, 19 nt, Artificial Sequence
  Description of Artificial Sequence: Synthetic oligonucleotide
  Antisense strand to SEQ ID NO: 1811769
uagaacaacuaucuuuccu

SEQ ID NO: 1811771 - RNA, 19 nt, Artificial Sequence
  Description of Artificial Sequence: Synthetic oligonucleotide
  Sense strand starting at position 380 of SEQ ID NO: 1563452
gaaagauaguuguucuaag

SEQ ID NO: 1811772 - RNA, 19 nt, Artificial Sequence
  Description of Artificial Sequence: Synthetic oligonucleotide
  Antisense strand to SEQ ID NO: 1811771
cuuagaacaacuaucuuuc

SEQ ID NO: 1811773 - RNA, 19 nt, Artificial Sequence
  Description of Artificial Sequence: Synthetic oligonucleotide
  Sense strand starting at position 381 of SEQ ID NO: 1563452
aaagauaguuguucuaaga

SEQ ID NO: 1811774 - RNA, 19 nt, Artificial Sequence
  Description of Artificial Sequence: Synthetic oligonucleotide
  Antisense strand to SEQ ID NO: 1811773
ucuuagaacaacuaucuuu

SEQ ID NO: 1811775 - RNA, 19 nt, Artificial Sequence
  Description of Artificial Sequence: Synthetic oligonucleotide
  Sense strand starting at position 704 of SEQ ID NO: 1563452
augauauucucuuuaggga

SEQ ID NO: 1811776 - RNA, 19 nt, Artificial Sequence
  Description of Artificial Sequence: Synthetic oligonucleotide
  Antisense strand to SEQ ID NO: 1811775
ucccuaaagagaauaucau

SEQ ID NO: 1811777 - RNA, 19 nt, Artificial Sequence
  Description of Artificial Sequence: Synthetic oligonucleotide
  Sense strand starting at position 959 of SEQ ID NO: 1563452
agggcauuuaguugcuuau

SEQ ID NO: 1811778 - RNA, 19 nt, Artificial Sequence
  Description of Artificial Sequence: Synthetic oligonucleotide
  Antisense strand to SEQ ID NO: 1811777
auaagcaacuaaaugcccu

SEQ ID NO: 1811779 - RNA, 19 nt, Artificial Sequence
  Description of Artificial Sequence: Synthetic oligonucleotide
  Sense strand starting at position 1363 of SEQ ID NO: 1563452
agagacauauccuuucgau

SEQ ID NO: 1811780 - RNA, 19 nt, Artificial Sequence
  Description of Artificial Sequence: Synthetic oligonucleotide
  Antisense strand to SEQ ID NO: 1811779
aucgaaaggauaugucucu

SEQ ID NO: 1811781 - RNA, 19 nt, Artificial Sequence
  Description of Artificial Sequence: Synthetic oligonucleotide
  Sense strand starting at position 1430 of SEQ ID NO: 1563452
cugacuguaugauugauga

SEQ ID NO: 1811782 - RNA, 19 nt, Artificial Sequence
  Description of Artificial Sequence: Synthetic oligonucleotide
  Antisense strand to SEQ ID NO: 1811781
ucaucaaucauacagucag

SEQ ID NO: 1811783 - RNA, 19 nt, Artificial Sequence
  Description of Artificial Sequence: Synthetic oligonucleotide
  Sense strand starting at position 1458 of SEQ ID NO: 1563452
ggcggaccucuagagacau

SEQ ID NO: 1811784 - RNA, 19 nt, Artificial Sequence
  Description of Artificial Sequence: Synthetic oligonucleotide
  Antisense strand to SEQ ID NO: 1811783
augucucuagagguccgcc

SEQ ID NO: 1811785 - RNA, 19 nt, Artificial Sequence
  Description of Artificial Sequence: Synthetic oligonucleotide
  Sense strand starting at position 1774 of SEQ ID NO: 1563452
guuugagugaggcaaggaa

SEQ ID NO: 1811786 - RNA, 19 nt, Artificial Sequence
  Description of Artificial Sequence: Synthetic oligonucleotide
  Antisense strand to SEQ ID NO: 1811785
uuccuugccucacucaaac

SEQ ID NO: 1811787 - RNA, 19 nt, Artificial Sequence
  Description of Artificial Sequence: Synthetic oligonucleotide
  Sense strand starting at position 1848 of SEQ ID NO: 1563452
gggaucaucucaccuuaac

SEQ ID NO: 1811788 - RNA, 19 nt, Artificial Sequence
  Description of Artificial Sequence: Synthetic oligonucleotide
  Antisense strand to SEQ ID NO: 1811787
guuaaggugagaugauccc

SEQ ID NO: 1811789 - RNA, 19 nt, Artificial Sequence
  Description of Artificial Sequence: Synthetic oligonucleotide
  Sense strand starting at position 2191 of SEQ ID NO: 1563452
gggagucuuagucaucaga

SEQ ID NO: 1811790 - RNA, 19 nt, Artificial Sequence
  Description of Artificial Sequence: Synthetic oligonucleotide
  Antisense strand to SEQ ID NO: 1811789
ucugaugacuaagacuccc

SEQ ID NO: 1811791 - RNA, 19 nt, Artificial Sequence
  Description of Artificial Sequence: Synthetic oligonucleotide
  Sense strand starting at position 2194 of SEQ ID NO: 1563452
agucuuagucaucagaaug

SEQ ID NO: 1811792 - RNA, 19 nt, Artificial Sequence
  Description of Artificial Sequence: Synthetic oligonucleotide
  Antisense strand to SEQ ID NO: 1811791
cauucugaugacuaagacu

SEQ ID NO: 1811793 - RNA, 19 nt, Artificial Sequence
  Description of Artificial Sequence: Synthetic oligonucleotide
  Sense strand starting at position 2527 of SEQ ID NO: 1563452
agaggugaguaauucuaca

SEQ ID NO: 1811794 - RNA, 19 nt, Artificial Sequence
  Description of Artificial Sequence: Synthetic oligonucleotide
  Antisense strand to SEQ ID NO: 1811793
uguagaauuacucaccucu

SEQ ID NO: 1811795 - RNA, 19 nt, Artificial Sequence
  Description of Artificial Sequence: Synthetic oligonucleotide
  Sense strand starting at position 2847 of SEQ ID NO: 1563452
guguuugaaugauuugcuu

SEQ ID NO: 1811796 - RNA, 19 nt, Artificial Sequence
  Description of Artificial Sequence: Synthetic oligonucleotide
  Antisense strand to SEQ ID NO: 1811795
aagcaaaucauucaaacac

SEQ ID NO: 1811797 - RNA, 19 nt, Artificial Sequence
  Description of Artificial Sequence: Synthetic oligonucleotide
  Sense strand starting at position 2855 of SEQ ID NO: 1563452
augauuugcuuuccuaugu

SEQ ID NO: 1811798 - RNA, 19 nt, Artificial Sequence
  Description of Artificial Sequence: Synthetic oligonucleotide
  Antisense strand to SEQ ID NO: 1811797
acauaggaaagcaaaucau

SEQ ID NO: 1811799 - RNA, 19 nt, Artificial Sequence
  Description of Artificial Sequence: Synthetic oligonucleotide
  Sense strand starting at position 3101 of SEQ ID NO: 1563452
gccuauauuucuuuaaggu

SEQ ID NO: 1811800 - RNA, 19 nt, Artificial Sequence
  Description of Artificial Sequence: Synthetic oligonucleotide
  Antisense strand to SEQ ID NO: 1811799
accuuaaagaaauauaggc

SEQ ID NO: 1811801 - RNA, 19 nt, Artificial Sequence
  Description of Artificial Sequence: Synthetic oligonucleotide
  Sense strand starting at position 3118 of SEQ ID NO: 1563452
guguauguucaggaacaga

SEQ ID NO: 1811802 - RNA, 19 nt, Artificial Sequence
  Description of Artificial Sequence: Synthetic oligonucleotide
  Antisense strand to SEQ ID NO: 1811801
ucuguuccugaacauacac

SEQ ID NO: 1811803 - RNA, 19 nt, Artificial Sequence
  Description of Artificial Sequence: Synthetic oligonucleotide
  Sense strand starting at position 3349 of SEQ ID NO: 1563452
aauaaagcgguuuaauaag

SEQ ID NO: 1811804 - RNA, 19 nt, Artificial Sequence
  Description of Artificial Sequence: Synthetic oligonucleotide
  Antisense strand to SEQ ID NO: 1811803
cuuauuaaaccgcuuuauu

SEQ ID NO: 1811805 - RNA, 19 nt, Artificial Sequence
  Description of Artificial Sequence: Synthetic oligonucleotide
  Sense strand starting at position 3698 of SEQ ID NO: 1563452
cugucaguugugcuuaagu

SEQ ID NO: 1811806 - RNA, 19 nt, Artificial Sequence
  Description of Artificial Sequence: Synthetic oligonucleotide
  Antisense strand to SEQ ID NO: 1811805
acuuaagcacaacugacag

SEQ ID NO: 1811807 - RNA, 19 nt, Artificial Sequence
  Description of Artificial Sequence: Synthetic oligonucleotide
  Sense strand starting at position 374 of SEQ ID NO: 1563453
aggauuuccugauggacug

SEQ ID NO: 1811808 - RNA, 19 nt, Artificial Sequence
  Description of Artificial Sequence: Synthetic oligonucleotide
  Antisense strand to SEQ ID NO: 1811807
caguccaucaggaaauccu

SEQ ID NO: 1811809 - RNA, 19 nt, Artificial Sequence
  Description of Artificial Sequence: Synthetic oligonucleotide
  Sense strand starting at position 396 of SEQ ID NO: 1563453
agauguaagguacgugaca

SEQ ID NO: 1811810 - RNA, 19 nt, Artificial Sequence
  Description of Artificial Sequence: Synthetic oligonucleotide
  Antisense strand to SEQ ID NO: 1811809
ugucacguaccuuacaucu

SEQ ID NO: 1811811 - RNA, 19 nt, Artificial Sequence
  Description of Artificial Sequence: Synthetic oligonucleotide
  Sense strand starting at position 398 of SEQ ID NO: 1563453
auguaagguacgugacaga

SEQ ID NO: 1811812 - RNA, 19 nt, Artificial Sequence
  Description of Artificial Sequence: Synthetic oligonucleotide
  Antisense strand to SEQ ID NO: 1811811
ucugucacguaccuuacau

SEQ ID NO: 1811813 - RNA, 19 nt, Artificial Sequence
  Description of Artificial Sequence: Synthetic oligonucleotide
  Sense strand starting at position 468 of SEQ ID NO: 1563453
uguacuacugacugcaaua

SEQ ID NO: 1811814 - RNA, 19 nt, Artificial Sequence
  Description of Artificial Sequence: Synthetic oligonucleotide
  Antisense strand to SEQ ID NO: 1811813
uauugcagucaguaguaca

SEQ ID NO: 1811815 - RNA, 19 nt, Artificial Sequence
  Description of Artificial Sequence: Synthetic oligonucleotide
  Sense strand starting at position 479 of SEQ ID NO: 1563453
cugcaauagggaugacuau

SEQ ID NO: 1811816 - RNA, 19 nt, Artificial Sequence
  Description of Artificial Sequence: Synthetic oligonucleotide
  Antisense strand to SEQ ID NO: 1811815
auagucaucccuauugcag

SEQ ID NO: 1811817 - RNA, 19 nt, Artificial Sequence
  Description of Artificial Sequence: Synthetic oligonucleotide
  Sense strand starting at position 614 of SEQ ID NO: 1563453
aggagaggugcagguuaaa

SEQ ID NO: 1811818 - RNA, 19 nt, Artificial Sequence
  Description of Artificial Sequence: Synthetic oligonucleotide
  Antisense strand to SEQ ID NO: 1811817
uuuaaccugcaccucuccu

SEQ ID NO: 1811819 - RNA, 19 nt, Artificial Sequence
  Description of Artificial Sequence: Synthetic oligonucleotide
  Sense strand starting at position 617 of SEQ ID NO: 1563453
agaggugcagguuaaagau

SEQ ID NO: 1811820 - RNA, 19 nt, Artificial Sequence
  Description of Artificial Sequence: Synthetic oligonucleotide
  Antisense strand to SEQ ID NO: 1811819
aucuuuaaccugcaccucu

SEQ ID NO: 1811821 - RNA, 19 nt, Artificial Sequence
  Description of Artificial Sequence: Synthetic oligonucleotide
  Sense strand starting at position 644 of SEQ ID NO: 1563453
gggaguuaccagcauguca

SEQ ID NO: 1811822 - RNA, 19 nt, Artificial Sequence
  Description of Artificial Sequence: Synthetic oligonucleotide
  Antisense strand to SEQ ID NO: 1811821
ugacaugcugguaacuccc

SEQ ID NO: 1811823 - RNA, 19 nt, Artificial Sequence
  Description of Artificial Sequence: Synthetic oligonucleotide
  Sense strand starting at position 1177 of SEQ ID NO: 1563453
augaaaugauuaccucugu

SEQ ID NO: 1811824 - RNA, 19 nt, Artificial Sequence
  Description of Artificial Sequence: Synthetic oligonucleotide
  Antisense strand to SEQ ID NO: 1811823
acagagguaaucauuucau

SEQ ID NO: 1811825 - RNA, 19 nt, Artificial Sequence
  Description of Artificial Sequence: Synthetic oligonucleotide
  Sense strand starting at position 1194 of SEQ ID NO: 1563453
gucaaaugccacugacaga

SEQ ID NO: 1811826 - RNA, 19 nt, Artificial Sequence
  Description of Artificial Sequence: Synthetic oligonucleotide
  Antisense strand to SEQ ID NO: 1811825
ucugucaguggcauuugac

SEQ ID NO: 1811827 - RNA, 19 nt, Artificial Sequence
  Description of Artificial Sequence: Synthetic oligonucleotide
  Sense strand starting at position 1259 of SEQ ID NO: 1563453
gccaaauacgguuaagaug

SEQ ID NO: 1811828 - RNA, 19 nt, Artificial Sequence
  Description of Artificial Sequence: Synthetic oligonucleotide
  Antisense strand to SEQ ID NO: 1811827
caucuuaaccguauuuggc

SEQ ID NO: 1811829 - RNA, 19 nt, Artificial Sequence
  Description of Artificial Sequence: Synthetic oligonucleotide
  Sense strand starting at position 1578 of SEQ ID NO: 1563453
guucuccugaaggaguuua

SEQ ID NO: 1811830 - RNA, 19 nt, Artificial Sequence
  Description of Artificial Sequence: Synthetic oligonucleotide
  Antisense strand to SEQ ID NO: 1811829
uaaacuccuucaggagaac

SEQ ID NO: 1811831 - RNA, 19 nt, Artificial Sequence
  Description of Artificial Sequence: Synthetic oligonucleotide
  Sense strand starting at position 1688 of SEQ ID NO: 1563453
aggauuuagucggagagag

SEQ ID NO: 1811832 - RNA, 19 nt, Artificial Sequence
  Description of Artificial Sequence: Synthetic oligonucleotide
  Antisense strand to SEQ ID NO: 1811831
cucucuccgacuaaauccu

SEQ ID NO: 1811833 - RNA, 19 nt, Artificial Sequence
  Description of Artificial Sequence: Synthetic oligonucleotide
  Sense strand starting at position 1712 of SEQ ID NO: 1563453
ccaccaaucuucguugaga

SEQ ID NO: 1811834 - RNA, 19 nt, Artificial Sequence
  Description of Artificial Sequence: Synthetic oligonucleotide
  Antisense strand to SEQ ID NO: 1811833
ucucaacgaagauuggugg

SEQ ID NO: 1811835 - RNA, 19 nt, Artificial Sequence
  Description of Artificial Sequence: Synthetic oligonucleotide
  Sense strand starting at position 1713 of SEQ ID NO: 1563453
caccaaucuucguugagaa

SEQ ID NO: 1811836 - RNA, 19 nt, Artificial Sequence
  Description of Artificial Sequence: Synthetic oligonucleotide
  Antisense strand to SEQ ID NO: 1811835
uucucaacgaagauuggug

SEQ ID NO: 1811837 - RNA, 19 nt, Artificial Sequence
  Description of Artificial Sequence: Synthetic oligonucleotide
  Sense strand starting at position 1714 of SEQ ID NO: 1563453
accaaucuucguugagaag

SEQ ID NO: 1811838 - RNA, 19 nt, Artificial Sequence
  Description of Artificial Sequence: Synthetic oligonucleotide
  Antisense strand to SEQ ID NO: 1811837
cuucucaacgaagauuggu

SEQ ID NO: 1811839 - RNA, 19 nt, Artificial Sequence
  Description of Artificial Sequence: Synthetic oligonucleotide
  Sense strand starting at position 1715 of SEQ ID NO: 1563453
ccaaucuucguugagaagu

SEQ ID NO: 1811840 - RNA, 19 nt, Artificial Sequence
  Description of Artificial Sequence: Synthetic oligonucleotide
  Antisense strand to SEQ ID NO: 1811839
acuucucaacgaagauugg

SEQ ID NO: 1811841 - RNA, 19 nt, Artificial Sequence
  Description of Artificial Sequence: Synthetic oligonucleotide
  Sense strand starting at position 1932 of SEQ ID NO: 1563453
cacuacuuucggcaugauu

SEQ ID NO: 1811842 - RNA, 19 nt, Artificial Sequence
  Description of Artificial Sequence: Synthetic oligonucleotide
  Antisense strand to SEQ ID NO: 1811841
aaucaugccgaaaguagug

SEQ ID NO: 1811843 - RNA, 19 nt, Artificial Sequence
  Description of Artificial Sequence: Synthetic oligonucleotide
  Sense strand starting at position 2082 of SEQ ID NO: 1563453
guccuaucaggcuaagaua

SEQ ID NO: 1811844 - RNA, 19 nt, Artificial Sequence
  Description of Artificial Sequence: Synthetic oligonucleotide
  Antisense strand to SEQ ID NO: 1811843
uaucuuagccugauaggac

SEQ ID NO: 1811845 - RNA, 19 nt, Artificial Sequence
  Description of Artificial Sequence: Synthetic oligonucleotide
  Sense strand starting at position 2154 of SEQ ID NO: 1563453
cugggacuccugugaucug

SEQ ID NO: 1811846 - RNA, 19 nt, Artificial Sequence
  Description of Artificial Sequence: Synthetic oligonucleotide
  Antisense strand to SEQ ID NO: 1811845
cagaucacaggagucccag

SEQ ID NO: 1811847 - RNA, 19 nt, Artificial Sequence
  Description of Artificial Sequence: Synthetic oligonucleotide
  Sense strand starting at position 2157 of SEQ ID NO: 1563453
ggacuccugugaucuggga

SEQ ID NO: 1811848 - RNA, 19 nt, Artificial Sequence
  Description of Artificial Sequence: Synthetic oligonucleotide
  Antisense strand to SEQ ID NO: 1811847
ucccagaucacaggagucc

SEQ ID NO: 1811849 - RNA, 19 nt, Artificial Sequence
  Description of Artificial Sequence: Synthetic oligonucleotide
  Sense strand starting at position 2159 of SEQ ID NO: 1563453
acuccugugaucugggagu

SEQ ID NO: 1811850 - RNA, 19 nt, Artificial Sequence
  Description of Artificial Sequence: Synthetic oligonucleotide
  Antisense strand to SEQ ID NO: 1811849
acucccagaucacaggagu

SEQ ID NO: 1811851 - RNA, 19 nt, Artificial Sequence
  Description of Artificial Sequence: Synthetic oligonucleotide
  Sense strand starting at position 2161 of SEQ ID NO: 1563453
uccugugaucugggaguca

SEQ ID NO: 1811852 - RNA, 19 nt, Artificial Sequence
  Description of Artificial Sequence: Synthetic oligonucleotide
  Antisense strand to SEQ ID NO: 1811851
ugacucccagaucacagga

SEQ ID NO: 1811853 - RNA, 19 nt, Artificial Sequence
  Description of Artificial Sequence: Synthetic oligonucleotide
  Sense strand starting at position 2172 of SEQ ID NO: 1563453
gggagucacuucucaauga

SEQ ID NO: 1811854 - RNA, 19 nt, Artificial Sequence
  Description of Artificial Sequence: Synthetic oligonucleotide
  Antisense strand to SEQ ID NO: 1811853
ucauugagaagugacuccc

SEQ ID NO: 1811855 - RNA, 19 nt, Artificial Sequence
  Description of Artificial Sequence: Synthetic oligonucleotide
  Sense strand starting at position 2176 of SEQ ID NO: 1563453
gucacuucucaaugaagau

SEQ ID NO: 1811856 - RNA, 19 nt, Artificial Sequence
  Description of Artificial Sequence: Synthetic oligonucleotide
  Antisense strand to SEQ ID NO: 1811855
aucuucauugagaagugac

SEQ ID NO: 1811857 - RNA, 19 nt, Artificial Sequence
  Description of Artificial Sequence: Synthetic oligonucleotide
  Sense strand starting at position 2243 of SEQ ID NO: 1563453
uucuauaacgcaugcauuu

SEQ ID NO: 1811858 - RNA, 19 nt, Artificial Sequence
  Description of Artificial Sequence: Synthetic oligonucleotide
  Antisense strand to SEQ ID NO: 1811857
aaaugcaugcguuauagaa

SEQ ID NO: 1811859 - RNA, 19 nt, Artificial Sequence
  Description of Artificial Sequence: Synthetic oligonucleotide
  Sense strand starting at position 2357 of SEQ ID NO: 1563453
uacugauuuggguguguuu

SEQ ID NO: 1811860 - RNA, 19 nt, Artificial Sequence
  Description of Artificial Sequence: Synthetic oligonucleotide
  Antisense strand to SEQ ID NO: 1811859
aaacacacccaaaucagua

SEQ ID NO: 1811861 - RNA, 19 nt, Artificial Sequence
  Description of Artificial Sequence: Synthetic oligonucleotide
  Sense strand starting at position 2360 of SEQ ID NO: 1563453
ugauuuggguguguuucua

SEQ ID NO: 1811862 - RNA, 19 nt, Artificial Sequence
  Description of Artificial Sequence: Synthetic oligonucleotide
  Antisense strand to SEQ ID NO: 1811861
uagaaacacacccaaauca

SEQ ID NO: 1811863 - RNA, 19 nt, Artificial Sequence
  Description of Artificial Sequence: Synthetic oligonucleotide
  Sense strand starting at position 2523 of SEQ ID NO: 1563453
guguaaccaucaccacuaa

SEQ ID NO: 1811864 - RNA, 19 nt, Artificial Sequence
  Description of Artificial Sequence: Synthetic oligonucleotide
  Antisense strand to SEQ ID NO: 1811863
uuaguggugaugguuacac

SEQ ID NO: 1811865 - RNA, 19 nt, Artificial Sequence
  Description of Artificial Sequence: Synthetic oligonucleotide
  Sense strand starting at position 2574 of SEQ ID NO: 1563453
ucuuauacccauuaguagu

SEQ ID NO: 1811866 - RNA, 19 nt, Artificial Sequence
  Description of Artificial Sequence: Synthetic oligonucleotide
  Antisense strand to SEQ ID NO: 1811865
acuacuaauggguauaaga

SEQ ID NO: 1811867 - RNA, 19 nt, Artificial Sequence
  Description of Artificial Sequence: Synthetic oligonucleotide
  Sense strand starting at position 2711 of SEQ ID NO: 1563453
ccauuugucuggcuucuuu

SEQ ID NO: 1811868 - RNA, 19 nt, Artificial Sequence
  Description of Artificial Sequence: Synthetic oligonucleotide
  Antisense strand to SEQ ID NO: 1811867
aaagaagccagacaaaugg

SEQ ID NO: 1811869 - RNA, 19 nt, Artificial Sequence
  Description of Artificial Sequence: Synthetic oligonucleotide
  Sense strand starting at position 2923 of SEQ ID NO: 1563453
ccgcaaauuugugugggaa

SEQ ID NO: 1811870 - RNA, 19 nt, Artificial Sequence
  Description of Artificial Sequence: Synthetic oligonucleotide
  Antisense strand to SEQ ID NO: 1811869
uucccacacaaauuugcgg

SEQ ID NO: 1811871 - RNA, 19 nt, Artificial Sequence
  Description of Artificial Sequence: Synthetic oligonucleotide
  Sense strand starting at position 2924 of SEQ ID NO: 1563453
cgcaaauuugugugggaau

SEQ ID NO: 1811872 - RNA, 19 nt, Artificial Sequence
  Description of Artificial Sequence: Synthetic oligonucleotide
  Antisense strand to SEQ ID NO: 1811871
auucccacacaaauuugcg

SEQ ID NO: 1811873 - RNA, 19 nt, Artificial Sequence
  Description of Artificial Sequence: Synthetic oligonucleotide
  Sense strand starting at position 2927 of SEQ ID NO: 1563453
aaauuugugugggaauaua

SEQ ID NO: 1811874 - RNA, 19 nt, Artificial Sequence
  Description of Artificial Sequence: Synthetic oligonucleotide
  Antisense strand to SEQ ID NO: 1811873
uauauucccacacaaauuu

SEQ ID NO: 1811875 - RNA, 19 nt, Artificial Sequence
  Description of Artificial Sequence: Synthetic oligonucleotide
  Sense strand starting at position 3019 of SEQ ID NO: 1563453
gugggaugucauugaauga

SEQ ID NO: 1811876 - RNA, 19 nt, Artificial Sequence
  Description of Artificial Sequence: Synthetic oligonucleotide
  Antisense strand to SEQ ID NO: 1811875
ucauucaaugacaucccac

SEQ ID NO: 1811877 - RNA, 19 nt, Artificial Sequence
  Description of Artificial Sequence: Synthetic oligonucleotide
  Sense strand starting at position 3023 of SEQ ID NO: 1563453
gaugucauugaaugacuuu

SEQ ID NO: 1811878 - RNA, 19 nt, Artificial Sequence
  Description of Artificial Sequence: Synthetic oligonucleotide
  Antisense strand to SEQ ID NO: 1811877
aaagucauucaaugacauc

SEQ ID NO: 1811879 - RNA, 19 nt, Artificial Sequence
  Description of Artificial Sequence: Synthetic oligonucleotide
  Sense strand starting at position 3026 of SEQ ID NO: 1563453
gucauugaaugacuuuacu

SEQ ID NO: 1811880 - RNA, 19 nt, Artificial Sequence
  Description of Artificial Sequence: Synthetic oligonucleotide
  Antisense strand to SEQ ID NO: 1811879
aguaaagucauucaaugac

SEQ ID NO: 1811881 - RNA, 19 nt, Artificial Sequence
  Description of Artificial Sequence: Synthetic oligonucleotide
  Sense strand starting at position 3112 of SEQ ID NO: 1563453
uuacuaagucuauggcaaa

SEQ ID NO: 1811882 - RNA, 19 nt, Artificial Sequence
  Description of Artificial Sequence: Synthetic oligonucleotide
  Antisense strand to SEQ ID NO: 1811881
uuugccauagacuuaguaa

SEQ ID NO: 1811883 - RNA, 19 nt, Artificial Sequence
  Description of Artificial Sequence: Synthetic oligonucleotide
  Sense strand starting at position 3399 of SEQ ID NO: 1563453
guaccugcuguuuaauaau

SEQ ID NO: 1811884 - RNA, 19 nt, Artificial Sequence
  Description of Artificial Sequence: Synthetic oligonucleotide
  Antisense strand to SEQ ID NO: 1811883
auuauuaaacagcagguac

SEQ ID NO: 1811885 - RNA, 19 nt, Artificial Sequence
  Description of Artificial Sequence: Synthetic oligonucleotide
  Sense strand starting at position 3517 of SEQ ID NO: 1563453
agcaaauuaugcuuuagac

SEQ ID NO: 1811886 - RNA, 19 nt, Artificial Sequence
  Description of Artificial Sequence: Synthetic oligonucleotide
  Antisense strand to SEQ ID NO: 1811885
gucuaaagcauaauuugcu

SEQ ID NO: 1811887 - RNA, 19 nt, Artificial Sequence
  Description of Artificial Sequence: Synthetic oligonucleotide
  Sense strand starting at position 349 of SEQ ID NO: 1563454
aggauuuccugauggacug

SEQ ID NO: 1811888 - RNA, 19 nt, Artificial Sequence
  Description of Artificial Sequence: Synthetic oligonucleotide
  Antisense strand to SEQ ID NO: 1811887
caguccaucaggaaauccu

SEQ ID NO: 1811889 - RNA, 19 nt, Artificial Sequence
  Description of Artificial Sequence: Synthetic oligonucleotide
  Sense strand starting at position 371 of SEQ ID NO: 1563454
agauguaagguacgugaca

SEQ ID NO: 1811890 - RNA, 19 nt, Artificial Sequence
  Description of Artificial Sequence: Synthetic oligonucleotide
  Antisense strand to SEQ ID NO: 1811889
ugucacguaccuuacaucu

SEQ ID NO: 1811891 - RNA, 19 nt, Artificial Sequence
  Description of Artificial Sequence: Synthetic oligonucleotide
  Sense strand starting at position 373 of SEQ ID NO: 1563454
auguaagguacgugacaga

SEQ ID NO: 1811892 - RNA, 19 nt, Artificial Sequence
  Description of Artificial Sequence: Synthetic oligonucleotide
  Antisense strand to SEQ ID NO: 1811891
ucugucacguaccuuacau

SEQ ID NO: 1811893 - RNA, 19 nt, Artificial Sequence
  Description of Artificial Sequence: Synthetic oligonucleotide
  Sense strand starting at position 443 of SEQ ID NO: 1563454
uguacuacugacugcaaua

SEQ ID NO: 1811894 - RNA, 19 nt, Artificial Sequence
  Description of Artificial Sequence: Synthetic oligonucleotide
  Antisense strand to SEQ ID NO: 1811893
uauugcagucaguaguaca

SEQ ID NO: 1811895 - RNA, 19 nt, Artificial Sequence
  Description of Artificial Sequence: Synthetic oligonucleotide
  Sense strand starting at position 454 of SEQ ID NO: 1563454
cugcaauagggaugacuau

SEQ ID NO: 1811896 - RNA, 19 nt, Artificial Sequence
  Description of Artificial Sequence: Synthetic oligonucleotide
  Antisense strand to SEQ ID NO: 1811895
auagucaucccuauugcag

SEQ ID NO: 1811897 - RNA, 19 nt, Artificial Sequence
  Description of Artificial Sequence: Synthetic oligonucleotide
  Sense strand starting at position 589 of SEQ ID NO: 1563454
aggagaggugcagguuaaa

SEQ ID NO: 1811898 - RNA, 19 nt, Artificial Sequence
  Description of Artificial Sequence: Synthetic oligonucleotide
  Antisense strand to SEQ ID NO: 1811897
uuuaaccugcaccucuccu

SEQ ID NO: 1811899 - RNA, 19 nt, Artificial Sequence
  Description of Artificial Sequence: Synthetic oligonucleotide
  Sense strand starting at position 592 of SEQ ID NO: 1563454
agaggugcagguuaaagau

SEQ ID NO: 1811900 - RNA, 19 nt, Artificial Sequence
  Description of Artificial Sequence: Synthetic oligonucleotide
  Antisense strand to SEQ ID NO: 1811899
aucuuuaaccugcaccucu

SEQ ID NO: 1811901 - RNA, 19 nt, Artificial Sequence
  Description of Artificial Sequence: Synthetic oligonucleotide
  Sense strand starting at position 619 of SEQ ID NO: 1563454
gggaguuaccagcauguca

SEQ ID NO: 1811902 - RNA, 19 nt, Artificial Sequence
  Description of Artificial Sequence: Synthetic oligonucleotide
  Antisense strand to SEQ ID NO: 1811901
ugacaugcugguaacuccc

SEQ ID NO: 1811903 - RNA, 19 nt, Artificial Sequence
  Description of Artificial Sequence: Synthetic oligonucleotide
  Sense strand starting at position 1152 of SEQ ID NO: 1563454
augaaaugauuaccucugu

SEQ ID NO: 1811904 - RNA, 19 nt, Artificial Sequence
  Description of Artificial Sequence: Synthetic oligonucleotide
  Antisense strand to SEQ ID NO: 1811903
acagagguaaucauuucau

SEQ ID NO: 1811905 - RNA, 19 nt, Artificial Sequence
  Description of Artificial Sequence: Synthetic oligonucleotide
  Sense strand starting at position 1169 of SEQ ID NO: 1563454
gucaaaugccacugacaga

SEQ ID NO: 1811906 - RNA, 19 nt, Artificial Sequence
  Description of Artificial Sequence: Synthetic oligonucleotide
  Antisense strand to SEQ ID NO: 1811905
ucugucaguggcauuugac

SEQ ID NO: 1811907 - RNA, 19 nt, Artificial Sequence
  Description of Artificial Sequence: Synthetic oligonucleotide
  Sense strand starting at position 1234 of SEQ ID NO: 1563454
gccaaauacgguuaagaug

SEQ ID NO: 1811908 - RNA, 19 nt, Artificial Sequence
  Description of Artificial Sequence: Synthetic oligonucleotide
  Antisense strand to SEQ ID NO: 1811907
caucuuaaccguauuuggc

SEQ ID NO: 1811909 - RNA, 19 nt, Artificial Sequence
  Description of Artificial Sequence: Synthetic oligonucleotide
  Sense strand starting at position 1553 of SEQ ID NO: 1563454
guucuccugaaggaguuua

SEQ ID NO: 1811910 - RNA, 19 nt, Artificial Sequence
  Description of Artificial Sequence: Synthetic oligonucleotide
  Antisense strand to SEQ ID NO: 1811909
uaaacuccuucaggagaac

SEQ ID NO: 1811911 - RNA, 19 nt, Artificial Sequence
  Description of Artificial Sequence: Synthetic oligonucleotide
  Sense strand starting at position 1663 of SEQ ID NO: 1563454
aggauuuagucggagagag

SEQ ID NO: 1811912 - RNA, 19 nt, Artificial Sequence
  Description of Artificial Sequence: Synthetic oligonucleotide
  Antisense strand to SEQ ID NO: 1811911
cucucuccgacuaaauccu

SEQ ID NO: 1811913 - RNA, 19 nt, Artificial Sequence
  Description of Artificial Sequence: Synthetic oligonucleotide
  Sense strand starting at position 1687 of SEQ ID NO: 1563454
ccaccaaucuucguugaga

SEQ ID NO: 1811914 - RNA, 19 nt, Artificial Sequence
  Description of Artificial Sequence: Synthetic oligonucleotide
  Antisense strand to SEQ ID NO: 1811913
ucucaacgaagauuggugg

SEQ ID NO: 1811915 - RNA, 19 nt, Artificial Sequence
  Description of Artificial Sequence: Synthetic oligonucleotide
  Sense strand starting at position 1688 of SEQ ID NO: 1563454
caccaaucuucguugagaa

SEQ ID NO: 1811916 - RNA, 19 nt, Artificial Sequence
  Description of Artificial Sequence: Synthetic oligonucleotide
  Antisense strand to SEQ ID NO: 1811915
uucucaacgaagauuggug

SEQ ID NO: 1811917 - RNA, 19 nt, Artificial Sequence
  Description of Artificial Sequence: Synthetic oligonucleotide
  Sense strand starting at position 1689 of SEQ ID NO: 1563454
accaaucuucguugagaag

SEQ ID NO: 1811918 - RNA, 19 nt, Artificial Sequence
  Description of Artificial Sequence: Synthetic oligonucleotide
  Antisense strand to SEQ ID NO: 1811917
cuucucaacgaagauuggu

SEQ ID NO: 1811919 - RNA, 19 nt, Artificial Sequence
  Description of Artificial Sequence: Synthetic oligonucleotide
  Sense strand starting at position 1690 of SEQ ID NO: 1563454
ccaaucuucguugagaagu

SEQ ID NO: 1811920 - RNA, 19 nt, Artificial Sequence
  Description of Artificial Sequence: Synthetic oligonucleotide
  Antisense strand to SEQ ID NO: 1811919
acuucucaacgaagauugg

SEQ ID NO: 1811921 - RNA, 19 nt, Artificial Sequence
  Description of Artificial Sequence: Synthetic oligonucleotide
  Sense strand starting at position 1907 of SEQ ID NO: 1563454
cacuacuuucggcaugauu

SEQ ID NO: 1811922 - RNA, 19 nt, Artificial Sequence
  Description of Artificial Sequence: Synthetic oligonucleotide
  Antisense strand to SEQ ID NO: 1811921
aaucaugccgaaaguagug

SEQ ID NO: 1811923 - RNA, 19 nt, Artificial Sequence
  Description of Artificial Sequence: Synthetic oligonucleotide
  Sense strand starting at position 2057 of SEQ ID NO: 1563454
guccuaucaggcuaagaua

SEQ ID NO: 1811924 - RNA, 19 nt, Artificial Sequence
  Description of Artificial Sequence: Synthetic oligonucleotide
  Antisense strand to SEQ ID NO: 1811923
uaucuuagccugauaggac

SEQ ID NO: 1811925 - RNA, 19 nt, Artificial Sequence
  Description of Artificial Sequence: Synthetic oligonucleotide
  Sense strand starting at position 2129 of SEQ ID NO: 1563454
cugggacuccugugaucug

SEQ ID NO: 1811926 - RNA, 19 nt, Artificial Sequence
  Description of Artificial Sequence: Synthetic oligonucleotide
  Antisense strand to SEQ ID NO: 1811925
cagaucacaggagucccag

SEQ ID NO: 1811927 - RNA, 19 nt, Artificial Sequence
  Description of Artificial Sequence: Synthetic oligonucleotide
  Sense strand starting at position 2132 of SEQ ID NO: 1563454
ggacuccugugaucuggga

SEQ ID NO: 1811928 - RNA, 19 nt, Artificial Sequence
  Description of Artificial Sequence: Synthetic oligonucleotide
  Antisense strand to SEQ ID NO: 1811927
ucccagaucacaggagucc

SEQ ID NO: 1811929 - RNA, 19 nt, Artificial Sequence
  Description of Artificial Sequence: Synthetic oligonucleotide
  Sense strand starting at position 2134 of SEQ ID NO: 1563454
acuccugugaucugggagu

SEQ ID NO: 1811930 - RNA, 19 nt, Artificial Sequence
  Description of Artificial Sequence: Synthetic oligonucleotide
  Antisense strand to SEQ ID NO: 1811929
acucccagaucacaggagu

SEQ ID NO: 1811931 - RNA, 19 nt, Artificial Sequence
  Description of Artificial Sequence: Synthetic oligonucleotide
  Sense strand starting at position 2136 of SEQ ID NO: 1563454
uccugugaucugggaguca

SEQ ID NO: 1811932 - RNA, 19 nt, Artificial Sequence
  Description of Artificial Sequence: Synthetic oligonucleotide
  Antisense strand to SEQ ID NO: 1811931
ugacucccagaucacagga

SEQ ID NO: 1811933 - RNA, 19 nt, Artificial Sequence
  Description of Artificial Sequence: Synthetic oligonucleotide
  Sense strand starting at position 2147 of SEQ ID NO: 1563454
gggagucacuucucaauga

SEQ ID NO: 1811934 - RNA, 19 nt, Artificial Sequence
  Description of Artificial Sequence: Synthetic oligonucleotide
  Antisense strand to SEQ ID NO: 1811933
ucauugagaagugacuccc

SEQ ID NO: 1811935 - RNA, 19 nt, Artificial Sequence
  Description of Artificial Sequence: Synthetic oligonucleotide
  Sense strand starting at position 2151 of SEQ ID NO: 1563454
gucacuucucaaugaagau

SEQ ID NO: 1811936 - RNA, 19 nt, Artificial Sequence
  Description of Artificial Sequence: Synthetic oligonucleotide
  Antisense strand to SEQ ID NO: 1811935
aucuucauugagaagugac

SEQ ID NO: 1811937 - RNA, 19 nt, Artificial Sequence
  Description of Artificial Sequence: Synthetic oligonucleotide
  Sense strand starting at position 2218 of SEQ ID NO: 1563454
uucuauaacgcaugcauuu

SEQ ID NO: 1811938 - RNA, 19 nt, Artificial Sequence
  Description of Artificial Sequence: Synthetic oligonucleotide
  Antisense strand to SEQ ID NO: 1811937
aaaugcaugcguuauagaa

SEQ ID NO: 1811939 - RNA, 19 nt, Artificial Sequence
  Description of Artificial Sequence: Synthetic oligonucleotide
  Sense strand starting at position 2332 of SEQ ID NO: 1563454
uacugauuuggguguguuu

SEQ ID NO: 1811940 - RNA, 19 nt, Artificial Sequence
  Description of Artificial Sequence: Synthetic oligonucleotide
  Antisense strand to SEQ ID NO: 1811939
aaacacacccaaaucagua

SEQ ID NO: 1811941 - RNA, 19 nt, Artificial Sequence
  Description of Artificial Sequence: Synthetic oligonucleotide
  Sense strand starting at position 2335 of SEQ ID NO: 1563454
ugauuuggguguguuucua

SEQ ID NO: 1811942 - RNA, 19 nt, Artificial Sequence
  Description of Artificial Sequence: Synthetic oligonucleotide
  Antisense strand to SEQ ID NO: 1811941
uagaaacacacccaaauca

SEQ ID NO: 1811943 - RNA, 19 nt, Artificial Sequence
  Description of Artificial Sequence: Synthetic oligonucleotide
  Sense strand starting at position 2498 of SEQ ID NO: 1563454
guguaaccaucaccacuaa

SEQ ID NO: 1811944 - RNA, 19 nt, Artificial Sequence
  Description of Artificial Sequence: Synthetic oligonucleotide
  Antisense strand to SEQ ID NO: 1811943
uuaguggugaugguuacac

SEQ ID NO: 1811945 - RNA, 19 nt, Artificial Sequence
  Description of Artificial Sequence: Synthetic oligonucleotide
  Sense strand starting at position 2549 of SEQ ID NO: 1563454
ucuuauacccauuaguagu

SEQ ID NO: 1811946 - RNA, 19 nt, Artificial Sequence
  Description of Artificial Sequence: Synthetic oligonucleotide
  Antisense strand to SEQ ID NO: 1811945
acuacuaauggguauaaga

SEQ ID NO: 1811947 - RNA, 19 nt, Artificial Sequence
  Description of Artificial Sequence: Synthetic oligonucleotide
  Sense strand starting at position 2686 of SEQ ID NO: 1563454
ccauuugucuggcuucuuu

SEQ ID NO: 1811948 - RNA, 19 nt, Artificial Sequence
  Description of Artificial Sequence: Synthetic oligonucleotide
  Antisense strand to SEQ ID NO: 1811947
aaagaagccagacaaaugg

SEQ ID NO: 1811949 - RNA, 19 nt, Artificial Sequence
  Description of Artificial Sequence: Synthetic oligonucleotide
  Sense strand starting at position 2898 of SEQ ID NO: 1563454
ccgcaaauuugugugggaa

SEQ ID NO: 1811950 - RNA, 19 nt, Artificial Sequence
  Description of Artificial Sequence: Synthetic oligonucleotide
  Antisense strand to SEQ ID NO: 1811949
uucccacacaaauuugcgg

SEQ ID NO: 1811951 - RNA, 19 nt, Artificial Sequence
  Description of Artificial Sequence: Synthetic oligonucleotide
  Sense strand starting at position 2899 of SEQ ID NO: 1563454
cgcaaauuugugugggaau

SEQ ID NO: 1811952 - RNA, 19 nt, Artificial Sequence
  Description of Artificial Sequence: Synthetic oligonucleotide
  Antisense strand to SEQ ID NO: 1811951
auucccacacaaauuugcg

SEQ ID NO: 1811953 - RNA, 19 nt, Artificial Sequence
  Description of Artificial Sequence: Synthetic oligonucleotide
  Sense strand starting at position 2902 of SEQ ID NO: 1563454
aaauuugugugggaauaua

SEQ ID NO: 1811954 - RNA, 19 nt, Artificial Sequence
  Description of Artificial Sequence: Synthetic oligonucleotide
  Antisense strand to SEQ ID NO: 1811953
uauauucccacacaaauuu

SEQ ID NO: 1811955 - RNA, 19 nt, Artificial Sequence
  Description of Artificial Sequence: Synthetic oligonucleotide
  Sense strand starting at position 2994 of SEQ ID NO: 1563454
gugggaugucauugaauga

SEQ ID NO: 1811956 - RNA, 19 nt, Artificial Sequence
  Description of Artificial Sequence: Synthetic oligonucleotide
  Antisense strand to SEQ ID NO: 1811955
ucauucaaugacaucccac

SEQ ID NO: 1811957 - RNA, 19 nt, Artificial Sequence
  Description of Artificial Sequence: Synthetic oligonucleotide
  Sense strand starting at position 2998 of SEQ ID NO: 1563454
gaugucauugaaugacuuu

SEQ ID NO: 1811958 - RNA, 19 nt, Artificial Sequence
  Description of Artificial Sequence: Synthetic oligonucleotide
  Antisense strand to SEQ ID NO: 1811957
aaagucauucaaugacauc

SEQ ID NO: 1811959 - RNA, 19 nt, Artificial Sequence
  Description of Artificial Sequence: Synthetic oligonucleotide
  Sense strand starting at position 3001 of SEQ ID NO: 1563454
gucauugaaugacuuuacu

SEQ ID NO: 1811960 - RNA, 19 nt, Artificial Sequence
  Description of Artificial Sequence: Synthetic oligonucleotide
  Antisense strand to SEQ ID NO: 1811959
aguaaagucauucaaugac

SEQ ID NO: 1811961 - RNA, 19 nt, Artificial Sequence
  Description of Artificial Sequence: Synthetic oligonucleotide
  Sense strand starting at position 3087 of SEQ ID NO: 1563454
uuacuaagucuauggcaaa

SEQ ID NO: 1811962 - RNA, 19 nt, Artificial Sequence
  Description of Artificial Sequence: Synthetic oligonucleotide
  Antisense strand to SEQ ID NO: 1811961
uuugccauagacuuaguaa

SEQ ID NO: 1811963 - RNA, 19 nt, Artificial Sequence
  Description of Artificial Sequence: Synthetic oligonucleotide
  Sense strand starting at position 3492 of SEQ ID NO: 1563454
agcaaauuaugcuuuagac

SEQ ID NO: 1811964 - RNA, 19 nt, Artificial Sequence
  Description of Artificial Sequence: Synthetic oligonucleotide
  Antisense strand to SEQ ID NO: 1811963
gucuaaagcauaauuugcu

SEQ ID NO: 1811965 - RNA, 19 nt, Artificial Sequence
  Description of Artificial Sequence: Synthetic oligonucleotide
  Sense strand starting at position 3975 of SEQ ID NO: 1563454
ugaguaauauugguaaaca

SEQ ID NO: 1811966 - RNA, 19 nt, Artificial Sequence
  Description of Artificial Sequence: Synthetic oligonucleotide
  Antisense strand to SEQ ID NO: 1811965
uguuuaccaauauuacuca

SEQ ID NO: 1811967 - RNA, 19 nt, Artificial Sequence
  Description of Artificial Sequence: Synthetic oligonucleotide
  Sense strand starting at position 72 of SEQ ID NO: 1563455
gaucaacauuuagaguagu

SEQ ID NO: 1811968 - RNA, 19 nt, Artificial Sequence
  Description of Artificial Sequence: Synthetic oligonucleotide
  Antisense strand to SEQ ID NO: 1811967
acuacucuaaauguugauc

SEQ ID NO: 1811969 - RNA, 19 nt, Artificial Sequence
  Description of Artificial Sequence: Synthetic oligonucleotide
  Sense strand starting at position 305 of SEQ ID NO: 1563455
acaguaagauuauccguga

SEQ ID NO: 1811970 - RNA, 19 nt, Artificial Sequence
  Description of Artificial Sequence: Synthetic oligonucleotide
  Antisense strand to SEQ ID NO: 1811969
ucacggauaaucuuacugu

SEQ ID NO: 1811971 - RNA, 19 nt, Artificial Sequence
  Description of Artificial Sequence: Synthetic oligonucleotide
  Sense strand starting at position 306 of SEQ ID NO: 1563455
caguaagauuauccgugau

SEQ ID NO: 1811972 - RNA, 19 nt, Artificial Sequence
  Description of Artificial Sequence: Synthetic oligonucleotide
  Antisense strand to SEQ ID NO: 1811971
aucacggauaaucuuacug

SEQ ID NO: 1811973 - RNA, 19 nt, Artificial Sequence
  Description of Artificial Sequence: Synthetic oligonucleotide
  Sense strand starting at position 312 of SEQ ID NO: 1563455
gauuauccgugauuuagca

SEQ ID NO: 1811974 - RNA, 19 nt, Artificial Sequence
  Description of Artificial Sequence: Synthetic oligonucleotide
  Antisense strand to SEQ ID NO: 1811973
ugcuaaaucacggauaauc

SEQ ID NO: 1811975 - RNA, 19 nt, Artificial Sequence
  Description of Artificial Sequence: Synthetic oligonucleotide
  Sense strand starting at position 583 of SEQ ID NO: 1563455
uucccagaucaguacucuu

SEQ ID NO: 1811976 - RNA, 19 nt, Artificial Sequence
  Description of Artificial Sequence: Synthetic oligonucleotide
  Antisense strand to SEQ ID NO: 1811975
aagaguacugaucugggaa

SEQ ID NO: 1811977 - RNA, 19 nt, Artificial Sequence
  Description of Artificial Sequence: Synthetic oligonucleotide
  Sense strand starting at position 596 of SEQ ID NO: 1563455
acucuuuguggugaguaau

SEQ ID NO: 1811978 - RNA, 19 nt, Artificial Sequence
  Description of Artificial Sequence: Synthetic oligonucleotide
  Antisense strand to SEQ ID NO: 1811977
auuacucaccacaaagagu

SEQ ID NO: 1811979 - RNA, 19 nt, Artificial Sequence
  Description of Artificial Sequence: Synthetic oligonucleotide
  Sense strand starting at position 599 of SEQ ID NO: 1563455
cuuuguggugaguaauaag

SEQ ID NO: 1811980 - RNA, 19 nt, Artificial Sequence
  Description of Artificial Sequence: Synthetic oligonucleotide
  Antisense strand to SEQ ID NO: 1811979
cuuauuacucaccacaaag

SEQ ID NO: 1811981 - RNA, 19 nt, Artificial Sequence
  Description of Artificial Sequence: Synthetic oligonucleotide
  Sense strand starting at position 669 of SEQ ID NO: 1563455
aggugauauuuacauaacu

SEQ ID NO: 1811982 - RNA, 19 nt, Artificial Sequence
  Description of Artificial Sequence: Synthetic oligonucleotide
  Antisense strand to SEQ ID NO: 1811981
aguuauguaaauaucaccu

SEQ ID NO: 1811983 - RNA, 19 nt, Artificial Sequence
  Description of Artificial Sequence: Synthetic oligonucleotide
  Sense strand starting at position 687 of SEQ ID NO: 1563455
uguuacacggcguuucaau

SEQ ID NO: 1811984 - RNA, 19 nt, Artificial Sequence
  Description of Artificial Sequence: Synthetic oligonucleotide
  Antisense strand to SEQ ID NO: 1811983
auugaaacgccguguaaca

SEQ ID NO: 1811985 - RNA, 19 nt, Artificial Sequence
  Description of Artificial Sequence: Synthetic oligonucleotide
  Sense strand starting at position 722 of SEQ ID NO: 1563455
ggaauacaucacggagcau

SEQ ID NO: 1811986 - RNA, 19 nt, Artificial Sequence
  Description of Artificial Sequence: Synthetic oligonucleotide
  Antisense strand to SEQ ID NO: 1811985
augcuccgugauguauucc

SEQ ID NO: 1811987 - RNA, 19 nt, Artificial Sequence
  Description of Artificial Sequence: Synthetic oligonucleotide
  Sense strand starting at position 890 of SEQ ID NO: 1563455
acauguaacgaacguauga

SEQ ID NO: 1811988 - RNA, 19 nt, Artificial Sequence
  Description of Artificial Sequence: Synthetic oligonucleotide
  Antisense strand to SEQ ID NO: 1811987
ucauacguucguuacaugu

SEQ ID NO: 1811989 - RNA, 19 nt, Artificial Sequence
  Description of Artificial Sequence: Synthetic oligonucleotide
  Sense strand starting at position 1055 of SEQ ID NO: 1563455
gagcaucccuuggucauuu

SEQ ID NO: 1811990 - RNA, 19 nt, Artificial Sequence
  Description of Artificial Sequence: Synthetic oligonucleotide
  Antisense strand to SEQ ID NO: 1811989
aaaugaccaagggaugcuc

SEQ ID NO: 1811991 - RNA, 19 nt, Artificial Sequence
  Description of Artificial Sequence: Synthetic oligonucleotide
  Sense strand starting at position 1056 of SEQ ID NO: 1563455
agcaucccuuggucauuua

SEQ ID NO: 1811992 - RNA, 19 nt, Artificial Sequence
  Description of Artificial Sequence: Synthetic oligonucleotide
  Antisense strand to SEQ ID NO: 1811991
uaaaugaccaagggaugcu

SEQ ID NO: 1811993 - RNA, 19 nt, Artificial Sequence
  Description of Artificial Sequence: Synthetic oligonucleotide
  Sense strand starting at position 1098 of SEQ ID NO: 1563455
ccuggcuuguaauuaacaa

SEQ ID NO: 1811994 - RNA, 19 nt, Artificial Sequence
  Description of Artificial Sequence: Synthetic oligonucleotide
  Antisense strand to SEQ ID NO: 1811993
uuguuaauuacaagccagg

SEQ ID NO: 1811995 - RNA, 19 nt, Artificial Sequence
  Description of Artificial Sequence: Synthetic oligonucleotide
  Sense strand starting at position 2176 of SEQ ID NO: 1563455
uugucaugguucucaaaga

SEQ ID NO: 1811996 - RNA, 19 nt, Artificial Sequence
  Description of Artificial Sequence: Synthetic oligonucleotide
  Antisense strand to SEQ ID NO: 1811995
ucuuugagaaccaugacaa

SEQ ID NO: 1811997 - RNA, 19 nt, Artificial Sequence
  Description of Artificial Sequence: Synthetic oligonucleotide
  Sense strand starting at position 2335 of SEQ ID NO: 1563455
uuuagaguugguuaacaua

SEQ ID NO: 1811998 - RNA, 19 nt, Artificial Sequence
  Description of Artificial Sequence: Synthetic oligonucleotide
  Antisense strand to SEQ ID NO: 1811997
uauguuaaccaacucuaaa

SEQ ID NO: 1811999 - RNA, 19 nt, Artificial Sequence
  Description of Artificial Sequence: Synthetic oligonucleotide
  Sense strand starting at position 2369 of SEQ ID NO: 1563455
auggguuuccuguaguaug

SEQ ID NO: 1812000 - RNA, 19 nt, Artificial Sequence
  Description of Artificial Sequence: Synthetic oligonucleotide
  Antisense strand to SEQ ID NO: 1811999
cauacuacaggaaacccau

SEQ ID NO: 1812001 - RNA, 19 nt, Artificial Sequence
  Description of Artificial Sequence: Synthetic oligonucleotide
  Sense strand starting at position 2374 of SEQ ID NO: 1563455
uuuccuguaguaugaacaa

SEQ ID NO: 1812002 - RNA, 19 nt, Artificial Sequence
  Description of Artificial Sequence: Synthetic oligonucleotide
  Antisense strand to SEQ ID NO: 1812001
uuguucauacuacaggaaa

SEQ ID NO: 1812003 - RNA, 19 nt, Artificial Sequence
  Description of Artificial Sequence: Synthetic oligonucleotide
  Sense strand starting at position 2525 of SEQ ID NO: 1563455
aguguuuaagugcaaauga

SEQ ID NO: 1812004 - RNA, 19 nt, Artificial Sequence
  Description of Artificial Sequence: Synthetic oligonucleotide
  Antisense strand to SEQ ID NO: 1812003
ucauuugcacuuaaacacu

SEQ ID NO: 1812005 - RNA, 19 nt, Artificial Sequence
  Description of Artificial Sequence: Synthetic oligonucleotide
  Sense strand starting at position 2554 of SEQ ID NO: 1563455
cuagaacuggcuuguaaag

SEQ ID NO: 1812006 - RNA, 19 nt, Artificial Sequence
  Description of Artificial Sequence: Synthetic oligonucleotide
  Antisense strand to SEQ ID NO: 1812005
cuuuacaagccaguucuag

SEQ ID NO: 1812007 - RNA, 19 nt, Artificial Sequence
  Description of Artificial Sequence: Synthetic oligonucleotide
  Sense strand starting at position 2570 of SEQ ID NO: 1563455
aagggcugccuuuagauua

SEQ ID NO: 1812008 - RNA, 19 nt, Artificial Sequence
  Description of Artificial Sequence: Synthetic oligonucleotide
  Antisense strand to SEQ ID NO: 1812007
uaaucuaaaggcagcccuu

SEQ ID NO: 1812009 - RNA, 19 nt, Artificial Sequence
  Description of Artificial Sequence: Synthetic oligonucleotide
  Sense strand starting at position 2575 of SEQ ID NO: 1563455
cugccuuuagauuagacuu

SEQ ID NO: 1812010 - RNA, 19 nt, Artificial Sequence
  Description of Artificial Sequence: Synthetic oligonucleotide
  Antisense strand to SEQ ID NO: 1812009
aagucuaaucuaaaggcag

SEQ ID NO: 1812011 - RNA, 19 nt, Artificial Sequence
  Description of Artificial Sequence: Synthetic oligonucleotide
  Sense strand starting at position 2654 of SEQ ID NO: 1563455
ucagaaacuuuguuuaaug

SEQ ID NO: 1812012 - RNA, 19 nt, Artificial Sequence
  Description of Artificial Sequence: Synthetic oligonucleotide
  Antisense strand to SEQ ID NO: 1812011
cauuaaacaaaguuucuga

SEQ ID NO: 1812013 - RNA, 19 nt, Artificial Sequence
  Description of Artificial Sequence: Synthetic oligonucleotide
  Sense strand starting at position 2793 of SEQ ID NO: 1563455
gggaguaauuguucuaaga

SEQ ID NO: 1812014 - RNA, 19 nt, Artificial Sequence
  Description of Artificial Sequence: Synthetic oligonucleotide
  Antisense strand to SEQ ID NO: 1812013
ucuuagaacaauuacuccc

SEQ ID NO: 1812015 - RNA, 19 nt, Artificial Sequence
  Description of Artificial Sequence: Synthetic oligonucleotide
  Sense strand starting at position 2938 of SEQ ID NO: 1563455
ggauaacuguagucagggu

SEQ ID NO: 1812016 - RNA, 19 nt, Artificial Sequence
  Description of Artificial Sequence: Synthetic oligonucleotide
  Antisense strand to SEQ ID NO: 1812015
acccugacuacaguuaucc

SEQ ID NO: 1812017 - RNA, 19 nt, Artificial Sequence
  Description of Artificial Sequence: Synthetic oligonucleotide
  Sense strand starting at position 2953 of SEQ ID NO: 1563455
ggguccuucccucaaguuu

SEQ ID NO: 1812018 - RNA, 19 nt, Artificial Sequence
  Description of Artificial Sequence: Synthetic oligonucleotide
  Antisense strand to SEQ ID NO: 1812017
aaacuugagggaaggaccc

SEQ ID NO: 1812019 - RNA, 19 nt, Artificial Sequence
  Description of Artificial Sequence: Synthetic oligonucleotide
  Sense strand starting at position 3155 of SEQ ID NO: 1563455
acagaaagguucucuagua

SEQ ID NO: 1812020 - RNA, 19 nt, Artificial Sequence
  Description of Artificial Sequence: Synthetic oligonucleotide
  Antisense strand to SEQ ID NO: 1812019
uacuagagaaccuuucugu

SEQ ID NO: 1812021 - RNA, 19 nt, Artificial Sequence
  Description of Artificial Sequence: Synthetic oligonucleotide
  Sense strand starting at position 3156 of SEQ ID NO: 1563455
cagaaagguucucuaguaa

SEQ ID NO: 1812022 - RNA, 19 nt, Artificial Sequence
  Description of Artificial Sequence: Synthetic oligonucleotide
  Antisense strand to SEQ ID NO: 1812021
uuacuagagaaccuuucug

SEQ ID NO: 1812023 - RNA, 19 nt, Artificial Sequence
  Description of Artificial Sequence: Synthetic oligonucleotide
  Sense strand starting at position 3209 of SEQ ID NO: 1563455
ggaagugagcuauguggau

SEQ ID NO: 1812024 - RNA, 19 nt, Artificial Sequence
  Description of Artificial Sequence: Synthetic oligonucleotide
  Antisense strand to SEQ ID NO: 1812023
auccacauagcucacuucc

SEQ ID NO: 1812025 - RNA, 19 nt, Artificial Sequence
  Description of Artificial Sequence: Synthetic oligonucleotide
  Sense strand starting at position 3211 of SEQ ID NO: 1563455
aagugagcuauguggauau

SEQ ID NO: 1812026 - RNA, 19 nt, Artificial Sequence
  Description of Artificial Sequence: Synthetic oligonucleotide
  Antisense strand to SEQ ID NO: 1812025
auauccacauagcucacuu

SEQ ID NO: 1812027 - RNA, 19 nt, Artificial Sequence
  Description of Artificial Sequence: Synthetic oligonucleotide
  Sense strand starting at position 3213 of SEQ ID NO: 1563455
gugagcuauguggauaucu

SEQ ID NO: 1812028 - RNA, 19 nt, Artificial Sequence
  Description of Artificial Sequence: Synthetic oligonucleotide
  Antisense strand to SEQ ID NO: 1812027
agauauccacauagcucac

SEQ ID NO: 1812029 - RNA, 19 nt, Artificial Sequence
  Description of Artificial Sequence: Synthetic oligonucleotide
  Sense strand starting at position 3215 of SEQ ID NO: 1563455
gagcuauguggauaucuag

SEQ ID NO: 1812030 - RNA, 19 nt, Artificial Sequence
  Description of Artificial Sequence: Synthetic oligonucleotide
  Antisense strand to SEQ ID NO: 1812029
cuagauauccacauagcuc

SEQ ID NO: 1812031 - RNA, 19 nt, Artificial Sequence
  Description of Artificial Sequence: Synthetic oligonucleotide
  Sense strand starting at position 3234 of SEQ ID NO: 1563455
gggaauggcacuugaauca

SEQ ID NO: 1812032 - RNA, 19 nt, Artificial Sequence
  Description of Artificial Sequence: Synthetic oligonucleotide
  Antisense strand to SEQ ID NO: 1812031
ugauucaagugccauuccc

SEQ ID NO: 1812033 - RNA, 19 nt, Artificial Sequence
  Description of Artificial Sequence: Synthetic oligonucleotide
  Sense strand starting at position 3282 of SEQ ID NO: 1563455
acagaagcauacuugauau

SEQ ID NO: 1812034 - RNA, 19 nt, Artificial Sequence
  Description of Artificial Sequence: Synthetic oligonucleotide
  Antisense strand to SEQ ID NO: 1812033
auaucaaguaugcuucugu

SEQ ID NO: 1812035 - RNA, 19 nt, Artificial Sequence
  Description of Artificial Sequence: Synthetic oligonucleotide
  Sense strand starting at position 3598 of SEQ ID NO: 1563455
uugauucuuugggccagaa

SEQ ID NO: 1812036 - RNA, 19 nt, Artificial Sequence
  Description of Artificial Sequence: Synthetic oligonucleotide
  Antisense strand to SEQ ID NO: 1812035
uucuggcccaaagaaucaa

SEQ ID NO: 1812037 - RNA, 19 nt, Artificial Sequence
  Description of Artificial Sequence: Synthetic oligonucleotide
  Sense strand starting at position 3602 of SEQ ID NO: 1563455
uucuuugggccagaaaguu

SEQ ID NO: 1812038 - RNA, 19 nt, Artificial Sequence
  Description of Artificial Sequence: Synthetic oligonucleotide
  Antisense strand to SEQ ID NO: 1812037
aacuuucuggcccaaagaa

SEQ ID NO: 1812039 - RNA, 19 nt, Artificial Sequence
  Description of Artificial Sequence: Synthetic oligonucleotide
  Sense strand starting at position 3784 of SEQ ID NO: 1563455
acccgauuaugaucugcau

SEQ ID NO: 1812040 - RNA, 19 nt, Artificial Sequence
  Description of Artificial Sequence: Synthetic oligonucleotide
  Antisense strand to SEQ ID NO: 1812039
augcagaucauaaucgggu

SEQ ID NO: 1812041 - RNA, 19 nt, Artificial Sequence
  Description of Artificial Sequence: Synthetic oligonucleotide
  Sense strand starting at position 3787 of SEQ ID NO: 1563455
cgauuaugaucugcauuaa

SEQ ID NO: 1812042 - RNA, 19 nt, Artificial Sequence
  Description of Artificial Sequence: Synthetic oligonucleotide
  Antisense strand to SEQ ID NO: 1812041
uuaaugcagaucauaaucg

SEQ ID NO: 1812043 - RNA, 19 nt, Artificial Sequence
  Description of Artificial Sequence: Synthetic oligonucleotide
  Sense strand starting at position 3927 of SEQ ID NO: 1563455
ggaauauacaaguguggcu

SEQ ID NO: 1812044 - RNA, 19 nt, Artificial Sequence
  Description of Artificial Sequence: Synthetic oligonucleotide
  Antisense strand to SEQ ID NO: 1812043
agccacacuuguauauucc

SEQ ID NO: 1812045 - RNA, 19 nt, Artificial Sequence
  Description of Artificial Sequence: Synthetic oligonucleotide
  Sense strand starting at position 3939 of SEQ ID NO: 1563455
uguggcuuuccauaaacaa

SEQ ID NO: 1812046 - RNA, 19 nt, Artificial Sequence
  Description of Artificial Sequence: Synthetic oligonucleotide
  Antisense strand to SEQ ID NO: 1812045
uuguuuauggaaagccaca

SEQ ID NO: 1812047 - RNA, 19 nt, Artificial Sequence
  Description of Artificial Sequence: Synthetic oligonucleotide
  Sense strand starting at position 68 of SEQ ID NO: 1563456
ggaggcaucuuguuaacua

SEQ ID NO: 1812048 - RNA, 19 nt, Artificial Sequence
  Description of Artificial Sequence: Synthetic oligonucleotide
  Antisense strand to SEQ ID NO: 1812047
uaguuaacaagaugccucc

SEQ ID NO: 1812049 - RNA, 19 nt, Artificial Sequence
  Description of Artificial Sequence: Synthetic oligonucleotide
  Sense strand starting at position 72 of SEQ ID NO: 1563456
gcaucuuguuaacuacaga

SEQ ID NO: 1812050 - RNA, 19 nt, Artificial Sequence
  Description of Artificial Sequence: Synthetic oligonucleotide
  Antisense strand to SEQ ID NO: 1812049
ucuguaguuaacaagaugc

SEQ ID NO: 1812051 - RNA, 19 nt, Artificial Sequence
  Description of Artificial Sequence: Synthetic oligonucleotide
  Sense strand starting at position 160 of SEQ ID NO: 1563456
accaaauagcagugagacu

SEQ ID NO: 1812052 - RNA, 19 nt, Artificial Sequence
  Description of Artificial Sequence: Synthetic oligonucleotide
  Antisense strand to SEQ ID NO: 1812051
agucucacugcuauuuggu

SEQ ID NO: 1812053 - RNA, 19 nt, Artificial Sequence
  Description of Artificial Sequence: Synthetic oligonucleotide
  Sense strand starting at position 222 of SEQ ID NO: 1563456
gguaaagugagaggguaua

SEQ ID NO: 1812054 - RNA, 19 nt, Artificial Sequence
  Description of Artificial Sequence: Synthetic oligonucleotide
  Antisense strand to SEQ ID NO: 1812053
uauacccucucacuuuacc

SEQ ID NO: 1812055 - RNA, 19 nt, Artificial Sequence
  Description of Artificial Sequence: Synthetic oligonucleotide
  Sense strand starting at position 538 of SEQ ID NO: 1563456
ugcauuaaaugagcucuaa

SEQ ID NO: 1812056 - RNA, 19 nt, Artificial Sequence
  Description of Artificial Sequence: Synthetic oligonucleotide
  Antisense strand to SEQ ID NO: 1812055
uuagagcucauuuaaugca

SEQ ID NO: 1812057 - RNA, 19 nt, Artificial Sequence
  Description of Artificial Sequence: Synthetic oligonucleotide
  Sense strand starting at position 572 of SEQ ID NO: 1563456
uguaguaacgagcauaaau

SEQ ID NO: 1812058 - RNA, 19 nt, Artificial Sequence
  Description of Artificial Sequence: Synthetic oligonucleotide
  Antisense strand to SEQ ID NO: 1812057
auuuaugcucguuacuaca

SEQ ID NO: 1812059 - RNA, 19 nt, Artificial Sequence
  Description of Artificial Sequence: Synthetic oligonucleotide
  Sense strand starting at position 574 of SEQ ID NO: 1563456
uaguaacgagcauaaauau

SEQ ID NO: 1812060 - RNA, 19 nt, Artificial Sequence
  Description of Artificial Sequence: Synthetic oligonucleotide
  Antisense strand to SEQ ID NO: 1812059
auauuuaugcucguuacua

SEQ ID NO: 1812061 - RNA, 19 nt, Artificial Sequence
  Description of Artificial Sequence: Synthetic oligonucleotide
  Sense strand starting at position 603 of SEQ ID NO: 1563456
cugacaugacugcaaugua

SEQ ID NO: 1812062 - RNA, 19 nt, Artificial Sequence
  Description of Artificial Sequence: Synthetic oligonucleotide
  Antisense strand to SEQ ID NO: 1812061
uacauugcagucaugucag

SEQ ID NO: 1812063 - RNA, 19 nt, Artificial Sequence
  Description of Artificial Sequence: Synthetic oligonucleotide
  Sense strand starting at position 606 of SEQ ID NO: 1563456
acaugacugcaauguaaca

SEQ ID NO: 1812064 - RNA, 19 nt, Artificial Sequence
  Description of Artificial Sequence: Synthetic oligonucleotide
  Antisense strand to SEQ ID NO: 1812063
uguuacauugcagucaugu

SEQ ID NO: 1812065 - RNA, 19 nt, Artificial Sequence
  Description of Artificial Sequence: Synthetic oligonucleotide
  Sense strand starting at position 649 of SEQ ID NO: 1563456
augacaaagucaucaaugu

SEQ ID NO: 1812066 - RNA, 19 nt, Artificial Sequence
  Description of Artificial Sequence: Synthetic oligonucleotide
  Antisense strand to SEQ ID NO: 1812065
acauugaugacuuugucau

SEQ ID NO: 1812067 - RNA, 19 nt, Artificial Sequence
  Description of Artificial Sequence: Synthetic oligonucleotide
  Sense strand starting at position 650 of SEQ ID NO: 1563456
ugacaaagucaucaauguu

SEQ ID NO: 1812068 - RNA, 19 nt, Artificial Sequence
  Description of Artificial Sequence: Synthetic oligonucleotide
  Antisense strand to SEQ ID NO: 1812067
aacauugaugacuuuguca

SEQ ID NO: 1812069 - RNA, 19 nt, Artificial Sequence
  Description of Artificial Sequence: Synthetic oligonucleotide
  Sense strand starting at position 681 of SEQ ID NO: 1563456
gcuuguuaucuacacuaua

SEQ ID NO: 1812070 - RNA, 19 nt, Artificial Sequence
  Description of Artificial Sequence: Synthetic oligonucleotide
  Antisense strand to SEQ ID NO: 1812069
uauaguguagauaacaagc

SEQ ID NO: 1812071 - RNA, 19 nt, Artificial Sequence
  Description of Artificial Sequence: Synthetic oligonucleotide
  Sense strand starting at position 938 of SEQ ID NO: 1563456
ccuuaacaucugggagcua

SEQ ID NO: 1812072 - RNA, 19 nt, Artificial Sequence
  Description of Artificial Sequence: Synthetic oligonucleotide
  Antisense strand to SEQ ID NO: 1812071
uagcucccagauguuaagg

SEQ ID NO: 1812073 - RNA, 19 nt, Artificial Sequence
  Description of Artificial Sequence: Synthetic oligonucleotide
  Sense strand starting at position 954 of SEQ ID NO: 1563456
cuaagcugggcuuaacuaa

SEQ ID NO: 1812074 - RNA, 19 nt, Artificial Sequence
  Description of Artificial Sequence: Synthetic oligonucleotide
  Antisense strand to SEQ ID NO: 1812073
uuaguuaagcccagcuuag

SEQ ID NO: 1812075 - RNA, 19 nt, Artificial Sequence
  Description of Artificial Sequence: Synthetic oligonucleotide
  Sense strand starting at position 1147 of SEQ ID NO: 1563456
ugcguucuccuugcagcaa

SEQ ID NO: 1812076 - RNA, 19 nt, Artificial Sequence
  Description of Artificial Sequence: Synthetic oligonucleotide
  Antisense strand to SEQ ID NO: 1812075
uugcugcaaggagaacgca

SEQ ID NO: 1812077 - RNA, 19 nt, Artificial Sequence
  Description of Artificial Sequence: Synthetic oligonucleotide
  Sense strand starting at position 1425 of SEQ ID NO: 1563456
uguggucuuguacaaauua

SEQ ID NO: 1812078 - RNA, 19 nt, Artificial Sequence
  Description of Artificial Sequence: Synthetic oligonucleotide
  Antisense strand to SEQ ID NO: 1812077
uaauuuguacaagaccaca

SEQ ID NO: 1812079 - RNA, 19 nt, Artificial Sequence
  Description of Artificial Sequence: Synthetic oligonucleotide
  Sense strand starting at position 1506 of SEQ ID NO: 1563456
cguuguuggaaagauuaga

SEQ ID NO: 1812080 - RNA, 19 nt, Artificial Sequence
  Description of Artificial Sequence: Synthetic oligonucleotide
  Antisense strand to SEQ ID NO: 1812079
ucuaaucuuuccaacaacg

SEQ ID NO: 1812081 - RNA, 19 nt, Artificial Sequence
  Description of Artificial Sequence: Synthetic oligonucleotide
  Sense strand starting at position 1569 of SEQ ID NO: 1563456
ugcuguaucagugcuuguu

SEQ ID NO: 1812082 - RNA, 19 nt, Artificial Sequence
  Description of Artificial Sequence: Synthetic oligonucleotide
  Antisense strand to SEQ ID NO: 1812081
aacaagcacugauacagca

SEQ ID NO: 1812083 - RNA, 19 nt, Artificial Sequence
  Description of Artificial Sequence: Synthetic oligonucleotide
  Sense strand starting at position 1570 of SEQ ID NO: 1563456
gcuguaucagugcuuguuu

SEQ ID NO: 1812084 - RNA, 19 nt, Artificial Sequence
  Description of Artificial Sequence: Synthetic oligonucleotide
  Antisense strand to SEQ ID NO: 1812083
aaacaagcacugauacagc

SEQ ID NO: 1812085 - RNA, 19 nt, Artificial Sequence
  Description of Artificial Sequence: Synthetic oligonucleotide
  Sense strand starting at position 2121 of SEQ ID NO: 1563456
cuucuagaaccgggugauu

SEQ ID NO: 1812086 - RNA, 19 nt, Artificial Sequence
  Description of Artificial Sequence: Synthetic oligonucleotide
  Antisense strand to SEQ ID NO: 1812085
aaucacccgguucuagaag

SEQ ID NO: 1812087 - RNA, 19 nt, Artificial Sequence
  Description of Artificial Sequence: Synthetic oligonucleotide
  Sense strand starting at position 2123 of SEQ ID NO: 1563456
ucuagaaccgggugauuga

SEQ ID NO: 1812088 - RNA, 19 nt, Artificial Sequence
  Description of Artificial Sequence: Synthetic oligonucleotide
  Antisense strand to SEQ ID NO: 1812087
ucaaucacccgguucuaga

SEQ ID NO: 1812089 - RNA, 19 nt, Artificial Sequence
  Description of Artificial Sequence: Synthetic oligonucleotide
  Sense strand starting at position 2193 of SEQ ID NO: 1563456
gccugcuugcgguuggaga

SEQ ID NO: 1812090 - RNA, 19 nt, Artificial Sequence
  Description of Artificial Sequence: Synthetic oligonucleotide
  Antisense strand to SEQ ID NO: 1812089
ucuccaaccgcaagcaggc

SEQ ID NO: 1812091 - RNA, 19 nt, Artificial Sequence
  Description of Artificial Sequence: Synthetic oligonucleotide
  Sense strand starting at position 2301 of SEQ ID NO: 1563456
cgacauguucaaggugaga

SEQ ID NO: 1812092 - RNA, 19 nt, Artificial Sequence
  Description of Artificial Sequence: Synthetic oligonucleotide
  Antisense strand to SEQ ID NO: 1812091
ucucaccuugaacaugucg

SEQ ID NO: 1812093 - RNA, 19 nt, Artificial Sequence
  Description of Artificial Sequence: Synthetic oligonucleotide
  Sense strand starting at position 2539 of SEQ ID NO: 1563456
uuggguugugcuuucguga

SEQ ID NO: 1812094 - RNA, 19 nt, Artificial Sequence
  Description of Artificial Sequence: Synthetic oligonucleotide
  Antisense strand to SEQ ID NO: 1812093
ucacgaaagcacaacccaa

SEQ ID NO: 1812095 - RNA, 19 nt, Artificial Sequence
  Description of Artificial Sequence: Synthetic oligonucleotide
  Sense strand starting at position 2540 of SEQ ID NO: 1563456
uggguugugcuuucgugaa

SEQ ID NO: 1812096 - RNA, 19 nt, Artificial Sequence
  Description of Artificial Sequence: Synthetic oligonucleotide
  Antisense strand to SEQ ID NO: 1812095
uucacgaaagcacaaccca

SEQ ID NO: 1812097 - RNA, 19 nt, Artificial Sequence
  Description of Artificial Sequence: Synthetic oligonucleotide
  Sense strand starting at position 2808 of SEQ ID NO: 1563456
uccacuccucagggaacau

SEQ ID NO: 1812098 - RNA, 19 nt, Artificial Sequence
  Description of Artificial Sequence: Synthetic oligonucleotide
  Antisense strand to SEQ ID NO: 1812097
auguucccugaggagugga

SEQ ID NO: 1812099 - RNA, 19 nt, Artificial Sequence
  Description of Artificial Sequence: Synthetic oligonucleotide
  Sense strand starting at position 3315 of SEQ ID NO: 1563456
ggccuaguauuugcucuua

SEQ ID NO: 1812100 - RNA, 19 nt, Artificial Sequence
  Description of Artificial Sequence: Synthetic oligonucleotide
  Antisense strand to SEQ ID NO: 1812099
uaagagcaaauacuaggcc

SEQ ID NO: 1812101 - RNA, 19 nt, Artificial Sequence
  Description of Artificial Sequence: Synthetic oligonucleotide
  Sense strand starting at position 3350 of SEQ ID NO: 1563456
cucacaguuuagucaggaa

SEQ ID NO: 1812102 - RNA, 19 nt, Artificial Sequence
  Description of Artificial Sequence: Synthetic oligonucleotide
  Antisense strand to SEQ ID NO: 1812101
uuccugacuaaacugugag

SEQ ID NO: 1812103 - RNA, 19 nt, Artificial Sequence
  Description of Artificial Sequence: Synthetic oligonucleotide
  Sense strand starting at position 3479 of SEQ ID NO: 1563456
ccaguuuaacuauaugugu

SEQ ID NO: 1812104 - RNA, 19 nt, Artificial Sequence
  Description of Artificial Sequence: Synthetic oligonucleotide
  Antisense strand to SEQ ID NO: 1812103
acacauauaguuaaacugg

SEQ ID NO: 1812105 - RNA, 19 nt, Artificial Sequence
  Description of Artificial Sequence: Synthetic oligonucleotide
  Sense strand starting at position 3484 of SEQ ID NO: 1563456
uuaacuauauguguaccaa

SEQ ID NO: 1812106 - RNA, 19 nt, Artificial Sequence
  Description of Artificial Sequence: Synthetic oligonucleotide
  Antisense strand to SEQ ID NO: 1812105
uugguacacauauaguuaa

SEQ ID NO: 1812107 - RNA, 19 nt, Artificial Sequence
  Description of Artificial Sequence: Synthetic oligonucleotide
  Sense strand starting at position 3496 of SEQ ID NO: 1563456
guaccaacaguguaguaaa

SEQ ID NO: 1812108 - RNA, 19 nt, Artificial Sequence
  Description of Artificial Sequence: Synthetic oligonucleotide
  Antisense strand to SEQ ID NO: 1812107
uuuacuacacuguugguac

SEQ ID NO: 1812109 - RNA, 19 nt, Artificial Sequence
  Description of Artificial Sequence: Synthetic oligonucleotide
  Sense strand starting at position 3504 of SEQ ID NO: 1563456
aguguaguaaaguaguaaa

SEQ ID NO: 1812110 - RNA, 19 nt, Artificial Sequence
  Description of Artificial Sequence: Synthetic oligonucleotide
  Antisense strand to SEQ ID NO: 1812109
uuuacuacuuuacuacacu

SEQ ID NO: 1812111 - RNA, 19 nt, Artificial Sequence
  Description of Artificial Sequence: Synthetic oligonucleotide
  Sense strand starting at position 3581 of SEQ ID NO: 1563456
cucaaaggaucugcacaua

SEQ ID NO: 1812112 - RNA, 19 nt, Artificial Sequence
  Description of Artificial Sequence: Synthetic oligonucleotide
  Antisense strand to SEQ ID NO: 1812111
uaugugcagauccuuugag

SEQ ID NO: 1812113 - RNA, 19 nt, Artificial Sequence
  Description of Artificial Sequence: Synthetic oligonucleotide
  Sense strand starting at position 3711 of SEQ ID NO: 1563456
aucuauuguuggguaacaa

SEQ ID NO: 1812114 - RNA, 19 nt, Artificial Sequence
  Description of Artificial Sequence: Synthetic oligonucleotide
  Antisense strand to SEQ ID NO: 1812113
uuguuacccaacaauagau

SEQ ID NO: 1812115 - RNA, 19 nt, Artificial Sequence
  Description of Artificial Sequence: Synthetic oligonucleotide
  Sense strand starting at position 3712 of SEQ ID NO: 1563456
ucuauuguuggguaacaaa

SEQ ID NO: 1812116 - RNA, 19 nt, Artificial Sequence
  Description of Artificial Sequence: Synthetic oligonucleotide
  Antisense strand to SEQ ID NO: 1812115
uuuguuacccaacaauaga

SEQ ID NO: 1812117 - RNA, 19 nt, Artificial Sequence
  Description of Artificial Sequence: Synthetic oligonucleotide
  Sense strand starting at position 3722 of SEQ ID NO: 1563456
gguaacaaaucacugcaaa

SEQ ID NO: 1812118 - RNA, 19 nt, Artificial Sequence
  Description of Artificial Sequence: Synthetic oligonucleotide
  Antisense strand to SEQ ID NO: 1812117
uuugcagugauuuguuacc

SEQ ID NO: 1812119 - RNA, 19 nt, Artificial Sequence
  Description of Artificial Sequence: Synthetic oligonucleotide
  Sense strand starting at position 3798 of SEQ ID NO: 1563456
uggugacuugacugaaagu

SEQ ID NO: 1812120 - RNA, 19 nt, Artificial Sequence
  Description of Artificial Sequence: Synthetic oligonucleotide
  Antisense strand to SEQ ID NO: 1812119
acuuucagucaagucacca

SEQ ID NO: 1812121 - RNA, 19 nt, Artificial Sequence
  Description of Artificial Sequence: Synthetic oligonucleotide
  Sense strand starting at position 3799 of SEQ ID NO: 1563456
ggugacuugacugaaaguu

SEQ ID NO: 1812122 - RNA, 19 nt, Artificial Sequence
  Description of Artificial Sequence: Synthetic oligonucleotide
  Antisense strand to SEQ ID NO: 1812121
aacuuucagucaagucacc

SEQ ID NO: 1812123 - RNA, 19 nt, Artificial Sequence
  Description of Artificial Sequence: Synthetic oligonucleotide
  Sense strand starting at position 3879 of SEQ ID NO: 1563456
cuugguuacugacuuccaa

SEQ ID NO: 1812124 - RNA, 19 nt, Artificial Sequence
  Description of Artificial Sequence: Synthetic oligonucleotide
  Antisense strand to SEQ ID NO: 1812123
uuggaagucaguaaccaag

SEQ ID NO: 1812125 - RNA, 19 nt, Artificial Sequence
  Description of Artificial Sequence: Synthetic oligonucleotide
  Sense strand starting at position 3958 of SEQ ID NO: 1563456
uagccaaguccagaguuga

SEQ ID NO: 1812126 - RNA, 19 nt, Artificial Sequence
  Description of Artificial Sequence: Synthetic oligonucleotide
  Antisense strand to SEQ ID NO: 1812125
ucaacucuggacuuggcua

SEQ ID NO: 1812127 - RNA, 19 nt, Artificial Sequence
  Description of Artificial Sequence: Synthetic oligonucleotide
  Sense strand starting at position 53 of SEQ ID NO: 1563457
ugaacauagccaugugcua

SEQ ID NO: 1812128 - RNA, 19 nt, Artificial Sequence
  Description of Artificial Sequence: Synthetic oligonucleotide
  Antisense strand to SEQ ID NO: 1812127
uagcacauggcuauguuca

SEQ ID NO: 1812129 - RNA, 19 nt, Artificial Sequence
  Description of Artificial Sequence: Synthetic oligonucleotide
  Sense strand starting at position 847 of SEQ ID NO: 1563457
ggagaguaugugugaggua

SEQ ID NO: 1812130 - RNA, 19 nt, Artificial Sequence
  Description of Artificial Sequence: Synthetic oligonucleotide
  Antisense strand to SEQ ID NO: 1812129
uaccucacacauacucucc

SEQ ID NO: 1812131 - RNA, 19 nt, Artificial Sequence
  Description of Artificial Sequence: Synthetic oligonucleotide
  Sense strand starting at position 852 of SEQ ID NO: 1563457
guaugugugagguaaccua

SEQ ID NO: 1812132 - RNA, 19 nt, Artificial Sequence
  Description of Artificial Sequence: Synthetic oligonucleotide
  Antisense strand to SEQ ID NO: 1812131
uagguuaccucacacauac

SEQ ID NO: 1812133 - RNA, 19 nt, Artificial Sequence
  Description of Artificial Sequence: Synthetic oligonucleotide
  Sense strand starting at position 862 of SEQ ID NO: 1563457
gguaaccuauuauuauaga

SEQ ID NO: 1812134 - RNA, 19 nt, Artificial Sequence
  Description of Artificial Sequence: Synthetic oligonucleotide
  Antisense strand to SEQ ID NO: 1812133
ucuauaauaauagguuacc

SEQ ID NO: 1812135 - RNA, 19 nt, Artificial Sequence
  Description of Artificial Sequence: Synthetic oligonucleotide
  Sense strand starting at position 890 of SEQ ID NO: 1563457
cuuccuuaggcugacuaga

SEQ ID NO: 1812136 - RNA, 19 nt, Artificial Sequence
  Description of Artificial Sequence: Synthetic oligonucleotide
  Antisense strand to SEQ ID NO: 1812135
ucuagucagccuaaggaag

SEQ ID NO: 1812137 - RNA, 19 nt, Artificial Sequence
  Description of Artificial Sequence: Synthetic oligonucleotide
  Sense strand starting at position 899 of SEQ ID NO: 1563457
gcugacuagagauggucaa

SEQ ID NO: 1812138 - RNA, 19 nt, Artificial Sequence
  Description of Artificial Sequence: Synthetic oligonucleotide
  Antisense strand to SEQ ID NO: 1812137
uugaccaucucuagucagc

SEQ ID NO: 1812139 - RNA, 19 nt, Artificial Sequence
  Description of Artificial Sequence: Synthetic oligonucleotide
  Sense strand starting at position 900 of SEQ ID NO: 1563457
cugacuagagauggucaau

SEQ ID NO: 1812140 - RNA, 19 nt, Artificial Sequence
  Description of Artificial Sequence: Synthetic oligonucleotide
  Antisense strand to SEQ ID NO: 1812139
auugaccaucucuagucag

SEQ ID NO: 1812141 - RNA, 19 nt, Artificial Sequence
  Description of Artificial Sequence: Synthetic oligonucleotide
  Sense strand starting at position 1165 of SEQ ID NO: 1563457
ucuugaaggccuuauucua

SEQ ID NO: 1812142 - RNA, 19 nt, Artificial Sequence
  Description of Artificial Sequence: Synthetic oligonucleotide
  Antisense strand to SEQ ID NO: 1812141
uagaauaaggccuucaaga

SEQ ID NO: 1812143 - RNA, 19 nt, Artificial Sequence
  Description of Artificial Sequence: Synthetic oligonucleotide
  Sense strand starting at position 1261 of SEQ ID NO: 1563457
aagguauuugcuggcauac

SEQ ID NO: 1812144 - RNA, 19 nt, Artificial Sequence
  Description of Artificial Sequence: Synthetic oligonucleotide
  Antisense strand to SEQ ID NO: 1812143
guaugccagcaaauaccuu

SEQ ID NO: 1812145 - RNA, 19 nt, Artificial Sequence
  Description of Artificial Sequence: Synthetic oligonucleotide
  Sense strand starting at position 1271 of SEQ ID NO: 1563457
cuggcauacucugcaugau

SEQ ID NO: 1812146 - RNA, 19 nt, Artificial Sequence
  Description of Artificial Sequence: Synthetic oligonucleotide
  Antisense strand to SEQ ID NO: 1812145
aucaugcagaguaugccag

SEQ ID NO: 1812147 - RNA, 19 nt, Artificial Sequence
  Description of Artificial Sequence: Synthetic oligonucleotide
  Sense strand starting at position 1272 of SEQ ID NO: 1563457
uggcauacucugcaugauu

SEQ ID NO: 1812148 - RNA, 19 nt, Artificial Sequence
  Description of Artificial Sequence: Synthetic oligonucleotide
  Antisense strand to SEQ ID NO: 1812147
aaucaugcagaguaugcca

SEQ ID NO: 1812149 - RNA, 19 nt, Artificial Sequence
  Description of Artificial Sequence: Synthetic oligonucleotide
  Sense strand starting at position 1342 of SEQ ID NO: 1563457
gauggugucuggagggaga

SEQ ID NO: 1812150 - RNA, 19 nt, Artificial Sequence
  Description of Artificial Sequence: Synthetic oligonucleotide
  Antisense strand to SEQ ID NO: 1812149
ucucccuccagacaccauc

SEQ ID NO: 1812151 - RNA, 19 nt, Artificial Sequence
  Description of Artificial Sequence: Synthetic oligonucleotide
  Sense strand starting at position 1568 of SEQ ID NO: 1563457
uacuuuacugcggauguaa

SEQ ID NO: 1812152 - RNA, 19 nt, Artificial Sequence
  Description of Artificial Sequence: Synthetic oligonucleotide
  Antisense strand to SEQ ID NO: 1812151
uuacauccgcaguaaagua

SEQ ID NO: 1812153 - RNA, 19 nt, Artificial Sequence
  Description of Artificial Sequence: Synthetic oligonucleotide
  Sense strand starting at position 1570 of SEQ ID NO: 1563457
cuuuacugcggauguaaua

SEQ ID NO: 1812154 - RNA, 19 nt, Artificial Sequence
  Description of Artificial Sequence: Synthetic oligonucleotide
  Antisense strand to SEQ ID NO: 1812153
uauuacauccgcaguaaag

SEQ ID NO: 1812155 - RNA, 19 nt, Artificial Sequence
  Description of Artificial Sequence: Synthetic oligonucleotide
  Sense strand starting at position 1621 of SEQ ID NO: 1563457
ccagaaacugcugauuauc

SEQ ID NO: 1812156 - RNA, 19 nt, Artificial Sequence
  Description of Artificial Sequence: Synthetic oligonucleotide
  Antisense strand to SEQ ID NO: 1812155
gauaaucagcaguuucugg

SEQ ID NO: 1812157 - RNA, 19 nt, Artificial Sequence
  Description of Artificial Sequence: Synthetic oligonucleotide
  Sense strand starting at position 1627 of SEQ ID NO: 1563457
acugcugauuaucugagaa

SEQ ID NO: 1812158 - RNA, 19 nt, Artificial Sequence
  Description of Artificial Sequence: Synthetic oligonucleotide
  Antisense strand to SEQ ID NO: 1812157
uucucagauaaucagcagu

SEQ ID NO: 1812159 - RNA, 19 nt, Artificial Sequence
  Description of Artificial Sequence: Synthetic oligonucleotide
  Sense strand starting at position 1631 of SEQ ID NO: 1563457
cugauuaucugagaagaga

SEQ ID NO: 1812160 - RNA, 19 nt, Artificial Sequence
  Description of Artificial Sequence: Synthetic oligonucleotide
  Antisense strand to SEQ ID NO: 1812159
ucucuucucagauaaucag

SEQ ID NO: 1812161 - RNA, 19 nt, Artificial Sequence
  Description of Artificial Sequence: Synthetic oligonucleotide
  Sense strand starting at position 1665 of SEQ ID NO: 1563457
gggcccauuucugugaucu

SEQ ID NO: 1812162 - RNA, 19 nt, Artificial Sequence
  Description of Artificial Sequence: Synthetic oligonucleotide
  Antisense strand to SEQ ID NO: 1812161
agaucacagaaaugggccc

SEQ ID NO: 1812163 - RNA, 19 nt, Artificial Sequence
  Description of Artificial Sequence: Synthetic oligonucleotide
  Sense strand starting at position 1666 of SEQ ID NO: 1563457
ggcccauuucugugaucuc

SEQ ID NO: 1812164 - RNA, 19 nt, Artificial Sequence
  Description of Artificial Sequence: Synthetic oligonucleotide
  Antisense strand to SEQ ID NO: 1812163
gagaucacagaaaugggcc

SEQ ID NO: 1812165 - RNA, 19 nt, Artificial Sequence
  Description of Artificial Sequence: Synthetic oligonucleotide
  Sense strand starting at position 1737 of SEQ ID NO: 1563457
cccucaccuccauguuuga

SEQ ID NO: 1812166 - RNA, 19 nt, Artificial Sequence
  Description of Artificial Sequence: Synthetic oligonucleotide
  Antisense strand to SEQ ID NO: 1812165
ucaaacauggaggugaggg

SEQ ID NO: 1812167 - RNA, 19 nt, Artificial Sequence
  Description of Artificial Sequence: Synthetic oligonucleotide
  Sense strand starting at position 1762 of SEQ ID NO: 1563457
ugaacaugcccucaagauc

SEQ ID NO: 1812168 - RNA, 19 nt, Artificial Sequence
  Description of Artificial Sequence: Synthetic oligonucleotide
  Antisense strand to SEQ ID NO: 1812167
gaucuugagggcauguuca

SEQ ID NO: 1812169 - RNA, 19 nt, Artificial Sequence
  Description of Artificial Sequence: Synthetic oligonucleotide
  Sense strand starting at position 1773 of SEQ ID NO: 1563457
ucaagaucgccucacucuu

SEQ ID NO: 1812170 - RNA, 19 nt, Artificial Sequence
  Description of Artificial Sequence: Synthetic oligonucleotide
  Antisense strand to SEQ ID NO: 1812169
aagagugaggcgaucuuga

SEQ ID NO: 1812171 - RNA, 19 nt, Artificial Sequence
  Description of Artificial Sequence: Synthetic oligonucleotide
  Sense strand starting at position 1815 of SEQ ID NO: 1563457
gcagaaggaggguguucua

SEQ ID NO: 1812172 - RNA, 19 nt, Artificial Sequence
  Description of Artificial Sequence: Synthetic oligonucleotide
  Antisense strand to SEQ ID NO: 1812171
uagaacacccuccuucugc

SEQ ID NO: 1812173 - RNA, 19 nt, Artificial Sequence
  Description of Artificial Sequence: Synthetic oligonucleotide
  Sense strand starting at position 1924 of SEQ ID NO: 1563457
gcaggagagagcuguugau

SEQ ID NO: 1812174 - RNA, 19 nt, Artificial Sequence
  Description of Artificial Sequence: Synthetic oligonucleotide
  Antisense strand to SEQ ID NO: 1812173
aucaacagcucucuccugc

SEQ ID NO: 1812175 - RNA, 19 nt, Artificial Sequence
  Description of Artificial Sequence: Synthetic oligonucleotide
  Sense strand starting at position 1928 of SEQ ID NO: 1563457
gagagagcuguugauaguu

SEQ ID NO: 1812176 - RNA, 19 nt, Artificial Sequence
  Description of Artificial Sequence: Synthetic oligonucleotide
  Antisense strand to SEQ ID NO: 1812175
aacuaucaacagcucucuc

SEQ ID NO: 1812177 - RNA, 19 nt, Artificial Sequence
  Description of Artificial Sequence: Synthetic oligonucleotide
  Sense strand starting at position 1982 of SEQ ID NO: 1563457
acugcaguuaagggauuau

SEQ ID NO: 1812178 - RNA, 19 nt, Artificial Sequence
  Description of Artificial Sequence: Synthetic oligonucleotide
  Antisense strand to SEQ ID NO: 1812177
auaaucccuuaacugcagu

SEQ ID NO: 1812179 - RNA, 19 nt, Artificial Sequence
  Description of Artificial Sequence: Synthetic oligonucleotide
  Sense strand starting at position 2065 of SEQ ID NO: 1563457
ggguauguuaaagauuagu

SEQ ID NO: 1812180 - RNA, 19 nt, Artificial Sequence
  Description of Artificial Sequence: Synthetic oligonucleotide
  Antisense strand to SEQ ID NO: 1812179
acuaaucuuuaacauaccc

SEQ ID NO: 1812181 - RNA, 19 nt, Artificial Sequence
  Description of Artificial Sequence: Synthetic oligonucleotide
  Sense strand starting at position 2071 of SEQ ID NO: 1563457
guuaaagauuaguuggaaa

SEQ ID NO: 1812182 - RNA, 19 nt, Artificial Sequence
  Description of Artificial Sequence: Synthetic oligonucleotide
  Antisense strand to SEQ ID NO: 1812181
uuuccaacuaaucuuuaac

SEQ ID NO: 1812183 - RNA, 19 nt, Artificial Sequence
  Description of Artificial Sequence: Synthetic oligonucleotide
  Sense strand starting at position 2660 of SEQ ID NO: 1563457
gaacaaucggaggguagau

SEQ ID NO: 1812184 - RNA, 19 nt, Artificial Sequence
  Description of Artificial Sequence: Synthetic oligonucleotide
  Antisense strand to SEQ ID NO: 1812183
aucuacccuccgauuguuc

SEQ ID NO: 1812185 - RNA, 19 nt, Artificial Sequence
  Description of Artificial Sequence: Synthetic oligonucleotide
  Sense strand starting at position 2956 of SEQ ID NO: 1563457
caggcuuuaggguguaaca

SEQ ID NO: 1812186 - RNA, 19 nt, Artificial Sequence
  Description of Artificial Sequence: Synthetic oligonucleotide
  Antisense strand to SEQ ID NO: 1812185
uguuacacccuaaagccug

SEQ ID NO: 1812187 - RNA, 19 nt, Artificial Sequence
  Description of Artificial Sequence: Synthetic oligonucleotide
  Sense strand starting at position 3141 of SEQ ID NO: 1563457
cagauauguccaggucagg

SEQ ID NO: 1812188 - RNA, 19 nt, Artificial Sequence
  Description of Artificial Sequence: Synthetic oligonucleotide
  Antisense strand to SEQ ID NO: 1812187
ccugaccuggacauaucug

SEQ ID NO: 1812189 - RNA, 19 nt, Artificial Sequence
  Description of Artificial Sequence: Synthetic oligonucleotide
  Sense strand starting at position 3196 of SEQ ID NO: 1563457
gugccaaaggaguacucau

SEQ ID NO: 1812190 - RNA, 19 nt, Artificial Sequence
  Description of Artificial Sequence: Synthetic oligonucleotide
  Antisense strand to SEQ ID NO: 1812189
augaguacuccuuuggcac

SEQ ID NO: 1812191 - RNA, 19 nt, Artificial Sequence
  Description of Artificial Sequence: Synthetic oligonucleotide
  Sense strand starting at position 3203 of SEQ ID NO: 1563457
aggaguacucaugaugucu

SEQ ID NO: 1812192 - RNA, 19 nt, Artificial Sequence
  Description of Artificial Sequence: Synthetic oligonucleotide
  Antisense strand to SEQ ID NO: 1812191
agacaucaugaguacuccu

SEQ ID NO: 1812193 - RNA, 19 nt, Artificial Sequence
  Description of Artificial Sequence: Synthetic oligonucleotide
  Sense strand starting at position 3500 of SEQ ID NO: 1563457
cgugguauucaguaacaag

SEQ ID NO: 1812194 - RNA, 19 nt, Artificial Sequence
  Description of Artificial Sequence: Synthetic oligonucleotide
  Antisense strand to SEQ ID NO: 1812193
cuuguuacugaauaccacg

SEQ ID NO: 1812195 - RNA, 19 nt, Artificial Sequence
  Description of Artificial Sequence: Synthetic oligonucleotide
  Sense strand starting at position 3511 of SEQ ID NO: 1563457
guaacaagauccucuaggu

SEQ ID NO: 1812196 - RNA, 19 nt, Artificial Sequence
  Description of Artificial Sequence: Synthetic oligonucleotide
  Antisense strand to SEQ ID NO: 1812195
accuagaggaucuuguuac

SEQ ID NO: 1812197 - RNA, 19 nt, Artificial Sequence
  Description of Artificial Sequence: Synthetic oligonucleotide
  Sense strand starting at position 3527 of SEQ ID NO: 1563457
gguucuucagggugggaau

SEQ ID NO: 1812198 - RNA, 19 nt, Artificial Sequence
  Description of Artificial Sequence: Synthetic oligonucleotide
  Antisense strand to SEQ ID NO: 1812197
auucccacccugaagaacc

SEQ ID NO: 1812199 - RNA, 19 nt, Artificial Sequence
  Description of Artificial Sequence: Synthetic oligonucleotide
  Sense strand starting at position 3528 of SEQ ID NO: 1563457
guucuucagggugggaauu

SEQ ID NO: 1812200 - RNA, 19 nt, Artificial Sequence
  Description of Artificial Sequence: Synthetic oligonucleotide
  Antisense strand to SEQ ID NO: 1812199
aauucccacccugaagaac

SEQ ID NO: 1812201 - RNA, 19 nt, Artificial Sequence
  Description of Artificial Sequence: Synthetic oligonucleotide
  Sense strand starting at position 3620 of SEQ ID NO: 1563457
ccaguugucccauaugaaa

SEQ ID NO: 1812202 - RNA, 19 nt, Artificial Sequence
  Description of Artificial Sequence: Synthetic oligonucleotide
  Antisense strand to SEQ ID NO: 1812201
uuucauaugggacaacugg

SEQ ID NO: 1812203 - RNA, 19 nt, Artificial Sequence
  Description of Artificial Sequence: Synthetic oligonucleotide
  Sense strand starting at position 3635 of SEQ ID NO: 1563457
gaaauaaagugauucugug

SEQ ID NO: 1812204 - RNA, 19 nt, Artificial Sequence
  Description of Artificial Sequence: Synthetic oligonucleotide
  Antisense strand to SEQ ID NO: 1812203
cacagaaucacuuuauuuc

SEQ ID NO: 1812205 - RNA, 19 nt, Artificial Sequence
  Description of Artificial Sequence: Synthetic oligonucleotide
  Sense strand starting at position 3639 of SEQ ID NO: 1563457
uaaagugauucuguguucu

SEQ ID NO: 1812206 - RNA, 19 nt, Artificial Sequence
  Description of Artificial Sequence: Synthetic oligonucleotide
  Antisense strand to SEQ ID NO: 1812205
agaacacagaaucacuuua

SEQ ID NO: 1812207 - RNA, 19 nt, Artificial Sequence
  Description of Artificial Sequence: Synthetic oligonucleotide
  Sense strand starting at position 1084 of SEQ ID NO: 1563458
cgcauacacacguauguuu

SEQ ID NO: 1812208 - RNA, 19 nt, Artificial Sequence
  Description of Artificial Sequence: Synthetic oligonucleotide
  Antisense strand to SEQ ID NO: 1812207
aaacauacguguguaugcg

SEQ ID NO: 1812209 - RNA, 19 nt, Artificial Sequence
  Description of Artificial Sequence: Synthetic oligonucleotide
  Sense strand starting at position 1594 of SEQ ID NO: 1563458
uguuaagucccuugccaga

SEQ ID NO: 1812210 - RNA, 19 nt, Artificial Sequence
  Description of Artificial Sequence: Synthetic oligonucleotide
  Antisense strand to SEQ ID NO: 1812209
ucuggcaagggacuuaaca

SEQ ID NO: 1812211 - RNA, 19 nt, Artificial Sequence
  Description of Artificial Sequence: Synthetic oligonucleotide
  Sense strand starting at position 1596 of SEQ ID NO: 1563458
uuaagucccuugccagauu

SEQ ID NO: 1812212 - RNA, 19 nt, Artificial Sequence
  Description of Artificial Sequence: Synthetic oligonucleotide
  Antisense strand to SEQ ID NO: 1812211
aaucuggcaagggacuuaa

SEQ ID NO: 1812213 - RNA, 19 nt, Artificial Sequence
  Description of Artificial Sequence: Synthetic oligonucleotide
  Sense strand starting at position 1684 of SEQ ID NO: 1563458
ggaccauaagucugucauc

SEQ ID NO: 1812214 - RNA, 19 nt, Artificial Sequence
  Description of Artificial Sequence: Synthetic oligonucleotide
  Antisense strand to SEQ ID NO: 1812213
gaugacagacuuauggucc

SEQ ID NO: 1812215 - RNA, 19 nt, Artificial Sequence
  Description of Artificial Sequence: Synthetic oligonucleotide
  Sense strand starting at position 1689 of SEQ ID NO: 1563458
auaagucugucaucuugau

SEQ ID NO: 1812216 - RNA, 19 nt, Artificial Sequence
  Description of Artificial Sequence: Synthetic oligonucleotide
  Antisense strand to SEQ ID NO: 1812215
aucaagaugacagacuuau

SEQ ID NO: 1812217 - RNA, 19 nt, Artificial Sequence
  Description of Artificial Sequence: Synthetic oligonucleotide
  Sense strand starting at position 1693 of SEQ ID NO: 1563458
gucugucaucuugaugcuu

SEQ ID NO: 1812218 - RNA, 19 nt, Artificial Sequence
  Description of Artificial Sequence: Synthetic oligonucleotide
  Antisense strand to SEQ ID NO: 1812217
aagcaucaagaugacagac

SEQ ID NO: 1812219 - RNA, 19 nt, Artificial Sequence
  Description of Artificial Sequence: Synthetic oligonucleotide
  Sense strand starting at position 1816 of SEQ ID NO: 1563458
uggcguuucuaauuaaaua

SEQ ID NO: 1812220 - RNA, 19 nt, Artificial Sequence
  Description of Artificial Sequence: Synthetic oligonucleotide
  Antisense strand to SEQ ID NO: 1812219
uauuuaauuagaaacgcca

SEQ ID NO: 1812221 - RNA, 19 nt, Artificial Sequence
  Description of Artificial Sequence: Synthetic oligonucleotide
  Sense strand starting at position 1882 of SEQ ID NO: 1563458
ggcaccuaccuguaguaga

SEQ ID NO: 1812222 - RNA, 19 nt, Artificial Sequence
  Description of Artificial Sequence: Synthetic oligonucleotide
  Antisense strand to SEQ ID NO: 1812221
ucuacuacagguaggugcc

SEQ ID NO: 1812223 - RNA, 19 nt, Artificial Sequence
  Description of Artificial Sequence: Synthetic oligonucleotide
  Sense strand starting at position 1913 of SEQ ID NO: 1563458
uugguuuguagucaugcaa

SEQ ID NO: 1812224 - RNA, 19 nt, Artificial Sequence
  Description of Artificial Sequence: Synthetic oligonucleotide
  Antisense strand to SEQ ID NO: 1812223
uugcaugacuacaaaccaa

SEQ ID NO: 1812225 - RNA, 19 nt, Artificial Sequence
  Description of Artificial Sequence: Synthetic oligonucleotide
  Sense strand starting at position 1957 of SEQ ID NO: 1563458
ggacacaaauaacaagauu

SEQ ID NO: 1812226 - RNA, 19 nt, Artificial Sequence
  Description of Artificial Sequence: Synthetic oligonucleotide
  Antisense strand to SEQ ID NO: 1812225
aaucuuguuauuugugucc

SEQ ID NO: 1812227 - RNA, 19 nt, Artificial Sequence
  Description of Artificial Sequence: Synthetic oligonucleotide
  Sense strand starting at position 1998 of SEQ ID NO: 1563458
ugauuugucuacuaaggua

SEQ ID NO: 1812228 - RNA, 19 nt, Artificial Sequence
  Description of Artificial Sequence: Synthetic oligonucleotide
  Antisense strand to SEQ ID NO: 1812227
uaccuuaguagacaaauca

SEQ ID NO: 1812229 - RNA, 19 nt, Artificial Sequence
  Description of Artificial Sequence: Synthetic oligonucleotide
  Sense strand starting at position 2048 of SEQ ID NO: 1563458
aggcauuuaugacaucauu

SEQ ID NO: 1812230 - RNA, 19 nt, Artificial Sequence
  Description of Artificial Sequence: Synthetic oligonucleotide
  Antisense strand to SEQ ID NO: 1812229
aaugaugucauaaaugccu

SEQ ID NO: 1812231 - RNA, 19 nt, Artificial Sequence
  Description of Artificial Sequence: Synthetic oligonucleotide
  Sense strand starting at position 2060 of SEQ ID NO: 1563458
caucauuaccauugugugu

SEQ ID NO: 1812232 - RNA, 19 nt, Artificial Sequence
  Description of Artificial Sequence: Synthetic oligonucleotide
  Antisense strand to SEQ ID NO: 1812231
acacacaaugguaaugaug

SEQ ID NO: 1812233 - RNA, 19 nt, Artificial Sequence
  Description of Artificial Sequence: Synthetic oligonucleotide
  Sense strand starting at position 2064 of SEQ ID NO: 1563458
auuaccauugugugucaua

SEQ ID NO: 1812234 - RNA, 19 nt, Artificial Sequence
  Description of Artificial Sequence: Synthetic oligonucleotide
  Antisense strand to SEQ ID NO: 1812233
uaugacacacaaugguaau

SEQ ID NO: 1812235 - RNA, 19 nt, Artificial Sequence
  Description of Artificial Sequence: Synthetic oligonucleotide
  Sense strand starting at position 2074 of SEQ ID NO: 1563458
ugugucauacucugacaac

SEQ ID NO: 1812236 - RNA, 19 nt, Artificial Sequence
  Description of Artificial Sequence: Synthetic oligonucleotide
  Antisense strand to SEQ ID NO: 1812235
guugucagaguaugacaca

SEQ ID NO: 1812237 - RNA, 19 nt, Artificial Sequence
  Description of Artificial Sequence: Synthetic oligonucleotide
  Sense strand starting at position 2112 of SEQ ID NO: 1563458
gcauaagcuucuguauaca

SEQ ID NO: 1812238 - RNA, 19 nt, Artificial Sequence
  Description of Artificial Sequence: Synthetic oligonucleotide
  Antisense strand to SEQ ID NO: 1812237
uguauacagaagcuuaugc

SEQ ID NO: 1812239 - RNA, 19 nt, Artificial Sequence
  Description of Artificial Sequence: Synthetic oligonucleotide
  Sense strand starting at position 2561 of SEQ ID NO: 1563458
guccuauaaaggugacagu

SEQ ID NO: 1812240 - RNA, 19 nt, Artificial Sequence
  Description of Artificial Sequence: Synthetic oligonucleotide
  Antisense strand to SEQ ID NO: 1812239
acugucaccuuuauaggac

SEQ ID NO: 1812241 - RNA, 19 nt, Artificial Sequence
  Description of Artificial Sequence: Synthetic oligonucleotide
  Sense strand starting at position 2570 of SEQ ID NO: 1563458
aggugacaguguuugaaau

SEQ ID NO: 1812242 - RNA, 19 nt, Artificial Sequence
  Description of Artificial Sequence: Synthetic oligonucleotide
  Antisense strand to SEQ ID NO: 1812241
auuucaaacacugucaccu

SEQ ID NO: 1812243 - RNA, 19 nt, Artificial Sequence
  Description of Artificial Sequence: Synthetic oligonucleotide
  Sense strand starting at position 2996 of SEQ ID NO: 1563458
gggcuuauaaagugaaaga

SEQ ID NO: 1812244 - RNA, 19 nt, Artificial Sequence
  Description of Artificial Sequence: Synthetic oligonucleotide
  Antisense strand to SEQ ID NO: 1812243
ucuuucacuuuauaagccc

SEQ ID NO: 1812245 - RNA, 19 nt, Artificial Sequence
  Description of Artificial Sequence: Synthetic oligonucleotide
  Sense strand starting at position 3006 of SEQ ID NO: 1563458
agugaaagaauguaucugu

SEQ ID NO: 1812246 - RNA, 19 nt, Artificial Sequence
  Description of Artificial Sequence: Synthetic oligonucleotide
  Antisense strand to SEQ ID NO: 1812245
acagauacauucuuucacu

SEQ ID NO: 1812247 - RNA, 19 nt, Artificial Sequence
  Description of Artificial Sequence: Synthetic oligonucleotide
  Sense strand starting at position 3009 of SEQ ID NO: 1563458
gaaagaauguaucugucac

SEQ ID NO: 1812248 - RNA, 19 nt, Artificial Sequence
  Description of Artificial Sequence: Synthetic oligonucleotide
  Antisense strand to SEQ ID NO: 1812247
gugacagauacauucuuuc

SEQ ID NO: 1812249 - RNA, 19 nt, Artificial Sequence
  Description of Artificial Sequence: Synthetic oligonucleotide
  Sense strand starting at position 3060 of SEQ ID NO: 1563458
uucccuaguguuggauaca

SEQ ID NO: 1812250 - RNA, 19 nt, Artificial Sequence
  Description of Artificial Sequence: Synthetic oligonucleotide
  Antisense strand to SEQ ID NO: 1812249
uguauccaacacuagggaa

SEQ ID NO: 1812251 - RNA, 19 nt, Artificial Sequence
  Description of Artificial Sequence: Synthetic oligonucleotide
  Sense strand starting at position 3065 of SEQ ID NO: 1563458
uaguguuggauacauggua

SEQ ID NO: 1812252 - RNA, 19 nt, Artificial Sequence
  Description of Artificial Sequence: Synthetic oligonucleotide
  Antisense strand to SEQ ID NO: 1812251
uaccauguauccaacacua

SEQ ID NO: 1812253 - RNA, 19 nt, Artificial Sequence
  Description of Artificial Sequence: Synthetic oligonucleotide
  Sense strand starting at position 3070 of SEQ ID NO: 1563458
uuggauacaugguagacaa

SEQ ID NO: 1812254 - RNA, 19 nt, Artificial Sequence
  Description of Artificial Sequence: Synthetic oligonucleotide
  Antisense strand to SEQ ID NO: 1812253
uugucuaccauguauccaa

SEQ ID NO: 1812255 - RNA, 19 nt, Artificial Sequence
  Description of Artificial Sequence: Synthetic oligonucleotide
  Sense strand starting at position 3228 of SEQ ID NO: 1563458
acaugacuagcauguuagu

SEQ ID NO: 1812256 - RNA, 19 nt, Artificial Sequence
  Description of Artificial Sequence: Synthetic oligonucleotide
  Antisense strand to SEQ ID NO: 1812255
acuaacaugcuagucaugu

SEQ ID NO: 1812257 - RNA, 19 nt, Artificial Sequence
  Description of Artificial Sequence: Synthetic oligonucleotide
  Sense strand starting at position 3233 of SEQ ID NO: 1563458
acuagcauguuaguaauaa

SEQ ID NO: 1812258 - RNA, 19 nt, Artificial Sequence
  Description of Artificial Sequence: Synthetic oligonucleotide
  Antisense strand to SEQ ID NO: 1812257
uuauuacuaacaugcuagu

SEQ ID NO: 1812259 - RNA, 19 nt, Artificial Sequence
  Description of Artificial Sequence: Synthetic oligonucleotide
  Sense strand starting at position 3262 of SEQ ID NO: 1563458
ucagaaauucuagguauua

SEQ ID NO: 1812260 - RNA, 19 nt, Artificial Sequence
  Description of Artificial Sequence: Synthetic oligonucleotide
  Antisense strand to SEQ ID NO: 1812259
uaauaccuagaauuucuga

SEQ ID NO: 1812261 - RNA, 19 nt, Artificial Sequence
  Description of Artificial Sequence: Synthetic oligonucleotide
  Sense strand starting at position 3358 of SEQ ID NO: 1563458
gauuguugccaggacuaga

SEQ ID NO: 1812262 - RNA, 19 nt, Artificial Sequence
  Description of Artificial Sequence: Synthetic oligonucleotide
  Antisense strand to SEQ ID NO: 1812261
ucuaguccuggcaacaauc

SEQ ID NO: 1812263 - RNA, 19 nt, Artificial Sequence
  Description of Artificial Sequence: Synthetic oligonucleotide
  Sense strand starting at position 3389 of SEQ ID NO: 1563458
gagauauuugccuguagca

SEQ ID NO: 1812264 - RNA, 19 nt, Artificial Sequence
  Description of Artificial Sequence: Synthetic oligonucleotide
  Antisense strand to SEQ ID NO: 1812263
ugcuacaggcaaauaucuc

SEQ ID NO: 1812265 - RNA, 19 nt, Artificial Sequence
  Description of Artificial Sequence: Synthetic oligonucleotide
  Sense strand starting at position 3528 of SEQ ID NO: 1563458
aggaucugauucugcauuu

SEQ ID NO: 1812266 - RNA, 19 nt, Artificial Sequence
  Description of Artificial Sequence: Synthetic oligonucleotide
  Antisense strand to SEQ ID NO: 1812265
aaaugcagaaucagauccu

SEQ ID NO: 1812267 - RNA, 19 nt, Artificial Sequence
  Description of Artificial Sequence: Synthetic oligonucleotide
  Sense strand starting at position 3653 of SEQ ID NO: 1563458
aggacuuagccagguacuu

SEQ ID NO: 1812268 - RNA, 19 nt, Artificial Sequence
  Description of Artificial Sequence: Synthetic oligonucleotide
  Antisense strand to SEQ ID NO: 1812267
aaguaccuggcuaaguccu

SEQ ID NO: 1812269 - RNA, 19 nt, Artificial Sequence
  Description of Artificial Sequence: Synthetic oligonucleotide
  Sense strand starting at position 3737 of SEQ ID NO: 1563458
ugggcccuuguguaaugau

SEQ ID NO: 1812270 - RNA, 19 nt, Artificial Sequence
  Description of Artificial Sequence: Synthetic oligonucleotide
  Antisense strand to SEQ ID NO: 1812269
aucauuacacaagggccca

SEQ ID NO: 1812271 - RNA, 19 nt, Artificial Sequence
  Description of Artificial Sequence: Synthetic oligonucleotide
  Sense strand starting at position 3746 of SEQ ID NO: 1563458
guguaaugauucuugguga

SEQ ID NO: 1812272 - RNA, 19 nt, Artificial Sequence
  Description of Artificial Sequence: Synthetic oligonucleotide
  Antisense strand to SEQ ID NO: 1812271
ucaccaagaaucauuacac

SEQ ID NO: 1812273 - RNA, 19 nt, Artificial Sequence
  Description of Artificial Sequence: Synthetic oligonucleotide
  Sense strand starting at position 3749 of SEQ ID NO: 1563458
uaaugauucuuggugaaga

SEQ ID NO: 1812274 - RNA, 19 nt, Artificial Sequence
  Description of Artificial Sequence: Synthetic oligonucleotide
  Antisense strand to SEQ ID NO: 1812273
ucuucaccaagaaucauua

SEQ ID NO: 1812275 - RNA, 19 nt, Artificial Sequence
  Description of Artificial Sequence: Synthetic oligonucleotide
  Sense strand starting at position 3792 of SEQ ID NO: 1563458
cuugguucuccagagauua

SEQ ID NO: 1812276 - RNA, 19 nt, Artificial Sequence
  Description of Artificial Sequence: Synthetic oligonucleotide
  Antisense strand to SEQ ID NO: 1812275
uaaucucuggagaaccaag

SEQ ID NO: 1812277 - RNA, 19 nt, Artificial Sequence
  Description of Artificial Sequence: Synthetic oligonucleotide
  Sense strand starting at position 3845 of SEQ ID NO: 1563458
uugauugucuugcuuccaa

SEQ ID NO: 1812278 - RNA, 19 nt, Artificial Sequence
  Description of Artificial Sequence: Synthetic oligonucleotide
  Antisense strand to SEQ ID NO: 1812277
uuggaagcaagacaaucaa

SEQ ID NO: 1812279 - RNA, 19 nt, Artificial Sequence
  Description of Artificial Sequence: Synthetic oligonucleotide
  Sense strand starting at position 3872 of SEQ ID NO: 1563458
uggcgucauaucuauagga

SEQ ID NO: 1812280 - RNA, 19 nt, Artificial Sequence
  Description of Artificial Sequence: Synthetic oligonucleotide
  Antisense strand to SEQ ID NO: 1812279
uccuauagauaugacgcca

SEQ ID NO: 1812281 - RNA, 19 nt, Artificial Sequence
  Description of Artificial Sequence: Synthetic oligonucleotide
  Sense strand starting at position 3874 of SEQ ID NO: 1563458
gcgucauaucuauaggaau

SEQ ID NO: 1812282 - RNA, 19 nt, Artificial Sequence
  Description of Artificial Sequence: Synthetic oligonucleotide
  Antisense strand to SEQ ID NO: 1812281
auuccuauagauaugacgc

SEQ ID NO: 1812283 - RNA, 19 nt, Artificial Sequence
  Description of Artificial Sequence: Synthetic oligonucleotide
  Sense strand starting at position 3887 of SEQ ID NO: 1563458
aggaaucaguaguaggaaa

SEQ ID NO: 1812284 - RNA, 19 nt, Artificial Sequence
  Description of Artificial Sequence: Synthetic oligonucleotide
  Antisense strand to SEQ ID NO: 1812283
uuuccuacuacugauuccu

SEQ ID NO: 1812285 - RNA, 19 nt, Artificial Sequence
  Description of Artificial Sequence: Synthetic oligonucleotide
  Sense strand starting at position 3951 of SEQ ID NO: 1563458
ugcccucauccgggugaga

SEQ ID NO: 1812286 - RNA, 19 nt, Artificial Sequence
  Description of Artificial Sequence: Synthetic oligonucleotide
  Antisense strand to SEQ ID NO: 1812285
ucucacccggaugagggca

SEQ ID NO: 1812287 - RNA, 19 nt, Artificial Sequence
  Description of Artificial Sequence: Synthetic oligonucleotide
  Sense strand starting at position 12 of SEQ ID NO: 1563459
cuccaaauaugauauagga

SEQ ID NO: 1812288 - RNA, 19 nt, Artificial Sequence
  Description of Artificial Sequence: Synthetic oligonucleotide
  Antisense strand to SEQ ID NO: 1812287
uccuauaucauauuuggag

SEQ ID NO: 1812289 - RNA, 19 nt, Artificial Sequence
  Description of Artificial Sequence: Synthetic oligonucleotide
  Sense strand starting at position 2147 of SEQ ID NO: 1563459
gggucaguagugugaaucu

SEQ ID NO: 1812290 - RNA, 19 nt, Artificial Sequence
  Description of Artificial Sequence: Synthetic oligonucleotide
  Antisense strand to SEQ ID NO: 1812289
agauucacacuacugaccc

SEQ ID NO: 1812291 - RNA, 19 nt, Artificial Sequence
  Description of Artificial Sequence: Synthetic oligonucleotide
  Sense strand starting at position 2184 of SEQ ID NO: 1563459
cccuaagacacguguuugu

SEQ ID NO: 1812292 - RNA, 19 nt, Artificial Sequence
  Description of Artificial Sequence: Synthetic oligonucleotide
  Antisense strand to SEQ ID NO: 1812291
acaaacacgugucuuaggg

SEQ ID NO: 1812293 - RNA, 19 nt, Artificial Sequence
  Description of Artificial Sequence: Synthetic oligonucleotide
  Sense strand starting at position 2250 of SEQ ID NO: 1563459
guguguuccacaugaacga

SEQ ID NO: 1812294 - RNA, 19 nt, Artificial Sequence
  Description of Artificial Sequence: Synthetic oligonucleotide
  Antisense strand to SEQ ID NO: 1812293
ucguucauguggaacacac

SEQ ID NO: 1812295 - RNA, 19 nt, Artificial Sequence
  Description of Artificial Sequence: Synthetic oligonucleotide
  Sense strand starting at position 2251 of SEQ ID NO: 1563459
uguguuccacaugaacgau

SEQ ID NO: 1812296 - RNA, 19 nt, Artificial Sequence
  Description of Artificial Sequence: Synthetic oligonucleotide
  Antisense strand to SEQ ID NO: 1812295
aucguucauguggaacaca

SEQ ID NO: 1812297 - RNA, 19 nt, Artificial Sequence
  Description of Artificial Sequence: Synthetic oligonucleotide
  Sense strand starting at position 2292 of SEQ ID NO: 1563459
ugaggcuuaaguggucauu

SEQ ID NO: 1812298 - RNA, 19 nt, Artificial Sequence
  Description of Artificial Sequence: Synthetic oligonucleotide
  Antisense strand to SEQ ID NO: 1812297
aaugaccacuuaagccuca

SEQ ID NO: 1812299 - RNA, 19 nt, Artificial Sequence
  Description of Artificial Sequence: Synthetic oligonucleotide
  Sense strand starting at position 2470 of SEQ ID NO: 1563459
ggguuauacagaggccuga

SEQ ID NO: 1812300 - RNA, 19 nt, Artificial Sequence
  Description of Artificial Sequence: Synthetic oligonucleotide
  Antisense strand to SEQ ID NO: 1812299
ucaggccucuguauaaccc

SEQ ID NO: 1812301 - RNA, 19 nt, Artificial Sequence
  Description of Artificial Sequence: Synthetic oligonucleotide
  Sense strand starting at position 2621 of SEQ ID NO: 1563459
acaguuagggauugccuaa

SEQ ID NO: 1812302 - RNA, 19 nt, Artificial Sequence
  Description of Artificial Sequence: Synthetic oligonucleotide
  Antisense strand to SEQ ID NO: 1812301
uuaggcaaucccuaacugu

SEQ ID NO: 1812303 - RNA, 19 nt, Artificial Sequence
  Description of Artificial Sequence: Synthetic oligonucleotide
  Sense strand starting at position 2648 of SEQ ID NO: 1563459
gugacaccguccuuaaaua

SEQ ID NO: 1812304 - RNA, 19 nt, Artificial Sequence
  Description of Artificial Sequence: Synthetic oligonucleotide
  Antisense strand to SEQ ID NO: 1812303
uauuuaaggacggugucac

SEQ ID NO: 1812305 - RNA, 19 nt, Artificial Sequence
  Description of Artificial Sequence: Synthetic oligonucleotide
  Sense strand starting at position 2649 of SEQ ID NO: 1563459
ugacaccguccuuaaauau

SEQ ID NO: 1812306 - RNA, 19 nt, Artificial Sequence
  Description of Artificial Sequence: Synthetic oligonucleotide
  Antisense strand to SEQ ID NO: 1812305
auauuuaaggacgguguca

SEQ ID NO: 1812307 - RNA, 19 nt, Artificial Sequence
  Description of Artificial Sequence: Synthetic oligonucleotide
  Sense strand starting at position 2680 of SEQ ID NO: 1563459
guaguaauccgcugaugaa

SEQ ID NO: 1812308 - RNA, 19 nt, Artificial Sequence
  Description of Artificial Sequence: Synthetic oligonucleotide
  Antisense strand to SEQ ID NO: 1812307
uucaucagcggauuacuac

SEQ ID NO: 1812309 - RNA, 19 nt, Artificial Sequence
  Description of Artificial Sequence: Synthetic oligonucleotide
  Sense strand starting at position 2681 of SEQ ID NO: 1563459
uaguaauccgcugaugaac

SEQ ID NO: 1812310 - RNA, 19 nt, Artificial Sequence
  Description of Artificial Sequence: Synthetic oligonucleotide
  Antisense strand to SEQ ID NO: 1812309
guucaucagcggauuacua

SEQ ID NO: 1812311 - RNA, 19 nt, Artificial Sequence
  Description of Artificial Sequence: Synthetic oligonucleotide
  Sense strand starting at position 2711 of SEQ ID NO: 1563459
uauuuaguguggucucuag

SEQ ID NO: 1812312 - RNA, 19 nt, Artificial Sequence
  Description of Artificial Sequence: Synthetic oligonucleotide
  Antisense strand to SEQ ID NO: 1812311
cuagagaccacacuaaaua

SEQ ID NO: 1812313 - RNA, 19 nt, Artificial Sequence
  Description of Artificial Sequence: Synthetic oligonucleotide
  Sense strand starting at position 2718 of SEQ ID NO: 1563459
uguggucucuagcuccuaa

SEQ ID NO: 1812314 - RNA, 19 nt, Artificial Sequence
  Description of Artificial Sequence: Synthetic oligonucleotide
  Antisense strand to SEQ ID NO: 1812313
uuaggagcuagagaccaca

SEQ ID NO: 1812315 - RNA, 19 nt, Artificial Sequence
  Description of Artificial Sequence: Synthetic oligonucleotide
  Sense strand starting at position 2749 of SEQ ID NO: 1563459
ugcuguaauguauagacuu

SEQ ID NO: 1812316 - RNA, 19 nt, Artificial Sequence
  Description of Artificial Sequence: Synthetic oligonucleotide
  Antisense strand to SEQ ID NO: 1812315
aagucuauacauuacagca

SEQ ID NO: 1812317 - RNA, 19 nt, Artificial Sequence
  Description of Artificial Sequence: Synthetic oligonucleotide
  Sense strand starting at position 2756 of SEQ ID NO: 1563459
auguauagacuugaaguuu

SEQ ID NO: 1812318 - RNA, 19 nt, Artificial Sequence
  Description of Artificial Sequence: Synthetic oligonucleotide
  Antisense strand to SEQ ID NO: 1812317
aaacuucaagucuauacau

SEQ ID NO: 1812319 - RNA, 19 nt, Artificial Sequence
  Description of Artificial Sequence: Synthetic oligonucleotide
  Sense strand starting at position 2815 of SEQ ID NO: 1563459
aggugucauguucaguacu

SEQ ID NO: 1812320 - RNA, 19 nt, Artificial Sequence
  Description of Artificial Sequence: Synthetic oligonucleotide
  Antisense strand to SEQ ID NO: 1812319
aguacugaacaugacaccu

SEQ ID NO: 1812321 - RNA, 19 nt, Artificial Sequence
  Description of Artificial Sequence: Synthetic oligonucleotide
  Sense strand starting at position 2885 of SEQ ID NO: 1563459
augggaaagugcuggaaau

SEQ ID NO: 1812322 - RNA, 19 nt, Artificial Sequence
  Description of Artificial Sequence: Synthetic oligonucleotide
  Antisense strand to SEQ ID NO: 1812321
auuuccagcacuuucccau

SEQ ID NO: 1812323 - RNA, 19 nt, Artificial Sequence
  Description of Artificial Sequence: Synthetic oligonucleotide
  Sense strand starting at position 2886 of SEQ ID NO: 1563459
ugggaaagugcuggaaauu

SEQ ID NO: 1812324 - RNA, 19 nt, Artificial Sequence
  Description of Artificial Sequence: Synthetic oligonucleotide
  Antisense strand to SEQ ID NO: 1812323
aauuuccagcacuuuccca

SEQ ID NO: 1812325 - RNA, 19 nt, Artificial Sequence
  Description of Artificial Sequence: Synthetic oligonucleotide
  Sense strand starting at position 2906 of SEQ ID NO: 1563459
uuacuuagacuuugguaga

SEQ ID NO: 1812326 - RNA, 19 nt, Artificial Sequence
  Description of Artificial Sequence: Synthetic oligonucleotide
  Antisense strand to SEQ ID NO: 1812325
ucuaccaaagucuaaguaa

SEQ ID NO: 1812327 - RNA, 19 nt, Artificial Sequence
  Description of Artificial Sequence: Synthetic oligonucleotide
  Sense strand starting at position 2907 of SEQ ID NO: 1563459
uacuuagacuuugguagaa

SEQ ID NO: 1812328 - RNA, 19 nt, Artificial Sequence
  Description of Artificial Sequence: Synthetic oligonucleotide
  Antisense strand to SEQ ID NO: 1812327
uucuaccaaagucuaagua

SEQ ID NO: 1812329 - RNA, 19 nt, Artificial Sequence
  Description of Artificial Sequence: Synthetic oligonucleotide
  Sense strand starting at position 2909 of SEQ ID NO: 1563459
cuuagacuuugguagaaag

SEQ ID NO: 1812330 - RNA, 19 nt, Artificial Sequence
  Description of Artificial Sequence: Synthetic oligonucleotide
  Antisense strand to SEQ ID NO: 1812329
cuuucuaccaaagucuaag

SEQ ID NO: 1812331 - RNA, 19 nt, Artificial Sequence
  Description of Artificial Sequence: Synthetic oligonucleotide
  Sense strand starting at position 2977 of SEQ ID NO: 1563459
auggaauaguuucuccaua

SEQ ID NO: 1812332 - RNA, 19 nt, Artificial Sequence
  Description of Artificial Sequence: Synthetic oligonucleotide
  Antisense strand to SEQ ID NO: 1812331
uauggagaaacuauuccau

SEQ ID NO: 1812333 - RNA, 19 nt, Artificial Sequence
  Description of Artificial Sequence: Synthetic oligonucleotide
  Sense strand starting at position 2978 of SEQ ID NO: 1563459
uggaauaguuucuccauag

SEQ ID NO: 1812334 - RNA, 19 nt, Artificial Sequence
  Description of Artificial Sequence: Synthetic oligonucleotide
  Antisense strand to SEQ ID NO: 1812333
cuauggagaaacuauucca

SEQ ID NO: 1812335 - RNA, 19 nt, Artificial Sequence
  Description of Artificial Sequence: Synthetic oligonucleotide
  Sense strand starting at position 3013 of SEQ ID NO: 1563459
ugcuuuggguuccagaaag

SEQ ID NO: 1812336 - RNA, 19 nt, Artificial Sequence
  Description of Artificial Sequence: Synthetic oligonucleotide
  Antisense strand to SEQ ID NO: 1812335
cuuucuggaacccaaagca

SEQ ID NO: 1812337 - RNA, 19 nt, Artificial Sequence
  Description of Artificial Sequence: Synthetic oligonucleotide
  Sense strand starting at position 3138 of SEQ ID NO: 1563459
cguuuaugcuguuuccaac

SEQ ID NO: 1812338 - RNA, 19 nt, Artificial Sequence
  Description of Artificial Sequence: Synthetic oligonucleotide
  Antisense strand to SEQ ID NO: 1812337
guuggaaacagcauaaacg

SEQ ID NO: 1812339 - RNA, 19 nt, Artificial Sequence
  Description of Artificial Sequence: Synthetic oligonucleotide
  Sense strand starting at position 3162 of SEQ ID NO: 1563459
acaucauugugagacacau

SEQ ID NO: 1812340 - RNA, 19 nt, Artificial Sequence
  Description of Artificial Sequence: Synthetic oligonucleotide
  Antisense strand to SEQ ID NO: 1812339
augugucucacaaugaugu

SEQ ID NO: 1812341 - RNA, 19 nt, Artificial Sequence
  Description of Artificial Sequence: Synthetic oligonucleotide
  Sense strand starting at position 3208 of SEQ ID NO: 1563459
uuaaaugugucauugugga

SEQ ID NO: 1812342 - RNA, 19 nt, Artificial Sequence
  Description of Artificial Sequence: Synthetic oligonucleotide
  Antisense strand to SEQ ID NO: 1812341
uccacaaugacacauuuaa

SEQ ID NO: 1812343 - RNA, 19 nt, Artificial Sequence
  Description of Artificial Sequence: Synthetic oligonucleotide
  Sense strand starting at position 3213 of SEQ ID NO: 1563459
ugugucauuguggauaaau

SEQ ID NO: 1812344 - RNA, 19 nt, Artificial Sequence
  Description of Artificial Sequence: Synthetic oligonucleotide
  Antisense strand to SEQ ID NO: 1812343
auuuauccacaaugacaca

SEQ ID NO: 1812345 - RNA, 19 nt, Artificial Sequence
  Description of Artificial Sequence: Synthetic oligonucleotide
  Sense strand starting at position 3215 of SEQ ID NO: 1563459
ugucauuguggauaaauuc

SEQ ID NO: 1812346 - RNA, 19 nt, Artificial Sequence
  Description of Artificial Sequence: Synthetic oligonucleotide
  Antisense strand to SEQ ID NO: 1812345
gaauuuauccacaaugaca

SEQ ID NO: 1812347 - RNA, 19 nt, Artificial Sequence
  Description of Artificial Sequence: Synthetic oligonucleotide
  Sense strand starting at position 3250 of SEQ ID NO: 1563459
uugguacaagucuaugaac

SEQ ID NO: 1812348 - RNA, 19 nt, Artificial Sequence
  Description of Artificial Sequence: Synthetic oligonucleotide
  Antisense strand to SEQ ID NO: 1812347
guucauagacuuguaccaa

SEQ ID NO: 1812349 - RNA, 19 nt, Artificial Sequence
  Description of Artificial Sequence: Synthetic oligonucleotide
  Sense strand starting at position 3252 of SEQ ID NO: 1563459
gguacaagucuaugaacau

SEQ ID NO: 1812350 - RNA, 19 nt, Artificial Sequence
  Description of Artificial Sequence: Synthetic oligonucleotide
  Antisense strand to SEQ ID NO: 1812349
auguucauagacuuguacc

SEQ ID NO: 1812351 - RNA, 19 nt, Artificial Sequence
  Description of Artificial Sequence: Synthetic oligonucleotide
  Sense strand starting at position 3253 of SEQ ID NO: 1563459
guacaagucuaugaacauu

SEQ ID NO: 1812352 - RNA, 19 nt, Artificial Sequence
  Description of Artificial Sequence: Synthetic oligonucleotide
  Antisense strand to SEQ ID NO: 1812351
aauguucauagacuuguac

SEQ ID NO: 1812353 - RNA, 19 nt, Artificial Sequence
  Description of Artificial Sequence: Synthetic oligonucleotide
  Sense strand starting at position 3629 of SEQ ID NO: 1563459
gcaaacuagucuccugaau

SEQ ID NO: 1812354 - RNA, 19 nt, Artificial Sequence
  Description of Artificial Sequence: Synthetic oligonucleotide
  Antisense strand to SEQ ID NO: 1812353
auucaggagacuaguuugc

SEQ ID NO: 1812355 - RNA, 19 nt, Artificial Sequence
  Description of Artificial Sequence: Synthetic oligonucleotide
  Sense strand starting at position 3640 of SEQ ID NO: 1563459
uccugaaugucacuguuau

SEQ ID NO: 1812356 - RNA, 19 nt, Artificial Sequence
  Description of Artificial Sequence: Synthetic oligonucleotide
  Antisense strand to SEQ ID NO: 1812355
auaacagugacauucagga

SEQ ID NO: 1812357 - RNA, 19 nt, Artificial Sequence
  Description of Artificial Sequence: Synthetic oligonucleotide
  Sense strand starting at position 3641 of SEQ ID NO: 1563459
ccugaaugucacuguuaua

SEQ ID NO: 1812358 - RNA, 19 nt, Artificial Sequence
  Description of Artificial Sequence: Synthetic oligonucleotide
  Antisense strand to SEQ ID NO: 1812357
uauaacagugacauucagg

SEQ ID NO: 1812359 - RNA, 19 nt, Artificial Sequence
  Description of Artificial Sequence: Synthetic oligonucleotide
  Sense strand starting at position 3646 of SEQ ID NO: 1563459
augucacuguuauaacauu

SEQ ID NO: 1812360 - RNA, 19 nt, Artificial Sequence
  Description of Artificial Sequence: Synthetic oligonucleotide
  Antisense strand to SEQ ID NO: 1812359
aauguuauaacagugacau

SEQ ID NO: 1812361 - RNA, 19 nt, Artificial Sequence
  Description of Artificial Sequence: Synthetic oligonucleotide
  Sense strand starting at position 3680 of SEQ ID NO: 1563459
ucggauauuuaauggaauu

SEQ ID NO: 1812362 - RNA, 19 nt, Artificial Sequence
  Description of Artificial Sequence: Synthetic oligonucleotide
  Antisense strand to SEQ ID NO: 1812361
aauuccauuaaauauccga

SEQ ID NO: 1812363 - RNA, 19 nt, Artificial Sequence
  Description of Artificial Sequence: Synthetic oligonucleotide
  Sense strand starting at position 3700 of SEQ ID NO: 1563459
gugaacaauugggcugaaa

SEQ ID NO: 1812364 - RNA, 19 nt, Artificial Sequence
  Description of Artificial Sequence: Synthetic oligonucleotide
  Antisense strand to SEQ ID NO: 1812363
uuucagcccaauuguucac

SEQ ID NO: 1812365 - RNA, 19 nt, Artificial Sequence
  Description of Artificial Sequence: Synthetic oligonucleotide
  Sense strand starting at position 3783 of SEQ ID NO: 1563459
uugaaaugguaugcaggau

SEQ ID NO: 1812366 - RNA, 19 nt, Artificial Sequence
  Description of Artificial Sequence: Synthetic oligonucleotide
  Antisense strand to SEQ ID NO: 1812365
auccugcauaccauuucaa

SEQ ID NO: 1812367 - RNA, 19 nt, Artificial Sequence
  Description of Artificial Sequence: Synthetic oligonucleotide
  Sense strand starting at position 43 of SEQ ID NO: 1563460
agugacaaagcuggauaua

SEQ ID NO: 1812368 - RNA, 19 nt, Artificial Sequence
  Description of Artificial Sequence: Synthetic oligonucleotide
  Antisense strand to SEQ ID NO: 1812367
uauauccagcuuugucacu

SEQ ID NO: 1812369 - RNA, 19 nt, Artificial Sequence
  Description of Artificial Sequence: Synthetic oligonucleotide
  Sense strand starting at position 374 of SEQ ID NO: 1563460
gcuagugaauucucaucag

SEQ ID NO: 1812370 - RNA, 19 nt, Artificial Sequence
  Description of Artificial Sequence: Synthetic oligonucleotide
  Antisense strand to SEQ ID NO: 1812369
cugaugagaauucacuagc

SEQ ID NO: 1812371 - RNA, 19 nt, Artificial Sequence
  Description of Artificial Sequence: Synthetic oligonucleotide
  Sense strand starting at position 377 of SEQ ID NO: 1563460
agugaauucucaucagcua

SEQ ID NO: 1812372 - RNA, 19 nt, Artificial Sequence
  Description of Artificial Sequence: Synthetic oligonucleotide
  Antisense strand to SEQ ID NO: 1812371
uagcugaugagaauucacu

SEQ ID NO: 1812373 - RNA, 19 nt, Artificial Sequence
  Description of Artificial Sequence: Synthetic oligonucleotide
  Sense strand starting at position 378 of SEQ ID NO: 1563460
gugaauucucaucagcuaa

SEQ ID NO: 1812374 - RNA, 19 nt, Artificial Sequence
  Description of Artificial Sequence: Synthetic oligonucleotide
  Antisense strand to SEQ ID NO: 1812373
uuagcugaugagaauucac

SEQ ID NO: 1812375 - RNA, 19 nt, Artificial Sequence
  Description of Artificial Sequence: Synthetic oligonucleotide
  Sense strand starting at position 447 of SEQ ID NO: 1563460
agagaauauugagcauagu

SEQ ID NO: 1812376 - RNA, 19 nt, Artificial Sequence
  Description of Artificial Sequence: Synthetic oligonucleotide
  Antisense strand to SEQ ID NO: 1812375
acuaugcucaauauucucu

SEQ ID NO: 1812377 - RNA, 19 nt, Artificial Sequence
  Description of Artificial Sequence: Synthetic oligonucleotide
  Sense strand starting at position 493 of SEQ ID NO: 1563460
agcuuucuagaucaugaca

SEQ ID NO: 1812378 - RNA, 19 nt, Artificial Sequence
  Description of Artificial Sequence: Synthetic oligonucleotide
  Antisense strand to SEQ ID NO: 1812377
ugucaugaucuagaaagcu

SEQ ID NO: 1812379 - RNA, 19 nt, Artificial Sequence
  Description of Artificial Sequence: Synthetic oligonucleotide
  Sense strand starting at position 496 of SEQ ID NO: 1563460
uuucuagaucaugacaguu

SEQ ID NO: 1812380 - RNA, 19 nt, Artificial Sequence
  Description of Artificial Sequence: Synthetic oligonucleotide
  Antisense strand to SEQ ID NO: 1812379
aacugucaugaucuagaaa

SEQ ID NO: 1812381 - RNA, 19 nt, Artificial Sequence
  Description of Artificial Sequence: Synthetic oligonucleotide
  Sense strand starting at position 737 of SEQ ID NO: 1563460
ucaagugcaugaguauaua

SEQ ID NO: 1812382 - RNA, 19 nt, Artificial Sequence
  Description of Artificial Sequence: Synthetic oligonucleotide
  Antisense strand to SEQ ID NO: 1812381
uauauacucaugcacuuga

SEQ ID NO: 1812383 - RNA, 19 nt, Artificial Sequence
  Description of Artificial Sequence: Synthetic oligonucleotide
  Sense strand starting at position 740 of SEQ ID NO: 1563460
agugcaugaguauauaauu

SEQ ID NO: 1812384 - RNA, 19 nt, Artificial Sequence
  Description of Artificial Sequence: Synthetic oligonucleotide
  Antisense strand to SEQ ID NO: 1812383
aauuauauacucaugcacu

SEQ ID NO: 1812385 - RNA, 19 nt, Artificial Sequence
  Description of Artificial Sequence: Synthetic oligonucleotide
  Sense strand starting at position 852 of SEQ ID NO: 1563460
gugauaagaaguuaaguuu

SEQ ID NO: 1812386 - RNA, 19 nt, Artificial Sequence
  Description of Artificial Sequence: Synthetic oligonucleotide
  Antisense strand to SEQ ID NO: 1812385
aaacuuaacuucuuaucac

SEQ ID NO: 1812387 - RNA, 19 nt, Artificial Sequence
  Description of Artificial Sequence: Synthetic oligonucleotide
  Sense strand starting at position 875 of SEQ ID NO: 1563460
cuucgaauacucggaagaa

SEQ ID NO: 1812388 - RNA, 19 nt, Artificial Sequence
  Description of Artificial Sequence: Synthetic oligonucleotide
  Antisense strand to SEQ ID NO: 1812387
uucuuccgaguauucgaag

SEQ ID NO: 1812389 - RNA, 19 nt, Artificial Sequence
  Description of Artificial Sequence: Synthetic oligonucleotide
  Sense strand starting at position 885 of SEQ ID NO: 1563460
ucggaagaauucucuguug

SEQ ID NO: 1812390 - RNA, 19 nt, Artificial Sequence
  Description of Artificial Sequence: Synthetic oligonucleotide
  Antisense strand to SEQ ID NO: 1812389
caacagagaauucuuccga

SEQ ID NO: 1812391 - RNA, 19 nt, Artificial Sequence
  Description of Artificial Sequence: Synthetic oligonucleotide
  Sense strand starting at position 887 of SEQ ID NO: 1563460
ggaagaauucucuguugca

SEQ ID NO: 1812392 - RNA, 19 nt, Artificial Sequence
  Description of Artificial Sequence: Synthetic oligonucleotide
  Antisense strand to SEQ ID NO: 1812391
ugcaacagagaauucuucc

SEQ ID NO: 1812393 - RNA, 19 nt, Artificial Sequence
  Description of Artificial Sequence: Synthetic oligonucleotide
  Sense strand starting at position 888 of SEQ ID NO: 1563460
gaagaauucucuguugcag

SEQ ID NO: 1812394 - RNA, 19 nt, Artificial Sequence
  Description of Artificial Sequence: Synthetic oligonucleotide
  Antisense strand to SEQ ID NO: 1812393
cugcaacagagaauucuuc

SEQ ID NO: 1812395 - RNA, 19 nt, Artificial Sequence
  Description of Artificial Sequence: Synthetic oligonucleotide
  Sense strand starting at position 1066 of SEQ ID NO: 1563460
uuaacaucuguguaaugcu

SEQ ID NO: 1812396 - RNA, 19 nt, Artificial Sequence
  Description of Artificial Sequence: Synthetic oligonucleotide
  Antisense strand to SEQ ID NO: 1812395
agcauuacacagauguuaa

SEQ ID NO: 1812397 - RNA, 19 nt, Artificial Sequence
  Description of Artificial Sequence: Synthetic oligonucleotide
  Sense strand starting at position 1080 of SEQ ID NO: 1563460
augcuucuauugguuauuu

SEQ ID NO: 1812398 - RNA, 19 nt, Artificial Sequence
  Description of Artificial Sequence: Synthetic oligonucleotide
  Antisense strand to SEQ ID NO: 1812397
aaauaaccaauagaagcau

SEQ ID NO: 1812399 - RNA, 19 nt, Artificial Sequence
  Description of Artificial Sequence: Synthetic oligonucleotide
  Sense strand starting at position 1081 of SEQ ID NO: 1563460
ugcuucuauugguuauuua

SEQ ID NO: 1812400 - RNA, 19 nt, Artificial Sequence
  Description of Artificial Sequence: Synthetic oligonucleotide
  Antisense strand to SEQ ID NO: 1812399
uaaauaaccaauagaagca

SEQ ID NO: 1812401 - RNA, 19 nt, Artificial Sequence
  Description of Artificial Sequence: Synthetic oligonucleotide
  Sense strand starting at position 1117 of SEQ ID NO: 1563460
ucguauuucuaucuaccca

SEQ ID NO: 1812402 - RNA, 19 nt, Artificial Sequence
  Description of Artificial Sequence: Synthetic oligonucleotide
  Antisense strand to SEQ ID NO: 1812401
uggguagauagaaauacga

SEQ ID NO: 1812403 - RNA, 19 nt, Artificial Sequence
  Description of Artificial Sequence: Synthetic oligonucleotide
  Sense strand starting at position 1248 of SEQ ID NO: 1563460
cuuacauaguuucuccaga

SEQ ID NO: 1812404 - RNA, 19 nt, Artificial Sequence
  Description of Artificial Sequence: Synthetic oligonucleotide
  Antisense strand to SEQ ID NO: 1812403
ucuggagaaacuauguaag

SEQ ID NO: 1812405 - RNA, 19 nt, Artificial Sequence
  Description of Artificial Sequence: Synthetic oligonucleotide
  Sense strand starting at position 1647 of SEQ ID NO: 1563460
gcgaaaugcuggcuaauuu

SEQ ID NO: 1812406 - RNA, 19 nt, Artificial Sequence
  Description of Artificial Sequence: Synthetic oligonucleotide
  Antisense strand to SEQ ID NO: 1812405
aaauuagccagcauuucgc

SEQ ID NO: 1812407 - RNA, 19 nt, Artificial Sequence
  Description of Artificial Sequence: Synthetic oligonucleotide
  Sense strand starting at position 1681 of SEQ ID NO: 1563460
ucagaaguaagcuagaagu

SEQ ID NO: 1812408 - RNA, 19 nt, Artificial Sequence
  Description of Artificial Sequence: Synthetic oligonucleotide
  Antisense strand to SEQ ID NO: 1812407
acuucuagcuuacuucuga

SEQ ID NO: 1812409 - RNA, 19 nt, Artificial Sequence
  Description of Artificial Sequence: Synthetic oligonucleotide
  Sense strand starting at position 1706 of SEQ ID NO: 1563460
ccagauauguucuuuccau

SEQ ID NO: 1812410 - RNA, 19 nt, Artificial Sequence
  Description of Artificial Sequence: Synthetic oligonucleotide
  Antisense strand to SEQ ID NO: 1812409
auggaaagaacauaucugg

SEQ ID NO: 1812411 - RNA, 19 nt, Artificial Sequence
  Description of Artificial Sequence: Synthetic oligonucleotide
  Sense strand starting at position 1713 of SEQ ID NO: 1563460
uguucuuuccauuaaggaa

SEQ ID NO: 1812412 - RNA, 19 nt, Artificial Sequence
  Description of Artificial Sequence: Synthetic oligonucleotide
  Antisense strand to SEQ ID NO: 1812411
uuccuuaauggaaagaaca

SEQ ID NO: 1812413 - RNA, 19 nt, Artificial Sequence
  Description of Artificial Sequence: Synthetic oligonucleotide
  Sense strand starting at position 1742 of SEQ ID NO: 1563460
uggacucagucuguuuaca

SEQ ID NO: 1812414 - RNA, 19 nt, Artificial Sequence
  Description of Artificial Sequence: Synthetic oligonucleotide
  Antisense strand to SEQ ID NO: 1812413
uguaaacagacugagucca

SEQ ID NO: 1812415 - RNA, 19 nt, Artificial Sequence
  Description of Artificial Sequence: Synthetic oligonucleotide
  Sense strand starting at position 1744 of SEQ ID NO: 1563460
gacucagucuguuuacaga

SEQ ID NO: 1812416 - RNA, 19 nt, Artificial Sequence
  Description of Artificial Sequence: Synthetic oligonucleotide
  Antisense strand to SEQ ID NO: 1812415
ucuguaaacagacugaguc

SEQ ID NO: 1812417 - RNA, 19 nt, Artificial Sequence
  Description of Artificial Sequence: Synthetic oligonucleotide
  Sense strand starting at position 1989 of SEQ ID NO: 1563460
uucuucuuccaaugaggaa

SEQ ID NO: 1812418 - RNA, 19 nt, Artificial Sequence
  Description of Artificial Sequence: Synthetic oligonucleotide
  Antisense strand to SEQ ID NO: 1812417
uuccucauuggaagaagaa

SEQ ID NO: 1812419 - RNA, 19 nt, Artificial Sequence
  Description of Artificial Sequence: Synthetic oligonucleotide
  Sense strand starting at position 2060 of SEQ ID NO: 1563460
ggcuaauaaucauugguca

SEQ ID NO: 1812420 - RNA, 19 nt, Artificial Sequence
  Description of Artificial Sequence: Synthetic oligonucleotide
  Antisense strand to SEQ ID NO: 1812419
ugaccaaugauuauuagcc

SEQ ID NO: 1812421 - RNA, 19 nt, Artificial Sequence
  Description of Artificial Sequence: Synthetic oligonucleotide
  Sense strand starting at position 2061 of SEQ ID NO: 1563460
gcuaauaaucauuggucaa

SEQ ID NO: 1812422 - RNA, 19 nt, Artificial Sequence
  Description of Artificial Sequence: Synthetic oligonucleotide
  Antisense strand to SEQ ID NO: 1812421
uugaccaaugauuauuagc

SEQ ID NO: 1812423 - RNA, 19 nt, Artificial Sequence
  Description of Artificial Sequence: Synthetic oligonucleotide
  Sense strand starting at position 2140 of SEQ ID NO: 1563460
ggucuauaaugauccaguc

SEQ ID NO: 1812424 - RNA, 19 nt, Artificial Sequence
  Description of Artificial Sequence: Synthetic oligonucleotide
  Antisense strand to SEQ ID NO: 1812423
gacuggaucauuauagacc

SEQ ID NO: 1812425 - RNA, 19 nt, Artificial Sequence
  Description of Artificial Sequence: Synthetic oligonucleotide
  Sense strand starting at position 2556 of SEQ ID NO: 1563460
agaugcuuuggccaaugau

SEQ ID NO: 1812426 - RNA, 19 nt, Artificial Sequence
  Description of Artificial Sequence: Synthetic oligonucleotide
  Antisense strand to SEQ ID NO: 1812425
aucauuggccaaagcaucu

SEQ ID NO: 1812427 - RNA, 19 nt, Artificial Sequence
  Description of Artificial Sequence: Synthetic oligonucleotide
  Sense strand starting at position 2575 of SEQ ID NO: 1563460
gaaccacauguaugacagu

SEQ ID NO: 1812428 - RNA, 19 nt, Artificial Sequence
  Description of Artificial Sequence: Synthetic oligonucleotide
  Antisense strand to SEQ ID NO: 1812427
acugucauacaugugguuc

SEQ ID NO: 1812429 - RNA, 19 nt, Artificial Sequence
  Description of Artificial Sequence: Synthetic oligonucleotide
  Sense strand starting at position 3322 of SEQ ID NO: 1563460
guuagugcccuugaagacu

SEQ ID NO: 1812430 - RNA, 19 nt, Artificial Sequence
  Description of Artificial Sequence: Synthetic oligonucleotide
  Antisense strand to SEQ ID NO: 1812429
agucuucaagggcacuaac

SEQ ID NO: 1812431 - RNA, 19 nt, Artificial Sequence
  Description of Artificial Sequence: Synthetic oligonucleotide
  Sense strand starting at position 3381 of SEQ ID NO: 1563460
uaaugauccugacuuugug

SEQ ID NO: 1812432 - RNA, 19 nt, Artificial Sequence
  Description of Artificial Sequence: Synthetic oligonucleotide
  Antisense strand to SEQ ID NO: 1812431
cacaaagucaggaucauua

SEQ ID NO: 1812433 - RNA, 19 nt, Artificial Sequence
  Description of Artificial Sequence: Synthetic oligonucleotide
  Sense strand starting at position 3418 of SEQ ID NO: 1563460
uauguuugugucuuagcuu

SEQ ID NO: 1812434 - RNA, 19 nt, Artificial Sequence
  Description of Artificial Sequence: Synthetic oligonucleotide
  Antisense strand to SEQ ID NO: 1812433
aagcuaagacacaaacaua

SEQ ID NO: 1812435 - RNA, 19 nt, Artificial Sequence
  Description of Artificial Sequence: Synthetic oligonucleotide
  Sense strand starting at position 3551 of SEQ ID NO: 1563460
uaagcuuaggguuauuaca

SEQ ID NO: 1812436 - RNA, 19 nt, Artificial Sequence
  Description of Artificial Sequence: Synthetic oligonucleotide
  Antisense strand to SEQ ID NO: 1812435
uguaauaacccuaagcuua

SEQ ID NO: 1812437 - RNA, 19 nt, Artificial Sequence
  Description of Artificial Sequence: Synthetic oligonucleotide
  Sense strand starting at position 3553 of SEQ ID NO: 1563460
agcuuaggguuauuacaaa

SEQ ID NO: 1812438 - RNA, 19 nt, Artificial Sequence
  Description of Artificial Sequence: Synthetic oligonucleotide
  Antisense strand to SEQ ID NO: 1812437
uuuguaauaacccuaagcu

SEQ ID NO: 1812439 - RNA, 19 nt, Artificial Sequence
  Description of Artificial Sequence: Synthetic oligonucleotide
  Sense strand starting at position 3698 of SEQ ID NO: 1563460
aaucuauaggaguguacaa

SEQ ID NO: 1812440 - RNA, 19 nt, Artificial Sequence
  Description of Artificial Sequence: Synthetic oligonucleotide
  Antisense strand to SEQ ID NO: 1812439
uuguacacuccuauagauu

SEQ ID NO: 1812441 - RNA, 19 nt, Artificial Sequence
  Description of Artificial Sequence: Synthetic oligonucleotide
  Sense strand starting at position 3866 of SEQ ID NO: 1563460
gguuaacuaugguuagaua

SEQ ID NO: 1812442 - RNA, 19 nt, Artificial Sequence
  Description of Artificial Sequence: Synthetic oligonucleotide
  Antisense strand to SEQ ID NO: 1812441
uaucuaaccauaguuaacc

SEQ ID NO: 1812443 - RNA, 19 nt, Artificial Sequence
  Description of Artificial Sequence: Synthetic oligonucleotide
  Sense strand starting at position 3867 of SEQ ID NO: 1563460
guuaacuaugguuagauac

SEQ ID NO: 1812444 - RNA, 19 nt, Artificial Sequence
  Description of Artificial Sequence: Synthetic oligonucleotide
  Antisense strand to SEQ ID NO: 1812443
guaucuaaccauaguuaac

SEQ ID NO: 1812445 - RNA, 19 nt, Artificial Sequence
  Description of Artificial Sequence: Synthetic oligonucleotide
  Sense strand starting at position 3890 of SEQ ID NO: 1563460
guguuagaaucucugacag

SEQ ID NO: 1812446 - RNA, 19 nt, Artificial Sequence
  Description of Artificial Sequence: Synthetic oligonucleotide
  Antisense strand to SEQ ID NO: 1812445
cugucagagauucuaacac

SEQ ID NO: 1812447 - RNA, 19 nt, Artificial Sequence
  Description of Artificial Sequence: Synthetic oligonucleotide
  Sense strand starting at position 61 of SEQ ID NO: 1563461
aguagaguacuaggaguca

SEQ ID NO: 1812448 - RNA, 19 nt, Artificial Sequence
  Description of Artificial Sequence: Synthetic oligonucleotide
  Antisense strand to SEQ ID NO: 1812447
ugacuccuaguacucuacu

SEQ ID NO: 1812449 - RNA, 19 nt, Artificial Sequence
  Description of Artificial Sequence: Synthetic oligonucleotide
  Sense strand starting at position 70 of SEQ ID NO: 1563461
cuaggagucaggugaugaa

SEQ ID NO: 1812450 - RNA, 19 nt, Artificial Sequence
  Description of Artificial Sequence: Synthetic oligonucleotide
  Antisense strand to SEQ ID NO: 1812449
uucaucaccugacuccuag

SEQ ID NO: 1812451 - RNA, 19 nt, Artificial Sequence
  Description of Artificial Sequence: Synthetic oligonucleotide
  Sense strand starting at position 106 of SEQ ID NO: 1563461
ggugauauaaguugaugac

SEQ ID NO: 1812452 - RNA, 19 nt, Artificial Sequence
  Description of Artificial Sequence: Synthetic oligonucleotide
  Antisense strand to SEQ ID NO: 1812451
gucaucaacuuauaucacc

SEQ ID NO: 1812453 - RNA, 19 nt, Artificial Sequence
  Description of Artificial Sequence: Synthetic oligonucleotide
  Sense strand starting at position 364 of SEQ ID NO: 1563461
gaggguguugcugaugaca

SEQ ID NO: 1812454 - RNA, 19 nt, Artificial Sequence
  Description of Artificial Sequence: Synthetic oligonucleotide
  Antisense strand to SEQ ID NO: 1812453
ugucaucagcaacacccuc

SEQ ID NO: 1812455 - RNA, 19 nt, Artificial Sequence
  Description of Artificial Sequence: Synthetic oligonucleotide
  Sense strand starting at position 401 of SEQ ID NO: 1563461
augccuaauggugacauaa

SEQ ID NO: 1812456 - RNA, 19 nt, Artificial Sequence
  Description of Artificial Sequence: Synthetic oligonucleotide
  Antisense strand to SEQ ID NO: 1812455
uuaugucaccauuaggcau

SEQ ID NO: 1812457 - RNA, 19 nt, Artificial Sequence
  Description of Artificial Sequence: Synthetic oligonucleotide
  Sense strand starting at position 419 of SEQ ID NO: 1563461
aaccuaaggucuuugugau

SEQ ID NO: 1812458 - RNA, 19 nt, Artificial Sequence
  Description of Artificial Sequence: Synthetic oligonucleotide
  Antisense strand to SEQ ID NO: 1812457
aucacaaagaccuuagguu

SEQ ID NO: 1812459 - RNA, 19 nt, Artificial Sequence
  Description of Artificial Sequence: Synthetic oligonucleotide
  Sense strand starting at position 420 of SEQ ID NO: 1563461
accuaaggucuuugugauc

SEQ ID NO: 1812460 - RNA, 19 nt, Artificial Sequence
  Description of Artificial Sequence: Synthetic oligonucleotide
  Antisense strand to SEQ ID NO: 1812459
gaucacaaagaccuuaggu

SEQ ID NO: 1812461 - RNA, 19 nt, Artificial Sequence
  Description of Artificial Sequence: Synthetic oligonucleotide
  Sense strand starting at position 425 of SEQ ID NO: 1563461
aggucuuugugaucuaaga

SEQ ID NO: 1812462 - RNA, 19 nt, Artificial Sequence
  Description of Artificial Sequence: Synthetic oligonucleotide
  Antisense strand to SEQ ID NO: 1812461
ucuuagaucacaaagaccu

SEQ ID NO: 1812463 - RNA, 19 nt, Artificial Sequence
  Description of Artificial Sequence: Synthetic oligonucleotide
  Sense strand starting at position 427 of SEQ ID NO: 1563461
gucuuugugaucuaagagg

SEQ ID NO: 1812464 - RNA, 19 nt, Artificial Sequence
  Description of Artificial Sequence: Synthetic oligonucleotide
  Antisense strand to SEQ ID NO: 1812463
ccucuuagaucacaaagac

SEQ ID NO: 1812465 - RNA, 19 nt, Artificial Sequence
  Description of Artificial Sequence: Synthetic oligonucleotide
  Sense strand starting at position 490 of SEQ ID NO: 1563461
aagcgcuagugauuugaga

SEQ ID NO: 1812466 - RNA, 19 nt, Artificial Sequence
  Description of Artificial Sequence: Synthetic oligonucleotide
  Antisense strand to SEQ ID NO: 1812465
ucucaaaucacuagcgcuu

SEQ ID NO: 1812467 - RNA, 19 nt, Artificial Sequence
  Description of Artificial Sequence: Synthetic oligonucleotide
  Sense strand starting at position 992 of SEQ ID NO: 1563461
ugcaauuccuuucuaggga

SEQ ID NO: 1812468 - RNA, 19 nt, Artificial Sequence
  Description of Artificial Sequence: Synthetic oligonucleotide
  Antisense strand to SEQ ID NO: 1812467
ucccuagaaaggaauugca

SEQ ID NO: 1812469 - RNA, 19 nt, Artificial Sequence
  Description of Artificial Sequence: Synthetic oligonucleotide
  Sense strand starting at position 1066 of SEQ ID NO: 1563461
uuucgaauuugugcacuuu

SEQ ID NO: 1812470 - RNA, 19 nt, Artificial Sequence
  Description of Artificial Sequence: Synthetic oligonucleotide
  Antisense strand to SEQ ID NO: 1812469
aaagugcacaaauucgaaa

SEQ ID NO: 1812471 - RNA, 19 nt, Artificial Sequence
  Description of Artificial Sequence: Synthetic oligonucleotide
  Sense strand starting at position 1126 of SEQ ID NO: 1563461
cuggucauauacccauauu

SEQ ID NO: 1812472 - RNA, 19 nt, Artificial Sequence
  Description of Artificial Sequence: Synthetic oligonucleotide
  Antisense strand to SEQ ID NO: 1812471
aauauggguauaugaccag

SEQ ID NO: 1812473 - RNA, 19 nt, Artificial Sequence
  Description of Artificial Sequence: Synthetic oligonucleotide
  Sense strand starting at position 1197 of SEQ ID NO: 1563461
uagguuguaccaugagaaa

SEQ ID NO: 1812474 - RNA, 19 nt, Artificial Sequence
  Description of Artificial Sequence: Synthetic oligonucleotide
  Antisense strand to SEQ ID NO: 1812473
uuucucaugguacaaccua

SEQ ID NO: 1812475 - RNA, 19 nt, Artificial Sequence
  Description of Artificial Sequence: Synthetic oligonucleotide
  Sense strand starting at position 1280 of SEQ ID NO: 1563461
augggauauuaucugguag

SEQ ID NO: 1812476 - RNA, 19 nt, Artificial Sequence
  Description of Artificial Sequence: Synthetic oligonucleotide
  Antisense strand to SEQ ID NO: 1812475
cuaccagauaauaucccau

SEQ ID NO: 1812477 - RNA, 19 nt, Artificial Sequence
  Description of Artificial Sequence: Synthetic oligonucleotide
  Sense strand starting at position 1305 of SEQ ID NO: 1563461
guuagcauggcuuacauua

SEQ ID NO: 1812478 - RNA, 19 nt, Artificial Sequence
  Description of Artificial Sequence: Synthetic oligonucleotide
  Antisense strand to SEQ ID NO: 1812477
uaauguaagccaugcuaac

SEQ ID NO: 1812479 - RNA, 19 nt, Artificial Sequence
  Description of Artificial Sequence: Synthetic oligonucleotide
  Sense strand starting at position 1484 of SEQ ID NO: 1563461
cugcacuuucuuggacaua

SEQ ID NO: 1812480 - RNA, 19 nt, Artificial Sequence
  Description of Artificial Sequence: Synthetic oligonucleotide
  Antisense strand to SEQ ID NO: 1812479
uauguccaagaaagugcag

SEQ ID NO: 1812481 - RNA, 19 nt, Artificial Sequence
  Description of Artificial Sequence: Synthetic oligonucleotide
  Sense strand starting at position 1629 of SEQ ID NO: 1563461
aguuuauucuuuccaugau

SEQ ID NO: 1812482 - RNA, 19 nt, Artificial Sequence
  Description of Artificial Sequence: Synthetic oligonucleotide
  Antisense strand to SEQ ID NO: 1812481
aucauggaaagaauaaacu

SEQ ID NO: 1812483 - RNA, 19 nt, Artificial Sequence
  Description of Artificial Sequence: Synthetic oligonucleotide
  Sense strand starting at position 1700 of SEQ ID NO: 1563461
ucaagauucgcagguauuu

SEQ ID NO: 1812484 - RNA, 19 nt, Artificial Sequence
  Description of Artificial Sequence: Synthetic oligonucleotide
  Antisense strand to SEQ ID NO: 1812483
aaauaccugcgaaucuuga

SEQ ID NO: 1812485 - RNA, 19 nt, Artificial Sequence
  Description of Artificial Sequence: Synthetic oligonucleotide
  Sense strand starting at position 1990 of SEQ ID NO: 1563461
acugguaauguugagugau

SEQ ID NO: 1812486 - RNA, 19 nt, Artificial Sequence
  Description of Artificial Sequence: Synthetic oligonucleotide
  Antisense strand to SEQ ID NO: 1812485
aucacucaacauuaccagu

SEQ ID NO: 1812487 - RNA, 19 nt, Artificial Sequence
  Description of Artificial Sequence: Synthetic oligonucleotide
  Sense strand starting at position 1992 of SEQ ID NO: 1563461
ugguaauguugagugauga

SEQ ID NO: 1812488 - RNA, 19 nt, Artificial Sequence
  Description of Artificial Sequence: Synthetic oligonucleotide
  Antisense strand to SEQ ID NO: 1812487
ucaucacucaacauuacca

SEQ ID NO: 1812489 - RNA, 19 nt, Artificial Sequence
  Description of Artificial Sequence: Synthetic oligonucleotide
  Sense strand starting at position 1993 of SEQ ID NO: 1563461
gguaauguugagugaugac

SEQ ID NO: 1812490 - RNA, 19 nt, Artificial Sequence
  Description of Artificial Sequence: Synthetic oligonucleotide
  Antisense strand to SEQ ID NO: 1812489
gucaucacucaacauuacc

SEQ ID NO: 1812491 - RNA, 19 nt, Artificial Sequence
  Description of Artificial Sequence: Synthetic oligonucleotide
  Sense strand starting at position 2047 of SEQ ID NO: 1563461
gggacagaguagucauauu

SEQ ID NO: 1812492 - RNA, 19 nt, Artificial Sequence
  Description of Artificial Sequence: Synthetic oligonucleotide
  Antisense strand to SEQ ID NO: 1812491
aauaugacuacucuguccc

SEQ ID NO: 1812493 - RNA, 19 nt, Artificial Sequence
  Description of Artificial Sequence: Synthetic oligonucleotide
  Sense strand starting at position 2137 of SEQ ID NO: 1563461
ugaacugaauuagucagua

SEQ ID NO: 1812494 - RNA, 19 nt, Artificial Sequence
  Description of Artificial Sequence: Synthetic oligonucleotide
  Antisense strand to SEQ ID NO: 1812493
uacugacuaauucaguuca

SEQ ID NO: 1812495 - RNA, 19 nt, Artificial Sequence
  Description of Artificial Sequence: Synthetic oligonucleotide
  Sense strand starting at position 2172 of SEQ ID NO: 1563461
accuguuugguuuauuaaa

SEQ ID NO: 1812496 - RNA, 19 nt, Artificial Sequence
  Description of Artificial Sequence: Synthetic oligonucleotide
  Antisense strand to SEQ ID NO: 1812495
uuuaauaaaccaaacaggu

SEQ ID NO: 1812497 - RNA, 19 nt, Artificial Sequence
  Description of Artificial Sequence: Synthetic oligonucleotide
  Sense strand starting at position 2246 of SEQ ID NO: 1563461
gcacaaagauguguuuaug

SEQ ID NO: 1812498 - RNA, 19 nt, Artificial Sequence
  Description of Artificial Sequence: Synthetic oligonucleotide
  Antisense strand to SEQ ID NO: 1812497
cauaaacacaucuuugugc

SEQ ID NO: 1812499 - RNA, 19 nt, Artificial Sequence
  Description of Artificial Sequence: Synthetic oligonucleotide
  Sense strand starting at position 2249 of SEQ ID NO: 1563461
caaagauguguuuaugugu

SEQ ID NO: 1812500 - RNA, 19 nt, Artificial Sequence
  Description of Artificial Sequence: Synthetic oligonucleotide
  Antisense strand to SEQ ID NO: 1812499
acacauaaacacaucuuug

SEQ ID NO: 1812501 - RNA, 19 nt, Artificial Sequence
  Description of Artificial Sequence: Synthetic oligonucleotide
  Sense strand starting at position 2278 of SEQ ID NO: 1563461
guguguaagagauauaugu

SEQ ID NO: 1812502 - RNA, 19 nt, Artificial Sequence
  Description of Artificial Sequence: Synthetic oligonucleotide
  Antisense strand to SEQ ID NO: 1812501
acauauaucucuuacacac

SEQ ID NO: 1812503 - RNA, 19 nt, Artificial Sequence
  Description of Artificial Sequence: Synthetic oligonucleotide
  Sense strand starting at position 2285 of SEQ ID NO: 1563461
agagauauaugugcugaaa

SEQ ID NO: 1812504 - RNA, 19 nt, Artificial Sequence
  Description of Artificial Sequence: Synthetic oligonucleotide
  Antisense strand to SEQ ID NO: 1812503
uuucagcacauauaucucu

SEQ ID NO: 1812505 - RNA, 19 nt, Artificial Sequence
  Description of Artificial Sequence: Synthetic oligonucleotide
  Sense strand starting at position 2429 of SEQ ID NO: 1563461
acuugaagaugucuuauuc

SEQ ID NO: 1812506 - RNA, 19 nt, Artificial Sequence
  Description of Artificial Sequence: Synthetic oligonucleotide
  Antisense strand to SEQ ID NO: 1812505
gaauaagacaucuucaagu

SEQ ID NO: 1812507 - RNA, 19 nt, Artificial Sequence
  Description of Artificial Sequence: Synthetic oligonucleotide
  Sense strand starting at position 2438 of SEQ ID NO: 1563461
ugucuuauucuuggauaug

SEQ ID NO: 1812508 - RNA, 19 nt, Artificial Sequence
  Description of Artificial Sequence: Synthetic oligonucleotide
  Antisense strand to SEQ ID NO: 1812507
cauauccaagaauaagaca

SEQ ID NO: 1812509 - RNA, 19 nt, Artificial Sequence
  Description of Artificial Sequence: Synthetic oligonucleotide
  Sense strand starting at position 2441 of SEQ ID NO: 1563461
cuuauucuuggauauguaa

SEQ ID NO: 1812510 - RNA, 19 nt, Artificial Sequence
  Description of Artificial Sequence: Synthetic oligonucleotide
  Antisense strand to SEQ ID NO: 1812509
uuacauauccaagaauaag

SEQ ID NO: 1812511 - RNA, 19 nt, Artificial Sequence
  Description of Artificial Sequence: Synthetic oligonucleotide
  Sense strand starting at position 2538 of SEQ ID NO: 1563461
ucuuauuaugcacagaguu

SEQ ID NO: 1812512 - RNA, 19 nt, Artificial Sequence
  Description of Artificial Sequence: Synthetic oligonucleotide
  Antisense strand to SEQ ID NO: 1812511
aacucugugcauaauaaga

SEQ ID NO: 1812513 - RNA, 19 nt, Artificial Sequence
  Description of Artificial Sequence: Synthetic oligonucleotide
  Sense strand starting at position 2629 of SEQ ID NO: 1563461
aaaccuuucugggcaggua

SEQ ID NO: 1812514 - RNA, 19 nt, Artificial Sequence
  Description of Artificial Sequence: Synthetic oligonucleotide
  Antisense strand to SEQ ID NO: 1812513
uaccugcccagaaagguuu

SEQ ID NO: 1812515 - RNA, 19 nt, Artificial Sequence
  Description of Artificial Sequence: Synthetic oligonucleotide
  Sense strand starting at position 2681 of SEQ ID NO: 1563461
uuuagauaacagugaccau

SEQ ID NO: 1812516 - RNA, 19 nt, Artificial Sequence
  Description of Artificial Sequence: Synthetic oligonucleotide
  Antisense strand to SEQ ID NO: 1812515
auggucacuguuaucuaaa

SEQ ID NO: 1812517 - RNA, 19 nt, Artificial Sequence
  Description of Artificial Sequence: Synthetic oligonucleotide
  Sense strand starting at position 3051 of SEQ ID NO: 1563461
acuccucuggcagaguaaa

SEQ ID NO: 1812518 - RNA, 19 nt, Artificial Sequence
  Description of Artificial Sequence: Synthetic oligonucleotide
  Antisense strand to SEQ ID NO: 1812517
uuuacucugccagaggagu

SEQ ID NO: 1812519 - RNA, 19 nt, Artificial Sequence
  Description of Artificial Sequence: Synthetic oligonucleotide
  Sense strand starting at position 3145 of SEQ ID NO: 1563461
acucuaaauguucgaaacu

SEQ ID NO: 1812520 - RNA, 19 nt, Artificial Sequence
  Description of Artificial Sequence: Synthetic oligonucleotide
  Antisense strand to SEQ ID NO: 1812519
aguuucgaacauuuagagu

SEQ ID NO: 1812521 - RNA, 19 nt, Artificial Sequence
  Description of Artificial Sequence: Synthetic oligonucleotide
  Sense strand starting at position 3546 of SEQ ID NO: 1563461
cugcaugcucaauggaaca

SEQ ID NO: 1812522 - RNA, 19 nt, Artificial Sequence
  Description of Artificial Sequence: Synthetic oligonucleotide
  Antisense strand to SEQ ID NO: 1812521
uguuccauugagcaugcag

SEQ ID NO: 1812523 - RNA, 19 nt, Artificial Sequence
  Description of Artificial Sequence: Synthetic oligonucleotide
  Sense strand starting at position 3678 of SEQ ID NO: 1563461
uggcaucuacagugggaaa

SEQ ID NO: 1812524 - RNA, 19 nt, Artificial Sequence
  Description of Artificial Sequence: Synthetic oligonucleotide
  Antisense strand to SEQ ID NO: 1812523
uuucccacuguagaugcca

SEQ ID NO: 1812525 - RNA, 19 nt, Artificial Sequence
  Description of Artificial Sequence: Synthetic oligonucleotide
  Sense strand starting at position 3896 of SEQ ID NO: 1563461
agcaguggugcucaaucaa

SEQ ID NO: 1812526 - RNA, 19 nt, Artificial Sequence
  Description of Artificial Sequence: Synthetic oligonucleotide
  Antisense strand to SEQ ID NO: 1812525
uugauugagcaccacugcu

SEQ ID NO: 1812527 - RNA, 19 nt, Artificial Sequence
  Description of Artificial Sequence: Synthetic oligonucleotide
  Sense strand starting at position 17 of SEQ ID NO: 1563462
cauacagggcaauguuauu

SEQ ID NO: 1812528 - RNA, 19 nt, Artificial Sequence
  Description of Artificial Sequence: Synthetic oligonucleotide
  Antisense strand to SEQ ID NO: 1812527
aauaacauugcccuguaug

SEQ ID NO: 1812529 - RNA, 19 nt, Artificial Sequence
  Description of Artificial Sequence: Synthetic oligonucleotide
  Sense strand starting at position 27 of SEQ ID NO: 1563462
aauguuauuugggagauua

SEQ ID NO: 1812530 - RNA, 19 nt, Artificial Sequence
  Description of Artificial Sequence: Synthetic oligonucleotide
  Antisense strand to SEQ ID NO: 1812529
uaaucucccaaauaacauu

SEQ ID NO: 1812531 - RNA, 19 nt, Artificial Sequence
  Description of Artificial Sequence: Synthetic oligonucleotide
  Sense strand starting at position 40 of SEQ ID NO: 1563462
agauuaugauaguuaccau

SEQ ID NO: 1812532 - RNA, 19 nt, Artificial Sequence
  Description of Artificial Sequence: Synthetic oligonucleotide
  Antisense strand to SEQ ID NO: 1812531
augguaacuaucauaaucu

SEQ ID NO: 1812533 - RNA, 19 nt, Artificial Sequence
  Description of Artificial Sequence: Synthetic oligonucleotide
  Sense strand starting at position 81 of SEQ ID NO: 1563462
uuggguauguaccuuaaga

SEQ ID NO: 1812534 - RNA, 19 nt, Artificial Sequence
  Description of Artificial Sequence: Synthetic oligonucleotide
  Antisense strand to SEQ ID NO: 1812533
ucuuaagguacauacccaa

SEQ ID NO: 1812535 - RNA, 19 nt, Artificial Sequence
  Description of Artificial Sequence: Synthetic oligonucleotide
  Sense strand starting at position 166 of SEQ ID NO: 1563462
uucuauacuguggaagagu

SEQ ID NO: 1812536 - RNA, 19 nt, Artificial Sequence
  Description of Artificial Sequence: Synthetic oligonucleotide
  Antisense strand to SEQ ID NO: 1812535
acucuuccacaguauagaa

SEQ ID NO: 1812537 - RNA, 19 nt, Artificial Sequence
  Description of Artificial Sequence: Synthetic oligonucleotide
  Sense strand starting at position 289 of SEQ ID NO: 1563462
augcuagauuaagucuaaa

SEQ ID NO: 1812538 - RNA, 19 nt, Artificial Sequence
  Description of Artificial Sequence: Synthetic oligonucleotide
  Antisense strand to SEQ ID NO: 1812537
uuuagacuuaaucuagcau

SEQ ID NO: 1812539 - RNA, 19 nt, Artificial Sequence
  Description of Artificial Sequence: Synthetic oligonucleotide
  Sense strand starting at position 399 of SEQ ID NO: 1563462
ugguguagucaauacuuag

SEQ ID NO: 1812540 - RNA, 19 nt, Artificial Sequence
  Description of Artificial Sequence: Synthetic oligonucleotide
  Antisense strand to SEQ ID NO: 1812539
cuaaguauugacuacacca

SEQ ID NO: 1812541 - RNA, 19 nt, Artificial Sequence
  Description of Artificial Sequence: Synthetic oligonucleotide
  Sense strand starting at position 464 of SEQ ID NO: 1563462
acuugagguuguuuaugau

SEQ ID NO: 1812542 - RNA, 19 nt, Artificial Sequence
  Description of Artificial Sequence: Synthetic oligonucleotide
  Antisense strand to SEQ ID NO: 1812541
aucauaaacaaccucaagu

SEQ ID NO: 1812543 - RNA, 19 nt, Artificial Sequence
  Description of Artificial Sequence: Synthetic oligonucleotide
  Sense strand starting at position 502 of SEQ ID NO: 1563462
aguucuaauugagccauua

SEQ ID NO: 1812544 - RNA, 19 nt, Artificial Sequence
  Description of Artificial Sequence: Synthetic oligonucleotide
  Antisense strand to SEQ ID NO: 1812543
uaauggcucaauuagaacu

SEQ ID NO: 1812545 - RNA, 19 nt, Artificial Sequence
  Description of Artificial Sequence: Synthetic oligonucleotide
  Sense strand starting at position 683 of SEQ ID NO: 1563462
uguacaaucuaguccagau

SEQ ID NO: 1812546 - RNA, 19 nt, Artificial Sequence
  Description of Artificial Sequence: Synthetic oligonucleotide
  Antisense strand to SEQ ID NO: 1812545
aucuggacuagauuguaca

SEQ ID NO: 1812547 - RNA, 19 nt, Artificial Sequence
  Description of Artificial Sequence: Synthetic oligonucleotide
  Sense strand starting at position 750 of SEQ ID NO: 1563462
auaguuucucucuagguuu

SEQ ID NO: 1812548 - RNA, 19 nt, Artificial Sequence
  Description of Artificial Sequence: Synthetic oligonucleotide
  Antisense strand to SEQ ID NO: 1812547
aaaccuagagagaaacuau

SEQ ID NO: 1812549 - RNA, 19 nt, Artificial Sequence
  Description of Artificial Sequence: Synthetic oligonucleotide
  Sense strand starting at position 801 of SEQ ID NO: 1563462
cugaauucaguagguggaa

SEQ ID NO: 1812550 - RNA, 19 nt, Artificial Sequence
  Description of Artificial Sequence: Synthetic oligonucleotide
  Antisense strand to SEQ ID NO: 1812549
uuccaccuacugaauucag

SEQ ID NO: 1812551 - RNA, 19 nt, Artificial Sequence
  Description of Artificial Sequence: Synthetic oligonucleotide
  Sense strand starting at position 875 of SEQ ID NO: 1563462
aaauguuccuggcuaaaga

SEQ ID NO: 1812552 - RNA, 19 nt, Artificial Sequence
  Description of Artificial Sequence: Synthetic oligonucleotide
  Antisense strand to SEQ ID NO: 1812551
ucuuuagccaggaacauuu

SEQ ID NO: 1812553 - RNA, 19 nt, Artificial Sequence
  Description of Artificial Sequence: Synthetic oligonucleotide
  Sense strand starting at position 876 of SEQ ID NO: 1563462
aauguuccuggcuaaagau

SEQ ID NO: 1812554 - RNA, 19 nt, Artificial Sequence
  Description of Artificial Sequence: Synthetic oligonucleotide
  Antisense strand to SEQ ID NO: 1812553
aucuuuagccaggaacauu

SEQ ID NO: 1812555 - RNA, 19 nt, Artificial Sequence
  Description of Artificial Sequence: Synthetic oligonucleotide
  Sense strand starting at position 944 of SEQ ID NO: 1563462
agaugugucugaguuacua

SEQ ID NO: 1812556 - RNA, 19 nt, Artificial Sequence
  Description of Artificial Sequence: Synthetic oligonucleotide
  Antisense strand to SEQ ID NO: 1812555
uaguaacucagacacaucu

SEQ ID NO: 1812557 - RNA, 19 nt, Artificial Sequence
  Description of Artificial Sequence: Synthetic oligonucleotide
  Sense strand starting at position 946 of SEQ ID NO: 1563462
augugucugaguuacuaaa

SEQ ID NO: 1812558 - RNA, 19 nt, Artificial Sequence
  Description of Artificial Sequence: Synthetic oligonucleotide
  Antisense strand to SEQ ID NO: 1812557
uuuaguaacucagacacau

SEQ ID NO: 1812559 - RNA, 19 nt, Artificial Sequence
  Description of Artificial Sequence: Synthetic oligonucleotide
  Sense strand starting at position 948 of SEQ ID NO: 1563462
gugucugaguuacuaaaua

SEQ ID NO: 1812560 - RNA, 19 nt, Artificial Sequence
  Description of Artificial Sequence: Synthetic oligonucleotide
  Antisense strand to SEQ ID NO: 1812559
uauuuaguaacucagacac

SEQ ID NO: 1812561 - RNA, 19 nt, Artificial Sequence
  Description of Artificial Sequence: Synthetic oligonucleotide
  Sense strand starting at position 1174 of SEQ ID NO: 1563462
augugaaacuaccuuguga

SEQ ID NO: 1812562 - RNA, 19 nt, Artificial Sequence
  Description of Artificial Sequence: Synthetic oligonucleotide
  Antisense strand to SEQ ID NO: 1812561
ucacaagguaguuucacau

SEQ ID NO: 1812563 - RNA, 19 nt, Artificial Sequence
  Description of Artificial Sequence: Synthetic oligonucleotide
  Sense strand starting at position 1176 of SEQ ID NO: 1563462
gugaaacuaccuugugaaa

SEQ ID NO: 1812564 - RNA, 19 nt, Artificial Sequence
  Description of Artificial Sequence: Synthetic oligonucleotide
  Antisense strand to SEQ ID NO: 1812563
uuucacaagguaguuucac

SEQ ID NO: 1812565 - RNA, 19 nt, Artificial Sequence
  Description of Artificial Sequence: Synthetic oligonucleotide
  Sense strand starting at position 1349 of SEQ ID NO: 1563462
ggagguuugcggagugugu

SEQ ID NO: 1812566 - RNA, 19 nt, Artificial Sequence
  Description of Artificial Sequence: Synthetic oligonucleotide
  Antisense strand to SEQ ID NO: 1812565
acacacuccgcaaaccucc

SEQ ID NO: 1812567 - RNA, 19 nt, Artificial Sequence
  Description of Artificial Sequence: Synthetic oligonucleotide
  Sense strand starting at position 1400 of SEQ ID NO: 1563462
agaagcacugagcaauauu

SEQ ID NO: 1812568 - RNA, 19 nt, Artificial Sequence
  Description of Artificial Sequence: Synthetic oligonucleotide
  Antisense strand to SEQ ID NO: 1812567
aauauugcucagugcuucu

SEQ ID NO: 1812569 - RNA, 19 nt, Artificial Sequence
  Description of Artificial Sequence: Synthetic oligonucleotide
  Sense strand starting at position 1445 of SEQ ID NO: 1563462
auuucuggcuaagaaauaa

SEQ ID NO: 1812570 - RNA, 19 nt, Artificial Sequence
  Description of Artificial Sequence: Synthetic oligonucleotide
  Antisense strand to SEQ ID NO: 1812569
uuauuucuuagccagaaau

SEQ ID NO: 1812571 - RNA, 19 nt, Artificial Sequence
  Description of Artificial Sequence: Synthetic oligonucleotide
  Sense strand starting at position 2124 of SEQ ID NO: 1563462
cuuaguucucugugauuuc

SEQ ID NO: 1812572 - RNA, 19 nt, Artificial Sequence
  Description of Artificial Sequence: Synthetic oligonucleotide
  Antisense strand to SEQ ID NO: 1812571
gaaaucacagagaacuaag

SEQ ID NO: 1812573 - RNA, 19 nt, Artificial Sequence
  Description of Artificial Sequence: Synthetic oligonucleotide
  Sense strand starting at position 2133 of SEQ ID NO: 1563462
cugugauuucugugacugu

SEQ ID NO: 1812574 - RNA, 19 nt, Artificial Sequence
  Description of Artificial Sequence: Synthetic oligonucleotide
  Antisense strand to SEQ ID NO: 1812573
acagucacagaaaucacag

SEQ ID NO: 1812575 - RNA, 19 nt, Artificial Sequence
  Description of Artificial Sequence: Synthetic oligonucleotide
  Sense strand starting at position 2148 of SEQ ID NO: 1563462
cugugaggucauuagacua

SEQ ID NO: 1812576 - RNA, 19 nt, Artificial Sequence
  Description of Artificial Sequence: Synthetic oligonucleotide
  Antisense strand to SEQ ID NO: 1812575
uagucuaaugaccucacag

SEQ ID NO: 1812577 - RNA, 19 nt, Artificial Sequence
  Description of Artificial Sequence: Synthetic oligonucleotide
  Sense strand starting at position 2207 of SEQ ID NO: 1563462
uauaacuggcauuauguga

SEQ ID NO: 1812578 - RNA, 19 nt, Artificial Sequence
  Description of Artificial Sequence: Synthetic oligonucleotide
  Antisense strand to SEQ ID NO: 1812577
ucacauaaugccaguuaua

SEQ ID NO: 1812579 - RNA, 19 nt, Artificial Sequence
  Description of Artificial Sequence: Synthetic oligonucleotide
  Sense strand starting at position 2221 of SEQ ID NO: 1563462
ugugaaacuugaucuuaag

SEQ ID NO: 1812580 - RNA, 19 nt, Artificial Sequence
  Description of Artificial Sequence: Synthetic oligonucleotide
  Antisense strand to SEQ ID NO: 1812579
cuuaagaucaaguuucaca

SEQ ID NO: 1812581 - RNA, 19 nt, Artificial Sequence
  Description of Artificial Sequence: Synthetic oligonucleotide
  Sense strand starting at position 2369 of SEQ ID NO: 1563462
auaaauugccuccauugga

SEQ ID NO: 1812582 - RNA, 19 nt, Artificial Sequence
  Description of Artificial Sequence: Synthetic oligonucleotide
  Antisense strand to SEQ ID NO: 1812581
uccaauggaggcaauuuau

SEQ ID NO: 1812583 - RNA, 19 nt, Artificial Sequence
  Description of Artificial Sequence: Synthetic oligonucleotide
  Sense strand starting at position 2572 of SEQ ID NO: 1563462
cugguaugugcugauugaa

SEQ ID NO: 1812584 - RNA, 19 nt, Artificial Sequence
  Description of Artificial Sequence: Synthetic oligonucleotide
  Antisense strand to SEQ ID NO: 1812583
uucaaucagcacauaccag

SEQ ID NO: 1812585 - RNA, 19 nt, Artificial Sequence
  Description of Artificial Sequence: Synthetic oligonucleotide
  Sense strand starting at position 2695 of SEQ ID NO: 1563462
ugggcauaaauauguugau

SEQ ID NO: 1812586 - RNA, 19 nt, Artificial Sequence
  Description of Artificial Sequence: Synthetic oligonucleotide
  Antisense strand to SEQ ID NO: 1812585
aucaacauauuuaugccca

SEQ ID NO: 1812587 - RNA, 19 nt, Artificial Sequence
  Description of Artificial Sequence: Synthetic oligonucleotide
  Sense strand starting at position 2712 of SEQ ID NO: 1563462
auguuaacacuuuguaaac

SEQ ID NO: 1812588 - RNA, 19 nt, Artificial Sequence
  Description of Artificial Sequence: Synthetic oligonucleotide
  Antisense strand to SEQ ID NO: 1812587
guuuacaaaguguuaacau

SEQ ID NO: 1812589 - RNA, 19 nt, Artificial Sequence
  Description of Artificial Sequence: Synthetic oligonucleotide
  Sense strand starting at position 2713 of SEQ ID NO: 1563462
uguuaacacuuuguaaaca

SEQ ID NO: 1812590 - RNA, 19 nt, Artificial Sequence
  Description of Artificial Sequence: Synthetic oligonucleotide
  Antisense strand to SEQ ID NO: 1812589
uguuuacaaaguguuaaca

SEQ ID NO: 1812591 - RNA, 19 nt, Artificial Sequence
  Description of Artificial Sequence: Synthetic oligonucleotide
  Sense strand starting at position 2873 of SEQ ID NO: 1563462
cugggacaaucgcuuuaag

SEQ ID NO: 1812592 - RNA, 19 nt, Artificial Sequence
  Description of Artificial Sequence: Synthetic oligonucleotide
  Antisense strand to SEQ ID NO: 1812591
cuuaaagcgauugucccag

SEQ ID NO: 1812593 - RNA, 19 nt, Artificial Sequence
  Description of Artificial Sequence: Synthetic oligonucleotide
  Sense strand starting at position 2915 of SEQ ID NO: 1563462
cacagaguucuggauugug

SEQ ID NO: 1812594 - RNA, 19 nt, Artificial Sequence
  Description of Artificial Sequence: Synthetic oligonucleotide
  Antisense strand to SEQ ID NO: 1812593
cacaauccagaacucugug

SEQ ID NO: 1812595 - RNA, 19 nt, Artificial Sequence
  Description of Artificial Sequence: Synthetic oligonucleotide
  Sense strand starting at position 2939 of SEQ ID NO: 1563462
gauggugauaguuggagga

SEQ ID NO: 1812596 - RNA, 19 nt, Artificial Sequence
  Description of Artificial Sequence: Synthetic oligonucleotide
  Antisense strand to SEQ ID NO: 1812595
uccuccaacuaucaccauc

SEQ ID NO: 1812597 - RNA, 19 nt, Artificial Sequence
  Description of Artificial Sequence: Synthetic oligonucleotide
  Sense strand starting at position 3018 of SEQ ID NO: 1563462
aauccucuccuagggaguu

SEQ ID NO: 1812598 - RNA, 19 nt, Artificial Sequence
  Description of Artificial Sequence: Synthetic oligonucleotide
  Antisense strand to SEQ ID NO: 1812597
aacucccuaggagaggauu

SEQ ID NO: 1812599 - RNA, 19 nt, Artificial Sequence
  Description of Artificial Sequence: Synthetic oligonucleotide
  Sense strand starting at position 3457 of SEQ ID NO: 1563462
aauggaaugucuccuguaa

SEQ ID NO: 1812600 - RNA, 19 nt, Artificial Sequence
  Description of Artificial Sequence: Synthetic oligonucleotide
  Antisense strand to SEQ ID NO: 1812599
uuacaggagacauuccauu

SEQ ID NO: 1812601 - RNA, 19 nt, Artificial Sequence
  Description of Artificial Sequence: Synthetic oligonucleotide
  Sense strand starting at position 3525 of SEQ ID NO: 1563462
guggcuagaggcgagauau

SEQ ID NO: 1812602 - RNA, 19 nt, Artificial Sequence
  Description of Artificial Sequence: Synthetic oligonucleotide
  Antisense strand to SEQ ID NO: 1812601
auaucucgccucuagccac

SEQ ID NO: 1812603 - RNA, 19 nt, Artificial Sequence
  Description of Artificial Sequence: Synthetic oligonucleotide
  Sense strand starting at position 3651 of SEQ ID NO: 1563462
auuuaugcaugauacagau

SEQ ID NO: 1812604 - RNA, 19 nt, Artificial Sequence
  Description of Artificial Sequence: Synthetic oligonucleotide
  Antisense strand to SEQ ID NO: 1812603
aucuguaucaugcauaaau

SEQ ID NO: 1812605 - RNA, 19 nt, Artificial Sequence
  Description of Artificial Sequence: Synthetic oligonucleotide
  Sense strand starting at position 3944 of SEQ ID NO: 1563462
ucaaguuggcaccgaaaua

SEQ ID NO: 1812606 - RNA, 19 nt, Artificial Sequence
  Description of Artificial Sequence: Synthetic oligonucleotide
  Antisense strand to SEQ ID NO: 1812605
uauuucggugccaacuuga

SEQ ID NO: 1812607 - RNA, 19 nt, Artificial Sequence
  Description of Artificial Sequence: Synthetic oligonucleotide
  Sense strand starting at position 120 of SEQ ID NO: 1563463
uugagaaaguuguugguuu

SEQ ID NO: 1812608 - RNA, 19 nt, Artificial Sequence
  Description of Artificial Sequence: Synthetic oligonucleotide
  Antisense strand to SEQ ID NO: 1812607
aaaccaacaacuuucucaa

SEQ ID NO: 1812609 - RNA, 19 nt, Artificial Sequence
  Description of Artificial Sequence: Synthetic oligonucleotide
  Sense strand starting at position 312 of SEQ ID NO: 1563463
agauaaucuugaguauacu

SEQ ID NO: 1812610 - RNA, 19 nt, Artificial Sequence
  Description of Artificial Sequence: Synthetic oligonucleotide
  Antisense strand to SEQ ID NO: 1812609
aguauacucaagauuaucu

SEQ ID NO: 1812611 - RNA, 19 nt, Artificial Sequence
  Description of Artificial Sequence: Synthetic oligonucleotide
  Sense strand starting at position 396 of SEQ ID NO: 1563463
ucacuaguguacuucuaaa

SEQ ID NO: 1812612 - RNA, 19 nt, Artificial Sequence
  Description of Artificial Sequence: Synthetic oligonucleotide
  Antisense strand to SEQ ID NO: 1812611
uuuagaaguacacuaguga

SEQ ID NO: 1812613 - RNA, 19 nt, Artificial Sequence
  Description of Artificial Sequence: Synthetic oligonucleotide
  Sense strand starting at position 406 of SEQ ID NO: 1563463
acuucuaaacugugauaug

SEQ ID NO: 1812614 - RNA, 19 nt, Artificial Sequence
  Description of Artificial Sequence: Synthetic oligonucleotide
  Antisense strand to SEQ ID NO: 1812613
cauaucacaguuuagaagu

SEQ ID NO: 1812615 - RNA, 19 nt, Artificial Sequence
  Description of Artificial Sequence: Synthetic oligonucleotide
  Sense strand starting at position 415 of SEQ ID NO: 1563463
cugugauaugaaggaggua

SEQ ID NO: 1812616 - RNA, 19 nt, Artificial Sequence
  Description of Artificial Sequence: Synthetic oligonucleotide
  Antisense strand to SEQ ID NO: 1812615
uaccuccuucauaucacag

SEQ ID NO: 1812617 - RNA, 19 nt, Artificial Sequence
  Description of Artificial Sequence: Synthetic oligonucleotide
  Sense strand starting at position 525 of SEQ ID NO: 1563463
agagcauccucucuagaaa

SEQ ID NO: 1812618 - RNA, 19 nt, Artificial Sequence
  Description of Artificial Sequence: Synthetic oligonucleotide
  Antisense strand to SEQ ID NO: 1812617
uuucuagagaggaugcucu

SEQ ID NO: 1812619 - RNA, 19 nt, Artificial Sequence
  Description of Artificial Sequence: Synthetic oligonucleotide
  Sense strand starting at position 637 of SEQ ID NO: 1563463
ccaggaaagugauauuugu

SEQ ID NO: 1812620 - RNA, 19 nt, Artificial Sequence
  Description of Artificial Sequence: Synthetic oligonucleotide
  Antisense strand to SEQ ID NO: 1812619
acaaauaucacuuuccugg

SEQ ID NO: 1812621 - RNA, 19 nt, Artificial Sequence
  Description of Artificial Sequence: Synthetic oligonucleotide
  Sense strand starting at position 641 of SEQ ID NO: 1563463
gaaagugauauuugucguc

SEQ ID NO: 1812622 - RNA, 19 nt, Artificial Sequence
  Description of Artificial Sequence: Synthetic oligonucleotide
  Antisense strand to SEQ ID NO: 1812621
gacgacaaauaucacuuuc

SEQ ID NO: 1812623 - RNA, 19 nt, Artificial Sequence
  Description of Artificial Sequence: Synthetic oligonucleotide
  Sense strand starting at position 944 of SEQ ID NO: 1563463
agagaaagcccuugguauc

SEQ ID NO: 1812624 - RNA, 19 nt, Artificial Sequence
  Description of Artificial Sequence: Synthetic oligonucleotide
  Antisense strand to SEQ ID NO: 1812623
gauaccaagggcuuucucu

SEQ ID NO: 1812625 - RNA, 19 nt, Artificial Sequence
  Description of Artificial Sequence: Synthetic oligonucleotide
  Sense strand starting at position 957 of SEQ ID NO: 1563463
gguauccguguucagaaga

SEQ ID NO: 1812626 - RNA, 19 nt, Artificial Sequence
  Description of Artificial Sequence: Synthetic oligonucleotide
  Antisense strand to SEQ ID NO: 1812625
ucuucugaacacggauacc

SEQ ID NO: 1812627 - RNA, 19 nt, Artificial Sequence
  Description of Artificial Sequence: Synthetic oligonucleotide
  Sense strand starting at position 1207 of SEQ ID NO: 1563463
accgauuuacagcgugaag

SEQ ID NO: 1812628 - RNA, 19 nt, Artificial Sequence
  Description of Artificial Sequence: Synthetic oligonucleotide
  Antisense strand to SEQ ID NO: 1812627
cuucacgcuguaaaucggu

SEQ ID NO: 1812629 - RNA, 19 nt, Artificial Sequence
  Description of Artificial Sequence: Synthetic oligonucleotide
  Sense strand starting at position 1230 of SEQ ID NO: 1563463
gaggcaaacuaguuaagac

SEQ ID NO: 1812630 - RNA, 19 nt, Artificial Sequence
  Description of Artificial Sequence: Synthetic oligonucleotide
  Antisense strand to SEQ ID NO: 1812629
gucuuaacuaguuugccuc

SEQ ID NO: 1812631 - RNA, 19 nt, Artificial Sequence
  Description of Artificial Sequence: Synthetic oligonucleotide
  Sense strand starting at position 1324 of SEQ ID NO: 1563463
ccaagaaacgagugucuca

SEQ ID NO: 1812632 - RNA, 19 nt, Artificial Sequence
  Description of Artificial Sequence: Synthetic oligonucleotide
  Antisense strand to SEQ ID NO: 1812631
ugagacacucguuucuugg

SEQ ID NO: 1812633 - RNA, 19 nt, Artificial Sequence
  Description of Artificial Sequence: Synthetic oligonucleotide
  Sense strand starting at position 2264 of SEQ ID NO: 1563463
ccagaugucacgcagaguu

SEQ ID NO: 1812634 - RNA, 19 nt, Artificial Sequence
  Description of Artificial Sequence: Synthetic oligonucleotide
  Antisense strand to SEQ ID NO: 1812633
aacucugcgugacaucugg

SEQ ID NO: 1812635 - RNA, 19 nt, Artificial Sequence
  Description of Artificial Sequence: Synthetic oligonucleotide
  Sense strand starting at position 2388 of SEQ ID NO: 1563463
caccuuacaccggguuaga

SEQ ID NO: 1812636 - RNA, 19 nt, Artificial Sequence
  Description of Artificial Sequence: Synthetic oligonucleotide
  Antisense strand to SEQ ID NO: 1812635
ucuaacccgguguaaggug

SEQ ID NO: 1812637 - RNA, 19 nt, Artificial Sequence
  Description of Artificial Sequence: Synthetic oligonucleotide
  Sense strand starting at position 2399 of SEQ ID NO: 1563463
ggguuagaucguggaaagu

SEQ ID NO: 1812638 - RNA, 19 nt, Artificial Sequence
  Description of Artificial Sequence: Synthetic oligonucleotide
  Antisense strand to SEQ ID NO: 1812637
acuuuccacgaucuaaccc

SEQ ID NO: 1812639 - RNA, 19 nt, Artificial Sequence
  Description of Artificial Sequence: Synthetic oligonucleotide
  Sense strand starting at position 2400 of SEQ ID NO: 1563463
gguuagaucguggaaagug

SEQ ID NO: 1812640 - RNA, 19 nt, Artificial Sequence
  Description of Artificial Sequence: Synthetic oligonucleotide
  Antisense strand to SEQ ID NO: 1812639
cacuuuccacgaucuaacc

SEQ ID NO: 1812641 - RNA, 19 nt, Artificial Sequence
  Description of Artificial Sequence: Synthetic oligonucleotide
  Sense strand starting at position 2552 of SEQ ID NO: 1563463
gugcgcuugguguaaauuu

SEQ ID NO: 1812642 - RNA, 19 nt, Artificial Sequence
  Description of Artificial Sequence: Synthetic oligonucleotide
  Antisense strand to SEQ ID NO: 1812641
aaauuuacaccaagcgcac

SEQ ID NO: 1812643 - RNA, 19 nt, Artificial Sequence
  Description of Artificial Sequence: Synthetic oligonucleotide
  Sense strand starting at position 2594 of SEQ ID NO: 1563463
acaagcguccgagaucaua

SEQ ID NO: 1812644 - RNA, 19 nt, Artificial Sequence
  Description of Artificial Sequence: Synthetic oligonucleotide
  Antisense strand to SEQ ID NO: 1812643
uaugaucucggacgcuugu

SEQ ID NO: 1812645 - RNA, 19 nt, Artificial Sequence
  Description of Artificial Sequence: Synthetic oligonucleotide
  Sense strand starting at position 2602 of SEQ ID NO: 1563463
ccgagaucauacucagauc

SEQ ID NO: 1812646 - RNA, 19 nt, Artificial Sequence
  Description of Artificial Sequence: Synthetic oligonucleotide
  Antisense strand to SEQ ID NO: 1812645
gaucugaguaugaucucgg

SEQ ID NO: 1812647 - RNA, 19 nt, Artificial Sequence
  Description of Artificial Sequence: Synthetic oligonucleotide
  Sense strand starting at position 2669 of SEQ ID NO: 1563463
cugugaacacuuugggaaa

SEQ ID NO: 1812648 - RNA, 19 nt, Artificial Sequence
  Description of Artificial Sequence: Synthetic oligonucleotide
  Antisense strand to SEQ ID NO: 1812647
uuucccaaaguguucacag

SEQ ID NO: 1812649 - RNA, 19 nt, Artificial Sequence
  Description of Artificial Sequence: Synthetic oligonucleotide
  Sense strand starting at position 2751 of SEQ ID NO: 1563463
cuggaagagacuugucugu

SEQ ID NO: 1812650 - RNA, 19 nt, Artificial Sequence
  Description of Artificial Sequence: Synthetic oligonucleotide
  Antisense strand to SEQ ID NO: 1812649
acagacaagucucuuccag

SEQ ID NO: 1812651 - RNA, 19 nt, Artificial Sequence
  Description of Artificial Sequence: Synthetic oligonucleotide
  Sense strand starting at position 2753 of SEQ ID NO: 1563463
ggaagagacuugucugugu

SEQ ID NO: 1812652 - RNA, 19 nt, Artificial Sequence
  Description of Artificial Sequence: Synthetic oligonucleotide
  Antisense strand to SEQ ID NO: 1812651
acacagacaagucucuucc

SEQ ID NO: 1812653 - RNA, 19 nt, Artificial Sequence
  Description of Artificial Sequence: Synthetic oligonucleotide
  Sense strand starting at position 2823 of SEQ ID NO: 1563463
auaggaaauguuuguuuag

SEQ ID NO: 1812654 - RNA, 19 nt, Artificial Sequence
  Description of Artificial Sequence: Synthetic oligonucleotide
  Antisense strand to SEQ ID NO: 1812653
cuaaacaaacauuuccuau

SEQ ID NO: 1812655 - RNA, 19 nt, Artificial Sequence
  Description of Artificial Sequence: Synthetic oligonucleotide
  Sense strand starting at position 2825 of SEQ ID NO: 1563463
aggaaauguuuguuuagga

SEQ ID NO: 1812656 - RNA, 19 nt, Artificial Sequence
  Description of Artificial Sequence: Synthetic oligonucleotide
  Antisense strand to SEQ ID NO: 1812655
uccuaaacaaacauuuccu

SEQ ID NO: 1812657 - RNA, 19 nt, Artificial Sequence
  Description of Artificial Sequence: Synthetic oligonucleotide
  Sense strand starting at position 2826 of SEQ ID NO: 1563463
ggaaauguuuguuuaggac

SEQ ID NO: 1812658 - RNA, 19 nt, Artificial Sequence
  Description of Artificial Sequence: Synthetic oligonucleotide
  Antisense strand to SEQ ID NO: 1812657
guccuaaacaaacauuucc

SEQ ID NO: 1812659 - RNA, 19 nt, Artificial Sequence
  Description of Artificial Sequence: Synthetic oligonucleotide
  Sense strand starting at position 2849 of SEQ ID NO: 1563463
aacagucaucacggaauau

SEQ ID NO: 1812660 - RNA, 19 nt, Artificial Sequence
  Description of Artificial Sequence: Synthetic oligonucleotide
  Antisense strand to SEQ ID NO: 1812659
auauuccgugaugacuguu

SEQ ID NO: 1812661 - RNA, 19 nt, Artificial Sequence
  Description of Artificial Sequence: Synthetic oligonucleotide
  Sense strand starting at position 3069 of SEQ ID NO: 1563463
acagcauauggugguuaga

SEQ ID NO: 1812662 - RNA, 19 nt, Artificial Sequence
  Description of Artificial Sequence: Synthetic oligonucleotide
  Antisense strand to SEQ ID NO: 1812661
ucuaaccaccauaugcugu

SEQ ID NO: 1812663 - RNA, 19 nt, Artificial Sequence
  Description of Artificial Sequence: Synthetic oligonucleotide
  Sense strand starting at position 3071 of SEQ ID NO: 1563463
agcauauggugguuagauc

SEQ ID NO: 1812664 - RNA, 19 nt, Artificial Sequence
  Description of Artificial Sequence: Synthetic oligonucleotide
  Antisense strand to SEQ ID NO: 1812663
gaucuaaccaccauaugcu

SEQ ID NO: 1812665 - RNA, 19 nt, Artificial Sequence
  Description of Artificial Sequence: Synthetic oligonucleotide
  Sense strand starting at position 3610 of SEQ ID NO: 1563463
aacuacauggcuuauggua

SEQ ID NO: 1812666 - RNA, 19 nt, Artificial Sequence
  Description of Artificial Sequence: Synthetic oligonucleotide
  Antisense strand to SEQ ID NO: 1812665
uaccauaagccauguaguu

SEQ ID NO: 1812667 - RNA, 19 nt, Artificial Sequence
  Description of Artificial Sequence: Synthetic oligonucleotide
  Sense strand starting at position 3623 of SEQ ID NO: 1563463
augguaacuucucugauau

SEQ ID NO: 1812668 - RNA, 19 nt, Artificial Sequence
  Description of Artificial Sequence: Synthetic oligonucleotide
  Antisense strand to SEQ ID NO: 1812667
auaucagagaaguuaccau

SEQ ID NO: 1812669 - RNA, 19 nt, Artificial Sequence
  Description of Artificial Sequence: Synthetic oligonucleotide
  Sense strand starting at position 3662 of SEQ ID NO: 1563463
guuggaaacuuacugaauu

SEQ ID NO: 1812670 - RNA, 19 nt, Artificial Sequence
  Description of Artificial Sequence: Synthetic oligonucleotide
  Antisense strand to SEQ ID NO: 1812669
aauucaguaaguuuccaac

SEQ ID NO: 1812671 - RNA, 19 nt, Artificial Sequence
  Description of Artificial Sequence: Synthetic oligonucleotide
  Sense strand starting at position 3663 of SEQ ID NO: 1563463
uuggaaacuuacugaauuu

SEQ ID NO: 1812672 - RNA, 19 nt, Artificial Sequence
  Description of Artificial Sequence: Synthetic oligonucleotide
  Antisense strand to SEQ ID NO: 1812671
aaauucaguaaguuuccaa

SEQ ID NO: 1812673 - RNA, 19 nt, Artificial Sequence
  Description of Artificial Sequence: Synthetic oligonucleotide
  Sense strand starting at position 3695 of SEQ ID NO: 1563463
uuguacuuagcaggaucaa

SEQ ID NO: 1812674 - RNA, 19 nt, Artificial Sequence
  Description of Artificial Sequence: Synthetic oligonucleotide
  Antisense strand to SEQ ID NO: 1812673
uugauccugcuaaguacaa

SEQ ID NO: 1812675 - RNA, 19 nt, Artificial Sequence
  Description of Artificial Sequence: Synthetic oligonucleotide
  Sense strand starting at position 3715 of SEQ ID NO: 1563463
gagaaauguguggguucuu

SEQ ID NO: 1812676 - RNA, 19 nt, Artificial Sequence
  Description of Artificial Sequence: Synthetic oligonucleotide
  Antisense strand to SEQ ID NO: 1812675
aagaacccacacauuucuc

SEQ ID NO: 1812677 - RNA, 19 nt, Artificial Sequence
  Description of Artificial Sequence: Synthetic oligonucleotide
  Sense strand starting at position 3742 of SEQ ID NO: 1563463
cuuauuuaguuacagauac

SEQ ID NO: 1812678 - RNA, 19 nt, Artificial Sequence
  Description of Artificial Sequence: Synthetic oligonucleotide
  Antisense strand to SEQ ID NO: 1812677
guaucuguaacuaaauaag

SEQ ID NO: 1812679 - RNA, 19 nt, Artificial Sequence
  Description of Artificial Sequence: Synthetic oligonucleotide
  Sense strand starting at position 3831 of SEQ ID NO: 1563463
agaacugcccuuugaaucu

SEQ ID NO: 1812680 - RNA, 19 nt, Artificial Sequence
  Description of Artificial Sequence: Synthetic oligonucleotide
  Antisense strand to SEQ ID NO: 1812679
agauucaaagggcaguucu

SEQ ID NO: 1812681 - RNA, 19 nt, Artificial Sequence
  Description of Artificial Sequence: Synthetic oligonucleotide
  Sense strand starting at position 3869 of SEQ ID NO: 1563463
caaauuguacaggguuaaa

SEQ ID NO: 1812682 - RNA, 19 nt, Artificial Sequence
  Description of Artificial Sequence: Synthetic oligonucleotide
  Antisense strand to SEQ ID NO: 1812681
uuuaacccuguacaauuug

SEQ ID NO: 1812683 - RNA, 19 nt, Artificial Sequence
  Description of Artificial Sequence: Synthetic oligonucleotide
  Sense strand starting at position 3888 of SEQ ID NO: 1563463
augcuaagaaguugugaug

SEQ ID NO: 1812684 - RNA, 19 nt, Artificial Sequence
  Description of Artificial Sequence: Synthetic oligonucleotide
  Antisense strand to SEQ ID NO: 1812683
caucacaacuucuuagcau

SEQ ID NO: 1812685 - RNA, 19 nt, Artificial Sequence
  Description of Artificial Sequence: Synthetic oligonucleotide
  Sense strand starting at position 3943 of SEQ ID NO: 1563463
auaauagauugggauauag

SEQ ID NO: 1812686 - RNA, 19 nt, Artificial Sequence
  Description of Artificial Sequence: Synthetic oligonucleotide
  Antisense strand to SEQ ID NO: 1812685
cuauaucccaaucuauuau

SEQ ID NO: 1812687 - RNA, 19 nt, Artificial Sequence
  Description of Artificial Sequence: Synthetic oligonucleotide
  Sense strand starting at position 39 of SEQ ID NO: 1563464
aaaggauguuucccacaga

SEQ ID NO: 1812688 - RNA, 19 nt, Artificial Sequence
  Description of Artificial Sequence: Synthetic oligonucleotide
  Antisense strand to SEQ ID NO: 1812687
ucugugggaaacauccuuu

SEQ ID NO: 1812689 - RNA, 19 nt, Artificial Sequence
  Description of Artificial Sequence: Synthetic oligonucleotide
  Sense strand starting at position 282 of SEQ ID NO: 1563464
acauguaguaaguaacagu

SEQ ID NO: 1812690 - RNA, 19 nt, Artificial Sequence
  Description of Artificial Sequence: Synthetic oligonucleotide
  Antisense strand to SEQ ID NO: 1812689
acuguuacuuacuacaugu

SEQ ID NO: 1812691 - RNA, 19 nt, Artificial Sequence
  Description of Artificial Sequence: Synthetic oligonucleotide
  Sense strand starting at position 317 of SEQ ID NO: 1563464
gacaacaguuucguaacau

SEQ ID NO: 1812692 - RNA, 19 nt, Artificial Sequence
  Description of Artificial Sequence: Synthetic oligonucleotide
  Antisense strand to SEQ ID NO: 1812691
auguuacgaaacuguuguc

SEQ ID NO: 1812693 - RNA, 19 nt, Artificial Sequence
  Description of Artificial Sequence: Synthetic oligonucleotide
  Sense strand starting at position 532 of SEQ ID NO: 1563464
gcuggcuuagcugagagaa

SEQ ID NO: 1812694 - RNA, 19 nt, Artificial Sequence
  Description of Artificial Sequence: Synthetic oligonucleotide
  Antisense strand to SEQ ID NO: 1812693
uucucucagcuaagccagc

SEQ ID NO: 1812695 - RNA, 19 nt, Artificial Sequence
  Description of Artificial Sequence: Synthetic oligonucleotide
  Sense strand starting at position 571 of SEQ ID NO: 1563464
gcacaauaaguguaugcaa

SEQ ID NO: 1812696 - RNA, 19 nt, Artificial Sequence
  Description of Artificial Sequence: Synthetic oligonucleotide
  Antisense strand to SEQ ID NO: 1812695
uugcauacacuuauugugc

SEQ ID NO: 1812697 - RNA, 19 nt, Artificial Sequence
  Description of Artificial Sequence: Synthetic oligonucleotide
  Sense strand starting at position 573 of SEQ ID NO: 1563464
acaauaaguguaugcaaau

SEQ ID NO: 1812698 - RNA, 19 nt, Artificial Sequence
  Description of Artificial Sequence: Synthetic oligonucleotide
  Antisense strand to SEQ ID NO: 1812697
auuugcauacacuuauugu

SEQ ID NO: 1812699 - RNA, 19 nt, Artificial Sequence
  Description of Artificial Sequence: Synthetic oligonucleotide
  Sense strand starting at position 721 of SEQ ID NO: 1563464
aagugcaaguuaguaauuu

SEQ ID NO: 1812700 - RNA, 19 nt, Artificial Sequence
  Description of Artificial Sequence: Synthetic oligonucleotide
  Antisense strand to SEQ ID NO: 1812699
aaauuacuaacuugcacuu

SEQ ID NO: 1812701 - RNA, 19 nt, Artificial Sequence
  Description of Artificial Sequence: Synthetic oligonucleotide
  Sense strand starting at position 775 of SEQ ID NO: 1563464
ugcucaacccucuagauga

SEQ ID NO: 1812702 - RNA, 19 nt, Artificial Sequence
  Description of Artificial Sequence: Synthetic oligonucleotide
  Antisense strand to SEQ ID NO: 1812701
ucaucuagaggguugagca

SEQ ID NO: 1812703 - RNA, 19 nt, Artificial Sequence
  Description of Artificial Sequence: Synthetic oligonucleotide
  Sense strand starting at position 807 of SEQ ID NO: 1563464
aguugcuugcaauaacuaa

SEQ ID NO: 1812704 - RNA, 19 nt, Artificial Sequence
  Description of Artificial Sequence: Synthetic oligonucleotide
  Antisense strand to SEQ ID NO: 1812703
uuaguuauugcaagcaacu

SEQ ID NO: 1812705 - RNA, 19 nt, Artificial Sequence
  Description of Artificial Sequence: Synthetic oligonucleotide
  Sense strand starting at position 910 of SEQ ID NO: 1563464
gaagaagauuccuuagguu

SEQ ID NO: 1812706 - RNA, 19 nt, Artificial Sequence
  Description of Artificial Sequence: Synthetic oligonucleotide
  Antisense strand to SEQ ID NO: 1812705
aaccuaaggaaucuucuuc

SEQ ID NO: 1812707 - RNA, 19 nt, Artificial Sequence
  Description of Artificial Sequence: Synthetic oligonucleotide
  Sense strand starting at position 1146 of SEQ ID NO: 1563464
ggguuucuaccugauguaa

SEQ ID NO: 1812708 - RNA, 19 nt, Artificial Sequence
  Description of Artificial Sequence: Synthetic oligonucleotide
  Antisense strand to SEQ ID NO: 1812707
uuacaucagguagaaaccc

SEQ ID NO: 1812709 - RNA, 19 nt, Artificial Sequence
  Description of Artificial Sequence: Synthetic oligonucleotide
  Sense strand starting at position 1175 of SEQ ID NO: 1563464
uuuguacuuagugaauagu

SEQ ID NO: 1812710 - RNA, 19 nt, Artificial Sequence
  Description of Artificial Sequence: Synthetic oligonucleotide
  Antisense strand to SEQ ID NO: 1812709
acuauucacuaaguacaaa

SEQ ID NO: 1812711 - RNA, 19 nt, Artificial Sequence
  Description of Artificial Sequence: Synthetic oligonucleotide
  Sense strand starting at position 1178 of SEQ ID NO: 1563464
guacuuagugaauagucau

SEQ ID NO: 1812712 - RNA, 19 nt, Artificial Sequence
  Description of Artificial Sequence: Synthetic oligonucleotide
  Antisense strand to SEQ ID NO: 1812711
augacuauucacuaaguac

SEQ ID NO: 1812713 - RNA, 19 nt, Artificial Sequence
  Description of Artificial Sequence: Synthetic oligonucleotide
  Sense strand starting at position 1185 of SEQ ID NO: 1563464
gugaauagucaugggugau

SEQ ID NO: 1812714 - RNA, 19 nt, Artificial Sequence
  Description of Artificial Sequence: Synthetic oligonucleotide
  Antisense strand to SEQ ID NO: 1812713
aucacccaugacuauucac

SEQ ID NO: 1812715 - RNA, 19 nt, Artificial Sequence
  Description of Artificial Sequence: Synthetic oligonucleotide
  Sense strand starting at position 1186 of SEQ ID NO: 1563464
ugaauagucaugggugauc

SEQ ID NO: 1812716 - RNA, 19 nt, Artificial Sequence
  Description of Artificial Sequence: Synthetic oligonucleotide
  Antisense strand to SEQ ID NO: 1812715
gaucacccaugacuauuca

SEQ ID NO: 1812717 - RNA, 19 nt, Artificial Sequence
  Description of Artificial Sequence: Synthetic oligonucleotide
  Sense strand starting at position 1188 of SEQ ID NO: 1563464
aauagucaugggugaucau

SEQ ID NO: 1812718 - RNA, 19 nt, Artificial Sequence
  Description of Artificial Sequence: Synthetic oligonucleotide
  Antisense strand to SEQ ID NO: 1812717
augaucacccaugacuauu

SEQ ID NO: 1812719 - RNA, 19 nt, Artificial Sequence
  Description of Artificial Sequence: Synthetic oligonucleotide
  Sense strand starting at position 1197 of SEQ ID NO: 1563464
gggugaucaugggugagag

SEQ ID NO: 1812720 - RNA, 19 nt, Artificial Sequence
  Description of Artificial Sequence: Synthetic oligonucleotide
  Antisense strand to SEQ ID NO: 1812719
cucucacccaugaucaccc

SEQ ID NO: 1812721 - RNA, 19 nt, Artificial Sequence
  Description of Artificial Sequence: Synthetic oligonucleotide
  Sense strand starting at position 1198 of SEQ ID NO: 1563464
ggugaucaugggugagaga

SEQ ID NO: 1812722 - RNA, 19 nt, Artificial Sequence
  Description of Artificial Sequence: Synthetic oligonucleotide
  Antisense strand to SEQ ID NO: 1812721
ucucucacccaugaucacc

SEQ ID NO: 1812723 - RNA, 19 nt, Artificial Sequence
  Description of Artificial Sequence: Synthetic oligonucleotide
  Sense strand starting at position 1706 of SEQ ID NO: 1563464
uuggcuacuuaggugauaa

SEQ ID NO: 1812724 - RNA, 19 nt, Artificial Sequence
  Description of Artificial Sequence: Synthetic oligonucleotide
  Antisense strand to SEQ ID NO: 1812723
uuaucaccuaaguagccaa

SEQ ID NO: 1812725 - RNA, 19 nt, Artificial Sequence
  Description of Artificial Sequence: Synthetic oligonucleotide
  Sense strand starting at position 1707 of SEQ ID NO: 1563464
uggcuacuuaggugauaaa

SEQ ID NO: 1812726 - RNA, 19 nt, Artificial Sequence
  Description of Artificial Sequence: Synthetic oligonucleotide
  Antisense strand to SEQ ID NO: 1812725
uuuaucaccuaaguagcca

SEQ ID NO: 1812727 - RNA, 19 nt, Artificial Sequence
  Description of Artificial Sequence: Synthetic oligonucleotide
  Sense strand starting at position 1992 of SEQ ID NO: 1563464
gggugcauaugucugggaa

SEQ ID NO: 1812728 - RNA, 19 nt, Artificial Sequence
  Description of Artificial Sequence: Synthetic oligonucleotide
  Antisense strand to SEQ ID NO: 1812727
uucccagacauaugcaccc

SEQ ID NO: 1812729 - RNA, 19 nt, Artificial Sequence
  Description of Artificial Sequence: Synthetic oligonucleotide
  Sense strand starting at position 2038 of SEQ ID NO: 1563464
ggagacugagauuguuugu

SEQ ID NO: 1812730 - RNA, 19 nt, Artificial Sequence
  Description of Artificial Sequence: Synthetic oligonucleotide
  Antisense strand to SEQ ID NO: 1812729
acaaacaaucucagucucc

SEQ ID NO: 1812731 - RNA, 19 nt, Artificial Sequence
  Description of Artificial Sequence: Synthetic oligonucleotide
  Sense strand starting at position 2352 of SEQ ID NO: 1563464
gugacagggugguucaaau

SEQ ID NO: 1812732 - RNA, 19 nt, Artificial Sequence
  Description of Artificial Sequence: Synthetic oligonucleotide
  Antisense strand to SEQ ID NO: 1812731
auuugaaccacccugucac

SEQ ID NO: 1812733 - RNA, 19 nt, Artificial Sequence
  Description of Artificial Sequence: Synthetic oligonucleotide
  Sense strand starting at position 2410 of SEQ ID NO: 1563464
accugcucccuauagucau

SEQ ID NO: 1812734 - RNA, 19 nt, Artificial Sequence
  Description of Artificial Sequence: Synthetic oligonucleotide
  Antisense strand to SEQ ID NO: 1812733
augacuauagggagcaggu

SEQ ID NO: 1812735 - RNA, 19 nt, Artificial Sequence
  Description of Artificial Sequence: Synthetic oligonucleotide
  Sense strand starting at position 2475 of SEQ ID NO: 1563464
cucuauguccagcaagaaa

SEQ ID NO: 1812736 - RNA, 19 nt, Artificial Sequence
  Description of Artificial Sequence: Synthetic oligonucleotide
  Antisense strand to SEQ ID NO: 1812735
uuucuugcuggacauagag

SEQ ID NO: 1812737 - RNA, 19 nt, Artificial Sequence
  Description of Artificial Sequence: Synthetic oligonucleotide
  Sense strand starting at position 2518 of SEQ ID NO: 1563464
auaagaauacacugcugau

SEQ ID NO: 1812738 - RNA, 19 nt, Artificial Sequence
  Description of Artificial Sequence: Synthetic oligonucleotide
  Antisense strand to SEQ ID NO: 1812737
aucagcaguguauucuuau

SEQ ID NO: 1812739 - RNA, 19 nt, Artificial Sequence
  Description of Artificial Sequence: Synthetic oligonucleotide
  Sense strand starting at position 2582 of SEQ ID NO: 1563464
uguggaucuauaugggaga

SEQ ID NO: 1812740 - RNA, 19 nt, Artificial Sequence
  Description of Artificial Sequence: Synthetic oligonucleotide
  Antisense strand to SEQ ID NO: 1812739
ucucccauauagauccaca

SEQ ID NO: 1812741 - RNA, 19 nt, Artificial Sequence
  Description of Artificial Sequence: Synthetic oligonucleotide
  Sense strand starting at position 2860 of SEQ ID NO: 1563464
gggaucuugccauguugaa

SEQ ID NO: 1812742 - RNA, 19 nt, Artificial Sequence
  Description of Artificial Sequence: Synthetic oligonucleotide
  Antisense strand to SEQ ID NO: 1812741
uucaacauggcaagauccc

SEQ ID NO: 1812743 - RNA, 19 nt, Artificial Sequence
  Description of Artificial Sequence: Synthetic oligonucleotide
  Sense strand starting at position 3124 of SEQ ID NO: 1563464
gguauuaaucauuggcuga

SEQ ID NO: 1812744 - RNA, 19 nt, Artificial Sequence
  Description of Artificial Sequence: Synthetic oligonucleotide
  Antisense strand to SEQ ID NO: 1812743
ucagccaaugauuaauacc

SEQ ID NO: 1812745 - RNA, 19 nt, Artificial Sequence
  Description of Artificial Sequence: Synthetic oligonucleotide
  Sense strand starting at position 3156 of SEQ ID NO: 1563464
agugcagaaggcuauaaua

SEQ ID NO: 1812746 - RNA, 19 nt, Artificial Sequence
  Description of Artificial Sequence: Synthetic oligonucleotide
  Antisense strand to SEQ ID NO: 1812745
uauuauagccuucugcacu

SEQ ID NO: 1812747 - RNA, 19 nt, Artificial Sequence
  Description of Artificial Sequence: Synthetic oligonucleotide
  Sense strand starting at position 3229 of SEQ ID NO: 1563464
cuuggaaaguuccuauuag

SEQ ID NO: 1812748 - RNA, 19 nt, Artificial Sequence
  Description of Artificial Sequence: Synthetic oligonucleotide
  Antisense strand to SEQ ID NO: 1812747
cuaauaggaacuuuccaag

SEQ ID NO: 1812749 - RNA, 19 nt, Artificial Sequence
  Description of Artificial Sequence: Synthetic oligonucleotide
  Sense strand starting at position 3413 of SEQ ID NO: 1563464
guuagaagaugucuccaca

SEQ ID NO: 1812750 - RNA, 19 nt, Artificial Sequence
  Description of Artificial Sequence: Synthetic oligonucleotide
  Antisense strand to SEQ ID NO: 1812749
uguggagacaucuucuaac

SEQ ID NO: 1812751 - RNA, 19 nt, Artificial Sequence
  Description of Artificial Sequence: Synthetic oligonucleotide
  Sense strand starting at position 3451 of SEQ ID NO: 1563464
cugccucacucuuuggaaa

SEQ ID NO: 1812752 - RNA, 19 nt, Artificial Sequence
  Description of Artificial Sequence: Synthetic oligonucleotide
  Antisense strand to SEQ ID NO: 1812751
uuuccaaagagugaggcag

SEQ ID NO: 1812753 - RNA, 19 nt, Artificial Sequence
  Description of Artificial Sequence: Synthetic oligonucleotide
  Sense strand starting at position 3526 of SEQ ID NO: 1563464
agagccaucaggugaagaa

SEQ ID NO: 1812754 - RNA, 19 nt, Artificial Sequence
  Description of Artificial Sequence: Synthetic oligonucleotide
  Antisense strand to SEQ ID NO: 1812753
uucuucaccugauggcucu

SEQ ID NO: 1812755 - RNA, 19 nt, Artificial Sequence
  Description of Artificial Sequence: Synthetic oligonucleotide
  Sense strand starting at position 3552 of SEQ ID NO: 1563464
agaacuggcuuugaaauuu

SEQ ID NO: 1812756 - RNA, 19 nt, Artificial Sequence
  Description of Artificial Sequence: Synthetic oligonucleotide
  Antisense strand to SEQ ID NO: 1812755
aaauuucaaagccaguucu

SEQ ID NO: 1812757 - RNA, 19 nt, Artificial Sequence
  Description of Artificial Sequence: Synthetic oligonucleotide
  Sense strand starting at position 3669 of SEQ ID NO: 1563464
ugucauguauuugcauacu

SEQ ID NO: 1812758 - RNA, 19 nt, Artificial Sequence
  Description of Artificial Sequence: Synthetic oligonucleotide
  Antisense strand to SEQ ID NO: 1812757
aguaugcaaauacaugaca

SEQ ID NO: 1812759 - RNA, 19 nt, Artificial Sequence
  Description of Artificial Sequence: Synthetic oligonucleotide
  Sense strand starting at position 3757 of SEQ ID NO: 1563464
cugagacaccacugaguaa

SEQ ID NO: 1812760 - RNA, 19 nt, Artificial Sequence
  Description of Artificial Sequence: Synthetic oligonucleotide
  Antisense strand to SEQ ID NO: 1812759
uuacucaguggugucucag

SEQ ID NO: 1812761 - RNA, 19 nt, Artificial Sequence
  Description of Artificial Sequence: Synthetic oligonucleotide
  Sense strand starting at position 3769 of SEQ ID NO: 1563464
ugaguaaagaagugugaaa

SEQ ID NO: 1812762 - RNA, 19 nt, Artificial Sequence
  Description of Artificial Sequence: Synthetic oligonucleotide
  Antisense strand to SEQ ID NO: 1812761
uuucacacuucuuuacuca

SEQ ID NO: 1812763 - RNA, 19 nt, Artificial Sequence
  Description of Artificial Sequence: Synthetic oligonucleotide
  Sense strand starting at position 3851 of SEQ ID NO: 1563464
gggagcucugaacauguga

SEQ ID NO: 1812764 - RNA, 19 nt, Artificial Sequence
  Description of Artificial Sequence: Synthetic oligonucleotide
  Antisense strand to SEQ ID NO: 1812763
ucacauguucagagcuccc

SEQ ID NO: 1812765 - RNA, 19 nt, Artificial Sequence
  Description of Artificial Sequence: Synthetic oligonucleotide
  Sense strand starting at position 3978 of SEQ ID NO: 1563464
ggcaacguuaaguaagagu

SEQ ID NO: 1812766 - RNA, 19 nt, Artificial Sequence
  Description of Artificial Sequence: Synthetic oligonucleotide
  Antisense strand to SEQ ID NO: 1812765
acucuuacuuaacguugcc

SEQ ID NO: 1812767 - RNA, 19 nt, Artificial Sequence
  Description of Artificial Sequence: Synthetic oligonucleotide
  Sense strand starting at position 309 of SEQ ID NO: 1563465
gcggaacugaaagguaaau

SEQ ID NO: 1812768 - RNA, 19 nt, Artificial Sequence
  Description of Artificial Sequence: Synthetic oligonucleotide
  Antisense strand to SEQ ID NO: 1812767
auuuaccuuucaguuccgc

SEQ ID NO: 1812769 - RNA, 19 nt, Artificial Sequence
  Description of Artificial Sequence: Synthetic oligonucleotide
  Sense strand starting at position 498 of SEQ ID NO: 1563465
cccagaaaucauugugguu

SEQ ID NO: 1812770 - RNA, 19 nt, Artificial Sequence
  Description of Artificial Sequence: Synthetic oligonucleotide
  Antisense strand to SEQ ID NO: 1812769
aaccacaaugauuucuggg

SEQ ID NO: 1812771 - RNA, 19 nt, Artificial Sequence
  Description of Artificial Sequence: Synthetic oligonucleotide
  Sense strand starting at position 589 of SEQ ID NO: 1563465
ggcucuuuccuccaggaau

SEQ ID NO: 1812772 - RNA, 19 nt, Artificial Sequence
  Description of Artificial Sequence: Synthetic oligonucleotide
  Antisense strand to SEQ ID NO: 1812771
auuccuggaggaaagagcc

SEQ ID NO: 1812773 - RNA, 19 nt, Artificial Sequence
  Description of Artificial Sequence: Synthetic oligonucleotide
  Sense strand starting at position 791 of SEQ ID NO: 1563465
acagacauaucaucacagu

SEQ ID NO: 1812774 - RNA, 19 nt, Artificial Sequence
  Description of Artificial Sequence: Synthetic oligonucleotide
  Antisense strand to SEQ ID NO: 1812773
acugugaugauaugucugu

SEQ ID NO: 1812775 - RNA, 19 nt, Artificial Sequence
  Description of Artificial Sequence: Synthetic oligonucleotide
  Sense strand starting at position 808 of SEQ ID NO: 1563465
guaggucaggcacacauua

SEQ ID NO: 1812776 - RNA, 19 nt, Artificial Sequence
  Description of Artificial Sequence: Synthetic oligonucleotide
  Antisense strand to SEQ ID NO: 1812775
uaaugugugccugaccuac

SEQ ID NO: 1812777 - RNA, 19 nt, Artificial Sequence
  Description of Artificial Sequence: Synthetic oligonucleotide
  Sense strand starting at position 819 of SEQ ID NO: 1563465
acacauuaucccggaagua

SEQ ID NO: 1812778 - RNA, 19 nt, Artificial Sequence
  Description of Artificial Sequence: Synthetic oligonucleotide
  Antisense strand to SEQ ID NO: 1812777
uacuuccgggauaaugugu

SEQ ID NO: 1812779 - RNA, 19 nt, Artificial Sequence
  Description of Artificial Sequence: Synthetic oligonucleotide
  Sense strand starting at position 820 of SEQ ID NO: 1563465
cacauuaucccggaaguag

SEQ ID NO: 1812780 - RNA, 19 nt, Artificial Sequence
  Description of Artificial Sequence: Synthetic oligonucleotide
  Antisense strand to SEQ ID NO: 1812779
cuacuuccgggauaaugug

SEQ ID NO: 1812781 - RNA, 19 nt, Artificial Sequence
  Description of Artificial Sequence: Synthetic oligonucleotide
  Sense strand starting at position 2262 of SEQ ID NO: 1563465
aucugaaaccuacgauaua

SEQ ID NO: 1812782 - RNA, 19 nt, Artificial Sequence
  Description of Artificial Sequence: Synthetic oligonucleotide
  Antisense strand to SEQ ID NO: 1812781
uauaucguagguuucagau

SEQ ID NO: 1812783 - RNA, 19 nt, Artificial Sequence
  Description of Artificial Sequence: Synthetic oligonucleotide
  Sense strand starting at position 2310 of SEQ ID NO: 1563465
ccacgaucugucuggagaa

SEQ ID NO: 1812784 - RNA, 19 nt, Artificial Sequence
  Description of Artificial Sequence: Synthetic oligonucleotide
  Antisense strand to SEQ ID NO: 1812783
uucuccagacagaucgugg

SEQ ID NO: 1812785 - RNA, 19 nt, Artificial Sequence
  Description of Artificial Sequence: Synthetic oligonucleotide
  Sense strand starting at position 2342 of SEQ ID NO: 1563465
ugguguaauccugggacac

SEQ ID NO: 1812786 - RNA, 19 nt, Artificial Sequence
  Description of Artificial Sequence: Synthetic oligonucleotide
  Antisense strand to SEQ ID NO: 1812785
gugucccaggauuacacca

SEQ ID NO: 1812787 - RNA, 19 nt, Artificial Sequence
  Description of Artificial Sequence: Synthetic oligonucleotide
  Sense strand starting at position 2343 of SEQ ID NO: 1563465
gguguaauccugggacacc

SEQ ID NO: 1812788 - RNA, 19 nt, Artificial Sequence
  Description of Artificial Sequence: Synthetic oligonucleotide
  Antisense strand to SEQ ID NO: 1812787
ggugucccaggauuacacc

SEQ ID NO: 1812789 - RNA, 19 nt, Artificial Sequence
  Description of Artificial Sequence: Synthetic oligonucleotide
  Sense strand starting at position 2354 of SEQ ID NO: 1563465
gggacacccuucgcuaaga

SEQ ID NO: 1812790 - RNA, 19 nt, Artificial Sequence
  Description of Artificial Sequence: Synthetic oligonucleotide
  Antisense strand to SEQ ID NO: 1812789
ucuuagcgaaggguguccc

SEQ ID NO: 1812791 - RNA, 19 nt, Artificial Sequence
  Description of Artificial Sequence: Synthetic oligonucleotide
  Sense strand starting at position 2362 of SEQ ID NO: 1563465
cuucgcuaagauuagacau

SEQ ID NO: 1812792 - RNA, 19 nt, Artificial Sequence
  Description of Artificial Sequence: Synthetic oligonucleotide
  Antisense strand to SEQ ID NO: 1812791
augucuaaucuuagcgaag

SEQ ID NO: 1812793 - RNA, 19 nt, Artificial Sequence
  Description of Artificial Sequence: Synthetic oligonucleotide
  Sense strand starting at position 2416 of SEQ ID NO: 1563465
gggagaccuuuacccauau

SEQ ID NO: 1812794 - RNA, 19 nt, Artificial Sequence
  Description of Artificial Sequence: Synthetic oligonucleotide
  Antisense strand to SEQ ID NO: 1812793
auauggguaaaggucuccc

SEQ ID NO: 1812795 - RNA, 19 nt, Artificial Sequence
  Description of Artificial Sequence: Synthetic oligonucleotide
  Sense strand starting at position 2466 of SEQ ID NO: 1563465
cucaguugaugucuuaaac

SEQ ID NO: 1812796 - RNA, 19 nt, Artificial Sequence
  Description of Artificial Sequence: Synthetic oligonucleotide
  Antisense strand to SEQ ID NO: 1812795
guuuaagacaucaacugag

SEQ ID NO: 1812797 - RNA, 19 nt, Artificial Sequence
  Description of Artificial Sequence: Synthetic oligonucleotide
  Sense strand starting at position 2515 of SEQ ID NO: 1563465
aauugaggucucugagcua

SEQ ID NO: 1812798 - RNA, 19 nt, Artificial Sequence
  Description of Artificial Sequence: Synthetic oligonucleotide
  Antisense strand to SEQ ID NO: 1812797
uagcucagagaccucaauu

SEQ ID NO: 1812799 - RNA, 19 nt, Artificial Sequence
  Description of Artificial Sequence: Synthetic oligonucleotide
  Sense strand starting at position 2597 of SEQ ID NO: 1563465
ggugauaucagcgaacacu

SEQ ID NO: 1812800 - RNA, 19 nt, Artificial Sequence
  Description of Artificial Sequence: Synthetic oligonucleotide
  Antisense strand to SEQ ID NO: 1812799
aguguucgcugauaucacc

SEQ ID NO: 1812801 - RNA, 19 nt, Artificial Sequence
  Description of Artificial Sequence: Synthetic oligonucleotide
  Sense strand starting at position 2638 of SEQ ID NO: 1563465
aaugguaggcuguacuaau

SEQ ID NO: 1812802 - RNA, 19 nt, Artificial Sequence
  Description of Artificial Sequence: Synthetic oligonucleotide
  Antisense strand to SEQ ID NO: 1812801
auuaguacagccuaccauu

SEQ ID NO: 1812803 - RNA, 19 nt, Artificial Sequence
  Description of Artificial Sequence: Synthetic oligonucleotide
  Sense strand starting at position 2899 of SEQ ID NO: 1563465
cguggauacaaugaugcaa

SEQ ID NO: 1812804 - RNA, 19 nt, Artificial Sequence
  Description of Artificial Sequence: Synthetic oligonucleotide
  Antisense strand to SEQ ID NO: 1812803
uugcaucauuguauccacg

SEQ ID NO: 1812805 - RNA, 19 nt, Artificial Sequence
  Description of Artificial Sequence: Synthetic oligonucleotide
  Sense strand starting at position 2922 of SEQ ID NO: 1563465
agagguucugugcaugaau

SEQ ID NO: 1812806 - RNA, 19 nt, Artificial Sequence
  Description of Artificial Sequence: Synthetic oligonucleotide
  Antisense strand to SEQ ID NO: 1812805
auucaugcacagaaccucu

SEQ ID NO: 1812807 - RNA, 19 nt, Artificial Sequence
  Description of Artificial Sequence: Synthetic oligonucleotide
  Sense strand starting at position 2925 of SEQ ID NO: 1563465
gguucugugcaugaauaac

SEQ ID NO: 1812808 - RNA, 19 nt, Artificial Sequence
  Description of Artificial Sequence: Synthetic oligonucleotide
  Antisense strand to SEQ ID NO: 1812807
guuauucaugcacagaacc

SEQ ID NO: 1812809 - RNA, 19 nt, Artificial Sequence
  Description of Artificial Sequence: Synthetic oligonucleotide
  Sense strand starting at position 2935 of SEQ ID NO: 1563465
augaauaacuucucagagu

SEQ ID NO: 1812810 - RNA, 19 nt, Artificial Sequence
  Description of Artificial Sequence: Synthetic oligonucleotide
  Antisense strand to SEQ ID NO: 1812809
acucugagaaguuauucau

SEQ ID NO: 1812811 - RNA, 19 nt, Artificial Sequence
  Description of Artificial Sequence: Synthetic oligonucleotide
  Sense strand starting at position 3041 of SEQ ID NO: 1563465
ucaguuacacagugauaca

SEQ ID NO: 1812812 - RNA, 19 nt, Artificial Sequence
  Description of Artificial Sequence: Synthetic oligonucleotide
  Antisense strand to SEQ ID NO: 1812811
uguaucacuguguaacuga

SEQ ID NO: 1812813 - RNA, 19 nt, Artificial Sequence
  Description of Artificial Sequence: Synthetic oligonucleotide
  Sense strand starting at position 3188 of SEQ ID NO: 1563465
gacaccugcggugauuaau

SEQ ID NO: 1812814 - RNA, 19 nt, Artificial Sequence
  Description of Artificial Sequence: Synthetic oligonucleotide
  Antisense strand to SEQ ID NO: 1812813
auuaaucaccgcagguguc

SEQ ID NO: 1812815 - RNA, 19 nt, Artificial Sequence
  Description of Artificial Sequence: Synthetic oligonucleotide
  Sense strand starting at position 3194 of SEQ ID NO: 1563465
ugcggugauuaauuuacuu

SEQ ID NO: 1812816 - RNA, 19 nt, Artificial Sequence
  Description of Artificial Sequence: Synthetic oligonucleotide
  Antisense strand to SEQ ID NO: 1812815
aaguaaauuaaucaccgca

SEQ ID NO: 1812817 - RNA, 19 nt, Artificial Sequence
  Description of Artificial Sequence: Synthetic oligonucleotide
  Sense strand starting at position 3206 of SEQ ID NO: 1563465
uuuacuuccugaucaggga

SEQ ID NO: 1812818 - RNA, 19 nt, Artificial Sequence
  Description of Artificial Sequence: Synthetic oligonucleotide
  Antisense strand to SEQ ID NO: 1812817
ucccugaucaggaaguaaa

SEQ ID NO: 1812819 - RNA, 19 nt, Artificial Sequence
  Description of Artificial Sequence: Synthetic oligonucleotide
  Sense strand starting at position 3542 of SEQ ID NO: 1563465
ggacacaaaugggaugaau

SEQ ID NO: 1812820 - RNA, 19 nt, Artificial Sequence
  Description of Artificial Sequence: Synthetic oligonucleotide
  Antisense strand to SEQ ID NO: 1812819
auucaucccauuugugucc

SEQ ID NO: 1812821 - RNA, 19 nt, Artificial Sequence
  Description of Artificial Sequence: Synthetic oligonucleotide
  Sense strand starting at position 3647 of SEQ ID NO: 1563465
ucaggagcagcuuaauaga

SEQ ID NO: 1812822 - RNA, 19 nt, Artificial Sequence
  Description of Artificial Sequence: Synthetic oligonucleotide
  Antisense strand to SEQ ID NO: 1812821
ucuauuaagcugcuccuga

SEQ ID NO: 1812823 - RNA, 19 nt, Artificial Sequence
  Description of Artificial Sequence: Synthetic oligonucleotide
  Sense strand starting at position 3688 of SEQ ID NO: 1563465
cccuaaagauuugaugcaa

SEQ ID NO: 1812824 - RNA, 19 nt, Artificial Sequence
  Description of Artificial Sequence: Synthetic oligonucleotide
  Antisense strand to SEQ ID NO: 1812823
uugcaucaaaucuuuaggg

SEQ ID NO: 1812825 - RNA, 19 nt, Artificial Sequence
  Description of Artificial Sequence: Synthetic oligonucleotide
  Sense strand starting at position 3702 of SEQ ID NO: 1563465
ugcaaaugaucaguggaca

SEQ ID NO: 1812826 - RNA, 19 nt, Artificial Sequence
  Description of Artificial Sequence: Synthetic oligonucleotide
  Antisense strand to SEQ ID NO: 1812825
uguccacugaucauuugca

SEQ ID NO: 1812827 - RNA, 19 nt, Artificial Sequence
  Description of Artificial Sequence: Synthetic oligonucleotide
  Sense strand starting at position 3703 of SEQ ID NO: 1563465
gcaaaugaucaguggacaa

SEQ ID NO: 1812828 - RNA, 19 nt, Artificial Sequence
  Description of Artificial Sequence: Synthetic oligonucleotide
  Antisense strand to SEQ ID NO: 1812827
uuguccacugaucauuugc

SEQ ID NO: 1812829 - RNA, 19 nt, Artificial Sequence
  Description of Artificial Sequence: Synthetic oligonucleotide
  Sense strand starting at position 3728 of SEQ ID NO: 1563465
gagaaacacuggucuacac

SEQ ID NO: 1812830 - RNA, 19 nt, Artificial Sequence
  Description of Artificial Sequence: Synthetic oligonucleotide
  Antisense strand to SEQ ID NO: 1812829
guguagaccaguguuucuc

SEQ ID NO: 1812831 - RNA, 19 nt, Artificial Sequence
  Description of Artificial Sequence: Synthetic oligonucleotide
  Sense strand starting at position 3830 of SEQ ID NO: 1563465
gggccuuauccaggugaau

SEQ ID NO: 1812832 - RNA, 19 nt, Artificial Sequence
  Description of Artificial Sequence: Synthetic oligonucleotide
  Antisense strand to SEQ ID NO: 1812831
auucaccuggauaaggccc

SEQ ID NO: 1812833 - RNA, 19 nt, Artificial Sequence
  Description of Artificial Sequence: Synthetic oligonucleotide
  Sense strand starting at position 3833 of SEQ ID NO: 1563465
ccuuauccaggugaauauu

SEQ ID NO: 1812834 - RNA, 19 nt, Artificial Sequence
  Description of Artificial Sequence: Synthetic oligonucleotide
  Antisense strand to SEQ ID NO: 1812833
aauauucaccuggauaagg

SEQ ID NO: 1812835 - RNA, 19 nt, Artificial Sequence
  Description of Artificial Sequence: Synthetic oligonucleotide
  Sense strand starting at position 3842 of SEQ ID NO: 1563465
ggugaauauugugcaagaa

SEQ ID NO: 1812836 - RNA, 19 nt, Artificial Sequence
  Description of Artificial Sequence: Synthetic oligonucleotide
  Antisense strand to SEQ ID NO: 1812835
uucuugcacaauauucacc

SEQ ID NO: 1812837 - RNA, 19 nt, Artificial Sequence
  Description of Artificial Sequence: Synthetic oligonucleotide
  Sense strand starting at position 3843 of SEQ ID NO: 1563465
gugaauauugugcaagaau

SEQ ID NO: 1812838 - RNA, 19 nt, Artificial Sequence
  Description of Artificial Sequence: Synthetic oligonucleotide
  Antisense strand to SEQ ID NO: 1812837
auucuugcacaauauucac

SEQ ID NO: 1812839 - RNA, 19 nt, Artificial Sequence
  Description of Artificial Sequence: Synthetic oligonucleotide
  Sense strand starting at position 3850 of SEQ ID NO: 1563465
uugugcaagaauugggaau

SEQ ID NO: 1812840 - RNA, 19 nt, Artificial Sequence
  Description of Artificial Sequence: Synthetic oligonucleotide
  Antisense strand to SEQ ID NO: 1812839
auucccaauucuugcacaa

SEQ ID NO: 1812841 - RNA, 19 nt, Artificial Sequence
  Description of Artificial Sequence: Synthetic oligonucleotide
  Sense strand starting at position 3851 of SEQ ID NO: 1563465
ugugcaagaauugggaauu

SEQ ID NO: 1812842 - RNA, 19 nt, Artificial Sequence
  Description of Artificial Sequence: Synthetic oligonucleotide
  Antisense strand to SEQ ID NO: 1812841
aauucccaauucuugcaca

SEQ ID NO: 1812843 - RNA, 19 nt, Artificial Sequence
  Description of Artificial Sequence: Synthetic oligonucleotide
  Sense strand starting at position 3880 of SEQ ID NO: 1563465
ugaugauguagaugucaga

SEQ ID NO: 1812844 - RNA, 19 nt, Artificial Sequence
  Description of Artificial Sequence: Synthetic oligonucleotide
  Antisense strand to SEQ ID NO: 1812843
ucugacaucuacaucauca

SEQ ID NO: 1812845 - RNA, 19 nt, Artificial Sequence
  Description of Artificial Sequence: Synthetic oligonucleotide
  Sense strand starting at position 3928 of SEQ ID NO: 1563465
accuauuaugcauguagaa

SEQ ID NO: 1812846 - RNA, 19 nt, Artificial Sequence
  Description of Artificial Sequence: Synthetic oligonucleotide
  Antisense strand to SEQ ID NO: 1812845
uucuacaugcauaauaggu

SEQ ID NO: 1812847 - RNA, 19 nt, Artificial Sequence
  Description of Artificial Sequence: Synthetic oligonucleotide
  Sense strand starting at position 111 of SEQ ID NO: 1563466
guaugugaaucacugaaag

SEQ ID NO: 1812848 - RNA, 19 nt, Artificial Sequence
  Description of Artificial Sequence: Synthetic oligonucleotide
  Antisense strand to SEQ ID NO: 1812847
cuuucagugauucacauac

SEQ ID NO: 1812849 - RNA, 19 nt, Artificial Sequence
  Description of Artificial Sequence: Synthetic oligonucleotide
  Sense strand starting at position 137 of SEQ ID NO: 1563466
acaauuaagguuuagccaa

SEQ ID NO: 1812850 - RNA, 19 nt, Artificial Sequence
  Description of Artificial Sequence: Synthetic oligonucleotide
  Antisense strand to SEQ ID NO: 1812849
uuggcuaaaccuuaauugu

SEQ ID NO: 1812851 - RNA, 19 nt, Artificial Sequence
  Description of Artificial Sequence: Synthetic oligonucleotide
  Sense strand starting at position 193 of SEQ ID NO: 1563466
gggaaacgugaaugagagu

SEQ ID NO: 1812852 - RNA, 19 nt, Artificial Sequence
  Description of Artificial Sequence: Synthetic oligonucleotide
  Antisense strand to SEQ ID NO: 1812851
acucucauucacguuuccc

SEQ ID NO: 1812853 - RNA, 19 nt, Artificial Sequence
  Description of Artificial Sequence: Synthetic oligonucleotide
  Sense strand starting at position 306 of SEQ ID NO: 1563466
guaaguuggacugguucca

SEQ ID NO: 1812854 - RNA, 19 nt, Artificial Sequence
  Description of Artificial Sequence: Synthetic oligonucleotide
  Antisense strand to SEQ ID NO: 1812853
uggaaccaguccaacuuac

SEQ ID NO: 1812855 - RNA, 19 nt, Artificial Sequence
  Description of Artificial Sequence: Synthetic oligonucleotide
  Sense strand starting at position 315 of SEQ ID NO: 1563466
acugguuccaccuggaaga

SEQ ID NO: 1812856 - RNA, 19 nt, Artificial Sequence
  Description of Artificial Sequence: Synthetic oligonucleotide
  Antisense strand to SEQ ID NO: 1812855
ucuuccagguggaaccagu

SEQ ID NO: 1812857 - RNA, 19 nt, Artificial Sequence
  Description of Artificial Sequence: Synthetic oligonucleotide
  Sense strand starting at position 358 of SEQ ID NO: 1563466
acaaaugcagcaugaagaa

SEQ ID NO: 1812858 - RNA, 19 nt, Artificial Sequence
  Description of Artificial Sequence: Synthetic oligonucleotide
  Antisense strand to SEQ ID NO: 1812857
uucuucaugcugcauuugu

SEQ ID NO: 1812859 - RNA, 19 nt, Artificial Sequence
  Description of Artificial Sequence: Synthetic oligonucleotide
  Sense strand starting at position 568 of SEQ ID NO: 1563466
guaguucacccagacguca

SEQ ID NO: 1812860 - RNA, 19 nt, Artificial Sequence
  Description of Artificial Sequence: Synthetic oligonucleotide
  Antisense strand to SEQ ID NO: 1812859
ugacgucugggugaacuac

SEQ ID NO: 1812861 - RNA, 19 nt, Artificial Sequence
  Description of Artificial Sequence: Synthetic oligonucleotide
  Sense strand starting at position 738 of SEQ ID NO: 1563466
ugaugaugugcugguagaa

SEQ ID NO: 1812862 - RNA, 19 nt, Artificial Sequence
  Description of Artificial Sequence: Synthetic oligonucleotide
  Antisense strand to SEQ ID NO: 1812861
uucuaccagcacaucauca

SEQ ID NO: 1812863 - RNA, 19 nt, Artificial Sequence
  Description of Artificial Sequence: Synthetic oligonucleotide
  Sense strand starting at position 869 of SEQ ID NO: 1563466
agggacaacucaucacagu

SEQ ID NO: 1812864 - RNA, 19 nt, Artificial Sequence
  Description of Artificial Sequence: Synthetic oligonucleotide
  Antisense strand to SEQ ID NO: 1812863
acugugaugaguugucccu

SEQ ID NO: 1812865 - RNA, 19 nt, Artificial Sequence
  Description of Artificial Sequence: Synthetic oligonucleotide
  Sense strand starting at position 954 of SEQ ID NO: 1563466
gggcuuuccacagguggaa

SEQ ID NO: 1812866 - RNA, 19 nt, Artificial Sequence
  Description of Artificial Sequence: Synthetic oligonucleotide
  Antisense strand to SEQ ID NO: 1812865
uuccaccuguggaaagccc

SEQ ID NO: 1812867 - RNA, 19 nt, Artificial Sequence
  Description of Artificial Sequence: Synthetic oligonucleotide
  Sense strand starting at position 1702 of SEQ ID NO: 1563466
cugcuucuuggguagcaga

SEQ ID NO: 1812868 - RNA, 19 nt, Artificial Sequence
  Description of Artificial Sequence: Synthetic oligonucleotide
  Antisense strand to SEQ ID NO: 1812867
ucugcuacccaagaagcag

SEQ ID NO: 1812869 - RNA, 19 nt, Artificial Sequence
  Description of Artificial Sequence: Synthetic oligonucleotide
  Sense strand starting at position 2150 of SEQ ID NO: 1563466
ggaagagugucugucugga

SEQ ID NO: 1812870 - RNA, 19 nt, Artificial Sequence
  Description of Artificial Sequence: Synthetic oligonucleotide
  Antisense strand to SEQ ID NO: 1812869
uccagacagacacucuucc

SEQ ID NO: 1812871 - RNA, 19 nt, Artificial Sequence
  Description of Artificial Sequence: Synthetic oligonucleotide
  Sense strand starting at position 2505 of SEQ ID NO: 1563466
cacggucugccuggagaaa

SEQ ID NO: 1812872 - RNA, 19 nt, Artificial Sequence
  Description of Artificial Sequence: Synthetic oligonucleotide
  Antisense strand to SEQ ID NO: 1812871
uuucuccaggcagaccgug

SEQ ID NO: 1812873 - RNA, 19 nt, Artificial Sequence
  Description of Artificial Sequence: Synthetic oligonucleotide
  Sense strand starting at position 2536 of SEQ ID NO: 1563466
ugguguaaucuugggacac

SEQ ID NO: 1812874 - RNA, 19 nt, Artificial Sequence
  Description of Artificial Sequence: Synthetic oligonucleotide
  Antisense strand to SEQ ID NO: 1812873
gugucccaagauuacacca

SEQ ID NO: 1812875 - RNA, 19 nt, Artificial Sequence
  Description of Artificial Sequence: Synthetic oligonucleotide
  Sense strand starting at position 2549 of SEQ ID NO: 1563466
ggacacccuucgcuuagau

SEQ ID NO: 1812876 - RNA, 19 nt, Artificial Sequence
  Description of Artificial Sequence: Synthetic oligonucleotide
  Antisense strand to SEQ ID NO: 1812875
aucuaagcgaagggugucc

SEQ ID NO: 1812877 - RNA, 19 nt, Artificial Sequence
  Description of Artificial Sequence: Synthetic oligonucleotide
  Sense strand starting at position 2551 of SEQ ID NO: 1563466
acacccuucgcuuagauua

SEQ ID NO: 1812878 - RNA, 19 nt, Artificial Sequence
  Description of Artificial Sequence: Synthetic oligonucleotide
  Antisense strand to SEQ ID NO: 1812877
uaaucuaagcgaagggugu

SEQ ID NO: 1812879 - RNA, 19 nt, Artificial Sequence
  Description of Artificial Sequence: Synthetic oligonucleotide
  Sense strand starting at position 2556 of SEQ ID NO: 1563466
cuucgcuuagauuauacau

SEQ ID NO: 1812880 - RNA, 19 nt, Artificial Sequence
  Description of Artificial Sequence: Synthetic oligonucleotide
  Antisense strand to SEQ ID NO: 1812879
auguauaaucuaagcgaag

SEQ ID NO: 1812881 - RNA, 19 nt, Artificial Sequence
  Description of Artificial Sequence: Synthetic oligonucleotide
  Sense strand starting at position 2572 of SEQ ID NO: 1563466
cauugaauuuggcaaggga

SEQ ID NO: 1812882 - RNA, 19 nt, Artificial Sequence
  Description of Artificial Sequence: Synthetic oligonucleotide
  Antisense strand to SEQ ID NO: 1812881
ucccuugccaaauucaaug

SEQ ID NO: 1812883 - RNA, 19 nt, Artificial Sequence
  Description of Artificial Sequence: Synthetic oligonucleotide
  Sense strand starting at position 2682 of SEQ ID NO: 1563466
cuggguugaugucuuaaac

SEQ ID NO: 1812884 - RNA, 19 nt, Artificial Sequence
  Description of Artificial Sequence: Synthetic oligonucleotide
  Antisense strand to SEQ ID NO: 1812883
guuuaagacaucaacccag

SEQ ID NO: 1812885 - RNA, 19 nt, Artificial Sequence
  Description of Artificial Sequence: Synthetic oligonucleotide
  Sense strand starting at position 2734 of SEQ ID NO: 1563466
aacugaagucuuugagcac

SEQ ID NO: 1812886 - RNA, 19 nt, Artificial Sequence
  Description of Artificial Sequence: Synthetic oligonucleotide
  Antisense strand to SEQ ID NO: 1812885
gugcucaaagacuucaguu

SEQ ID NO: 1812887 - RNA, 19 nt, Artificial Sequence
  Description of Artificial Sequence: Synthetic oligonucleotide
  Sense strand starting at position 2738 of SEQ ID NO: 1563466
gaagucuuugagcaccuga

SEQ ID NO: 1812888 - RNA, 19 nt, Artificial Sequence
  Description of Artificial Sequence: Synthetic oligonucleotide
  Antisense strand to SEQ ID NO: 1812887
ucaggugcucaaagacuuc

SEQ ID NO: 1812889 - RNA, 19 nt, Artificial Sequence
  Description of Artificial Sequence: Synthetic oligonucleotide
  Sense strand starting at position 2751 of SEQ ID NO: 1563466
accugaaucccugagcauu

SEQ ID NO: 1812890 - RNA, 19 nt, Artificial Sequence
  Description of Artificial Sequence: Synthetic oligonucleotide
  Antisense strand to SEQ ID NO: 1812889
aaugcucagggauucaggu

SEQ ID NO: 1812891 - RNA, 19 nt, Artificial Sequence
  Description of Artificial Sequence: Synthetic oligonucleotide
  Sense strand starting at position 2826 of SEQ ID NO: 1563466
gggacccuuuagucagaaa

SEQ ID NO: 1812892 - RNA, 19 nt, Artificial Sequence
  Description of Artificial Sequence: Synthetic oligonucleotide
  Antisense strand to SEQ ID NO: 1812891
uuucugacuaaaggguccc

SEQ ID NO: 1812893 - RNA, 19 nt, Artificial Sequence
  Description of Artificial Sequence: Synthetic oligonucleotide
  Sense strand starting at position 2862 of SEQ ID NO: 1563466
cagggcugcagugaugaua

SEQ ID NO: 1812894 - RNA, 19 nt, Artificial Sequence
  Description of Artificial Sequence: Synthetic oligonucleotide
  Antisense strand to SEQ ID NO: 1812893
uaucaucacugcagcccug

SEQ ID NO: 1812895 - RNA, 19 nt, Artificial Sequence
  Description of Artificial Sequence: Synthetic oligonucleotide
  Sense strand starting at position 3017 of SEQ ID NO: 1563466
acggaaaggucagcccaaa

SEQ ID NO: 1812896 - RNA, 19 nt, Artificial Sequence
  Description of Artificial Sequence: Synthetic oligonucleotide
  Antisense strand to SEQ ID NO: 1812895
uuugggcugaccuuuccgu

SEQ ID NO: 1812897 - RNA, 19 nt, Artificial Sequence
  Description of Artificial Sequence: Synthetic oligonucleotide
  Sense strand starting at position 3366 of SEQ ID NO: 1563466
uuuguuaagcguguuugca

SEQ ID NO: 1812898 - RNA, 19 nt, Artificial Sequence
  Description of Artificial Sequence: Synthetic oligonucleotide
  Antisense strand to SEQ ID NO: 1812897
ugcaaacacgcuuaacaaa

SEQ ID NO: 1812899 - RNA, 19 nt, Artificial Sequence
  Description of Artificial Sequence: Synthetic oligonucleotide
  Sense strand starting at position 3374 of SEQ ID NO: 1563466
gcguguuugcagaagucag

SEQ ID NO: 1812900 - RNA, 19 nt, Artificial Sequence
  Description of Artificial Sequence: Synthetic oligonucleotide
  Antisense strand to SEQ ID NO: 1812899
cugacuucugcaaacacgc

SEQ ID NO: 1812901 - RNA, 19 nt, Artificial Sequence
  Description of Artificial Sequence: Synthetic oligonucleotide
  Sense strand starting at position 3386 of SEQ ID NO: 1563466
aagucagguggugaguuaa

SEQ ID NO: 1812902 - RNA, 19 nt, Artificial Sequence
  Description of Artificial Sequence: Synthetic oligonucleotide
  Antisense strand to SEQ ID NO: 1812901
uuaacucaccaccugacuu

SEQ ID NO: 1812903 - RNA, 19 nt, Artificial Sequence
  Description of Artificial Sequence: Synthetic oligonucleotide
  Sense strand starting at position 3397 of SEQ ID NO: 1563466
ugaguuaacuguccuugau

SEQ ID NO: 1812904 - RNA, 19 nt, Artificial Sequence
  Description of Artificial Sequence: Synthetic oligonucleotide
  Antisense strand to SEQ ID NO: 1812903
aucaaggacaguuaacuca

SEQ ID NO: 1812905 - RNA, 19 nt, Artificial Sequence
  Description of Artificial Sequence: Synthetic oligonucleotide
  Sense strand starting at position 3399 of SEQ ID NO: 1563466
aguuaacuguccuugauca

SEQ ID NO: 1812906 - RNA, 19 nt, Artificial Sequence
  Description of Artificial Sequence: Synthetic oligonucleotide
  Antisense strand to SEQ ID NO: 1812905
ugaucaaggacaguuaacu

SEQ ID NO: 1812907 - RNA, 19 nt, Artificial Sequence
  Description of Artificial Sequence: Synthetic oligonucleotide
  Sense strand starting at position 3400 of SEQ ID NO: 1563466
guuaacuguccuugaucag

SEQ ID NO: 1812908 - RNA, 19 nt, Artificial Sequence
  Description of Artificial Sequence: Synthetic oligonucleotide
  Antisense strand to SEQ ID NO: 1812907
cugaucaaggacaguuaac

SEQ ID NO: 1812909 - RNA, 19 nt, Artificial Sequence
  Description of Artificial Sequence: Synthetic oligonucleotide
  Sense strand starting at position 3401 of SEQ ID NO: 1563466
uuaacuguccuugaucaga

SEQ ID NO: 1812910 - RNA, 19 nt, Artificial Sequence
  Description of Artificial Sequence: Synthetic oligonucleotide
  Antisense strand to SEQ ID NO: 1812909
ucugaucaaggacaguuaa

SEQ ID NO: 1812911 - RNA, 19 nt, Artificial Sequence
  Description of Artificial Sequence: Synthetic oligonucleotide
  Sense strand starting at position 3403 of SEQ ID NO: 1563466
aacuguccuugaucagaga

SEQ ID NO: 1812912 - RNA, 19 nt, Artificial Sequence
  Description of Artificial Sequence: Synthetic oligonucleotide
  Antisense strand to SEQ ID NO: 1812911
ucucugaucaaggacaguu

SEQ ID NO: 1812913 - RNA, 19 nt, Artificial Sequence
  Description of Artificial Sequence: Synthetic oligonucleotide
  Sense strand starting at position 3629 of SEQ ID NO: 1563466
uugggaguaaucugacaau

SEQ ID NO: 1812914 - RNA, 19 nt, Artificial Sequence
  Description of Artificial Sequence: Synthetic oligonucleotide
  Antisense strand to SEQ ID NO: 1812913
auugucagauuacucccaa

SEQ ID NO: 1812915 - RNA, 19 nt, Artificial Sequence
  Description of Artificial Sequence: Synthetic oligonucleotide
  Sense strand starting at position 3848 of SEQ ID NO: 1563466
uuaucagacuaguugguca

SEQ ID NO: 1812916 - RNA, 19 nt, Artificial Sequence
  Description of Artificial Sequence: Synthetic oligonucleotide
  Antisense strand to SEQ ID NO: 1812915
ugaccaacuagucugauaa

SEQ ID NO: 1812917 - RNA, 19 nt, Artificial Sequence
  Description of Artificial Sequence: Synthetic oligonucleotide
  Sense strand starting at position 3850 of SEQ ID NO: 1563466
aucagacuaguuggucaua

SEQ ID NO: 1812918 - RNA, 19 nt, Artificial Sequence
  Description of Artificial Sequence: Synthetic oligonucleotide
  Antisense strand to SEQ ID NO: 1812917
uaugaccaacuagucugau

SEQ ID NO: 1812919 - RNA, 19 nt, Artificial Sequence
  Description of Artificial Sequence: Synthetic oligonucleotide
  Sense strand starting at position 3851 of SEQ ID NO: 1563466
ucagacuaguuggucauau

SEQ ID NO: 1812920 - RNA, 19 nt, Artificial Sequence
  Description of Artificial Sequence: Synthetic oligonucleotide
  Antisense strand to SEQ ID NO: 1812919
auaugaccaacuagucuga

SEQ ID NO: 1812921 - RNA, 19 nt, Artificial Sequence
  Description of Artificial Sequence: Synthetic oligonucleotide
  Sense strand starting at position 3852 of SEQ ID NO: 1563466
cagacuaguuggucauaua

SEQ ID NO: 1812922 - RNA, 19 nt, Artificial Sequence
  Description of Artificial Sequence: Synthetic oligonucleotide
  Antisense strand to SEQ ID NO: 1812921
uauaugaccaacuagucug

SEQ ID NO: 1812923 - RNA, 19 nt, Artificial Sequence
  Description of Artificial Sequence: Synthetic oligonucleotide
  Sense strand starting at position 3853 of SEQ ID NO: 1563466
agacuaguuggucauauau

SEQ ID NO: 1812924 - RNA, 19 nt, Artificial Sequence
  Description of Artificial Sequence: Synthetic oligonucleotide
  Antisense strand to SEQ ID NO: 1812923
auauaugaccaacuagucu

SEQ ID NO: 1812925 - RNA, 19 nt, Artificial Sequence
  Description of Artificial Sequence: Synthetic oligonucleotide
  Sense strand starting at position 3891 of SEQ ID NO: 1563466
ggcugaaauauguaugugu

SEQ ID NO: 1812926 - RNA, 19 nt, Artificial Sequence
  Description of Artificial Sequence: Synthetic oligonucleotide
  Antisense strand to SEQ ID NO: 1812925
acacauacauauuucagcc

SEQ ID NO: 1812927 - RNA, 19 nt, Artificial Sequence
  Description of Artificial Sequence: Synthetic oligonucleotide
  Sense strand starting at position 240 of SEQ ID NO: 1563467
cgaagcaugcgguugucaa

SEQ ID NO: 1812928 - RNA, 19 nt, Artificial Sequence
  Description of Artificial Sequence: Synthetic oligonucleotide
  Antisense strand to SEQ ID NO: 1812927
uugacaaccgcaugcuucg

SEQ ID NO: 1812929 - RNA, 19 nt, Artificial Sequence
  Description of Artificial Sequence: Synthetic oligonucleotide
  Sense strand starting at position 564 of SEQ ID NO: 1563467
uugauugugucauuauuuc

SEQ ID NO: 1812930 - RNA, 19 nt, Artificial Sequence
  Description of Artificial Sequence: Synthetic oligonucleotide
  Antisense strand to SEQ ID NO: 1812929
gaaauaaugacacaaucaa

SEQ ID NO: 1812931 - RNA, 19 nt, Artificial Sequence
  Description of Artificial Sequence: Synthetic oligonucleotide
  Sense strand starting at position 610 of SEQ ID NO: 1563467
gagcaccaucacugagaga

SEQ ID NO: 1812932 - RNA, 19 nt, Artificial Sequence
  Description of Artificial Sequence: Synthetic oligonucleotide
  Antisense strand to SEQ ID NO: 1812931
ucucucagugauggugcuc

SEQ ID NO: 1812933 - RNA, 19 nt, Artificial Sequence
  Description of Artificial Sequence: Synthetic oligonucleotide
  Sense strand starting at position 840 of SEQ ID NO: 1563467
ugguaaauauuggcaggau

SEQ ID NO: 1812934 - RNA, 19 nt, Artificial Sequence
  Description of Artificial Sequence: Synthetic oligonucleotide
  Antisense strand to SEQ ID NO: 1812933
auccugccaauauuuacca

SEQ ID NO: 1812935 - RNA, 19 nt, Artificial Sequence
  Description of Artificial Sequence: Synthetic oligonucleotide
  Sense strand starting at position 989 of SEQ ID NO: 1563467
aggagagucuggcuccaga

SEQ ID NO: 1812936 - RNA, 19 nt, Artificial Sequence
  Description of Artificial Sequence: Synthetic oligonucleotide
  Antisense strand to SEQ ID NO: 1812935
ucuggagccagacucuccu

SEQ ID NO: 1812937 - RNA, 19 nt, Artificial Sequence
  Description of Artificial Sequence: Synthetic oligonucleotide
  Sense strand starting at position 1043 of SEQ ID NO: 1563467
acgcuuaguauucucgcaa

SEQ ID NO: 1812938 - RNA, 19 nt, Artificial Sequence
  Description of Artificial Sequence: Synthetic oligonucleotide
  Antisense strand to SEQ ID NO: 1812937
uugcgagaauacuaagcgu

SEQ ID NO: 1812939 - RNA, 19 nt, Artificial Sequence
  Description of Artificial Sequence: Synthetic oligonucleotide
  Sense strand starting at position 1141 of SEQ ID NO: 1563467
gaaagaacuuagccuggau

SEQ ID NO: 1812940 - RNA, 19 nt, Artificial Sequence
  Description of Artificial Sequence: Synthetic oligonucleotide
  Antisense strand to SEQ ID NO: 1812939
auccaggcuaaguucuuuc

SEQ ID NO: 1812941 - RNA, 19 nt, Artificial Sequence
  Description of Artificial Sequence: Synthetic oligonucleotide
  Sense strand starting at position 1143 of SEQ ID NO: 1563467
aagaacuuagccuggauga

SEQ ID NO: 1812942 - RNA, 19 nt, Artificial Sequence
  Description of Artificial Sequence: Synthetic oligonucleotide
  Antisense strand to SEQ ID NO: 1812941
ucauccaggcuaaguucuu

SEQ ID NO: 1812943 - RNA, 19 nt, Artificial Sequence
  Description of Artificial Sequence: Synthetic oligonucleotide
  Sense strand starting at position 1268 of SEQ ID NO: 1563467
cugguuaaaguguauggua

SEQ ID NO: 1812944 - RNA, 19 nt, Artificial Sequence
  Description of Artificial Sequence: Synthetic oligonucleotide
  Antisense strand to SEQ ID NO: 1812943
uaccauacacuuuaaccag

SEQ ID NO: 1812945 - RNA, 19 nt, Artificial Sequence
  Description of Artificial Sequence: Synthetic oligonucleotide
  Sense strand starting at position 1277 of SEQ ID NO: 1563467
guguaugguacugacagaa

SEQ ID NO: 1812946 - RNA, 19 nt, Artificial Sequence
  Description of Artificial Sequence: Synthetic oligonucleotide
  Antisense strand to SEQ ID NO: 1812945
uucugucaguaccauacac

SEQ ID NO: 1812947 - RNA, 19 nt, Artificial Sequence
  Description of Artificial Sequence: Synthetic oligonucleotide
  Sense strand starting at position 1439 of SEQ ID NO: 1563467
ggcagaugucucugaggaa

SEQ ID NO: 1812948 - RNA, 19 nt, Artificial Sequence
  Description of Artificial Sequence: Synthetic oligonucleotide
  Antisense strand to SEQ ID NO: 1812947
uuccucagagacaucugcc

SEQ ID NO: 1812949 - RNA, 19 nt, Artificial Sequence
  Description of Artificial Sequence: Synthetic oligonucleotide
  Sense strand starting at position 1475 of SEQ ID NO: 1563467
cugauccucgucuaacaaa

SEQ ID NO: 1812950 - RNA, 19 nt, Artificial Sequence
  Description of Artificial Sequence: Synthetic oligonucleotide
  Antisense strand to SEQ ID NO: 1812949
uuuguuagacgaggaucag

SEQ ID NO: 1812951 - RNA, 19 nt, Artificial Sequence
  Description of Artificial Sequence: Synthetic oligonucleotide
  Sense strand starting at position 1697 of SEQ ID NO: 1563467
ggcaucguucaggaaacca

SEQ ID NO: 1812952 - RNA, 19 nt, Artificial Sequence
  Description of Artificial Sequence: Synthetic oligonucleotide
  Antisense strand to SEQ ID NO: 1812951
ugguuuccugaacgaugcc

SEQ ID NO: 1812953 - RNA, 19 nt, Artificial Sequence
  Description of Artificial Sequence: Synthetic oligonucleotide
  Sense strand starting at position 1877 of SEQ ID NO: 1563467
gugggacaucucgaacgau

SEQ ID NO: 1812954 - RNA, 19 nt, Artificial Sequence
  Description of Artificial Sequence: Synthetic oligonucleotide
  Antisense strand to SEQ ID NO: 1812953
aucguucgagaugucccac

SEQ ID NO: 1812955 - RNA, 19 nt, Artificial Sequence
  Description of Artificial Sequence: Synthetic oligonucleotide
  Sense strand starting at position 2074 of SEQ ID NO: 1563467
gccagugagguucagaaga

SEQ ID NO: 1812956 - RNA, 19 nt, Artificial Sequence
  Description of Artificial Sequence: Synthetic oligonucleotide
  Antisense strand to SEQ ID NO: 1812955
ucuucugaaccucacuggc

SEQ ID NO: 1812957 - RNA, 19 nt, Artificial Sequence
  Description of Artificial Sequence: Synthetic oligonucleotide
  Sense strand starting at position 2085 of SEQ ID NO: 1563467
ucagaagacuucuuaucug

SEQ ID NO: 1812958 - RNA, 19 nt, Artificial Sequence
  Description of Artificial Sequence: Synthetic oligonucleotide
  Antisense strand to SEQ ID NO: 1812957
cagauaagaagucuucuga

SEQ ID NO: 1812959 - RNA, 19 nt, Artificial Sequence
  Description of Artificial Sequence: Synthetic oligonucleotide
  Sense strand starting at position 2175 of SEQ ID NO: 1563467
cugugaguagcugugguuu

SEQ ID NO: 1812960 - RNA, 19 nt, Artificial Sequence
  Description of Artificial Sequence: Synthetic oligonucleotide
  Antisense strand to SEQ ID NO: 1812959
aaaccacagcuacucacag

SEQ ID NO: 1812961 - RNA, 19 nt, Artificial Sequence
  Description of Artificial Sequence: Synthetic oligonucleotide
  Sense strand starting at position 2237 of SEQ ID NO: 1563467
uugaaaggucacgaaguga

SEQ ID NO: 1812962 - RNA, 19 nt, Artificial Sequence
  Description of Artificial Sequence: Synthetic oligonucleotide
  Antisense strand to SEQ ID NO: 1812961
ucacuucgugaccuuucaa

SEQ ID NO: 1812963 - RNA, 19 nt, Artificial Sequence
  Description of Artificial Sequence: Synthetic oligonucleotide
  Sense strand starting at position 2257 of SEQ ID NO: 1563467
ugcaaagaacucugauagu

SEQ ID NO: 1812964 - RNA, 19 nt, Artificial Sequence
  Description of Artificial Sequence: Synthetic oligonucleotide
  Antisense strand to SEQ ID NO: 1812963
acuaucagaguucuuugca

SEQ ID NO: 1812965 - RNA, 19 nt, Artificial Sequence
  Description of Artificial Sequence: Synthetic oligonucleotide
  Sense strand starting at position 2307 of SEQ ID NO: 1563467
cagugaggucucuacuaua

SEQ ID NO: 1812966 - RNA, 19 nt, Artificial Sequence
  Description of Artificial Sequence: Synthetic oligonucleotide
  Antisense strand to SEQ ID NO: 1812965
uauaguagagaccucacug

SEQ ID NO: 1812967 - RNA, 19 nt, Artificial Sequence
  Description of Artificial Sequence: Synthetic oligonucleotide
  Sense strand starting at position 2318 of SEQ ID NO: 1563467
cuacuauagguguaucuua

SEQ ID NO: 1812968 - RNA, 19 nt, Artificial Sequence
  Description of Artificial Sequence: Synthetic oligonucleotide
  Antisense strand to SEQ ID NO: 1812967
uaagauacaccuauaguag

SEQ ID NO: 1812969 - RNA, 19 nt, Artificial Sequence
  Description of Artificial Sequence: Synthetic oligonucleotide
  Sense strand starting at position 2341 of SEQ ID NO: 1563467
agacauaggcucugagaug

SEQ ID NO: 1812970 - RNA, 19 nt, Artificial Sequence
  Description of Artificial Sequence: Synthetic oligonucleotide
  Antisense strand to SEQ ID NO: 1812969
caucucagagccuaugucu

SEQ ID NO: 1812971 - RNA, 19 nt, Artificial Sequence
  Description of Artificial Sequence: Synthetic oligonucleotide
  Sense strand starting at position 2346 of SEQ ID NO: 1563467
uaggcucugagaugaggau

SEQ ID NO: 1812972 - RNA, 19 nt, Artificial Sequence
  Description of Artificial Sequence: Synthetic oligonucleotide
  Antisense strand to SEQ ID NO: 1812971
auccucaucucagagccua

SEQ ID NO: 1812973 - RNA, 19 nt, Artificial Sequence
  Description of Artificial Sequence: Synthetic oligonucleotide
  Sense strand starting at position 2352 of SEQ ID NO: 1563467
cugagaugaggauguaucu

SEQ ID NO: 1812974 - RNA, 19 nt, Artificial Sequence
  Description of Artificial Sequence: Synthetic oligonucleotide
  Antisense strand to SEQ ID NO: 1812973
agauacauccucaucucag

SEQ ID NO: 1812975 - RNA, 19 nt, Artificial Sequence
  Description of Artificial Sequence: Synthetic oligonucleotide
  Sense strand starting at position 2359 of SEQ ID NO: 1563467
gaggauguaucuuugauua

SEQ ID NO: 1812976 - RNA, 19 nt, Artificial Sequence
  Description of Artificial Sequence: Synthetic oligonucleotide
  Antisense strand to SEQ ID NO: 1812975
uaaucaaagauacauccuc

SEQ ID NO: 1812977 - RNA, 19 nt, Artificial Sequence
  Description of Artificial Sequence: Synthetic oligonucleotide
  Sense strand starting at position 2501 of SEQ ID NO: 1563467
cugaguuauccuuacacca

SEQ ID NO: 1812978 - RNA, 19 nt, Artificial Sequence
  Description of Artificial Sequence: Synthetic oligonucleotide
  Antisense strand to SEQ ID NO: 1812977
ugguguaaggauaacucag

SEQ ID NO: 1812979 - RNA, 19 nt, Artificial Sequence
  Description of Artificial Sequence: Synthetic oligonucleotide
  Sense strand starting at position 2602 of SEQ ID NO: 1563467
ccagaugucccagaugcuu

SEQ ID NO: 1812980 - RNA, 19 nt, Artificial Sequence
  Description of Artificial Sequence: Synthetic oligonucleotide
  Antisense strand to SEQ ID NO: 1812979
aagcaucugggacaucugg

SEQ ID NO: 1812981 - RNA, 19 nt, Artificial Sequence
  Description of Artificial Sequence: Synthetic oligonucleotide
  Sense strand starting at position 2818 of SEQ ID NO: 1563467
guguaugcugaugaaagua

SEQ ID NO: 1812982 - RNA, 19 nt, Artificial Sequence
  Description of Artificial Sequence: Synthetic oligonucleotide
  Antisense strand to SEQ ID NO: 1812981
uacuuucaucagcauacac

SEQ ID NO: 1812983 - RNA, 19 nt, Artificial Sequence
  Description of Artificial Sequence: Synthetic oligonucleotide
  Sense strand starting at position 2897 of SEQ ID NO: 1563467
uaaagucauggugagcaaa

SEQ ID NO: 1812984 - RNA, 19 nt, Artificial Sequence
  Description of Artificial Sequence: Synthetic oligonucleotide
  Antisense strand to SEQ ID NO: 1812983
uuugcucaccaugacuuua

SEQ ID NO: 1812985 - RNA, 19 nt, Artificial Sequence
  Description of Artificial Sequence: Synthetic oligonucleotide
  Sense strand starting at position 2899 of SEQ ID NO: 1563467
aagucauggugagcaaaug

SEQ ID NO: 1812986 - RNA, 19 nt, Artificial Sequence
  Description of Artificial Sequence: Synthetic oligonucleotide
  Antisense strand to SEQ ID NO: 1812985
cauuugcucaccaugacuu

SEQ ID NO: 1812987 - RNA, 19 nt, Artificial Sequence
  Description of Artificial Sequence: Synthetic oligonucleotide
  Sense strand starting at position 2981 of SEQ ID NO: 1563467
augccaguugaaugaauaa

SEQ ID NO: 1812988 - RNA, 19 nt, Artificial Sequence
  Description of Artificial Sequence: Synthetic oligonucleotide
  Antisense strand to SEQ ID NO: 1812987
uuauucauucaacuggcau

SEQ ID NO: 1812989 - RNA, 19 nt, Artificial Sequence
  Description of Artificial Sequence: Synthetic oligonucleotide
  Sense strand starting at position 3078 of SEQ ID NO: 1563467
aaggucuaccgaugaauga

SEQ ID NO: 1812990 - RNA, 19 nt, Artificial Sequence
  Description of Artificial Sequence: Synthetic oligonucleotide
  Antisense strand to SEQ ID NO: 1812989
ucauucaucgguagaccuu

SEQ ID NO: 1812991 - RNA, 19 nt, Artificial Sequence
  Description of Artificial Sequence: Synthetic oligonucleotide
  Sense strand starting at position 3165 of SEQ ID NO: 1563467
uguuaaugaucaguaacau

SEQ ID NO: 1812992 - RNA, 19 nt, Artificial Sequence
  Description of Artificial Sequence: Synthetic oligonucleotide
  Antisense strand to SEQ ID NO: 1812991
auguuacugaucauuaaca

SEQ ID NO: 1812993 - RNA, 19 nt, Artificial Sequence
  Description of Artificial Sequence: Synthetic oligonucleotide
  Sense strand starting at position 3166 of SEQ ID NO: 1563467
guuaaugaucaguaacauu

SEQ ID NO: 1812994 - RNA, 19 nt, Artificial Sequence
  Description of Artificial Sequence: Synthetic oligonucleotide
  Antisense strand to SEQ ID NO: 1812993
aauguuacugaucauuaac

SEQ ID NO: 1812995 - RNA, 19 nt, Artificial Sequence
  Description of Artificial Sequence: Synthetic oligonucleotide
  Sense strand starting at position 3624 of SEQ ID NO: 1563467
ucuuacaggcccuaagauu

SEQ ID NO: 1812996 - RNA, 19 nt, Artificial Sequence
  Description of Artificial Sequence: Synthetic oligonucleotide
  Antisense strand to SEQ ID NO: 1812995
aaucuuagggccuguaaga

SEQ ID NO: 1812997 - RNA, 19 nt, Artificial Sequence
  Description of Artificial Sequence: Synthetic oligonucleotide
  Sense strand starting at position 3779 of SEQ ID NO: 1563467
ggcaucuaccuccaauaga

SEQ ID NO: 1812998 - RNA, 19 nt, Artificial Sequence
  Description of Artificial Sequence: Synthetic oligonucleotide
  Antisense strand to SEQ ID NO: 1812997
ucuauuggagguagaugcc

SEQ ID NO: 1812999 - RNA, 19 nt, Artificial Sequence
  Description of Artificial Sequence: Synthetic oligonucleotide
  Sense strand starting at position 3856 of SEQ ID NO: 1563467
auaugcuuuguaugagaga

SEQ ID NO: 1813000 - RNA, 19 nt, Artificial Sequence
  Description of Artificial Sequence: Synthetic oligonucleotide
  Antisense strand to SEQ ID NO: 1812999
ucucucauacaaagcauau

SEQ ID NO: 1813001 - RNA, 19 nt, Artificial Sequence
  Description of Artificial Sequence: Synthetic oligonucleotide
  Sense strand starting at position 3899 of SEQ ID NO: 1563467
gaucauuaagugggacgau

SEQ ID NO: 1813002 - RNA, 19 nt, Artificial Sequence
  Description of Artificial Sequence: Synthetic oligonucleotide
  Antisense strand to SEQ ID NO: 1813001
aucgucccacuuaaugauc

SEQ ID NO: 1813003 - RNA, 19 nt, Artificial Sequence
  Description of Artificial Sequence: Synthetic oligonucleotide
  Sense strand starting at position 3908 of SEQ ID NO: 1563467
gugggacgauuugucaagu

SEQ ID NO: 1813004 - RNA, 19 nt, Artificial Sequence
  Description of Artificial Sequence: Synthetic oligonucleotide
  Antisense strand to SEQ ID NO: 1813003
acuugacaaaucgucccac

SEQ ID NO: 1813005 - RNA, 19 nt, Artificial Sequence
  Description of Artificial Sequence: Synthetic oligonucleotide
  Sense strand starting at position 3930 of SEQ ID NO: 1563467
acugguucuugugcuauuu

SEQ ID NO: 1813006 - RNA, 19 nt, Artificial Sequence
  Description of Artificial Sequence: Synthetic oligonucleotide
  Antisense strand to SEQ ID NO: 1813005
aaauagcacaagaaccagu

SEQ ID NO: 1813007 - RNA, 19 nt, Artificial Sequence
  Description of Artificial Sequence: Synthetic oligonucleotide
  Sense strand starting at position 1992 of SEQ ID NO: 1563468
gcgguuaggacugauggua

SEQ ID NO: 1813008 - RNA, 19 nt, Artificial Sequence
  Description of Artificial Sequence: Synthetic oligonucleotide
  Antisense strand to SEQ ID NO: 1813007
uaccaucaguccuaaccgc

SEQ ID NO: 1813009 - RNA, 19 nt, Artificial Sequence
  Description of Artificial Sequence: Synthetic oligonucleotide
  Sense strand starting at position 2004 of SEQ ID NO: 1563468
gaugguagugaaggaagua

SEQ ID NO: 1813010 - RNA, 19 nt, Artificial Sequence
  Description of Artificial Sequence: Synthetic oligonucleotide
  Antisense strand to SEQ ID NO: 1813009
uacuuccuucacuaccauc

SEQ ID NO: 1813011 - RNA, 19 nt, Artificial Sequence
  Description of Artificial Sequence: Synthetic oligonucleotide
  Sense strand starting at position 2039 of SEQ ID NO: 1563468
acagcaaucugauuggcua

SEQ ID NO: 1813012 - RNA, 19 nt, Artificial Sequence
  Description of Artificial Sequence: Synthetic oligonucleotide
  Antisense strand to SEQ ID NO: 1813011
uagccaaucagauugcugu

SEQ ID NO: 1813013 - RNA, 19 nt, Artificial Sequence
  Description of Artificial Sequence: Synthetic oligonucleotide
  Sense strand starting at position 2042 of SEQ ID NO: 1563468
gcaaucugauuggcuaaag

SEQ ID NO: 1813014 - RNA, 19 nt, Artificial Sequence
  Description of Artificial Sequence: Synthetic oligonucleotide
  Antisense strand to SEQ ID NO: 1813013
cuuuagccaaucagauugc

SEQ ID NO: 1813015 - RNA, 19 nt, Artificial Sequence
  Description of Artificial Sequence: Synthetic oligonucleotide
  Sense strand starting at position 2086 of SEQ ID NO: 1563468
ggcaguugccaguauggga

SEQ ID NO: 1813016 - RNA, 19 nt, Artificial Sequence
  Description of Artificial Sequence: Synthetic oligonucleotide
  Antisense strand to SEQ ID NO: 1813015
ucccauacuggcaacugcc

SEQ ID NO: 1813017 - RNA, 19 nt, Artificial Sequence
  Description of Artificial Sequence: Synthetic oligonucleotide
  Sense strand starting at position 2287 of SEQ ID NO: 1563468
agugauccuccuuaagcaa

SEQ ID NO: 1813018 - RNA, 19 nt, Artificial Sequence
  Description of Artificial Sequence: Synthetic oligonucleotide
  Antisense strand to SEQ ID NO: 1813017
uugcuuaaggaggaucacu

SEQ ID NO: 1813019 - RNA, 19 nt, Artificial Sequence
  Description of Artificial Sequence: Synthetic oligonucleotide
  Sense strand starting at position 2332 of SEQ ID NO: 1563468
uuugcuugaagguaaugua

SEQ ID NO: 1813020 - RNA, 19 nt, Artificial Sequence
  Description of Artificial Sequence: Synthetic oligonucleotide
  Antisense strand to SEQ ID NO: 1813019
uacauuaccuucaagcaaa

SEQ ID NO: 1813021 - RNA, 19 nt, Artificial Sequence
  Description of Artificial Sequence: Synthetic oligonucleotide
  Sense strand starting at position 2393 of SEQ ID NO: 1563468
cuaagugucccauagcuag

SEQ ID NO: 1813022 - RNA, 19 nt, Artificial Sequence
  Description of Artificial Sequence: Synthetic oligonucleotide
  Antisense strand to SEQ ID NO: 1813021
cuagcuaugggacacuuag

SEQ ID NO: 1813023 - RNA, 19 nt, Artificial Sequence
  Description of Artificial Sequence: Synthetic oligonucleotide
  Sense strand starting at position 2436 of SEQ ID NO: 1563468
ucuuaaaucgaacagcuua

SEQ ID NO: 1813024 - RNA, 19 nt, Artificial Sequence
  Description of Artificial Sequence: Synthetic oligonucleotide
  Antisense strand to SEQ ID NO: 1813023
uaagcuguucgauuuaaga

SEQ ID NO: 1813025 - RNA, 19 nt, Artificial Sequence
  Description of Artificial Sequence: Synthetic oligonucleotide
  Sense strand starting at position 2457 of SEQ ID NO: 1563468
ggaaaccuugagugcucua

SEQ ID NO: 1813026 - RNA, 19 nt, Artificial Sequence
  Description of Artificial Sequence: Synthetic oligonucleotide
  Antisense strand to SEQ ID NO: 1813025
uagagcacucaagguuucc

SEQ ID NO: 1813027 - RNA, 19 nt, Artificial Sequence
  Description of Artificial Sequence: Synthetic oligonucleotide
  Sense strand starting at position 2462 of SEQ ID NO: 1563468
ccuugagugcucuaacuag

SEQ ID NO: 1813028 - RNA, 19 nt, Artificial Sequence
  Description of Artificial Sequence: Synthetic oligonucleotide
  Antisense strand to SEQ ID NO: 1813027
cuaguuagagcacucaagg

SEQ ID NO: 1813029 - RNA, 19 nt, Artificial Sequence
  Description of Artificial Sequence: Synthetic oligonucleotide
  Sense strand starting at position 2480 of SEQ ID NO: 1563468
guagaaucgauauaggguu

SEQ ID NO: 1813030 - RNA, 19 nt, Artificial Sequence
  Description of Artificial Sequence: Synthetic oligonucleotide
  Antisense strand to SEQ ID NO: 1813029
aacccuauaucgauucuac

SEQ ID NO: 1813031 - RNA, 19 nt, Artificial Sequence
  Description of Artificial Sequence: Synthetic oligonucleotide
  Sense strand starting at position 2486 of SEQ ID NO: 1563468
ucgauauaggguugccaga

SEQ ID NO: 1813032 - RNA, 19 nt, Artificial Sequence
  Description of Artificial Sequence: Synthetic oligonucleotide
  Antisense strand to SEQ ID NO: 1813031
ucuggcaacccuauaucga

SEQ ID NO: 1813033 - RNA, 19 nt, Artificial Sequence
  Description of Artificial Sequence: Synthetic oligonucleotide
  Sense strand starting at position 2488 of SEQ ID NO: 1563468
gauauaggguugccagaua

SEQ ID NO: 1813034 - RNA, 19 nt, Artificial Sequence
  Description of Artificial Sequence: Synthetic oligonucleotide
  Antisense strand to SEQ ID NO: 1813033
uaucuggcaacccuauauc

SEQ ID NO: 1813035 - RNA, 19 nt, Artificial Sequence
  Description of Artificial Sequence: Synthetic oligonucleotide
  Sense strand starting at position 2559 of SEQ ID NO: 1563468
uuaguaugaguagaucuca

SEQ ID NO: 1813036 - RNA, 19 nt, Artificial Sequence
  Description of Artificial Sequence: Synthetic oligonucleotide
  Antisense strand to SEQ ID NO: 1813035
ugagaucuacucauacuaa

SEQ ID NO: 1813037 - RNA, 19 nt, Artificial Sequence
  Description of Artificial Sequence: Synthetic oligonucleotide
  Sense strand starting at position 2638 of SEQ ID NO: 1563468
uuaacaugguguccucuau

SEQ ID NO: 1813038 - RNA, 19 nt, Artificial Sequence
  Description of Artificial Sequence: Synthetic oligonucleotide
  Antisense strand to SEQ ID NO: 1813037
auagaggacaccauguuaa

SEQ ID NO: 1813039 - RNA, 19 nt, Artificial Sequence
  Description of Artificial Sequence: Synthetic oligonucleotide
  Sense strand starting at position 2676 of SEQ ID NO: 1563468
caggcuccuuuagugagaa

SEQ ID NO: 1813040 - RNA, 19 nt, Artificial Sequence
  Description of Artificial Sequence: Synthetic oligonucleotide
  Antisense strand to SEQ ID NO: 1813039
uucucacuaaaggagccug

SEQ ID NO: 1813041 - RNA, 19 nt, Artificial Sequence
  Description of Artificial Sequence: Synthetic oligonucleotide
  Sense strand starting at position 2678 of SEQ ID NO: 1563468
ggcuccuuuagugagaaga

SEQ ID NO: 1813042 - RNA, 19 nt, Artificial Sequence
  Description of Artificial Sequence: Synthetic oligonucleotide
  Antisense strand to SEQ ID NO: 1813041
ucuucucacuaaaggagcc

SEQ ID NO: 1813043 - RNA, 19 nt, Artificial Sequence
  Description of Artificial Sequence: Synthetic oligonucleotide
  Sense strand starting at position 2698 of SEQ ID NO: 1563468
uuuagacccucaguguaau

SEQ ID NO: 1813044 - RNA, 19 nt, Artificial Sequence
  Description of Artificial Sequence: Synthetic oligonucleotide
  Antisense strand to SEQ ID NO: 1813043
auuacacugagggucuaaa

SEQ ID NO: 1813045 - RNA, 19 nt, Artificial Sequence
  Description of Artificial Sequence: Synthetic oligonucleotide
  Sense strand starting at position 2708 of SEQ ID NO: 1563468
caguguaaugaaggcugaa

SEQ ID NO: 1813046 - RNA, 19 nt, Artificial Sequence
  Description of Artificial Sequence: Synthetic oligonucleotide
  Antisense strand to SEQ ID NO: 1813045
uucagccuucauuacacug

SEQ ID NO: 1813047 - RNA, 19 nt, Artificial Sequence
  Description of Artificial Sequence: Synthetic oligonucleotide
  Sense strand starting at position 2711 of SEQ ID NO: 1563468
uguaaugaaggcugaaauc

SEQ ID NO: 1813048 - RNA, 19 nt, Artificial Sequence
  Description of Artificial Sequence: Synthetic oligonucleotide
  Antisense strand to SEQ ID NO: 1813047
gauuucagccuucauuaca

SEQ ID NO: 1813049 - RNA, 19 nt, Artificial Sequence
  Description of Artificial Sequence: Synthetic oligonucleotide
  Sense strand starting at position 2771 of SEQ ID NO: 1563468
ucaccuauuugagauagaa

SEQ ID NO: 1813050 - RNA, 19 nt, Artificial Sequence
  Description of Artificial Sequence: Synthetic oligonucleotide
  Antisense strand to SEQ ID NO: 1813049
uucuaucucaaauagguga

SEQ ID NO: 1813051 - RNA, 19 nt, Artificial Sequence
  Description of Artificial Sequence: Synthetic oligonucleotide
  Sense strand starting at position 2805 of SEQ ID NO: 1563468
uucuuauuccaccagaguu

SEQ ID NO: 1813052 - RNA, 19 nt, Artificial Sequence
  Description of Artificial Sequence: Synthetic oligonucleotide
  Antisense strand to SEQ ID NO: 1813051
aacucugguggaauaagaa

SEQ ID NO: 1813053 - RNA, 19 nt, Artificial Sequence
  Description of Artificial Sequence: Synthetic oligonucleotide
  Sense strand starting at position 2813 of SEQ ID NO: 1563468
ccaccagaguuccuauaua

SEQ ID NO: 1813054 - RNA, 19 nt, Artificial Sequence
  Description of Artificial Sequence: Synthetic oligonucleotide
  Antisense strand to SEQ ID NO: 1813053
uauauaggaacucuggugg

SEQ ID NO: 1813055 - RNA, 19 nt, Artificial Sequence
  Description of Artificial Sequence: Synthetic oligonucleotide
  Sense strand starting at position 2891 of SEQ ID NO: 1563468
aaaggaaauuaugugaugu

SEQ ID NO: 1813056 - RNA, 19 nt, Artificial Sequence
  Description of Artificial Sequence: Synthetic oligonucleotide
  Antisense strand to SEQ ID NO: 1813055
acaucacauaauuuccuuu

SEQ ID NO: 1813057 - RNA, 19 nt, Artificial Sequence
  Description of Artificial Sequence: Synthetic oligonucleotide
  Sense strand starting at position 3026 of SEQ ID NO: 1563468
uuaauaguuucucugaaug

SEQ ID NO: 1813058 - RNA, 19 nt, Artificial Sequence
  Description of Artificial Sequence: Synthetic oligonucleotide
  Antisense strand to SEQ ID NO: 1813057
cauucagagaaacuauuaa

SEQ ID NO: 1813059 - RNA, 19 nt, Artificial Sequence
  Description of Artificial Sequence: Synthetic oligonucleotide
  Sense strand starting at position 3031 of SEQ ID NO: 1563468
aguuucucugaaugaauua

SEQ ID NO: 1813060 - RNA, 19 nt, Artificial Sequence
  Description of Artificial Sequence: Synthetic oligonucleotide
  Antisense strand to SEQ ID NO: 1813059
uaauucauucagagaaacu

SEQ ID NO: 1813061 - RNA, 19 nt, Artificial Sequence
  Description of Artificial Sequence: Synthetic oligonucleotide
  Sense strand starting at position 3086 of SEQ ID NO: 1563468
guaaacugcuaacuaagaa

SEQ ID NO: 1813062 - RNA, 19 nt, Artificial Sequence
  Description of Artificial Sequence: Synthetic oligonucleotide
  Antisense strand to SEQ ID NO: 1813061
uucuuaguuagcaguuuac

SEQ ID NO: 1813063 - RNA, 19 nt, Artificial Sequence
  Description of Artificial Sequence: Synthetic oligonucleotide
  Sense strand starting at position 3176 of SEQ ID NO: 1563468
aguauacagucuucuaaag

SEQ ID NO: 1813064 - RNA, 19 nt, Artificial Sequence
  Description of Artificial Sequence: Synthetic oligonucleotide
  Antisense strand to SEQ ID NO: 1813063
cuuuagaagacuguauacu

SEQ ID NO: 1813065 - RNA, 19 nt, Artificial Sequence
  Description of Artificial Sequence: Synthetic oligonucleotide
  Sense strand starting at position 3323 of SEQ ID NO: 1563468
uggaauaauguauggaagu

SEQ ID NO: 1813066 - RNA, 19 nt, Artificial Sequence
  Description of Artificial Sequence: Synthetic oligonucleotide
  Antisense strand to SEQ ID NO: 1813065
acuuccauacauuauucca

SEQ ID NO: 1813067 - RNA, 19 nt, Artificial Sequence
  Description of Artificial Sequence: Synthetic oligonucleotide
  Sense strand starting at position 3375 of SEQ ID NO: 1563468
acggaugaaucuuuaacac

SEQ ID NO: 1813068 - RNA, 19 nt, Artificial Sequence
  Description of Artificial Sequence: Synthetic oligonucleotide
  Antisense strand to SEQ ID NO: 1813067
guguuaaagauucauccgu

SEQ ID NO: 1813069 - RNA, 19 nt, Artificial Sequence
  Description of Artificial Sequence: Synthetic oligonucleotide
  Sense strand starting at position 3443 of SEQ ID NO: 1563468
uuugcaagucuauauuguu

SEQ ID NO: 1813070 - RNA, 19 nt, Artificial Sequence
  Description of Artificial Sequence: Synthetic oligonucleotide
  Antisense strand to SEQ ID NO: 1813069
aacaauauagacuugcaaa

SEQ ID NO: 1813071 - RNA, 19 nt, Artificial Sequence
  Description of Artificial Sequence: Synthetic oligonucleotide
  Sense strand starting at position 3598 of SEQ ID NO: 1563468
aucuuauccugaguauagg

SEQ ID NO: 1813072 - RNA, 19 nt, Artificial Sequence
  Description of Artificial Sequence: Synthetic oligonucleotide
  Antisense strand to SEQ ID NO: 1813071
ccuauacucaggauaagau

SEQ ID NO: 1813073 - RNA, 19 nt, Artificial Sequence
  Description of Artificial Sequence: Synthetic oligonucleotide
  Sense strand starting at position 3599 of SEQ ID NO: 1563468
ucuuauccugaguauaggu

SEQ ID NO: 1813074 - RNA, 19 nt, Artificial Sequence
  Description of Artificial Sequence: Synthetic oligonucleotide
  Antisense strand to SEQ ID NO: 1813073
accuauacucaggauaaga

SEQ ID NO: 1813075 - RNA, 19 nt, Artificial Sequence
  Description of Artificial Sequence: Synthetic oligonucleotide
  Sense strand starting at position 3608 of SEQ ID NO: 1563468
gaguauagguguccaguua

SEQ ID NO: 1813076 - RNA, 19 nt, Artificial Sequence
  Description of Artificial Sequence: Synthetic oligonucleotide
  Antisense strand to SEQ ID NO: 1813075
uaacuggacaccuauacuc

SEQ ID NO: 1813077 - RNA, 19 nt, Artificial Sequence
  Description of Artificial Sequence: Synthetic oligonucleotide
  Sense strand starting at position 3609 of SEQ ID NO: 1563468
aguauagguguccaguuau

SEQ ID NO: 1813078 - RNA, 19 nt, Artificial Sequence
  Description of Artificial Sequence: Synthetic oligonucleotide
  Antisense strand to SEQ ID NO: 1813077
auaacuggacaccuauacu

SEQ ID NO: 1813079 - RNA, 19 nt, Artificial Sequence
  Description of Artificial Sequence: Synthetic oligonucleotide
  Sense strand starting at position 3817 of SEQ ID NO: 1563468
ccauuucgcuuugcucuaa

SEQ ID NO: 1813080 - RNA, 19 nt, Artificial Sequence
  Description of Artificial Sequence: Synthetic oligonucleotide
  Antisense strand to SEQ ID NO: 1813079
uuagagcaaagcgaaaugg

SEQ ID NO: 1813081 - RNA, 19 nt, Artificial Sequence
  Description of Artificial Sequence: Synthetic oligonucleotide
  Sense strand starting at position 3821 of SEQ ID NO: 1563468
uucgcuuugcucuaaagga

SEQ ID NO: 1813082 - RNA, 19 nt, Artificial Sequence
  Description of Artificial Sequence: Synthetic oligonucleotide
  Antisense strand to SEQ ID NO: 1813081
uccuuuagagcaaagcgaa

SEQ ID NO: 1813083 - RNA, 19 nt, Artificial Sequence
  Description of Artificial Sequence: Synthetic oligonucleotide
  Sense strand starting at position 3870 of SEQ ID NO: 1563468
aaugguuuacuugguuaaa

SEQ ID NO: 1813084 - RNA, 19 nt, Artificial Sequence
  Description of Artificial Sequence: Synthetic oligonucleotide
  Antisense strand to SEQ ID NO: 1813083
uuuaaccaaguaaaccauu

SEQ ID NO: 1813085 - RNA, 19 nt, Artificial Sequence
  Description of Artificial Sequence: Synthetic oligonucleotide
  Sense strand starting at position 3949 of SEQ ID NO: 1563468
agcuuuaaucauggcagaa

SEQ ID NO: 1813086 - RNA, 19 nt, Artificial Sequence
  Description of Artificial Sequence: Synthetic oligonucleotide
  Antisense strand to SEQ ID NO: 1813085
uucugccaugauuaaagcu

SEQ ID NO: 1813087 - RNA, 19 nt, Artificial Sequence
  Description of Artificial Sequence: Synthetic oligonucleotide
  Sense strand starting at position 9 of SEQ ID NO: 1563469
agggaagcauccucaguau

SEQ ID NO: 1813088 - RNA, 19 nt, Artificial Sequence
  Description of Artificial Sequence: Synthetic oligonucleotide
  Antisense strand to SEQ ID NO: 1813087
auacugaggaugcuucccu

SEQ ID NO: 1813089 - RNA, 19 nt, Artificial Sequence
  Description of Artificial Sequence: Synthetic oligonucleotide
  Sense strand starting at position 15 of SEQ ID NO: 1563469
gcauccucaguauaauuga

SEQ ID NO: 1813090 - RNA, 19 nt, Artificial Sequence
  Description of Artificial Sequence: Synthetic oligonucleotide
  Antisense strand to SEQ ID NO: 1813089
ucaauuauacugaggaugc

SEQ ID NO: 1813091 - RNA, 19 nt, Artificial Sequence
  Description of Artificial Sequence: Synthetic oligonucleotide
  Sense strand starting at position 95 of SEQ ID NO: 1563469
agacucuauggcuggguaa

SEQ ID NO: 1813092 - RNA, 19 nt, Artificial Sequence
  Description of Artificial Sequence: Synthetic oligonucleotide
  Antisense strand to SEQ ID NO: 1813091
uuacccagccauagagucu

SEQ ID NO: 1813093 - RNA, 19 nt, Artificial Sequence
  Description of Artificial Sequence: Synthetic oligonucleotide
  Sense strand starting at position 174 of SEQ ID NO: 1563469
uuggcaaucuacucagaaa

SEQ ID NO: 1813094 - RNA, 19 nt, Artificial Sequence
  Description of Artificial Sequence: Synthetic oligonucleotide
  Antisense strand to SEQ ID NO: 1813093
uuucugaguagauugccaa

SEQ ID NO: 1813095 - RNA, 19 nt, Artificial Sequence
  Description of Artificial Sequence: Synthetic oligonucleotide
  Sense strand starting at position 236 of SEQ ID NO: 1563469
uagguauagugagucaaau

SEQ ID NO: 1813096 - RNA, 19 nt, Artificial Sequence
  Description of Artificial Sequence: Synthetic oligonucleotide
  Antisense strand to SEQ ID NO: 1813095
auuugacucacuauaccua

SEQ ID NO: 1813097 - RNA, 19 nt, Artificial Sequence
  Description of Artificial Sequence: Synthetic oligonucleotide
  Sense strand starting at position 265 of SEQ ID NO: 1563469
uaggaauggucuuuauuaa

SEQ ID NO: 1813098 - RNA, 19 nt, Artificial Sequence
  Description of Artificial Sequence: Synthetic oligonucleotide
  Antisense strand to SEQ ID NO: 1813097
uuaauaaagaccauuccua

SEQ ID NO: 1813099 - RNA, 19 nt, Artificial Sequence
  Description of Artificial Sequence: Synthetic oligonucleotide
  Sense strand starting at position 401 of SEQ ID NO: 1563469
agaauaauccucugugaau

SEQ ID NO: 1813100 - RNA, 19 nt, Artificial Sequence
  Description of Artificial Sequence: Synthetic oligonucleotide
  Antisense strand to SEQ ID NO: 1813099
auucacagaggauuauucu

SEQ ID NO: 1813101 - RNA, 19 nt, Artificial Sequence
  Description of Artificial Sequence: Synthetic oligonucleotide
  Sense strand starting at position 412 of SEQ ID NO: 1563469
cugugaauauguccaggaa

SEQ ID NO: 1813102 - RNA, 19 nt, Artificial Sequence
  Description of Artificial Sequence: Synthetic oligonucleotide
  Antisense strand to SEQ ID NO: 1813101
uuccuggacauauucacag

SEQ ID NO: 1813103 - RNA, 19 nt, Artificial Sequence
  Description of Artificial Sequence: Synthetic oligonucleotide
  Sense strand starting at position 415 of SEQ ID NO: 1563469
ugaauauguccaggaaauc

SEQ ID NO: 1813104 - RNA, 19 nt, Artificial Sequence
  Description of Artificial Sequence: Synthetic oligonucleotide
  Antisense strand to SEQ ID NO: 1813103
gauuuccuggacauauuca

SEQ ID NO: 1813105 - RNA, 19 nt, Artificial Sequence
  Description of Artificial Sequence: Synthetic oligonucleotide
  Sense strand starting at position 426 of SEQ ID NO: 1563469
aggaaauccugcucuuagg

SEQ ID NO: 1813106 - RNA, 19 nt, Artificial Sequence
  Description of Artificial Sequence: Synthetic oligonucleotide
  Antisense strand to SEQ ID NO: 1813105
ccuaagagcaggauuuccu

SEQ ID NO: 1813107 - RNA, 19 nt, Artificial Sequence
  Description of Artificial Sequence: Synthetic oligonucleotide
  Sense strand starting at position 547 of SEQ ID NO: 1563469
ucguuauacccuuaaugau

SEQ ID NO: 1813108 - RNA, 19 nt, Artificial Sequence
  Description of Artificial Sequence: Synthetic oligonucleotide
  Antisense strand to SEQ ID NO: 1813107
aucauuaaggguauaacga

SEQ ID NO: 1813109 - RNA, 19 nt, Artificial Sequence
  Description of Artificial Sequence: Synthetic oligonucleotide
  Sense strand starting at position 711 of SEQ ID NO: 1563469
acugaagggugauugcuaa

SEQ ID NO: 1813110 - RNA, 19 nt, Artificial Sequence
  Description of Artificial Sequence: Synthetic oligonucleotide
  Antisense strand to SEQ ID NO: 1813109
uuagcaaucacccuucagu

SEQ ID NO: 1813111 - RNA, 19 nt, Artificial Sequence
  Description of Artificial Sequence: Synthetic oligonucleotide
  Sense strand starting at position 736 of SEQ ID NO: 1563469
uguugaugucuauagcauu

SEQ ID NO: 1813112 - RNA, 19 nt, Artificial Sequence
  Description of Artificial Sequence: Synthetic oligonucleotide
  Antisense strand to SEQ ID NO: 1813111
aaugcuauagacaucaaca

SEQ ID NO: 1813113 - RNA, 19 nt, Artificial Sequence
  Description of Artificial Sequence: Synthetic oligonucleotide
  Sense strand starting at position 742 of SEQ ID NO: 1563469
ugucuauagcauuagaaau

SEQ ID NO: 1813114 - RNA, 19 nt, Artificial Sequence
  Description of Artificial Sequence: Synthetic oligonucleotide
  Antisense strand to SEQ ID NO: 1813113
auuucuaaugcuauagaca

SEQ ID NO: 1813115 - RNA, 19 nt, Artificial Sequence
  Description of Artificial Sequence: Synthetic oligonucleotide
  Sense strand starting at position 822 of SEQ ID NO: 1563469
cgaagaauguaaccauaac

SEQ ID NO: 1813116 - RNA, 19 nt, Artificial Sequence
  Description of Artificial Sequence: Synthetic oligonucleotide
  Antisense strand to SEQ ID NO: 1813115
guuaugguuacauucuucg

SEQ ID NO: 1813117 - RNA, 19 nt, Artificial Sequence
  Description of Artificial Sequence: Synthetic oligonucleotide
  Sense strand starting at position 912 of SEQ ID NO: 1563469
ccgaucuuccuggauccau

SEQ ID NO: 1813118 - RNA, 19 nt, Artificial Sequence
  Description of Artificial Sequence: Synthetic oligonucleotide
  Antisense strand to SEQ ID NO: 1813117
auggauccaggaagaucgg

SEQ ID NO: 1813119 - RNA, 19 nt, Artificial Sequence
  Description of Artificial Sequence: Synthetic oligonucleotide
  Sense strand starting at position 922 of SEQ ID NO: 1563469
uggauccaucaauggugua

SEQ ID NO: 1813120 - RNA, 19 nt, Artificial Sequence
  Description of Artificial Sequence: Synthetic oligonucleotide
  Antisense strand to SEQ ID NO: 1813119
uacaccauugauggaucca

SEQ ID NO: 1813121 - RNA, 19 nt, Artificial Sequence
  Description of Artificial Sequence: Synthetic oligonucleotide
  Sense strand starting at position 923 of SEQ ID NO: 1563469
ggauccaucaaugguguaa

SEQ ID NO: 1813122 - RNA, 19 nt, Artificial Sequence
  Description of Artificial Sequence: Synthetic oligonucleotide
  Antisense strand to SEQ ID NO: 1813121
uuacaccauugauggaucc

SEQ ID NO: 1813123 - RNA, 19 nt, Artificial Sequence
  Description of Artificial Sequence: Synthetic oligonucleotide
  Sense strand starting at position 1546 of SEQ ID NO: 1563469
ggcacuguuccagacagag

SEQ ID NO: 1813124 - RNA, 19 nt, Artificial Sequence
  Description of Artificial Sequence: Synthetic oligonucleotide
  Antisense strand to SEQ ID NO: 1813123
cucugucuggaacagugcc

SEQ ID NO: 1813125 - RNA, 19 nt, Artificial Sequence
  Description of Artificial Sequence: Synthetic oligonucleotide
  Sense strand starting at position 1630 of SEQ ID NO: 1563469
ggaacuucgggcuaaauac

SEQ ID NO: 1813126 - RNA, 19 nt, Artificial Sequence
  Description of Artificial Sequence: Synthetic oligonucleotide
  Antisense strand to SEQ ID NO: 1813125
guauuuagcccgaaguucc

SEQ ID NO: 1813127 - RNA, 19 nt, Artificial Sequence
  Description of Artificial Sequence: Synthetic oligonucleotide
  Sense strand starting at position 2171 of SEQ ID NO: 1563469
acaaaugacucuccgaaca

SEQ ID NO: 1813128 - RNA, 19 nt, Artificial Sequence
  Description of Artificial Sequence: Synthetic oligonucleotide
  Antisense strand to SEQ ID NO: 1813127
uguucggagagucauuugu

SEQ ID NO: 1813129 - RNA, 19 nt, Artificial Sequence
  Description of Artificial Sequence: Synthetic oligonucleotide
  Sense strand starting at position 2230 of SEQ ID NO: 1563469
cuggguuucuaccuuaauu

SEQ ID NO: 1813130 - RNA, 19 nt, Artificial Sequence
  Description of Artificial Sequence: Synthetic oligonucleotide
  Antisense strand to SEQ ID NO: 1813129
aauuaagguagaaacccag

SEQ ID NO: 1813131 - RNA, 19 nt, Artificial Sequence
  Description of Artificial Sequence: Synthetic oligonucleotide
  Sense strand starting at position 2232 of SEQ ID NO: 1563469
ggguuucuaccuuaauuga

SEQ ID NO: 1813132 - RNA, 19 nt, Artificial Sequence
  Description of Artificial Sequence: Synthetic oligonucleotide
  Antisense strand to SEQ ID NO: 1813131
ucaauuaagguagaaaccc

SEQ ID NO: 1813133 - RNA, 19 nt, Artificial Sequence
  Description of Artificial Sequence: Synthetic oligonucleotide
  Sense strand starting at position 2303 of SEQ ID NO: 1563469
aggugcauuagcugagaaa

SEQ ID NO: 1813134 - RNA, 19 nt, Artificial Sequence
  Description of Artificial Sequence: Synthetic oligonucleotide
  Antisense strand to SEQ ID NO: 1813133
uuucucagcuaaugcaccu

SEQ ID NO: 1813135 - RNA, 19 nt, Artificial Sequence
  Description of Artificial Sequence: Synthetic oligonucleotide
  Sense strand starting at position 2541 of SEQ ID NO: 1563469
ucaauauauuugcaaggga

SEQ ID NO: 1813136 - RNA, 19 nt, Artificial Sequence
  Description of Artificial Sequence: Synthetic oligonucleotide
  Antisense strand to SEQ ID NO: 1813135
ucccuugcaaauauauuga

SEQ ID NO: 1813137 - RNA, 19 nt, Artificial Sequence
  Description of Artificial Sequence: Synthetic oligonucleotide
  Sense strand starting at position 2736 of SEQ ID NO: 1563469
gccaguaaggcuuugcuuu

SEQ ID NO: 1813138 - RNA, 19 nt, Artificial Sequence
  Description of Artificial Sequence: Synthetic oligonucleotide
  Antisense strand to SEQ ID NO: 1813137
aaagcaaagccuuacuggc

SEQ ID NO: 1813139 - RNA, 19 nt, Artificial Sequence
  Description of Artificial Sequence: Synthetic oligonucleotide
  Sense strand starting at position 2767 of SEQ ID NO: 1563469
gagguaguauuauucuaaa

SEQ ID NO: 1813140 - RNA, 19 nt, Artificial Sequence
  Description of Artificial Sequence: Synthetic oligonucleotide
  Antisense strand to SEQ ID NO: 1813139
uuuagaauaauacuaccuc

SEQ ID NO: 1813141 - RNA, 19 nt, Artificial Sequence
  Description of Artificial Sequence: Synthetic oligonucleotide
  Sense strand starting at position 3054 of SEQ ID NO: 1563469
uugucugagcuccaagcaa

SEQ ID NO: 1813142 - RNA, 19 nt, Artificial Sequence
  Description of Artificial Sequence: Synthetic oligonucleotide
  Antisense strand to SEQ ID NO: 1813141
uugcuuggagcucagacaa

SEQ ID NO: 1813143 - RNA, 19 nt, Artificial Sequence
  Description of Artificial Sequence: Synthetic oligonucleotide
  Sense strand starting at position 3136 of SEQ ID NO: 1563469
guaacucaggcuuagugaa

SEQ ID NO: 1813144 - RNA, 19 nt, Artificial Sequence
  Description of Artificial Sequence: Synthetic oligonucleotide
  Antisense strand to SEQ ID NO: 1813143
uucacuaagccugaguuac

SEQ ID NO: 1813145 - RNA, 19 nt, Artificial Sequence
  Description of Artificial Sequence: Synthetic oligonucleotide
  Sense strand starting at position 3625 of SEQ ID NO: 1563469
aucagcuugguguaagaau

SEQ ID NO: 1813146 - RNA, 19 nt, Artificial Sequence
  Description of Artificial Sequence: Synthetic oligonucleotide
  Antisense strand to SEQ ID NO: 1813145
auucuuacaccaagcugau

SEQ ID NO: 1813147 - RNA, 19 nt, Artificial Sequence
  Description of Artificial Sequence: Synthetic oligonucleotide
  Sense strand starting at position 3640 of SEQ ID NO: 1563469
gaauuugguuaaugaaagg

SEQ ID NO: 1813148 - RNA, 19 nt, Artificial Sequence
  Description of Artificial Sequence: Synthetic oligonucleotide
  Antisense strand to SEQ ID NO: 1813147
ccuuucauuaaccaaauuc

SEQ ID NO: 1813149 - RNA, 19 nt, Artificial Sequence
  Description of Artificial Sequence: Synthetic oligonucleotide
  Sense strand starting at position 3645 of SEQ ID NO: 1563469
ugguuaaugaaagguuaau

SEQ ID NO: 1813150 - RNA, 19 nt, Artificial Sequence
  Description of Artificial Sequence: Synthetic oligonucleotide
  Antisense strand to SEQ ID NO: 1813149
auuaaccuuucauuaacca

SEQ ID NO: 1813151 - RNA, 19 nt, Artificial Sequence
  Description of Artificial Sequence: Synthetic oligonucleotide
  Sense strand starting at position 3707 of SEQ ID NO: 1563469
aagaccuuucuaugugaag

SEQ ID NO: 1813152 - RNA, 19 nt, Artificial Sequence
  Description of Artificial Sequence: Synthetic oligonucleotide
  Antisense strand to SEQ ID NO: 1813151
cuucacauagaaaggucuu

SEQ ID NO: 1813153 - RNA, 19 nt, Artificial Sequence
  Description of Artificial Sequence: Synthetic oligonucleotide
  Sense strand starting at position 3708 of SEQ ID NO: 1563469
agaccuuucuaugugaagu

SEQ ID NO: 1813154 - RNA, 19 nt, Artificial Sequence
  Description of Artificial Sequence: Synthetic oligonucleotide
  Antisense strand to SEQ ID NO: 1813153
acuucacauagaaaggucu

SEQ ID NO: 1813155 - RNA, 19 nt, Artificial Sequence
  Description of Artificial Sequence: Synthetic oligonucleotide
  Sense strand starting at position 3724 of SEQ ID NO: 1563469
aguaaaucugauggcuaca

SEQ ID NO: 1813156 - RNA, 19 nt, Artificial Sequence
  Description of Artificial Sequence: Synthetic oligonucleotide
  Antisense strand to SEQ ID NO: 1813155
uguagccaucagauuuacu

SEQ ID NO: 1813157 - RNA, 19 nt, Artificial Sequence
  Description of Artificial Sequence: Synthetic oligonucleotide
  Sense strand starting at position 3774 of SEQ ID NO: 1563469
gcuuauuugucacuaacug

SEQ ID NO: 1813158 - RNA, 19 nt, Artificial Sequence
  Description of Artificial Sequence: Synthetic oligonucleotide
  Antisense strand to SEQ ID NO: 1813157
caguuagugacaaauaagc

SEQ ID NO: 1813159 - RNA, 19 nt, Artificial Sequence
  Description of Artificial Sequence: Synthetic oligonucleotide
  Sense strand starting at position 3851 of SEQ ID NO: 1563469
auuagaucaggccgaacua

SEQ ID NO: 1813160 - RNA, 19 nt, Artificial Sequence
  Description of Artificial Sequence: Synthetic oligonucleotide
  Antisense strand to SEQ ID NO: 1813159
uaguucggccugaucuaau

SEQ ID NO: 1813161 - RNA, 19 nt, Artificial Sequence
  Description of Artificial Sequence: Synthetic oligonucleotide
  Sense strand starting at position 3852 of SEQ ID NO: 1563469
uuagaucaggccgaacuau

SEQ ID NO: 1813162 - RNA, 19 nt, Artificial Sequence
  Description of Artificial Sequence: Synthetic oligonucleotide
  Antisense strand to SEQ ID NO: 1813161
auaguucggccugaucuaa

SEQ ID NO: 1813163 - RNA, 19 nt, Artificial Sequence
  Description of Artificial Sequence: Synthetic oligonucleotide
  Sense strand starting at position 3951 of SEQ ID NO: 1563469
uguagcagccuugaacuau

SEQ ID NO: 1813164 - RNA, 19 nt, Artificial Sequence
  Description of Artificial Sequence: Synthetic oligonucleotide
  Antisense strand to SEQ ID NO: 1813163
auaguucaaggcugcuaca

SEQ ID NO: 1813165 - RNA, 19 nt, Artificial Sequence
  Description of Artificial Sequence: Synthetic oligonucleotide
  Sense strand starting at position 3961 of SEQ ID NO: 1563469
uugaacuaucaugguucua

SEQ ID NO: 1813166 - RNA, 19 nt, Artificial Sequence
  Description of Artificial Sequence: Synthetic oligonucleotide
  Antisense strand to SEQ ID NO: 1813165
uagaaccaugauaguucaa

SEQ ID NO: 1813167 - RNA, 19 nt, Artificial Sequence
  Description of Artificial Sequence: Synthetic oligonucleotide
  Sense strand starting at position 460 of SEQ ID NO: 1563470
ggcacuguuccagacagag

SEQ ID NO: 1813168 - RNA, 19 nt, Artificial Sequence
  Description of Artificial Sequence: Synthetic oligonucleotide
  Antisense strand to SEQ ID NO: 1813167
cucugucuggaacagugcc

SEQ ID NO: 1813169 - RNA, 19 nt, Artificial Sequence
  Description of Artificial Sequence: Synthetic oligonucleotide
  Sense strand starting at position 544 of SEQ ID NO: 1563470
ggaacuucgggcuaaauac

SEQ ID NO: 1813170 - RNA, 19 nt, Artificial Sequence
  Description of Artificial Sequence: Synthetic oligonucleotide
  Antisense strand to SEQ ID NO: 1813169
guauuuagcccgaaguucc

SEQ ID NO: 1813171 - RNA, 19 nt, Artificial Sequence
  Description of Artificial Sequence: Synthetic oligonucleotide
  Sense strand starting at position 1085 of SEQ ID NO: 1563470
acaaaugacucuccgaaca

SEQ ID NO: 1813172 - RNA, 19 nt, Artificial Sequence
  Description of Artificial Sequence: Synthetic oligonucleotide
  Antisense strand to SEQ ID NO: 1813171
uguucggagagucauuugu

SEQ ID NO: 1813173 - RNA, 19 nt, Artificial Sequence
  Description of Artificial Sequence: Synthetic oligonucleotide
  Sense strand starting at position 1144 of SEQ ID NO: 1563470
cuggguuucuaccuuaauu

SEQ ID NO: 1813174 - RNA, 19 nt, Artificial Sequence
  Description of Artificial Sequence: Synthetic oligonucleotide
  Antisense strand to SEQ ID NO: 1813173
aauuaagguagaaacccag

SEQ ID NO: 1813175 - RNA, 19 nt, Artificial Sequence
  Description of Artificial Sequence: Synthetic oligonucleotide
  Sense strand starting at position 1146 of SEQ ID NO: 1563470
ggguuucuaccuuaauuga

SEQ ID NO: 1813176 - RNA, 19 nt, Artificial Sequence
  Description of Artificial Sequence: Synthetic oligonucleotide
  Antisense strand to SEQ ID NO: 1813175
ucaauuaagguagaaaccc

SEQ ID NO: 1813177 - RNA, 19 nt, Artificial Sequence
  Description of Artificial Sequence: Synthetic oligonucleotide
  Sense strand starting at position 1217 of SEQ ID NO: 1563470
aggugcauuagcugagaaa

SEQ ID NO: 1813178 - RNA, 19 nt, Artificial Sequence
  Description of Artificial Sequence: Synthetic oligonucleotide
  Antisense strand to SEQ ID NO: 1813177
uuucucagcuaaugcaccu

SEQ ID NO: 1813179 - RNA, 19 nt, Artificial Sequence
  Description of Artificial Sequence: Synthetic oligonucleotide
  Sense strand starting at position 1455 of SEQ ID NO: 1563470
ucaauauauuugcaaggga

SEQ ID NO: 1813180 - RNA, 19 nt, Artificial Sequence
  Description of Artificial Sequence: Synthetic oligonucleotide
  Antisense strand to SEQ ID NO: 1813179
ucccuugcaaauauauuga

SEQ ID NO: 1813181 - RNA, 19 nt, Artificial Sequence
  Description of Artificial Sequence: Synthetic oligonucleotide
  Sense strand starting at position 1650 of SEQ ID NO: 1563470
gccaguaaggcuuugcuuu

SEQ ID NO: 1813182 - RNA, 19 nt, Artificial Sequence
  Description of Artificial Sequence: Synthetic oligonucleotide
  Antisense strand to SEQ ID NO: 1813181
aaagcaaagccuuacuggc

SEQ ID NO: 1813183 - RNA, 19 nt, Artificial Sequence
  Description of Artificial Sequence: Synthetic oligonucleotide
  Sense strand starting at position 1681 of SEQ ID NO: 1563470
gagguaguauuauucuaaa

SEQ ID NO: 1813184 - RNA, 19 nt, Artificial Sequence
  Description of Artificial Sequence: Synthetic oligonucleotide
  Antisense strand to SEQ ID NO: 1813183
uuuagaauaauacuaccuc

SEQ ID NO: 1813185 - RNA, 19 nt, Artificial Sequence
  Description of Artificial Sequence: Synthetic oligonucleotide
  Sense strand starting at position 1968 of SEQ ID NO: 1563470
uugucugagcuccaagcaa

SEQ ID NO: 1813186 - RNA, 19 nt, Artificial Sequence
  Description of Artificial Sequence: Synthetic oligonucleotide
  Antisense strand to SEQ ID NO: 1813185
uugcuuggagcucagacaa

SEQ ID NO: 1813187 - RNA, 19 nt, Artificial Sequence
  Description of Artificial Sequence: Synthetic oligonucleotide
  Sense strand starting at position 2050 of SEQ ID NO: 1563470
guaacucaggcuuagugaa

SEQ ID NO: 1813188 - RNA, 19 nt, Artificial Sequence
  Description of Artificial Sequence: Synthetic oligonucleotide
  Antisense strand to SEQ ID NO: 1813187
uucacuaagccugaguuac

SEQ ID NO: 1813189 - RNA, 19 nt, Artificial Sequence
  Description of Artificial Sequence: Synthetic oligonucleotide
  Sense strand starting at position 2539 of SEQ ID NO: 1563470
aucagcuugguguaagaau

SEQ ID NO: 1813190 - RNA, 19 nt, Artificial Sequence
  Description of Artificial Sequence: Synthetic oligonucleotide
  Antisense strand to SEQ ID NO: 1813189
auucuuacaccaagcugau

SEQ ID NO: 1813191 - RNA, 19 nt, Artificial Sequence
  Description of Artificial Sequence: Synthetic oligonucleotide
  Sense strand starting at position 2554 of SEQ ID NO: 1563470
gaauuugguuaaugaaagg

SEQ ID NO: 1813192 - RNA, 19 nt, Artificial Sequence
  Description of Artificial Sequence: Synthetic oligonucleotide
  Antisense strand to SEQ ID NO: 1813191
ccuuucauuaaccaaauuc

SEQ ID NO: 1813193 - RNA, 19 nt, Artificial Sequence
  Description of Artificial Sequence: Synthetic oligonucleotide
  Sense strand starting at position 2559 of SEQ ID NO: 1563470
ugguuaaugaaagguuaau

SEQ ID NO: 1813194 - RNA, 19 nt, Artificial Sequence
  Description of Artificial Sequence: Synthetic oligonucleotide
  Antisense strand to SEQ ID NO: 1813193
auuaaccuuucauuaacca

SEQ ID NO: 1813195 - RNA, 19 nt, Artificial Sequence
  Description of Artificial Sequence: Synthetic oligonucleotide
  Sense strand starting at position 2621 of SEQ ID NO: 1563470
aagaccuuucuaugugaag

SEQ ID NO: 1813196 - RNA, 19 nt, Artificial Sequence
  Description of Artificial Sequence: Synthetic oligonucleotide
  Antisense strand to SEQ ID NO: 1813195
cuucacauagaaaggucuu

SEQ ID NO: 1813197 - RNA, 19 nt, Artificial Sequence
  Description of Artificial Sequence: Synthetic oligonucleotide
  Sense strand starting at position 2622 of SEQ ID NO: 1563470
agaccuuucuaugugaagu

SEQ ID NO: 1813198 - RNA, 19 nt, Artificial Sequence
  Description of Artificial Sequence: Synthetic oligonucleotide
  Antisense strand to SEQ ID NO: 1813197
acuucacauagaaaggucu

SEQ ID NO: 1813199 - RNA, 19 nt, Artificial Sequence
  Description of Artificial Sequence: Synthetic oligonucleotide
  Sense strand starting at position 2638 of SEQ ID NO: 1563470
aguaaaucugauggcuaca

SEQ ID NO: 1813200 - RNA, 19 nt, Artificial Sequence
  Description of Artificial Sequence: Synthetic oligonucleotide
  Antisense strand to SEQ ID NO: 1813199
uguagccaucagauuuacu

SEQ ID NO: 1813201 - RNA, 19 nt, Artificial Sequence
  Description of Artificial Sequence: Synthetic oligonucleotide
  Sense strand starting at position 2688 of SEQ ID NO: 1563470
gcuuauuugucacuaacug

SEQ ID NO: 1813202 - RNA, 19 nt, Artificial Sequence
  Description of Artificial Sequence: Synthetic oligonucleotide
  Antisense strand to SEQ ID NO: 1813201
caguuagugacaaauaagc

SEQ ID NO: 1813203 - RNA, 19 nt, Artificial Sequence
  Description of Artificial Sequence: Synthetic oligonucleotide
  Sense strand starting at position 2765 of SEQ ID NO: 1563470
auuagaucaggccgaacua

SEQ ID NO: 1813204 - RNA, 19 nt, Artificial Sequence
  Description of Artificial Sequence: Synthetic oligonucleotide
  Antisense strand to SEQ ID NO: 1813203
uaguucggccugaucuaau

SEQ ID NO: 1813205 - RNA, 19 nt, Artificial Sequence
  Description of Artificial Sequence: Synthetic oligonucleotide
  Sense strand starting at position 2766 of SEQ ID NO: 1563470
uuagaucaggccgaacuau

SEQ ID NO: 1813206 - RNA, 19 nt, Artificial Sequence
  Description of Artificial Sequence: Synthetic oligonucleotide
  Antisense strand to SEQ ID NO: 1813205
auaguucggccugaucuaa

SEQ ID NO: 1813207 - RNA, 19 nt, Artificial Sequence
  Description of Artificial Sequence: Synthetic oligonucleotide
  Sense strand starting at position 2865 of SEQ ID NO: 1563470
uguagcagccuugaacuau

SEQ ID NO: 1813208 - RNA, 19 nt, Artificial Sequence
  Description of Artificial Sequence: Synthetic oligonucleotide
  Antisense strand to SEQ ID NO: 1813207
auaguucaaggcugcuaca

SEQ ID NO: 1813209 - RNA, 19 nt, Artificial Sequence
  Description of Artificial Sequence: Synthetic oligonucleotide
  Sense strand starting at position 2875 of SEQ ID NO: 1563470
uugaacuaucaugguucua

SEQ ID NO: 1813210 - RNA, 19 nt, Artificial Sequence
  Description of Artificial Sequence: Synthetic oligonucleotide
  Antisense strand to SEQ ID NO: 1813209
uagaaccaugauaguucaa

SEQ ID NO: 1813211 - RNA, 19 nt, Artificial Sequence
  Description of Artificial Sequence: Synthetic oligonucleotide
  Sense strand starting at position 2927 of SEQ ID NO: 1563470
gagcaugcucaguaauuau

SEQ ID NO: 1813212 - RNA, 19 nt, Artificial Sequence
  Description of Artificial Sequence: Synthetic oligonucleotide
  Antisense strand to SEQ ID NO: 1813211
auaauuacugagcaugcuc

SEQ ID NO: 1813213 - RNA, 19 nt, Artificial Sequence
  Description of Artificial Sequence: Synthetic oligonucleotide
  Sense strand starting at position 3065 of SEQ ID NO: 1563470
auaugauggucuuucuucu

SEQ ID NO: 1813214 - RNA, 19 nt, Artificial Sequence
  Description of Artificial Sequence: Synthetic oligonucleotide
  Antisense strand to SEQ ID NO: 1813213
agaagaaagaccaucauau

SEQ ID NO: 1813215 - RNA, 19 nt, Artificial Sequence
  Description of Artificial Sequence: Synthetic oligonucleotide
  Sense strand starting at position 3072 of SEQ ID NO: 1563470
ggucuuucuucugugaaag

SEQ ID NO: 1813216 - RNA, 19 nt, Artificial Sequence
  Description of Artificial Sequence: Synthetic oligonucleotide
  Antisense strand to SEQ ID NO: 1813215
cuuucacagaagaaagacc

SEQ ID NO: 1813217 - RNA, 19 nt, Artificial Sequence
  Description of Artificial Sequence: Synthetic oligonucleotide
  Sense strand starting at position 3119 of SEQ ID NO: 1563470
cuguuaguugaguggauag

SEQ ID NO: 1813218 - RNA, 19 nt, Artificial Sequence
  Description of Artificial Sequence: Synthetic oligonucleotide
  Antisense strand to SEQ ID NO: 1813217
cuauccacucaacuaacag

SEQ ID NO: 1813219 - RNA, 19 nt, Artificial Sequence
  Description of Artificial Sequence: Synthetic oligonucleotide
  Sense strand starting at position 3129 of SEQ ID NO: 1563470
aguggauagccucaaaugu

SEQ ID NO: 1813220 - RNA, 19 nt, Artificial Sequence
  Description of Artificial Sequence: Synthetic oligonucleotide
  Antisense strand to SEQ ID NO: 1813219
acauuugaggcuauccacu

SEQ ID NO: 1813221 - RNA, 19 nt, Artificial Sequence
  Description of Artificial Sequence: Synthetic oligonucleotide
  Sense strand starting at position 3137 of SEQ ID NO: 1563470
gccucaaaugugcaaccua

SEQ ID NO: 1813222 - RNA, 19 nt, Artificial Sequence
  Description of Artificial Sequence: Synthetic oligonucleotide
  Antisense strand to SEQ ID NO: 1813221
uagguugcacauuugaggc

SEQ ID NO: 1813223 - RNA, 19 nt, Artificial Sequence
  Description of Artificial Sequence: Synthetic oligonucleotide
  Sense strand starting at position 3181 of SEQ ID NO: 1563470
gcugcugauuucuugguua

SEQ ID NO: 1813224 - RNA, 19 nt, Artificial Sequence
  Description of Artificial Sequence: Synthetic oligonucleotide
  Antisense strand to SEQ ID NO: 1813223
uaaccaagaaaucagcagc

SEQ ID NO: 1813225 - RNA, 19 nt, Artificial Sequence
  Description of Artificial Sequence: Synthetic oligonucleotide
  Sense strand starting at position 3183 of SEQ ID NO: 1563470
ugcugauuucuugguuacu

SEQ ID NO: 1813226 - RNA, 19 nt, Artificial Sequence
  Description of Artificial Sequence: Synthetic oligonucleotide
  Antisense strand to SEQ ID NO: 1813225
aguaaccaagaaaucagca

SEQ ID NO: 1813227 - RNA, 19 nt, Artificial Sequence
  Description of Artificial Sequence: Synthetic oligonucleotide
  Sense strand starting at position 3184 of SEQ ID NO: 1563470
gcugauuucuugguuacua

SEQ ID NO: 1813228 - RNA, 19 nt, Artificial Sequence
  Description of Artificial Sequence: Synthetic oligonucleotide
  Antisense strand to SEQ ID NO: 1813227
uaguaaccaagaaaucagc

SEQ ID NO: 1813229 - RNA, 19 nt, Artificial Sequence
  Description of Artificial Sequence: Synthetic oligonucleotide
  Sense strand starting at position 3465 of SEQ ID NO: 1563470
aacaauggaugggauaaua

SEQ ID NO: 1813230 - RNA, 19 nt, Artificial Sequence
  Description of Artificial Sequence: Synthetic oligonucleotide
  Antisense strand to SEQ ID NO: 1813229
uauuaucccauccauuguu

SEQ ID NO: 1813231 - RNA, 19 nt, Artificial Sequence
  Description of Artificial Sequence: Synthetic oligonucleotide
  Sense strand starting at position 3662 of SEQ ID NO: 1563470
uugagauaugugggcauua

SEQ ID NO: 1813232 - RNA, 19 nt, Artificial Sequence
  Description of Artificial Sequence: Synthetic oligonucleotide
  Antisense strand to SEQ ID NO: 1813231
uaaugcccacauaucucaa

SEQ ID NO: 1813233 - RNA, 19 nt, Artificial Sequence
  Description of Artificial Sequence: Synthetic oligonucleotide
  Sense strand starting at position 3663 of SEQ ID NO: 1563470
ugagauaugugggcauuaa

SEQ ID NO: 1813234 - RNA, 19 nt, Artificial Sequence
  Description of Artificial Sequence: Synthetic oligonucleotide
  Antisense strand to SEQ ID NO: 1813233
uuaaugcccacauaucuca

SEQ ID NO: 1813235 - RNA, 19 nt, Artificial Sequence
  Description of Artificial Sequence: Synthetic oligonucleotide
  Sense strand starting at position 3677 of SEQ ID NO: 1563470
auuaauagguguuccuuaa

SEQ ID NO: 1813236 - RNA, 19 nt, Artificial Sequence
  Description of Artificial Sequence: Synthetic oligonucleotide
  Antisense strand to SEQ ID NO: 1813235
uuaaggaacaccuauuaau

SEQ ID NO: 1813237 - RNA, 19 nt, Artificial Sequence
  Description of Artificial Sequence: Synthetic oligonucleotide
  Sense strand starting at position 3741 of SEQ ID NO: 1563470
gcgcuaaacgaagauaauu

SEQ ID NO: 1813238 - RNA, 19 nt, Artificial Sequence
  Description of Artificial Sequence: Synthetic oligonucleotide
  Antisense strand to SEQ ID NO: 1813237
aauuaucuucguuuagcgc

SEQ ID NO: 1813239 - RNA, 19 nt, Artificial Sequence
  Description of Artificial Sequence: Synthetic oligonucleotide
  Sense strand starting at position 3890 of SEQ ID NO: 1563470
gacuaauguucugcaggga

SEQ ID NO: 1813240 - RNA, 19 nt, Artificial Sequence
  Description of Artificial Sequence: Synthetic oligonucleotide
  Antisense strand to SEQ ID NO: 1813239
ucccugcagaacauuaguc

SEQ ID NO: 1813241 - RNA, 19 nt, Artificial Sequence
  Description of Artificial Sequence: Synthetic oligonucleotide
  Sense strand starting at position 3891 of SEQ ID NO: 1563470
acuaauguucugcagggau

SEQ ID NO: 1813242 - RNA, 19 nt, Artificial Sequence
  Description of Artificial Sequence: Synthetic oligonucleotide
  Antisense strand to SEQ ID NO: 1813241
aucccugcagaacauuagu

SEQ ID NO: 1813243 - RNA, 19 nt, Artificial Sequence
  Description of Artificial Sequence: Synthetic oligonucleotide
  Sense strand starting at position 3893 of SEQ ID NO: 1563470
uaauguucugcagggauaa

SEQ ID NO: 1813244 - RNA, 19 nt, Artificial Sequence
  Description of Artificial Sequence: Synthetic oligonucleotide
  Antisense strand to SEQ ID NO: 1813243
uuaucccugcagaacauua

SEQ ID NO: 1813245 - RNA, 19 nt, Artificial Sequence
  Description of Artificial Sequence: Synthetic oligonucleotide
  Sense strand starting at position 3894 of SEQ ID NO: 1563470
aauguucugcagggauaaa

SEQ ID NO: 1813246 - RNA, 19 nt, Artificial Sequence
  Description of Artificial Sequence: Synthetic oligonucleotide
  Antisense strand to SEQ ID NO: 1813245
uuuaucccugcagaacauu

SEQ ID NO: 1813247 - RNA, 19 nt, Artificial Sequence
  Description of Artificial Sequence: Synthetic oligonucleotide
  Sense strand starting at position 501 of SEQ ID NO: 1563471
ggcacuguuccagacagag

SEQ ID NO: 1813248 - RNA, 19 nt, Artificial Sequence
  Description of Artificial Sequence: Synthetic oligonucleotide
  Antisense strand to SEQ ID NO: 1813247
cucugucuggaacagugcc

SEQ ID NO: 1813249 - RNA, 19 nt, Artificial Sequence
  Description of Artificial Sequence: Synthetic oligonucleotide
  Sense strand starting at position 585 of SEQ ID NO: 1563471
ggaacuucgggcuaaauac

SEQ ID NO: 1813250 - RNA, 19 nt, Artificial Sequence
  Description of Artificial Sequence: Synthetic oligonucleotide
  Antisense strand to SEQ ID NO: 1813249
guauuuagcccgaaguucc

SEQ ID NO: 1813251 - RNA, 19 nt, Artificial Sequence
  Description of Artificial Sequence: Synthetic oligonucleotide
  Sense strand starting at position 1126 of SEQ ID NO: 1563471
acaaaugacucuccgaaca

SEQ ID NO: 1813252 - RNA, 19 nt, Artificial Sequence
  Description of Artificial Sequence: Synthetic oligonucleotide
  Antisense strand to SEQ ID NO: 1813251
uguucggagagucauuugu

SEQ ID NO: 1813253 - RNA, 19 nt, Artificial Sequence
  Description of Artificial Sequence: Synthetic oligonucleotide
  Sense strand starting at position 1185 of SEQ ID NO: 1563471
cuggguuucuaccuuaauu

SEQ ID NO: 1813254 - RNA, 19 nt, Artificial Sequence
  Description of Artificial Sequence: Synthetic oligonucleotide
  Antisense strand to SEQ ID NO: 1813253
aauuaagguagaaacccag

SEQ ID NO: 1813255 - RNA, 19 nt, Artificial Sequence
  Description of Artificial Sequence: Synthetic oligonucleotide
  Sense strand starting at position 1187 of SEQ ID NO: 1563471
ggguuucuaccuuaauuga

SEQ ID NO: 1813256 - RNA, 19 nt, Artificial Sequence
  Description of Artificial Sequence: Synthetic oligonucleotide
  Antisense strand to SEQ ID NO: 1813255
ucaauuaagguagaaaccc

SEQ ID NO: 1813257 - RNA, 19 nt, Artificial Sequence
  Description of Artificial Sequence: Synthetic oligonucleotide
  Sense strand starting at position 1258 of SEQ ID NO: 1563471
aggugcauuagcugagaaa

SEQ ID NO: 1813258 - RNA, 19 nt, Artificial Sequence
  Description of Artificial Sequence: Synthetic oligonucleotide
  Antisense strand to SEQ ID NO: 1813257
uuucucagcuaaugcaccu

SEQ ID NO: 1813259 - RNA, 19 nt, Artificial Sequence
  Description of Artificial Sequence: Synthetic oligonucleotide
  Sense strand starting at position 1496 of SEQ ID NO: 1563471
ucaauauauuugcaaggga

SEQ ID NO: 1813260 - RNA, 19 nt, Artificial Sequence
  Description of Artificial Sequence: Synthetic oligonucleotide
  Antisense strand to SEQ ID NO: 1813259
ucccuugcaaauauauuga

SEQ ID NO: 1813261 - RNA, 19 nt, Artificial Sequence
  Description of Artificial Sequence: Synthetic oligonucleotide
  Sense strand starting at position 1691 of SEQ ID NO: 1563471
gccaguaaggcuuugcuuu

SEQ ID NO: 1813262 - RNA, 19 nt, Artificial Sequence
  Description of Artificial Sequence: Synthetic oligonucleotide
  Antisense strand to SEQ ID NO: 1813261
aaagcaaagccuuacuggc

SEQ ID NO: 1813263 - RNA, 19 nt, Artificial Sequence
  Description of Artificial Sequence: Synthetic oligonucleotide
  Sense strand starting at position 1722 of SEQ ID NO: 1563471
gagguaguauuauucuaaa

SEQ ID NO: 1813264 - RNA, 19 nt, Artificial Sequence
  Description of Artificial Sequence: Synthetic oligonucleotide
  Antisense strand to SEQ ID NO: 1813263
uuuagaauaauacuaccuc

SEQ ID NO: 1813265 - RNA, 19 nt, Artificial Sequence
  Description of Artificial Sequence: Synthetic oligonucleotide
  Sense strand starting at position 2009 of SEQ ID NO: 1563471
uugucugagcuccaagcaa

SEQ ID NO: 1813266 - RNA, 19 nt, Artificial Sequence
  Description of Artificial Sequence: Synthetic oligonucleotide
  Antisense strand to SEQ ID NO: 1813265
uugcuuggagcucagacaa

SEQ ID NO: 1813267 - RNA, 19 nt, Artificial Sequence
  Description of Artificial Sequence: Synthetic oligonucleotide
  Sense strand starting at position 2091 of SEQ ID NO: 1563471
guaacucaggcuuagugaa

SEQ ID NO: 1813268 - RNA, 19 nt, Artificial Sequence
  Description of Artificial Sequence: Synthetic oligonucleotide
  Antisense strand to SEQ ID NO: 1813267
uucacuaagccugaguuac

SEQ ID NO: 1813269 - RNA, 19 nt, Artificial Sequence
  Description of Artificial Sequence: Synthetic oligonucleotide
  Sense strand starting at position 2580 of SEQ ID NO: 1563471
aucagcuugguguaagaau

SEQ ID NO: 1813270 - RNA, 19 nt, Artificial Sequence
  Description of Artificial Sequence: Synthetic oligonucleotide
  Antisense strand to SEQ ID NO: 1813269
auucuuacaccaagcugau

SEQ ID NO: 1813271 - RNA, 19 nt, Artificial Sequence
  Description of Artificial Sequence: Synthetic oligonucleotide
  Sense strand starting at position 2595 of SEQ ID NO: 1563471
gaauuugguuaaugaaagg

SEQ ID NO: 1813272 - RNA, 19 nt, Artificial Sequence
  Description of Artificial Sequence: Synthetic oligonucleotide
  Antisense strand to SEQ ID NO: 1813271
ccuuucauuaaccaaauuc

SEQ ID NO: 1813273 - RNA, 19 nt, Artificial Sequence
  Description of Artificial Sequence: Synthetic oligonucleotide
  Sense strand starting at position 2600 of SEQ ID NO: 1563471
ugguuaaugaaagguuaau

SEQ ID NO: 1813274 - RNA, 19 nt, Artificial Sequence
  Description of Artificial Sequence: Synthetic oligonucleotide
  Antisense strand to SEQ ID NO: 1813273
auuaaccuuucauuaacca

SEQ ID NO: 1813275 - RNA, 19 nt, Artificial Sequence
  Description of Artificial Sequence: Synthetic oligonucleotide
  Sense strand starting at position 2662 of SEQ ID NO: 1563471
aagaccuuucuaugugaag

SEQ ID NO: 1813276 - RNA, 19 nt, Artificial Sequence
  Description of Artificial Sequence: Synthetic oligonucleotide
  Antisense strand to SEQ ID NO: 1813275
cuucacauagaaaggucuu

SEQ ID NO: 1813277 - RNA, 19 nt, Artificial Sequence
  Description of Artificial Sequence: Synthetic oligonucleotide
  Sense strand starting at position 2663 of SEQ ID NO: 1563471
agaccuuucuaugugaagu

SEQ ID NO: 1813278 - RNA, 19 nt, Artificial Sequence
  Description of Artificial Sequence: Synthetic oligonucleotide
  Antisense strand to SEQ ID NO: 1813277
acuucacauagaaaggucu

SEQ ID NO: 1813279 - RNA, 19 nt, Artificial Sequence
  Description of Artificial Sequence: Synthetic oligonucleotide
  Sense strand starting at position 2679 of SEQ ID NO: 1563471
aguaaaucugauggcuaca

SEQ ID NO: 1813280 - RNA, 19 nt, Artificial Sequence
  Description of Artificial Sequence: Synthetic oligonucleotide
  Antisense strand to SEQ ID NO: 1813279
uguagccaucagauuuacu

SEQ ID NO: 1813281 - RNA, 19 nt, Artificial Sequence
  Description of Artificial Sequence: Synthetic oligonucleotide
  Sense strand starting at position 2729 of SEQ ID NO: 1563471
gcuuauuugucacuaacug

SEQ ID NO: 1813282 - RNA, 19 nt, Artificial Sequence
  Description of Artificial Sequence: Synthetic oligonucleotide
  Antisense strand to SEQ ID NO: 1813281
caguuagugacaaauaagc

SEQ ID NO: 1813283 - RNA, 19 nt, Artificial Sequence
  Description of Artificial Sequence: Synthetic oligonucleotide
  Sense strand starting at position 2806 of SEQ ID NO: 1563471
auuagaucaggccgaacua

SEQ ID NO: 1813284 - RNA, 19 nt, Artificial Sequence
  Description of Artificial Sequence: Synthetic oligonucleotide
  Antisense strand to SEQ ID NO: 1813283
uaguucggccugaucuaau

SEQ ID NO: 1813285 - RNA, 19 nt, Artificial Sequence
  Description of Artificial Sequence: Synthetic oligonucleotide
  Sense strand starting at position 2807 of SEQ ID NO: 1563471
uuagaucaggccgaacuau

SEQ ID NO: 1813286 - RNA, 19 nt, Artificial Sequence
  Description of Artificial Sequence: Synthetic oligonucleotide
  Antisense strand to SEQ ID NO: 1813285
auaguucggccugaucuaa

SEQ ID NO: 1813287 - RNA, 19 nt, Artificial Sequence
  Description of Artificial Sequence: Synthetic oligonucleotide
  Sense strand starting at position 2906 of SEQ ID NO: 1563471
uguagcagccuugaacuau

SEQ ID NO: 1813288 - RNA, 19 nt, Artificial Sequence
  Description of Artificial Sequence: Synthetic oligonucleotide
  Antisense strand to SEQ ID NO: 1813287
auaguucaaggcugcuaca

SEQ ID NO: 1813289 - RNA, 19 nt, Artificial Sequence
  Description of Artificial Sequence: Synthetic oligonucleotide
  Sense strand starting at position 2916 of SEQ ID NO: 1563471
uugaacuaucaugguucua

SEQ ID NO: 1813290 - RNA, 19 nt, Artificial Sequence
  Description of Artificial Sequence: Synthetic oligonucleotide
  Antisense strand to SEQ ID NO: 1813289
uagaaccaugauaguucaa

SEQ ID NO: 1813291 - RNA, 19 nt, Artificial Sequence
  Description of Artificial Sequence: Synthetic oligonucleotide
  Sense strand starting at position 2968 of SEQ ID NO: 1563471
gagcaugcucaguaauuau

SEQ ID NO: 1813292 - RNA, 19 nt, Artificial Sequence
  Description of Artificial Sequence: Synthetic oligonucleotide
  Antisense strand to SEQ ID NO: 1813291
auaauuacugagcaugcuc

SEQ ID NO: 1813293 - RNA, 19 nt, Artificial Sequence
  Description of Artificial Sequence: Synthetic oligonucleotide
  Sense strand starting at position 3106 of SEQ ID NO: 1563471
auaugauggucuuucuucu

SEQ ID NO: 1813294 - RNA, 19 nt, Artificial Sequence
  Description of Artificial Sequence: Synthetic oligonucleotide
  Antisense strand to SEQ ID NO: 1813293
agaagaaagaccaucauau

SEQ ID NO: 1813295 - RNA, 19 nt, Artificial Sequence
  Description of Artificial Sequence: Synthetic oligonucleotide
  Sense strand starting at position 3113 of SEQ ID NO: 1563471
ggucuuucuucugugaaag

SEQ ID NO: 1813296 - RNA, 19 nt, Artificial Sequence
  Description of Artificial Sequence: Synthetic oligonucleotide
  Antisense strand to SEQ ID NO: 1813295
cuuucacagaagaaagacc

SEQ ID NO: 1813297 - RNA, 19 nt, Artificial Sequence
  Description of Artificial Sequence: Synthetic oligonucleotide
  Sense strand starting at position 3160 of SEQ ID NO: 1563471
cuguuaguugaguggauag

SEQ ID NO: 1813298 - RNA, 19 nt, Artificial Sequence
  Description of Artificial Sequence: Synthetic oligonucleotide
  Antisense strand to SEQ ID NO: 1813297
cuauccacucaacuaacag

SEQ ID NO: 1813299 - RNA, 19 nt, Artificial Sequence
  Description of Artificial Sequence: Synthetic oligonucleotide
  Sense strand starting at position 3170 of SEQ ID NO: 1563471
aguggauagccucaaaugu

SEQ ID NO: 1813300 - RNA, 19 nt, Artificial Sequence
  Description of Artificial Sequence: Synthetic oligonucleotide
  Antisense strand to SEQ ID NO: 1813299
acauuugaggcuauccacu

SEQ ID NO: 1813301 - RNA, 19 nt, Artificial Sequence
  Description of Artificial Sequence: Synthetic oligonucleotide
  Sense strand starting at position 3178 of SEQ ID NO: 1563471
gccucaaaugugcaaccua

SEQ ID NO: 1813302 - RNA, 19 nt, Artificial Sequence
  Description of Artificial Sequence: Synthetic oligonucleotide
  Antisense strand to SEQ ID NO: 1813301
uagguugcacauuugaggc

SEQ ID NO: 1813303 - RNA, 19 nt, Artificial Sequence
  Description of Artificial Sequence: Synthetic oligonucleotide
  Sense strand starting at position 3222 of SEQ ID NO: 1563471
gcugcugauuucuugguua

SEQ ID NO: 1813304 - RNA, 19 nt, Artificial Sequence
  Description of Artificial Sequence: Synthetic oligonucleotide
  Antisense strand to SEQ ID NO: 1813303
uaaccaagaaaucagcagc

SEQ ID NO: 1813305 - RNA, 19 nt, Artificial Sequence
  Description of Artificial Sequence: Synthetic oligonucleotide
  Sense strand starting at position 3224 of SEQ ID NO: 1563471
ugcugauuucuugguuacu

SEQ ID NO: 1813306 - RNA, 19 nt, Artificial Sequence
  Description of Artificial Sequence: Synthetic oligonucleotide
  Antisense strand to SEQ ID NO: 1813305
aguaaccaagaaaucagca

SEQ ID NO: 1813307 - RNA, 19 nt, Artificial Sequence
  Description of Artificial Sequence: Synthetic oligonucleotide
  Sense strand starting at position 3225 of SEQ ID NO: 1563471
gcugauuucuugguuacua

SEQ ID NO: 1813308 - RNA, 19 nt, Artificial Sequence
  Description of Artificial Sequence: Synthetic oligonucleotide
  Antisense strand to SEQ ID NO: 1813307
uaguaaccaagaaaucagc

SEQ ID NO: 1813309 - RNA, 19 nt, Artificial Sequence
  Description of Artificial Sequence: Synthetic oligonucleotide
  Sense strand starting at position 3506 of SEQ ID NO: 1563471
aacaauggaugggauaaua

SEQ ID NO: 1813310 - RNA, 19 nt, Artificial Sequence
  Description of Artificial Sequence: Synthetic oligonucleotide
  Antisense strand to SEQ ID NO: 1813309
uauuaucccauccauuguu

SEQ ID NO: 1813311 - RNA, 19 nt, Artificial Sequence
  Description of Artificial Sequence: Synthetic oligonucleotide
  Sense strand starting at position 3703 of SEQ ID NO: 1563471
uugagauaugugggcauua

SEQ ID NO: 1813312 - RNA, 19 nt, Artificial Sequence
  Description of Artificial Sequence: Synthetic oligonucleotide
  Antisense strand to SEQ ID NO: 1813311
uaaugcccacauaucucaa

SEQ ID NO: 1813313 - RNA, 19 nt, Artificial Sequence
  Description of Artificial Sequence: Synthetic oligonucleotide
  Sense strand starting at position 3704 of SEQ ID NO: 1563471
ugagauaugugggcauuaa

SEQ ID NO: 1813314 - RNA, 19 nt, Artificial Sequence
  Description of Artificial Sequence: Synthetic oligonucleotide
  Antisense strand to SEQ ID NO: 1813313
uuaaugcccacauaucuca

SEQ ID NO: 1813315 - RNA, 19 nt, Artificial Sequence
  Description of Artificial Sequence: Synthetic oligonucleotide
  Sense strand starting at position 3718 of SEQ ID NO: 1563471
auuaauagguguuccuuaa

SEQ ID NO: 1813316 - RNA, 19 nt, Artificial Sequence
  Description of Artificial Sequence: Synthetic oligonucleotide
  Antisense strand to SEQ ID NO: 1813315
uuaaggaacaccuauuaau

SEQ ID NO: 1813317 - RNA, 19 nt, Artificial Sequence
  Description of Artificial Sequence: Synthetic oligonucleotide
  Sense strand starting at position 3782 of SEQ ID NO: 1563471
gcgcuaaacgaagauaauu

SEQ ID NO: 1813318 - RNA, 19 nt, Artificial Sequence
  Description of Artificial Sequence: Synthetic oligonucleotide
  Antisense strand to SEQ ID NO: 1813317
aauuaucuucguuuagcgc

SEQ ID NO: 1813319 - RNA, 19 nt, Artificial Sequence
  Description of Artificial Sequence: Synthetic oligonucleotide
  Sense strand starting at position 3931 of SEQ ID NO: 1563471
gacuaauguucugcaggga

SEQ ID NO: 1813320 - RNA, 19 nt, Artificial Sequence
  Description of Artificial Sequence: Synthetic oligonucleotide
  Antisense strand to SEQ ID NO: 1813319
ucccugcagaacauuaguc

SEQ ID NO: 1813321 - RNA, 19 nt, Artificial Sequence
  Description of Artificial Sequence: Synthetic oligonucleotide
  Sense strand starting at position 3932 of SEQ ID NO: 1563471
acuaauguucugcagggau

SEQ ID NO: 1813322 - RNA, 19 nt, Artificial Sequence
  Description of Artificial Sequence: Synthetic oligonucleotide
  Antisense strand to SEQ ID NO: 1813321
aucccugcagaacauuagu

SEQ ID NO: 1813323 - RNA, 19 nt, Artificial Sequence
  Description of Artificial Sequence: Synthetic oligonucleotide
  Sense strand starting at position 3934 of SEQ ID NO: 1563471
uaauguucugcagggauaa

SEQ ID NO: 1813324 - RNA, 19 nt, Artificial Sequence
  Description of Artificial Sequence: Synthetic oligonucleotide
  Antisense strand to SEQ ID NO: 1813323
uuaucccugcagaacauua

SEQ ID NO: 1813325 - RNA, 19 nt, Artificial Sequence
  Description of Artificial Sequence: Synthetic oligonucleotide
  Sense strand starting at position 3935 of SEQ ID NO: 1563471
aauguucugcagggauaaa

SEQ ID NO: 1813326 - RNA, 19 nt, Artificial Sequence
  Description of Artificial Sequence: Synthetic oligonucleotide
  Antisense strand to SEQ ID NO: 1813325
uuuaucccugcagaacauu

SEQ ID NO: 1813327 - RNA, 19 nt, Artificial Sequence
  Description of Artificial Sequence: Synthetic oligonucleotide
  Sense strand starting at position 79 of SEQ ID NO: 1563472
gacgucaaggauuguggua

SEQ ID NO: 1813328 - RNA, 19 nt, Artificial Sequence
  Description of Artificial Sequence: Synthetic oligonucleotide
  Antisense strand to SEQ ID NO: 1813327
uaccacaauccuugacguc

SEQ ID NO: 1813329 - RNA, 19 nt, Artificial Sequence
  Description of Artificial Sequence: Synthetic oligonucleotide
  Sense strand starting at position 127 of SEQ ID NO: 1563472
gacucuuaugcagguugau

SEQ ID NO: 1813330 - RNA, 19 nt, Artificial Sequence
  Description of Artificial Sequence: Synthetic oligonucleotide
  Antisense strand to SEQ ID NO: 1813329
aucaaccugcauaagaguc

SEQ ID NO: 1813331 - RNA, 19 nt, Artificial Sequence
  Description of Artificial Sequence: Synthetic oligonucleotide
  Sense strand starting at position 328 of SEQ ID NO: 1563472
ucuuucuugucccuggauu

SEQ ID NO: 1813332 - RNA, 19 nt, Artificial Sequence
  Description of Artificial Sequence: Synthetic oligonucleotide
  Antisense strand to SEQ ID NO: 1813331
aauccagggacaagaaaga

SEQ ID NO: 1813333 - RNA, 19 nt, Artificial Sequence
  Description of Artificial Sequence: Synthetic oligonucleotide
  Sense strand starting at position 329 of SEQ ID NO: 1563472
cuuucuugucccuggauua

SEQ ID NO: 1813334 - RNA, 19 nt, Artificial Sequence
  Description of Artificial Sequence: Synthetic oligonucleotide
  Antisense strand to SEQ ID NO: 1813333
uaauccagggacaagaaag

SEQ ID NO: 1813335 - RNA, 19 nt, Artificial Sequence
  Description of Artificial Sequence: Synthetic oligonucleotide
  Sense strand starting at position 330 of SEQ ID NO: 1563472
uuucuugucccuggauuaa

SEQ ID NO: 1813336 - RNA, 19 nt, Artificial Sequence
  Description of Artificial Sequence: Synthetic oligonucleotide
  Antisense strand to SEQ ID NO: 1813335
uuaauccagggacaagaaa

SEQ ID NO: 1813337 - RNA, 19 nt, Artificial Sequence
  Description of Artificial Sequence: Synthetic oligonucleotide
  Sense strand starting at position 343 of SEQ ID NO: 1563472
gauuaauuccuacguggcu

SEQ ID NO: 1813338 - RNA, 19 nt, Artificial Sequence
  Description of Artificial Sequence: Synthetic oligonucleotide
  Antisense strand to SEQ ID NO: 1813337
agccacguaggaauuaauc

SEQ ID NO: 1813339 - RNA, 19 nt, Artificial Sequence
  Description of Artificial Sequence: Synthetic oligonucleotide
  Sense strand starting at position 455 of SEQ ID NO: 1563472
cguugcuucgcuggaauuu

SEQ ID NO: 1813340 - RNA, 19 nt, Artificial Sequence
  Description of Artificial Sequence: Synthetic oligonucleotide
  Antisense strand to SEQ ID NO: 1813339
aaauuccagcgaagcaacg

SEQ ID NO: 1813341 - RNA, 19 nt, Artificial Sequence
  Description of Artificial Sequence: Synthetic oligonucleotide
  Sense strand starting at position 523 of SEQ ID NO: 1563472
uggccaauuccggagcaga

SEQ ID NO: 1813342 - RNA, 19 nt, Artificial Sequence
  Description of Artificial Sequence: Synthetic oligonucleotide
  Antisense strand to SEQ ID NO: 1813341
ucugcuccggaauuggcca

SEQ ID NO: 1813343 - RNA, 19 nt, Artificial Sequence
  Description of Artificial Sequence: Synthetic oligonucleotide
  Sense strand starting at position 1440 of SEQ ID NO: 1563472
gggcgauacaaacguuaca

SEQ ID NO: 1813344 - RNA, 19 nt, Artificial Sequence
  Description of Artificial Sequence: Synthetic oligonucleotide
  Antisense strand to SEQ ID NO: 1813343
uguaacguuuguaucgccc

SEQ ID NO: 1813345 - RNA, 19 nt, Artificial Sequence
  Description of Artificial Sequence: Synthetic oligonucleotide
  Sense strand starting at position 1443 of SEQ ID NO: 1563472
cgauacaaacguuacagaa

SEQ ID NO: 1813346 - RNA, 19 nt, Artificial Sequence
  Description of Artificial Sequence: Synthetic oligonucleotide
  Antisense strand to SEQ ID NO: 1813345
uucuguaacguuuguaucg

SEQ ID NO: 1813347 - RNA, 19 nt, Artificial Sequence
  Description of Artificial Sequence: Synthetic oligonucleotide
  Sense strand starting at position 2171 of SEQ ID NO: 1563472
ucgcuaggauucuccuuua

SEQ ID NO: 1813348 - RNA, 19 nt, Artificial Sequence
  Description of Artificial Sequence: Synthetic oligonucleotide
  Antisense strand to SEQ ID NO: 1813347
uaaaggagaauccuagcga

SEQ ID NO: 1813349 - RNA, 19 nt, Artificial Sequence
  Description of Artificial Sequence: Synthetic oligonucleotide
  Sense strand starting at position 2201 of SEQ ID NO: 1563472
agcaguucgaaugauuagu

SEQ ID NO: 1813350 - RNA, 19 nt, Artificial Sequence
  Description of Artificial Sequence: Synthetic oligonucleotide
  Antisense strand to SEQ ID NO: 1813349
acuaaucauucgaacugcu

SEQ ID NO: 1813351 - RNA, 19 nt, Artificial Sequence
  Description of Artificial Sequence: Synthetic oligonucleotide
  Sense strand starting at position 2214 of SEQ ID NO: 1563472
auuaguucgggugguuuaa

SEQ ID NO: 1813352 - RNA, 19 nt, Artificial Sequence
  Description of Artificial Sequence: Synthetic oligonucleotide
  Antisense strand to SEQ ID NO: 1813351
uuaaaccacccgaacuaau

SEQ ID NO: 1813353 - RNA, 19 nt, Artificial Sequence
  Description of Artificial Sequence: Synthetic oligonucleotide
  Sense strand starting at position 2216 of SEQ ID NO: 1563472
uaguucgggugguuuaaau

SEQ ID NO: 1813354 - RNA, 19 nt, Artificial Sequence
  Description of Artificial Sequence: Synthetic oligonucleotide
  Antisense strand to SEQ ID NO: 1813353
auuuaaaccacccgaacua

SEQ ID NO: 1813355 - RNA, 19 nt, Artificial Sequence
  Description of Artificial Sequence: Synthetic oligonucleotide
  Sense strand starting at position 2220 of SEQ ID NO: 1563472
ucgggugguuuaaauggau

SEQ ID NO: 1813356 - RNA, 19 nt, Artificial Sequence
  Description of Artificial Sequence: Synthetic oligonucleotide
  Antisense strand to SEQ ID NO: 1813355
auccauuuaaaccacccga

SEQ ID NO: 1813357 - RNA, 19 nt, Artificial Sequence
  Description of Artificial Sequence: Synthetic oligonucleotide
  Sense strand starting at position 2254 of SEQ ID NO: 1563472
caaagauggugauucgaaa

SEQ ID NO: 1813358 - RNA, 19 nt, Artificial Sequence
  Description of Artificial Sequence: Synthetic oligonucleotide
  Antisense strand to SEQ ID NO: 1813357
uuucgaaucaccaucuuug

SEQ ID NO: 1813359 - RNA, 19 nt, Artificial Sequence
  Description of Artificial Sequence: Synthetic oligonucleotide
  Sense strand starting at position 2289 of SEQ ID NO: 1563472
gcaacaguuguacagaagu

SEQ ID NO: 1813360 - RNA, 19 nt, Artificial Sequence
  Description of Artificial Sequence: Synthetic oligonucleotide
  Antisense strand to SEQ ID NO: 1813359
acuucuguacaacuguugc

SEQ ID NO: 1813361 - RNA, 19 nt, Artificial Sequence
  Description of Artificial Sequence: Synthetic oligonucleotide
  Sense strand starting at position 2428 of SEQ ID NO: 1563472
guacucacauuccuuuaga

SEQ ID NO: 1813362 - RNA, 19 nt, Artificial Sequence
  Description of Artificial Sequence: Synthetic oligonucleotide
  Antisense strand to SEQ ID NO: 1813361
ucuaaaggaaugugaguac

SEQ ID NO: 1813363 - RNA, 19 nt, Artificial Sequence
  Description of Artificial Sequence: Synthetic oligonucleotide
  Sense strand starting at position 2455 of SEQ ID NO: 1563472
ccgucuugaucaguauuug

SEQ ID NO: 1813364 - RNA, 19 nt, Artificial Sequence
  Description of Artificial Sequence: Synthetic oligonucleotide
  Antisense strand to SEQ ID NO: 1813363
caaauacugaucaagacgg

SEQ ID NO: 1813365 - RNA, 19 nt, Artificial Sequence
  Description of Artificial Sequence: Synthetic oligonucleotide
  Sense strand starting at position 2456 of SEQ ID NO: 1563472
cgucuugaucaguauuugu

SEQ ID NO: 1813366 - RNA, 19 nt, Artificial Sequence
  Description of Artificial Sequence: Synthetic oligonucleotide
  Antisense strand to SEQ ID NO: 1813365
acaaauacugaucaagacg

SEQ ID NO: 1813367 - RNA, 19 nt, Artificial Sequence
  Description of Artificial Sequence: Synthetic oligonucleotide
  Sense strand starting at position 2460 of SEQ ID NO: 1563472
uugaucaguauuugugagu

SEQ ID NO: 1813368 - RNA, 19 nt, Artificial Sequence
  Description of Artificial Sequence: Synthetic oligonucleotide
  Antisense strand to SEQ ID NO: 1813367
acucacaaauacugaucaa

SEQ ID NO: 1813369 - RNA, 19 nt, Artificial Sequence
  Description of Artificial Sequence: Synthetic oligonucleotide
  Sense strand starting at position 2465 of SEQ ID NO: 1563472
caguauuugugaguugguu

SEQ ID NO: 1813370 - RNA, 19 nt, Artificial Sequence
  Description of Artificial Sequence: Synthetic oligonucleotide
  Antisense strand to SEQ ID NO: 1813369
aaccaacucacaaauacug

SEQ ID NO: 1813371 - RNA, 19 nt, Artificial Sequence
  Description of Artificial Sequence: Synthetic oligonucleotide
  Sense strand starting at position 2650 of SEQ ID NO: 1563472
gccuuuacacauggagguu

SEQ ID NO: 1813372 - RNA, 19 nt, Artificial Sequence
  Description of Artificial Sequence: Synthetic oligonucleotide
  Antisense strand to SEQ ID NO: 1813371
aaccuccauguguaaaggc

SEQ ID NO: 1813373 - RNA, 19 nt, Artificial Sequence
  Description of Artificial Sequence: Synthetic oligonucleotide
  Sense strand starting at position 2670 of SEQ ID NO: 1563472
gcaaaccuagauugugauu

SEQ ID NO: 1813374 - RNA, 19 nt, Artificial Sequence
  Description of Artificial Sequence: Synthetic oligonucleotide
  Antisense strand to SEQ ID NO: 1813373
aaucacaaucuagguuugc

SEQ ID NO: 1813375 - RNA, 19 nt, Artificial Sequence
  Description of Artificial Sequence: Synthetic oligonucleotide
  Sense strand starting at position 2875 of SEQ ID NO: 1563472
uuuauugagugccuaugaa

SEQ ID NO: 1813376 - RNA, 19 nt, Artificial Sequence
  Description of Artificial Sequence: Synthetic oligonucleotide
  Antisense strand to SEQ ID NO: 1813375
uucauaggcacucaauaaa

SEQ ID NO: 1813377 - RNA, 19 nt, Artificial Sequence
  Description of Artificial Sequence: Synthetic oligonucleotide
  Sense strand starting at position 2909 of SEQ ID NO: 1563472
gguagccuuguuuaaucuu

SEQ ID NO: 1813378 - RNA, 19 nt, Artificial Sequence
  Description of Artificial Sequence: Synthetic oligonucleotide
  Antisense strand to SEQ ID NO: 1813377
aagauuaaacaaggcuacc

SEQ ID NO: 1813379 - RNA, 19 nt, Artificial Sequence
  Description of Artificial Sequence: Synthetic oligonucleotide
  Sense strand starting at position 2912 of SEQ ID NO: 1563472
agccuuguuuaaucuuuga

SEQ ID NO: 1813380 - RNA, 19 nt, Artificial Sequence
  Description of Artificial Sequence: Synthetic oligonucleotide
  Antisense strand to SEQ ID NO: 1813379
ucaaagauuaaacaaggcu

SEQ ID NO: 1813381 - RNA, 19 nt, Artificial Sequence
  Description of Artificial Sequence: Synthetic oligonucleotide
  Sense strand starting at position 2932 of SEQ ID NO: 1563472
uuaauuauggcagauggca

SEQ ID NO: 1813382 - RNA, 19 nt, Artificial Sequence
  Description of Artificial Sequence: Synthetic oligonucleotide
  Antisense strand to SEQ ID NO: 1813381
ugccaucugccauaauuaa

SEQ ID NO: 1813383 - RNA, 19 nt, Artificial Sequence
  Description of Artificial Sequence: Synthetic oligonucleotide
  Sense strand starting at position 2940 of SEQ ID NO: 1563472
ggcagauggcauuguauuc

SEQ ID NO: 1813384 - RNA, 19 nt, Artificial Sequence
  Description of Artificial Sequence: Synthetic oligonucleotide
  Antisense strand to SEQ ID NO: 1813383
gaauacaaugccaucugcc

SEQ ID NO: 1813385 - RNA, 19 nt, Artificial Sequence
  Description of Artificial Sequence: Synthetic oligonucleotide
  Sense strand starting at position 3019 of SEQ ID NO: 1563472
aggucuggcucugugaaga

SEQ ID NO: 1813386 - RNA, 19 nt, Artificial Sequence
  Description of Artificial Sequence: Synthetic oligonucleotide
  Antisense strand to SEQ ID NO: 1813385
ucuucacagagccagaccu

SEQ ID NO: 1813387 - RNA, 19 nt, Artificial Sequence
  Description of Artificial Sequence: Synthetic oligonucleotide
  Sense strand starting at position 3032 of SEQ ID NO: 1563472
ugaagagacucaguaagug

SEQ ID NO: 1813388 - RNA, 19 nt, Artificial Sequence
  Description of Artificial Sequence: Synthetic oligonucleotide
  Antisense strand to SEQ ID NO: 1813387
cacuuacugagucucuuca

SEQ ID NO: 1813389 - RNA, 19 nt, Artificial Sequence
  Description of Artificial Sequence: Synthetic oligonucleotide
  Sense strand starting at position 3101 of SEQ ID NO: 1563472
acuuguguauuccuggcaa

SEQ ID NO: 1813390 - RNA, 19 nt, Artificial Sequence
  Description of Artificial Sequence: Synthetic oligonucleotide
  Antisense strand to SEQ ID NO: 1813389
uugccaggaauacacaagu

SEQ ID NO: 1813391 - RNA, 19 nt, Artificial Sequence
  Description of Artificial Sequence: Synthetic oligonucleotide
  Sense strand starting at position 3121 of SEQ ID NO: 1563472
uacuauugacaauguggaa

SEQ ID NO: 1813392 - RNA, 19 nt, Artificial Sequence
  Description of Artificial Sequence: Synthetic oligonucleotide
  Antisense strand to SEQ ID NO: 1813391
uuccacauugucaauagua

SEQ ID NO: 1813393 - RNA, 19 nt, Artificial Sequence
  Description of Artificial Sequence: Synthetic oligonucleotide
  Sense strand starting at position 3174 of SEQ ID NO: 1563472
gagagaugaugacauauac

SEQ ID NO: 1813394 - RNA, 19 nt, Artificial Sequence
  Description of Artificial Sequence: Synthetic oligonucleotide
  Antisense strand to SEQ ID NO: 1813393
guauaugucaucaucucuc

SEQ ID NO: 1813395 - RNA, 19 nt, Artificial Sequence
  Description of Artificial Sequence: Synthetic oligonucleotide
  Sense strand starting at position 3476 of SEQ ID NO: 1563472
gcaacagaaugagauaaca

SEQ ID NO: 1813396 - RNA, 19 nt, Artificial Sequence
  Description of Artificial Sequence: Synthetic oligonucleotide
  Antisense strand to SEQ ID NO: 1813395
uguuaucucauucuguugc

SEQ ID NO: 1813397 - RNA, 19 nt, Artificial Sequence
  Description of Artificial Sequence: Synthetic oligonucleotide
  Sense strand starting at position 3640 of SEQ ID NO: 1563472
gucauauggcaguauauga

SEQ ID NO: 1813398 - RNA, 19 nt, Artificial Sequence
  Description of Artificial Sequence: Synthetic oligonucleotide
  Antisense strand to SEQ ID NO: 1813397
ucauauacugccauaugac

SEQ ID NO: 1813399 - RNA, 19 nt, Artificial Sequence
  Description of Artificial Sequence: Synthetic oligonucleotide
  Sense strand starting at position 3833 of SEQ ID NO: 1563472
ggccauucugguggaaagu

SEQ ID NO: 1813400 - RNA, 19 nt, Artificial Sequence
  Description of Artificial Sequence: Synthetic oligonucleotide
  Antisense strand to SEQ ID NO: 1813399
acuuuccaccagaauggcc

SEQ ID NO: 1813401 - RNA, 19 nt, Artificial Sequence
  Description of Artificial Sequence: Synthetic oligonucleotide
  Sense strand starting at position 3834 of SEQ ID NO: 1563472
gccauucugguggaaagua

SEQ ID NO: 1813402 - RNA, 19 nt, Artificial Sequence
  Description of Artificial Sequence: Synthetic oligonucleotide
  Antisense strand to SEQ ID NO: 1813401
uacuuuccaccagaauggc

SEQ ID NO: 1813403 - RNA, 19 nt, Artificial Sequence
  Description of Artificial Sequence: Synthetic oligonucleotide
  Sense strand starting at position 3911 of SEQ ID NO: 1563472
auacaaaugucaguguaga

SEQ ID NO: 1813404 - RNA, 19 nt, Artificial Sequence
  Description of Artificial Sequence: Synthetic oligonucleotide
  Antisense strand to SEQ ID NO: 1813403
ucuacacugacauuuguau

SEQ ID NO: 1813405 - RNA, 19 nt, Artificial Sequence
  Description of Artificial Sequence: Synthetic oligonucleotide
  Sense strand starting at position 3912 of SEQ ID NO: 1563472
uacaaaugucaguguagaa

SEQ ID NO: 1813406 - RNA, 19 nt, Artificial Sequence
  Description of Artificial Sequence: Synthetic oligonucleotide
  Antisense strand to SEQ ID NO: 1813405
uucuacacugacauuugua

SEQ ID NO: 1813407 - RNA, 19 nt, Artificial Sequence
  Description of Artificial Sequence: Synthetic oligonucleotide
  Sense strand starting at position 20 of SEQ ID NO: 1563473
guguuuaaagcucaguaug

SEQ ID NO: 1813408 - RNA, 19 nt, Artificial Sequence
  Description of Artificial Sequence: Synthetic oligonucleotide
  Antisense strand to SEQ ID NO: 1813407
cauacugagcuuuaaacac

SEQ ID NO: 1813409 - RNA, 19 nt, Artificial Sequence
  Description of Artificial Sequence: Synthetic oligonucleotide
  Sense strand starting at position 22 of SEQ ID NO: 1563473
guuuaaagcucaguaugau

SEQ ID NO: 1813410 - RNA, 19 nt, Artificial Sequence
  Description of Artificial Sequence: Synthetic oligonucleotide
  Antisense strand to SEQ ID NO: 1813409
aucauacugagcuuuaaac

SEQ ID NO: 1813411 - RNA, 19 nt, Artificial Sequence
  Description of Artificial Sequence: Synthetic oligonucleotide
  Sense strand starting at position 23 of SEQ ID NO: 1563473
uuuaaagcucaguaugaua

SEQ ID NO: 1813412 - RNA, 19 nt, Artificial Sequence
  Description of Artificial Sequence: Synthetic oligonucleotide
  Antisense strand to SEQ ID NO: 1813411
uaucauacugagcuuuaaa

SEQ ID NO: 1813413 - RNA, 19 nt, Artificial Sequence
  Description of Artificial Sequence: Synthetic oligonucleotide
  Sense strand starting at position 31 of SEQ ID NO: 1563473
ucaguaugauacggccaaa

SEQ ID NO: 1813414 - RNA, 19 nt, Artificial Sequence
  Description of Artificial Sequence: Synthetic oligonucleotide
  Antisense strand to SEQ ID NO: 1813413
uuuggccguaucauacuga

SEQ ID NO: 1813415 - RNA, 19 nt, Artificial Sequence
  Description of Artificial Sequence: Synthetic oligonucleotide
  Sense strand starting at position 83 of SEQ ID NO: 1563473
ggaagcagaugcuauacuu

SEQ ID NO: 1813416 - RNA, 19 nt, Artificial Sequence
  Description of Artificial Sequence: Synthetic oligonucleotide
  Antisense strand to SEQ ID NO: 1813415
aaguauagcaucugcuucc

SEQ ID NO: 1813417 - RNA, 19 nt, Artificial Sequence
  Description of Artificial Sequence: Synthetic oligonucleotide
  Sense strand starting at position 167 of SEQ ID NO: 1563473
gcgcuuucucuugcuacca

SEQ ID NO: 1813418 - RNA, 19 nt, Artificial Sequence
  Description of Artificial Sequence: Synthetic oligonucleotide
  Antisense strand to SEQ ID NO: 1813417
ugguagcaagagaaagcgc

SEQ ID NO: 1813419 - RNA, 19 nt, Artificial Sequence
  Description of Artificial Sequence: Synthetic oligonucleotide
  Sense strand starting at position 168 of SEQ ID NO: 1563473
cgcuuucucuugcuaccau

SEQ ID NO: 1813420 - RNA, 19 nt, Artificial Sequence
  Description of Artificial Sequence: Synthetic oligonucleotide
  Antisense strand to SEQ ID NO: 1813419
augguagcaagagaaagcg

SEQ ID NO: 1813421 - RNA, 19 nt, Artificial Sequence
  Description of Artificial Sequence: Synthetic oligonucleotide
  Sense strand starting at position 339 of SEQ ID NO: 1563473
gcugguagguuguuaaagu

SEQ ID NO: 1813422 - RNA, 19 nt, Artificial Sequence
  Description of Artificial Sequence: Synthetic oligonucleotide
  Antisense strand to SEQ ID NO: 1813421
acuuuaacaaccuaccagc

SEQ ID NO: 1813423 - RNA, 19 nt, Artificial Sequence
  Description of Artificial Sequence: Synthetic oligonucleotide
  Sense strand starting at position 503 of SEQ ID NO: 1563473
gccacuaaacuucgucuca

SEQ ID NO: 1813424 - RNA, 19 nt, Artificial Sequence
  Description of Artificial Sequence: Synthetic oligonucleotide
  Antisense strand to SEQ ID NO: 1813423
ugagacgaaguuuaguggc

SEQ ID NO: 1813425 - RNA, 19 nt, Artificial Sequence
  Description of Artificial Sequence: Synthetic oligonucleotide
  Sense strand starting at position 508 of SEQ ID NO: 1563473
uaaacuucgucucaggauu

SEQ ID NO: 1813426 - RNA, 19 nt, Artificial Sequence
  Description of Artificial Sequence: Synthetic oligonucleotide
  Antisense strand to SEQ ID NO: 1813425
aauccugagacgaaguuua

SEQ ID NO: 1813427 - RNA, 19 nt, Artificial Sequence
  Description of Artificial Sequence: Synthetic oligonucleotide
  Sense strand starting at position 510 of SEQ ID NO: 1563473
aacuucgucucaggauuau

SEQ ID NO: 1813428 - RNA, 19 nt, Artificial Sequence
  Description of Artificial Sequence: Synthetic oligonucleotide
  Antisense strand to SEQ ID NO: 1813427
auaauccugagacgaaguu

SEQ ID NO: 1813429 - RNA, 19 nt, Artificial Sequence
  Description of Artificial Sequence: Synthetic oligonucleotide
  Sense strand starting at position 519 of SEQ ID NO: 1563473
ucaggauuauuccggaguu

SEQ ID NO: 1813430 - RNA, 19 nt, Artificial Sequence
  Description of Artificial Sequence: Synthetic oligonucleotide
  Antisense strand to SEQ ID NO: 1813429
aacuccggaauaauccuga

SEQ ID NO: 1813431 - RNA, 19 nt, Artificial Sequence
  Description of Artificial Sequence: Synthetic oligonucleotide
  Sense strand starting at position 520 of SEQ ID NO: 1563473
caggauuauuccggaguuu

SEQ ID NO: 1813432 - RNA, 19 nt, Artificial Sequence
  Description of Artificial Sequence: Synthetic oligonucleotide
  Antisense strand to SEQ ID NO: 1813431
aaacuccggaauaauccug

SEQ ID NO: 1813433 - RNA, 19 nt, Artificial Sequence
  Description of Artificial Sequence: Synthetic oligonucleotide
  Sense strand starting at position 521 of SEQ ID NO: 1563473
aggauuauuccggaguuug

SEQ ID NO: 1813434 - RNA, 19 nt, Artificial Sequence
  Description of Artificial Sequence: Synthetic oligonucleotide
  Antisense strand to SEQ ID NO: 1813433
caaacuccggaauaauccu

SEQ ID NO: 1813435 - RNA, 19 nt, Artificial Sequence
  Description of Artificial Sequence: Synthetic oligonucleotide
  Sense strand starting at position 526 of SEQ ID NO: 1563473
uauuccggaguuugugaaa

SEQ ID NO: 1813436 - RNA, 19 nt, Artificial Sequence
  Description of Artificial Sequence: Synthetic oligonucleotide
  Antisense strand to SEQ ID NO: 1813435
uuucacaaacuccggaaua

SEQ ID NO: 1813437 - RNA, 19 nt, Artificial Sequence
  Description of Artificial Sequence: Synthetic oligonucleotide
  Sense strand starting at position 529 of SEQ ID NO: 1563473
uccggaguuugugaaauca

SEQ ID NO: 1813438 - RNA, 19 nt, Artificial Sequence
  Description of Artificial Sequence: Synthetic oligonucleotide
  Antisense strand to SEQ ID NO: 1813437
ugauuucacaaacuccgga

SEQ ID NO: 1813439 - RNA, 19 nt, Artificial Sequence
  Description of Artificial Sequence: Synthetic oligonucleotide
  Sense strand starting at position 561 of SEQ ID NO: 1563473
cacaguagacaguaguuua

SEQ ID NO: 1813440 - RNA, 19 nt, Artificial Sequence
  Description of Artificial Sequence: Synthetic oligonucleotide
  Antisense strand to SEQ ID NO: 1813439
uaaacuacugucuacugug

SEQ ID NO: 1813441 - RNA, 19 nt, Artificial Sequence
  Description of Artificial Sequence: Synthetic oligonucleotide
  Sense strand starting at position 775 of SEQ ID NO: 1563473
gcaagauucuacuccacag

SEQ ID NO: 1813442 - RNA, 19 nt, Artificial Sequence
  Description of Artificial Sequence: Synthetic oligonucleotide
  Antisense strand to SEQ ID NO: 1813441
cuguggaguagaaucuugc

SEQ ID NO: 1813443 - RNA, 19 nt, Artificial Sequence
  Description of Artificial Sequence: Synthetic oligonucleotide
  Sense strand starting at position 854 of SEQ ID NO: 1563473
ggcggauuccuggaucaca

SEQ ID NO: 1813444 - RNA, 19 nt, Artificial Sequence
  Description of Artificial Sequence: Synthetic oligonucleotide
  Antisense strand to SEQ ID NO: 1813443
ugugauccaggaauccgcc

SEQ ID NO: 1813445 - RNA, 19 nt, Artificial Sequence
  Description of Artificial Sequence: Synthetic oligonucleotide
  Sense strand starting at position 935 of SEQ ID NO: 1563473
gggacucccggcuaacaua

SEQ ID NO: 1813446 - RNA, 19 nt, Artificial Sequence
  Description of Artificial Sequence: Synthetic oligonucleotide
  Antisense strand to SEQ ID NO: 1813445
uauguuagccgggaguccc

SEQ ID NO: 1813447 - RNA, 19 nt, Artificial Sequence
  Description of Artificial Sequence: Synthetic oligonucleotide
  Sense strand starting at position 1106 of SEQ ID NO: 1563473
cccaaucuucugcgucaca

SEQ ID NO: 1813448 - RNA, 19 nt, Artificial Sequence
  Description of Artificial Sequence: Synthetic oligonucleotide
  Antisense strand to SEQ ID NO: 1813447
ugugacgcagaagauuggg

SEQ ID NO: 1813449 - RNA, 19 nt, Artificial Sequence
  Description of Artificial Sequence: Synthetic oligonucleotide
  Sense strand starting at position 1107 of SEQ ID NO: 1563473
ccaaucuucugcgucacaa

SEQ ID NO: 1813450 - RNA, 19 nt, Artificial Sequence
  Description of Artificial Sequence: Synthetic oligonucleotide
  Antisense strand to SEQ ID NO: 1813449
uugugacgcagaagauugg

SEQ ID NO: 1813451 - RNA, 19 nt, Artificial Sequence
  Description of Artificial Sequence: Synthetic oligonucleotide
  Sense strand starting at position 1545 of SEQ ID NO: 1563473
ucacuaaucagucgggauu

SEQ ID NO: 1813452 - RNA, 19 nt, Artificial Sequence
  Description of Artificial Sequence: Synthetic oligonucleotide
  Antisense strand to SEQ ID NO: 1813451
aaucccgacugauuaguga

SEQ ID NO: 1813453 - RNA, 19 nt, Artificial Sequence
  Description of Artificial Sequence: Synthetic oligonucleotide
  Sense strand starting at position 3153 of SEQ ID NO: 1563473
gcccaagggugucgggaau

SEQ ID NO: 1813454 - RNA, 19 nt, Artificial Sequence
  Description of Artificial Sequence: Synthetic oligonucleotide
  Antisense strand to SEQ ID NO: 1813453
auucccgacacccuugggc

SEQ ID NO: 1813455 - RNA, 19 nt, Artificial Sequence
  Description of Artificial Sequence: Synthetic oligonucleotide
  Sense strand starting at position 3371 of SEQ ID NO: 1563473
agaagaagguguuuacuag

SEQ ID NO: 1813456 - RNA, 19 nt, Artificial Sequence
  Description of Artificial Sequence: Synthetic oligonucleotide
  Antisense strand to SEQ ID NO: 1813455
cuaguaaacaccuucuucu

SEQ ID NO: 1813457 - RNA, 19 nt, Artificial Sequence
  Description of Artificial Sequence: Synthetic oligonucleotide
  Sense strand starting at position 3372 of SEQ ID NO: 1563473
gaagaagguguuuacuagu

SEQ ID NO: 1813458 - RNA, 19 nt, Artificial Sequence
  Description of Artificial Sequence: Synthetic oligonucleotide
  Antisense strand to SEQ ID NO: 1813457
acuaguaaacaccuucuuc

SEQ ID NO: 1813459 - RNA, 19 nt, Artificial Sequence
  Description of Artificial Sequence: Synthetic oligonucleotide
  Sense strand starting at position 3375 of SEQ ID NO: 1563473
gaagguguuuacuagugga

SEQ ID NO: 1813460 - RNA, 19 nt, Artificial Sequence
  Description of Artificial Sequence: Synthetic oligonucleotide
  Antisense strand to SEQ ID NO: 1813459
uccacuaguaaacaccuuc

SEQ ID NO: 1813461 - RNA, 19 nt, Artificial Sequence
  Description of Artificial Sequence: Synthetic oligonucleotide
  Sense strand starting at position 3378 of SEQ ID NO: 1563473
gguguuuacuaguggauuc

SEQ ID NO: 1813462 - RNA, 19 nt, Artificial Sequence
  Description of Artificial Sequence: Synthetic oligonucleotide
  Antisense strand to SEQ ID NO: 1813461
gaauccacuaguaaacacc

SEQ ID NO: 1813463 - RNA, 19 nt, Artificial Sequence
  Description of Artificial Sequence: Synthetic oligonucleotide
  Sense strand starting at position 3417 of SEQ ID NO: 1563473
gcacauccguaguuucuua

SEQ ID NO: 1813464 - RNA, 19 nt, Artificial Sequence
  Description of Artificial Sequence: Synthetic oligonucleotide
  Antisense strand to SEQ ID NO: 1813463
uaagaaacuacggaugugc

SEQ ID NO: 1813465 - RNA, 19 nt, Artificial Sequence
  Description of Artificial Sequence: Synthetic oligonucleotide
  Sense strand starting at position 3460 of SEQ ID NO: 1563473
cccucagcccuacgaaauu

SEQ ID NO: 1813466 - RNA, 19 nt, Artificial Sequence
  Description of Artificial Sequence: Synthetic oligonucleotide
  Antisense strand to SEQ ID NO: 1813465
aauuucguagggcugaggg

SEQ ID NO: 1813467 - RNA, 19 nt, Artificial Sequence
  Description of Artificial Sequence: Synthetic oligonucleotide
  Sense strand starting at position 3513 of SEQ ID NO: 1563473
aaggucuucugcugccaga

SEQ ID NO: 1813468 - RNA, 19 nt, Artificial Sequence
  Description of Artificial Sequence: Synthetic oligonucleotide
  Antisense strand to SEQ ID NO: 1813467
ucuggcagcagaagaccuu

SEQ ID NO: 1813469 - RNA, 19 nt, Artificial Sequence
  Description of Artificial Sequence: Synthetic oligonucleotide
  Sense strand starting at position 3516 of SEQ ID NO: 1563473
gucuucugcugccagaauu

SEQ ID NO: 1813470 - RNA, 19 nt, Artificial Sequence
  Description of Artificial Sequence: Synthetic oligonucleotide
  Antisense strand to SEQ ID NO: 1813469
aauucuggcagcagaagac

SEQ ID NO: 1813471 - RNA, 19 nt, Artificial Sequence
  Description of Artificial Sequence: Synthetic oligonucleotide
  Sense strand starting at position 3538 of SEQ ID NO: 1563473
auaguucgugcucaucaca

SEQ ID NO: 1813472 - RNA, 19 nt, Artificial Sequence
  Description of Artificial Sequence: Synthetic oligonucleotide
  Antisense strand to SEQ ID NO: 1813471
ugugaugagcacgaacuau

SEQ ID NO: 1813473 - RNA, 19 nt, Artificial Sequence
  Description of Artificial Sequence: Synthetic oligonucleotide
  Sense strand starting at position 3541 of SEQ ID NO: 1563473
guucgugcucaucacauaa

SEQ ID NO: 1813474 - RNA, 19 nt, Artificial Sequence
  Description of Artificial Sequence: Synthetic oligonucleotide
  Antisense strand to SEQ ID NO: 1813473
uuaugugaugagcacgaac

SEQ ID NO: 1813475 - RNA, 19 nt, Artificial Sequence
  Description of Artificial Sequence: Synthetic oligonucleotide
  Sense strand starting at position 3543 of SEQ ID NO: 1563473
ucgugcucaucacauaauu

SEQ ID NO: 1813476 - RNA, 19 nt, Artificial Sequence
  Description of Artificial Sequence: Synthetic oligonucleotide
  Antisense strand to SEQ ID NO: 1813475
aauuaugugaugagcacga

SEQ ID NO: 1813477 - RNA, 19 nt, Artificial Sequence
  Description of Artificial Sequence: Synthetic oligonucleotide
  Sense strand starting at position 3608 of SEQ ID NO: 1563473
cggaaauucgaacgagaua

SEQ ID NO: 1813478 - RNA, 19 nt, Artificial Sequence
  Description of Artificial Sequence: Synthetic oligonucleotide
  Antisense strand to SEQ ID NO: 1813477
uaucucguucgaauuuccg

SEQ ID NO: 1813479 - RNA, 19 nt, Artificial Sequence
  Description of Artificial Sequence: Synthetic oligonucleotide
  Sense strand starting at position 3695 of SEQ ID NO: 1563473
aaaggagucugcuacauuc

SEQ ID NO: 1813480 - RNA, 19 nt, Artificial Sequence
  Description of Artificial Sequence: Synthetic oligonucleotide
  Antisense strand to SEQ ID NO: 1813479
gaauguagcagacuccuuu

SEQ ID NO: 1813481 - RNA, 19 nt, Artificial Sequence
  Description of Artificial Sequence: Synthetic oligonucleotide
  Sense strand starting at position 3712 of SEQ ID NO: 1563473
uccauaacccugugaaaga

SEQ ID NO: 1813482 - RNA, 19 nt, Artificial Sequence
  Description of Artificial Sequence: Synthetic oligonucleotide
  Antisense strand to SEQ ID NO: 1813481
ucuuucacaggguuaugga

SEQ ID NO: 1813483 - RNA, 19 nt, Artificial Sequence
  Description of Artificial Sequence: Synthetic oligonucleotide
  Sense strand starting at position 3961 of SEQ ID NO: 1563473
acuggaaagguguguugau

SEQ ID NO: 1813484 - RNA, 19 nt, Artificial Sequence
  Description of Artificial Sequence: Synthetic oligonucleotide
  Antisense strand to SEQ ID NO: 1813483
aucaacacaccuuuccagu

SEQ ID NO: 1813485 - RNA, 19 nt, Artificial Sequence
  Description of Artificial Sequence: Synthetic oligonucleotide
  Sense strand starting at position 3962 of SEQ ID NO: 1563473
cuggaaagguguguugauu

SEQ ID NO: 1813486 - RNA, 19 nt, Artificial Sequence
  Description of Artificial Sequence: Synthetic oligonucleotide
  Antisense strand to SEQ ID NO: 1813485
aaucaacacaccuuuccag

SEQ ID NO: 1813487 - RNA, 19 nt, Artificial Sequence
  Description of Artificial Sequence: Synthetic oligonucleotide
  Sense strand starting at position 81 of SEQ ID NO: 1563474
gggacucccggcuaacaua

SEQ ID NO: 1813488 - RNA, 19 nt, Artificial Sequence
  Description of Artificial Sequence: Synthetic oligonucleotide
  Antisense strand to SEQ ID NO: 1813487
uauguuagccgggaguccc

SEQ ID NO: 1813489 - RNA, 19 nt, Artificial Sequence
  Description of Artificial Sequence: Synthetic oligonucleotide
  Sense strand starting at position 252 of SEQ ID NO: 1563474
cccaaucuucugcgucaca

SEQ ID NO: 1813490 - RNA, 19 nt, Artificial Sequence
  Description of Artificial Sequence: Synthetic oligonucleotide
  Antisense strand to SEQ ID NO: 1813489
ugugacgcagaagauuggg

SEQ ID NO: 1813491 - RNA, 19 nt, Artificial Sequence
  Description of Artificial Sequence: Synthetic oligonucleotide
  Sense strand starting at position 253 of SEQ ID NO: 1563474
ccaaucuucugcgucacaa

SEQ ID NO: 1813492 - RNA, 19 nt, Artificial Sequence
  Description of Artificial Sequence: Synthetic oligonucleotide
  Antisense strand to SEQ ID NO: 1813491
uugugacgcagaagauugg

SEQ ID NO: 1813493 - RNA, 19 nt, Artificial Sequence
  Description of Artificial Sequence: Synthetic oligonucleotide
  Sense strand starting at position 691 of SEQ ID NO: 1563474
ucacuaaucagucgggauu

SEQ ID NO: 1813494 - RNA, 19 nt, Artificial Sequence
  Description of Artificial Sequence: Synthetic oligonucleotide
  Antisense strand to SEQ ID NO: 1813493
aaucccgacugauuaguga

SEQ ID NO: 1813495 - RNA, 19 nt, Artificial Sequence
  Description of Artificial Sequence: Synthetic oligonucleotide
  Sense strand starting at position 2517 of SEQ ID NO: 1563474
agaagaagguguuuacuag

SEQ ID NO: 1813496 - RNA, 19 nt, Artificial Sequence
  Description of Artificial Sequence: Synthetic oligonucleotide
  Antisense strand to SEQ ID NO: 1813495
cuaguaaacaccuucuucu

SEQ ID NO: 1813497 - RNA, 19 nt, Artificial Sequence
  Description of Artificial Sequence: Synthetic oligonucleotide
  Sense strand starting at position 2518 of SEQ ID NO: 1563474
gaagaagguguuuacuagu

SEQ ID NO: 1813498 - RNA, 19 nt, Artificial Sequence
  Description of Artificial Sequence: Synthetic oligonucleotide
  Antisense strand to SEQ ID NO: 1813497
acuaguaaacaccuucuuc

SEQ ID NO: 1813499 - RNA, 19 nt, Artificial Sequence
  Description of Artificial Sequence: Synthetic oligonucleotide
  Sense strand starting at position 2521 of SEQ ID NO: 1563474
gaagguguuuacuagugga

SEQ ID NO: 1813500 - RNA, 19 nt, Artificial Sequence
  Description of Artificial Sequence: Synthetic oligonucleotide
  Antisense strand to SEQ ID NO: 1813499
uccacuaguaaacaccuuc

SEQ ID NO: 1813501 - RNA, 19 nt, Artificial Sequence
  Description of Artificial Sequence: Synthetic oligonucleotide
  Sense strand starting at position 2563 of SEQ ID NO: 1563474
gcacauccguaguuucuua

SEQ ID NO: 1813502 - RNA, 19 nt, Artificial Sequence
  Description of Artificial Sequence: Synthetic oligonucleotide
  Antisense strand to SEQ ID NO: 1813501
uaagaaacuacggaugugc

SEQ ID NO: 1813503 - RNA, 19 nt, Artificial Sequence
  Description of Artificial Sequence: Synthetic oligonucleotide
  Sense strand starting at position 2606 of SEQ ID NO: 1563474
cccucagcccuacgaaauu

SEQ ID NO: 1813504 - RNA, 19 nt, Artificial Sequence
  Description of Artificial Sequence: Synthetic oligonucleotide
  Antisense strand to SEQ ID NO: 1813503
aauuucguagggcugaggg

SEQ ID NO: 1813505 - RNA, 19 nt, Artificial Sequence
  Description of Artificial Sequence: Synthetic oligonucleotide
  Sense strand starting at position 2684 of SEQ ID NO: 1563474
auaguucgugcucaucaca

SEQ ID NO: 1813506 - RNA, 19 nt, Artificial Sequence
  Description of Artificial Sequence: Synthetic oligonucleotide
  Antisense strand to SEQ ID NO: 1813505
ugugaugagcacgaacuau

SEQ ID NO: 1813507 - RNA, 19 nt, Artificial Sequence
  Description of Artificial Sequence: Synthetic oligonucleotide
  Sense strand starting at position 2687 of SEQ ID NO: 1563474
guucgugcucaucacauaa

SEQ ID NO: 1813508 - RNA, 19 nt, Artificial Sequence
  Description of Artificial Sequence: Synthetic oligonucleotide
  Antisense strand to SEQ ID NO: 1813507
uuaugugaugagcacgaac

SEQ ID NO: 1813509 - RNA, 19 nt, Artificial Sequence
  Description of Artificial Sequence: Synthetic oligonucleotide
  Sense strand starting at position 2754 of SEQ ID NO: 1563474
cggaaauucgaacgagaua

SEQ ID NO: 1813510 - RNA, 19 nt, Artificial Sequence
  Description of Artificial Sequence: Synthetic oligonucleotide
  Antisense strand to SEQ ID NO: 1813509
uaucucguucgaauuuccg

SEQ ID NO: 1813511 - RNA, 19 nt, Artificial Sequence
  Description of Artificial Sequence: Synthetic oligonucleotide
  Sense strand starting at position 2841 of SEQ ID NO: 1563474
aaaggagucugcuacauuc

SEQ ID NO: 1813512 - RNA, 19 nt, Artificial Sequence
  Description of Artificial Sequence: Synthetic oligonucleotide
  Antisense strand to SEQ ID NO: 1813511
gaauguagcagacuccuuu

SEQ ID NO: 1813513 - RNA, 19 nt, Artificial Sequence
  Description of Artificial Sequence: Synthetic oligonucleotide
  Sense strand starting at position 2858 of SEQ ID NO: 1563474
uccauaacccugugaaaga

SEQ ID NO: 1813514 - RNA, 19 nt, Artificial Sequence
  Description of Artificial Sequence: Synthetic oligonucleotide
  Antisense strand to SEQ ID NO: 1813513
ucuuucacaggguuaugga

SEQ ID NO: 1813515 - RNA, 19 nt, Artificial Sequence
  Description of Artificial Sequence: Synthetic oligonucleotide
  Sense strand starting at position 3107 of SEQ ID NO: 1563474
acuggaaagguguguugau

SEQ ID NO: 1813516 - RNA, 19 nt, Artificial Sequence
  Description of Artificial Sequence: Synthetic oligonucleotide
  Antisense strand to SEQ ID NO: 1813515
aucaacacaccuuuccagu

SEQ ID NO: 1813517 - RNA, 19 nt, Artificial Sequence
  Description of Artificial Sequence: Synthetic oligonucleotide
  Sense strand starting at position 3108 of SEQ ID NO: 1563474
cuggaaagguguguugauu

SEQ ID NO: 1813518 - RNA, 19 nt, Artificial Sequence
  Description of Artificial Sequence: Synthetic oligonucleotide
  Antisense strand to SEQ ID NO: 1813517
aaucaacacaccuuuccag

SEQ ID NO: 1813519 - RNA, 19 nt, Artificial Sequence
  Description of Artificial Sequence: Synthetic oligonucleotide
  Sense strand starting at position 3277 of SEQ ID NO: 1563474
gggcaaagauacuuugugu

SEQ ID NO: 1813520 - RNA, 19 nt, Artificial Sequence
  Description of Artificial Sequence: Synthetic oligonucleotide
  Antisense strand to SEQ ID NO: 1813519
acacaaaguaucuuugccc

SEQ ID NO: 1813521 - RNA, 19 nt, Artificial Sequence
  Description of Artificial Sequence: Synthetic oligonucleotide
  Sense strand starting at position 3310 of SEQ ID NO: 1563474
guguuaguucuaggcuuag

SEQ ID NO: 1813522 - RNA, 19 nt, Artificial Sequence
  Description of Artificial Sequence: Synthetic oligonucleotide
  Antisense strand to SEQ ID NO: 1813521
cuaagccuagaacuaacac

SEQ ID NO: 1813523 - RNA, 19 nt, Artificial Sequence
  Description of Artificial Sequence: Synthetic oligonucleotide
  Sense strand starting at position 3314 of SEQ ID NO: 1563474
uaguucuaggcuuagauga

SEQ ID NO: 1813524 - RNA, 19 nt, Artificial Sequence
  Description of Artificial Sequence: Synthetic oligonucleotide
  Antisense strand to SEQ ID NO: 1813523
ucaucuaagccuagaacua

SEQ ID NO: 1813525 - RNA, 19 nt, Artificial Sequence
  Description of Artificial Sequence: Synthetic oligonucleotide
  Sense strand starting at position 3316 of SEQ ID NO: 1563474
guucuaggcuuagaugaua

SEQ ID NO: 1813526 - RNA, 19 nt, Artificial Sequence
  Description of Artificial Sequence: Synthetic oligonucleotide
  Antisense strand to SEQ ID NO: 1813525
uaucaucuaagccuagaac

SEQ ID NO: 1813527 - RNA, 19 nt, Artificial Sequence
  Description of Artificial Sequence: Synthetic oligonucleotide
  Sense strand starting at position 3321 of SEQ ID NO: 1563474
aggcuuagaugauaaugaa

SEQ ID NO: 1813528 - RNA, 19 nt, Artificial Sequence
  Description of Artificial Sequence: Synthetic oligonucleotide
  Antisense strand to SEQ ID NO: 1813527
uucauuaucaucuaagccu

SEQ ID NO: 1813529 - RNA, 19 nt, Artificial Sequence
  Description of Artificial Sequence: Synthetic oligonucleotide
  Sense strand starting at position 3324 of SEQ ID NO: 1563474
cuuagaugauaaugaacua

SEQ ID NO: 1813530 - RNA, 19 nt, Artificial Sequence
  Description of Artificial Sequence: Synthetic oligonucleotide
  Antisense strand to SEQ ID NO: 1813529
uaguucauuaucaucuaag

SEQ ID NO: 1813531 - RNA, 19 nt, Artificial Sequence
  Description of Artificial Sequence: Synthetic oligonucleotide
  Sense strand starting at position 3351 of SEQ ID NO: 1563474
ccgacauguguccagugau

SEQ ID NO: 1813532 - RNA, 19 nt, Artificial Sequence
  Description of Artificial Sequence: Synthetic oligonucleotide
  Antisense strand to SEQ ID NO: 1813531
aucacuggacacaugucgg

SEQ ID NO: 1813533 - RNA, 19 nt, Artificial Sequence
  Description of Artificial Sequence: Synthetic oligonucleotide
  Sense strand starting at position 3372 of SEQ ID NO: 1563474
aauuauucgcucuguggga

SEQ ID NO: 1813534 - RNA, 19 nt, Artificial Sequence
  Description of Artificial Sequence: Synthetic oligonucleotide
  Antisense strand to SEQ ID NO: 1813533
ucccacagagcgaauaauu

SEQ ID NO: 1813535 - RNA, 19 nt, Artificial Sequence
  Description of Artificial Sequence: Synthetic oligonucleotide
  Sense strand starting at position 3445 of SEQ ID NO: 1563474
aguagcucucgccagucau

SEQ ID NO: 1813536 - RNA, 19 nt, Artificial Sequence
  Description of Artificial Sequence: Synthetic oligonucleotide
  Antisense strand to SEQ ID NO: 1813535
augacuggcgagagcuacu

SEQ ID NO: 1813537 - RNA, 19 nt, Artificial Sequence
  Description of Artificial Sequence: Synthetic oligonucleotide
  Sense strand starting at position 3452 of SEQ ID NO: 1563474
cucgccagucauugugaca

SEQ ID NO: 1813538 - RNA, 19 nt, Artificial Sequence
  Description of Artificial Sequence: Synthetic oligonucleotide
  Antisense strand to SEQ ID NO: 1813537
ugucacaaugacuggcgag

SEQ ID NO: 1813539 - RNA, 19 nt, Artificial Sequence
  Description of Artificial Sequence: Synthetic oligonucleotide
  Sense strand starting at position 3505 of SEQ ID NO: 1563474
gagagccacuagguuuaau

SEQ ID NO: 1813540 - RNA, 19 nt, Artificial Sequence
  Description of Artificial Sequence: Synthetic oligonucleotide
  Antisense strand to SEQ ID NO: 1813539
auuaaaccuaguggcucuc

SEQ ID NO: 1813541 - RNA, 19 nt, Artificial Sequence
  Description of Artificial Sequence: Synthetic oligonucleotide
  Sense strand starting at position 3508 of SEQ ID NO: 1563474
agccacuagguuuaaugau

SEQ ID NO: 1813542 - RNA, 19 nt, Artificial Sequence
  Description of Artificial Sequence: Synthetic oligonucleotide
  Antisense strand to SEQ ID NO: 1813541
aucauuaaaccuaguggcu

SEQ ID NO: 1813543 - RNA, 19 nt, Artificial Sequence
  Description of Artificial Sequence: Synthetic oligonucleotide
  Sense strand starting at position 3533 of SEQ ID NO: 1563474
gucccuuccugcccugaga

SEQ ID NO: 1813544 - RNA, 19 nt, Artificial Sequence
  Description of Artificial Sequence: Synthetic oligonucleotide
  Antisense strand to SEQ ID NO: 1813543
ucucagggcaggaagggac

SEQ ID NO: 1813545 - RNA, 19 nt, Artificial Sequence
  Description of Artificial Sequence: Synthetic oligonucleotide
  Sense strand starting at position 3535 of SEQ ID NO: 1563474
cccuuccugcccugagauu

SEQ ID NO: 1813546 - RNA, 19 nt, Artificial Sequence
  Description of Artificial Sequence: Synthetic oligonucleotide
  Antisense strand to SEQ ID NO: 1813545
aaucucagggcaggaaggg

SEQ ID NO: 1813547 - RNA, 19 nt, Artificial Sequence
  Description of Artificial Sequence: Synthetic oligonucleotide
  Sense strand starting at position 3542 of SEQ ID NO: 1563474
ugcccugagauucguggau

SEQ ID NO: 1813548 - RNA, 19 nt, Artificial Sequence
  Description of Artificial Sequence: Synthetic oligonucleotide
  Antisense strand to SEQ ID NO: 1813547
auccacgaaucucagggca

SEQ ID NO: 1813549 - RNA, 19 nt, Artificial Sequence
  Description of Artificial Sequence: Synthetic oligonucleotide
  Sense strand starting at position 3544 of SEQ ID NO: 1563474
cccugagauucguggauuc

SEQ ID NO: 1813550 - RNA, 19 nt, Artificial Sequence
  Description of Artificial Sequence: Synthetic oligonucleotide
  Antisense strand to SEQ ID NO: 1813549
gaauccacgaaucucaggg

SEQ ID NO: 1813551 - RNA, 19 nt, Artificial Sequence
  Description of Artificial Sequence: Synthetic oligonucleotide
  Sense strand starting at position 3546 of SEQ ID NO: 1563474
cugagauucguggauucuc

SEQ ID NO: 1813552 - RNA, 19 nt, Artificial Sequence
  Description of Artificial Sequence: Synthetic oligonucleotide
  Antisense strand to SEQ ID NO: 1813551
gagaauccacgaaucucag

SEQ ID NO: 1813553 - RNA, 19 nt, Artificial Sequence
  Description of Artificial Sequence: Synthetic oligonucleotide
  Sense strand starting at position 3555 of SEQ ID NO: 1563474
guggauucucauggaguuu

SEQ ID NO: 1813554 - RNA, 19 nt, Artificial Sequence
  Description of Artificial Sequence: Synthetic oligonucleotide
  Antisense strand to SEQ ID NO: 1813553
aaacuccaugagaauccac

SEQ ID NO: 1813555 - RNA, 19 nt, Artificial Sequence
  Description of Artificial Sequence: Synthetic oligonucleotide
  Sense strand starting at position 3609 of SEQ ID NO: 1563474
uccuaugaaccaggguaaa

SEQ ID NO: 1813556 - RNA, 19 nt, Artificial Sequence
  Description of Artificial Sequence: Synthetic oligonucleotide
  Antisense strand to SEQ ID NO: 1813555
uuuacccugguucauagga

SEQ ID NO: 1813557 - RNA, 19 nt, Artificial Sequence
  Description of Artificial Sequence: Synthetic oligonucleotide
  Sense strand starting at position 3621 of SEQ ID NO: 1563474
ggguaaacaugagucaggu

SEQ ID NO: 1813558 - RNA, 19 nt, Artificial Sequence
  Description of Artificial Sequence: Synthetic oligonucleotide
  Antisense strand to SEQ ID NO: 1813557
accugacucauguuuaccc

SEQ ID NO: 1813559 - RNA, 19 nt, Artificial Sequence
  Description of Artificial Sequence: Synthetic oligonucleotide
  Sense strand starting at position 3625 of SEQ ID NO: 1563474
aaacaugagucagguucga

SEQ ID NO: 1813560 - RNA, 19 nt, Artificial Sequence
  Description of Artificial Sequence: Synthetic oligonucleotide
  Antisense strand to SEQ ID NO: 1813559
ucgaaccugacucauguuu

SEQ ID NO: 1813561 - RNA, 19 nt, Artificial Sequence
  Description of Artificial Sequence: Synthetic oligonucleotide
  Sense strand starting at position 3866 of SEQ ID NO: 1563474
acguuauaauuggaauauc

SEQ ID NO: 1813562 - RNA, 19 nt, Artificial Sequence
  Description of Artificial Sequence: Synthetic oligonucleotide
  Antisense strand to SEQ ID NO: 1813561
gauauuccaauuauaacgu

SEQ ID NO: 1813563 - RNA, 19 nt, Artificial Sequence
  Description of Artificial Sequence: Synthetic oligonucleotide
  Sense strand starting at position 3946 of SEQ ID NO: 1563474
aagaaugaugugcacacuu

SEQ ID NO: 1813564 - RNA, 19 nt, Artificial Sequence
  Description of Artificial Sequence: Synthetic oligonucleotide
  Antisense strand to SEQ ID NO: 1813563
aagugugcacaucauucuu

SEQ ID NO: 1813565 - RNA, 19 nt, Artificial Sequence
  Description of Artificial Sequence: Synthetic oligonucleotide
  Sense strand starting at position 3948 of SEQ ID NO: 1563474
gaaugaugugcacacuuga

SEQ ID NO: 1813566 - RNA, 19 nt, Artificial Sequence
  Description of Artificial Sequence: Synthetic oligonucleotide
  Antisense strand to SEQ ID NO: 1813565
ucaagugugcacaucauuc

SEQ ID NO: 1813567 - RNA, 19 nt, Artificial Sequence
  Description of Artificial Sequence: Synthetic oligonucleotide
  Sense strand starting at position 2011 of SEQ ID NO: 1563475
caauuauuuccgggugcua

SEQ ID NO: 1813568 - RNA, 19 nt, Artificial Sequence
  Description of Artificial Sequence: Synthetic oligonucleotide
  Antisense strand to SEQ ID NO: 1813567
uagcacccggaaauaauug

SEQ ID NO: 1813569 - RNA, 19 nt, Artificial Sequence
  Description of Artificial Sequence: Synthetic oligonucleotide
  Sense strand starting at position 2013 of SEQ ID NO: 1563475
auuauuuccgggugcuagu

SEQ ID NO: 1813570 - RNA, 19 nt, Artificial Sequence
  Description of Artificial Sequence: Synthetic oligonucleotide
  Antisense strand to SEQ ID NO: 1813569
acuagcacccggaaauaau

SEQ ID NO: 1813571 - RNA, 19 nt, Artificial Sequence
  Description of Artificial Sequence: Synthetic oligonucleotide
  Sense strand starting at position 2061 of SEQ ID NO: 1563475
accaguguuggcgucgaau

SEQ ID NO: 1813572 - RNA, 19 nt, Artificial Sequence
  Description of Artificial Sequence: Synthetic oligonucleotide
  Antisense strand to SEQ ID NO: 1813571
auucgacgccaacacuggu

SEQ ID NO: 1813573 - RNA, 19 nt, Artificial Sequence
  Description of Artificial Sequence: Synthetic oligonucleotide
  Sense strand starting at position 2073 of SEQ ID NO: 1563475
gucgaauuccgggucgugu

SEQ ID NO: 1813574 - RNA, 19 nt, Artificial Sequence
  Description of Artificial Sequence: Synthetic oligonucleotide
  Antisense strand to SEQ ID NO: 1813573
acacgacccggaauucgac

SEQ ID NO: 1813575 - RNA, 19 nt, Artificial Sequence
  Description of Artificial Sequence: Synthetic oligonucleotide
  Sense strand starting at position 2074 of SEQ ID NO: 1563475
ucgaauuccgggucgugua

SEQ ID NO: 1813576 - RNA, 19 nt, Artificial Sequence
  Description of Artificial Sequence: Synthetic oligonucleotide
  Antisense strand to SEQ ID NO: 1813575
uacacgacccggaauucga

SEQ ID NO: 1813577 - RNA, 19 nt, Artificial Sequence
  Description of Artificial Sequence: Synthetic oligonucleotide
  Sense strand starting at position 2103 of SEQ ID NO: 1563475
cuuugauggccugaccaau

SEQ ID NO: 1813578 - RNA, 19 nt, Artificial Sequence
  Description of Artificial Sequence: Synthetic oligonucleotide
  Antisense strand to SEQ ID NO: 1813577
auuggucaggccaucaaag

SEQ ID NO: 1813579 - RNA, 19 nt, Artificial Sequence
  Description of Artificial Sequence: Synthetic oligonucleotide
  Sense strand starting at position 2152 of SEQ ID NO: 1563475
ggcgucugugacgcaaauu

SEQ ID NO: 1813580 - RNA, 19 nt, Artificial Sequence
  Description of Artificial Sequence: Synthetic oligonucleotide
  Antisense strand to SEQ ID NO: 1813579
aauuugcgucacagacgcc

SEQ ID NO: 1813581 - RNA, 19 nt, Artificial Sequence
  Description of Artificial Sequence: Synthetic oligonucleotide
  Sense strand starting at position 2153 of SEQ ID NO: 1563475
gcgucugugacgcaaauuu

SEQ ID NO: 1813582 - RNA, 19 nt, Artificial Sequence
  Description of Artificial Sequence: Synthetic oligonucleotide
  Antisense strand to SEQ ID NO: 1813581
aaauuugcgucacagacgc

SEQ ID NO: 1813583 - RNA, 19 nt, Artificial Sequence
  Description of Artificial Sequence: Synthetic oligonucleotide
  Sense strand starting at position 2223 of SEQ ID NO: 1563475
aggaguaacugccuccuua

SEQ ID NO: 1813584 - RNA, 19 nt, Artificial Sequence
  Description of Artificial Sequence: Synthetic oligonucleotide
  Antisense strand to SEQ ID NO: 1813583
uaaggaggcaguuacuccu

SEQ ID NO: 1813585 - RNA, 19 nt, Artificial Sequence
  Description of Artificial Sequence: Synthetic oligonucleotide
  Sense strand starting at position 2267 of SEQ ID NO: 1563475
cacucuucucgugauaguu

SEQ ID NO: 1813586 - RNA, 19 nt, Artificial Sequence
  Description of Artificial Sequence: Synthetic oligonucleotide
  Antisense strand to SEQ ID NO: 1813585
aacuaucacgagaagagug

SEQ ID NO: 1813587 - RNA, 19 nt, Artificial Sequence
  Description of Artificial Sequence: Synthetic oligonucleotide
  Sense strand starting at position 2309 of SEQ ID NO: 1563475
ugaagcacgccuuaaacau

SEQ ID NO: 1813588 - RNA, 19 nt, Artificial Sequence
  Description of Artificial Sequence: Synthetic oligonucleotide
  Antisense strand to SEQ ID NO: 1813587
auguuuaaggcgugcuuca

SEQ ID NO: 1813589 - RNA, 19 nt, Artificial Sequence
  Description of Artificial Sequence: Synthetic oligonucleotide
  Sense strand starting at position 2462 of SEQ ID NO: 1563475
uacaguacuuugucaggau

SEQ ID NO: 1813590 - RNA, 19 nt, Artificial Sequence
  Description of Artificial Sequence: Synthetic oligonucleotide
  Antisense strand to SEQ ID NO: 1813589
auccugacaaaguacugua

SEQ ID NO: 1813591 - RNA, 19 nt, Artificial Sequence
  Description of Artificial Sequence: Synthetic oligonucleotide
  Sense strand starting at position 2466 of SEQ ID NO: 1563475
guacuuugucaggauaaau

SEQ ID NO: 1813592 - RNA, 19 nt, Artificial Sequence
  Description of Artificial Sequence: Synthetic oligonucleotide
  Antisense strand to SEQ ID NO: 1813591
auuuauccugacaaaguac

SEQ ID NO: 1813593 - RNA, 19 nt, Artificial Sequence
  Description of Artificial Sequence: Synthetic oligonucleotide
  Sense strand starting at position 2496 of SEQ ID NO: 1563475
uguccucuaguguaacuua

SEQ ID NO: 1813594 - RNA, 19 nt, Artificial Sequence
  Description of Artificial Sequence: Synthetic oligonucleotide
  Antisense strand to SEQ ID NO: 1813593
uaaguuacacuagaggaca

SEQ ID NO: 1813595 - RNA, 19 nt, Artificial Sequence
  Description of Artificial Sequence: Synthetic oligonucleotide
  Sense strand starting at position 2499 of SEQ ID NO: 1563475
ccucuaguguaacuuaaau

SEQ ID NO: 1813596 - RNA, 19 nt, Artificial Sequence
  Description of Artificial Sequence: Synthetic oligonucleotide
  Antisense strand to SEQ ID NO: 1813595
auuuaaguuacacuagagg

SEQ ID NO: 1813597 - RNA, 19 nt, Artificial Sequence
  Description of Artificial Sequence: Synthetic oligonucleotide
  Sense strand starting at position 2529 of SEQ ID NO: 1563475
gaaaucucuuaggugcaca

SEQ ID NO: 1813598 - RNA, 19 nt, Artificial Sequence
  Description of Artificial Sequence: Synthetic oligonucleotide
  Antisense strand to SEQ ID NO: 1813597
ugugcaccuaagagauuuc

SEQ ID NO: 1813599 - RNA, 19 nt, Artificial Sequence
  Description of Artificial Sequence: Synthetic oligonucleotide
  Sense strand starting at position 2625 of SEQ ID NO: 1563475
ggaugaugguuagaagaga

SEQ ID NO: 1813600 - RNA, 19 nt, Artificial Sequence
  Description of Artificial Sequence: Synthetic oligonucleotide
  Antisense strand to SEQ ID NO: 1813599
ucucuucuaaccaucaucc

SEQ ID NO: 1813601 - RNA, 19 nt, Artificial Sequence
  Description of Artificial Sequence: Synthetic oligonucleotide
  Sense strand starting at position 2642 of SEQ ID NO: 1563475
gagguaaagcagugccuaa

SEQ ID NO: 1813602 - RNA, 19 nt, Artificial Sequence
  Description of Artificial Sequence: Synthetic oligonucleotide
  Antisense strand to SEQ ID NO: 1813601
uuaggcacugcuuuaccuc

SEQ ID NO: 1813603 - RNA, 19 nt, Artificial Sequence
  Description of Artificial Sequence: Synthetic oligonucleotide
  Sense strand starting at position 2782 of SEQ ID NO: 1563475
uuauuagguacacguagaa

SEQ ID NO: 1813604 - RNA, 19 nt, Artificial Sequence
  Description of Artificial Sequence: Synthetic oligonucleotide
  Antisense strand to SEQ ID NO: 1813603
uucuacguguaccuaauaa

SEQ ID NO: 1813605 - RNA, 19 nt, Artificial Sequence
  Description of Artificial Sequence: Synthetic oligonucleotide
  Sense strand starting at position 2799 of SEQ ID NO: 1563475
aagacauucuagcugcagu

SEQ ID NO: 1813606 - RNA, 19 nt, Artificial Sequence
  Description of Artificial Sequence: Synthetic oligonucleotide
  Antisense strand to SEQ ID NO: 1813605
acugcagcuagaaugucuu

SEQ ID NO: 1813607 - RNA, 19 nt, Artificial Sequence
  Description of Artificial Sequence: Synthetic oligonucleotide
  Sense strand starting at position 2895 of SEQ ID NO: 1563475
ccauuaugaggcuguuuaa

SEQ ID NO: 1813608 - RNA, 19 nt, Artificial Sequence
  Description of Artificial Sequence: Synthetic oligonucleotide
  Antisense strand to SEQ ID NO: 1813607
uuaaacagccucauaaugg

SEQ ID NO: 1813609 - RNA, 19 nt, Artificial Sequence
  Description of Artificial Sequence: Synthetic oligonucleotide
  Sense strand starting at position 2905 of SEQ ID NO: 1563475
gcuguuuaaugguuacaaa

SEQ ID NO: 1813610 - RNA, 19 nt, Artificial Sequence
  Description of Artificial Sequence: Synthetic oligonucleotide
  Antisense strand to SEQ ID NO: 1813609
uuuguaaccauuaaacagc

SEQ ID NO: 1813611 - RNA, 19 nt, Artificial Sequence
  Description of Artificial Sequence: Synthetic oligonucleotide
  Sense strand starting at position 2945 of SEQ ID NO: 1563475
cggcuuccuguguccuuaa

SEQ ID NO: 1813612 - RNA, 19 nt, Artificial Sequence
  Description of Artificial Sequence: Synthetic oligonucleotide
  Antisense strand to SEQ ID NO: 1813611
uuaaggacacaggaagccg

SEQ ID NO: 1813613 - RNA, 19 nt, Artificial Sequence
  Description of Artificial Sequence: Synthetic oligonucleotide
  Sense strand starting at position 2947 of SEQ ID NO: 1563475
gcuuccuguguccuuaagu

SEQ ID NO: 1813614 - RNA, 19 nt, Artificial Sequence
  Description of Artificial Sequence: Synthetic oligonucleotide
  Antisense strand to SEQ ID NO: 1813613
acuuaaggacacaggaagc

SEQ ID NO: 1813615 - RNA, 19 nt, Artificial Sequence
  Description of Artificial Sequence: Synthetic oligonucleotide
  Sense strand starting at position 2962 of SEQ ID NO: 1563475
aaguccuucugaguucuga

SEQ ID NO: 1813616 - RNA, 19 nt, Artificial Sequence
  Description of Artificial Sequence: Synthetic oligonucleotide
  Antisense strand to SEQ ID NO: 1813615
ucagaacucagaaggacuu

SEQ ID NO: 1813617 - RNA, 19 nt, Artificial Sequence
  Description of Artificial Sequence: Synthetic oligonucleotide
  Sense strand starting at position 2987 of SEQ ID NO: 1563475
acagaauaggcuugauucu

SEQ ID NO: 1813618 - RNA, 19 nt, Artificial Sequence
  Description of Artificial Sequence: Synthetic oligonucleotide
  Antisense strand to SEQ ID NO: 1813617
agaaucaagccuauucugu

SEQ ID NO: 1813619 - RNA, 19 nt, Artificial Sequence
  Description of Artificial Sequence: Synthetic oligonucleotide
  Sense strand starting at position 2994 of SEQ ID NO: 1563475
aggcuugauucuccuguau

SEQ ID NO: 1813620 - RNA, 19 nt, Artificial Sequence
  Description of Artificial Sequence: Synthetic oligonucleotide
  Antisense strand to SEQ ID NO: 1813619
auacaggagaaucaagccu

SEQ ID NO: 1813621 - RNA, 19 nt, Artificial Sequence
  Description of Artificial Sequence: Synthetic oligonucleotide
  Sense strand starting at position 2998 of SEQ ID NO: 1563475
uugauucuccuguauccuu

SEQ ID NO: 1813622 - RNA, 19 nt, Artificial Sequence
  Description of Artificial Sequence: Synthetic oligonucleotide
  Antisense strand to SEQ ID NO: 1813621
aaggauacaggagaaucaa

SEQ ID NO: 1813623 - RNA, 19 nt, Artificial Sequence
  Description of Artificial Sequence: Synthetic oligonucleotide
  Sense strand starting at position 3008 of SEQ ID NO: 1563475
uguauccuuguguacuaaa

SEQ ID NO: 1813624 - RNA, 19 nt, Artificial Sequence
  Description of Artificial Sequence: Synthetic oligonucleotide
  Antisense strand to SEQ ID NO: 1813623
uuuaguacacaaggauaca

SEQ ID NO: 1813625 - RNA, 19 nt, Artificial Sequence
  Description of Artificial Sequence: Synthetic oligonucleotide
  Sense strand starting at position 3469 of SEQ ID NO: 1563475
uugccucuccuuuggaaau

SEQ ID NO: 1813626 - RNA, 19 nt, Artificial Sequence
  Description of Artificial Sequence: Synthetic oligonucleotide
  Antisense strand to SEQ ID NO: 1813625
auuuccaaaggagaggcaa

SEQ ID NO: 1813627 - RNA, 19 nt, Artificial Sequence
  Description of Artificial Sequence: Synthetic oligonucleotide
  Sense strand starting at position 3545 of SEQ ID NO: 1563475
agcaaacaaucugcagaaa

SEQ ID NO: 1813628 - RNA, 19 nt, Artificial Sequence
  Description of Artificial Sequence: Synthetic oligonucleotide
  Antisense strand to SEQ ID NO: 1813627
uuucugcagauuguuugcu

SEQ ID NO: 1813629 - RNA, 19 nt, Artificial Sequence
  Description of Artificial Sequence: Synthetic oligonucleotide
  Sense strand starting at position 3590 of SEQ ID NO: 1563475
cuuuacugagcaugacaau

SEQ ID NO: 1813630 - RNA, 19 nt, Artificial Sequence
  Description of Artificial Sequence: Synthetic oligonucleotide
  Antisense strand to SEQ ID NO: 1813629
auugucaugcucaguaaag

SEQ ID NO: 1813631 - RNA, 19 nt, Artificial Sequence
  Description of Artificial Sequence: Synthetic oligonucleotide
  Sense strand starting at position 3591 of SEQ ID NO: 1563475
uuuacugagcaugacaauu

SEQ ID NO: 1813632 - RNA, 19 nt, Artificial Sequence
  Description of Artificial Sequence: Synthetic oligonucleotide
  Antisense strand to SEQ ID NO: 1813631
aauugucaugcucaguaaa

SEQ ID NO: 1813633 - RNA, 19 nt, Artificial Sequence
  Description of Artificial Sequence: Synthetic oligonucleotide
  Sense strand starting at position 3654 of SEQ ID NO: 1563475
aguaacaugacgugcauuu

SEQ ID NO: 1813634 - RNA, 19 nt, Artificial Sequence
  Description of Artificial Sequence: Synthetic oligonucleotide
  Antisense strand to SEQ ID NO: 1813633
aaaugcacgucauguuacu

SEQ ID NO: 1813635 - RNA, 19 nt, Artificial Sequence
  Description of Artificial Sequence: Synthetic oligonucleotide
  Sense strand starting at position 3727 of SEQ ID NO: 1563475
aaaugaagacuauguaugu

SEQ ID NO: 1813636 - RNA, 19 nt, Artificial Sequence
  Description of Artificial Sequence: Synthetic oligonucleotide
  Antisense strand to SEQ ID NO: 1813635
acauacauagucuucauuu

SEQ ID NO: 1813637 - RNA, 19 nt, Artificial Sequence
  Description of Artificial Sequence: Synthetic oligonucleotide
  Sense strand starting at position 3728 of SEQ ID NO: 1563475
aaugaagacuauguaugua

SEQ ID NO: 1813638 - RNA, 19 nt, Artificial Sequence
  Description of Artificial Sequence: Synthetic oligonucleotide
  Antisense strand to SEQ ID NO: 1813637
uacauacauagucuucauu

SEQ ID NO: 1813639 - RNA, 19 nt, Artificial Sequence
  Description of Artificial Sequence: Synthetic oligonucleotide
  Sense strand starting at position 3827 of SEQ ID NO: 1563475
ucauauuagucucuaguuu

SEQ ID NO: 1813640 - RNA, 19 nt, Artificial Sequence
  Description of Artificial Sequence: Synthetic oligonucleotide
  Antisense strand to SEQ ID NO: 1813639
aaacuagagacuaauauga

SEQ ID NO: 1813641 - RNA, 19 nt, Artificial Sequence
  Description of Artificial Sequence: Synthetic oligonucleotide
  Sense strand starting at position 3887 of SEQ ID NO: 1563475
uuuagucagucacugauua

SEQ ID NO: 1813642 - RNA, 19 nt, Artificial Sequence
  Description of Artificial Sequence: Synthetic oligonucleotide
  Antisense strand to SEQ ID NO: 1813641
uaaucagugacugacuaaa

SEQ ID NO: 1813643 - RNA, 19 nt, Artificial Sequence
  Description of Artificial Sequence: Synthetic oligonucleotide
  Sense strand starting at position 3888 of SEQ ID NO: 1563475
uuagucagucacugauuaa

SEQ ID NO: 1813644 - RNA, 19 nt, Artificial Sequence
  Description of Artificial Sequence: Synthetic oligonucleotide
  Antisense strand to SEQ ID NO: 1813643
uuaaucagugacugacuaa

SEQ ID NO: 1813645 - RNA, 19 nt, Artificial Sequence
  Description of Artificial Sequence: Synthetic oligonucleotide
  Sense strand starting at position 3917 of SEQ ID NO: 1563475
uggucuaguauaggacaga

SEQ ID NO: 1813646 - RNA, 19 nt, Artificial Sequence
  Description of Artificial Sequence: Synthetic oligonucleotide
  Antisense strand to SEQ ID NO: 1813645
ucuguccuauacuagacca

SEQ ID NO: 1813647 - RNA, 19 nt, Artificial Sequence
  Description of Artificial Sequence: Synthetic oligonucleotide
  Sense strand starting at position 82 of SEQ ID NO: 1563476
aauagcaagucucuuagga

SEQ ID NO: 1813648 - RNA, 19 nt, Artificial Sequence
  Description of Artificial Sequence: Synthetic oligonucleotide
  Antisense strand to SEQ ID NO: 1813647
uccuaagagacuugcuauu

SEQ ID NO: 1813649 - RNA, 19 nt, Artificial Sequence
  Description of Artificial Sequence: Synthetic oligonucleotide
  Sense strand starting at position 236 of SEQ ID NO: 1563476
augacuuucuucucucgau

SEQ ID NO: 1813650 - RNA, 19 nt, Artificial Sequence
  Description of Artificial Sequence: Synthetic oligonucleotide
  Antisense strand to SEQ ID NO: 1813649
aucgagagaagaaagucau

SEQ ID NO: 1813651 - RNA, 19 nt, Artificial Sequence
  Description of Artificial Sequence: Synthetic oligonucleotide
  Sense strand starting at position 237 of SEQ ID NO: 1563476
ugacuuucuucucucgaua

SEQ ID NO: 1813652 - RNA, 19 nt, Artificial Sequence
  Description of Artificial Sequence: Synthetic oligonucleotide
  Antisense strand to SEQ ID NO: 1813651
uaucgagagaagaaaguca

SEQ ID NO: 1813653 - RNA, 19 nt, Artificial Sequence
  Description of Artificial Sequence: Synthetic oligonucleotide
  Sense strand starting at position 240 of SEQ ID NO: 1563476
cuuucuucucucgauauag

SEQ ID NO: 1813654 - RNA, 19 nt, Artificial Sequence
  Description of Artificial Sequence: Synthetic oligonucleotide
  Antisense strand to SEQ ID NO: 1813653
cuauaucgagagaagaaag

SEQ ID NO: 1813655 - RNA, 19 nt, Artificial Sequence
  Description of Artificial Sequence: Synthetic oligonucleotide
  Sense strand starting at position 242 of SEQ ID NO: 1563476
uucuucucucgauauagcu

SEQ ID NO: 1813656 - RNA, 19 nt, Artificial Sequence
  Description of Artificial Sequence: Synthetic oligonucleotide
  Antisense strand to SEQ ID NO: 1813655
agcuauaucgagagaagaa

SEQ ID NO: 1813657 - RNA, 19 nt, Artificial Sequence
  Description of Artificial Sequence: Synthetic oligonucleotide
  Sense strand starting at position 306 of SEQ ID NO: 1563476
gcuuaauaagucugcauuu

SEQ ID NO: 1813658 - RNA, 19 nt, Artificial Sequence
  Description of Artificial Sequence: Synthetic oligonucleotide
  Antisense strand to SEQ ID NO: 1813657
aaaugcagacuuauuaagc

SEQ ID NO: 1813659 - RNA, 19 nt, Artificial Sequence
  Description of Artificial Sequence: Synthetic oligonucleotide
  Sense strand starting at position 365 of SEQ ID NO: 1563476
uggacccuuucucugaaua

SEQ ID NO: 1813660 - RNA, 19 nt, Artificial Sequence
  Description of Artificial Sequence: Synthetic oligonucleotide
  Antisense strand to SEQ ID NO: 1813659
uauucagagaaagggucca

SEQ ID NO: 1813661 - RNA, 19 nt, Artificial Sequence
  Description of Artificial Sequence: Synthetic oligonucleotide
  Sense strand starting at position 366 of SEQ ID NO: 1563476
ggacccuuucucugaauaa

SEQ ID NO: 1813662 - RNA, 19 nt, Artificial Sequence
  Description of Artificial Sequence: Synthetic oligonucleotide
  Antisense strand to SEQ ID NO: 1813661
uuauucagagaaagggucc

SEQ ID NO: 1813663 - RNA, 19 nt, Artificial Sequence
  Description of Artificial Sequence: Synthetic oligonucleotide
  Sense strand starting at position 553 of SEQ ID NO: 1563476
ugaaguagucgugaacaua

SEQ ID NO: 1813664 - RNA, 19 nt, Artificial Sequence
  Description of Artificial Sequence: Synthetic oligonucleotide
  Antisense strand to SEQ ID NO: 1813663
uauguucacgacuacuuca

SEQ ID NO: 1813665 - RNA, 19 nt, Artificial Sequence
  Description of Artificial Sequence: Synthetic oligonucleotide
  Sense strand starting at position 556 of SEQ ID NO: 1563476
aguagucgugaacauaaau

SEQ ID NO: 1813666 - RNA, 19 nt, Artificial Sequence
  Description of Artificial Sequence: Synthetic oligonucleotide
  Antisense strand to SEQ ID NO: 1813665
auuuauguucacgacuacu

SEQ ID NO: 1813667 - RNA, 19 nt, Artificial Sequence
  Description of Artificial Sequence: Synthetic oligonucleotide
  Sense strand starting at position 610 of SEQ ID NO: 1563476
aaugcaaaucucugugaug

SEQ ID NO: 1813668 - RNA, 19 nt, Artificial Sequence
  Description of Artificial Sequence: Synthetic oligonucleotide
  Antisense strand to SEQ ID NO: 1813667
caucacagagauuugcauu

SEQ ID NO: 1813669 - RNA, 19 nt, Artificial Sequence
  Description of Artificial Sequence: Synthetic oligonucleotide
  Sense strand starting at position 611 of SEQ ID NO: 1563476
augcaaaucucugugaugu

SEQ ID NO: 1813670 - RNA, 19 nt, Artificial Sequence
  Description of Artificial Sequence: Synthetic oligonucleotide
  Antisense strand to SEQ ID NO: 1813669
acaucacagagauuugcau

SEQ ID NO: 1813671 - RNA, 19 nt, Artificial Sequence
  Description of Artificial Sequence: Synthetic oligonucleotide
  Sense strand starting at position 1071 of SEQ ID NO: 1563476
gugggagaggcccaacauu

SEQ ID NO: 1813672 - RNA, 19 nt, Artificial Sequence
  Description of Artificial Sequence: Synthetic oligonucleotide
  Antisense strand to SEQ ID NO: 1813671
aauguugggccucucccac

SEQ ID NO: 1813673 - RNA, 19 nt, Artificial Sequence
  Description of Artificial Sequence: Synthetic oligonucleotide
  Sense strand starting at position 1262 of SEQ ID NO: 1563476
ugcccugucccugaauaug

SEQ ID NO: 1813674 - RNA, 19 nt, Artificial Sequence
  Description of Artificial Sequence: Synthetic oligonucleotide
  Antisense strand to SEQ ID NO: 1813673
cauauucagggacagggca

SEQ ID NO: 1813675 - RNA, 19 nt, Artificial Sequence
  Description of Artificial Sequence: Synthetic oligonucleotide
  Sense strand starting at position 1685 of SEQ ID NO: 1563476
gccuuugugccagccagau

SEQ ID NO: 1813676 - RNA, 19 nt, Artificial Sequence
  Description of Artificial Sequence: Synthetic oligonucleotide
  Antisense strand to SEQ ID NO: 1813675
aucuggcuggcacaaaggc

SEQ ID NO: 1813677 - RNA, 19 nt, Artificial Sequence
  Description of Artificial Sequence: Synthetic oligonucleotide
  Sense strand starting at position 1726 of SEQ ID NO: 1563476
cccagaugaucucuuugga

SEQ ID NO: 1813678 - RNA, 19 nt, Artificial Sequence
  Description of Artificial Sequence: Synthetic oligonucleotide
  Antisense strand to SEQ ID NO: 1813677
uccaaagagaucaucuggg

SEQ ID NO: 1813679 - RNA, 19 nt, Artificial Sequence
  Description of Artificial Sequence: Synthetic oligonucleotide
  Sense strand starting at position 1729 of SEQ ID NO: 1563476
agaugaucucuuuggaacc

SEQ ID NO: 1813680 - RNA, 19 nt, Artificial Sequence
  Description of Artificial Sequence: Synthetic oligonucleotide
  Antisense strand to SEQ ID NO: 1813679
gguuccaaagagaucaucu

SEQ ID NO: 1813681 - RNA, 19 nt, Artificial Sequence
  Description of Artificial Sequence: Synthetic oligonucleotide
  Sense strand starting at position 1991 of SEQ ID NO: 1563476
aaucucuuacuguggagua

SEQ ID NO: 1813682 - RNA, 19 nt, Artificial Sequence
  Description of Artificial Sequence: Synthetic oligonucleotide
  Antisense strand to SEQ ID NO: 1813681
uacuccacaguaagagauu

SEQ ID NO: 1813683 - RNA, 19 nt, Artificial Sequence
  Description of Artificial Sequence: Synthetic oligonucleotide
  Sense strand starting at position 1996 of SEQ ID NO: 1563476
cuuacuguggaguaagauu

SEQ ID NO: 1813684 - RNA, 19 nt, Artificial Sequence
  Description of Artificial Sequence: Synthetic oligonucleotide
  Antisense strand to SEQ ID NO: 1813683
aaucuuacuccacaguaag

SEQ ID NO: 1813685 - RNA, 19 nt, Artificial Sequence
  Description of Artificial Sequence: Synthetic oligonucleotide
  Sense strand starting at position 2027 of SEQ ID NO: 1563476
uuugucaggcuugaccaaa

SEQ ID NO: 1813686 - RNA, 19 nt, Artificial Sequence
  Description of Artificial Sequence: Synthetic oligonucleotide
  Antisense strand to SEQ ID NO: 1813685
uuuggucaagccugacaaa

SEQ ID NO: 1813687 - RNA, 19 nt, Artificial Sequence
  Description of Artificial Sequence: Synthetic oligonucleotide
  Sense strand starting at position 2207 of SEQ ID NO: 1563476
uugauaaaucagcgcagga

SEQ ID NO: 1813688 - RNA, 19 nt, Artificial Sequence
  Description of Artificial Sequence: Synthetic oligonucleotide
  Antisense strand to SEQ ID NO: 1813687
uccugcgcugauuuaucaa

SEQ ID NO: 1813689 - RNA, 19 nt, Artificial Sequence
  Description of Artificial Sequence: Synthetic oligonucleotide
  Sense strand starting at position 2209 of SEQ ID NO: 1563476
gauaaaucagcgcaggaag

SEQ ID NO: 1813690 - RNA, 19 nt, Artificial Sequence
  Description of Artificial Sequence: Synthetic oligonucleotide
  Antisense strand to SEQ ID NO: 1813689
cuuccugcgcugauuuauc

SEQ ID NO: 1813691 - RNA, 19 nt, Artificial Sequence
  Description of Artificial Sequence: Synthetic oligonucleotide
  Sense strand starting at position 2228 of SEQ ID NO: 1563476
agaguaucuugggccucaa

SEQ ID NO: 1813692 - RNA, 19 nt, Artificial Sequence
  Description of Artificial Sequence: Synthetic oligonucleotide
  Antisense strand to SEQ ID NO: 1813691
uugaggcccaagauacucu

SEQ ID NO: 1813693 - RNA, 19 nt, Artificial Sequence
  Description of Artificial Sequence: Synthetic oligonucleotide
  Sense strand starting at position 2472 of SEQ ID NO: 1563476
uuaucauagagcgggagaa

SEQ ID NO: 1813694 - RNA, 19 nt, Artificial Sequence
  Description of Artificial Sequence: Synthetic oligonucleotide
  Antisense strand to SEQ ID NO: 1813693
uucucccgcucuaugauaa

SEQ ID NO: 1813695 - RNA, 19 nt, Artificial Sequence
  Description of Artificial Sequence: Synthetic oligonucleotide
  Sense strand starting at position 2473 of SEQ ID NO: 1563476
uaucauagagcgggagaaa

SEQ ID NO: 1813696 - RNA, 19 nt, Artificial Sequence
  Description of Artificial Sequence: Synthetic oligonucleotide
  Antisense strand to SEQ ID NO: 1813695
uuucucccgcucuaugaua

SEQ ID NO: 1813697 - RNA, 19 nt, Artificial Sequence
  Description of Artificial Sequence: Synthetic oligonucleotide
  Sense strand starting at position 2564 of SEQ ID NO: 1563476
guuacaucucucuagagcu

SEQ ID NO: 1813698 - RNA, 19 nt, Artificial Sequence
  Description of Artificial Sequence: Synthetic oligonucleotide
  Antisense strand to SEQ ID NO: 1813697
agcucuagagagauguaac

SEQ ID NO: 1813699 - RNA, 19 nt, Artificial Sequence
  Description of Artificial Sequence: Synthetic oligonucleotide
  Sense strand starting at position 2810 of SEQ ID NO: 1563476
guuuccugucauuacuacu

SEQ ID NO: 1813700 - RNA, 19 nt, Artificial Sequence
  Description of Artificial Sequence: Synthetic oligonucleotide
  Antisense strand to SEQ ID NO: 1813699
aguaguaaugacaggaaac

SEQ ID NO: 1813701 - RNA, 19 nt, Artificial Sequence
  Description of Artificial Sequence: Synthetic oligonucleotide
  Sense strand starting at position 2816 of SEQ ID NO: 1563476
ugucauuacuacucacuga

SEQ ID NO: 1813702 - RNA, 19 nt, Artificial Sequence
  Description of Artificial Sequence: Synthetic oligonucleotide
  Antisense strand to SEQ ID NO: 1813701
ucagugaguaguaaugaca

SEQ ID NO: 1813703 - RNA, 19 nt, Artificial Sequence
  Description of Artificial Sequence: Synthetic oligonucleotide
  Sense strand starting at position 3177 of SEQ ID NO: 1563476
uucugucacuaucuauuga

SEQ ID NO: 1813704 - RNA, 19 nt, Artificial Sequence
  Description of Artificial Sequence: Synthetic oligonucleotide
  Antisense strand to SEQ ID NO: 1813703
ucaauagauagugacagaa

SEQ ID NO: 1813705 - RNA, 19 nt, Artificial Sequence
  Description of Artificial Sequence: Synthetic oligonucleotide
  Sense strand starting at position 3220 of SEQ ID NO: 1563476
uguuuaggugcugaggauu

SEQ ID NO: 1813706 - RNA, 19 nt, Artificial Sequence
  Description of Artificial Sequence: Synthetic oligonucleotide
  Antisense strand to SEQ ID NO: 1813705
aauccucagcaccuaaaca

SEQ ID NO: 1813707 - RNA, 19 nt, Artificial Sequence
  Description of Artificial Sequence: Synthetic oligonucleotide
  Sense strand starting at position 3554 of SEQ ID NO: 1563476
agcagaaggccuugaauau

SEQ ID NO: 1813708 - RNA, 19 nt, Artificial Sequence
  Description of Artificial Sequence: Synthetic oligonucleotide
  Antisense strand to SEQ ID NO: 1813707
auauucaaggccuucugcu

SEQ ID NO: 1813709 - RNA, 19 nt, Artificial Sequence
  Description of Artificial Sequence: Synthetic oligonucleotide
  Sense strand starting at position 3555 of SEQ ID NO: 1563476
gcagaaggccuugaauaua

SEQ ID NO: 1813710 - RNA, 19 nt, Artificial Sequence
  Description of Artificial Sequence: Synthetic oligonucleotide
  Antisense strand to SEQ ID NO: 1813709
uauauucaaggccuucugc

SEQ ID NO: 1813711 - RNA, 19 nt, Artificial Sequence
  Description of Artificial Sequence: Synthetic oligonucleotide
  Sense strand starting at position 3731 of SEQ ID NO: 1563476
uugggcuucccgcauuaga

SEQ ID NO: 1813712 - RNA, 19 nt, Artificial Sequence
  Description of Artificial Sequence: Synthetic oligonucleotide
  Antisense strand to SEQ ID NO: 1813711
ucuaaugcgggaagcccaa

SEQ ID NO: 1813713 - RNA, 19 nt, Artificial Sequence
  Description of Artificial Sequence: Synthetic oligonucleotide
  Sense strand starting at position 3739 of SEQ ID NO: 1563476
cccgcauuagacugaccaa

SEQ ID NO: 1813714 - RNA, 19 nt, Artificial Sequence
  Description of Artificial Sequence: Synthetic oligonucleotide
  Antisense strand to SEQ ID NO: 1813713
uuggucagucuaaugcggg

SEQ ID NO: 1813715 - RNA, 19 nt, Artificial Sequence
  Description of Artificial Sequence: Synthetic oligonucleotide
  Sense strand starting at position 3742 of SEQ ID NO: 1563476
gcauuagacugaccaaugu

SEQ ID NO: 1813716 - RNA, 19 nt, Artificial Sequence
  Description of Artificial Sequence: Synthetic oligonucleotide
  Antisense strand to SEQ ID NO: 1813715
acauuggucagucuaaugc

SEQ ID NO: 1813717 - RNA, 19 nt, Artificial Sequence
  Description of Artificial Sequence: Synthetic oligonucleotide
  Sense strand starting at position 3746 of SEQ ID NO: 1563476
uagacugaccaaugugacu

SEQ ID NO: 1813718 - RNA, 19 nt, Artificial Sequence
  Description of Artificial Sequence: Synthetic oligonucleotide
  Antisense strand to SEQ ID NO: 1813717
agucacauuggucagucua

SEQ ID NO: 1813719 - RNA, 19 nt, Artificial Sequence
  Description of Artificial Sequence: Synthetic oligonucleotide
  Sense strand starting at position 3827 of SEQ ID NO: 1563476
gcacuagauggucaucuga

SEQ ID NO: 1813720 - RNA, 19 nt, Artificial Sequence
  Description of Artificial Sequence: Synthetic oligonucleotide
  Antisense strand to SEQ ID NO: 1813719
ucagaugaccaucuagugc

SEQ ID NO: 1813721 - RNA, 19 nt, Artificial Sequence
  Description of Artificial Sequence: Synthetic oligonucleotide
  Sense strand starting at position 3829 of SEQ ID NO: 1563476
acuagauggucaucugaca

SEQ ID NO: 1813722 - RNA, 19 nt, Artificial Sequence
  Description of Artificial Sequence: Synthetic oligonucleotide
  Antisense strand to SEQ ID NO: 1813721
ugucagaugaccaucuagu

SEQ ID NO: 1813723 - RNA, 19 nt, Artificial Sequence
  Description of Artificial Sequence: Synthetic oligonucleotide
  Sense strand starting at position 3836 of SEQ ID NO: 1563476
ggucaucugacaugcgaca

SEQ ID NO: 1813724 - RNA, 19 nt, Artificial Sequence
  Description of Artificial Sequence: Synthetic oligonucleotide
  Antisense strand to SEQ ID NO: 1813723
ugucgcaugucagaugacc

SEQ ID NO: 1813725 - RNA, 19 nt, Artificial Sequence
  Description of Artificial Sequence: Synthetic oligonucleotide
  Sense strand starting at position 3922 of SEQ ID NO: 1563476
gcugcuugaccacauagaa

SEQ ID NO: 1813726 - RNA, 19 nt, Artificial Sequence
  Description of Artificial Sequence: Synthetic oligonucleotide
  Antisense strand to SEQ ID NO: 1813725
uucuauguggucaagcagc

SEQ ID NO: 1813727 - RNA, 19 nt, Artificial Sequence
  Description of Artificial Sequence: Synthetic oligonucleotide
  Sense strand starting at position 8 of SEQ ID NO: 1563477
uucuacauucuauaagugu

SEQ ID NO: 1813728 - RNA, 19 nt, Artificial Sequence
  Description of Artificial Sequence: Synthetic oligonucleotide
  Antisense strand to SEQ ID NO: 1813727
acacuuauagaauguagaa

SEQ ID NO: 1813729 - RNA, 19 nt, Artificial Sequence
  Description of Artificial Sequence: Synthetic oligonucleotide
  Sense strand starting at position 47 of SEQ ID NO: 1563477
uccugagccguguccuuau

SEQ ID NO: 1813730 - RNA, 19 nt, Artificial Sequence
  Description of Artificial Sequence: Synthetic oligonucleotide
  Antisense strand to SEQ ID NO: 1813729
auaaggacacggcucagga

SEQ ID NO: 1813731 - RNA, 19 nt, Artificial Sequence
  Description of Artificial Sequence: Synthetic oligonucleotide
  Sense strand starting at position 91 of SEQ ID NO: 1563477
gguauuguucguguguugu

SEQ ID NO: 1813732 - RNA, 19 nt, Artificial Sequence
  Description of Artificial Sequence: Synthetic oligonucleotide
  Antisense strand to SEQ ID NO: 1813731
acaacacacgaacaauacc

SEQ ID NO: 1813733 - RNA, 19 nt, Artificial Sequence
  Description of Artificial Sequence: Synthetic oligonucleotide
  Sense strand starting at position 363 of SEQ ID NO: 1563477
gggcgagugccagaagauu

SEQ ID NO: 1813734 - RNA, 19 nt, Artificial Sequence
  Description of Artificial Sequence: Synthetic oligonucleotide
  Antisense strand to SEQ ID NO: 1813733
aaucuucuggcacucgccc

SEQ ID NO: 1813735 - RNA, 19 nt, Artificial Sequence
  Description of Artificial Sequence: Synthetic oligonucleotide
  Sense strand starting at position 502 of SEQ ID NO: 1563477
ccaggacuccuguaccauu

SEQ ID NO: 1813736 - RNA, 19 nt, Artificial Sequence
  Description of Artificial Sequence: Synthetic oligonucleotide
  Antisense strand to SEQ ID NO: 1813735
aaugguacaggaguccugg

SEQ ID NO: 1813737 - RNA, 19 nt, Artificial Sequence
  Description of Artificial Sequence: Synthetic oligonucleotide
  Sense strand starting at position 907 of SEQ ID NO: 1563477
ucaauccguccgcuaugua

SEQ ID NO: 1813738 - RNA, 19 nt, Artificial Sequence
  Description of Artificial Sequence: Synthetic oligonucleotide
  Antisense strand to SEQ ID NO: 1813737
uacauagcggacggauuga

SEQ ID NO: 1813739 - RNA, 19 nt, Artificial Sequence
  Description of Artificial Sequence: Synthetic oligonucleotide
  Sense strand starting at position 1097 of SEQ ID NO: 1563477
ucucgauucccacauguug

SEQ ID NO: 1813740 - RNA, 19 nt, Artificial Sequence
  Description of Artificial Sequence: Synthetic oligonucleotide
  Antisense strand to SEQ ID NO: 1813739
caacaugugggaaucgaga

SEQ ID NO: 1813741 - RNA, 19 nt, Artificial Sequence
  Description of Artificial Sequence: Synthetic oligonucleotide
  Sense strand starting at position 1350 of SEQ ID NO: 1563477
uggcgaggucuuuagaccu

SEQ ID NO: 1813742 - RNA, 19 nt, Artificial Sequence
  Description of Artificial Sequence: Synthetic oligonucleotide
  Antisense strand to SEQ ID NO: 1813741
aggucuaaagaccucgcca

SEQ ID NO: 1813743 - RNA, 19 nt, Artificial Sequence
  Description of Artificial Sequence: Synthetic oligonucleotide
  Sense strand starting at position 1386 of SEQ ID NO: 1563477
cggacauugcaauagacau

SEQ ID NO: 1813744 - RNA, 19 nt, Artificial Sequence
  Description of Artificial Sequence: Synthetic oligonucleotide
  Antisense strand to SEQ ID NO: 1813743
augucuauugcaauguccg

SEQ ID NO: 1813745 - RNA, 19 nt, Artificial Sequence
  Description of Artificial Sequence: Synthetic oligonucleotide
  Sense strand starting at position 2315 of SEQ ID NO: 1563477
gagccuugccguguuuaac

SEQ ID NO: 1813746 - RNA, 19 nt, Artificial Sequence
  Description of Artificial Sequence: Synthetic oligonucleotide
  Antisense strand to SEQ ID NO: 1813745
guuaaacacggcaaggcuc

SEQ ID NO: 1813747 - RNA, 19 nt, Artificial Sequence
  Description of Artificial Sequence: Synthetic oligonucleotide
  Sense strand starting at position 2326 of SEQ ID NO: 1563477
uguuuaacccuuuagugac

SEQ ID NO: 1813748 - RNA, 19 nt, Artificial Sequence
  Description of Artificial Sequence: Synthetic oligonucleotide
  Antisense strand to SEQ ID NO: 1813747
gucacuaaaggguuaaaca

SEQ ID NO: 1813749 - RNA, 19 nt, Artificial Sequence
  Description of Artificial Sequence: Synthetic oligonucleotide
  Sense strand starting at position 2334 of SEQ ID NO: 1563477
ccuuuagugacacgaauga

SEQ ID NO: 1813750 - RNA, 19 nt, Artificial Sequence
  Description of Artificial Sequence: Synthetic oligonucleotide
  Antisense strand to SEQ ID NO: 1813749
ucauucgugucacuaaagg

SEQ ID NO: 1813751 - RNA, 19 nt, Artificial Sequence
  Description of Artificial Sequence: Synthetic oligonucleotide
  Sense strand starting at position 2373 of SEQ ID NO: 1563477
aguugagggucuuugcaau

SEQ ID NO: 1813752 - RNA, 19 nt, Artificial Sequence
  Description of Artificial Sequence: Synthetic oligonucleotide
  Antisense strand to SEQ ID NO: 1813751
auugcaaagacccucaacu

SEQ ID NO: 1813753 - RNA, 19 nt, Artificial Sequence
  Description of Artificial Sequence: Synthetic oligonucleotide
  Sense strand starting at position 2402 of SEQ ID NO: 1563477
cuuagcugcuggucagaau

SEQ ID NO: 1813754 - RNA, 19 nt, Artificial Sequence
  Description of Artificial Sequence: Synthetic oligonucleotide
  Antisense strand to SEQ ID NO: 1813753
auucugaccagcagcuaag

SEQ ID NO: 1813755 - RNA, 19 nt, Artificial Sequence
  Description of Artificial Sequence: Synthetic oligonucleotide
  Sense strand starting at position 2403 of SEQ ID NO: 1563477
uuagcugcuggucagaaua

SEQ ID NO: 1813756 - RNA, 19 nt, Artificial Sequence
  Description of Artificial Sequence: Synthetic oligonucleotide
  Antisense strand to SEQ ID NO: 1813755
uauucugaccagcagcuaa

SEQ ID NO: 1813757 - RNA, 19 nt, Artificial Sequence
  Description of Artificial Sequence: Synthetic oligonucleotide
  Sense strand starting at position 2462 of SEQ ID NO: 1563477
gagcuuagccucggaccaa

SEQ ID NO: 1813758 - RNA, 19 nt, Artificial Sequence
  Description of Artificial Sequence: Synthetic oligonucleotide
  Antisense strand to SEQ ID NO: 1813757
uugguccgaggcuaagcuc

SEQ ID NO: 1813759 - RNA, 19 nt, Artificial Sequence
  Description of Artificial Sequence: Synthetic oligonucleotide
  Sense strand starting at position 2607 of SEQ ID NO: 1563477
ccuccuuuggauugaagua

SEQ ID NO: 1813760 - RNA, 19 nt, Artificial Sequence
  Description of Artificial Sequence: Synthetic oligonucleotide
  Antisense strand to SEQ ID NO: 1813759
uacuucaauccaaaggagg

SEQ ID NO: 1813761 - RNA, 19 nt, Artificial Sequence
  Description of Artificial Sequence: Synthetic oligonucleotide
  Sense strand starting at position 2657 of SEQ ID NO: 1563477
ugagcuuugccguugggua

SEQ ID NO: 1813762 - RNA, 19 nt, Artificial Sequence
  Description of Artificial Sequence: Synthetic oligonucleotide
  Antisense strand to SEQ ID NO: 1813761
uacccaacggcaaagcuca

SEQ ID NO: 1813763 - RNA, 19 nt, Artificial Sequence
  Description of Artificial Sequence: Synthetic oligonucleotide
  Sense strand starting at position 2877 of SEQ ID NO: 1563477
cagccaucagcaggaguuu

SEQ ID NO: 1813764 - RNA, 19 nt, Artificial Sequence
  Description of Artificial Sequence: Synthetic oligonucleotide
  Antisense strand to SEQ ID NO: 1813763
aaacuccugcugauggcug

SEQ ID NO: 1813765 - RNA, 19 nt, Artificial Sequence
  Description of Artificial Sequence: Synthetic oligonucleotide
  Sense strand starting at position 3022 of SEQ ID NO: 1563477
ccugaagcagucugacauu

SEQ ID NO: 1813766 - RNA, 19 nt, Artificial Sequence
  Description of Artificial Sequence: Synthetic oligonucleotide
  Antisense strand to SEQ ID NO: 1813765
aaugucagacugcuucagg

SEQ ID NO: 1813767 - RNA, 19 nt, Artificial Sequence
  Description of Artificial Sequence: Synthetic oligonucleotide
  Sense strand starting at position 3028 of SEQ ID NO: 1563477
gcagucugacauuagagau

SEQ ID NO: 1813768 - RNA, 19 nt, Artificial Sequence
  Description of Artificial Sequence: Synthetic oligonucleotide
  Antisense strand to SEQ ID NO: 1813767
aucucuaaugucagacugc

SEQ ID NO: 1813769 - RNA, 19 nt, Artificial Sequence
  Description of Artificial Sequence: Synthetic oligonucleotide
  Sense strand starting at position 3050 of SEQ ID NO: 1563477
agauucucuugggaagaga

SEQ ID NO: 1813770 - RNA, 19 nt, Artificial Sequence
  Description of Artificial Sequence: Synthetic oligonucleotide
  Antisense strand to SEQ ID NO: 1813769
ucucuucccaagagaaucu

SEQ ID NO: 1813771 - RNA, 19 nt, Artificial Sequence
  Description of Artificial Sequence: Synthetic oligonucleotide
  Sense strand starting at position 3118 of SEQ ID NO: 1563477
gaagcucuuucuguuauag

SEQ ID NO: 1813772 - RNA, 19 nt, Artificial Sequence
  Description of Artificial Sequence: Synthetic oligonucleotide
  Antisense strand to SEQ ID NO: 1813771
cuauaacagaaagagcuuc

SEQ ID NO: 1813773 - RNA, 19 nt, Artificial Sequence
  Description of Artificial Sequence: Synthetic oligonucleotide
  Sense strand starting at position 3130 of SEQ ID NO: 1563477
guuauagucacguacacau

SEQ ID NO: 1813774 - RNA, 19 nt, Artificial Sequence
  Description of Artificial Sequence: Synthetic oligonucleotide
  Antisense strand to SEQ ID NO: 1813773
auguguacgugacuauaac

SEQ ID NO: 1813775 - RNA, 19 nt, Artificial Sequence
  Description of Artificial Sequence: Synthetic oligonucleotide
  Sense strand starting at position 3182 of SEQ ID NO: 1563477
uuuagacgccaauauauua

SEQ ID NO: 1813776 - RNA, 19 nt, Artificial Sequence
  Description of Artificial Sequence: Synthetic oligonucleotide
  Antisense strand to SEQ ID NO: 1813775
uaauauauuggcgucuaaa

SEQ ID NO: 1813777 - RNA, 19 nt, Artificial Sequence
  Description of Artificial Sequence: Synthetic oligonucleotide
  Sense strand starting at position 3219 of SEQ ID NO: 1563477
ugagaagacuaccuguuaa

SEQ ID NO: 1813778 - RNA, 19 nt, Artificial Sequence
  Description of Artificial Sequence: Synthetic oligonucleotide
  Antisense strand to SEQ ID NO: 1813777
uuaacagguagucuucuca

SEQ ID NO: 1813779 - RNA, 19 nt, Artificial Sequence
  Description of Artificial Sequence: Synthetic oligonucleotide
  Sense strand starting at position 3289 of SEQ ID NO: 1563477
uuugaaauaugacaaguga

SEQ ID NO: 1813780 - RNA, 19 nt, Artificial Sequence
  Description of Artificial Sequence: Synthetic oligonucleotide
  Antisense strand to SEQ ID NO: 1813779
ucacuugucauauuucaaa

SEQ ID NO: 1813781 - RNA, 19 nt, Artificial Sequence
  Description of Artificial Sequence: Synthetic oligonucleotide
  Sense strand starting at position 3466 of SEQ ID NO: 1563477
cuuucuguugccuauacua

SEQ ID NO: 1813782 - RNA, 19 nt, Artificial Sequence
  Description of Artificial Sequence: Synthetic oligonucleotide
  Antisense strand to SEQ ID NO: 1813781
uaguauaggcaacagaaag

SEQ ID NO: 1813783 - RNA, 19 nt, Artificial Sequence
  Description of Artificial Sequence: Synthetic oligonucleotide
  Sense strand starting at position 3550 of SEQ ID NO: 1563477
ucuggugaggucugcauuu

SEQ ID NO: 1813784 - RNA, 19 nt, Artificial Sequence
  Description of Artificial Sequence: Synthetic oligonucleotide
  Antisense strand to SEQ ID NO: 1813783
aaaugcagaccucaccaga

SEQ ID NO: 1813785 - RNA, 19 nt, Artificial Sequence
  Description of Artificial Sequence: Synthetic oligonucleotide
  Sense strand starting at position 3601 of SEQ ID NO: 1563477
cccaccuuuccagagaugu

SEQ ID NO: 1813786 - RNA, 19 nt, Artificial Sequence
  Description of Artificial Sequence: Synthetic oligonucleotide
  Antisense strand to SEQ ID NO: 1813785
acaucucuggaaagguggg

SEQ ID NO: 1813787 - RNA, 19 nt, Artificial Sequence
  Description of Artificial Sequence: Synthetic oligonucleotide
  Sense strand starting at position 3652 of SEQ ID NO: 1563477
cagggaccguccuuaaacu

SEQ ID NO: 1813788 - RNA, 19 nt, Artificial Sequence
  Description of Artificial Sequence: Synthetic oligonucleotide
  Antisense strand to SEQ ID NO: 1813787
aguuuaaggacggucccug

SEQ ID NO: 1813789 - RNA, 19 nt, Artificial Sequence
  Description of Artificial Sequence: Synthetic oligonucleotide
  Sense strand starting at position 3691 of SEQ ID NO: 1563477
agaagugagcccuaucaau

SEQ ID NO: 1813790 - RNA, 19 nt, Artificial Sequence
  Description of Artificial Sequence: Synthetic oligonucleotide
  Antisense strand to SEQ ID NO: 1813789
auugauagggcucacuucu

SEQ ID NO: 1813791 - RNA, 19 nt, Artificial Sequence
  Description of Artificial Sequence: Synthetic oligonucleotide
  Sense strand starting at position 3819 of SEQ ID NO: 1563477
cgccuuuaacccuaagagu

SEQ ID NO: 1813792 - RNA, 19 nt, Artificial Sequence
  Description of Artificial Sequence: Synthetic oligonucleotide
  Antisense strand to SEQ ID NO: 1813791
acucuuaggguuaaaggcg

SEQ ID NO: 1813793 - RNA, 19 nt, Artificial Sequence
  Description of Artificial Sequence: Synthetic oligonucleotide
  Sense strand starting at position 3859 of SEQ ID NO: 1563477
gccagaucucauuauugga

SEQ ID NO: 1813794 - RNA, 19 nt, Artificial Sequence
  Description of Artificial Sequence: Synthetic oligonucleotide
  Antisense strand to SEQ ID NO: 1813793
uccaauaaugagaucuggc

SEQ ID NO: 1813795 - RNA, 19 nt, Artificial Sequence
  Description of Artificial Sequence: Synthetic oligonucleotide
  Sense strand starting at position 3873 of SEQ ID NO: 1563477
uuggaucuggugcauuaaa

SEQ ID NO: 1813796 - RNA, 19 nt, Artificial Sequence
  Description of Artificial Sequence: Synthetic oligonucleotide
  Antisense strand to SEQ ID NO: 1813795
uuuaaugcaccagauccaa

SEQ ID NO: 1813797 - RNA, 19 nt, Artificial Sequence
  Description of Artificial Sequence: Synthetic oligonucleotide
  Sense strand starting at position 3881 of SEQ ID NO: 1563477
ggugcauuaaagugccaga

SEQ ID NO: 1813798 - RNA, 19 nt, Artificial Sequence
  Description of Artificial Sequence: Synthetic oligonucleotide
  Antisense strand to SEQ ID NO: 1813797
ucuggcacuuuaaugcacc

SEQ ID NO: 1813799 - RNA, 19 nt, Artificial Sequence
  Description of Artificial Sequence: Synthetic oligonucleotide
  Sense strand starting at position 3886 of SEQ ID NO: 1563477
auuaaagugccagaucuga

SEQ ID NO: 1813800 - RNA, 19 nt, Artificial Sequence
  Description of Artificial Sequence: Synthetic oligonucleotide
  Antisense strand to SEQ ID NO: 1813799
ucagaucuggcacuuuaau

SEQ ID NO: 1813801 - RNA, 19 nt, Artificial Sequence
  Description of Artificial Sequence: Synthetic oligonucleotide
  Sense strand starting at position 3942 of SEQ ID NO: 1563477
gcucucacaccuuaaugga

SEQ ID NO: 1813802 - RNA, 19 nt, Artificial Sequence
  Description of Artificial Sequence: Synthetic oligonucleotide
  Antisense strand to SEQ ID NO: 1813801
uccauuaaggugugagagc

SEQ ID NO: 1813803 - RNA, 19 nt, Artificial Sequence
  Description of Artificial Sequence: Synthetic oligonucleotide
  Sense strand starting at position 3957 of SEQ ID NO: 1563477
uggaaucccuguccuuaga

SEQ ID NO: 1813804 - RNA, 19 nt, Artificial Sequence
  Description of Artificial Sequence: Synthetic oligonucleotide
  Antisense strand to SEQ ID NO: 1813803
ucuaaggacagggauucca

SEQ ID NO: 1813805 - RNA, 19 nt, Artificial Sequence
  Description of Artificial Sequence: Synthetic oligonucleotide
  Sense strand starting at position 3959 of SEQ ID NO: 1563477
gaaucccuguccuuagaag

SEQ ID NO: 1813806 - RNA, 19 nt, Artificial Sequence
  Description of Artificial Sequence: Synthetic oligonucleotide
  Antisense strand to SEQ ID NO: 1813805
cuucuaaggacagggauuc

SEQ ID NO: 1813807 - RNA, 19 nt, Artificial Sequence
  Description of Artificial Sequence: Synthetic oligonucleotide
  Sense strand starting at position 109 of SEQ ID NO: 1563479
cagugaaguuagcuaggaa

SEQ ID NO: 1813808 - RNA, 19 nt, Artificial Sequence
  Description of Artificial Sequence: Synthetic oligonucleotide
  Antisense strand to SEQ ID NO: 1813807
uuccuagcuaacuucacug

SEQ ID NO: 1813809 - RNA, 19 nt, Artificial Sequence
  Description of Artificial Sequence: Synthetic oligonucleotide
  Sense strand starting at position 223 of SEQ ID NO: 1563479
gaauauaaucaagguguua

SEQ ID NO: 1813810 - RNA, 19 nt, Artificial Sequence
  Description of Artificial Sequence: Synthetic oligonucleotide
  Antisense strand to SEQ ID NO: 1813809
uaacaccuugauuauauuc

SEQ ID NO: 1813811 - RNA, 19 nt, Artificial Sequence
  Description of Artificial Sequence: Synthetic oligonucleotide
  Sense strand starting at position 273 of SEQ ID NO: 1563479
ucgaaagcauacuucuuaa

SEQ ID NO: 1813812 - RNA, 19 nt, Artificial Sequence
  Description of Artificial Sequence: Synthetic oligonucleotide
  Antisense strand to SEQ ID NO: 1813811
uuaagaaguaugcuuucga

SEQ ID NO: 1813813 - RNA, 19 nt, Artificial Sequence
  Description of Artificial Sequence: Synthetic oligonucleotide
  Sense strand starting at position 329 of SEQ ID NO: 1563479
uggaaacuaucaguuaacu

SEQ ID NO: 1813814 - RNA, 19 nt, Artificial Sequence
  Description of Artificial Sequence: Synthetic oligonucleotide
  Antisense strand to SEQ ID NO: 1813813
aguuaacugauaguuucca

SEQ ID NO: 1813815 - RNA, 19 nt, Artificial Sequence
  Description of Artificial Sequence: Synthetic oligonucleotide
  Sense strand starting at position 463 of SEQ ID NO: 1563479
auaaucaaguugguaguua

SEQ ID NO: 1813816 - RNA, 19 nt, Artificial Sequence
  Description of Artificial Sequence: Synthetic oligonucleotide
  Antisense strand to SEQ ID NO: 1813815
uaacuaccaacuugauuau

SEQ ID NO: 1813817 - RNA, 19 nt, Artificial Sequence
  Description of Artificial Sequence: Synthetic oligonucleotide
  Sense strand starting at position 474 of SEQ ID NO: 1563479
gguaguuaaagcugaaauc

SEQ ID NO: 1813818 - RNA, 19 nt, Artificial Sequence
  Description of Artificial Sequence: Synthetic oligonucleotide
  Antisense strand to SEQ ID NO: 1813817
gauuucagcuuuaacuacc

SEQ ID NO: 1813819 - RNA, 19 nt, Artificial Sequence
  Description of Artificial Sequence: Synthetic oligonucleotide
  Sense strand starting at position 475 of SEQ ID NO: 1563479
guaguuaaagcugaaaucu

SEQ ID NO: 1813820 - RNA, 19 nt, Artificial Sequence
  Description of Artificial Sequence: Synthetic oligonucleotide
  Antisense strand to SEQ ID NO: 1813819
agauuucagcuuuaacuac

SEQ ID NO: 1813821 - RNA, 19 nt, Artificial Sequence
  Description of Artificial Sequence: Synthetic oligonucleotide
  Sense strand starting at position 545 of SEQ ID NO: 1563479
uaaggaguaucugcugaau

SEQ ID NO: 1813822 - RNA, 19 nt, Artificial Sequence
  Description of Artificial Sequence: Synthetic oligonucleotide
  Antisense strand to SEQ ID NO: 1813821
auucagcagauacuccuua

SEQ ID NO: 1813823 - RNA, 19 nt, Artificial Sequence
  Description of Artificial Sequence: Synthetic oligonucleotide
  Sense strand starting at position 803 of SEQ ID NO: 1563479
guggaaguacuguaugacu

SEQ ID NO: 1813824 - RNA, 19 nt, Artificial Sequence
  Description of Artificial Sequence: Synthetic oligonucleotide
  Antisense strand to SEQ ID NO: 1813823
agucauacaguacuuccac

SEQ ID NO: 1813825 - RNA, 19 nt, Artificial Sequence
  Description of Artificial Sequence: Synthetic oligonucleotide
  Sense strand starting at position 805 of SEQ ID NO: 1563479
ggaaguacuguaugacuau

SEQ ID NO: 1813826 - RNA, 19 nt, Artificial Sequence
  Description of Artificial Sequence: Synthetic oligonucleotide
  Antisense strand to SEQ ID NO: 1813825
auagucauacaguacuucc

SEQ ID NO: 1813827 - RNA, 19 nt, Artificial Sequence
  Description of Artificial Sequence: Synthetic oligonucleotide
  Sense strand starting at position 900 of SEQ ID NO: 1563479
aacauuucuugggagagca

SEQ ID NO: 1813828 - RNA, 19 nt, Artificial Sequence
  Description of Artificial Sequence: Synthetic oligonucleotide
  Antisense strand to SEQ ID NO: 1813827
ugcucucccaagaaauguu

SEQ ID NO: 1813829 - RNA, 19 nt, Artificial Sequence
  Description of Artificial Sequence: Synthetic oligonucleotide
  Sense strand starting at position 956 of SEQ ID NO: 1563479
gcgccucuuccugagauuu

SEQ ID NO: 1813830 - RNA, 19 nt, Artificial Sequence
  Description of Artificial Sequence: Synthetic oligonucleotide
  Antisense strand to SEQ ID NO: 1813829
aaaucucaggaagaggcgc

SEQ ID NO: 1813831 - RNA, 19 nt, Artificial Sequence
  Description of Artificial Sequence: Synthetic oligonucleotide
  Sense strand starting at position 1008 of SEQ ID NO: 1563479
uguucuucuugauuugcga

SEQ ID NO: 1813832 - RNA, 19 nt, Artificial Sequence
  Description of Artificial Sequence: Synthetic oligonucleotide
  Antisense strand to SEQ ID NO: 1813831
ucgcaaaucaagaagaaca

SEQ ID NO: 1813833 - RNA, 19 nt, Artificial Sequence
  Description of Artificial Sequence: Synthetic oligonucleotide
  Sense strand starting at position 1404 of SEQ ID NO: 1563479
uguucaauggcaggaggau

SEQ ID NO: 1813834 - RNA, 19 nt, Artificial Sequence
  Description of Artificial Sequence: Synthetic oligonucleotide
  Antisense strand to SEQ ID NO: 1813833
auccuccugccauugaaca

SEQ ID NO: 1813835 - RNA, 19 nt, Artificial Sequence
  Description of Artificial Sequence: Synthetic oligonucleotide
  Sense strand starting at position 2349 of SEQ ID NO: 1563479
gauuaauugccucgacaga

SEQ ID NO: 1813836 - RNA, 19 nt, Artificial Sequence
  Description of Artificial Sequence: Synthetic oligonucleotide
  Antisense strand to SEQ ID NO: 1813835
ucugucgaggcaauuaauc

SEQ ID NO: 1813837 - RNA, 19 nt, Artificial Sequence
  Description of Artificial Sequence: Synthetic oligonucleotide
  Sense strand starting at position 2350 of SEQ ID NO: 1563479
auuaauugccucgacagac

SEQ ID NO: 1813838 - RNA, 19 nt, Artificial Sequence
  Description of Artificial Sequence: Synthetic oligonucleotide
  Antisense strand to SEQ ID NO: 1813837
gucugucgaggcaauuaau

SEQ ID NO: 1813839 - RNA, 19 nt, Artificial Sequence
  Description of Artificial Sequence: Synthetic oligonucleotide
  Sense strand starting at position 2376 of SEQ ID NO: 1563479
gggucagaguggaaagagu

SEQ ID NO: 1813840 - RNA, 19 nt, Artificial Sequence
  Description of Artificial Sequence: Synthetic oligonucleotide
  Antisense strand to SEQ ID NO: 1813839
acucuuuccacucugaccc

SEQ ID NO: 1813841 - RNA, 19 nt, Artificial Sequence
  Description of Artificial Sequence: Synthetic oligonucleotide
  Sense strand starting at position 2385 of SEQ ID NO: 1563479
uggaaagagugagugcuuu

SEQ ID NO: 1813842 - RNA, 19 nt, Artificial Sequence
  Description of Artificial Sequence: Synthetic oligonucleotide
  Antisense strand to SEQ ID NO: 1813841
aaagcacucacucuuucca

SEQ ID NO: 1813843 - RNA, 19 nt, Artificial Sequence
  Description of Artificial Sequence: Synthetic oligonucleotide
  Sense strand starting at position 2397 of SEQ ID NO: 1563479
gugcuuucuguugucguga

SEQ ID NO: 1813844 - RNA, 19 nt, Artificial Sequence
  Description of Artificial Sequence: Synthetic oligonucleotide
  Antisense strand to SEQ ID NO: 1813843
ucacgacaacagaaagcac

SEQ ID NO: 1813845 - RNA, 19 nt, Artificial Sequence
  Description of Artificial Sequence: Synthetic oligonucleotide
  Sense strand starting at position 2417 of SEQ ID NO: 1563479
uacguugugaccgaagaaa

SEQ ID NO: 1813846 - RNA, 19 nt, Artificial Sequence
  Description of Artificial Sequence: Synthetic oligonucleotide
  Antisense strand to SEQ ID NO: 1813845
uuucuucggucacaacgua

SEQ ID NO: 1813847 - RNA, 19 nt, Artificial Sequence
  Description of Artificial Sequence: Synthetic oligonucleotide
  Sense strand starting at position 2549 of SEQ ID NO: 1563479
aauugaauugagugcuauu

SEQ ID NO: 1813848 - RNA, 19 nt, Artificial Sequence
  Description of Artificial Sequence: Synthetic oligonucleotide
  Antisense strand to SEQ ID NO: 1813847
aauagcacucaauucaauu

SEQ ID NO: 1813849 - RNA, 19 nt, Artificial Sequence
  Description of Artificial Sequence: Synthetic oligonucleotide
  Sense strand starting at position 2576 of SEQ ID NO: 1563479
cccgaacuaguuuagaguu

SEQ ID NO: 1813850 - RNA, 19 nt, Artificial Sequence
  Description of Artificial Sequence: Synthetic oligonucleotide
  Antisense strand to SEQ ID NO: 1813849
aacucuaaacuaguucggg

SEQ ID NO: 1813851 - RNA, 19 nt, Artificial Sequence
  Description of Artificial Sequence: Synthetic oligonucleotide
  Sense strand starting at position 2604 of SEQ ID NO: 1563479
agugaauaagaucaugugu

SEQ ID NO: 1813852 - RNA, 19 nt, Artificial Sequence
  Description of Artificial Sequence: Synthetic oligonucleotide
  Antisense strand to SEQ ID NO: 1813851
acacaugaucuuauucacu

SEQ ID NO: 1813853 - RNA, 19 nt, Artificial Sequence
  Description of Artificial Sequence: Synthetic oligonucleotide
  Sense strand starting at position 2609 of SEQ ID NO: 1563479
auaagaucaugugugucaa

SEQ ID NO: 1813854 - RNA, 19 nt, Artificial Sequence
  Description of Artificial Sequence: Synthetic oligonucleotide
  Antisense strand to SEQ ID NO: 1813853
uugacacacaugaucuuau

SEQ ID NO: 1813855 - RNA, 19 nt, Artificial Sequence
  Description of Artificial Sequence: Synthetic oligonucleotide
  Sense strand starting at position 2610 of SEQ ID NO: 1563479
uaagaucaugugugucaaa

SEQ ID NO: 1813856 - RNA, 19 nt, Artificial Sequence
  Description of Artificial Sequence: Synthetic oligonucleotide
  Antisense strand to SEQ ID NO: 1813855
uuugacacacaugaucuua

SEQ ID NO: 1813857 - RNA, 19 nt, Artificial Sequence
  Description of Artificial Sequence: Synthetic oligonucleotide
  Sense strand starting at position 2836 of SEQ ID NO: 1563479
uggguaggauuugaaugaa

SEQ ID NO: 1813858 - RNA, 19 nt, Artificial Sequence
  Description of Artificial Sequence: Synthetic oligonucleotide
  Antisense strand to SEQ ID NO: 1813857
uucauucaaauccuaccca

SEQ ID NO: 1813859 - RNA, 19 nt, Artificial Sequence
  Description of Artificial Sequence: Synthetic oligonucleotide
  Sense strand starting at position 3040 of SEQ ID NO: 1563479
uugagagugcauuaggaug

SEQ ID NO: 1813860 - RNA, 19 nt, Artificial Sequence
  Description of Artificial Sequence: Synthetic oligonucleotide
  Antisense strand to SEQ ID NO: 1813859
cauccuaaugcacucucaa

SEQ ID NO: 1813861 - RNA, 19 nt, Artificial Sequence
  Description of Artificial Sequence: Synthetic oligonucleotide
  Sense strand starting at position 3045 of SEQ ID NO: 1563479
agugcauuaggaugcauuu

SEQ ID NO: 1813862 - RNA, 19 nt, Artificial Sequence
  Description of Artificial Sequence: Synthetic oligonucleotide
  Antisense strand to SEQ ID NO: 1813861
aaaugcauccuaaugcacu

SEQ ID NO: 1813863 - RNA, 19 nt, Artificial Sequence
  Description of Artificial Sequence: Synthetic oligonucleotide
  Sense strand starting at position 3057 of SEQ ID NO: 1563479
ugcauuugaccaugcuaua

SEQ ID NO: 1813864 - RNA, 19 nt, Artificial Sequence
  Description of Artificial Sequence: Synthetic oligonucleotide
  Antisense strand to SEQ ID NO: 1813863
uauagcauggucaaaugca

SEQ ID NO: 1813865 - RNA, 19 nt, Artificial Sequence
  Description of Artificial Sequence: Synthetic oligonucleotide
  Sense strand starting at position 3153 of SEQ ID NO: 1563479
ugucauugucauuaacuuu

SEQ ID NO: 1813866 - RNA, 19 nt, Artificial Sequence
  Description of Artificial Sequence: Synthetic oligonucleotide
  Antisense strand to SEQ ID NO: 1813865
aaaguuaaugacaaugaca

SEQ ID NO: 1813867 - RNA, 19 nt, Artificial Sequence
  Description of Artificial Sequence: Synthetic oligonucleotide
  Sense strand starting at position 3480 of SEQ ID NO: 1563479
uuuaaucauggagguguga

SEQ ID NO: 1813868 - RNA, 19 nt, Artificial Sequence
  Description of Artificial Sequence: Synthetic oligonucleotide
  Antisense strand to SEQ ID NO: 1813867
ucacaccuccaugauuaaa

SEQ ID NO: 1813869 - RNA, 19 nt, Artificial Sequence
  Description of Artificial Sequence: Synthetic oligonucleotide
  Sense strand starting at position 3482 of SEQ ID NO: 1563479
uaaucauggaggugugacu

SEQ ID NO: 1813870 - RNA, 19 nt, Artificial Sequence
  Description of Artificial Sequence: Synthetic oligonucleotide
  Antisense strand to SEQ ID NO: 1813869
agucacaccuccaugauua

SEQ ID NO: 1813871 - RNA, 19 nt, Artificial Sequence
  Description of Artificial Sequence: Synthetic oligonucleotide
  Sense strand starting at position 3546 of SEQ ID NO: 1563479
gggaauacaugcucccaaa

SEQ ID NO: 1813872 - RNA, 19 nt, Artificial Sequence
  Description of Artificial Sequence: Synthetic oligonucleotide
  Antisense strand to SEQ ID NO: 1813871
uuugggagcauguauuccc

SEQ ID NO: 1813873 - RNA, 19 nt, Artificial Sequence
  Description of Artificial Sequence: Synthetic oligonucleotide
  Sense strand starting at position 3739 of SEQ ID NO: 1563479
acaugaccuguuuagccaa

SEQ ID NO: 1813874 - RNA, 19 nt, Artificial Sequence
  Description of Artificial Sequence: Synthetic oligonucleotide
  Antisense strand to SEQ ID NO: 1813873
uuggcuaaacaggucaugu

SEQ ID NO: 1813875 - RNA, 19 nt, Artificial Sequence
  Description of Artificial Sequence: Synthetic oligonucleotide
  Sense strand starting at position 3747 of SEQ ID NO: 1563479
uguuuagccaaugcguaau

SEQ ID NO: 1813876 - RNA, 19 nt, Artificial Sequence
  Description of Artificial Sequence: Synthetic oligonucleotide
  Antisense strand to SEQ ID NO: 1813875
auuacgcauuggcuaaaca

SEQ ID NO: 1813877 - RNA, 19 nt, Artificial Sequence
  Description of Artificial Sequence: Synthetic oligonucleotide
  Sense strand starting at position 3758 of SEQ ID NO: 1563479
ugcguaauuccuguuugug

SEQ ID NO: 1813878 - RNA, 19 nt, Artificial Sequence
  Description of Artificial Sequence: Synthetic oligonucleotide
  Antisense strand to SEQ ID NO: 1813877
cacaaacaggaauuacgca

SEQ ID NO: 1813879 - RNA, 19 nt, Artificial Sequence
  Description of Artificial Sequence: Synthetic oligonucleotide
  Sense strand starting at position 3759 of SEQ ID NO: 1563479
gcguaauuccuguuugugc

SEQ ID NO: 1813880 - RNA, 19 nt, Artificial Sequence
  Description of Artificial Sequence: Synthetic oligonucleotide
  Antisense strand to SEQ ID NO: 1813879
gcacaaacaggaauuacgc

SEQ ID NO: 1813881 - RNA, 19 nt, Artificial Sequence
  Description of Artificial Sequence: Synthetic oligonucleotide
  Sense strand starting at position 3825 of SEQ ID NO: 1563479
caguaaucugcccaguaga

SEQ ID NO: 1813882 - RNA, 19 nt, Artificial Sequence
  Description of Artificial Sequence: Synthetic oligonucleotide
  Antisense strand to SEQ ID NO: 1813881
ucuacugggcagauuacug

SEQ ID NO: 1813883 - RNA, 19 nt, Artificial Sequence
  Description of Artificial Sequence: Synthetic oligonucleotide
  Sense strand starting at position 3860 of SEQ ID NO: 1563479
uagaguacacuaggugaua

SEQ ID NO: 1813884 - RNA, 19 nt, Artificial Sequence
  Description of Artificial Sequence: Synthetic oligonucleotide
  Antisense strand to SEQ ID NO: 1813883
uaucaccuaguguacucua

SEQ ID NO: 1813885 - RNA, 19 nt, Artificial Sequence
  Description of Artificial Sequence: Synthetic oligonucleotide
  Sense strand starting at position 3872 of SEQ ID NO: 1563479
ggugauacagagugucaug

SEQ ID NO: 1813886 - RNA, 19 nt, Artificial Sequence
  Description of Artificial Sequence: Synthetic oligonucleotide
  Antisense strand to SEQ ID NO: 1813885
caugacacucuguaucacc

SEQ ID NO: 1813887 - RNA, 19 nt, Artificial Sequence
  Description of Artificial Sequence: Synthetic oligonucleotide
  Sense strand starting at position 243 of SEQ ID NO: 1563480
guauuauuacaacagucga

SEQ ID NO: 1813888 - RNA, 19 nt, Artificial Sequence
  Description of Artificial Sequence: Synthetic oligonucleotide
  Antisense strand to SEQ ID NO: 1813887
ucgacuguuguaauaauac

SEQ ID NO: 1813889 - RNA, 19 nt, Artificial Sequence
  Description of Artificial Sequence: Synthetic oligonucleotide
  Sense strand starting at position 337 of SEQ ID NO: 1563480
guagccuagguguacagau

SEQ ID NO: 1813890 - RNA, 19 nt, Artificial Sequence
  Description of Artificial Sequence: Synthetic oligonucleotide
  Antisense strand to SEQ ID NO: 1813889
aucuguacaccuaggcuac

SEQ ID NO: 1813891 - RNA, 19 nt, Artificial Sequence
  Description of Artificial Sequence: Synthetic oligonucleotide
  Sense strand starting at position 339 of SEQ ID NO: 1563480
agccuagguguacagauua

SEQ ID NO: 1813892 - RNA, 19 nt, Artificial Sequence
  Description of Artificial Sequence: Synthetic oligonucleotide
  Antisense strand to SEQ ID NO: 1813891
uaaucuguacaccuaggcu

SEQ ID NO: 1813893 - RNA, 19 nt, Artificial Sequence
  Description of Artificial Sequence: Synthetic oligonucleotide
  Sense strand starting at position 354 of SEQ ID NO: 1563480
auuauaaagucuccaguag

SEQ ID NO: 1813894 - RNA, 19 nt, Artificial Sequence
  Description of Artificial Sequence: Synthetic oligonucleotide
  Antisense strand to SEQ ID NO: 1813893
cuacuggagacuuuauaau

SEQ ID NO: 1813895 - RNA, 19 nt, Artificial Sequence
  Description of Artificial Sequence: Synthetic oligonucleotide
  Sense strand starting at position 477 of SEQ ID NO: 1563480
uuauaaccuuguguacuau

SEQ ID NO: 1813896 - RNA, 19 nt, Artificial Sequence
  Description of Artificial Sequence: Synthetic oligonucleotide
  Antisense strand to SEQ ID NO: 1813895
auaguacacaagguuauaa

SEQ ID NO: 1813897 - RNA, 19 nt, Artificial Sequence
  Description of Artificial Sequence: Synthetic oligonucleotide
  Sense strand starting at position 885 of SEQ ID NO: 1563480
cuuagacauguuuaaguac

SEQ ID NO: 1813898 - RNA, 19 nt, Artificial Sequence
  Description of Artificial Sequence: Synthetic oligonucleotide
  Antisense strand to SEQ ID NO: 1813897
guacuuaaacaugucuaag

SEQ ID NO: 1813899 - RNA, 19 nt, Artificial Sequence
  Description of Artificial Sequence: Synthetic oligonucleotide
  Sense strand starting at position 888 of SEQ ID NO: 1563480
agacauguuuaaguacaca

SEQ ID NO: 1813900 - RNA, 19 nt, Artificial Sequence
  Description of Artificial Sequence: Synthetic oligonucleotide
  Antisense strand to SEQ ID NO: 1813899
uguguacuuaaacaugucu

SEQ ID NO: 1813901 - RNA, 19 nt, Artificial Sequence
  Description of Artificial Sequence: Synthetic oligonucleotide
  Sense strand starting at position 1097 of SEQ ID NO: 1563480
aacguauauccguagguaa

SEQ ID NO: 1813902 - RNA, 19 nt, Artificial Sequence
  Description of Artificial Sequence: Synthetic oligonucleotide
  Antisense strand to SEQ ID NO: 1813901
uuaccuacggauauacguu

SEQ ID NO: 1813903 - RNA, 19 nt, Artificial Sequence
  Description of Artificial Sequence: Synthetic oligonucleotide
  Sense strand starting at position 1265 of SEQ ID NO: 1563480
cggaaaguuccauaagcga

SEQ ID NO: 1813904 - RNA, 19 nt, Artificial Sequence
  Description of Artificial Sequence: Synthetic oligonucleotide
  Antisense strand to SEQ ID NO: 1813903
ucgcuuauggaacuuuccg

SEQ ID NO: 1813905 - RNA, 19 nt, Artificial Sequence
  Description of Artificial Sequence: Synthetic oligonucleotide
  Sense strand starting at position 1497 of SEQ ID NO: 1563480
agaugucuuucgacggcga

SEQ ID NO: 1813906 - RNA, 19 nt, Artificial Sequence
  Description of Artificial Sequence: Synthetic oligonucleotide
  Antisense strand to SEQ ID NO: 1813905
ucgccgucgaaagacaucu

SEQ ID NO: 1813907 - RNA, 19 nt, Artificial Sequence
  Description of Artificial Sequence: Synthetic oligonucleotide
  Sense strand starting at position 2230 of SEQ ID NO: 1563480
uggaucaguccugaugcau

SEQ ID NO: 1813908 - RNA, 19 nt, Artificial Sequence
  Description of Artificial Sequence: Synthetic oligonucleotide
  Antisense strand to SEQ ID NO: 1813907
augcaucaggacugaucca

SEQ ID NO: 1813909 - RNA, 19 nt, Artificial Sequence
  Description of Artificial Sequence: Synthetic oligonucleotide
  Sense strand starting at position 2236 of SEQ ID NO: 1563480
aguccugaugcauaaguga

SEQ ID NO: 1813910 - RNA, 19 nt, Artificial Sequence
  Description of Artificial Sequence: Synthetic oligonucleotide
  Antisense strand to SEQ ID NO: 1813909
ucacuuaugcaucaggacu

SEQ ID NO: 1813911 - RNA, 19 nt, Artificial Sequence
  Description of Artificial Sequence: Synthetic oligonucleotide
  Sense strand starting at position 2316 of SEQ ID NO: 1563480
gcagauggccaauaggagu

SEQ ID NO: 1813912 - RNA, 19 nt, Artificial Sequence
  Description of Artificial Sequence: Synthetic oligonucleotide
  Antisense strand to SEQ ID NO: 1813911
acuccuauuggccaucugc

SEQ ID NO: 1813913 - RNA, 19 nt, Artificial Sequence
  Description of Artificial Sequence: Synthetic oligonucleotide
  Sense strand starting at position 2332 of SEQ ID NO: 1563480
aguagugugcgugccacau

SEQ ID NO: 1813914 - RNA, 19 nt, Artificial Sequence
  Description of Artificial Sequence: Synthetic oligonucleotide
  Antisense strand to SEQ ID NO: 1813913
auguggcacgcacacuacu

SEQ ID NO: 1813915 - RNA, 19 nt, Artificial Sequence
  Description of Artificial Sequence: Synthetic oligonucleotide
  Sense strand starting at position 2438 of SEQ ID NO: 1563480
gcguauccgaaauauuauc

SEQ ID NO: 1813916 - RNA, 19 nt, Artificial Sequence
  Description of Artificial Sequence: Synthetic oligonucleotide
  Antisense strand to SEQ ID NO: 1813915
gauaauauuucggauacgc

SEQ ID NO: 1813917 - RNA, 19 nt, Artificial Sequence
  Description of Artificial Sequence: Synthetic oligonucleotide
  Sense strand starting at position 2641 of SEQ ID NO: 1563480
acaggaugagccuggguau

SEQ ID NO: 1813918 - RNA, 19 nt, Artificial Sequence
  Description of Artificial Sequence: Synthetic oligonucleotide
  Antisense strand to SEQ ID NO: 1813917
auacccaggcucauccugu

SEQ ID NO: 1813919 - RNA, 19 nt, Artificial Sequence
  Description of Artificial Sequence: Synthetic oligonucleotide
  Sense strand starting at position 2644 of SEQ ID NO: 1563480
ggaugagccuggguaucau

SEQ ID NO: 1813920 - RNA, 19 nt, Artificial Sequence
  Description of Artificial Sequence: Synthetic oligonucleotide
  Antisense strand to SEQ ID NO: 1813919
augauacccaggcucaucc

SEQ ID NO: 1813921 - RNA, 19 nt, Artificial Sequence
  Description of Artificial Sequence: Synthetic oligonucleotide
  Sense strand starting at position 2715 of SEQ ID NO: 1563480
uuugguggugucuaauuga

SEQ ID NO: 1813922 - RNA, 19 nt, Artificial Sequence
  Description of Artificial Sequence: Synthetic oligonucleotide
  Antisense strand to SEQ ID NO: 1813921
ucaauuagacaccaccaaa

SEQ ID NO: 1813923 - RNA, 19 nt, Artificial Sequence
  Description of Artificial Sequence: Synthetic oligonucleotide
  Sense strand starting at position 2722 of SEQ ID NO: 1563480
gugucuaauugaucacagu

SEQ ID NO: 1813924 - RNA, 19 nt, Artificial Sequence
  Description of Artificial Sequence: Synthetic oligonucleotide
  Antisense strand to SEQ ID NO: 1813923
acugugaucaauuagacac

SEQ ID NO: 1813925 - RNA, 19 nt, Artificial Sequence
  Description of Artificial Sequence: Synthetic oligonucleotide
  Sense strand starting at position 2723 of SEQ ID NO: 1563480
ugucuaauugaucacagug

SEQ ID NO: 1813926 - RNA, 19 nt, Artificial Sequence
  Description of Artificial Sequence: Synthetic oligonucleotide
  Antisense strand to SEQ ID NO: 1813925
cacugugaucaauuagaca

SEQ ID NO: 1813927 - RNA, 19 nt, Artificial Sequence
  Description of Artificial Sequence: Synthetic oligonucleotide
  Sense strand starting at position 2735 of SEQ ID NO: 1563480
cacaguguccuguaguaag

SEQ ID NO: 1813928 - RNA, 19 nt, Artificial Sequence
  Description of Artificial Sequence: Synthetic oligonucleotide
  Antisense strand to SEQ ID NO: 1813927
cuuacuacaggacacugug

SEQ ID NO: 1813929 - RNA, 19 nt, Artificial Sequence
  Description of Artificial Sequence: Synthetic oligonucleotide
  Sense strand starting at position 2746 of SEQ ID NO: 1563480
guaguaagccaucaugauc

SEQ ID NO: 1813930 - RNA, 19 nt, Artificial Sequence
  Description of Artificial Sequence: Synthetic oligonucleotide
  Antisense strand to SEQ ID NO: 1813929
gaucaugauggcuuacuac

SEQ ID NO: 1813931 - RNA, 19 nt, Artificial Sequence
  Description of Artificial Sequence: Synthetic oligonucleotide
  Sense strand starting at position 2991 of SEQ ID NO: 1563480
gcacuagcccgugugaauc

SEQ ID NO: 1813932 - RNA, 19 nt, Artificial Sequence
  Description of Artificial Sequence: Synthetic oligonucleotide
  Antisense strand to SEQ ID NO: 1813931
gauucacacgggcuagugc

SEQ ID NO: 1813933 - RNA, 19 nt, Artificial Sequence
  Description of Artificial Sequence: Synthetic oligonucleotide
  Sense strand starting at position 3129 of SEQ ID NO: 1563480
cacaauugguagcuggaua

SEQ ID NO: 1813934 - RNA, 19 nt, Artificial Sequence
  Description of Artificial Sequence: Synthetic oligonucleotide
  Antisense strand to SEQ ID NO: 1813933
uauccagcuaccaauugug

SEQ ID NO: 1813935 - RNA, 19 nt, Artificial Sequence
  Description of Artificial Sequence: Synthetic oligonucleotide
  Sense strand starting at position 3130 of SEQ ID NO: 1563480
acaauugguagcuggauaa

SEQ ID NO: 1813936 - RNA, 19 nt, Artificial Sequence
  Description of Artificial Sequence: Synthetic oligonucleotide
  Antisense strand to SEQ ID NO: 1813935
uuauccagcuaccaauugu

SEQ ID NO: 1813937 - RNA, 19 nt, Artificial Sequence
  Description of Artificial Sequence: Synthetic oligonucleotide
  Sense strand starting at position 3229 of SEQ ID NO: 1563480
auaauugagucccugggaa

SEQ ID NO: 1813938 - RNA, 19 nt, Artificial Sequence
  Description of Artificial Sequence: Synthetic oligonucleotide
  Antisense strand to SEQ ID NO: 1813937
uucccagggacucaauuau

SEQ ID NO: 1813939 - RNA, 19 nt, Artificial Sequence
  Description of Artificial Sequence: Synthetic oligonucleotide
  Sense strand starting at position 3231 of SEQ ID NO: 1563480
aauugagucccugggaacu

SEQ ID NO: 1813940 - RNA, 19 nt, Artificial Sequence
  Description of Artificial Sequence: Synthetic oligonucleotide
  Antisense strand to SEQ ID NO: 1813939
aguucccagggacucaauu

SEQ ID NO: 1813941 - RNA, 19 nt, Artificial Sequence
  Description of Artificial Sequence: Synthetic oligonucleotide
  Sense strand starting at position 3251 of SEQ ID NO: 1563480
auuugaucaucucacugua

SEQ ID NO: 1813942 - RNA, 19 nt, Artificial Sequence
  Description of Artificial Sequence: Synthetic oligonucleotide
  Antisense strand to SEQ ID NO: 1813941
uacagugagaugaucaaau

SEQ ID NO: 1813943 - RNA, 19 nt, Artificial Sequence
  Description of Artificial Sequence: Synthetic oligonucleotide
  Sense strand starting at position 3285 of SEQ ID NO: 1563480
cugaguggaccugaugcau

SEQ ID NO: 1813944 - RNA, 19 nt, Artificial Sequence
  Description of Artificial Sequence: Synthetic oligonucleotide
  Antisense strand to SEQ ID NO: 1813943
augcaucagguccacucag

SEQ ID NO: 1813945 - RNA, 19 nt, Artificial Sequence
  Description of Artificial Sequence: Synthetic oligonucleotide
  Sense strand starting at position 3362 of SEQ ID NO: 1563480
ggugauaccucagugaacu

SEQ ID NO: 1813946 - RNA, 19 nt, Artificial Sequence
  Description of Artificial Sequence: Synthetic oligonucleotide
  Antisense strand to SEQ ID NO: 1813945
aguucacugagguaucacc

SEQ ID NO: 1813947 - RNA, 19 nt, Artificial Sequence
  Description of Artificial Sequence: Synthetic oligonucleotide
  Sense strand starting at position 3363 of SEQ ID NO: 1563480
gugauaccucagugaacuu

SEQ ID NO: 1813948 - RNA, 19 nt, Artificial Sequence
  Description of Artificial Sequence: Synthetic oligonucleotide
  Antisense strand to SEQ ID NO: 1813947
aaguucacugagguaucac

SEQ ID NO: 1813949 - RNA, 19 nt, Artificial Sequence
  Description of Artificial Sequence: Synthetic oligonucleotide
  Sense strand starting at position 3677 of SEQ ID NO: 1563480
acggaaugacugugauaca

SEQ ID NO: 1813950 - RNA, 19 nt, Artificial Sequence
  Description of Artificial Sequence: Synthetic oligonucleotide
  Antisense strand to SEQ ID NO: 1813949
uguaucacagucauuccgu

SEQ ID NO: 1813951 - RNA, 19 nt, Artificial Sequence
  Description of Artificial Sequence: Synthetic oligonucleotide
  Sense strand starting at position 3689 of SEQ ID NO: 1563480
ugauacauguggucuuaag

SEQ ID NO: 1813952 - RNA, 19 nt, Artificial Sequence
  Description of Artificial Sequence: Synthetic oligonucleotide
  Antisense strand to SEQ ID NO: 1813951
cuuaagaccacauguauca

SEQ ID NO: 1813953 - RNA, 19 nt, Artificial Sequence
  Description of Artificial Sequence: Synthetic oligonucleotide
  Sense strand starting at position 3708 of SEQ ID NO: 1563480
accugaccugcccaugaua

SEQ ID NO: 1813954 - RNA, 19 nt, Artificial Sequence
  Description of Artificial Sequence: Synthetic oligonucleotide
  Antisense strand to SEQ ID NO: 1813953
uaucaugggcaggucaggu

SEQ ID NO: 1813955 - RNA, 19 nt, Artificial Sequence
  Description of Artificial Sequence: Synthetic oligonucleotide
  Sense strand starting at position 3710 of SEQ ID NO: 1563480
cugaccugcccaugauaaa

SEQ ID NO: 1813956 - RNA, 19 nt, Artificial Sequence
  Description of Artificial Sequence: Synthetic oligonucleotide
  Antisense strand to SEQ ID NO: 1813955
uuuaucaugggcaggucag

SEQ ID NO: 1813957 - RNA, 19 nt, Artificial Sequence
  Description of Artificial Sequence: Synthetic oligonucleotide
  Sense strand starting at position 3719 of SEQ ID NO: 1563480
ccaugauaaacuggguguu

SEQ ID NO: 1813958 - RNA, 19 nt, Artificial Sequence
  Description of Artificial Sequence: Synthetic oligonucleotide
  Antisense strand to SEQ ID NO: 1813957
aacacccaguuuaucaugg

SEQ ID NO: 1813959 - RNA, 19 nt, Artificial Sequence
  Description of Artificial Sequence: Synthetic oligonucleotide
  Sense strand starting at position 3795 of SEQ ID NO: 1563480
ucuggcaauuccuugaaag

SEQ ID NO: 1813960 - RNA, 19 nt, Artificial Sequence
  Description of Artificial Sequence: Synthetic oligonucleotide
  Antisense strand to SEQ ID NO: 1813959
cuuucaaggaauugccaga

SEQ ID NO: 1813961 - RNA, 19 nt, Artificial Sequence
  Description of Artificial Sequence: Synthetic oligonucleotide
  Sense strand starting at position 3796 of SEQ ID NO: 1563480
cuggcaauuccuugaaagg

SEQ ID NO: 1813962 - RNA, 19 nt, Artificial Sequence
  Description of Artificial Sequence: Synthetic oligonucleotide
  Antisense strand to SEQ ID NO: 1813961
ccuuucaaggaauugccag

SEQ ID NO: 1813963 - RNA, 19 nt, Artificial Sequence
  Description of Artificial Sequence: Synthetic oligonucleotide
  Sense strand starting at position 3797 of SEQ ID NO: 1563480
uggcaauuccuugaaaggu

SEQ ID NO: 1813964 - RNA, 19 nt, Artificial Sequence
  Description of Artificial Sequence: Synthetic oligonucleotide
  Antisense strand to SEQ ID NO: 1813963
accuuucaaggaauugcca

SEQ ID NO: 1813965 - RNA, 19 nt, Artificial Sequence
  Description of Artificial Sequence: Synthetic oligonucleotide
  Sense strand starting at position 3889 of SEQ ID NO: 1563480
uuagauagaugguuguaca

SEQ ID NO: 1813966 - RNA, 19 nt, Artificial Sequence
  Description of Artificial Sequence: Synthetic oligonucleotide
  Antisense strand to SEQ ID NO: 1813965
uguacaaccaucuaucuaa

SEQ ID NO: 1813967 - RNA, 19 nt, Artificial Sequence
  Description of Artificial Sequence: Synthetic oligonucleotide
  Sense strand starting at position 276 of SEQ ID NO: 1563481
cacagaaugcuugacaguc

SEQ ID NO: 1813968 - RNA, 19 nt, Artificial Sequence
  Description of Artificial Sequence: Synthetic oligonucleotide
  Antisense strand to SEQ ID NO: 1813967
gacugucaagcauucugug

SEQ ID NO: 1813969 - RNA, 19 nt, Artificial Sequence
  Description of Artificial Sequence: Synthetic oligonucleotide
  Sense strand starting at position 437 of SEQ ID NO: 1563481
ccuaaauccuaagagaaga

SEQ ID NO: 1813970 - RNA, 19 nt, Artificial Sequence
  Description of Artificial Sequence: Synthetic oligonucleotide
  Antisense strand to SEQ ID NO: 1813969
ucuucucuuaggauuuagg

SEQ ID NO: 1813971 - RNA, 19 nt, Artificial Sequence
  Description of Artificial Sequence: Synthetic oligonucleotide
  Sense strand starting at position 457 of SEQ ID NO: 1563481
aggccuuauuuggcaagua

SEQ ID NO: 1813972 - RNA, 19 nt, Artificial Sequence
  Description of Artificial Sequence: Synthetic oligonucleotide
  Antisense strand to SEQ ID NO: 1813971
uacuugccaaauaaggccu

SEQ ID NO: 1813973 - RNA, 19 nt, Artificial Sequence
  Description of Artificial Sequence: Synthetic oligonucleotide
  Sense strand starting at position 621 of SEQ ID NO: 1563481
gucauagaaauauguaguc

SEQ ID NO: 1813974 - RNA, 19 nt, Artificial Sequence
  Description of Artificial Sequence: Synthetic oligonucleotide
  Antisense strand to SEQ ID NO: 1813973
gacuacauauuucuaugac

SEQ ID NO: 1813975 - RNA, 19 nt, Artificial Sequence
  Description of Artificial Sequence: Synthetic oligonucleotide
  Sense strand starting at position 626 of SEQ ID NO: 1563481
agaaauauguagucacuag

SEQ ID NO: 1813976 - RNA, 19 nt, Artificial Sequence
  Description of Artificial Sequence: Synthetic oligonucleotide
  Antisense strand to SEQ ID NO: 1813975
cuagugacuacauauuucu

SEQ ID NO: 1813977 - RNA, 19 nt, Artificial Sequence
  Description of Artificial Sequence: Synthetic oligonucleotide
  Sense strand starting at position 630 of SEQ ID NO: 1563481
auauguagucacuaguauc

SEQ ID NO: 1813978 - RNA, 19 nt, Artificial Sequence
  Description of Artificial Sequence: Synthetic oligonucleotide
  Antisense strand to SEQ ID NO: 1813977
gauacuagugacuacauau

SEQ ID NO: 1813979 - RNA, 19 nt, Artificial Sequence
  Description of Artificial Sequence: Synthetic oligonucleotide
  Sense strand starting at position 796 of SEQ ID NO: 1563481
cuaaguugugggcaugaaa

SEQ ID NO: 1813980 - RNA, 19 nt, Artificial Sequence
  Description of Artificial Sequence: Synthetic oligonucleotide
  Antisense strand to SEQ ID NO: 1813979
uuucaugcccacaacuuag

SEQ ID NO: 1813981 - RNA, 19 nt, Artificial Sequence
  Description of Artificial Sequence: Synthetic oligonucleotide
  Sense strand starting at position 816 of SEQ ID NO: 1563481
gcacaaauauuaguugcua

SEQ ID NO: 1813982 - RNA, 19 nt, Artificial Sequence
  Description of Artificial Sequence: Synthetic oligonucleotide
  Antisense strand to SEQ ID NO: 1813981
uagcaacuaauauuugugc

SEQ ID NO: 1813983 - RNA, 19 nt, Artificial Sequence
  Description of Artificial Sequence: Synthetic oligonucleotide
  Sense strand starting at position 919 of SEQ ID NO: 1563481
ccugaucaguaagcugaaa

SEQ ID NO: 1813984 - RNA, 19 nt, Artificial Sequence
  Description of Artificial Sequence: Synthetic oligonucleotide
  Antisense strand to SEQ ID NO: 1813983
uuucagcuuacugaucagg

SEQ ID NO: 1813985 - RNA, 19 nt, Artificial Sequence
  Description of Artificial Sequence: Synthetic oligonucleotide
  Sense strand starting at position 1037 of SEQ ID NO: 1563481
acuucuguccucgaucaga

SEQ ID NO: 1813986 - RNA, 19 nt, Artificial Sequence
  Description of Artificial Sequence: Synthetic oligonucleotide
  Antisense strand to SEQ ID NO: 1813985
ucugaucgaggacagaagu

SEQ ID NO: 1813987 - RNA, 19 nt, Artificial Sequence
  Description of Artificial Sequence: Synthetic oligonucleotide
  Sense strand starting at position 1051 of SEQ ID NO: 1563481
ucagaagagccucguggaa

SEQ ID NO: 1813988 - RNA, 19 nt, Artificial Sequence
  Description of Artificial Sequence: Synthetic oligonucleotide
  Antisense strand to SEQ ID NO: 1813987
uuccacgaggcucuucuga

SEQ ID NO: 1813989 - RNA, 19 nt, Artificial Sequence
  Description of Artificial Sequence: Synthetic oligonucleotide
  Sense strand starting at position 1205 of SEQ ID NO: 1563481
ccucucaucgcggaaauag

SEQ ID NO: 1813990 - RNA, 19 nt, Artificial Sequence
  Description of Artificial Sequence: Synthetic oligonucleotide
  Antisense strand to SEQ ID NO: 1813989
cuauuuccgcgaugagagg

SEQ ID NO: 1813991 - RNA, 19 nt, Artificial Sequence
  Description of Artificial Sequence: Synthetic oligonucleotide
  Sense strand starting at position 1334 of SEQ ID NO: 1563481
ggcgaaagaagucgggaau

SEQ ID NO: 1813992 - RNA, 19 nt, Artificial Sequence
  Description of Artificial Sequence: Synthetic oligonucleotide
  Antisense strand to SEQ ID NO: 1813991
auucccgacuucuuucgcc

SEQ ID NO: 1813993 - RNA, 19 nt, Artificial Sequence
  Description of Artificial Sequence: Synthetic oligonucleotide
  Sense strand starting at position 2210 of SEQ ID NO: 1563481
aaggacugcucacugagaa

SEQ ID NO: 1813994 - RNA, 19 nt, Artificial Sequence
  Description of Artificial Sequence: Synthetic oligonucleotide
  Antisense strand to SEQ ID NO: 1813993
uucucagugagcaguccuu

SEQ ID NO: 1813995 - RNA, 19 nt, Artificial Sequence
  Description of Artificial Sequence: Synthetic oligonucleotide
  Sense strand starting at position 2211 of SEQ ID NO: 1563481
aggacugcucacugagaau

SEQ ID NO: 1813996 - RNA, 19 nt, Artificial Sequence
  Description of Artificial Sequence: Synthetic oligonucleotide
  Antisense strand to SEQ ID NO: 1813995
auucucagugagcaguccu

SEQ ID NO: 1813997 - RNA, 19 nt, Artificial Sequence
  Description of Artificial Sequence: Synthetic oligonucleotide
  Sense strand starting at position 2271 of SEQ ID NO: 1563481
ggccuaucccaagggcaua

SEQ ID NO: 1813998 - RNA, 19 nt, Artificial Sequence
  Description of Artificial Sequence: Synthetic oligonucleotide
  Antisense strand to SEQ ID NO: 1813997
uaugcccuugggauaggcc

SEQ ID NO: 1813999 - RNA, 19 nt, Artificial Sequence
  Description of Artificial Sequence: Synthetic oligonucleotide
  Sense strand starting at position 2305 of SEQ ID NO: 1563481
cgcguuuaugggucuuuca

SEQ ID NO: 1814000 - RNA, 19 nt, Artificial Sequence
  Description of Artificial Sequence: Synthetic oligonucleotide
  Antisense strand to SEQ ID NO: 1813999
ugaaagacccauaaacgcg

SEQ ID NO: 1814001 - RNA, 19 nt, Artificial Sequence
  Description of Artificial Sequence: Synthetic oligonucleotide
  Sense strand starting at position 2360 of SEQ ID NO: 1563481
agagguuuggcccaagauc

SEQ ID NO: 1814002 - RNA, 19 nt, Artificial Sequence
  Description of Artificial Sequence: Synthetic oligonucleotide
  Antisense strand to SEQ ID NO: 1814001
gaucuugggccaaaccucu

SEQ ID NO: 1814003 - RNA, 19 nt, Artificial Sequence
  Description of Artificial Sequence: Synthetic oligonucleotide
  Sense strand starting at position 2368 of SEQ ID NO: 1563481
ggcccaagaucucuuaaga

SEQ ID NO: 1814004 - RNA, 19 nt, Artificial Sequence
  Description of Artificial Sequence: Synthetic oligonucleotide
  Antisense strand to SEQ ID NO: 1814003
ucuuaagagaucuugggcc

SEQ ID NO: 1814005 - RNA, 19 nt, Artificial Sequence
  Description of Artificial Sequence: Synthetic oligonucleotide
  Sense strand starting at position 2584 of SEQ ID NO: 1563481
ugagcacagccuuaauuga

SEQ ID NO: 1814006 - RNA, 19 nt, Artificial Sequence
  Description of Artificial Sequence: Synthetic oligonucleotide
  Antisense strand to SEQ ID NO: 1814005
ucaauuaaggcugugcuca

SEQ ID NO: 1814007 - RNA, 19 nt, Artificial Sequence
  Description of Artificial Sequence: Synthetic oligonucleotide
  Sense strand starting at position 2655 of SEQ ID NO: 1563481
agagguuacugcucuaggu

SEQ ID NO: 1814008 - RNA, 19 nt, Artificial Sequence
  Description of Artificial Sequence: Synthetic oligonucleotide
  Antisense strand to SEQ ID NO: 1814007
accuagagcaguaaccucu

SEQ ID NO: 1814009 - RNA, 19 nt, Artificial Sequence
  Description of Artificial Sequence: Synthetic oligonucleotide
  Sense strand starting at position 2657 of SEQ ID NO: 1563481
agguuacugcucuagguag

SEQ ID NO: 1814010 - RNA, 19 nt, Artificial Sequence
  Description of Artificial Sequence: Synthetic oligonucleotide
  Antisense strand to SEQ ID NO: 1814009
cuaccuagagcaguaaccu

SEQ ID NO: 1814011 - RNA, 19 nt, Artificial Sequence
  Description of Artificial Sequence: Synthetic oligonucleotide
  Sense strand starting at position 2659 of SEQ ID NO: 1563481
guuacugcucuagguagaa

SEQ ID NO: 1814012 - RNA, 19 nt, Artificial Sequence
  Description of Artificial Sequence: Synthetic oligonucleotide
  Antisense strand to SEQ ID NO: 1814011
uucuaccuagagcaguaac

SEQ ID NO: 1814013 - RNA, 19 nt, Artificial Sequence
  Description of Artificial Sequence: Synthetic oligonucleotide
  Sense strand starting at position 2692 of SEQ ID NO: 1563481
uggcuuuguuaccuaggau

SEQ ID NO: 1814014 - RNA, 19 nt, Artificial Sequence
  Description of Artificial Sequence: Synthetic oligonucleotide
  Antisense strand to SEQ ID NO: 1814013
auccuagguaacaaagcca

SEQ ID NO: 1814015 - RNA, 19 nt, Artificial Sequence
  Description of Artificial Sequence: Synthetic oligonucleotide
  Sense strand starting at position 2693 of SEQ ID NO: 1563481
ggcuuuguuaccuaggaug

SEQ ID NO: 1814016 - RNA, 19 nt, Artificial Sequence
  Description of Artificial Sequence: Synthetic oligonucleotide
  Antisense strand to SEQ ID NO: 1814015
cauccuagguaacaaagcc

SEQ ID NO: 1814017 - RNA, 19 nt, Artificial Sequence
  Description of Artificial Sequence: Synthetic oligonucleotide
  Sense strand starting at position 2923 of SEQ ID NO: 1563481
gaaagaggguccucugcau

SEQ ID NO: 1814018 - RNA, 19 nt, Artificial Sequence
  Description of Artificial Sequence: Synthetic oligonucleotide
  Antisense strand to SEQ ID NO: 1814017
augcagaggacccucuuuc

SEQ ID NO: 1814019 - RNA, 19 nt, Artificial Sequence
  Description of Artificial Sequence: Synthetic oligonucleotide
  Sense strand starting at position 2937 of SEQ ID NO: 1563481
ugcauuagcaguuaggaga

SEQ ID NO: 1814020 - RNA, 19 nt, Artificial Sequence
  Description of Artificial Sequence: Synthetic oligonucleotide
  Antisense strand to SEQ ID NO: 1814019
ucuccuaacugcuaaugca

SEQ ID NO: 1814021 - RNA, 19 nt, Artificial Sequence
  Description of Artificial Sequence: Synthetic oligonucleotide
  Sense strand starting at position 2974 of SEQ ID NO: 1563481
cccuaagccuguuuagaug

SEQ ID NO: 1814022 - RNA, 19 nt, Artificial Sequence
  Description of Artificial Sequence: Synthetic oligonucleotide
  Antisense strand to SEQ ID NO: 1814021
caucuaaacaggcuuaggg

SEQ ID NO: 1814023 - RNA, 19 nt, Artificial Sequence
  Description of Artificial Sequence: Synthetic oligonucleotide
  Sense strand starting at position 3038 of SEQ ID NO: 1563481
auacgacaucucuagugua

SEQ ID NO: 1814024 - RNA, 19 nt, Artificial Sequence
  Description of Artificial Sequence: Synthetic oligonucleotide
  Antisense strand to SEQ ID NO: 1814023
uacacuagagaugucguau

SEQ ID NO: 1814025 - RNA, 19 nt, Artificial Sequence
  Description of Artificial Sequence: Synthetic oligonucleotide
  Sense strand starting at position 3043 of SEQ ID NO: 1563481
acaucucuaguguaacaau

SEQ ID NO: 1814026 - RNA, 19 nt, Artificial Sequence
  Description of Artificial Sequence: Synthetic oligonucleotide
  Antisense strand to SEQ ID NO: 1814025
auuguuacacuagagaugu

SEQ ID NO: 1814027 - RNA, 19 nt, Artificial Sequence
  Description of Artificial Sequence: Synthetic oligonucleotide
  Sense strand starting at position 3082 of SEQ ID NO: 1563481
gccaaucaggguuaagauc

SEQ ID NO: 1814028 - RNA, 19 nt, Artificial Sequence
  Description of Artificial Sequence: Synthetic oligonucleotide
  Antisense strand to SEQ ID NO: 1814027
gaucuuaacccugauuggc

SEQ ID NO: 1814029 - RNA, 19 nt, Artificial Sequence
  Description of Artificial Sequence: Synthetic oligonucleotide
  Sense strand starting at position 3148 of SEQ ID NO: 1563481
ugucacuaaggaugucuau

SEQ ID NO: 1814030 - RNA, 19 nt, Artificial Sequence
  Description of Artificial Sequence: Synthetic oligonucleotide
  Antisense strand to SEQ ID NO: 1814029
auagacauccuuagugaca

SEQ ID NO: 1814031 - RNA, 19 nt, Artificial Sequence
  Description of Artificial Sequence: Synthetic oligonucleotide
  Sense strand starting at position 3214 of SEQ ID NO: 1563481
agaagcauuccucggagga

SEQ ID NO: 1814032 - RNA, 19 nt, Artificial Sequence
  Description of Artificial Sequence: Synthetic oligonucleotide
  Antisense strand to SEQ ID NO: 1814031
uccuccgaggaaugcuucu

SEQ ID NO: 1814033 - RNA, 19 nt, Artificial Sequence
  Description of Artificial Sequence: Synthetic oligonucleotide
  Sense strand starting at position 3215 of SEQ ID NO: 1563481
gaagcauuccucggaggaa

SEQ ID NO: 1814034 - RNA, 19 nt, Artificial Sequence
  Description of Artificial Sequence: Synthetic oligonucleotide
  Antisense strand to SEQ ID NO: 1814033
uuccuccgaggaaugcuuc

SEQ ID NO: 1814035 - RNA, 19 nt, Artificial Sequence
  Description of Artificial Sequence: Synthetic oligonucleotide
  Sense strand starting at position 3218 of SEQ ID NO: 1563481
gcauuccucggaggaagua

SEQ ID NO: 1814036 - RNA, 19 nt, Artificial Sequence
  Description of Artificial Sequence: Synthetic oligonucleotide
  Antisense strand to SEQ ID NO: 1814035
uacuuccuccgaggaaugc

SEQ ID NO: 1814037 - RNA, 19 nt, Artificial Sequence
  Description of Artificial Sequence: Synthetic oligonucleotide
  Sense strand starting at position 3291 of SEQ ID NO: 1563481
uuugucuccucaccgauaa

SEQ ID NO: 1814038 - RNA, 19 nt, Artificial Sequence
  Description of Artificial Sequence: Synthetic oligonucleotide
  Antisense strand to SEQ ID NO: 1814037
uuaucggugaggagacaaa

SEQ ID NO: 1814039 - RNA, 19 nt, Artificial Sequence
  Description of Artificial Sequence: Synthetic oligonucleotide
  Sense strand starting at position 3295 of SEQ ID NO: 1563481
ucuccucaccgauaagauc

SEQ ID NO: 1814040 - RNA, 19 nt, Artificial Sequence
  Description of Artificial Sequence: Synthetic oligonucleotide
  Antisense strand to SEQ ID NO: 1814039
gaucuuaucggugaggaga

SEQ ID NO: 1814041 - RNA, 19 nt, Artificial Sequence
  Description of Artificial Sequence: Synthetic oligonucleotide
  Sense strand starting at position 3481 of SEQ ID NO: 1563481
gagucaggacuagguagau

SEQ ID NO: 1814042 - RNA, 19 nt, Artificial Sequence
  Description of Artificial Sequence: Synthetic oligonucleotide
  Antisense strand to SEQ ID NO: 1814041
aucuaccuaguccugacuc

SEQ ID NO: 1814043 - RNA, 19 nt, Artificial Sequence
  Description of Artificial Sequence: Synthetic oligonucleotide
  Sense strand starting at position 3709 of SEQ ID NO: 1563481
uacucucucgggugaacaa

SEQ ID NO: 1814044 - RNA, 19 nt, Artificial Sequence
  Description of Artificial Sequence: Synthetic oligonucleotide
  Antisense strand to SEQ ID NO: 1814043
uuguucacccgagagagua

SEQ ID NO: 1814045 - RNA, 19 nt, Artificial Sequence
  Description of Artificial Sequence: Synthetic oligonucleotide
  Sense strand starting at position 3710 of SEQ ID NO: 1563481
acucucucgggugaacaaa

SEQ ID NO: 1814046 - RNA, 19 nt, Artificial Sequence
  Description of Artificial Sequence: Synthetic oligonucleotide
  Antisense strand to SEQ ID NO: 1814045
uuuguucacccgagagagu

SEQ ID NO: 1814047 - RNA, 19 nt, Artificial Sequence
  Description of Artificial Sequence: Synthetic oligonucleotide
  Sense strand starting at position 132 of SEQ ID NO: 1563482
gaaagaggguccucugcau

SEQ ID NO: 1814048 - RNA, 19 nt, Artificial Sequence
  Description of Artificial Sequence: Synthetic oligonucleotide
  Antisense strand to SEQ ID NO: 1814047
augcagaggacccucuuuc

SEQ ID NO: 1814049 - RNA, 19 nt, Artificial Sequence
  Description of Artificial Sequence: Synthetic oligonucleotide
  Sense strand starting at position 146 of SEQ ID NO: 1563482
ugcauuagcaguuaggaga

SEQ ID NO: 1814050 - RNA, 19 nt, Artificial Sequence
  Description of Artificial Sequence: Synthetic oligonucleotide
  Antisense strand to SEQ ID NO: 1814049
ucuccuaacugcuaaugca

SEQ ID NO: 1814051 - RNA, 19 nt, Artificial Sequence
  Description of Artificial Sequence: Synthetic oligonucleotide
  Sense strand starting at position 183 of SEQ ID NO: 1563482
cccuaagccuguuuagaug

SEQ ID NO: 1814052 - RNA, 19 nt, Artificial Sequence
  Description of Artificial Sequence: Synthetic oligonucleotide
  Antisense strand to SEQ ID NO: 1814051
caucuaaacaggcuuaggg

SEQ ID NO: 1814053 - RNA, 19 nt, Artificial Sequence
  Description of Artificial Sequence: Synthetic oligonucleotide
  Sense strand starting at position 247 of SEQ ID NO: 1563482
auacgacaucucuagugua

SEQ ID NO: 1814054 - RNA, 19 nt, Artificial Sequence
  Description of Artificial Sequence: Synthetic oligonucleotide
  Antisense strand to SEQ ID NO: 1814053
uacacuagagaugucguau

SEQ ID NO: 1814055 - RNA, 19 nt, Artificial Sequence
  Description of Artificial Sequence: Synthetic oligonucleotide
  Sense strand starting at position 252 of SEQ ID NO: 1563482
acaucucuaguguaacaau

SEQ ID NO: 1814056 - RNA, 19 nt, Artificial Sequence
  Description of Artificial Sequence: Synthetic oligonucleotide
  Antisense strand to SEQ ID NO: 1814055
auuguuacacuagagaugu

SEQ ID NO: 1814057 - RNA, 19 nt, Artificial Sequence
  Description of Artificial Sequence: Synthetic oligonucleotide
  Sense strand starting at position 291 of SEQ ID NO: 1563482
gccaaucaggguuaagauc

SEQ ID NO: 1814058 - RNA, 19 nt, Artificial Sequence
  Description of Artificial Sequence: Synthetic oligonucleotide
  Antisense strand to SEQ ID NO: 1814057
gaucuuaacccugauuggc

SEQ ID NO: 1814059 - RNA, 19 nt, Artificial Sequence
  Description of Artificial Sequence: Synthetic oligonucleotide
  Sense strand starting at position 357 of SEQ ID NO: 1563482
ugucacuaaggaugucuau

SEQ ID NO: 1814060 - RNA, 19 nt, Artificial Sequence
  Description of Artificial Sequence: Synthetic oligonucleotide
  Antisense strand to SEQ ID NO: 1814059
auagacauccuuagugaca

SEQ ID NO: 1814061 - RNA, 19 nt, Artificial Sequence
  Description of Artificial Sequence: Synthetic oligonucleotide
  Sense strand starting at position 423 of SEQ ID NO: 1563482
agaagcauuccucggagga

SEQ ID NO: 1814062 - RNA, 19 nt, Artificial Sequence
  Description of Artificial Sequence: Synthetic oligonucleotide
  Antisense strand to SEQ ID NO: 1814061
uccuccgaggaaugcuucu

SEQ ID NO: 1814063 - RNA, 19 nt, Artificial Sequence
  Description of Artificial Sequence: Synthetic oligonucleotide
  Sense strand starting at position 424 of SEQ ID NO: 1563482
gaagcauuccucggaggaa

SEQ ID NO: 1814064 - RNA, 19 nt, Artificial Sequence
  Description of Artificial Sequence: Synthetic oligonucleotide
  Antisense strand to SEQ ID NO: 1814063
uuccuccgaggaaugcuuc

SEQ ID NO: 1814065 - RNA, 19 nt, Artificial Sequence
  Description of Artificial Sequence: Synthetic oligonucleotide
  Sense strand starting at position 427 of SEQ ID NO: 1563482
gcauuccucggaggaagua

SEQ ID NO: 1814066 - RNA, 19 nt, Artificial Sequence
  Description of Artificial Sequence: Synthetic oligonucleotide
  Antisense strand to SEQ ID NO: 1814065
uacuuccuccgaggaaugc

SEQ ID NO: 1814067 - RNA, 19 nt, Artificial Sequence
  Description of Artificial Sequence: Synthetic oligonucleotide
  Sense strand starting at position 500 of SEQ ID NO: 1563482
uuugucuccucaccgauaa

SEQ ID NO: 1814068 - RNA, 19 nt, Artificial Sequence
  Description of Artificial Sequence: Synthetic oligonucleotide
  Antisense strand to SEQ ID NO: 1814067
uuaucggugaggagacaaa

SEQ ID NO: 1814069 - RNA, 19 nt, Artificial Sequence
  Description of Artificial Sequence: Synthetic oligonucleotide
  Sense strand starting at position 504 of SEQ ID NO: 1563482
ucuccucaccgauaagauc

SEQ ID NO: 1814070 - RNA, 19 nt, Artificial Sequence
  Description of Artificial Sequence: Synthetic oligonucleotide
  Antisense strand to SEQ ID NO: 1814069
gaucuuaucggugaggaga

SEQ ID NO: 1814071 - RNA, 19 nt, Artificial Sequence
  Description of Artificial Sequence: Synthetic oligonucleotide
  Sense strand starting at position 690 of SEQ ID NO: 1563482
gagucaggacuagguagau

SEQ ID NO: 1814072 - RNA, 19 nt, Artificial Sequence
  Description of Artificial Sequence: Synthetic oligonucleotide
  Antisense strand to SEQ ID NO: 1814071
aucuaccuaguccugacuc

SEQ ID NO: 1814073 - RNA, 19 nt, Artificial Sequence
  Description of Artificial Sequence: Synthetic oligonucleotide
  Sense strand starting at position 770 of SEQ ID NO: 1563482
ggacgugguucccuaugua

SEQ ID NO: 1814074 - RNA, 19 nt, Artificial Sequence
  Description of Artificial Sequence: Synthetic oligonucleotide
  Antisense strand to SEQ ID NO: 1814073
uacauagggaaccacgucc

SEQ ID NO: 1814075 - RNA, 19 nt, Artificial Sequence
  Description of Artificial Sequence: Synthetic oligonucleotide
  Sense strand starting at position 773 of SEQ ID NO: 1563482
cgugguucccuauguauga

SEQ ID NO: 1814076 - RNA, 19 nt, Artificial Sequence
  Description of Artificial Sequence: Synthetic oligonucleotide
  Antisense strand to SEQ ID NO: 1814075
ucauacauagggaaccacg

SEQ ID NO: 1814077 - RNA, 19 nt, Artificial Sequence
  Description of Artificial Sequence: Synthetic oligonucleotide
  Sense strand starting at position 774 of SEQ ID NO: 1563482
gugguucccuauguaugau

SEQ ID NO: 1814078 - RNA, 19 nt, Artificial Sequence
  Description of Artificial Sequence: Synthetic oligonucleotide
  Antisense strand to SEQ ID NO: 1814077
aucauacauagggaaccac

SEQ ID NO: 1814079 - RNA, 19 nt, Artificial Sequence
  Description of Artificial Sequence: Synthetic oligonucleotide
  Sense strand starting at position 918 of SEQ ID NO: 1563482
uacucucucgggugaacaa

SEQ ID NO: 1814080 - RNA, 19 nt, Artificial Sequence
  Description of Artificial Sequence: Synthetic oligonucleotide
  Antisense strand to SEQ ID NO: 1814079
uuguucacccgagagagua

SEQ ID NO: 1814081 - RNA, 19 nt, Artificial Sequence
  Description of Artificial Sequence: Synthetic oligonucleotide
  Sense strand starting at position 919 of SEQ ID NO: 1563482
acucucucgggugaacaaa

SEQ ID NO: 1814082 - RNA, 19 nt, Artificial Sequence
  Description of Artificial Sequence: Synthetic oligonucleotide
  Antisense strand to SEQ ID NO: 1814081
uuuguucacccgagagagu

SEQ ID NO: 1814083 - RNA, 19 nt, Artificial Sequence
  Description of Artificial Sequence: Synthetic oligonucleotide
  Sense strand starting at position 1310 of SEQ ID NO: 1563482
gcacaugagaaaugcgaau

SEQ ID NO: 1814084 - RNA, 19 nt, Artificial Sequence
  Description of Artificial Sequence: Synthetic oligonucleotide
  Antisense strand to SEQ ID NO: 1814083
auucgcauuucucaugugc

SEQ ID NO: 1814085 - RNA, 19 nt, Artificial Sequence
  Description of Artificial Sequence: Synthetic oligonucleotide
  Sense strand starting at position 1428 of SEQ ID NO: 1563482
agcaucuuuccucggagga

SEQ ID NO: 1814086 - RNA, 19 nt, Artificial Sequence
  Description of Artificial Sequence: Synthetic oligonucleotide
  Antisense strand to SEQ ID NO: 1814085
uccuccgaggaaagaugcu

SEQ ID NO: 1814087 - RNA, 19 nt, Artificial Sequence
  Description of Artificial Sequence: Synthetic oligonucleotide
  Sense strand starting at position 1429 of SEQ ID NO: 1563482
gcaucuuuccucggaggag

SEQ ID NO: 1814088 - RNA, 19 nt, Artificial Sequence
  Description of Artificial Sequence: Synthetic oligonucleotide
  Antisense strand to SEQ ID NO: 1814087
cuccuccgaggaaagaugc

SEQ ID NO: 1814089 - RNA, 19 nt, Artificial Sequence
  Description of Artificial Sequence: Synthetic oligonucleotide
  Sense strand starting at position 2154 of SEQ ID NO: 1563482
gggagugaugagggccuua

SEQ ID NO: 1814090 - RNA, 19 nt, Artificial Sequence
  Description of Artificial Sequence: Synthetic oligonucleotide
  Antisense strand to SEQ ID NO: 1814089
uaaggcccucaucacuccc

SEQ ID NO: 1814091 - RNA, 19 nt, Artificial Sequence
  Description of Artificial Sequence: Synthetic oligonucleotide
  Sense strand starting at position 2244 of SEQ ID NO: 1563482
gguagauugaaugggaugu

SEQ ID NO: 1814092 - RNA, 19 nt, Artificial Sequence
  Description of Artificial Sequence: Synthetic oligonucleotide
  Antisense strand to SEQ ID NO: 1814091
acaucccauucaaucuacc

SEQ ID NO: 1814093 - RNA, 19 nt, Artificial Sequence
  Description of Artificial Sequence: Synthetic oligonucleotide
  Sense strand starting at position 2245 of SEQ ID NO: 1563482
guagauugaaugggauguu

SEQ ID NO: 1814094 - RNA, 19 nt, Artificial Sequence
  Description of Artificial Sequence: Synthetic oligonucleotide
  Antisense strand to SEQ ID NO: 1814093
aacaucccauucaaucuac

SEQ ID NO: 1814095 - RNA, 19 nt, Artificial Sequence
  Description of Artificial Sequence: Synthetic oligonucleotide
  Sense strand starting at position 2545 of SEQ ID NO: 1563482
aagggaugcugauuccuca

SEQ ID NO: 1814096 - RNA, 19 nt, Artificial Sequence
  Description of Artificial Sequence: Synthetic oligonucleotide
  Antisense strand to SEQ ID NO: 1814095
ugaggaaucagcaucccuu

SEQ ID NO: 1814097 - RNA, 19 nt, Artificial Sequence
  Description of Artificial Sequence: Synthetic oligonucleotide
  Sense strand starting at position 2633 of SEQ ID NO: 1563482
ggcucacuccugugagucu

SEQ ID NO: 1814098 - RNA, 19 nt, Artificial Sequence
  Description of Artificial Sequence: Synthetic oligonucleotide
  Antisense strand to SEQ ID NO: 1814097
agacucacaggagugagcc

SEQ ID NO: 1814099 - RNA, 19 nt, Artificial Sequence
  Description of Artificial Sequence: Synthetic oligonucleotide
  Sense strand starting at position 2690 of SEQ ID NO: 1563482
caugacuagaggugugacu

SEQ ID NO: 1814100 - RNA, 19 nt, Artificial Sequence
  Description of Artificial Sequence: Synthetic oligonucleotide
  Antisense strand to SEQ ID NO: 1814099
agucacaccucuagucaug

SEQ ID NO: 1814101 - RNA, 19 nt, Artificial Sequence
  Description of Artificial Sequence: Synthetic oligonucleotide
  Sense strand starting at position 2692 of SEQ ID NO: 1563482
ugacuagaggugugacuaa

SEQ ID NO: 1814102 - RNA, 19 nt, Artificial Sequence
  Description of Artificial Sequence: Synthetic oligonucleotide
  Antisense strand to SEQ ID NO: 1814101
uuagucacaccucuaguca

SEQ ID NO: 1814103 - RNA, 19 nt, Artificial Sequence
  Description of Artificial Sequence: Synthetic oligonucleotide
  Sense strand starting at position 2773 of SEQ ID NO: 1563482
ucauuugauccuugcagca

SEQ ID NO: 1814104 - RNA, 19 nt, Artificial Sequence
  Description of Artificial Sequence: Synthetic oligonucleotide
  Antisense strand to SEQ ID NO: 1814103
ugcugcaaggaucaaauga

SEQ ID NO: 1814105 - RNA, 19 nt, Artificial Sequence
  Description of Artificial Sequence: Synthetic oligonucleotide
  Sense strand starting at position 2786 of SEQ ID NO: 1563482
gcagcaguccuaugaggaa

SEQ ID NO: 1814106 - RNA, 19 nt, Artificial Sequence
  Description of Artificial Sequence: Synthetic oligonucleotide
  Antisense strand to SEQ ID NO: 1814105
uuccucauaggacugcugc

SEQ ID NO: 1814107 - RNA, 19 nt, Artificial Sequence
  Description of Artificial Sequence: Synthetic oligonucleotide
  Sense strand starting at position 2857 of SEQ ID NO: 1563482
gugaaagggacuugucuaa

SEQ ID NO: 1814108 - RNA, 19 nt, Artificial Sequence
  Description of Artificial Sequence: Synthetic oligonucleotide
  Antisense strand to SEQ ID NO: 1814107
uuagacaagucccuuucac

SEQ ID NO: 1814109 - RNA, 19 nt, Artificial Sequence
  Description of Artificial Sequence: Synthetic oligonucleotide
  Sense strand starting at position 3424 of SEQ ID NO: 1563482
agcugcuugcccucucuua

SEQ ID NO: 1814110 - RNA, 19 nt, Artificial Sequence
  Description of Artificial Sequence: Synthetic oligonucleotide
  Antisense strand to SEQ ID NO: 1814109
uaagagagggcaagcagcu

SEQ ID NO: 1814111 - RNA, 19 nt, Artificial Sequence
  Description of Artificial Sequence: Synthetic oligonucleotide
  Sense strand starting at position 3425 of SEQ ID NO: 1563482
gcugcuugcccucucuuaa

SEQ ID NO: 1814112 - RNA, 19 nt, Artificial Sequence
  Description of Artificial Sequence: Synthetic oligonucleotide
  Antisense strand to SEQ ID NO: 1814111
uuaagagagggcaagcagc

SEQ ID NO: 1814113 - RNA, 19 nt, Artificial Sequence
  Description of Artificial Sequence: Synthetic oligonucleotide
  Sense strand starting at position 3709 of SEQ ID NO: 1563482
gaggcuucuccagggaacu

SEQ ID NO: 1814114 - RNA, 19 nt, Artificial Sequence
  Description of Artificial Sequence: Synthetic oligonucleotide
  Antisense strand to SEQ ID NO: 1814113
aguucccuggagaagccuc

SEQ ID NO: 1814115 - RNA, 19 nt, Artificial Sequence
  Description of Artificial Sequence: Synthetic oligonucleotide
  Sense strand starting at position 3777 of SEQ ID NO: 1563482
aguauagugcugugaggag

SEQ ID NO: 1814116 - RNA, 19 nt, Artificial Sequence
  Description of Artificial Sequence: Synthetic oligonucleotide
  Antisense strand to SEQ ID NO: 1814115
cuccucacagcacuauacu

SEQ ID NO: 1814117 - RNA, 19 nt, Artificial Sequence
  Description of Artificial Sequence: Synthetic oligonucleotide
  Sense strand starting at position 3848 of SEQ ID NO: 1563482
ggccuuuguaucugggcaa

SEQ ID NO: 1814118 - RNA, 19 nt, Artificial Sequence
  Description of Artificial Sequence: Synthetic oligonucleotide
  Antisense strand to SEQ ID NO: 1814117
uugcccagauacaaaggcc

SEQ ID NO: 1814119 - RNA, 19 nt, Artificial Sequence
  Description of Artificial Sequence: Synthetic oligonucleotide
  Sense strand starting at position 3851 of SEQ ID NO: 1563482
cuuuguaucugggcaaaca

SEQ ID NO: 1814120 - RNA, 19 nt, Artificial Sequence
  Description of Artificial Sequence: Synthetic oligonucleotide
  Antisense strand to SEQ ID NO: 1814119
uguuugcccagauacaaag

SEQ ID NO: 1814121 - RNA, 19 nt, Artificial Sequence
  Description of Artificial Sequence: Synthetic oligonucleotide
  Sense strand starting at position 3904 of SEQ ID NO: 1563482
augccucaucccugaguga

SEQ ID NO: 1814122 - RNA, 19 nt, Artificial Sequence
  Description of Artificial Sequence: Synthetic oligonucleotide
  Antisense strand to SEQ ID NO: 1814121
ucacucagggaugaggcau

SEQ ID NO: 1814123 - RNA, 19 nt, Artificial Sequence
  Description of Artificial Sequence: Synthetic oligonucleotide
  Sense strand starting at position 3920 of SEQ ID NO: 1563482
ugagguuuaggcggaguaa

SEQ ID NO: 1814124 - RNA, 19 nt, Artificial Sequence
  Description of Artificial Sequence: Synthetic oligonucleotide
  Antisense strand to SEQ ID NO: 1814123
uuacuccgccuaaaccuca

SEQ ID NO: 1814125 - RNA, 19 nt, Artificial Sequence
  Description of Artificial Sequence: Synthetic oligonucleotide
  Sense strand starting at position 3921 of SEQ ID NO: 1563482
gagguuuaggcggaguaag

SEQ ID NO: 1814126 - RNA, 19 nt, Artificial Sequence
  Description of Artificial Sequence: Synthetic oligonucleotide
  Antisense strand to SEQ ID NO: 1814125
cuuacuccgccuaaaccuc

SEQ ID NO: 1814127 - RNA, 19 nt, Artificial Sequence
  Description of Artificial Sequence: Synthetic oligonucleotide
  Sense strand starting at position 148 of SEQ ID NO: 1563483
ugcugcuucucccacagau

SEQ ID NO: 1814128 - RNA, 19 nt, Artificial Sequence
  Description of Artificial Sequence: Synthetic oligonucleotide
  Antisense strand to SEQ ID NO: 1814127
aucugugggagaagcagca

SEQ ID NO: 1814129 - RNA, 19 nt, Artificial Sequence
  Description of Artificial Sequence: Synthetic oligonucleotide
  Sense strand starting at position 382 of SEQ ID NO: 1563483
cgaggaggcuugcuucagu

SEQ ID NO: 1814130 - RNA, 19 nt, Artificial Sequence
  Description of Artificial Sequence: Synthetic oligonucleotide
  Antisense strand to SEQ ID NO: 1814129
acugaagcaagccuccucg

SEQ ID NO: 1814131 - RNA, 19 nt, Artificial Sequence
  Description of Artificial Sequence: Synthetic oligonucleotide
  Sense strand starting at position 450 of SEQ ID NO: 1563483
uacagagcugcuuggacaa

SEQ ID NO: 1814132 - RNA, 19 nt, Artificial Sequence
  Description of Artificial Sequence: Synthetic oligonucleotide
  Antisense strand to SEQ ID NO: 1814131
uuguccaagcagcucugua

SEQ ID NO: 1814133 - RNA, 19 nt, Artificial Sequence
  Description of Artificial Sequence: Synthetic oligonucleotide
  Sense strand starting at position 1094 of SEQ ID NO: 1563483
ccagucuucuaauggagac

SEQ ID NO: 1814134 - RNA, 19 nt, Artificial Sequence
  Description of Artificial Sequence: Synthetic oligonucleotide
  Antisense strand to SEQ ID NO: 1814133
gucuccauuagaagacugg

SEQ ID NO: 1814135 - RNA, 19 nt, Artificial Sequence
  Description of Artificial Sequence: Synthetic oligonucleotide
  Sense strand starting at position 2003 of SEQ ID NO: 1563483
ggauggaucugaguggagu

SEQ ID NO: 1814136 - RNA, 19 nt, Artificial Sequence
  Description of Artificial Sequence: Synthetic oligonucleotide
  Antisense strand to SEQ ID NO: 1814135
acuccacucagauccaucc

SEQ ID NO: 1814137 - RNA, 19 nt, Artificial Sequence
  Description of Artificial Sequence: Synthetic oligonucleotide
  Sense strand starting at position 2040 of SEQ ID NO: 1563483
gcucccuucucaguugauu

SEQ ID NO: 1814138 - RNA, 19 nt, Artificial Sequence
  Description of Artificial Sequence: Synthetic oligonucleotide
  Antisense strand to SEQ ID NO: 1814137
aaucaacugagaagggagc

SEQ ID NO: 1814139 - RNA, 19 nt, Artificial Sequence
  Description of Artificial Sequence: Synthetic oligonucleotide
  Sense strand starting at position 2187 of SEQ ID NO: 1563483
uagggaacuguuggcucua

SEQ ID NO: 1814140 - RNA, 19 nt, Artificial Sequence
  Description of Artificial Sequence: Synthetic oligonucleotide
  Antisense strand to SEQ ID NO: 1814139
uagagccaacaguucccua

SEQ ID NO: 1814141 - RNA, 19 nt, Artificial Sequence
  Description of Artificial Sequence: Synthetic oligonucleotide
  Sense strand starting at position 2188 of SEQ ID NO: 1563483
agggaacuguuggcucuaa

SEQ ID NO: 1814142 - RNA, 19 nt, Artificial Sequence
  Description of Artificial Sequence: Synthetic oligonucleotide
  Antisense strand to SEQ ID NO: 1814141
uuagagccaacaguucccu

SEQ ID NO: 1814143 - RNA, 19 nt, Artificial Sequence
  Description of Artificial Sequence: Synthetic oligonucleotide
  Sense strand starting at position 2249 of SEQ ID NO: 1563483
ccgaucuugugcccuuaua

SEQ ID NO: 1814144 - RNA, 19 nt, Artificial Sequence
  Description of Artificial Sequence: Synthetic oligonucleotide
  Antisense strand to SEQ ID NO: 1814143
uauaagggcacaagaucgg

SEQ ID NO: 1814145 - RNA, 19 nt, Artificial Sequence
  Description of Artificial Sequence: Synthetic oligonucleotide
  Sense strand starting at position 2259 of SEQ ID NO: 1563483
gcccuuauaucgccaguuu

SEQ ID NO: 1814146 - RNA, 19 nt, Artificial Sequence
  Description of Artificial Sequence: Synthetic oligonucleotide
  Antisense strand to SEQ ID NO: 1814145
aaacuggcgauauaagggc

SEQ ID NO: 1814147 - RNA, 19 nt, Artificial Sequence
  Description of Artificial Sequence: Synthetic oligonucleotide
  Sense strand starting at position 2431 of SEQ ID NO: 1563483
ggaggugcuuucucuuaca

SEQ ID NO: 1814148 - RNA, 19 nt, Artificial Sequence
  Description of Artificial Sequence: Synthetic oligonucleotide
  Antisense strand to SEQ ID NO: 1814147
uguaagagaaagcaccucc

SEQ ID NO: 1814149 - RNA, 19 nt, Artificial Sequence
  Description of Artificial Sequence: Synthetic oligonucleotide
  Sense strand starting at position 2509 of SEQ ID NO: 1563483
agacuauuguucucucagu

SEQ ID NO: 1814150 - RNA, 19 nt, Artificial Sequence
  Description of Artificial Sequence: Synthetic oligonucleotide
  Antisense strand to SEQ ID NO: 1814149
acugagagaacaauagucu

SEQ ID NO: 1814151 - RNA, 19 nt, Artificial Sequence
  Description of Artificial Sequence: Synthetic oligonucleotide
  Sense strand starting at position 2514 of SEQ ID NO: 1563483
auuguucucucagucucua

SEQ ID NO: 1814152 - RNA, 19 nt, Artificial Sequence
  Description of Artificial Sequence: Synthetic oligonucleotide
  Antisense strand to SEQ ID NO: 1814151
uagagacugagagaacaau

SEQ ID NO: 1814153 - RNA, 19 nt, Artificial Sequence
  Description of Artificial Sequence: Synthetic oligonucleotide
  Sense strand starting at position 2526 of SEQ ID NO: 1563483
gucucuaggcccugaaauu

SEQ ID NO: 1814154 - RNA, 19 nt, Artificial Sequence
  Description of Artificial Sequence: Synthetic oligonucleotide
  Antisense strand to SEQ ID NO: 1814153
aauuucagggccuagagac

SEQ ID NO: 1814155 - RNA, 19 nt, Artificial Sequence
  Description of Artificial Sequence: Synthetic oligonucleotide
  Sense strand starting at position 2527 of SEQ ID NO: 1563483
ucucuaggcccugaaauua

SEQ ID NO: 1814156 - RNA, 19 nt, Artificial Sequence
  Description of Artificial Sequence: Synthetic oligonucleotide
  Antisense strand to SEQ ID NO: 1814155
uaauuucagggccuagaga

SEQ ID NO: 1814157 - RNA, 19 nt, Artificial Sequence
  Description of Artificial Sequence: Synthetic oligonucleotide
  Sense strand starting at position 2537 of SEQ ID NO: 1563483
cugaaauuacugugaccuc

SEQ ID NO: 1814158 - RNA, 19 nt, Artificial Sequence
  Description of Artificial Sequence: Synthetic oligonucleotide
  Antisense strand to SEQ ID NO: 1814157
gaggucacaguaauuucag

SEQ ID NO: 1814159 - RNA, 19 nt, Artificial Sequence
  Description of Artificial Sequence: Synthetic oligonucleotide
  Sense strand starting at position 2538 of SEQ ID NO: 1563483
ugaaauuacugugaccuca

SEQ ID NO: 1814160 - RNA, 19 nt, Artificial Sequence
  Description of Artificial Sequence: Synthetic oligonucleotide
  Antisense strand to SEQ ID NO: 1814159
ugaggucacaguaauuuca

SEQ ID NO: 1814161 - RNA, 19 nt, Artificial Sequence
  Description of Artificial Sequence: Synthetic oligonucleotide
  Sense strand starting at position 2756 of SEQ ID NO: 1563483
gagaaacccuucuaugggu

SEQ ID NO: 1814162 - RNA, 19 nt, Artificial Sequence
  Description of Artificial Sequence: Synthetic oligonucleotide
  Antisense strand to SEQ ID NO: 1814161
acccauagaaggguuucuc

SEQ ID NO: 1814163 - RNA, 19 nt, Artificial Sequence
  Description of Artificial Sequence: Synthetic oligonucleotide
  Sense strand starting at position 2764 of SEQ ID NO: 1563483
cuucuaugggucuggaaua

SEQ ID NO: 1814164 - RNA, 19 nt, Artificial Sequence
  Description of Artificial Sequence: Synthetic oligonucleotide
  Antisense strand to SEQ ID NO: 1814163
uauuccagacccauagaag

SEQ ID NO: 1814165 - RNA, 19 nt, Artificial Sequence
  Description of Artificial Sequence: Synthetic oligonucleotide
  Sense strand starting at position 2793 of SEQ ID NO: 1563483
auacuuguccaaggacauc

SEQ ID NO: 1814166 - RNA, 19 nt, Artificial Sequence
  Description of Artificial Sequence: Synthetic oligonucleotide
  Antisense strand to SEQ ID NO: 1814165
gauguccuuggacaaguau

SEQ ID NO: 1814167 - RNA, 19 nt, Artificial Sequence
  Description of Artificial Sequence: Synthetic oligonucleotide
  Sense strand starting at position 2849 of SEQ ID NO: 1563483
gaggaaggaugacauacaa

SEQ ID NO: 1814168 - RNA, 19 nt, Artificial Sequence
  Description of Artificial Sequence: Synthetic oligonucleotide
  Antisense strand to SEQ ID NO: 1814167
uuguaugucauccuuccuc

SEQ ID NO: 1814169 - RNA, 19 nt, Artificial Sequence
  Description of Artificial Sequence: Synthetic oligonucleotide
  Sense strand starting at position 2909 of SEQ ID NO: 1563483
accaauuauugggucuuua

SEQ ID NO: 1814170 - RNA, 19 nt, Artificial Sequence
  Description of Artificial Sequence: Synthetic oligonucleotide
  Antisense strand to SEQ ID NO: 1814169
uaaagacccaauaauuggu

SEQ ID NO: 1814171 - RNA, 19 nt, Artificial Sequence
  Description of Artificial Sequence: Synthetic oligonucleotide
  Sense strand starting at position 2913 of SEQ ID NO: 1563483
auuauugggucuuuacaaa

SEQ ID NO: 1814172 - RNA, 19 nt, Artificial Sequence
  Description of Artificial Sequence: Synthetic oligonucleotide
  Antisense strand to SEQ ID NO: 1814171
uuuguaaagacccaauaau

SEQ ID NO: 1814173 - RNA, 19 nt, Artificial Sequence
  Description of Artificial Sequence: Synthetic oligonucleotide
  Sense strand starting at position 2966 of SEQ ID NO: 1563483
ccaagcugaugcuauuauu

SEQ ID NO: 1814174 - RNA, 19 nt, Artificial Sequence
  Description of Artificial Sequence: Synthetic oligonucleotide
  Antisense strand to SEQ ID NO: 1814173
aauaauagcaucagcuugg

SEQ ID NO: 1814175 - RNA, 19 nt, Artificial Sequence
  Description of Artificial Sequence: Synthetic oligonucleotide
  Sense strand starting at position 3013 of SEQ ID NO: 1563483
gcucaaagauguuaacaca

SEQ ID NO: 1814176 - RNA, 19 nt, Artificial Sequence
  Description of Artificial Sequence: Synthetic oligonucleotide
  Antisense strand to SEQ ID NO: 1814175
uguguuaacaucuuugagc

SEQ ID NO: 1814177 - RNA, 19 nt, Artificial Sequence
  Description of Artificial Sequence: Synthetic oligonucleotide
  Sense strand starting at position 3064 of SEQ ID NO: 1563483
ggaugcaaauccugauuau

SEQ ID NO: 1814178 - RNA, 19 nt, Artificial Sequence
  Description of Artificial Sequence: Synthetic oligonucleotide
  Antisense strand to SEQ ID NO: 1814177
auaaucaggauuugcaucc

SEQ ID NO: 1814179 - RNA, 19 nt, Artificial Sequence
  Description of Artificial Sequence: Synthetic oligonucleotide
  Sense strand starting at position 3112 of SEQ ID NO: 1563483
ucuaguacgacaggucuau

SEQ ID NO: 1814180 - RNA, 19 nt, Artificial Sequence
  Description of Artificial Sequence: Synthetic oligonucleotide
  Antisense strand to SEQ ID NO: 1814179
auagaccugucguacuaga

SEQ ID NO: 1814181 - RNA, 19 nt, Artificial Sequence
  Description of Artificial Sequence: Synthetic oligonucleotide
  Sense strand starting at position 3116 of SEQ ID NO: 1563483
guacgacaggucuauucua

SEQ ID NO: 1814182 - RNA, 19 nt, Artificial Sequence
  Description of Artificial Sequence: Synthetic oligonucleotide
  Antisense strand to SEQ ID NO: 1814181
uagaauagaccugucguac

SEQ ID NO: 1814183 - RNA, 19 nt, Artificial Sequence
  Description of Artificial Sequence: Synthetic oligonucleotide
  Sense strand starting at position 3196 of SEQ ID NO: 1563483
ugugcaagaccuugaccua

SEQ ID NO: 1814184 - RNA, 19 nt, Artificial Sequence
  Description of Artificial Sequence: Synthetic oligonucleotide
  Antisense strand to SEQ ID NO: 1814183
uaggucaaggucuugcaca

SEQ ID NO: 1814185 - RNA, 19 nt, Artificial Sequence
  Description of Artificial Sequence: Synthetic oligonucleotide
  Sense strand starting at position 3203 of SEQ ID NO: 1563483
gaccuugaccuagguauua

SEQ ID NO: 1814186 - RNA, 19 nt, Artificial Sequence
  Description of Artificial Sequence: Synthetic oligonucleotide
  Antisense strand to SEQ ID NO: 1814185
uaauaccuaggucaagguc

SEQ ID NO: 1814187 - RNA, 19 nt, Artificial Sequence
  Description of Artificial Sequence: Synthetic oligonucleotide
  Sense strand starting at position 3208 of SEQ ID NO: 1563483
ugaccuagguauuagggau

SEQ ID NO: 1814188 - RNA, 19 nt, Artificial Sequence
  Description of Artificial Sequence: Synthetic oligonucleotide
  Antisense strand to SEQ ID NO: 1814187
aucccuaauaccuagguca

SEQ ID NO: 1814189 - RNA, 19 nt, Artificial Sequence
  Description of Artificial Sequence: Synthetic oligonucleotide
  Sense strand starting at position 3567 of SEQ ID NO: 1563483
ucaacaaauaugcguggaa

SEQ ID NO: 1814190 - RNA, 19 nt, Artificial Sequence
  Description of Artificial Sequence: Synthetic oligonucleotide
  Antisense strand to SEQ ID NO: 1814189
uuccacgcauauuuguuga

SEQ ID NO: 1814191 - RNA, 19 nt, Artificial Sequence
  Description of Artificial Sequence: Synthetic oligonucleotide
  Sense strand starting at position 3569 of SEQ ID NO: 1563483
aacaaauaugcguggaaca

SEQ ID NO: 1814192 - RNA, 19 nt, Artificial Sequence
  Description of Artificial Sequence: Synthetic oligonucleotide
  Antisense strand to SEQ ID NO: 1814191
uguuccacgcauauuuguu

SEQ ID NO: 1814193 - RNA, 19 nt, Artificial Sequence
  Description of Artificial Sequence: Synthetic oligonucleotide
  Sense strand starting at position 3571 of SEQ ID NO: 1563483
caaauaugcguggaacacu

SEQ ID NO: 1814194 - RNA, 19 nt, Artificial Sequence
  Description of Artificial Sequence: Synthetic oligonucleotide
  Antisense strand to SEQ ID NO: 1814193
aguguuccacgcauauuug

SEQ ID NO: 1814195 - RNA, 19 nt, Artificial Sequence
  Description of Artificial Sequence: Synthetic oligonucleotide
  Sense strand starting at position 3600 of SEQ ID NO: 1563483
cagacacuguuguaggauu

SEQ ID NO: 1814196 - RNA, 19 nt, Artificial Sequence
  Description of Artificial Sequence: Synthetic oligonucleotide
  Antisense strand to SEQ ID NO: 1814195
aauccuacaacagugucug

SEQ ID NO: 1814197 - RNA, 19 nt, Artificial Sequence
  Description of Artificial Sequence: Synthetic oligonucleotide
  Sense strand starting at position 3679 of SEQ ID NO: 1563483
gagcuuaccuccuagugag

SEQ ID NO: 1814198 - RNA, 19 nt, Artificial Sequence
  Description of Artificial Sequence: Synthetic oligonucleotide
  Antisense strand to SEQ ID NO: 1814197
cucacuaggagguaagcuc

SEQ ID NO: 1814199 - RNA, 19 nt, Artificial Sequence
  Description of Artificial Sequence: Synthetic oligonucleotide
  Sense strand starting at position 3731 of SEQ ID NO: 1563483
ugaauuauguaguacagua

SEQ ID NO: 1814200 - RNA, 19 nt, Artificial Sequence
  Description of Artificial Sequence: Synthetic oligonucleotide
  Antisense strand to SEQ ID NO: 1814199
uacuguacuacauaauuca

SEQ ID NO: 1814201 - RNA, 19 nt, Artificial Sequence
  Description of Artificial Sequence: Synthetic oligonucleotide
  Sense strand starting at position 3767 of SEQ ID NO: 1563483
auugguagguccuuggcaa

SEQ ID NO: 1814202 - RNA, 19 nt, Artificial Sequence
  Description of Artificial Sequence: Synthetic oligonucleotide
  Antisense strand to SEQ ID NO: 1814201
uugccaaggaccuaccaau

SEQ ID NO: 1814203 - RNA, 19 nt, Artificial Sequence
  Description of Artificial Sequence: Synthetic oligonucleotide
  Sense strand starting at position 3946 of SEQ ID NO: 1563483
augagcuaugcauacauau

SEQ ID NO: 1814204 - RNA, 19 nt, Artificial Sequence
  Description of Artificial Sequence: Synthetic oligonucleotide
  Antisense strand to SEQ ID NO: 1814203
auauguaugcauagcucau

SEQ ID NO: 1814205 - RNA, 19 nt, Artificial Sequence
  Description of Artificial Sequence: Synthetic oligonucleotide
  Sense strand starting at position 103 of SEQ ID NO: 1563484
guguaauuagcccaccacu

SEQ ID NO: 1814206 - RNA, 19 nt, Artificial Sequence
  Description of Artificial Sequence: Synthetic oligonucleotide
  Antisense strand to SEQ ID NO: 1814205
aguggugggcuaauuacac

SEQ ID NO: 1814207 - RNA, 19 nt, Artificial Sequence
  Description of Artificial Sequence: Synthetic oligonucleotide
  Sense strand starting at position 174 of SEQ ID NO: 1563484
cuaagaggaauacguaauu

SEQ ID NO: 1814208 - RNA, 19 nt, Artificial Sequence
  Description of Artificial Sequence: Synthetic oligonucleotide
  Antisense strand to SEQ ID NO: 1814207
aauuacguauuccucuuag

SEQ ID NO: 1814209 - RNA, 19 nt, Artificial Sequence
  Description of Artificial Sequence: Synthetic oligonucleotide
  Sense strand starting at position 352 of SEQ ID NO: 1563484
gucuauuaacuuggaugau

SEQ ID NO: 1814210 - RNA, 19 nt, Artificial Sequence
  Description of Artificial Sequence: Synthetic oligonucleotide
  Antisense strand to SEQ ID NO: 1814209
aucauccaaguuaauagac

SEQ ID NO: 1814211 - RNA, 19 nt, Artificial Sequence
  Description of Artificial Sequence: Synthetic oligonucleotide
  Sense strand starting at position 367 of SEQ ID NO: 1563484
ugauuuagcuccucaggcu

SEQ ID NO: 1814212 - RNA, 19 nt, Artificial Sequence
  Description of Artificial Sequence: Synthetic oligonucleotide
  Antisense strand to SEQ ID NO: 1814211
agccugaggagcuaaauca

SEQ ID NO: 1814213 - RNA, 19 nt, Artificial Sequence
  Description of Artificial Sequence: Synthetic oligonucleotide
  Sense strand starting at position 408 of SEQ ID NO: 1563484
ccgaaagauucuguauuac

SEQ ID NO: 1814214 - RNA, 19 nt, Artificial Sequence
  Description of Artificial Sequence: Synthetic oligonucleotide
  Antisense strand to SEQ ID NO: 1814213
guaauacagaaucuuucgg

SEQ ID NO: 1814215 - RNA, 19 nt, Artificial Sequence
  Description of Artificial Sequence: Synthetic oligonucleotide
  Sense strand starting at position 505 of SEQ ID NO: 1563484
cuuguuaaauguuugaaug

SEQ ID NO: 1814216 - RNA, 19 nt, Artificial Sequence
  Description of Artificial Sequence: Synthetic oligonucleotide
  Antisense strand to SEQ ID NO: 1814215
cauucaaacauuuaacaag

SEQ ID NO: 1814217 - RNA, 19 nt, Artificial Sequence
  Description of Artificial Sequence: Synthetic oligonucleotide
  Sense strand starting at position 579 of SEQ ID NO: 1563484
gauuacagucacugacaga

SEQ ID NO: 1814218 - RNA, 19 nt, Artificial Sequence
  Description of Artificial Sequence: Synthetic oligonucleotide
  Antisense strand to SEQ ID NO: 1814217
ucugucagugacuguaauc

SEQ ID NO: 1814219 - RNA, 19 nt, Artificial Sequence
  Description of Artificial Sequence: Synthetic oligonucleotide
  Sense strand starting at position 622 of SEQ ID NO: 1563484
gguuauagaaacgaugcau

SEQ ID NO: 1814220 - RNA, 19 nt, Artificial Sequence
  Description of Artificial Sequence: Synthetic oligonucleotide
  Antisense strand to SEQ ID NO: 1814219
augcaucguuucuauaacc

SEQ ID NO: 1814221 - RNA, 19 nt, Artificial Sequence
  Description of Artificial Sequence: Synthetic oligonucleotide
  Sense strand starting at position 628 of SEQ ID NO: 1563484
agaaacgaugcauaguuua

SEQ ID NO: 1814222 - RNA, 19 nt, Artificial Sequence
  Description of Artificial Sequence: Synthetic oligonucleotide
  Antisense strand to SEQ ID NO: 1814221
uaaacuaugcaucguuucu

SEQ ID NO: 1814223 - RNA, 19 nt, Artificial Sequence
  Description of Artificial Sequence: Synthetic oligonucleotide
  Sense strand starting at position 633 of SEQ ID NO: 1563484
cgaugcauaguuuauacaa

SEQ ID NO: 1814224 - RNA, 19 nt, Artificial Sequence
  Description of Artificial Sequence: Synthetic oligonucleotide
  Antisense strand to SEQ ID NO: 1814223
uuguauaaacuaugcaucg

SEQ ID NO: 1814225 - RNA, 19 nt, Artificial Sequence
  Description of Artificial Sequence: Synthetic oligonucleotide
  Sense strand starting at position 980 of SEQ ID NO: 1563484
gcaguaaucaagcgagaaa

SEQ ID NO: 1814226 - RNA, 19 nt, Artificial Sequence
  Description of Artificial Sequence: Synthetic oligonucleotide
  Antisense strand to SEQ ID NO: 1814225
uuucucgcuugauuacugc

SEQ ID NO: 1814227 - RNA, 19 nt, Artificial Sequence
  Description of Artificial Sequence: Synthetic oligonucleotide
  Sense strand starting at position 983 of SEQ ID NO: 1563484
guaaucaagcgagaaauca

SEQ ID NO: 1814228 - RNA, 19 nt, Artificial Sequence
  Description of Artificial Sequence: Synthetic oligonucleotide
  Antisense strand to SEQ ID NO: 1814227
ugauuucucgcuugauuac

SEQ ID NO: 1814229 - RNA, 19 nt, Artificial Sequence
  Description of Artificial Sequence: Synthetic oligonucleotide
  Sense strand starting at position 1052 of SEQ ID NO: 1563484
agcugaaacagaugcuaga

SEQ ID NO: 1814230 - RNA, 19 nt, Artificial Sequence
  Description of Artificial Sequence: Synthetic oligonucleotide
  Antisense strand to SEQ ID NO: 1814229
ucuagcaucuguuucagcu

SEQ ID NO: 1814231 - RNA, 19 nt, Artificial Sequence
  Description of Artificial Sequence: Synthetic oligonucleotide
  Sense strand starting at position 1061 of SEQ ID NO: 1563484
agaugcuagaguuguugaa

SEQ ID NO: 1814232 - RNA, 19 nt, Artificial Sequence
  Description of Artificial Sequence: Synthetic oligonucleotide
  Antisense strand to SEQ ID NO: 1814231
uucaacaacucuagcaucu

SEQ ID NO: 1814233 - RNA, 19 nt, Artificial Sequence
  Description of Artificial Sequence: Synthetic oligonucleotide
  Sense strand starting at position 1149 of SEQ ID NO: 1563484
agaaauugaugaggagaaa

SEQ ID NO: 1814234 - RNA, 19 nt, Artificial Sequence
  Description of Artificial Sequence: Synthetic oligonucleotide
  Antisense strand to SEQ ID NO: 1814233
uuucuccucaucaauuucu

SEQ ID NO: 1814235 - RNA, 19 nt, Artificial Sequence
  Description of Artificial Sequence: Synthetic oligonucleotide
  Sense strand starting at position 1257 of SEQ ID NO: 1563484
cugucugaauaugccaaua

SEQ ID NO: 1814236 - RNA, 19 nt, Artificial Sequence
  Description of Artificial Sequence: Synthetic oligonucleotide
  Antisense strand to SEQ ID NO: 1814235
uauuggcauauucagacag

SEQ ID NO: 1814237 - RNA, 19 nt, Artificial Sequence
  Description of Artificial Sequence: Synthetic oligonucleotide
  Sense strand starting at position 1350 of SEQ ID NO: 1563484
gucaucaucuaccugaaga

SEQ ID NO: 1814238 - RNA, 19 nt, Artificial Sequence
  Description of Artificial Sequence: Synthetic oligonucleotide
  Antisense strand to SEQ ID NO: 1814237
ucuucagguagaugaugac

SEQ ID NO: 1814239 - RNA, 19 nt, Artificial Sequence
  Description of Artificial Sequence: Synthetic oligonucleotide
  Sense strand starting at position 1414 of SEQ ID NO: 1563484
ugauuucuaucccagaagu

SEQ ID NO: 1814240 - RNA, 19 nt, Artificial Sequence
  Description of Artificial Sequence: Synthetic oligonucleotide
  Antisense strand to SEQ ID NO: 1814239
acuucugggauagaaauca

SEQ ID NO: 1814241 - RNA, 19 nt, Artificial Sequence
  Description of Artificial Sequence: Synthetic oligonucleotide
  Sense strand starting at position 1536 of SEQ ID NO: 1563484
ugaagagcucggcaacaaa

SEQ ID NO: 1814242 - RNA, 19 nt, Artificial Sequence
  Description of Artificial Sequence: Synthetic oligonucleotide
  Antisense strand to SEQ ID NO: 1814241
uuuguugccgagcucuuca

SEQ ID NO: 1814243 - RNA, 19 nt, Artificial Sequence
  Description of Artificial Sequence: Synthetic oligonucleotide
  Sense strand starting at position 1679 of SEQ ID NO: 1563484
ccaucaugccaauaaguug

SEQ ID NO: 1814244 - RNA, 19 nt, Artificial Sequence
  Description of Artificial Sequence: Synthetic oligonucleotide
  Antisense strand to SEQ ID NO: 1814243
caacuuauuggcaugaugg

SEQ ID NO: 1814245 - RNA, 19 nt, Artificial Sequence
  Description of Artificial Sequence: Synthetic oligonucleotide
  Sense strand starting at position 1910 of SEQ ID NO: 1563484
ugguaaccacucugacuau

SEQ ID NO: 1814246 - RNA, 19 nt, Artificial Sequence
  Description of Artificial Sequence: Synthetic oligonucleotide
  Antisense strand to SEQ ID NO: 1814245
auagucagagugguuacca

SEQ ID NO: 1814247 - RNA, 19 nt, Artificial Sequence
  Description of Artificial Sequence: Synthetic oligonucleotide
  Sense strand starting at position 1930 of SEQ ID NO: 1563484
ugauacgucagucgaacaa

SEQ ID NO: 1814248 - RNA, 19 nt, Artificial Sequence
  Description of Artificial Sequence: Synthetic oligonucleotide
  Antisense strand to SEQ ID NO: 1814247
uuguucgacugacguauca

SEQ ID NO: 1814249 - RNA, 19 nt, Artificial Sequence
  Description of Artificial Sequence: Synthetic oligonucleotide
  Sense strand starting at position 1976 of SEQ ID NO: 1563484
gccagagcagcguuugcau

SEQ ID NO: 1814250 - RNA, 19 nt, Artificial Sequence
  Description of Artificial Sequence: Synthetic oligonucleotide
  Antisense strand to SEQ ID NO: 1814249
augcaaacgcugcucuggc

SEQ ID NO: 1814251 - RNA, 19 nt, Artificial Sequence
  Description of Artificial Sequence: Synthetic oligonucleotide
  Sense strand starting at position 1979 of SEQ ID NO: 1563484
agagcagcguuugcauuua

SEQ ID NO: 1814252 - RNA, 19 nt, Artificial Sequence
  Description of Artificial Sequence: Synthetic oligonucleotide
  Antisense strand to SEQ ID NO: 1814251
uaaaugcaaacgcugcucu

SEQ ID NO: 1814253 - RNA, 19 nt, Artificial Sequence
  Description of Artificial Sequence: Synthetic oligonucleotide
  Sense strand starting at position 2071 of SEQ ID NO: 1563484
augcaaagccuuuggauua

SEQ ID NO: 1814254 - RNA, 19 nt, Artificial Sequence
  Description of Artificial Sequence: Synthetic oligonucleotide
  Antisense strand to SEQ ID NO: 1814253
uaauccaaaggcuuugcau

SEQ ID NO: 1814255 - RNA, 19 nt, Artificial Sequence
  Description of Artificial Sequence: Synthetic oligonucleotide
  Sense strand starting at position 2117 of SEQ ID NO: 1563484
agaguuccucgccaaacau

SEQ ID NO: 1814256 - RNA, 19 nt, Artificial Sequence
  Description of Artificial Sequence: Synthetic oligonucleotide
  Antisense strand to SEQ ID NO: 1814255
auguuuggcgaggaacucu

SEQ ID NO: 1814257 - RNA, 19 nt, Artificial Sequence
  Description of Artificial Sequence: Synthetic oligonucleotide
  Sense strand starting at position 2236 of SEQ ID NO: 1563484
gugugcucagcuccacauu

SEQ ID NO: 1814258 - RNA, 19 nt, Artificial Sequence
  Description of Artificial Sequence: Synthetic oligonucleotide
  Antisense strand to SEQ ID NO: 1814257
aauguggagcugagcacac

SEQ ID NO: 1814259 - RNA, 19 nt, Artificial Sequence
  Description of Artificial Sequence: Synthetic oligonucleotide
  Sense strand starting at position 2247 of SEQ ID NO: 1563484
uccacauuucugcguugua

SEQ ID NO: 1814260 - RNA, 19 nt, Artificial Sequence
  Description of Artificial Sequence: Synthetic oligonucleotide
  Antisense strand to SEQ ID NO: 1814259
uacaacgcagaaaugugga

SEQ ID NO: 1814261 - RNA, 19 nt, Artificial Sequence
  Description of Artificial Sequence: Synthetic oligonucleotide
  Sense strand starting at position 2248 of SEQ ID NO: 1563484
ccacauuucugcguuguaa

SEQ ID NO: 1814262 - RNA, 19 nt, Artificial Sequence
  Description of Artificial Sequence: Synthetic oligonucleotide
  Antisense strand to SEQ ID NO: 1814261
uuacaacgcagaaaugugg

SEQ ID NO: 1814263 - RNA, 19 nt, Artificial Sequence
  Description of Artificial Sequence: Synthetic oligonucleotide
  Sense strand starting at position 2432 of SEQ ID NO: 1563484
uuugacuuuagaugaguga

SEQ ID NO: 1814264 - RNA, 19 nt, Artificial Sequence
  Description of Artificial Sequence: Synthetic oligonucleotide
  Antisense strand to SEQ ID NO: 1814263
ucacucaucuaaagucaaa

SEQ ID NO: 1814265 - RNA, 19 nt, Artificial Sequence
  Description of Artificial Sequence: Synthetic oligonucleotide
  Sense strand starting at position 2649 of SEQ ID NO: 1563484
gggcacuuaugguuugaaa

SEQ ID NO: 1814266 - RNA, 19 nt, Artificial Sequence
  Description of Artificial Sequence: Synthetic oligonucleotide
  Antisense strand to SEQ ID NO: 1814265
uuucaaaccauaagugccc

SEQ ID NO: 1814267 - RNA, 19 nt, Artificial Sequence
  Description of Artificial Sequence: Synthetic oligonucleotide
  Sense strand starting at position 2651 of SEQ ID NO: 1563484
gcacuuaugguuugaaauu

SEQ ID NO: 1814268 - RNA, 19 nt, Artificial Sequence
  Description of Artificial Sequence: Synthetic oligonucleotide
  Antisense strand to SEQ ID NO: 1814267
aauuucaaaccauaagugc

SEQ ID NO: 1814269 - RNA, 19 nt, Artificial Sequence
  Description of Artificial Sequence: Synthetic oligonucleotide
  Sense strand starting at position 2716 of SEQ ID NO: 1563484
ucauauguuuccucucaga

SEQ ID NO: 1814270 - RNA, 19 nt, Artificial Sequence
  Description of Artificial Sequence: Synthetic oligonucleotide
  Antisense strand to SEQ ID NO: 1814269
ucugagaggaaacauauga

SEQ ID NO: 1814271 - RNA, 19 nt, Artificial Sequence
  Description of Artificial Sequence: Synthetic oligonucleotide
  Sense strand starting at position 3084 of SEQ ID NO: 1563484
ccugaaagauaaguugagu

SEQ ID NO: 1814272 - RNA, 19 nt, Artificial Sequence
  Description of Artificial Sequence: Synthetic oligonucleotide
  Antisense strand to SEQ ID NO: 1814271
acucaacuuaucuuucagg

SEQ ID NO: 1814273 - RNA, 19 nt, Artificial Sequence
  Description of Artificial Sequence: Synthetic oligonucleotide
  Sense strand starting at position 3089 of SEQ ID NO: 1563484
aagauaaguugaguccaua

SEQ ID NO: 1814274 - RNA, 19 nt, Artificial Sequence
  Description of Artificial Sequence: Synthetic oligonucleotide
  Antisense strand to SEQ ID NO: 1814273
uauggacucaacuuaucuu

SEQ ID NO: 1814275 - RNA, 19 nt, Artificial Sequence
  Description of Artificial Sequence: Synthetic oligonucleotide
  Sense strand starting at position 3207 of SEQ ID NO: 1563484
cggugauuagcauaucuau

SEQ ID NO: 1814276 - RNA, 19 nt, Artificial Sequence
  Description of Artificial Sequence: Synthetic oligonucleotide
  Antisense strand to SEQ ID NO: 1814275
auagauaugcuaaucaccg

SEQ ID NO: 1814277 - RNA, 19 nt, Artificial Sequence
  Description of Artificial Sequence: Synthetic oligonucleotide
  Sense strand starting at position 3599 of SEQ ID NO: 1563484
ucucuuagugcauacugua

SEQ ID NO: 1814278 - RNA, 19 nt, Artificial Sequence
  Description of Artificial Sequence: Synthetic oligonucleotide
  Antisense strand to SEQ ID NO: 1814277
uacaguaugcacuaagaga

SEQ ID NO: 1814279 - RNA, 19 nt, Artificial Sequence
  Description of Artificial Sequence: Synthetic oligonucleotide
  Sense strand starting at position 3612 of SEQ ID NO: 1563484
acuguaguguuauuaacua

SEQ ID NO: 1814280 - RNA, 19 nt, Artificial Sequence
  Description of Artificial Sequence: Synthetic oligonucleotide
  Antisense strand to SEQ ID NO: 1814279
uaguuaauaacacuacagu

SEQ ID NO: 1814281 - RNA, 19 nt, Artificial Sequence
  Description of Artificial Sequence: Synthetic oligonucleotide
  Sense strand starting at position 3798 of SEQ ID NO: 1563484
gagaucaugcaguauuauu

SEQ ID NO: 1814282 - RNA, 19 nt, Artificial Sequence
  Description of Artificial Sequence: Synthetic oligonucleotide
  Antisense strand to SEQ ID NO: 1814281
aauaauacugcaugaucuc

SEQ ID NO: 1814283 - RNA, 19 nt, Artificial Sequence
  Description of Artificial Sequence: Synthetic oligonucleotide
  Sense strand starting at position 3895 of SEQ ID NO: 1563484
uccuuuguaggcuaaauau

SEQ ID NO: 1814284 - RNA, 19 nt, Artificial Sequence
  Description of Artificial Sequence: Synthetic oligonucleotide
  Antisense strand to SEQ ID NO: 1814283
auauuuagccuacaaagga

SEQ ID NO: 1814285 - RNA, 19 nt, Artificial Sequence
  Description of Artificial Sequence: Synthetic oligonucleotide
  Sense strand starting at position 86 of SEQ ID NO: 1563485
auaauauagcccugaguau

SEQ ID NO: 1814286 - RNA, 19 nt, Artificial Sequence
  Description of Artificial Sequence: Synthetic oligonucleotide
  Antisense strand to SEQ ID NO: 1814285
auacucagggcuauauuau

SEQ ID NO: 1814287 - RNA, 19 nt, Artificial Sequence
  Description of Artificial Sequence: Synthetic oligonucleotide
  Sense strand starting at position 144 of SEQ ID NO: 1563485
uaggcauuacuugaugauu

SEQ ID NO: 1814288 - RNA, 19 nt, Artificial Sequence
  Description of Artificial Sequence: Synthetic oligonucleotide
  Antisense strand to SEQ ID NO: 1814287
aaucaucaaguaaugccua

SEQ ID NO: 1814289 - RNA, 19 nt, Artificial Sequence
  Description of Artificial Sequence: Synthetic oligonucleotide
  Sense strand starting at position 257 of SEQ ID NO: 1563485
gacaaagcagaguguagau

SEQ ID NO: 1814290 - RNA, 19 nt, Artificial Sequence
  Description of Artificial Sequence: Synthetic oligonucleotide
  Antisense strand to SEQ ID NO: 1814289
aucuacacucugcuuuguc

SEQ ID NO: 1814291 - RNA, 19 nt, Artificial Sequence
  Description of Artificial Sequence: Synthetic oligonucleotide
  Sense strand starting at position 293 of SEQ ID NO: 1563485
agcagaauugcauauauuc

SEQ ID NO: 1814292 - RNA, 19 nt, Artificial Sequence
  Description of Artificial Sequence: Synthetic oligonucleotide
  Antisense strand to SEQ ID NO: 1814291
gaauauaugcaauucugcu

SEQ ID NO: 1814293 - RNA, 19 nt, Artificial Sequence
  Description of Artificial Sequence: Synthetic oligonucleotide
  Sense strand starting at position 699 of SEQ ID NO: 1563485
auuacuuauuuggagagau

SEQ ID NO: 1814294 - RNA, 19 nt, Artificial Sequence
  Description of Artificial Sequence: Synthetic oligonucleotide
  Antisense strand to SEQ ID NO: 1814293
aucucuccaaauaaguaau

SEQ ID NO: 1814295 - RNA, 19 nt, Artificial Sequence
  Description of Artificial Sequence: Synthetic oligonucleotide
  Sense strand starting at position 929 of SEQ ID NO: 1563485
guauuucuauaugaaagac

SEQ ID NO: 1814296 - RNA, 19 nt, Artificial Sequence
  Description of Artificial Sequence: Synthetic oligonucleotide
  Antisense strand to SEQ ID NO: 1814295
gucuuucauauagaaauac

SEQ ID NO: 1814297 - RNA, 19 nt, Artificial Sequence
  Description of Artificial Sequence: Synthetic oligonucleotide
  Sense strand starting at position 1047 of SEQ ID NO: 1563485
ucguuuacccaagaaauca

SEQ ID NO: 1814298 - RNA, 19 nt, Artificial Sequence
  Description of Artificial Sequence: Synthetic oligonucleotide
  Antisense strand to SEQ ID NO: 1814297
ugauuucuuggguaaacga

SEQ ID NO: 1814299 - RNA, 19 nt, Artificial Sequence
  Description of Artificial Sequence: Synthetic oligonucleotide
  Sense strand starting at position 1139 of SEQ ID NO: 1563485
ugaaauaguaaaugugagu

SEQ ID NO: 1814300 - RNA, 19 nt, Artificial Sequence
  Description of Artificial Sequence: Synthetic oligonucleotide
  Antisense strand to SEQ ID NO: 1814299
acucacauuuacuauuuca

SEQ ID NO: 1814301 - RNA, 19 nt, Artificial Sequence
  Description of Artificial Sequence: Synthetic oligonucleotide
  Sense strand starting at position 1144 of SEQ ID NO: 1563485
uaguaaaugugaguaagaa

SEQ ID NO: 1814302 - RNA, 19 nt, Artificial Sequence
  Description of Artificial Sequence: Synthetic oligonucleotide
  Antisense strand to SEQ ID NO: 1814301
uucuuacucacauuuacua

SEQ ID NO: 1814303 - RNA, 19 nt, Artificial Sequence
  Description of Artificial Sequence: Synthetic oligonucleotide
  Sense strand starting at position 1312 of SEQ ID NO: 1563485
uugagaauauaugucaggu

SEQ ID NO: 1814304 - RNA, 19 nt, Artificial Sequence
  Description of Artificial Sequence: Synthetic oligonucleotide
  Antisense strand to SEQ ID NO: 1814303
accugacauauauucucaa

SEQ ID NO: 1814305 - RNA, 19 nt, Artificial Sequence
  Description of Artificial Sequence: Synthetic oligonucleotide
  Sense strand starting at position 1322 of SEQ ID NO: 1563485
augucaggucaguaaccuu

SEQ ID NO: 1814306 - RNA, 19 nt, Artificial Sequence
  Description of Artificial Sequence: Synthetic oligonucleotide
  Antisense strand to SEQ ID NO: 1814305
aagguuacugaccugacau

SEQ ID NO: 1814307 - RNA, 19 nt, Artificial Sequence
  Description of Artificial Sequence: Synthetic oligonucleotide
  Sense strand starting at position 1329 of SEQ ID NO: 1563485
gucaguaaccuuuauguaa

SEQ ID NO: 1814308 - RNA, 19 nt, Artificial Sequence
  Description of Artificial Sequence: Synthetic oligonucleotide
  Antisense strand to SEQ ID NO: 1814307
uuacauaaagguuacugac

SEQ ID NO: 1814309 - RNA, 19 nt, Artificial Sequence
  Description of Artificial Sequence: Synthetic oligonucleotide
  Sense strand starting at position 1948 of SEQ ID NO: 1563485
gaaagugagugaucccaac

SEQ ID NO: 1814310 - RNA, 19 nt, Artificial Sequence
  Description of Artificial Sequence: Synthetic oligonucleotide
  Antisense strand to SEQ ID NO: 1814309
guugggaucacucacuuuc

SEQ ID NO: 1814311 - RNA, 19 nt, Artificial Sequence
  Description of Artificial Sequence: Synthetic oligonucleotide
  Sense strand starting at position 2073 of SEQ ID NO: 1563485
guugguuucccauaauagg

SEQ ID NO: 1814312 - RNA, 19 nt, Artificial Sequence
  Description of Artificial Sequence: Synthetic oligonucleotide
  Antisense strand to SEQ ID NO: 1814311
ccuauuaugggaaaccaac

SEQ ID NO: 1814313 - RNA, 19 nt, Artificial Sequence
  Description of Artificial Sequence: Synthetic oligonucleotide
  Sense strand starting at position 2082 of SEQ ID NO: 1563485
ccauaauaggacuguccau

SEQ ID NO: 1814314 - RNA, 19 nt, Artificial Sequence
  Description of Artificial Sequence: Synthetic oligonucleotide
  Antisense strand to SEQ ID NO: 1814313
auggacaguccuauuaugg

SEQ ID NO: 1814315 - RNA, 19 nt, Artificial Sequence
  Description of Artificial Sequence: Synthetic oligonucleotide
  Sense strand starting at position 2095 of SEQ ID NO: 1563485
guccauggucacuacauau

SEQ ID NO: 1814316 - RNA, 19 nt, Artificial Sequence
  Description of Artificial Sequence: Synthetic oligonucleotide
  Antisense strand to SEQ ID NO: 1814315
auauguagugaccauggac

SEQ ID NO: 1814317 - RNA, 19 nt, Artificial Sequence
  Description of Artificial Sequence: Synthetic oligonucleotide
  Sense strand starting at position 2164 of SEQ ID NO: 1563485
cuguguucugauuaauauc

SEQ ID NO: 1814318 - RNA, 19 nt, Artificial Sequence
  Description of Artificial Sequence: Synthetic oligonucleotide
  Antisense strand to SEQ ID NO: 1814317
gauauuaaucagaacacag

SEQ ID NO: 1814319 - RNA, 19 nt, Artificial Sequence
  Description of Artificial Sequence: Synthetic oligonucleotide
  Sense strand starting at position 2286 of SEQ ID NO: 1563485
ugaauuuauuaacagagca

SEQ ID NO: 1814320 - RNA, 19 nt, Artificial Sequence
  Description of Artificial Sequence: Synthetic oligonucleotide
  Antisense strand to SEQ ID NO: 1814319
ugcucuguuaauaaauuca

SEQ ID NO: 1814321 - RNA, 19 nt, Artificial Sequence
  Description of Artificial Sequence: Synthetic oligonucleotide
  Sense strand starting at position 2408 of SEQ ID NO: 1563485
ugcauuuguuauguaucca

SEQ ID NO: 1814322 - RNA, 19 nt, Artificial Sequence
  Description of Artificial Sequence: Synthetic oligonucleotide
  Antisense strand to SEQ ID NO: 1814321
uggauacauaacaaaugca

SEQ ID NO: 1814323 - RNA, 19 nt, Artificial Sequence
  Description of Artificial Sequence: Synthetic oligonucleotide
  Sense strand starting at position 2420 of SEQ ID NO: 1563485
guauccacugucuaccaaa

SEQ ID NO: 1814324 - RNA, 19 nt, Artificial Sequence
  Description of Artificial Sequence: Synthetic oligonucleotide
  Antisense strand to SEQ ID NO: 1814323
uuugguagacaguggauac

SEQ ID NO: 1814325 - RNA, 19 nt, Artificial Sequence
  Description of Artificial Sequence: Synthetic oligonucleotide
  Sense strand starting at position 2484 of SEQ ID NO: 1563485
augccaacagucugaauaa

SEQ ID NO: 1814326 - RNA, 19 nt, Artificial Sequence
  Description of Artificial Sequence: Synthetic oligonucleotide
  Antisense strand to SEQ ID NO: 1814325
uuauucagacuguuggcau

SEQ ID NO: 1814327 - RNA, 19 nt, Artificial Sequence
  Description of Artificial Sequence: Synthetic oligonucleotide
  Sense strand starting at position 2528 of SEQ ID NO: 1563485
cugaauucugaaggcagaa

SEQ ID NO: 1814328 - RNA, 19 nt, Artificial Sequence
  Description of Artificial Sequence: Synthetic oligonucleotide
  Antisense strand to SEQ ID NO: 1814327
uucugccuucagaauucag

SEQ ID NO: 1814329 - RNA, 19 nt, Artificial Sequence
  Description of Artificial Sequence: Synthetic oligonucleotide
  Sense strand starting at position 2558 of SEQ ID NO: 1563485
auaggucucaugggacaug

SEQ ID NO: 1814330 - RNA, 19 nt, Artificial Sequence
  Description of Artificial Sequence: Synthetic oligonucleotide
  Antisense strand to SEQ ID NO: 1814329
caugucccaugagaccuau

SEQ ID NO: 1814331 - RNA, 19 nt, Artificial Sequence
  Description of Artificial Sequence: Synthetic oligonucleotide
  Sense strand starting at position 2561 of SEQ ID NO: 1563485
ggucucaugggacauguuu

SEQ ID NO: 1814332 - RNA, 19 nt, Artificial Sequence
  Description of Artificial Sequence: Synthetic oligonucleotide
  Antisense strand to SEQ ID NO: 1814331
aaacaugucccaugagacc

SEQ ID NO: 1814333 - RNA, 19 nt, Artificial Sequence
  Description of Artificial Sequence: Synthetic oligonucleotide
  Sense strand starting at position 2601 of SEQ ID NO: 1563485
ucuuauaaugcaggaaaga

SEQ ID NO: 1814334 - RNA, 19 nt, Artificial Sequence
  Description of Artificial Sequence: Synthetic oligonucleotide
  Antisense strand to SEQ ID NO: 1814333
ucuuuccugcauuauaaga

SEQ ID NO: 1814335 - RNA, 19 nt, Artificial Sequence
  Description of Artificial Sequence: Synthetic oligonucleotide
  Sense strand starting at position 2728 of SEQ ID NO: 1563485
uuuagacauugaguuaaug

SEQ ID NO: 1814336 - RNA, 19 nt, Artificial Sequence
  Description of Artificial Sequence: Synthetic oligonucleotide
  Antisense strand to SEQ ID NO: 1814335
cauuaacucaaugucuaaa

SEQ ID NO: 1814337 - RNA, 19 nt, Artificial Sequence
  Description of Artificial Sequence: Synthetic oligonucleotide
  Sense strand starting at position 2987 of SEQ ID NO: 1563485
uuguaccauuuguuaaagu

SEQ ID NO: 1814338 - RNA, 19 nt, Artificial Sequence
  Description of Artificial Sequence: Synthetic oligonucleotide
  Antisense strand to SEQ ID NO: 1814337
acuuuaacaaaugguacaa

SEQ ID NO: 1814339 - RNA, 19 nt, Artificial Sequence
  Description of Artificial Sequence: Synthetic oligonucleotide
  Sense strand starting at position 3090 of SEQ ID NO: 1563485
gacugugauguuuaccuua

SEQ ID NO: 1814340 - RNA, 19 nt, Artificial Sequence
  Description of Artificial Sequence: Synthetic oligonucleotide
  Antisense strand to SEQ ID NO: 1814339
uaagguaaacaucacaguc

SEQ ID NO: 1814341 - RNA, 19 nt, Artificial Sequence
  Description of Artificial Sequence: Synthetic oligonucleotide
  Sense strand starting at position 3095 of SEQ ID NO: 1563485
ugauguuuaccuuaauagu

SEQ ID NO: 1814342 - RNA, 19 nt, Artificial Sequence
  Description of Artificial Sequence: Synthetic oligonucleotide
  Antisense strand to SEQ ID NO: 1814341
acuauuaagguaaacauca

SEQ ID NO: 1814343 - RNA, 19 nt, Artificial Sequence
  Description of Artificial Sequence: Synthetic oligonucleotide
  Sense strand starting at position 3371 of SEQ ID NO: 1563485
ugcugugagguacaauauu

SEQ ID NO: 1814344 - RNA, 19 nt, Artificial Sequence
  Description of Artificial Sequence: Synthetic oligonucleotide
  Antisense strand to SEQ ID NO: 1814343
aauauuguaccucacagca

SEQ ID NO: 1814345 - RNA, 19 nt, Artificial Sequence
  Description of Artificial Sequence: Synthetic oligonucleotide
  Sense strand starting at position 3495 of SEQ ID NO: 1563485
aucaauaucacgugggaac

SEQ ID NO: 1814346 - RNA, 19 nt, Artificial Sequence
  Description of Artificial Sequence: Synthetic oligonucleotide
  Antisense strand to SEQ ID NO: 1814345
guucccacgugauauugau

SEQ ID NO: 1814347 - RNA, 19 nt, Artificial Sequence
  Description of Artificial Sequence: Synthetic oligonucleotide
  Sense strand starting at position 3496 of SEQ ID NO: 1563485
ucaauaucacgugggaacu

SEQ ID NO: 1814348 - RNA, 19 nt, Artificial Sequence
  Description of Artificial Sequence: Synthetic oligonucleotide
  Antisense strand to SEQ ID NO: 1814347
aguucccacgugauauuga

SEQ ID NO: 1814349 - RNA, 19 nt, Artificial Sequence
  Description of Artificial Sequence: Synthetic oligonucleotide
  Sense strand starting at position 3497 of SEQ ID NO: 1563485
caauaucacgugggaacuu

SEQ ID NO: 1814350 - RNA, 19 nt, Artificial Sequence
  Description of Artificial Sequence: Synthetic oligonucleotide
  Antisense strand to SEQ ID NO: 1814349
aaguucccacgugauauug

SEQ ID NO: 1814351 - RNA, 19 nt, Artificial Sequence
  Description of Artificial Sequence: Synthetic oligonucleotide
  Sense strand starting at position 3605 of SEQ ID NO: 1563485
cauggucaacuuugagaaa

SEQ ID NO: 1814352 - RNA, 19 nt, Artificial Sequence
  Description of Artificial Sequence: Synthetic oligonucleotide
  Antisense strand to SEQ ID NO: 1814351
uuucucaaaguugaccaug

SEQ ID NO: 1814353 - RNA, 19 nt, Artificial Sequence
  Description of Artificial Sequence: Synthetic oligonucleotide
  Sense strand starting at position 3645 of SEQ ID NO: 1563485
aaacaaccgugguucuaaa

SEQ ID NO: 1814354 - RNA, 19 nt, Artificial Sequence
  Description of Artificial Sequence: Synthetic oligonucleotide
  Antisense strand to SEQ ID NO: 1814353
uuuagaaccacgguuguuu

SEQ ID NO: 1814355 - RNA, 19 nt, Artificial Sequence
  Description of Artificial Sequence: Synthetic oligonucleotide
  Sense strand starting at position 3681 of SEQ ID NO: 1563485
cuggguaaugucuaaagca

SEQ ID NO: 1814356 - RNA, 19 nt, Artificial Sequence
  Description of Artificial Sequence: Synthetic oligonucleotide
  Antisense strand to SEQ ID NO: 1814355
ugcuuuagacauuacccag

SEQ ID NO: 1814357 - RNA, 19 nt, Artificial Sequence
  Description of Artificial Sequence: Synthetic oligonucleotide
  Sense strand starting at position 3712 of SEQ ID NO: 1563485
agaucugaaugcccugaga

SEQ ID NO: 1814358 - RNA, 19 nt, Artificial Sequence
  Description of Artificial Sequence: Synthetic oligonucleotide
  Antisense strand to SEQ ID NO: 1814357
ucucagggcauucagaucu

SEQ ID NO: 1814359 - RNA, 19 nt, Artificial Sequence
  Description of Artificial Sequence: Synthetic oligonucleotide
  Sense strand starting at position 3714 of SEQ ID NO: 1563485
aucugaaugcccugagaua

SEQ ID NO: 1814360 - RNA, 19 nt, Artificial Sequence
  Description of Artificial Sequence: Synthetic oligonucleotide
  Antisense strand to SEQ ID NO: 1814359
uaucucagggcauucagau

SEQ ID NO: 1814361 - RNA, 19 nt, Artificial Sequence
  Description of Artificial Sequence: Synthetic oligonucleotide
  Sense strand starting at position 3715 of SEQ ID NO: 1563485
ucugaaugcccugagauac

SEQ ID NO: 1814362 - RNA, 19 nt, Artificial Sequence
  Description of Artificial Sequence: Synthetic oligonucleotide
  Antisense strand to SEQ ID NO: 1814361
guaucucagggcauucaga

SEQ ID NO: 1814363 - RNA, 19 nt, Artificial Sequence
  Description of Artificial Sequence: Synthetic oligonucleotide
  Sense strand starting at position 3752 of SEQ ID NO: 1563485
cuuaguugauaaucagaau

SEQ ID NO: 1814364 - RNA, 19 nt, Artificial Sequence
  Description of Artificial Sequence: Synthetic oligonucleotide
  Antisense strand to SEQ ID NO: 1814363
auucugauuaucaacuaag

SEQ ID NO: 1814365 - RNA, 19 nt, Artificial Sequence
  Description of Artificial Sequence: Synthetic oligonucleotide
  Sense strand starting at position 169 of SEQ ID NO: 1563486
gggcuuugcggagaacaau

SEQ ID NO: 1814366 - RNA, 19 nt, Artificial Sequence
  Description of Artificial Sequence: Synthetic oligonucleotide
  Antisense strand to SEQ ID NO: 1814365
auuguucuccgcaaagccc

SEQ ID NO: 1814367 - RNA, 19 nt, Artificial Sequence
  Description of Artificial Sequence: Synthetic oligonucleotide
  Sense strand starting at position 207 of SEQ ID NO: 1563486
aggacucuauaagcauaau

SEQ ID NO: 1814368 - RNA, 19 nt, Artificial Sequence
  Description of Artificial Sequence: Synthetic oligonucleotide
  Antisense strand to SEQ ID NO: 1814367
auuaugcuuauagaguccu

SEQ ID NO: 1814369 - RNA, 19 nt, Artificial Sequence
  Description of Artificial Sequence: Synthetic oligonucleotide
  Sense strand starting at position 230 of SEQ ID NO: 1563486
uaaauagacggaugauugu

SEQ ID NO: 1814370 - RNA, 19 nt, Artificial Sequence
  Description of Artificial Sequence: Synthetic oligonucleotide
  Antisense strand to SEQ ID NO: 1814369
acaaucauccgucuauuua

SEQ ID NO: 1814371 - RNA, 19 nt, Artificial Sequence
  Description of Artificial Sequence: Synthetic oligonucleotide
  Sense strand starting at position 295 of SEQ ID NO: 1563486
gagauaaucucagcaaugu

SEQ ID NO: 1814372 - RNA, 19 nt, Artificial Sequence
  Description of Artificial Sequence: Synthetic oligonucleotide
  Antisense strand to SEQ ID NO: 1814371
acauugcugagauuaucuc

SEQ ID NO: 1814373 - RNA, 19 nt, Artificial Sequence
  Description of Artificial Sequence: Synthetic oligonucleotide
  Sense strand starting at position 296 of SEQ ID NO: 1563486
agauaaucucagcaauguc

SEQ ID NO: 1814374 - RNA, 19 nt, Artificial Sequence
  Description of Artificial Sequence: Synthetic oligonucleotide
  Antisense strand to SEQ ID NO: 1814373
gacauugcugagauuaucu

SEQ ID NO: 1814375 - RNA, 19 nt, Artificial Sequence
  Description of Artificial Sequence: Synthetic oligonucleotide
  Sense strand starting at position 351 of SEQ ID NO: 1563486
caauaaauaggucgguaaa

SEQ ID NO: 1814376 - RNA, 19 nt, Artificial Sequence
  Description of Artificial Sequence: Synthetic oligonucleotide
  Antisense strand to SEQ ID NO: 1814375
uuuaccgaccuauuuauug

SEQ ID NO: 1814377 - RNA, 19 nt, Artificial Sequence
  Description of Artificial Sequence: Synthetic oligonucleotide
  Sense strand starting at position 352 of SEQ ID NO: 1563486
aauaaauaggucgguaaac

SEQ ID NO: 1814378 - RNA, 19 nt, Artificial Sequence
  Description of Artificial Sequence: Synthetic oligonucleotide
  Antisense strand to SEQ ID NO: 1814377
guuuaccgaccuauuuauu

SEQ ID NO: 1814379 - RNA, 19 nt, Artificial Sequence
  Description of Artificial Sequence: Synthetic oligonucleotide
  Sense strand starting at position 353 of SEQ ID NO: 1563486
auaaauaggucgguaaaca

SEQ ID NO: 1814380 - RNA, 19 nt, Artificial Sequence
  Description of Artificial Sequence: Synthetic oligonucleotide
  Antisense strand to SEQ ID NO: 1814379
uguuuaccgaccuauuuau

SEQ ID NO: 1814381 - RNA, 19 nt, Artificial Sequence
  Description of Artificial Sequence: Synthetic oligonucleotide
  Sense strand starting at position 354 of SEQ ID NO: 1563486
uaaauaggucgguaaacau

SEQ ID NO: 1814382 - RNA, 19 nt, Artificial Sequence
  Description of Artificial Sequence: Synthetic oligonucleotide
  Antisense strand to SEQ ID NO: 1814381
auguuuaccgaccuauuua

SEQ ID NO: 1814383 - RNA, 19 nt, Artificial Sequence
  Description of Artificial Sequence: Synthetic oligonucleotide
  Sense strand starting at position 421 of SEQ ID NO: 1563486
gcuauauucggcucagcuu

SEQ ID NO: 1814384 - RNA, 19 nt, Artificial Sequence
  Description of Artificial Sequence: Synthetic oligonucleotide
  Antisense strand to SEQ ID NO: 1814383
aagcugagccgaauauagc

SEQ ID NO: 1814385 - RNA, 19 nt, Artificial Sequence
  Description of Artificial Sequence: Synthetic oligonucleotide
  Sense strand starting at position 464 of SEQ ID NO: 1563486
ucuguacuuccaggacaau

SEQ ID NO: 1814386 - RNA, 19 nt, Artificial Sequence
  Description of Artificial Sequence: Synthetic oligonucleotide
  Antisense strand to SEQ ID NO: 1814385
auuguccuggaaguacaga

SEQ ID NO: 1814387 - RNA, 19 nt, Artificial Sequence
  Description of Artificial Sequence: Synthetic oligonucleotide
  Sense strand starting at position 540 of SEQ ID NO: 1563486
aacagcaaucuguaaguga

SEQ ID NO: 1814388 - RNA, 19 nt, Artificial Sequence
  Description of Artificial Sequence: Synthetic oligonucleotide
  Antisense strand to SEQ ID NO: 1814387
ucacuuacagauugcuguu

SEQ ID NO: 1814389 - RNA, 19 nt, Artificial Sequence
  Description of Artificial Sequence: Synthetic oligonucleotide
  Sense strand starting at position 543 of SEQ ID NO: 1563486
agcaaucuguaagugagaa

SEQ ID NO: 1814390 - RNA, 19 nt, Artificial Sequence
  Description of Artificial Sequence: Synthetic oligonucleotide
  Antisense strand to SEQ ID NO: 1814389
uucucacuuacagauugcu

SEQ ID NO: 1814391 - RNA, 19 nt, Artificial Sequence
  Description of Artificial Sequence: Synthetic oligonucleotide
  Sense strand starting at position 702 of SEQ ID NO: 1563486
aauuuaaugcgguguacuu

SEQ ID NO: 1814392 - RNA, 19 nt, Artificial Sequence
  Description of Artificial Sequence: Synthetic oligonucleotide
  Antisense strand to SEQ ID NO: 1814391
aaguacaccgcauuaaauu

SEQ ID NO: 1814393 - RNA, 19 nt, Artificial Sequence
  Description of Artificial Sequence: Synthetic oligonucleotide
  Sense strand starting at position 796 of SEQ ID NO: 1563486
gucagaaacucuuuggaau

SEQ ID NO: 1814394 - RNA, 19 nt, Artificial Sequence
  Description of Artificial Sequence: Synthetic oligonucleotide
  Antisense strand to SEQ ID NO: 1814393
auuccaaagaguuucugac

SEQ ID NO: 1814395 - RNA, 19 nt, Artificial Sequence
  Description of Artificial Sequence: Synthetic oligonucleotide
  Sense strand starting at position 797 of SEQ ID NO: 1563486
ucagaaacucuuuggaauu

SEQ ID NO: 1814396 - RNA, 19 nt, Artificial Sequence
  Description of Artificial Sequence: Synthetic oligonucleotide
  Antisense strand to SEQ ID NO: 1814395
aauuccaaagaguuucuga

SEQ ID NO: 1814397 - RNA, 19 nt, Artificial Sequence
  Description of Artificial Sequence: Synthetic oligonucleotide
  Sense strand starting at position 1037 of SEQ ID NO: 1563486
uggaauuacuguuuacaau

SEQ ID NO: 1814398 - RNA, 19 nt, Artificial Sequence
  Description of Artificial Sequence: Synthetic oligonucleotide
  Antisense strand to SEQ ID NO: 1814397
auuguaaacaguaauucca

SEQ ID NO: 1814399 - RNA, 19 nt, Artificial Sequence
  Description of Artificial Sequence: Synthetic oligonucleotide
  Sense strand starting at position 1127 of SEQ ID NO: 1563486
uuauuuccgucuucuuuga

SEQ ID NO: 1814400 - RNA, 19 nt, Artificial Sequence
  Description of Artificial Sequence: Synthetic oligonucleotide
  Antisense strand to SEQ ID NO: 1814399
ucaaagaagacggaaauaa

SEQ ID NO: 1814401 - RNA, 19 nt, Artificial Sequence
  Description of Artificial Sequence: Synthetic oligonucleotide
  Sense strand starting at position 1129 of SEQ ID NO: 1563486
auuuccgucuucuuugauu

SEQ ID NO: 1814402 - RNA, 19 nt, Artificial Sequence
  Description of Artificial Sequence: Synthetic oligonucleotide
  Antisense strand to SEQ ID NO: 1814401
aaucaaagaagacggaaau

SEQ ID NO: 1814403 - RNA, 19 nt, Artificial Sequence
  Description of Artificial Sequence: Synthetic oligonucleotide
  Sense strand starting at position 1303 of SEQ ID NO: 1563486
aguuuaugaauguagucua

SEQ ID NO: 1814404 - RNA, 19 nt, Artificial Sequence
  Description of Artificial Sequence: Synthetic oligonucleotide
  Antisense strand to SEQ ID NO: 1814403
uagacuacauucauaaacu

SEQ ID NO: 1814405 - RNA, 19 nt, Artificial Sequence
  Description of Artificial Sequence: Synthetic oligonucleotide
  Sense strand starting at position 1364 of SEQ ID NO: 1563486
uagauuaaggucuggauau

SEQ ID NO: 1814406 - RNA, 19 nt, Artificial Sequence
  Description of Artificial Sequence: Synthetic oligonucleotide
  Antisense strand to SEQ ID NO: 1814405
auauccagaccuuaaucua

SEQ ID NO: 1814407 - RNA, 19 nt, Artificial Sequence
  Description of Artificial Sequence: Synthetic oligonucleotide
  Sense strand starting at position 1460 of SEQ ID NO: 1563486
gaauauggguuccuucuua

SEQ ID NO: 1814408 - RNA, 19 nt, Artificial Sequence
  Description of Artificial Sequence: Synthetic oligonucleotide
  Antisense strand to SEQ ID NO: 1814407
uaagaaggaacccauauuc

SEQ ID NO: 1814409 - RNA, 19 nt, Artificial Sequence
  Description of Artificial Sequence: Synthetic oligonucleotide
  Sense strand starting at position 1490 of SEQ ID NO: 1563486
ugcauuauccuauagguua

SEQ ID NO: 1814410 - RNA, 19 nt, Artificial Sequence
  Description of Artificial Sequence: Synthetic oligonucleotide
  Antisense strand to SEQ ID NO: 1814409
uaaccuauaggauaaugca

SEQ ID NO: 1814411 - RNA, 19 nt, Artificial Sequence
  Description of Artificial Sequence: Synthetic oligonucleotide
  Sense strand starting at position 1693 of SEQ ID NO: 1563486
ugcauuuaucugcagcuuu

SEQ ID NO: 1814412 - RNA, 19 nt, Artificial Sequence
  Description of Artificial Sequence: Synthetic oligonucleotide
  Antisense strand to SEQ ID NO: 1814411
aaagcugcagauaaaugca

SEQ ID NO: 1814413 - RNA, 19 nt, Artificial Sequence
  Description of Artificial Sequence: Synthetic oligonucleotide
  Sense strand starting at position 1830 of SEQ ID NO: 1563486
uaugguaaaccuggaggua

SEQ ID NO: 1814414 - RNA, 19 nt, Artificial Sequence
  Description of Artificial Sequence: Synthetic oligonucleotide
  Antisense strand to SEQ ID NO: 1814413
uaccuccagguuuaccaua

SEQ ID NO: 1814415 - RNA, 19 nt, Artificial Sequence
  Description of Artificial Sequence: Synthetic oligonucleotide
  Sense strand starting at position 1947 of SEQ ID NO: 1563486
ccgguugccgugaauagug

SEQ ID NO: 1814416 - RNA, 19 nt, Artificial Sequence
  Description of Artificial Sequence: Synthetic oligonucleotide
  Antisense strand to SEQ ID NO: 1814415
cacuauucacggcaaccgg

SEQ ID NO: 1814417 - RNA, 19 nt, Artificial Sequence
  Description of Artificial Sequence: Synthetic oligonucleotide
  Sense strand starting at position 1954 of SEQ ID NO: 1563486
ccgugaauagugagguguu

SEQ ID NO: 1814418 - RNA, 19 nt, Artificial Sequence
  Description of Artificial Sequence: Synthetic oligonucleotide
  Antisense strand to SEQ ID NO: 1814417
aacaccucacuauucacgg

SEQ ID NO: 1814419 - RNA, 19 nt, Artificial Sequence
  Description of Artificial Sequence: Synthetic oligonucleotide
  Sense strand starting at position 2105 of SEQ ID NO: 1563486
cugugucgucugcuuuaua

SEQ ID NO: 1814420 - RNA, 19 nt, Artificial Sequence
  Description of Artificial Sequence: Synthetic oligonucleotide
  Antisense strand to SEQ ID NO: 1814419
uauaaagcagacgacacag

SEQ ID NO: 1814421 - RNA, 19 nt, Artificial Sequence
  Description of Artificial Sequence: Synthetic oligonucleotide
  Sense strand starting at position 2169 of SEQ ID NO: 1563486
aggagcugauuauuaugaa

SEQ ID NO: 1814422 - RNA, 19 nt, Artificial Sequence
  Description of Artificial Sequence: Synthetic oligonucleotide
  Antisense strand to SEQ ID NO: 1814421
uucauaauaaucagcuccu

SEQ ID NO: 1814423 - RNA, 19 nt, Artificial Sequence
  Description of Artificial Sequence: Synthetic oligonucleotide
  Sense strand starting at position 2675 of SEQ ID NO: 1563486
acuguuuacccagagcaua

SEQ ID NO: 1814424 - RNA, 19 nt, Artificial Sequence
  Description of Artificial Sequence: Synthetic oligonucleotide
  Antisense strand to SEQ ID NO: 1814423
uaugcucuggguaaacagu

SEQ ID NO: 1814425 - RNA, 19 nt, Artificial Sequence
  Description of Artificial Sequence: Synthetic oligonucleotide
  Sense strand starting at position 2950 of SEQ ID NO: 1563486
acaguaugugcucaacaua

SEQ ID NO: 1814426 - RNA, 19 nt, Artificial Sequence
  Description of Artificial Sequence: Synthetic oligonucleotide
  Antisense strand to SEQ ID NO: 1814425
uauguugagcacauacugu

SEQ ID NO: 1814427 - RNA, 19 nt, Artificial Sequence
  Description of Artificial Sequence: Synthetic oligonucleotide
  Sense strand starting at position 3348 of SEQ ID NO: 1563486
guagcaugaguauaauuag

SEQ ID NO: 1814428 - RNA, 19 nt, Artificial Sequence
  Description of Artificial Sequence: Synthetic oligonucleotide
  Antisense strand to SEQ ID NO: 1814427
cuaauuauacucaugcuac

SEQ ID NO: 1814429 - RNA, 19 nt, Artificial Sequence
  Description of Artificial Sequence: Synthetic oligonucleotide
  Sense strand starting at position 3385 of SEQ ID NO: 1563486
ggaaauggagguugccuaa

SEQ ID NO: 1814430 - RNA, 19 nt, Artificial Sequence
  Description of Artificial Sequence: Synthetic oligonucleotide
  Antisense strand to SEQ ID NO: 1814429
uuaggcaaccuccauuucc

SEQ ID NO: 1814431 - RNA, 19 nt, Artificial Sequence
  Description of Artificial Sequence: Synthetic oligonucleotide
  Sense strand starting at position 3459 of SEQ ID NO: 1563486
gguauuucuucugugguau

SEQ ID NO: 1814432 - RNA, 19 nt, Artificial Sequence
  Description of Artificial Sequence: Synthetic oligonucleotide
  Antisense strand to SEQ ID NO: 1814431
auaccacagaagaaauacc

SEQ ID NO: 1814433 - RNA, 19 nt, Artificial Sequence
  Description of Artificial Sequence: Synthetic oligonucleotide
  Sense strand starting at position 3460 of SEQ ID NO: 1563486
guauuucuucugugguauu

SEQ ID NO: 1814434 - RNA, 19 nt, Artificial Sequence
  Description of Artificial Sequence: Synthetic oligonucleotide
  Antisense strand to SEQ ID NO: 1814433
aauaccacagaagaaauac

SEQ ID NO: 1814435 - RNA, 19 nt, Artificial Sequence
  Description of Artificial Sequence: Synthetic oligonucleotide
  Sense strand starting at position 3668 of SEQ ID NO: 1563486
uaguuaauugcagaaguua

SEQ ID NO: 1814436 - RNA, 19 nt, Artificial Sequence
  Description of Artificial Sequence: Synthetic oligonucleotide
  Antisense strand to SEQ ID NO: 1814435
uaacuucugcaauuaacua

SEQ ID NO: 1814437 - RNA, 19 nt, Artificial Sequence
  Description of Artificial Sequence: Synthetic oligonucleotide
  Sense strand starting at position 3677 of SEQ ID NO: 1563486
gcagaaguuacugacuuga

SEQ ID NO: 1814438 - RNA, 19 nt, Artificial Sequence
  Description of Artificial Sequence: Synthetic oligonucleotide
  Antisense strand to SEQ ID NO: 1814437
ucaagucaguaacuucugc

SEQ ID NO: 1814439 - RNA, 19 nt, Artificial Sequence
  Description of Artificial Sequence: Synthetic oligonucleotide
  Sense strand starting at position 3717 of SEQ ID NO: 1563486
auaugaguuucuguaaaga

SEQ ID NO: 1814440 - RNA, 19 nt, Artificial Sequence
  Description of Artificial Sequence: Synthetic oligonucleotide
  Antisense strand to SEQ ID NO: 1814439
ucuuuacagaaacucauau

SEQ ID NO: 1814441 - RNA, 19 nt, Artificial Sequence
  Description of Artificial Sequence: Synthetic oligonucleotide
  Sense strand starting at position 3738 of SEQ ID NO: 1563486
uuagcucuuggccagggaa

SEQ ID NO: 1814442 - RNA, 19 nt, Artificial Sequence
  Description of Artificial Sequence: Synthetic oligonucleotide
  Antisense strand to SEQ ID NO: 1814441
uucccuggccaagagcuaa

SEQ ID NO: 1814443 - RNA, 19 nt, Artificial Sequence
  Description of Artificial Sequence: Synthetic oligonucleotide
  Sense strand starting at position 3846 of SEQ ID NO: 1563486
ugcacaacagugcaagauu

SEQ ID NO: 1814444 - RNA, 19 nt, Artificial Sequence
  Description of Artificial Sequence: Synthetic oligonucleotide
  Antisense strand to SEQ ID NO: 1814443
aaucuugcacuguugugca

SEQ ID NO: 1814445 - RNA, 19 nt, Artificial Sequence
  Description of Artificial Sequence: Synthetic oligonucleotide
  Sense strand starting at position 170 of SEQ ID NO: 1563487
gggcuuugcggagaacaau

SEQ ID NO: 1814446 - RNA, 19 nt, Artificial Sequence
  Description of Artificial Sequence: Synthetic oligonucleotide
  Antisense strand to SEQ ID NO: 1814445
auuguucuccgcaaagccc

SEQ ID NO: 1814447 - RNA, 19 nt, Artificial Sequence
  Description of Artificial Sequence: Synthetic oligonucleotide
  Sense strand starting at position 208 of SEQ ID NO: 1563487
aggacucuauaagcauaau

SEQ ID NO: 1814448 - RNA, 19 nt, Artificial Sequence
  Description of Artificial Sequence: Synthetic oligonucleotide
  Antisense strand to SEQ ID NO: 1814447
auuaugcuuauagaguccu

SEQ ID NO: 1814449 - RNA, 19 nt, Artificial Sequence
  Description of Artificial Sequence: Synthetic oligonucleotide
  Sense strand starting at position 231 of SEQ ID NO: 1563487
uaaauagacggaugauugu

SEQ ID NO: 1814450 - RNA, 19 nt, Artificial Sequence
  Description of Artificial Sequence: Synthetic oligonucleotide
  Antisense strand to SEQ ID NO: 1814449
acaaucauccgucuauuua

SEQ ID NO: 1814451 - RNA, 19 nt, Artificial Sequence
  Description of Artificial Sequence: Synthetic oligonucleotide
  Sense strand starting at position 296 of SEQ ID NO: 1563487
gagauaaucucagcaaugu

SEQ ID NO: 1814452 - RNA, 19 nt, Artificial Sequence
  Description of Artificial Sequence: Synthetic oligonucleotide
  Antisense strand to SEQ ID NO: 1814451
acauugcugagauuaucuc

SEQ ID NO: 1814453 - RNA, 19 nt, Artificial Sequence
  Description of Artificial Sequence: Synthetic oligonucleotide
  Sense strand starting at position 297 of SEQ ID NO: 1563487
agauaaucucagcaauguc

SEQ ID NO: 1814454 - RNA, 19 nt, Artificial Sequence
  Description of Artificial Sequence: Synthetic oligonucleotide
  Antisense strand to SEQ ID NO: 1814453
gacauugcugagauuaucu

SEQ ID NO: 1814455 - RNA, 19 nt, Artificial Sequence
  Description of Artificial Sequence: Synthetic oligonucleotide
  Sense strand starting at position 352 of SEQ ID NO: 1563487
caauaaauaggucgguaaa

SEQ ID NO: 1814456 - RNA, 19 nt, Artificial Sequence
  Description of Artificial Sequence: Synthetic oligonucleotide
  Antisense strand to SEQ ID NO: 1814455
uuuaccgaccuauuuauug

SEQ ID NO: 1814457 - RNA, 19 nt, Artificial Sequence
  Description of Artificial Sequence: Synthetic oligonucleotide
  Sense strand starting at position 353 of SEQ ID NO: 1563487
aauaaauaggucgguaaac

SEQ ID NO: 1814458 - RNA, 19 nt, Artificial Sequence
  Description of Artificial Sequence: Synthetic oligonucleotide
  Antisense strand to SEQ ID NO: 1814457
guuuaccgaccuauuuauu

SEQ ID NO: 1814459 - RNA, 19 nt, Artificial Sequence
  Description of Artificial Sequence: Synthetic oligonucleotide
  Sense strand starting at position 354 of SEQ ID NO: 1563487
auaaauaggucgguaaaca

SEQ ID NO: 1814460 - RNA, 19 nt, Artificial Sequence
  Description of Artificial Sequence: Synthetic oligonucleotide
  Antisense strand to SEQ ID NO: 1814459
uguuuaccgaccuauuuau

SEQ ID NO: 1814461 - RNA, 19 nt, Artificial Sequence
  Description of Artificial Sequence: Synthetic oligonucleotide
  Sense strand starting at position 355 of SEQ ID NO: 1563487
uaaauaggucgguaaacau

SEQ ID NO: 1814462 - RNA, 19 nt, Artificial Sequence
  Description of Artificial Sequence: Synthetic oligonucleotide
  Antisense strand to SEQ ID NO: 1814461
auguuuaccgaccuauuua

SEQ ID NO: 1814463 - RNA, 19 nt, Artificial Sequence
  Description of Artificial Sequence: Synthetic oligonucleotide
  Sense strand starting at position 422 of SEQ ID NO: 1563487
gcuauauucggcucagcuu

SEQ ID NO: 1814464 - RNA, 19 nt, Artificial Sequence
  Description of Artificial Sequence: Synthetic oligonucleotide
  Antisense strand to SEQ ID NO: 1814463
aagcugagccgaauauagc

SEQ ID NO: 1814465 - RNA, 19 nt, Artificial Sequence
  Description of Artificial Sequence: Synthetic oligonucleotide
  Sense strand starting at position 465 of SEQ ID NO: 1563487
ucuguacuuccaggacaau

SEQ ID NO: 1814466 - RNA, 19 nt, Artificial Sequence
  Description of Artificial Sequence: Synthetic oligonucleotide
  Antisense strand to SEQ ID NO: 1814465
auuguccuggaaguacaga

SEQ ID NO: 1814467 - RNA, 19 nt, Artificial Sequence
  Description of Artificial Sequence: Synthetic oligonucleotide
  Sense strand starting at position 541 of SEQ ID NO: 1563487
aacagcaaucuguaaguga

SEQ ID NO: 1814468 - RNA, 19 nt, Artificial Sequence
  Description of Artificial Sequence: Synthetic oligonucleotide
  Antisense strand to SEQ ID NO: 1814467
ucacuuacagauugcuguu

SEQ ID NO: 1814469 - RNA, 19 nt, Artificial Sequence
  Description of Artificial Sequence: Synthetic oligonucleotide
  Sense strand starting at position 544 of SEQ ID NO: 1563487
agcaaucuguaagugagaa

SEQ ID NO: 1814470 - RNA, 19 nt, Artificial Sequence
  Description of Artificial Sequence: Synthetic oligonucleotide
  Antisense strand to SEQ ID NO: 1814469
uucucacuuacagauugcu

SEQ ID NO: 1814471 - RNA, 19 nt, Artificial Sequence
  Description of Artificial Sequence: Synthetic oligonucleotide
  Sense strand starting at position 703 of SEQ ID NO: 1563487
aauuuaaugcgguguacuu

SEQ ID NO: 1814472 - RNA, 19 nt, Artificial Sequence
  Description of Artificial Sequence: Synthetic oligonucleotide
  Antisense strand to SEQ ID NO: 1814471
aaguacaccgcauuaaauu

SEQ ID NO: 1814473 - RNA, 19 nt, Artificial Sequence
  Description of Artificial Sequence: Synthetic oligonucleotide
  Sense strand starting at position 797 of SEQ ID NO: 1563487
gucagaaacucuuuggaau

SEQ ID NO: 1814474 - RNA, 19 nt, Artificial Sequence
  Description of Artificial Sequence: Synthetic oligonucleotide
  Antisense strand to SEQ ID NO: 1814473
auuccaaagaguuucugac

SEQ ID NO: 1814475 - RNA, 19 nt, Artificial Sequence
  Description of Artificial Sequence: Synthetic oligonucleotide
  Sense strand starting at position 798 of SEQ ID NO: 1563487
ucagaaacucuuuggaauu

SEQ ID NO: 1814476 - RNA, 19 nt, Artificial Sequence
  Description of Artificial Sequence: Synthetic oligonucleotide
  Antisense strand to SEQ ID NO: 1814475
aauuccaaagaguuucuga

SEQ ID NO: 1814477 - RNA, 19 nt, Artificial Sequence
  Description of Artificial Sequence: Synthetic oligonucleotide
  Sense strand starting at position 1038 of SEQ ID NO: 1563487
uggaauuacuguuuacaau

SEQ ID NO: 1814478 - RNA, 19 nt, Artificial Sequence
  Description of Artificial Sequence: Synthetic oligonucleotide
  Antisense strand to SEQ ID NO: 1814477
auuguaaacaguaauucca

SEQ ID NO: 1814479 - RNA, 19 nt, Artificial Sequence
  Description of Artificial Sequence: Synthetic oligonucleotide
  Sense strand starting at position 1128 of SEQ ID NO: 1563487
uuauuuccgucuucuuuga

SEQ ID NO: 1814480 - RNA, 19 nt, Artificial Sequence
  Description of Artificial Sequence: Synthetic oligonucleotide
  Antisense strand to SEQ ID NO: 1814479
ucaaagaagacggaaauaa

SEQ ID NO: 1814481 - RNA, 19 nt, Artificial Sequence
  Description of Artificial Sequence: Synthetic oligonucleotide
  Sense strand starting at position 1130 of SEQ ID NO: 1563487
auuuccgucuucuuugauu

SEQ ID NO: 1814482 - RNA, 19 nt, Artificial Sequence
  Description of Artificial Sequence: Synthetic oligonucleotide
  Antisense strand to SEQ ID NO: 1814481
aaucaaagaagacggaaau

SEQ ID NO: 1814483 - RNA, 19 nt, Artificial Sequence
  Description of Artificial Sequence: Synthetic oligonucleotide
  Sense strand starting at position 1304 of SEQ ID NO: 1563487
aguuuaugaauguagucua

SEQ ID NO: 1814484 - RNA, 19 nt, Artificial Sequence
  Description of Artificial Sequence: Synthetic oligonucleotide
  Antisense strand to SEQ ID NO: 1814483
uagacuacauucauaaacu

SEQ ID NO: 1814485 - RNA, 19 nt, Artificial Sequence
  Description of Artificial Sequence: Synthetic oligonucleotide
  Sense strand starting at position 1365 of SEQ ID NO: 1563487
uagauuaaggucuggauau

SEQ ID NO: 1814486 - RNA, 19 nt, Artificial Sequence
  Description of Artificial Sequence: Synthetic oligonucleotide
  Antisense strand to SEQ ID NO: 1814485
auauccagaccuuaaucua

SEQ ID NO: 1814487 - RNA, 19 nt, Artificial Sequence
  Description of Artificial Sequence: Synthetic oligonucleotide
  Sense strand starting at position 1461 of SEQ ID NO: 1563487
gaauauggguuccuucuua

SEQ ID NO: 1814488 - RNA, 19 nt, Artificial Sequence
  Description of Artificial Sequence: Synthetic oligonucleotide
  Antisense strand to SEQ ID NO: 1814487
uaagaaggaacccauauuc

SEQ ID NO: 1814489 - RNA, 19 nt, Artificial Sequence
  Description of Artificial Sequence: Synthetic oligonucleotide
  Sense strand starting at position 1491 of SEQ ID NO: 1563487
ugcauuauccuauagguua

SEQ ID NO: 1814490 - RNA, 19 nt, Artificial Sequence
  Description of Artificial Sequence: Synthetic oligonucleotide
  Antisense strand to SEQ ID NO: 1814489
uaaccuauaggauaaugca

SEQ ID NO: 1814491 - RNA, 19 nt, Artificial Sequence
  Description of Artificial Sequence: Synthetic oligonucleotide
  Sense strand starting at position 1694 of SEQ ID NO: 1563487
ugcauuuaucugcagcuuu

SEQ ID NO: 1814492 - RNA, 19 nt, Artificial Sequence
  Description of Artificial Sequence: Synthetic oligonucleotide
  Antisense strand to SEQ ID NO: 1814491
aaagcugcagauaaaugca

SEQ ID NO: 1814493 - RNA, 19 nt, Artificial Sequence
  Description of Artificial Sequence: Synthetic oligonucleotide
  Sense strand starting at position 1831 of SEQ ID NO: 1563487
uaugguaaaccuggaggua

SEQ ID NO: 1814494 - RNA, 19 nt, Artificial Sequence
  Description of Artificial Sequence: Synthetic oligonucleotide
  Antisense strand to SEQ ID NO: 1814493
uaccuccagguuuaccaua

SEQ ID NO: 1814495 - RNA, 19 nt, Artificial Sequence
  Description of Artificial Sequence: Synthetic oligonucleotide
  Sense strand starting at position 1948 of SEQ ID NO: 1563487
ccgguugccgugaauagug

SEQ ID NO: 1814496 - RNA, 19 nt, Artificial Sequence
  Description of Artificial Sequence: Synthetic oligonucleotide
  Antisense strand to SEQ ID NO: 1814495
cacuauucacggcaaccgg

SEQ ID NO: 1814497 - RNA, 19 nt, Artificial Sequence
  Description of Artificial Sequence: Synthetic oligonucleotide
  Sense strand starting at position 1955 of SEQ ID NO: 1563487
ccgugaauagugagguguu

SEQ ID NO: 1814498 - RNA, 19 nt, Artificial Sequence
  Description of Artificial Sequence: Synthetic oligonucleotide
  Antisense strand to SEQ ID NO: 1814497
aacaccucacuauucacgg

SEQ ID NO: 1814499 - RNA, 19 nt, Artificial Sequence
  Description of Artificial Sequence: Synthetic oligonucleotide
  Sense strand starting at position 2106 of SEQ ID NO: 1563487
cugugucgucugcuuuaua

SEQ ID NO: 1814500 - RNA, 19 nt, Artificial Sequence
  Description of Artificial Sequence: Synthetic oligonucleotide
  Antisense strand to SEQ ID NO: 1814499
uauaaagcagacgacacag

SEQ ID NO: 1814501 - RNA, 19 nt, Artificial Sequence
  Description of Artificial Sequence: Synthetic oligonucleotide
  Sense strand starting at position 2170 of SEQ ID NO: 1563487
aggagcugauuauuaugaa

SEQ ID NO: 1814502 - RNA, 19 nt, Artificial Sequence
  Description of Artificial Sequence: Synthetic oligonucleotide
  Antisense strand to SEQ ID NO: 1814501
uucauaauaaucagcuccu

SEQ ID NO: 1814503 - RNA, 19 nt, Artificial Sequence
  Description of Artificial Sequence: Synthetic oligonucleotide
  Sense strand starting at position 2676 of SEQ ID NO: 1563487
acuguuuacccagagcaua

SEQ ID NO: 1814504 - RNA, 19 nt, Artificial Sequence
  Description of Artificial Sequence: Synthetic oligonucleotide
  Antisense strand to SEQ ID NO: 1814503
uaugcucuggguaaacagu

SEQ ID NO: 1814505 - RNA, 19 nt, Artificial Sequence
  Description of Artificial Sequence: Synthetic oligonucleotide
  Sense strand starting at position 2951 of SEQ ID NO: 1563487
acaguaugugcucaacaua

SEQ ID NO: 1814506 - RNA, 19 nt, Artificial Sequence
  Description of Artificial Sequence: Synthetic oligonucleotide
  Antisense strand to SEQ ID NO: 1814505
uauguugagcacauacugu

SEQ ID NO: 1814507 - RNA, 19 nt, Artificial Sequence
  Description of Artificial Sequence: Synthetic oligonucleotide
  Sense strand starting at position 3349 of SEQ ID NO: 1563487
guagcaugaguauaauuag

SEQ ID NO: 1814508 - RNA, 19 nt, Artificial Sequence
  Description of Artificial Sequence: Synthetic oligonucleotide
  Antisense strand to SEQ ID NO: 1814507
cuaauuauacucaugcuac

SEQ ID NO: 1814509 - RNA, 19 nt, Artificial Sequence
  Description of Artificial Sequence: Synthetic oligonucleotide
  Sense strand starting at position 3386 of SEQ ID NO: 1563487
ggaaauggagguugccuaa

SEQ ID NO: 1814510 - RNA, 19 nt, Artificial Sequence
  Description of Artificial Sequence: Synthetic oligonucleotide
  Antisense strand to SEQ ID NO: 1814509
uuaggcaaccuccauuucc

SEQ ID NO: 1814511 - RNA, 19 nt, Artificial Sequence
  Description of Artificial Sequence: Synthetic oligonucleotide
  Sense strand starting at position 3460 of SEQ ID NO: 1563487
gguauuucuucugugguau

SEQ ID NO: 1814512 - RNA, 19 nt, Artificial Sequence
  Description of Artificial Sequence: Synthetic oligonucleotide
  Antisense strand to SEQ ID NO: 1814511
auaccacagaagaaauacc

SEQ ID NO: 1814513 - RNA, 19 nt, Artificial Sequence
  Description of Artificial Sequence: Synthetic oligonucleotide
  Sense strand starting at position 3461 of SEQ ID NO: 1563487
guauuucuucugugguauu

SEQ ID NO: 1814514 - RNA, 19 nt, Artificial Sequence
  Description of Artificial Sequence: Synthetic oligonucleotide
  Antisense strand to SEQ ID NO: 1814513
aauaccacagaagaaauac

SEQ ID NO: 1814515 - RNA, 19 nt, Artificial Sequence
  Description of Artificial Sequence: Synthetic oligonucleotide
  Sense strand starting at position 3669 of SEQ ID NO: 1563487
uaguuaauugcagaaguua

SEQ ID NO: 1814516 - RNA, 19 nt, Artificial Sequence
  Description of Artificial Sequence: Synthetic oligonucleotide
  Antisense strand to SEQ ID NO: 1814515
uaacuucugcaauuaacua

SEQ ID NO: 1814517 - RNA, 19 nt, Artificial Sequence
  Description of Artificial Sequence: Synthetic oligonucleotide
  Sense strand starting at position 3678 of SEQ ID NO: 1563487
gcagaaguuacugacuuga

SEQ ID NO: 1814518 - RNA, 19 nt, Artificial Sequence
  Description of Artificial Sequence: Synthetic oligonucleotide
  Antisense strand to SEQ ID NO: 1814517
ucaagucaguaacuucugc

SEQ ID NO: 1814519 - RNA, 19 nt, Artificial Sequence
  Description of Artificial Sequence: Synthetic oligonucleotide
  Sense strand starting at position 3718 of SEQ ID NO: 1563487
auaugaguuucuguaaaga

SEQ ID NO: 1814520 - RNA, 19 nt, Artificial Sequence
  Description of Artificial Sequence: Synthetic oligonucleotide
  Antisense strand to SEQ ID NO: 1814519
ucuuuacagaaacucauau

SEQ ID NO: 1814521 - RNA, 19 nt, Artificial Sequence
  Description of Artificial Sequence: Synthetic oligonucleotide
  Sense strand starting at position 3739 of SEQ ID NO: 1563487
uuagcucuuggccagggaa

SEQ ID NO: 1814522 - RNA, 19 nt, Artificial Sequence
  Description of Artificial Sequence: Synthetic oligonucleotide
  Antisense strand to SEQ ID NO: 1814521
uucccuggccaagagcuaa

SEQ ID NO: 1814523 - RNA, 19 nt, Artificial Sequence
  Description of Artificial Sequence: Synthetic oligonucleotide
  Sense strand starting at position 3847 of SEQ ID NO: 1563487
ugcacaacagugcaagauu

SEQ ID NO: 1814524 - RNA, 19 nt, Artificial Sequence
  Description of Artificial Sequence: Synthetic oligonucleotide
  Antisense strand to SEQ ID NO: 1814523
aaucuugcacuguugugca

SEQ ID NO: 1814525 - RNA, 19 nt, Artificial Sequence
  Description of Artificial Sequence: Synthetic oligonucleotide
  Sense strand starting at position 60 of SEQ ID NO: 1563488
guaugcacuccauaaggaa

SEQ ID NO: 1814526 - RNA, 19 nt, Artificial Sequence
  Description of Artificial Sequence: Synthetic oligonucleotide
  Antisense strand to SEQ ID NO: 1814525
uuccuuauggagugcauac

SEQ ID NO: 1814527 - RNA, 19 nt, Artificial Sequence
  Description of Artificial Sequence: Synthetic oligonucleotide
  Sense strand starting at position 139 of SEQ ID NO: 1563488
agggacauucuuggucaaa

SEQ ID NO: 1814528 - RNA, 19 nt, Artificial Sequence
  Description of Artificial Sequence: Synthetic oligonucleotide
  Antisense strand to SEQ ID NO: 1814527
uuugaccaagaaugucccu

SEQ ID NO: 1814529 - RNA, 19 nt, Artificial Sequence
  Description of Artificial Sequence: Synthetic oligonucleotide
  Sense strand starting at position 140 of SEQ ID NO: 1563488
gggacauucuuggucaaag

SEQ ID NO: 1814530 - RNA, 19 nt, Artificial Sequence
  Description of Artificial Sequence: Synthetic oligonucleotide
  Antisense strand to SEQ ID NO: 1814529
cuuugaccaagaauguccc

SEQ ID NO: 1814531 - RNA, 19 nt, Artificial Sequence
  Description of Artificial Sequence: Synthetic oligonucleotide
  Sense strand starting at position 141 of SEQ ID NO: 1563488
ggacauucuuggucaaagu

SEQ ID NO: 1814532 - RNA, 19 nt, Artificial Sequence
  Description of Artificial Sequence: Synthetic oligonucleotide
  Antisense strand to SEQ ID NO: 1814531
acuuugaccaagaaugucc

SEQ ID NO: 1814533 - RNA, 19 nt, Artificial Sequence
  Description of Artificial Sequence: Synthetic oligonucleotide
  Sense strand starting at position 330 of SEQ ID NO: 1563488
gggagaaggcuuugagauu

SEQ ID NO: 1814534 - RNA, 19 nt, Artificial Sequence
  Description of Artificial Sequence: Synthetic oligonucleotide
  Antisense strand to SEQ ID NO: 1814533
aaucucaaagccuucuccc

SEQ ID NO: 1814535 - RNA, 19 nt, Artificial Sequence
  Description of Artificial Sequence: Synthetic oligonucleotide
  Sense strand starting at position 331 of SEQ ID NO: 1563488
ggagaaggcuuugagauuu

SEQ ID NO: 1814536 - RNA, 19 nt, Artificial Sequence
  Description of Artificial Sequence: Synthetic oligonucleotide
  Antisense strand to SEQ ID NO: 1814535
aaaucucaaagccuucucc

SEQ ID NO: 1814537 - RNA, 19 nt, Artificial Sequence
  Description of Artificial Sequence: Synthetic oligonucleotide
  Sense strand starting at position 379 of SEQ ID NO: 1563488
auagcauggacuuggugau

SEQ ID NO: 1814538 - RNA, 19 nt, Artificial Sequence
  Description of Artificial Sequence: Synthetic oligonucleotide
  Antisense strand to SEQ ID NO: 1814537
aucaccaaguccaugcuau

SEQ ID NO: 1814539 - RNA, 19 nt, Artificial Sequence
  Description of Artificial Sequence: Synthetic oligonucleotide
  Sense strand starting at position 392 of SEQ ID NO: 1563488
ggugauuggguucacaaca

SEQ ID NO: 1814540 - RNA, 19 nt, Artificial Sequence
  Description of Artificial Sequence: Synthetic oligonucleotide
  Antisense strand to SEQ ID NO: 1814539
uguugugaacccaaucacc

SEQ ID NO: 1814541 - RNA, 19 nt, Artificial Sequence
  Description of Artificial Sequence: Synthetic oligonucleotide
  Sense strand starting at position 438 of SEQ ID NO: 1563488
aguaauugcgaucacacaa

SEQ ID NO: 1814542 - RNA, 19 nt, Artificial Sequence
  Description of Artificial Sequence: Synthetic oligonucleotide
  Antisense strand to SEQ ID NO: 1814541
uugugugaucgcaauuacu

SEQ ID NO: 1814543 - RNA, 19 nt, Artificial Sequence
  Description of Artificial Sequence: Synthetic oligonucleotide
  Sense strand starting at position 548 of SEQ ID NO: 1563488
ucuuacagugaauguaaau

SEQ ID NO: 1814544 - RNA, 19 nt, Artificial Sequence
  Description of Artificial Sequence: Synthetic oligonucleotide
  Antisense strand to SEQ ID NO: 1814543
auuuacauucacuguaaga

SEQ ID NO: 1814545 - RNA, 19 nt, Artificial Sequence
  Description of Artificial Sequence: Synthetic oligonucleotide
  Sense strand starting at position 677 of SEQ ID NO: 1563488
gaaugaagcaugggaguga

SEQ ID NO: 1814546 - RNA, 19 nt, Artificial Sequence
  Description of Artificial Sequence: Synthetic oligonucleotide
  Antisense strand to SEQ ID NO: 1814545
ucacucccaugcuucauuc

SEQ ID NO: 1814547 - RNA, 19 nt, Artificial Sequence
  Description of Artificial Sequence: Synthetic oligonucleotide
  Sense strand starting at position 704 of SEQ ID NO: 1563488
agcuauauugagcaugauc

SEQ ID NO: 1814548 - RNA, 19 nt, Artificial Sequence
  Description of Artificial Sequence: Synthetic oligonucleotide
  Antisense strand to SEQ ID NO: 1814547
gaucaugcucaauauagcu

SEQ ID NO: 1814549 - RNA, 19 nt, Artificial Sequence
  Description of Artificial Sequence: Synthetic oligonucleotide
  Sense strand starting at position 706 of SEQ ID NO: 1563488
cuauauugagcaugaucau

SEQ ID NO: 1814550 - RNA, 19 nt, Artificial Sequence
  Description of Artificial Sequence: Synthetic oligonucleotide
  Antisense strand to SEQ ID NO: 1814549
augaucaugcucaauauag

SEQ ID NO: 1814551 - RNA, 19 nt, Artificial Sequence
  Description of Artificial Sequence: Synthetic oligonucleotide
  Sense strand starting at position 712 of SEQ ID NO: 1563488
ugagcaugaucauuaauaa

SEQ ID NO: 1814552 - RNA, 19 nt, Artificial Sequence
  Description of Artificial Sequence: Synthetic oligonucleotide
  Antisense strand to SEQ ID NO: 1814551
uuauuaaugaucaugcuca

SEQ ID NO: 1814553 - RNA, 19 nt, Artificial Sequence
  Description of Artificial Sequence: Synthetic oligonucleotide
  Sense strand starting at position 812 of SEQ ID NO: 1563488
gugacuaaacgaggaguuu

SEQ ID NO: 1814554 - RNA, 19 nt, Artificial Sequence
  Description of Artificial Sequence: Synthetic oligonucleotide
  Antisense strand to SEQ ID NO: 1814553
aaacuccucguuuagucac

SEQ ID NO: 1814555 - RNA, 19 nt, Artificial Sequence
  Description of Artificial Sequence: Synthetic oligonucleotide
  Sense strand starting at position 844 of SEQ ID NO: 1563488
ugagacugcuuuccaacaa

SEQ ID NO: 1814556 - RNA, 19 nt, Artificial Sequence
  Description of Artificial Sequence: Synthetic oligonucleotide
  Antisense strand to SEQ ID NO: 1814555
uuguuggaaagcagucuca

SEQ ID NO: 1814557 - RNA, 19 nt, Artificial Sequence
  Description of Artificial Sequence: Synthetic oligonucleotide
  Sense strand starting at position 1475 of SEQ ID NO: 1563488
agcugauucccagauguac

SEQ ID NO: 1814558 - RNA, 19 nt, Artificial Sequence
  Description of Artificial Sequence: Synthetic oligonucleotide
  Antisense strand to SEQ ID NO: 1814557
guacaucugggaaucagcu

SEQ ID NO: 1814559 - RNA, 19 nt, Artificial Sequence
  Description of Artificial Sequence: Synthetic oligonucleotide
  Sense strand starting at position 1670 of SEQ ID NO: 1563488
ggaauaagaguguaucagu

SEQ ID NO: 1814560 - RNA, 19 nt, Artificial Sequence
  Description of Artificial Sequence: Synthetic oligonucleotide
  Antisense strand to SEQ ID NO: 1814559
acugauacacucuuauucc

SEQ ID NO: 1814561 - RNA, 19 nt, Artificial Sequence
  Description of Artificial Sequence: Synthetic oligonucleotide
  Sense strand starting at position 1675 of SEQ ID NO: 1563488
aagaguguaucaguuaaau

SEQ ID NO: 1814562 - RNA, 19 nt, Artificial Sequence
  Description of Artificial Sequence: Synthetic oligonucleotide
  Antisense strand to SEQ ID NO: 1814561
auuuaacugauacacucuu

SEQ ID NO: 1814563 - RNA, 19 nt, Artificial Sequence
  Description of Artificial Sequence: Synthetic oligonucleotide
  Sense strand starting at position 1715 of SEQ ID NO: 1563488
uguaauccugcugaacaau

SEQ ID NO: 1814564 - RNA, 19 nt, Artificial Sequence
  Description of Artificial Sequence: Synthetic oligonucleotide
  Antisense strand to SEQ ID NO: 1814563
auuguucagcaggauuaca

SEQ ID NO: 1814565 - RNA, 19 nt, Artificial Sequence
  Description of Artificial Sequence: Synthetic oligonucleotide
  Sense strand starting at position 1773 of SEQ ID NO: 1563488
aagacagauuucgcagcuu

SEQ ID NO: 1814566 - RNA, 19 nt, Artificial Sequence
  Description of Artificial Sequence: Synthetic oligonucleotide
  Antisense strand to SEQ ID NO: 1814565
aagcugcgaaaucugucuu

SEQ ID NO: 1814567 - RNA, 19 nt, Artificial Sequence
  Description of Artificial Sequence: Synthetic oligonucleotide
  Sense strand starting at position 2031 of SEQ ID NO: 1563488
uagggucaucgucaucaca

SEQ ID NO: 1814568 - RNA, 19 nt, Artificial Sequence
  Description of Artificial Sequence: Synthetic oligonucleotide
  Antisense strand to SEQ ID NO: 1814567
ugugaugacgaugacccua

SEQ ID NO: 1814569 - RNA, 19 nt, Artificial Sequence
  Description of Artificial Sequence: Synthetic oligonucleotide
  Sense strand starting at position 2137 of SEQ ID NO: 1563488
uagauaacagucugguuaa

SEQ ID NO: 1814570 - RNA, 19 nt, Artificial Sequence
  Description of Artificial Sequence: Synthetic oligonucleotide
  Antisense strand to SEQ ID NO: 1814569
uuaaccagacuguuaucua

SEQ ID NO: 1814571 - RNA, 19 nt, Artificial Sequence
  Description of Artificial Sequence: Synthetic oligonucleotide
  Sense strand starting at position 2140 of SEQ ID NO: 1563488
auaacagucugguuaaaga

SEQ ID NO: 1814572 - RNA, 19 nt, Artificial Sequence
  Description of Artificial Sequence: Synthetic oligonucleotide
  Antisense strand to SEQ ID NO: 1814571
ucuuuaaccagacuguuau

SEQ ID NO: 1814573 - RNA, 19 nt, Artificial Sequence
  Description of Artificial Sequence: Synthetic oligonucleotide
  Sense strand starting at position 2231 of SEQ ID NO: 1563488
acagaaauuguuuguacaa

SEQ ID NO: 1814574 - RNA, 19 nt, Artificial Sequence
  Description of Artificial Sequence: Synthetic oligonucleotide
  Antisense strand to SEQ ID NO: 1814573
uuguacaaacaauuucugu

SEQ ID NO: 1814575 - RNA, 19 nt, Artificial Sequence
  Description of Artificial Sequence: Synthetic oligonucleotide
  Sense strand starting at position 2245 of SEQ ID NO: 1563488
uacaauuggguuuauguua

SEQ ID NO: 1814576 - RNA, 19 nt, Artificial Sequence
  Description of Artificial Sequence: Synthetic oligonucleotide
  Antisense strand to SEQ ID NO: 1814575
uaacauaaacccaauugua

SEQ ID NO: 1814577 - RNA, 19 nt, Artificial Sequence
  Description of Artificial Sequence: Synthetic oligonucleotide
  Sense strand starting at position 2305 of SEQ ID NO: 1563488
gcaauuaaucuugauugua

SEQ ID NO: 1814578 - RNA, 19 nt, Artificial Sequence
  Description of Artificial Sequence: Synthetic oligonucleotide
  Antisense strand to SEQ ID NO: 1814577
uacaaucaagauuaauugc

SEQ ID NO: 1814579 - RNA, 19 nt, Artificial Sequence
  Description of Artificial Sequence: Synthetic oligonucleotide
  Sense strand starting at position 2313 of SEQ ID NO: 1563488
ucuugauuguaacuauaag

SEQ ID NO: 1814580 - RNA, 19 nt, Artificial Sequence
  Description of Artificial Sequence: Synthetic oligonucleotide
  Antisense strand to SEQ ID NO: 1814579
cuuauaguuacaaucaaga

SEQ ID NO: 1814581 - RNA, 19 nt, Artificial Sequence
  Description of Artificial Sequence: Synthetic oligonucleotide
  Sense strand starting at position 2325 of SEQ ID NO: 1563488
cuauaaguaugauuaggau

SEQ ID NO: 1814582 - RNA, 19 nt, Artificial Sequence
  Description of Artificial Sequence: Synthetic oligonucleotide
  Antisense strand to SEQ ID NO: 1814581
auccuaaucauacuuauag

SEQ ID NO: 1814583 - RNA, 19 nt, Artificial Sequence
  Description of Artificial Sequence: Synthetic oligonucleotide
  Sense strand starting at position 2417 of SEQ ID NO: 1563488
uuaacagaguaguuguaaa

SEQ ID NO: 1814584 - RNA, 19 nt, Artificial Sequence
  Description of Artificial Sequence: Synthetic oligonucleotide
  Antisense strand to SEQ ID NO: 1814583
uuuacaacuacucuguuaa

SEQ ID NO: 1814585 - RNA, 19 nt, Artificial Sequence
  Description of Artificial Sequence: Synthetic oligonucleotide
  Sense strand starting at position 2449 of SEQ ID NO: 1563488
gcaggcaacuuauugggaa

SEQ ID NO: 1814586 - RNA, 19 nt, Artificial Sequence
  Description of Artificial Sequence: Synthetic oligonucleotide
  Antisense strand to SEQ ID NO: 1814585
uucccaauaaguugccugc

SEQ ID NO: 1814587 - RNA, 19 nt, Artificial Sequence
  Description of Artificial Sequence: Synthetic oligonucleotide
  Sense strand starting at position 2507 of SEQ ID NO: 1563488
aauguaaaggcaugauuau

SEQ ID NO: 1814588 - RNA, 19 nt, Artificial Sequence
  Description of Artificial Sequence: Synthetic oligonucleotide
  Antisense strand to SEQ ID NO: 1814587
auaaucaugccuuuacauu

SEQ ID NO: 1814589 - RNA, 19 nt, Artificial Sequence
  Description of Artificial Sequence: Synthetic oligonucleotide
  Sense strand starting at position 2508 of SEQ ID NO: 1563488
auguaaaggcaugauuauc

SEQ ID NO: 1814590 - RNA, 19 nt, Artificial Sequence
  Description of Artificial Sequence: Synthetic oligonucleotide
  Antisense strand to SEQ ID NO: 1814589
gauaaucaugccuuuacau

SEQ ID NO: 1814591 - RNA, 19 nt, Artificial Sequence
  Description of Artificial Sequence: Synthetic oligonucleotide
  Sense strand starting at position 2513 of SEQ ID NO: 1563488
aaggcaugauuaucaggua

SEQ ID NO: 1814592 - RNA, 19 nt, Artificial Sequence
  Description of Artificial Sequence: Synthetic oligonucleotide
  Antisense strand to SEQ ID NO: 1814591
uaccugauaaucaugccuu

SEQ ID NO: 1814593 - RNA, 19 nt, Artificial Sequence
  Description of Artificial Sequence: Synthetic oligonucleotide
  Sense strand starting at position 2772 of SEQ ID NO: 1563488
agggaaggcuuucccagua

SEQ ID NO: 1814594 - RNA, 19 nt, Artificial Sequence
  Description of Artificial Sequence: Synthetic oligonucleotide
  Antisense strand to SEQ ID NO: 1814593
uacugggaaagccuucccu

SEQ ID NO: 1814595 - RNA, 19 nt, Artificial Sequence
  Description of Artificial Sequence: Synthetic oligonucleotide
  Sense strand starting at position 2954 of SEQ ID NO: 1563488
guuaucucacccuauugga

SEQ ID NO: 1814596 - RNA, 19 nt, Artificial Sequence
  Description of Artificial Sequence: Synthetic oligonucleotide
  Antisense strand to SEQ ID NO: 1814595
uccaauagggugagauaac

SEQ ID NO: 1814597 - RNA, 19 nt, Artificial Sequence
  Description of Artificial Sequence: Synthetic oligonucleotide
  Sense strand starting at position 2968 of SEQ ID NO: 1563488
uuggacaucuccucaugaa

SEQ ID NO: 1814598 - RNA, 19 nt, Artificial Sequence
  Description of Artificial Sequence: Synthetic oligonucleotide
  Antisense strand to SEQ ID NO: 1814597
uucaugaggagauguccaa

SEQ ID NO: 1814599 - RNA, 19 nt, Artificial Sequence
  Description of Artificial Sequence: Synthetic oligonucleotide
  Sense strand starting at position 3266 of SEQ ID NO: 1563488
uugucuuuacucuaguuaa

SEQ ID NO: 1814600 - RNA, 19 nt, Artificial Sequence
  Description of Artificial Sequence: Synthetic oligonucleotide
  Antisense strand to SEQ ID NO: 1814599
uuaacuagaguaaagacaa

SEQ ID NO: 1814601 - RNA, 19 nt, Artificial Sequence
  Description of Artificial Sequence: Synthetic oligonucleotide
  Sense strand starting at position 3374 of SEQ ID NO: 1563488
guguucucucaauaacgaa

SEQ ID NO: 1814602 - RNA, 19 nt, Artificial Sequence
  Description of Artificial Sequence: Synthetic oligonucleotide
  Antisense strand to SEQ ID NO: 1814601
uucguuauugagagaacac

SEQ ID NO: 1814603 - RNA, 19 nt, Artificial Sequence
  Description of Artificial Sequence: Synthetic oligonucleotide
  Sense strand starting at position 3836 of SEQ ID NO: 1563488
cugcucuagcuauacagaa

SEQ ID NO: 1814604 - RNA, 19 nt, Artificial Sequence
  Description of Artificial Sequence: Synthetic oligonucleotide
  Antisense strand to SEQ ID NO: 1814603
uucuguauagcuagagcag

SEQ ID NO: 1814605 - RNA, 19 nt, Artificial Sequence
  Description of Artificial Sequence: Synthetic oligonucleotide
  Sense strand starting at position 82 of SEQ ID NO: 1563489
uaguuugugaaagaagagu

SEQ ID NO: 1814606 - RNA, 19 nt, Artificial Sequence
  Description of Artificial Sequence: Synthetic oligonucleotide
  Antisense strand to SEQ ID NO: 1814605
acucuucuuucacaaacua

SEQ ID NO: 1814607 - RNA, 19 nt, Artificial Sequence
  Description of Artificial Sequence: Synthetic oligonucleotide
  Sense strand starting at position 201 of SEQ ID NO: 1563489
agcaacagugcaugaaauu

SEQ ID NO: 1814608 - RNA, 19 nt, Artificial Sequence
  Description of Artificial Sequence: Synthetic oligonucleotide
  Antisense strand to SEQ ID NO: 1814607
aauuucaugcacuguugcu

SEQ ID NO: 1814609 - RNA, 19 nt, Artificial Sequence
  Description of Artificial Sequence: Synthetic oligonucleotide
  Sense strand starting at position 247 of SEQ ID NO: 1563489
ugacuucuuggcugacaca

SEQ ID NO: 1814610 - RNA, 19 nt, Artificial Sequence
  Description of Artificial Sequence: Synthetic oligonucleotide
  Antisense strand to SEQ ID NO: 1814609
ugugucagccaagaaguca

SEQ ID NO: 1814611 - RNA, 19 nt, Artificial Sequence
  Description of Artificial Sequence: Synthetic oligonucleotide
  Sense strand starting at position 912 of SEQ ID NO: 1563489
acauaaccguauguuaauu

SEQ ID NO: 1814612 - RNA, 19 nt, Artificial Sequence
  Description of Artificial Sequence: Synthetic oligonucleotide
  Antisense strand to SEQ ID NO: 1814611
aauuaacauacgguuaugu

SEQ ID NO: 1814613 - RNA, 19 nt, Artificial Sequence
  Description of Artificial Sequence: Synthetic oligonucleotide
  Sense strand starting at position 1075 of SEQ ID NO: 1563489
ucaaccuaguguuucuuaa

SEQ ID NO: 1814614 - RNA, 19 nt, Artificial Sequence
  Description of Artificial Sequence: Synthetic oligonucleotide
  Antisense strand to SEQ ID NO: 1814613
uuaagaaacacuagguuga

SEQ ID NO: 1814615 - RNA, 19 nt, Artificial Sequence
  Description of Artificial Sequence: Synthetic oligonucleotide
  Sense strand starting at position 1123 of SEQ ID NO: 1563489
gaaggcagcuauguauaua

SEQ ID NO: 1814616 - RNA, 19 nt, Artificial Sequence
  Description of Artificial Sequence: Synthetic oligonucleotide
  Antisense strand to SEQ ID NO: 1814615
uauauacauagcugccuuc

SEQ ID NO: 1814617 - RNA, 19 nt, Artificial Sequence
  Description of Artificial Sequence: Synthetic oligonucleotide
  Sense strand starting at position 1242 of SEQ ID NO: 1563489
gcuuuaguaaagcagaaag

SEQ ID NO: 1814618 - RNA, 19 nt, Artificial Sequence
  Description of Artificial Sequence: Synthetic oligonucleotide
  Antisense strand to SEQ ID NO: 1814617
cuuucugcuuuacuaaagc

SEQ ID NO: 1814619 - RNA, 19 nt, Artificial Sequence
  Description of Artificial Sequence: Synthetic oligonucleotide
  Sense strand starting at position 1410 of SEQ ID NO: 1563489
acuguuaaacucuauuguu

SEQ ID NO: 1814620 - RNA, 19 nt, Artificial Sequence
  Description of Artificial Sequence: Synthetic oligonucleotide
  Antisense strand to SEQ ID NO: 1814619
aacaauagaguuuaacagu

SEQ ID NO: 1814621 - RNA, 19 nt, Artificial Sequence
  Description of Artificial Sequence: Synthetic oligonucleotide
  Sense strand starting at position 1418 of SEQ ID NO: 1563489
acucuauuguucccugaug

SEQ ID NO: 1814622 - RNA, 19 nt, Artificial Sequence
  Description of Artificial Sequence: Synthetic oligonucleotide
  Antisense strand to SEQ ID NO: 1814621
caucagggaacaauagagu

SEQ ID NO: 1814623 - RNA, 19 nt, Artificial Sequence
  Description of Artificial Sequence: Synthetic oligonucleotide
  Sense strand starting at position 1420 of SEQ ID NO: 1563489
ucuauuguucccugaugga

SEQ ID NO: 1814624 - RNA, 19 nt, Artificial Sequence
  Description of Artificial Sequence: Synthetic oligonucleotide
  Antisense strand to SEQ ID NO: 1814623
uccaucagggaacaauaga

SEQ ID NO: 1814625 - RNA, 19 nt, Artificial Sequence
  Description of Artificial Sequence: Synthetic oligonucleotide
  Sense strand starting at position 1503 of SEQ ID NO: 1563489
aaacaaauuggcuguagga

SEQ ID NO: 1814626 - RNA, 19 nt, Artificial Sequence
  Description of Artificial Sequence: Synthetic oligonucleotide
  Antisense strand to SEQ ID NO: 1814625
uccuacagccaauuuguuu

SEQ ID NO: 1814627 - RNA, 19 nt, Artificial Sequence
  Description of Artificial Sequence: Synthetic oligonucleotide
  Sense strand starting at position 1627 of SEQ ID NO: 1563489
augguuuaacuugagagca

SEQ ID NO: 1814628 - RNA, 19 nt, Artificial Sequence
  Description of Artificial Sequence: Synthetic oligonucleotide
  Antisense strand to SEQ ID NO: 1814627
ugcucucaaguuaaaccau

SEQ ID NO: 1814629 - RNA, 19 nt, Artificial Sequence
  Description of Artificial Sequence: Synthetic oligonucleotide
  Sense strand starting at position 1720 of SEQ ID NO: 1563489
ccacuuaauccggaccuca

SEQ ID NO: 1814630 - RNA, 19 nt, Artificial Sequence
  Description of Artificial Sequence: Synthetic oligonucleotide
  Antisense strand to SEQ ID NO: 1814629
ugagguccggauuaagugg

SEQ ID NO: 1814631 - RNA, 19 nt, Artificial Sequence
  Description of Artificial Sequence: Synthetic oligonucleotide
  Sense strand starting at position 1781 of SEQ ID NO: 1563489
acgcuccugcaucagaaua

SEQ ID NO: 1814632 - RNA, 19 nt, Artificial Sequence
  Description of Artificial Sequence: Synthetic oligonucleotide
  Antisense strand to SEQ ID NO: 1814631
uauucugaugcaggagcgu

SEQ ID NO: 1814633 - RNA, 19 nt, Artificial Sequence
  Description of Artificial Sequence: Synthetic oligonucleotide
  Sense strand starting at position 2041 of SEQ ID NO: 1563489
caacuuuguguguagcaaa

SEQ ID NO: 1814634 - RNA, 19 nt, Artificial Sequence
  Description of Artificial Sequence: Synthetic oligonucleotide
  Antisense strand to SEQ ID NO: 1814633
uuugcuacacacaaaguug

SEQ ID NO: 1814635 - RNA, 19 nt, Artificial Sequence
  Description of Artificial Sequence: Synthetic oligonucleotide
  Sense strand starting at position 2065 of SEQ ID NO: 1563489
uaaagaaauccugggcuga

SEQ ID NO: 1814636 - RNA, 19 nt, Artificial Sequence
  Description of Artificial Sequence: Synthetic oligonucleotide
  Antisense strand to SEQ ID NO: 1814635
ucagcccaggauuucuuua

SEQ ID NO: 1814637 - RNA, 19 nt, Artificial Sequence
  Description of Artificial Sequence: Synthetic oligonucleotide
  Sense strand starting at position 2069 of SEQ ID NO: 1563489
gaaauccugggcugaaacu

SEQ ID NO: 1814638 - RNA, 19 nt, Artificial Sequence
  Description of Artificial Sequence: Synthetic oligonucleotide
  Antisense strand to SEQ ID NO: 1814637
aguuucagcccaggauuuc

SEQ ID NO: 1814639 - RNA, 19 nt, Artificial Sequence
  Description of Artificial Sequence: Synthetic oligonucleotide
  Sense strand starting at position 2078 of SEQ ID NO: 1563489
ggcugaaacucugcuggau

SEQ ID NO: 1814640 - RNA, 19 nt, Artificial Sequence
  Description of Artificial Sequence: Synthetic oligonucleotide
  Antisense strand to SEQ ID NO: 1814639
auccagcagaguuucagcc

SEQ ID NO: 1814641 - RNA, 19 nt, Artificial Sequence
  Description of Artificial Sequence: Synthetic oligonucleotide
  Sense strand starting at position 2081 of SEQ ID NO: 1563489
ugaaacucugcuggaucau

SEQ ID NO: 1814642 - RNA, 19 nt, Artificial Sequence
  Description of Artificial Sequence: Synthetic oligonucleotide
  Antisense strand to SEQ ID NO: 1814641
augauccagcagaguuuca

SEQ ID NO: 1814643 - RNA, 19 nt, Artificial Sequence
  Description of Artificial Sequence: Synthetic oligonucleotide
  Sense strand starting at position 2133 of SEQ ID NO: 1563489
gcauuaccugauggagauu

SEQ ID NO: 1814644 - RNA, 19 nt, Artificial Sequence
  Description of Artificial Sequence: Synthetic oligonucleotide
  Antisense strand to SEQ ID NO: 1814643
aaucuccaucagguaaugc

SEQ ID NO: 1814645 - RNA, 19 nt, Artificial Sequence
  Description of Artificial Sequence: Synthetic oligonucleotide
  Sense strand starting at position 2547 of SEQ ID NO: 1563489
accuguauagcugaugaua

SEQ ID NO: 1814646 - RNA, 19 nt, Artificial Sequence
  Description of Artificial Sequence: Synthetic oligonucleotide
  Antisense strand to SEQ ID NO: 1814645
uaucaucagcuauacaggu

SEQ ID NO: 1814647 - RNA, 19 nt, Artificial Sequence
  Description of Artificial Sequence: Synthetic oligonucleotide
  Sense strand starting at position 2550 of SEQ ID NO: 1563489
uguauagcugaugauaaau

SEQ ID NO: 1814648 - RNA, 19 nt, Artificial Sequence
  Description of Artificial Sequence: Synthetic oligonucleotide
  Antisense strand to SEQ ID NO: 1814647
auuuaucaucagcuauaca

SEQ ID NO: 1814649 - RNA, 19 nt, Artificial Sequence
  Description of Artificial Sequence: Synthetic oligonucleotide
  Sense strand starting at position 2965 of SEQ ID NO: 1563489
cuuagaaaguuuguugaaa

SEQ ID NO: 1814650 - RNA, 19 nt, Artificial Sequence
  Description of Artificial Sequence: Synthetic oligonucleotide
  Antisense strand to SEQ ID NO: 1814649
uuucaacaaacuuucuaag

SEQ ID NO: 1814651 - RNA, 19 nt, Artificial Sequence
  Description of Artificial Sequence: Synthetic oligonucleotide
  Sense strand starting at position 3000 of SEQ ID NO: 1563489
gcuuauugcccugacaauu

SEQ ID NO: 1814652 - RNA, 19 nt, Artificial Sequence
  Description of Artificial Sequence: Synthetic oligonucleotide
  Antisense strand to SEQ ID NO: 1814651
aauugucagggcaauaagc

SEQ ID NO: 1814653 - RNA, 19 nt, Artificial Sequence
  Description of Artificial Sequence: Synthetic oligonucleotide
  Sense strand starting at position 3048 of SEQ ID NO: 1563489
cccauuccucagugaauga

SEQ ID NO: 1814654 - RNA, 19 nt, Artificial Sequence
  Description of Artificial Sequence: Synthetic oligonucleotide
  Antisense strand to SEQ ID NO: 1814653
ucauucacugaggaauggg

SEQ ID NO: 1814655 - RNA, 19 nt, Artificial Sequence
  Description of Artificial Sequence: Synthetic oligonucleotide
  Sense strand starting at position 3239 of SEQ ID NO: 1563489
ugcauuaaaccuggauuga

SEQ ID NO: 1814656 - RNA, 19 nt, Artificial Sequence
  Description of Artificial Sequence: Synthetic oligonucleotide
  Antisense strand to SEQ ID NO: 1814655
ucaauccagguuuaaugca

SEQ ID NO: 1814657 - RNA, 19 nt, Artificial Sequence
  Description of Artificial Sequence: Synthetic oligonucleotide
  Sense strand starting at position 3287 of SEQ ID NO: 1563489
uuacuucuucuaugaggac

SEQ ID NO: 1814658 - RNA, 19 nt, Artificial Sequence
  Description of Artificial Sequence: Synthetic oligonucleotide
  Antisense strand to SEQ ID NO: 1814657
guccucauagaagaaguaa

SEQ ID NO: 1814659 - RNA, 19 nt, Artificial Sequence
  Description of Artificial Sequence: Synthetic oligonucleotide
  Sense strand starting at position 3301 of SEQ ID NO: 1563489
aggacuucucaguaacccu

SEQ ID NO: 1814660 - RNA, 19 nt, Artificial Sequence
  Description of Artificial Sequence: Synthetic oligonucleotide
  Antisense strand to SEQ ID NO: 1814659
aggguuacugagaaguccu

SEQ ID NO: 1814661 - RNA, 19 nt, Artificial Sequence
  Description of Artificial Sequence: Synthetic oligonucleotide
  Sense strand starting at position 3328 of SEQ ID NO: 1563489
aggcauauucuuuacaugu

SEQ ID NO: 1814662 - RNA, 19 nt, Artificial Sequence
  Description of Artificial Sequence: Synthetic oligonucleotide
  Antisense strand to SEQ ID NO: 1814661
acauguaaagaauaugccu

SEQ ID NO: 1814663 - RNA, 19 nt, Artificial Sequence
  Description of Artificial Sequence: Synthetic oligonucleotide
  Sense strand starting at position 3341 of SEQ ID NO: 1563489
acauguuacugucccaaag

SEQ ID NO: 1814664 - RNA, 19 nt, Artificial Sequence
  Description of Artificial Sequence: Synthetic oligonucleotide
  Antisense strand to SEQ ID NO: 1814663
cuuugggacaguaacaugu

SEQ ID NO: 1814665 - RNA, 19 nt, Artificial Sequence
  Description of Artificial Sequence: Synthetic oligonucleotide
  Sense strand starting at position 3392 of SEQ ID NO: 1563489
agguuaauuccugaagcua

SEQ ID NO: 1814666 - RNA, 19 nt, Artificial Sequence
  Description of Artificial Sequence: Synthetic oligonucleotide
  Antisense strand to SEQ ID NO: 1814665
uagcuucaggaauuaaccu

SEQ ID NO: 1814667 - RNA, 19 nt, Artificial Sequence
  Description of Artificial Sequence: Synthetic oligonucleotide
  Sense strand starting at position 3569 of SEQ ID NO: 1563489
ggcuuuauugugcuguuua

SEQ ID NO: 1814668 - RNA, 19 nt, Artificial Sequence
  Description of Artificial Sequence: Synthetic oligonucleotide
  Antisense strand to SEQ ID NO: 1814667
uaaacagcacaauaaagcc

SEQ ID NO: 1814669 - RNA, 19 nt, Artificial Sequence
  Description of Artificial Sequence: Synthetic oligonucleotide
  Sense strand starting at position 3574 of SEQ ID NO: 1563489
uauugugcuguuuaugaca

SEQ ID NO: 1814670 - RNA, 19 nt, Artificial Sequence
  Description of Artificial Sequence: Synthetic oligonucleotide
  Antisense strand to SEQ ID NO: 1814669
ugucauaaacagcacaaua

SEQ ID NO: 1814671 - RNA, 19 nt, Artificial Sequence
  Description of Artificial Sequence: Synthetic oligonucleotide
  Sense strand starting at position 3587 of SEQ ID NO: 1563489
augacaauaucugcagauu

SEQ ID NO: 1814672 - RNA, 19 nt, Artificial Sequence
  Description of Artificial Sequence: Synthetic oligonucleotide
  Antisense strand to SEQ ID NO: 1814671
aaucugcagauauugucau

SEQ ID NO: 1814673 - RNA, 19 nt, Artificial Sequence
  Description of Artificial Sequence: Synthetic oligonucleotide
  Sense strand starting at position 3676 of SEQ ID NO: 1563489
ggugcugacguguuuaugu

SEQ ID NO: 1814674 - RNA, 19 nt, Artificial Sequence
  Description of Artificial Sequence: Synthetic oligonucleotide
  Antisense strand to SEQ ID NO: 1814673
acauaaacacgucagcacc

SEQ ID NO: 1814675 - RNA, 19 nt, Artificial Sequence
  Description of Artificial Sequence: Synthetic oligonucleotide
  Sense strand starting at position 3687 of SEQ ID NO: 1563489
guuuauguaccacaacuga

SEQ ID NO: 1814676 - RNA, 19 nt, Artificial Sequence
  Description of Artificial Sequence: Synthetic oligonucleotide
  Antisense strand to SEQ ID NO: 1814675
ucaguugugguacauaaac

SEQ ID NO: 1814677 - RNA, 19 nt, Artificial Sequence
  Description of Artificial Sequence: Synthetic oligonucleotide
  Sense strand starting at position 3753 of SEQ ID NO: 1563489
aaggaauccucagucugua

SEQ ID NO: 1814678 - RNA, 19 nt, Artificial Sequence
  Description of Artificial Sequence: Synthetic oligonucleotide
  Antisense strand to SEQ ID NO: 1814677
uacagacugaggauuccuu

SEQ ID NO: 1814679 - RNA, 19 nt, Artificial Sequence
  Description of Artificial Sequence: Synthetic oligonucleotide
  Sense strand starting at position 3885 of SEQ ID NO: 1563489
cuugucaaaugaucagaua

SEQ ID NO: 1814680 - RNA, 19 nt, Artificial Sequence
  Description of Artificial Sequence: Synthetic oligonucleotide
  Antisense strand to SEQ ID NO: 1814679
uaucugaucauuugacaag

SEQ ID NO: 1814681 - RNA, 19 nt, Artificial Sequence
  Description of Artificial Sequence: Synthetic oligonucleotide
  Sense strand starting at position 3952 of SEQ ID NO: 1563489
cuccuaugggcauauaauu

SEQ ID NO: 1814682 - RNA, 19 nt, Artificial Sequence
  Description of Artificial Sequence: Synthetic oligonucleotide
  Antisense strand to SEQ ID NO: 1814681
aauuauaugcccauaggag

SEQ ID NO: 1814683 - RNA, 19 nt, Artificial Sequence
  Description of Artificial Sequence: Synthetic oligonucleotide
  Sense strand starting at position 3975 of SEQ ID NO: 1563489
aggaguugcuacuuggauu

SEQ ID NO: 1814684 - RNA, 19 nt, Artificial Sequence
  Description of Artificial Sequence: Synthetic oligonucleotide
  Antisense strand to SEQ ID NO: 1814683
aauccaaguagcaacuccu

SEQ ID NO: 1814685 - RNA, 19 nt, Artificial Sequence
  Description of Artificial Sequence: Synthetic oligonucleotide
  Sense strand starting at position 23 of SEQ ID NO: 1563490
acucccgucauuuagugua

SEQ ID NO: 1814686 - RNA, 19 nt, Artificial Sequence
  Description of Artificial Sequence: Synthetic oligonucleotide
  Antisense strand to SEQ ID NO: 1814685
uacacuaaaugacgggagu

SEQ ID NO: 1814687 - RNA, 19 nt, Artificial Sequence
  Description of Artificial Sequence: Synthetic oligonucleotide
  Sense strand starting at position 25 of SEQ ID NO: 1563490
ucccgucauuuaguguaua

SEQ ID NO: 1814688 - RNA, 19 nt, Artificial Sequence
  Description of Artificial Sequence: Synthetic oligonucleotide
  Antisense strand to SEQ ID NO: 1814687
uauacacuaaaugacggga

SEQ ID NO: 1814689 - RNA, 19 nt, Artificial Sequence
  Description of Artificial Sequence: Synthetic oligonucleotide
  Sense strand starting at position 391 of SEQ ID NO: 1563490
aaaguaugugaguauacua

SEQ ID NO: 1814690 - RNA, 19 nt, Artificial Sequence
  Description of Artificial Sequence: Synthetic oligonucleotide
  Antisense strand to SEQ ID NO: 1814689
uaguauacucacauacuuu

SEQ ID NO: 1814691 - RNA, 19 nt, Artificial Sequence
  Description of Artificial Sequence: Synthetic oligonucleotide
  Sense strand starting at position 502 of SEQ ID NO: 1563490
ggagcuaucuccucuaaac

SEQ ID NO: 1814692 - RNA, 19 nt, Artificial Sequence
  Description of Artificial Sequence: Synthetic oligonucleotide
  Antisense strand to SEQ ID NO: 1814691
guuuagaggagauagcucc

SEQ ID NO: 1814693 - RNA, 19 nt, Artificial Sequence
  Description of Artificial Sequence: Synthetic oligonucleotide
  Sense strand starting at position 882 of SEQ ID NO: 1563490
uacguagacaugugagaua

SEQ ID NO: 1814694 - RNA, 19 nt, Artificial Sequence
  Description of Artificial Sequence: Synthetic oligonucleotide
  Antisense strand to SEQ ID NO: 1814693
uaucucacaugucuacgua

SEQ ID NO: 1814695 - RNA, 19 nt, Artificial Sequence
  Description of Artificial Sequence: Synthetic oligonucleotide
  Sense strand starting at position 911 of SEQ ID NO: 1563490
gugcuaagacaaugaggaa

SEQ ID NO: 1814696 - RNA, 19 nt, Artificial Sequence
  Description of Artificial Sequence: Synthetic oligonucleotide
  Antisense strand to SEQ ID NO: 1814695
uuccucauugucuuagcac

SEQ ID NO: 1814697 - RNA, 19 nt, Artificial Sequence
  Description of Artificial Sequence: Synthetic oligonucleotide
  Sense strand starting at position 1110 of SEQ ID NO: 1563490
gguugugauaaacaucugu

SEQ ID NO: 1814698 - RNA, 19 nt, Artificial Sequence
  Description of Artificial Sequence: Synthetic oligonucleotide
  Antisense strand to SEQ ID NO: 1814697
acagauguuuaucacaacc

SEQ ID NO: 1814699 - RNA, 19 nt, Artificial Sequence
  Description of Artificial Sequence: Synthetic oligonucleotide
  Sense strand starting at position 1172 of SEQ ID NO: 1563490
agaagaauaugugcagaau

SEQ ID NO: 1814700 - RNA, 19 nt, Artificial Sequence
  Description of Artificial Sequence: Synthetic oligonucleotide
  Antisense strand to SEQ ID NO: 1814699
auucugcacauauucuucu

SEQ ID NO: 1814701 - RNA, 19 nt, Artificial Sequence
  Description of Artificial Sequence: Synthetic oligonucleotide
  Sense strand starting at position 1206 of SEQ ID NO: 1563490
acaagcgaugaaugugaau

SEQ ID NO: 1814702 - RNA, 19 nt, Artificial Sequence
  Description of Artificial Sequence: Synthetic oligonucleotide
  Antisense strand to SEQ ID NO: 1814701
auucacauucaucgcuugu

SEQ ID NO: 1814703 - RNA, 19 nt, Artificial Sequence
  Description of Artificial Sequence: Synthetic oligonucleotide
  Sense strand starting at position 1391 of SEQ ID NO: 1563490
gccauuaugaguuggaaag

SEQ ID NO: 1814704 - RNA, 19 nt, Artificial Sequence
  Description of Artificial Sequence: Synthetic oligonucleotide
  Antisense strand to SEQ ID NO: 1814703
cuuuccaacucauaauggc

SEQ ID NO: 1814705 - RNA, 19 nt, Artificial Sequence
  Description of Artificial Sequence: Synthetic oligonucleotide
  Sense strand starting at position 1392 of SEQ ID NO: 1563490
ccauuaugaguuggaaagu

SEQ ID NO: 1814706 - RNA, 19 nt, Artificial Sequence
  Description of Artificial Sequence: Synthetic oligonucleotide
  Antisense strand to SEQ ID NO: 1814705
acuuuccaacucauaaugg

SEQ ID NO: 1814707 - RNA, 19 nt, Artificial Sequence
  Description of Artificial Sequence: Synthetic oligonucleotide
  Sense strand starting at position 1398 of SEQ ID NO: 1563490
ugaguuggaaaguaaugua

SEQ ID NO: 1814708 - RNA, 19 nt, Artificial Sequence
  Description of Artificial Sequence: Synthetic oligonucleotide
  Antisense strand to SEQ ID NO: 1814707
uacauuacuuuccaacuca

SEQ ID NO: 1814709 - RNA, 19 nt, Artificial Sequence
  Description of Artificial Sequence: Synthetic oligonucleotide
  Sense strand starting at position 1447 of SEQ ID NO: 1563490
ucuucuagucuauggacaa

SEQ ID NO: 1814710 - RNA, 19 nt, Artificial Sequence
  Description of Artificial Sequence: Synthetic oligonucleotide
  Antisense strand to SEQ ID NO: 1814709
uuguccauagacuagaaga

SEQ ID NO: 1814711 - RNA, 19 nt, Artificial Sequence
  Description of Artificial Sequence: Synthetic oligonucleotide
  Sense strand starting at position 1479 of SEQ ID NO: 1563490
auggaagugauaggcaaua

SEQ ID NO: 1814712 - RNA, 19 nt, Artificial Sequence
  Description of Artificial Sequence: Synthetic oligonucleotide
  Antisense strand to SEQ ID NO: 1814711
uauugccuaucacuuccau

SEQ ID NO: 1814713 - RNA, 19 nt, Artificial Sequence
  Description of Artificial Sequence: Synthetic oligonucleotide
  Sense strand starting at position 1573 of SEQ ID NO: 1563490
uaguaaucuguagaguuaa

SEQ ID NO: 1814714 - RNA, 19 nt, Artificial Sequence
  Description of Artificial Sequence: Synthetic oligonucleotide
  Antisense strand to SEQ ID NO: 1814713
uuaacucuacagauuacua

SEQ ID NO: 1814715 - RNA, 19 nt, Artificial Sequence
  Description of Artificial Sequence: Synthetic oligonucleotide
  Sense strand starting at position 1664 of SEQ ID NO: 1563490
gagucugucaugggagaga

SEQ ID NO: 1814716 - RNA, 19 nt, Artificial Sequence
  Description of Artificial Sequence: Synthetic oligonucleotide
  Antisense strand to SEQ ID NO: 1814715
ucucucccaugacagacuc

SEQ ID NO: 1814717 - RNA, 19 nt, Artificial Sequence
  Description of Artificial Sequence: Synthetic oligonucleotide
  Sense strand starting at position 1718 of SEQ ID NO: 1563490
guauuauagcaucauacau

SEQ ID NO: 1814718 - RNA, 19 nt, Artificial Sequence
  Description of Artificial Sequence: Synthetic oligonucleotide
  Antisense strand to SEQ ID NO: 1814717
auguaugaugcuauaauac

SEQ ID NO: 1814719 - RNA, 19 nt, Artificial Sequence
  Description of Artificial Sequence: Synthetic oligonucleotide
  Sense strand starting at position 1794 of SEQ ID NO: 1563490
gcuugacagguggaaagua

SEQ ID NO: 1814720 - RNA, 19 nt, Artificial Sequence
  Description of Artificial Sequence: Synthetic oligonucleotide
  Antisense strand to SEQ ID NO: 1814719
uacuuuccaccugucaagc

SEQ ID NO: 1814721 - RNA, 19 nt, Artificial Sequence
  Description of Artificial Sequence: Synthetic oligonucleotide
  Sense strand starting at position 2174 of SEQ ID NO: 1563490
ggaauaugcaacugacagu

SEQ ID NO: 1814722 - RNA, 19 nt, Artificial Sequence
  Description of Artificial Sequence: Synthetic oligonucleotide
  Antisense strand to SEQ ID NO: 1814721
acugucaguugcauauucc

SEQ ID NO: 1814723 - RNA, 19 nt, Artificial Sequence
  Description of Artificial Sequence: Synthetic oligonucleotide
  Sense strand starting at position 2366 of SEQ ID NO: 1563490
ggaggcuuuguauauuauc

SEQ ID NO: 1814724 - RNA, 19 nt, Artificial Sequence
  Description of Artificial Sequence: Synthetic oligonucleotide
  Antisense strand to SEQ ID NO: 1814723
gauaauauacaaagccucc

SEQ ID NO: 1814725 - RNA, 19 nt, Artificial Sequence
  Description of Artificial Sequence: Synthetic oligonucleotide
  Sense strand starting at position 2399 of SEQ ID NO: 1563490
agauuuguaugcuucuguu

SEQ ID NO: 1814726 - RNA, 19 nt, Artificial Sequence
  Description of Artificial Sequence: Synthetic oligonucleotide
  Antisense strand to SEQ ID NO: 1814725
aacagaagcauacaaaucu

SEQ ID NO: 1814727 - RNA, 19 nt, Artificial Sequence
  Description of Artificial Sequence: Synthetic oligonucleotide
  Sense strand starting at position 2458 of SEQ ID NO: 1563490
gauugaucuguguaacuag

SEQ ID NO: 1814728 - RNA, 19 nt, Artificial Sequence
  Description of Artificial Sequence: Synthetic oligonucleotide
  Antisense strand to SEQ ID NO: 1814727
cuaguuacacagaucaauc

SEQ ID NO: 1814729 - RNA, 19 nt, Artificial Sequence
  Description of Artificial Sequence: Synthetic oligonucleotide
  Sense strand starting at position 2461 of SEQ ID NO: 1563490
ugaucuguguaacuagaaa

SEQ ID NO: 1814730 - RNA, 19 nt, Artificial Sequence
  Description of Artificial Sequence: Synthetic oligonucleotide
  Antisense strand to SEQ ID NO: 1814729
uuucuaguuacacagauca

SEQ ID NO: 1814731 - RNA, 19 nt, Artificial Sequence
  Description of Artificial Sequence: Synthetic oligonucleotide
  Sense strand starting at position 2604 of SEQ ID NO: 1563490
ucuuaagaugcagaauucu

SEQ ID NO: 1814732 - RNA, 19 nt, Artificial Sequence
  Description of Artificial Sequence: Synthetic oligonucleotide
  Antisense strand to SEQ ID NO: 1814731
agaauucugcaucuuaaga

SEQ ID NO: 1814733 - RNA, 19 nt, Artificial Sequence
  Description of Artificial Sequence: Synthetic oligonucleotide
  Sense strand starting at position 2722 of SEQ ID NO: 1563490
auucucuuugacugggaga

SEQ ID NO: 1814734 - RNA, 19 nt, Artificial Sequence
  Description of Artificial Sequence: Synthetic oligonucleotide
  Antisense strand to SEQ ID NO: 1814733
ucucccagucaaagagaau

SEQ ID NO: 1814735 - RNA, 19 nt, Artificial Sequence
  Description of Artificial Sequence: Synthetic oligonucleotide
  Sense strand starting at position 2724 of SEQ ID NO: 1563490
ucucuuugacugggagaca

SEQ ID NO: 1814736 - RNA, 19 nt, Artificial Sequence
  Description of Artificial Sequence: Synthetic oligonucleotide
  Antisense strand to SEQ ID NO: 1814735
ugucucccagucaaagaga

SEQ ID NO: 1814737 - RNA, 19 nt, Artificial Sequence
  Description of Artificial Sequence: Synthetic oligonucleotide
  Sense strand starting at position 2811 of SEQ ID NO: 1563490
aguaucucugaguaguaca

SEQ ID NO: 1814738 - RNA, 19 nt, Artificial Sequence
  Description of Artificial Sequence: Synthetic oligonucleotide
  Antisense strand to SEQ ID NO: 1814737
uguacuacucagagauacu

SEQ ID NO: 1814739 - RNA, 19 nt, Artificial Sequence
  Description of Artificial Sequence: Synthetic oligonucleotide
  Sense strand starting at position 2873 of SEQ ID NO: 1563490
guuuauaugguagaagguu

SEQ ID NO: 1814740 - RNA, 19 nt, Artificial Sequence
  Description of Artificial Sequence: Synthetic oligonucleotide
  Antisense strand to SEQ ID NO: 1814739
aaccuucuaccauauaaac

SEQ ID NO: 1814741 - RNA, 19 nt, Artificial Sequence
  Description of Artificial Sequence: Synthetic oligonucleotide
  Sense strand starting at position 2879 of SEQ ID NO: 1563490
augguagaagguuaguauu

SEQ ID NO: 1814742 - RNA, 19 nt, Artificial Sequence
  Description of Artificial Sequence: Synthetic oligonucleotide
  Antisense strand to SEQ ID NO: 1814741
aauacuaaccuucuaccau

SEQ ID NO: 1814743 - RNA, 19 nt, Artificial Sequence
  Description of Artificial Sequence: Synthetic oligonucleotide
  Sense strand starting at position 2910 of SEQ ID NO: 1563490
gaacgaaguuuggucaaau

SEQ ID NO: 1814744 - RNA, 19 nt, Artificial Sequence
  Description of Artificial Sequence: Synthetic oligonucleotide
  Antisense strand to SEQ ID NO: 1814743
auuugaccaaacuucguuc

SEQ ID NO: 1814745 - RNA, 19 nt, Artificial Sequence
  Description of Artificial Sequence: Synthetic oligonucleotide
  Sense strand starting at position 2911 of SEQ ID NO: 1563490
aacgaaguuuggucaaaua

SEQ ID NO: 1814746 - RNA, 19 nt, Artificial Sequence
  Description of Artificial Sequence: Synthetic oligonucleotide
  Antisense strand to SEQ ID NO: 1814745
uauuugaccaaacuucguu

SEQ ID NO: 1814747 - RNA, 19 nt, Artificial Sequence
  Description of Artificial Sequence: Synthetic oligonucleotide
  Sense strand starting at position 3368 of SEQ ID NO: 1563490
gcauaaauaggauguugau

SEQ ID NO: 1814748 - RNA, 19 nt, Artificial Sequence
  Description of Artificial Sequence: Synthetic oligonucleotide
  Antisense strand to SEQ ID NO: 1814747
aucaacauccuauuuaugc

SEQ ID NO: 1814749 - RNA, 19 nt, Artificial Sequence
  Description of Artificial Sequence: Synthetic oligonucleotide
  Sense strand starting at position 3503 of SEQ ID NO: 1563490
cugauuuauugucuaguuu

SEQ ID NO: 1814750 - RNA, 19 nt, Artificial Sequence
  Description of Artificial Sequence: Synthetic oligonucleotide
  Antisense strand to SEQ ID NO: 1814749
aaacuagacaauaaaucag

SEQ ID NO: 1814751 - RNA, 19 nt, Artificial Sequence
  Description of Artificial Sequence: Synthetic oligonucleotide
  Sense strand starting at position 3725 of SEQ ID NO: 1563490
gaagauaagucuucuguca

SEQ ID NO: 1814752 - RNA, 19 nt, Artificial Sequence
  Description of Artificial Sequence: Synthetic oligonucleotide
  Antisense strand to SEQ ID NO: 1814751
ugacagaagacuuaucuuc

SEQ ID NO: 1814753 - RNA, 19 nt, Artificial Sequence
  Description of Artificial Sequence: Synthetic oligonucleotide
  Sense strand starting at position 3755 of SEQ ID NO: 1563490
cuaggucaugauggugaua

SEQ ID NO: 1814754 - RNA, 19 nt, Artificial Sequence
  Description of Artificial Sequence: Synthetic oligonucleotide
  Antisense strand to SEQ ID NO: 1814753
uaucaccaucaugaccuag

SEQ ID NO: 1814755 - RNA, 19 nt, Artificial Sequence
  Description of Artificial Sequence: Synthetic oligonucleotide
  Sense strand starting at position 3783 of SEQ ID NO: 1563490
aaaugacacguguacagua

SEQ ID NO: 1814756 - RNA, 19 nt, Artificial Sequence
  Description of Artificial Sequence: Synthetic oligonucleotide
  Antisense strand to SEQ ID NO: 1814755
uacuguacacgugucauuu

SEQ ID NO: 1814757 - RNA, 19 nt, Artificial Sequence
  Description of Artificial Sequence: Synthetic oligonucleotide
  Sense strand starting at position 3939 of SEQ ID NO: 1563490
agccauauagcugauaagu

SEQ ID NO: 1814758 - RNA, 19 nt, Artificial Sequence
  Description of Artificial Sequence: Synthetic oligonucleotide
  Antisense strand to SEQ ID NO: 1814757
acuuaucagcuauauggcu

SEQ ID NO: 1814759 - RNA, 19 nt, Artificial Sequence
  Description of Artificial Sequence: Synthetic oligonucleotide
  Sense strand starting at position 3955 of SEQ ID NO: 1563490
aguguuagaacugggaaau

SEQ ID NO: 1814760 - RNA, 19 nt, Artificial Sequence
  Description of Artificial Sequence: Synthetic oligonucleotide
  Antisense strand to SEQ ID NO: 1814759
auuucccaguucuaacacu

SEQ ID NO: 1814761 - RNA, 19 nt, Artificial Sequence
  Description of Artificial Sequence: Synthetic oligonucleotide
  Sense strand starting at position 3956 of SEQ ID NO: 1563490
guguuagaacugggaaaug

SEQ ID NO: 1814762 - RNA, 19 nt, Artificial Sequence
  Description of Artificial Sequence: Synthetic oligonucleotide
  Antisense strand to SEQ ID NO: 1814761
cauuucccaguucuaacac

SEQ ID NO: 1814763 - RNA, 19 nt, Artificial Sequence
  Description of Artificial Sequence: Synthetic oligonucleotide
  Sense strand starting at position 3974 of SEQ ID NO: 1563490
ggauccaauucucuugauu

SEQ ID NO: 1814764 - RNA, 19 nt, Artificial Sequence
  Description of Artificial Sequence: Synthetic oligonucleotide
  Antisense strand to SEQ ID NO: 1814763
aaucaagagaauuggaucc

SEQ ID NO: 1814765 - RNA, 19 nt, Artificial Sequence
  Description of Artificial Sequence: Synthetic oligonucleotide
  Sense strand starting at position 81 of SEQ ID NO: 1563491
auggcaguugccuaauuaa

SEQ ID NO: 1814766 - RNA, 19 nt, Artificial Sequence
  Description of Artificial Sequence: Synthetic oligonucleotide
  Antisense strand to SEQ ID NO: 1814765
uuaauuaggcaacugccau

SEQ ID NO: 1814767 - RNA, 19 nt, Artificial Sequence
  Description of Artificial Sequence: Synthetic oligonucleotide
  Sense strand starting at position 226 of SEQ ID NO: 1563491
gggagcguucucuugcgau

SEQ ID NO: 1814768 - RNA, 19 nt, Artificial Sequence
  Description of Artificial Sequence: Synthetic oligonucleotide
  Antisense strand to SEQ ID NO: 1814767
aucgcaagagaacgcuccc

SEQ ID NO: 1814769 - RNA, 19 nt, Artificial Sequence
  Description of Artificial Sequence: Synthetic oligonucleotide
  Sense strand starting at position 385 of SEQ ID NO: 1563491
cuugcauugcuggaauacu

SEQ ID NO: 1814770 - RNA, 19 nt, Artificial Sequence
  Description of Artificial Sequence: Synthetic oligonucleotide
  Antisense strand to SEQ ID NO: 1814769
aguauuccagcaaugcaag

SEQ ID NO: 1814771 - RNA, 19 nt, Artificial Sequence
  Description of Artificial Sequence: Synthetic oligonucleotide
  Sense strand starting at position 405 of SEQ ID NO: 1563491
gcaggguguggaugguaaa

SEQ ID NO: 1814772 - RNA, 19 nt, Artificial Sequence
  Description of Artificial Sequence: Synthetic oligonucleotide
  Antisense strand to SEQ ID NO: 1814771
uuuaccauccacacccugc

SEQ ID NO: 1814773 - RNA, 19 nt, Artificial Sequence
  Description of Artificial Sequence: Synthetic oligonucleotide
  Sense strand starting at position 512 of SEQ ID NO: 1563491
uuucuuguucccugggaua

SEQ ID NO: 1814774 - RNA, 19 nt, Artificial Sequence
  Description of Artificial Sequence: Synthetic oligonucleotide
  Antisense strand to SEQ ID NO: 1814773
uaucccagggaacaagaaa

SEQ ID NO: 1814775 - RNA, 19 nt, Artificial Sequence
  Description of Artificial Sequence: Synthetic oligonucleotide
  Sense strand starting at position 582 of SEQ ID NO: 1563491
guggcuguuccagcuguua

SEQ ID NO: 1814776 - RNA, 19 nt, Artificial Sequence
  Description of Artificial Sequence: Synthetic oligonucleotide
  Antisense strand to SEQ ID NO: 1814775
uaacagcuggaacagccac

SEQ ID NO: 1814777 - RNA, 19 nt, Artificial Sequence
  Description of Artificial Sequence: Synthetic oligonucleotide
  Sense strand starting at position 585 of SEQ ID NO: 1563491
gcuguuccagcuguuaguu

SEQ ID NO: 1814778 - RNA, 19 nt, Artificial Sequence
  Description of Artificial Sequence: Synthetic oligonucleotide
  Antisense strand to SEQ ID NO: 1814777
aacuaacagcuggaacagc

SEQ ID NO: 1814779 - RNA, 19 nt, Artificial Sequence
  Description of Artificial Sequence: Synthetic oligonucleotide
  Sense strand starting at position 796 of SEQ ID NO: 1563491
gcaaauguauccuccaaag

SEQ ID NO: 1814780 - RNA, 19 nt, Artificial Sequence
  Description of Artificial Sequence: Synthetic oligonucleotide
  Antisense strand to SEQ ID NO: 1814779
cuuuggaggauacauuugc

SEQ ID NO: 1814781 - RNA, 19 nt, Artificial Sequence
  Description of Artificial Sequence: Synthetic oligonucleotide
  Sense strand starting at position 935 of SEQ ID NO: 1563491
agaguuuauugcccaagga

SEQ ID NO: 1814782 - RNA, 19 nt, Artificial Sequence
  Description of Artificial Sequence: Synthetic oligonucleotide
  Antisense strand to SEQ ID NO: 1814781
uccuugggcaauaaacucu

SEQ ID NO: 1814783 - RNA, 19 nt, Artificial Sequence
  Description of Artificial Sequence: Synthetic oligonucleotide
  Sense strand starting at position 936 of SEQ ID NO: 1563491
gaguuuauugcccaaggaa

SEQ ID NO: 1814784 - RNA, 19 nt, Artificial Sequence
  Description of Artificial Sequence: Synthetic oligonucleotide
  Antisense strand to SEQ ID NO: 1814783
uuccuugggcaauaaacuc

SEQ ID NO: 1814785 - RNA, 19 nt, Artificial Sequence
  Description of Artificial Sequence: Synthetic oligonucleotide
  Sense strand starting at position 1109 of SEQ ID NO: 1563491
ugacuaauauaagcaaagu

SEQ ID NO: 1814786 - RNA, 19 nt, Artificial Sequence
  Description of Artificial Sequence: Synthetic oligonucleotide
  Antisense strand to SEQ ID NO: 1814785
acuuugcuuauauuaguca

SEQ ID NO: 1814787 - RNA, 19 nt, Artificial Sequence
  Description of Artificial Sequence: Synthetic oligonucleotide
  Sense strand starting at position 1163 of SEQ ID NO: 1563491
gugacaaacuuugcuugaa

SEQ ID NO: 1814788 - RNA, 19 nt, Artificial Sequence
  Description of Artificial Sequence: Synthetic oligonucleotide
  Antisense strand to SEQ ID NO: 1814787
uucaagcaaaguuugucac

SEQ ID NO: 1814789 - RNA, 19 nt, Artificial Sequence
  Description of Artificial Sequence: Synthetic oligonucleotide
  Sense strand starting at position 1164 of SEQ ID NO: 1563491
ugacaaacuuugcuugaag

SEQ ID NO: 1814790 - RNA, 19 nt, Artificial Sequence
  Description of Artificial Sequence: Synthetic oligonucleotide
  Antisense strand to SEQ ID NO: 1814789
cuucaagcaaaguuuguca

SEQ ID NO: 1814791 - RNA, 19 nt, Artificial Sequence
  Description of Artificial Sequence: Synthetic oligonucleotide
  Sense strand starting at position 1166 of SEQ ID NO: 1563491
acaaacuuugcuugaagau

SEQ ID NO: 1814792 - RNA, 19 nt, Artificial Sequence
  Description of Artificial Sequence: Synthetic oligonucleotide
  Antisense strand to SEQ ID NO: 1814791
aucuucaagcaaaguuugu

SEQ ID NO: 1814793 - RNA, 19 nt, Artificial Sequence
  Description of Artificial Sequence: Synthetic oligonucleotide
  Sense strand starting at position 1373 of SEQ ID NO: 1563491
uggaaugagcacgguagaa

SEQ ID NO: 1814794 - RNA, 19 nt, Artificial Sequence
  Description of Artificial Sequence: Synthetic oligonucleotide
  Antisense strand to SEQ ID NO: 1814793
uucuaccgugcucauucca

SEQ ID NO: 1814795 - RNA, 19 nt, Artificial Sequence
  Description of Artificial Sequence: Synthetic oligonucleotide
  Sense strand starting at position 1413 of SEQ ID NO: 1563491
guuggaauccucggaagaa

SEQ ID NO: 1814796 - RNA, 19 nt, Artificial Sequence
  Description of Artificial Sequence: Synthetic oligonucleotide
  Antisense strand to SEQ ID NO: 1814795
uucuuccgaggauuccaac

SEQ ID NO: 1814797 - RNA, 19 nt, Artificial Sequence
  Description of Artificial Sequence: Synthetic oligonucleotide
  Sense strand starting at position 1504 of SEQ ID NO: 1563491
acgaguaagagcgacgauu

SEQ ID NO: 1814798 - RNA, 19 nt, Artificial Sequence
  Description of Artificial Sequence: Synthetic oligonucleotide
  Antisense strand to SEQ ID NO: 1814797
aaucgucgcucuuacucgu

SEQ ID NO: 1814799 - RNA, 19 nt, Artificial Sequence
  Description of Artificial Sequence: Synthetic oligonucleotide
  Sense strand starting at position 2309 of SEQ ID NO: 1563491
acuacuuguugucuaaaua

SEQ ID NO: 1814800 - RNA, 19 nt, Artificial Sequence
  Description of Artificial Sequence: Synthetic oligonucleotide
  Antisense strand to SEQ ID NO: 1814799
uauuuagacaacaaguagu

SEQ ID NO: 1814801 - RNA, 19 nt, Artificial Sequence
  Description of Artificial Sequence: Synthetic oligonucleotide
  Sense strand starting at position 2310 of SEQ ID NO: 1563491
cuacuuguugucuaaauaa

SEQ ID NO: 1814802 - RNA, 19 nt, Artificial Sequence
  Description of Artificial Sequence: Synthetic oligonucleotide
  Antisense strand to SEQ ID NO: 1814801
uuauuuagacaacaaguag

SEQ ID NO: 1814803 - RNA, 19 nt, Artificial Sequence
  Description of Artificial Sequence: Synthetic oligonucleotide
  Sense strand starting at position 2438 of SEQ ID NO: 1563491
uccuccucaguugaagauu

SEQ ID NO: 1814804 - RNA, 19 nt, Artificial Sequence
  Description of Artificial Sequence: Synthetic oligonucleotide
  Antisense strand to SEQ ID NO: 1814803
aaucuucaacugaggagga

SEQ ID NO: 1814805 - RNA, 19 nt, Artificial Sequence
  Description of Artificial Sequence: Synthetic oligonucleotide
  Sense strand starting at position 2492 of SEQ ID NO: 1563491
aggcucauccugggcuaaa

SEQ ID NO: 1814806 - RNA, 19 nt, Artificial Sequence
  Description of Artificial Sequence: Synthetic oligonucleotide
  Antisense strand to SEQ ID NO: 1814805
uuuagcccaggaugagccu

SEQ ID NO: 1814807 - RNA, 19 nt, Artificial Sequence
  Description of Artificial Sequence: Synthetic oligonucleotide
  Sense strand starting at position 2578 of SEQ ID NO: 1563491
gggaacagcaguuaucagu

SEQ ID NO: 1814808 - RNA, 19 nt, Artificial Sequence
  Description of Artificial Sequence: Synthetic oligonucleotide
  Antisense strand to SEQ ID NO: 1814807
acugauaacugcuguuccc

SEQ ID NO: 1814809 - RNA, 19 nt, Artificial Sequence
  Description of Artificial Sequence: Synthetic oligonucleotide
  Sense strand starting at position 2678 of SEQ ID NO: 1563491
guuugagaaucacugguau

SEQ ID NO: 1814810 - RNA, 19 nt, Artificial Sequence
  Description of Artificial Sequence: Synthetic oligonucleotide
  Antisense strand to SEQ ID NO: 1814809
auaccagugauucucaaac

SEQ ID NO: 1814811 - RNA, 19 nt, Artificial Sequence
  Description of Artificial Sequence: Synthetic oligonucleotide
  Sense strand starting at position 2847 of SEQ ID NO: 1563491
uagaguuugcaguaugaug

SEQ ID NO: 1814812 - RNA, 19 nt, Artificial Sequence
  Description of Artificial Sequence: Synthetic oligonucleotide
  Antisense strand to SEQ ID NO: 1814811
caucauacugcaaacucua

SEQ ID NO: 1814813 - RNA, 19 nt, Artificial Sequence
  Description of Artificial Sequence: Synthetic oligonucleotide
  Sense strand starting at position 2996 of SEQ ID NO: 1563491
gauaaacuguuagugauau

SEQ ID NO: 1814814 - RNA, 19 nt, Artificial Sequence
  Description of Artificial Sequence: Synthetic oligonucleotide
  Antisense strand to SEQ ID NO: 1814813
auaucacuaacaguuuauc

SEQ ID NO: 1814815 - RNA, 19 nt, Artificial Sequence
  Description of Artificial Sequence: Synthetic oligonucleotide
  Sense strand starting at position 3022 of SEQ ID NO: 1563491
gcccuucuuuguccauuua

SEQ ID NO: 1814816 - RNA, 19 nt, Artificial Sequence
  Description of Artificial Sequence: Synthetic oligonucleotide
  Antisense strand to SEQ ID NO: 1814815
uaaauggacaaagaagggc

SEQ ID NO: 1814817 - RNA, 19 nt, Artificial Sequence
  Description of Artificial Sequence: Synthetic oligonucleotide
  Sense strand starting at position 3120 of SEQ ID NO: 1563491
cggucuacaguuuaaaugu

SEQ ID NO: 1814818 - RNA, 19 nt, Artificial Sequence
  Description of Artificial Sequence: Synthetic oligonucleotide
  Antisense strand to SEQ ID NO: 1814817
acauuuaaacuguagaccg

SEQ ID NO: 1814819 - RNA, 19 nt, Artificial Sequence
  Description of Artificial Sequence: Synthetic oligonucleotide
  Sense strand starting at position 3417 of SEQ ID NO: 1563491
aagggaaugccaggauucu

SEQ ID NO: 1814820 - RNA, 19 nt, Artificial Sequence
  Description of Artificial Sequence: Synthetic oligonucleotide
  Antisense strand to SEQ ID NO: 1814819
agaauccuggcauucccuu

SEQ ID NO: 1814821 - RNA, 19 nt, Artificial Sequence
  Description of Artificial Sequence: Synthetic oligonucleotide
  Sense strand starting at position 3423 of SEQ ID NO: 1563491
augccaggauucuuuauua

SEQ ID NO: 1814822 - RNA, 19 nt, Artificial Sequence
  Description of Artificial Sequence: Synthetic oligonucleotide
  Antisense strand to SEQ ID NO: 1814821
uaauaaagaauccuggcau

SEQ ID NO: 1814823 - RNA, 19 nt, Artificial Sequence
  Description of Artificial Sequence: Synthetic oligonucleotide
  Sense strand starting at position 3463 of SEQ ID NO: 1563491
agguaaauguuaucacuaa

SEQ ID NO: 1814824 - RNA, 19 nt, Artificial Sequence
  Description of Artificial Sequence: Synthetic oligonucleotide
  Antisense strand to SEQ ID NO: 1814823
uuagugauaacauuuaccu

SEQ ID NO: 1814825 - RNA, 19 nt, Artificial Sequence
  Description of Artificial Sequence: Synthetic oligonucleotide
  Sense strand starting at position 3550 of SEQ ID NO: 1563491
uggcucauacacugagauu

SEQ ID NO: 1814826 - RNA, 19 nt, Artificial Sequence
  Description of Artificial Sequence: Synthetic oligonucleotide
  Antisense strand to SEQ ID NO: 1814825
aaucucaguguaugagcca

SEQ ID NO: 1814827 - RNA, 19 nt, Artificial Sequence
  Description of Artificial Sequence: Synthetic oligonucleotide
  Sense strand starting at position 3559 of SEQ ID NO: 1563491
cacugagauuacuuagugu

SEQ ID NO: 1814828 - RNA, 19 nt, Artificial Sequence
  Description of Artificial Sequence: Synthetic oligonucleotide
  Antisense strand to SEQ ID NO: 1814827
acacuaaguaaucucagug

SEQ ID NO: 1814829 - RNA, 19 nt, Artificial Sequence
  Description of Artificial Sequence: Synthetic oligonucleotide
  Sense strand starting at position 3650 of SEQ ID NO: 1563491
auuugcuuuggcugaaguu

SEQ ID NO: 1814830 - RNA, 19 nt, Artificial Sequence
  Description of Artificial Sequence: Synthetic oligonucleotide
  Antisense strand to SEQ ID NO: 1814829
aacuucagccaaagcaaau

SEQ ID NO: 1814831 - RNA, 19 nt, Artificial Sequence
  Description of Artificial Sequence: Synthetic oligonucleotide
  Sense strand starting at position 3668 of SEQ ID NO: 1563491
ugucccuuggucuaauagu

SEQ ID NO: 1814832 - RNA, 19 nt, Artificial Sequence
  Description of Artificial Sequence: Synthetic oligonucleotide
  Antisense strand to SEQ ID NO: 1814831
acuauuagaccaagggaca

SEQ ID NO: 1814833 - RNA, 19 nt, Artificial Sequence
  Description of Artificial Sequence: Synthetic oligonucleotide
  Sense strand starting at position 3676 of SEQ ID NO: 1563491
ggucuaauaguauauucua

SEQ ID NO: 1814834 - RNA, 19 nt, Artificial Sequence
  Description of Artificial Sequence: Synthetic oligonucleotide
  Antisense strand to SEQ ID NO: 1814833
uagaauauacuauuagacc

SEQ ID NO: 1814835 - RNA, 19 nt, Artificial Sequence
  Description of Artificial Sequence: Synthetic oligonucleotide
  Sense strand starting at position 3723 of SEQ ID NO: 1563491
auuaguguccuguaaugag

SEQ ID NO: 1814836 - RNA, 19 nt, Artificial Sequence
  Description of Artificial Sequence: Synthetic oligonucleotide
  Antisense strand to SEQ ID NO: 1814835
cucauuacaggacacuaau

SEQ ID NO: 1814837 - RNA, 19 nt, Artificial Sequence
  Description of Artificial Sequence: Synthetic oligonucleotide
  Sense strand starting at position 3842 of SEQ ID NO: 1563491
gccucagagcauggacauu

SEQ ID NO: 1814838 - RNA, 19 nt, Artificial Sequence
  Description of Artificial Sequence: Synthetic oligonucleotide
  Antisense strand to SEQ ID NO: 1814837
aauguccaugcucugaggc

SEQ ID NO: 1814839 - RNA, 19 nt, Artificial Sequence
  Description of Artificial Sequence: Synthetic oligonucleotide
  Sense strand starting at position 3891 of SEQ ID NO: 1563491
uuuguaacaccuggauagu

SEQ ID NO: 1814840 - RNA, 19 nt, Artificial Sequence
  Description of Artificial Sequence: Synthetic oligonucleotide
  Antisense strand to SEQ ID NO: 1814839
acuauccagguguuacaaa

SEQ ID NO: 1814841 - RNA, 19 nt, Artificial Sequence
  Description of Artificial Sequence: Synthetic oligonucleotide
  Sense strand starting at position 3892 of SEQ ID NO: 1563491
uuguaacaccuggauagua

SEQ ID NO: 1814842 - RNA, 19 nt, Artificial Sequence
  Description of Artificial Sequence: Synthetic oligonucleotide
  Antisense strand to SEQ ID NO: 1814841
uacuauccagguguuacaa

SEQ ID NO: 1814843 - RNA, 19 nt, Artificial Sequence
  Description of Artificial Sequence: Synthetic oligonucleotide
  Sense strand starting at position 3900 of SEQ ID NO: 1563491
ccuggauaguaagacauuu

SEQ ID NO: 1814844 - RNA, 19 nt, Artificial Sequence
  Description of Artificial Sequence: Synthetic oligonucleotide
  Antisense strand to SEQ ID NO: 1814843
aaaugucuuacuauccagg

SEQ ID NO: 1814845 - RNA, 19 nt, Artificial Sequence
  Description of Artificial Sequence: Synthetic oligonucleotide
  Sense strand starting at position 246 of SEQ ID NO: 1563492
aguaucuggaugugagaau

SEQ ID NO: 1814846 - RNA, 19 nt, Artificial Sequence
  Description of Artificial Sequence: Synthetic oligonucleotide
  Antisense strand to SEQ ID NO: 1814845
auucucacauccagauacu

SEQ ID NO: 1814847 - RNA, 19 nt, Artificial Sequence
  Description of Artificial Sequence: Synthetic oligonucleotide
  Sense strand starting at position 448 of SEQ ID NO: 1563492
ccuggagagaugugauuac

SEQ ID NO: 1814848 - RNA, 19 nt, Artificial Sequence
  Description of Artificial Sequence: Synthetic oligonucleotide
  Antisense strand to SEQ ID NO: 1814847
guaaucacaucucuccagg

SEQ ID NO: 1814849 - RNA, 19 nt, Artificial Sequence
  Description of Artificial Sequence: Synthetic oligonucleotide
  Sense strand starting at position 452 of SEQ ID NO: 1563492
gagagaugugauuacuguc

SEQ ID NO: 1814850 - RNA, 19 nt, Artificial Sequence
  Description of Artificial Sequence: Synthetic oligonucleotide
  Antisense strand to SEQ ID NO: 1814849
gacaguaaucacaucucuc

SEQ ID NO: 1814851 - RNA, 19 nt, Artificial Sequence
  Description of Artificial Sequence: Synthetic oligonucleotide
  Sense strand starting at position 520 of SEQ ID NO: 1563492
cuugaagggucuccaggaa

SEQ ID NO: 1814852 - RNA, 19 nt, Artificial Sequence
  Description of Artificial Sequence: Synthetic oligonucleotide
  Antisense strand to SEQ ID NO: 1814851
uuccuggagacccuucaag

SEQ ID NO: 1814853 - RNA, 19 nt, Artificial Sequence
  Description of Artificial Sequence: Synthetic oligonucleotide
  Sense strand starting at position 532 of SEQ ID NO: 1563492
ccaggaagcuuucucuaau

SEQ ID NO: 1814854 - RNA, 19 nt, Artificial Sequence
  Description of Artificial Sequence: Synthetic oligonucleotide
  Antisense strand to SEQ ID NO: 1814853
auuagagaaagcuuccugg

SEQ ID NO: 1814855 - RNA, 19 nt, Artificial Sequence
  Description of Artificial Sequence: Synthetic oligonucleotide
  Sense strand starting at position 720 of SEQ ID NO: 1563492
auagaauauuguccucagu

SEQ ID NO: 1814856 - RNA, 19 nt, Artificial Sequence
  Description of Artificial Sequence: Synthetic oligonucleotide
  Antisense strand to SEQ ID NO: 1814855
acugaggacaauauucuau

SEQ ID NO: 1814857 - RNA, 19 nt, Artificial Sequence
  Description of Artificial Sequence: Synthetic oligonucleotide
  Sense strand starting at position 722 of SEQ ID NO: 1563492
agaauauuguccucaguac

SEQ ID NO: 1814858 - RNA, 19 nt, Artificial Sequence
  Description of Artificial Sequence: Synthetic oligonucleotide
  Antisense strand to SEQ ID NO: 1814857
guacugaggacaauauucu

SEQ ID NO: 1814859 - RNA, 19 nt, Artificial Sequence
  Description of Artificial Sequence: Synthetic oligonucleotide
  Sense strand starting at position 824 of SEQ ID NO: 1563492
cuguccucgcccguuagua

SEQ ID NO: 1814860 - RNA, 19 nt, Artificial Sequence
  Description of Artificial Sequence: Synthetic oligonucleotide
  Antisense strand to SEQ ID NO: 1814859
uacuaacgggcgaggacag

SEQ ID NO: 1814861 - RNA, 19 nt, Artificial Sequence
  Description of Artificial Sequence: Synthetic oligonucleotide
  Sense strand starting at position 825 of SEQ ID NO: 1563492
uguccucgcccguuaguau

SEQ ID NO: 1814862 - RNA, 19 nt, Artificial Sequence
  Description of Artificial Sequence: Synthetic oligonucleotide
  Antisense strand to SEQ ID NO: 1814861
auacuaacgggcgaggaca

SEQ ID NO: 1814863 - RNA, 19 nt, Artificial Sequence
  Description of Artificial Sequence: Synthetic oligonucleotide
  Sense strand starting at position 1396 of SEQ ID NO: 1563492
agaugaaacccauguccuu

SEQ ID NO: 1814864 - RNA, 19 nt, Artificial Sequence
  Description of Artificial Sequence: Synthetic oligonucleotide
  Antisense strand to SEQ ID NO: 1814863
aaggacauggguuucaucu

SEQ ID NO: 1814865 - RNA, 19 nt, Artificial Sequence
  Description of Artificial Sequence: Synthetic oligonucleotide
  Sense strand starting at position 1402 of SEQ ID NO: 1563492
aacccauguccuugggaca

SEQ ID NO: 1814866 - RNA, 19 nt, Artificial Sequence
  Description of Artificial Sequence: Synthetic oligonucleotide
  Antisense strand to SEQ ID NO: 1814865
ugucccaaggacauggguu

SEQ ID NO: 1814867 - RNA, 19 nt, Artificial Sequence
  Description of Artificial Sequence: Synthetic oligonucleotide
  Sense strand starting at position 1422 of SEQ ID NO: 1563492
ggugaaagaugucuggaca

SEQ ID NO: 1814868 - RNA, 19 nt, Artificial Sequence
  Description of Artificial Sequence: Synthetic oligonucleotide
  Antisense strand to SEQ ID NO: 1814867
uguccagacaucuuucacc

SEQ ID NO: 1814869 - RNA, 19 nt, Artificial Sequence
  Description of Artificial Sequence: Synthetic oligonucleotide
  Sense strand starting at position 1423 of SEQ ID NO: 1563492
gugaaagaugucuggacag

SEQ ID NO: 1814870 - RNA, 19 nt, Artificial Sequence
  Description of Artificial Sequence: Synthetic oligonucleotide
  Antisense strand to SEQ ID NO: 1814869
cuguccagacaucuuucac

SEQ ID NO: 1814871 - RNA, 19 nt, Artificial Sequence
  Description of Artificial Sequence: Synthetic oligonucleotide
  Sense strand starting at position 1619 of SEQ ID NO: 1563492
ggucucaucucaccaugga

SEQ ID NO: 1814872 - RNA, 19 nt, Artificial Sequence
  Description of Artificial Sequence: Synthetic oligonucleotide
  Antisense strand to SEQ ID NO: 1814871
uccauggugagaugagacc

SEQ ID NO: 1814873 - RNA, 19 nt, Artificial Sequence
  Description of Artificial Sequence: Synthetic oligonucleotide
  Sense strand starting at position 2020 of SEQ ID NO: 1563492
gggcuaagauuagucccau

SEQ ID NO: 1814874 - RNA, 19 nt, Artificial Sequence
  Description of Artificial Sequence: Synthetic oligonucleotide
  Antisense strand to SEQ ID NO: 1814873
augggacuaaucuuagccc

SEQ ID NO: 1814875 - RNA, 19 nt, Artificial Sequence
  Description of Artificial Sequence: Synthetic oligonucleotide
  Sense strand starting at position 2277 of SEQ ID NO: 1563492
gggugcagcggguauuuau

SEQ ID NO: 1814876 - RNA, 19 nt, Artificial Sequence
  Description of Artificial Sequence: Synthetic oligonucleotide
  Antisense strand to SEQ ID NO: 1814875
auaaauacccgcugcaccc

SEQ ID NO: 1814877 - RNA, 19 nt, Artificial Sequence
  Description of Artificial Sequence: Synthetic oligonucleotide
  Sense strand starting at position 3002 of SEQ ID NO: 1563492
aucauauuguucuccugga

SEQ ID NO: 1814878 - RNA, 19 nt, Artificial Sequence
  Description of Artificial Sequence: Synthetic oligonucleotide
  Antisense strand to SEQ ID NO: 1814877
uccaggagaacaauaugau

SEQ ID NO: 1814879 - RNA, 19 nt, Artificial Sequence
  Description of Artificial Sequence: Synthetic oligonucleotide
  Sense strand starting at position 3003 of SEQ ID NO: 1563492
ucauauuguucuccuggau

SEQ ID NO: 1814880 - RNA, 19 nt, Artificial Sequence
  Description of Artificial Sequence: Synthetic oligonucleotide
  Antisense strand to SEQ ID NO: 1814879
auccaggagaacaauauga

SEQ ID NO: 1814881 - RNA, 19 nt, Artificial Sequence
  Description of Artificial Sequence: Synthetic oligonucleotide
  Sense strand starting at position 3735 of SEQ ID NO: 1563492
uagggaacuccucagugca

SEQ ID NO: 1814882 - RNA, 19 nt, Artificial Sequence
  Description of Artificial Sequence: Synthetic oligonucleotide
  Antisense strand to SEQ ID NO: 1814881
ugcacugaggaguucccua

SEQ ID NO: 1814883 - RNA, 19 nt, Artificial Sequence
  Description of Artificial Sequence: Synthetic oligonucleotide
  Sense strand starting at position 3857 of SEQ ID NO: 1563492
acaauugugcuugagcaca

SEQ ID NO: 1814884 - RNA, 19 nt, Artificial Sequence
  Description of Artificial Sequence: Synthetic oligonucleotide
  Antisense strand to SEQ ID NO: 1814883
ugugcucaagcacaauugu

SEQ ID NO: 1814885 - RNA, 19 nt, Artificial Sequence
  Description of Artificial Sequence: Synthetic oligonucleotide
  Sense strand starting at position 136 of SEQ ID NO: 1563493
gaggaucagaguugagcau

SEQ ID NO: 1814886 - RNA, 19 nt, Artificial Sequence
  Description of Artificial Sequence: Synthetic oligonucleotide
  Antisense strand to SEQ ID NO: 1814885
augcucaacucugauccuc

SEQ ID NO: 1814887 - RNA, 19 nt, Artificial Sequence
  Description of Artificial Sequence: Synthetic oligonucleotide
  Sense strand starting at position 242 of SEQ ID NO: 1563493
aguaucuggaugugagaau

SEQ ID NO: 1814888 - RNA, 19 nt, Artificial Sequence
  Description of Artificial Sequence: Synthetic oligonucleotide
  Antisense strand to SEQ ID NO: 1814887
auucucacauccagauacu

SEQ ID NO: 1814889 - RNA, 19 nt, Artificial Sequence
  Description of Artificial Sequence: Synthetic oligonucleotide
  Sense strand starting at position 444 of SEQ ID NO: 1563493
ccuggagagaugugauuac

SEQ ID NO: 1814890 - RNA, 19 nt, Artificial Sequence
  Description of Artificial Sequence: Synthetic oligonucleotide
  Antisense strand to SEQ ID NO: 1814889
guaaucacaucucuccagg

SEQ ID NO: 1814891 - RNA, 19 nt, Artificial Sequence
  Description of Artificial Sequence: Synthetic oligonucleotide
  Sense strand starting at position 448 of SEQ ID NO: 1563493
gagagaugugauuacuguc

SEQ ID NO: 1814892 - RNA, 19 nt, Artificial Sequence
  Description of Artificial Sequence: Synthetic oligonucleotide
  Antisense strand to SEQ ID NO: 1814891
gacaguaaucacaucucuc

SEQ ID NO: 1814893 - RNA, 19 nt, Artificial Sequence
  Description of Artificial Sequence: Synthetic oligonucleotide
  Sense strand starting at position 516 of SEQ ID NO: 1563493
cuugaagggucuccaggaa

SEQ ID NO: 1814894 - RNA, 19 nt, Artificial Sequence
  Description of Artificial Sequence: Synthetic oligonucleotide
  Antisense strand to SEQ ID NO: 1814893
uuccuggagacccuucaag

SEQ ID NO: 1814895 - RNA, 19 nt, Artificial Sequence
  Description of Artificial Sequence: Synthetic oligonucleotide
  Sense strand starting at position 716 of SEQ ID NO: 1563493
auagaauauuguccucagu

SEQ ID NO: 1814896 - RNA, 19 nt, Artificial Sequence
  Description of Artificial Sequence: Synthetic oligonucleotide
  Antisense strand to SEQ ID NO: 1814895
acugaggacaauauucuau

SEQ ID NO: 1814897 - RNA, 19 nt, Artificial Sequence
  Description of Artificial Sequence: Synthetic oligonucleotide
  Sense strand starting at position 718 of SEQ ID NO: 1563493
agaauauuguccucaguac

SEQ ID NO: 1814898 - RNA, 19 nt, Artificial Sequence
  Description of Artificial Sequence: Synthetic oligonucleotide
  Antisense strand to SEQ ID NO: 1814897
guacugaggacaauauucu

SEQ ID NO: 1814899 - RNA, 19 nt, Artificial Sequence
  Description of Artificial Sequence: Synthetic oligonucleotide
  Sense strand starting at position 820 of SEQ ID NO: 1563493
cuguccucgcccguuagua

SEQ ID NO: 1814900 - RNA, 19 nt, Artificial Sequence
  Description of Artificial Sequence: Synthetic oligonucleotide
  Antisense strand to SEQ ID NO: 1814899
uacuaacgggcgaggacag

SEQ ID NO: 1814901 - RNA, 19 nt, Artificial Sequence
  Description of Artificial Sequence: Synthetic oligonucleotide
  Sense strand starting at position 821 of SEQ ID NO: 1563493
uguccucgcccguuaguau

SEQ ID NO: 1814902 - RNA, 19 nt, Artificial Sequence
  Description of Artificial Sequence: Synthetic oligonucleotide
  Antisense strand to SEQ ID NO: 1814901
auacuaacgggcgaggaca

SEQ ID NO: 1814903 - RNA, 19 nt, Artificial Sequence
  Description of Artificial Sequence: Synthetic oligonucleotide
  Sense strand starting at position 1395 of SEQ ID NO: 1563493
agaugaaacccauguccuu

SEQ ID NO: 1814904 - RNA, 19 nt, Artificial Sequence
  Description of Artificial Sequence: Synthetic oligonucleotide
  Antisense strand to SEQ ID NO: 1814903
aaggacauggguuucaucu

SEQ ID NO: 1814905 - RNA, 19 nt, Artificial Sequence
  Description of Artificial Sequence: Synthetic oligonucleotide
  Sense strand starting at position 1401 of SEQ ID NO: 1563493
aacccauguccuugggaca

SEQ ID NO: 1814906 - RNA, 19 nt, Artificial Sequence
  Description of Artificial Sequence: Synthetic oligonucleotide
  Antisense strand to SEQ ID NO: 1814905
ugucccaaggacauggguu

SEQ ID NO: 1814907 - RNA, 19 nt, Artificial Sequence
  Description of Artificial Sequence: Synthetic oligonucleotide
  Sense strand starting at position 1421 of SEQ ID NO: 1563493
ggugaaagaugucuggaca

SEQ ID NO: 1814908 - RNA, 19 nt, Artificial Sequence
  Description of Artificial Sequence: Synthetic oligonucleotide
  Antisense strand to SEQ ID NO: 1814907
uguccagacaucuuucacc

SEQ ID NO: 1814909 - RNA, 19 nt, Artificial Sequence
  Description of Artificial Sequence: Synthetic oligonucleotide
  Sense strand starting at position 1422 of SEQ ID NO: 1563493
gugaaagaugucuggacag

SEQ ID NO: 1814910 - RNA, 19 nt, Artificial Sequence
  Description of Artificial Sequence: Synthetic oligonucleotide
  Antisense strand to SEQ ID NO: 1814909
cuguccagacaucuuucac

SEQ ID NO: 1814911 - RNA, 19 nt, Artificial Sequence
  Description of Artificial Sequence: Synthetic oligonucleotide
  Sense strand starting at position 1618 of SEQ ID NO: 1563493
ggucucaucucaccaugga

SEQ ID NO: 1814912 - RNA, 19 nt, Artificial Sequence
  Description of Artificial Sequence: Synthetic oligonucleotide
  Antisense strand to SEQ ID NO: 1814911
uccauggugagaugagacc

SEQ ID NO: 1814913 - RNA, 19 nt, Artificial Sequence
  Description of Artificial Sequence: Synthetic oligonucleotide
  Sense strand starting at position 2019 of SEQ ID NO: 1563493
gggcuaagauuagucccau

SEQ ID NO: 1814914 - RNA, 19 nt, Artificial Sequence
  Description of Artificial Sequence: Synthetic oligonucleotide
  Antisense strand to SEQ ID NO: 1814913
augggacuaaucuuagccc

SEQ ID NO: 1814915 - RNA, 19 nt, Artificial Sequence
  Description of Artificial Sequence: Synthetic oligonucleotide
  Sense strand starting at position 2276 of SEQ ID NO: 1563493
gggugcagcggguauuuau

SEQ ID NO: 1814916 - RNA, 19 nt, Artificial Sequence
  Description of Artificial Sequence: Synthetic oligonucleotide
  Antisense strand to SEQ ID NO: 1814915
auaaauacccgcugcaccc

SEQ ID NO: 1814917 - RNA, 19 nt, Artificial Sequence
  Description of Artificial Sequence: Synthetic oligonucleotide
  Sense strand starting at position 3001 of SEQ ID NO: 1563493
aucauauuguucuccugga

SEQ ID NO: 1814918 - RNA, 19 nt, Artificial Sequence
  Description of Artificial Sequence: Synthetic oligonucleotide
  Antisense strand to SEQ ID NO: 1814917
uccaggagaacaauaugau

SEQ ID NO: 1814919 - RNA, 19 nt, Artificial Sequence
  Description of Artificial Sequence: Synthetic oligonucleotide
  Sense strand starting at position 3002 of SEQ ID NO: 1563493
ucauauuguucuccuggau

SEQ ID NO: 1814920 - RNA, 19 nt, Artificial Sequence
  Description of Artificial Sequence: Synthetic oligonucleotide
  Antisense strand to SEQ ID NO: 1814919
auccaggagaacaauauga

SEQ ID NO: 1814921 - RNA, 19 nt, Artificial Sequence
  Description of Artificial Sequence: Synthetic oligonucleotide
  Sense strand starting at position 3734 of SEQ ID NO: 1563493
uagggaacuccucagugca

SEQ ID NO: 1814922 - RNA, 19 nt, Artificial Sequence
  Description of Artificial Sequence: Synthetic oligonucleotide
  Antisense strand to SEQ ID NO: 1814921
ugcacugaggaguucccua

SEQ ID NO: 1814923 - RNA, 19 nt, Artificial Sequence
  Description of Artificial Sequence: Synthetic oligonucleotide
  Sense strand starting at position 3856 of SEQ ID NO: 1563493
acaauugugcuugagcaca

SEQ ID NO: 1814924 - RNA, 19 nt, Artificial Sequence
  Description of Artificial Sequence: Synthetic oligonucleotide
  Antisense strand to SEQ ID NO: 1814923
ugugcucaagcacaauugu

SEQ ID NO: 1814925 - RNA, 19 nt, Artificial Sequence
  Description of Artificial Sequence: Synthetic oligonucleotide
  Sense strand starting at position 246 of SEQ ID NO: 1563494
aguaucuggaugugagaau

SEQ ID NO: 1814926 - RNA, 19 nt, Artificial Sequence
  Description of Artificial Sequence: Synthetic oligonucleotide
  Antisense strand to SEQ ID NO: 1814925
auucucacauccagauacu

SEQ ID NO: 1814927 - RNA, 19 nt, Artificial Sequence
  Description of Artificial Sequence: Synthetic oligonucleotide
  Sense strand starting at position 448 of SEQ ID NO: 1563494
ccuggagagaugugauuac

SEQ ID NO: 1814928 - RNA, 19 nt, Artificial Sequence
  Description of Artificial Sequence: Synthetic oligonucleotide
  Antisense strand to SEQ ID NO: 1814927
guaaucacaucucuccagg

SEQ ID NO: 1814929 - RNA, 19 nt, Artificial Sequence
  Description of Artificial Sequence: Synthetic oligonucleotide
  Sense strand starting at position 452 of SEQ ID NO: 1563494
gagagaugugauuacuguc

SEQ ID NO: 1814930 - RNA, 19 nt, Artificial Sequence
  Description of Artificial Sequence: Synthetic oligonucleotide
  Antisense strand to SEQ ID NO: 1814929
gacaguaaucacaucucuc

SEQ ID NO: 1814931 - RNA, 19 nt, Artificial Sequence
  Description of Artificial Sequence: Synthetic oligonucleotide
  Sense strand starting at position 520 of SEQ ID NO: 1563494
cuugaagggucuccaggaa

SEQ ID NO: 1814932 - RNA, 19 nt, Artificial Sequence
  Description of Artificial Sequence: Synthetic oligonucleotide
  Antisense strand to SEQ ID NO: 1814931
uuccuggagacccuucaag

SEQ ID NO: 1814933 - RNA, 19 nt, Artificial Sequence
  Description of Artificial Sequence: Synthetic oligonucleotide
  Sense strand starting at position 532 of SEQ ID NO: 1563494
ccaggaagcuuucucuaau

SEQ ID NO: 1814934 - RNA, 19 nt, Artificial Sequence
  Description of Artificial Sequence: Synthetic oligonucleotide
  Antisense strand to SEQ ID NO: 1814933
auuagagaaagcuuccugg

SEQ ID NO: 1814935 - RNA, 19 nt, Artificial Sequence
  Description of Artificial Sequence: Synthetic oligonucleotide
  Sense strand starting at position 720 of SEQ ID NO: 1563494
auagaauauuguccucagu

SEQ ID NO: 1814936 - RNA, 19 nt, Artificial Sequence
  Description of Artificial Sequence: Synthetic oligonucleotide
  Antisense strand to SEQ ID NO: 1814935
acugaggacaauauucuau

SEQ ID NO: 1814937 - RNA, 19 nt, Artificial Sequence
  Description of Artificial Sequence: Synthetic oligonucleotide
  Sense strand starting at position 722 of SEQ ID NO: 1563494
agaauauuguccucaguac

SEQ ID NO: 1814938 - RNA, 19 nt, Artificial Sequence
  Description of Artificial Sequence: Synthetic oligonucleotide
  Antisense strand to SEQ ID NO: 1814937
guacugaggacaauauucu

SEQ ID NO: 1814939 - RNA, 19 nt, Artificial Sequence
  Description of Artificial Sequence: Synthetic oligonucleotide
  Sense strand starting at position 824 of SEQ ID NO: 1563494
cuguccucgcccguuagua

SEQ ID NO: 1814940 - RNA, 19 nt, Artificial Sequence
  Description of Artificial Sequence: Synthetic oligonucleotide
  Antisense strand to SEQ ID NO: 1814939
uacuaacgggcgaggacag

SEQ ID NO: 1814941 - RNA, 19 nt, Artificial Sequence
  Description of Artificial Sequence: Synthetic oligonucleotide
  Sense strand starting at position 825 of SEQ ID NO: 1563494
uguccucgcccguuaguau

SEQ ID NO: 1814942 - RNA, 19 nt, Artificial Sequence
  Description of Artificial Sequence: Synthetic oligonucleotide
  Antisense strand to SEQ ID NO: 1814941
auacuaacgggcgaggaca

SEQ ID NO: 1814943 - RNA, 19 nt, Artificial Sequence
  Description of Artificial Sequence: Synthetic oligonucleotide
  Sense strand starting at position 1396 of SEQ ID NO: 1563494
agaugaaacccauguccuu

SEQ ID NO: 1814944 - RNA, 19 nt, Artificial Sequence
  Description of Artificial Sequence: Synthetic oligonucleotide
  Antisense strand to SEQ ID NO: 1814943
aaggacauggguuucaucu

SEQ ID NO: 1814945 - RNA, 19 nt, Artificial Sequence
  Description of Artificial Sequence: Synthetic oligonucleotide
  Sense strand starting at position 1402 of SEQ ID NO: 1563494
aacccauguccuugggaca

SEQ ID NO: 1814946 - RNA, 19 nt, Artificial Sequence
  Description of Artificial Sequence: Synthetic oligonucleotide
  Antisense strand to SEQ ID NO: 1814945
ugucccaaggacauggguu

SEQ ID NO: 1814947 - RNA, 19 nt, Artificial Sequence
  Description of Artificial Sequence: Synthetic oligonucleotide
  Sense strand starting at position 1422 of SEQ ID NO: 1563494
ggugaaagaugucuggaca

SEQ ID NO: 1814948 - RNA, 19 nt, Artificial Sequence
  Description of Artificial Sequence: Synthetic oligonucleotide
  Antisense strand to SEQ ID NO: 1814947
uguccagacaucuuucacc

SEQ ID NO: 1814949 - RNA, 19 nt, Artificial Sequence
  Description of Artificial Sequence: Synthetic oligonucleotide
  Sense strand starting at position 1423 of SEQ ID NO: 1563494
gugaaagaugucuggacag

SEQ ID NO: 1814950 - RNA, 19 nt, Artificial Sequence
  Description of Artificial Sequence: Synthetic oligonucleotide
  Antisense strand to SEQ ID NO: 1814949
cuguccagacaucuuucac

SEQ ID NO: 1814951 - RNA, 19 nt, Artificial Sequence
  Description of Artificial Sequence: Synthetic oligonucleotide
  Sense strand starting at position 1619 of SEQ ID NO: 1563494
ggucucaucucaccaugga

SEQ ID NO: 1814952 - RNA, 19 nt, Artificial Sequence
  Description of Artificial Sequence: Synthetic oligonucleotide
  Antisense strand to SEQ ID NO: 1814951
uccauggugagaugagacc

SEQ ID NO: 1814953 - RNA, 19 nt, Artificial Sequence
  Description of Artificial Sequence: Synthetic oligonucleotide
  Sense strand starting at position 2020 of SEQ ID NO: 1563494
gggcuaagauuagucccau

SEQ ID NO: 1814954 - RNA, 19 nt, Artificial Sequence
  Description of Artificial Sequence: Synthetic oligonucleotide
  Antisense strand to SEQ ID NO: 1814953
augggacuaaucuuagccc

SEQ ID NO: 1814955 - RNA, 19 nt, Artificial Sequence
  Description of Artificial Sequence: Synthetic oligonucleotide
  Sense strand starting at position 2277 of SEQ ID NO: 1563494
gggugcagcggguauuuau

SEQ ID NO: 1814956 - RNA, 19 nt, Artificial Sequence
  Description of Artificial Sequence: Synthetic oligonucleotide
  Antisense strand to SEQ ID NO: 1814955
auaaauacccgcugcaccc

SEQ ID NO: 1814957 - RNA, 19 nt, Artificial Sequence
  Description of Artificial Sequence: Synthetic oligonucleotide
  Sense strand starting at position 3002 of SEQ ID NO: 1563494
aucauauuguucuccugga

SEQ ID NO: 1814958 - RNA, 19 nt, Artificial Sequence
  Description of Artificial Sequence: Synthetic oligonucleotide
  Antisense strand to SEQ ID NO: 1814957
uccaggagaacaauaugau

SEQ ID NO: 1814959 - RNA, 19 nt, Artificial Sequence
  Description of Artificial Sequence: Synthetic oligonucleotide
  Sense strand starting at position 3003 of SEQ ID NO: 1563494
ucauauuguucuccuggau

SEQ ID NO: 1814960 - RNA, 19 nt, Artificial Sequence
  Description of Artificial Sequence: Synthetic oligonucleotide
  Antisense strand to SEQ ID NO: 1814959
auccaggagaacaauauga

SEQ ID NO: 1814961 - RNA, 19 nt, Artificial Sequence
  Description of Artificial Sequence: Synthetic oligonucleotide
  Sense strand starting at position 3735 of SEQ ID NO: 1563494
uagggaacuccucagugca

SEQ ID NO: 1814962 - RNA, 19 nt, Artificial Sequence
  Description of Artificial Sequence: Synthetic oligonucleotide
  Antisense strand to SEQ ID NO: 1814961
ugcacugaggaguucccua

SEQ ID NO: 1814963 - RNA, 19 nt, Artificial Sequence
  Description of Artificial Sequence: Synthetic oligonucleotide
  Sense strand starting at position 3857 of SEQ ID NO: 1563494
acaauugugcuugagcaca

SEQ ID NO: 1814964 - RNA, 19 nt, Artificial Sequence
  Description of Artificial Sequence: Synthetic oligonucleotide
  Antisense strand to SEQ ID NO: 1814963
ugugcucaagcacaauugu

SEQ ID NO: 1814965 - RNA, 19 nt, Artificial Sequence
  Description of Artificial Sequence: Synthetic oligonucleotide
  Sense strand starting at position 136 of SEQ ID NO: 1563495
gaggaucagaguugagcau

SEQ ID NO: 1814966 - RNA, 19 nt, Artificial Sequence
  Description of Artificial Sequence: Synthetic oligonucleotide
  Antisense strand to SEQ ID NO: 1814965
augcucaacucugauccuc

SEQ ID NO: 1814967 - RNA, 19 nt, Artificial Sequence
  Description of Artificial Sequence: Synthetic oligonucleotide
  Sense strand starting at position 242 of SEQ ID NO: 1563495
aguaucuggaugugagaau

SEQ ID NO: 1814968 - RNA, 19 nt, Artificial Sequence
  Description of Artificial Sequence: Synthetic oligonucleotide
  Antisense strand to SEQ ID NO: 1814967
auucucacauccagauacu

SEQ ID NO: 1814969 - RNA, 19 nt, Artificial Sequence
  Description of Artificial Sequence: Synthetic oligonucleotide
  Sense strand starting at position 444 of SEQ ID NO: 1563495
ccuggagagaugugauuac

SEQ ID NO: 1814970 - RNA, 19 nt, Artificial Sequence
  Description of Artificial Sequence: Synthetic oligonucleotide
  Antisense strand to SEQ ID NO: 1814969
guaaucacaucucuccagg

SEQ ID NO: 1814971 - RNA, 19 nt, Artificial Sequence
  Description of Artificial Sequence: Synthetic oligonucleotide
  Sense strand starting at position 448 of SEQ ID NO: 1563495
gagagaugugauuacuguc

SEQ ID NO: 1814972 - RNA, 19 nt, Artificial Sequence
  Description of Artificial Sequence: Synthetic oligonucleotide
  Antisense strand to SEQ ID NO: 1814971
gacaguaaucacaucucuc

SEQ ID NO: 1814973 - RNA, 19 nt, Artificial Sequence
  Description of Artificial Sequence: Synthetic oligonucleotide
  Sense strand starting at position 516 of SEQ ID NO: 1563495
cuugaagggucuccaggaa

SEQ ID NO: 1814974 - RNA, 19 nt, Artificial Sequence
  Description of Artificial Sequence: Synthetic oligonucleotide
  Antisense strand to SEQ ID NO: 1814973
uuccuggagacccuucaag

SEQ ID NO: 1814975 - RNA, 19 nt, Artificial Sequence
  Description of Artificial Sequence: Synthetic oligonucleotide
  Sense strand starting at position 716 of SEQ ID NO: 1563495
auagaauauuguccucagu

SEQ ID NO: 1814976 - RNA, 19 nt, Artificial Sequence
  Description of Artificial Sequence: Synthetic oligonucleotide
  Antisense strand to SEQ ID NO: 1814975
acugaggacaauauucuau

SEQ ID NO: 1814977 - RNA, 19 nt, Artificial Sequence
  Description of Artificial Sequence: Synthetic oligonucleotide
  Sense strand starting at position 718 of SEQ ID NO: 1563495
agaauauuguccucaguac

SEQ ID NO: 1814978 - RNA, 19 nt, Artificial Sequence
  Description of Artificial Sequence: Synthetic oligonucleotide
  Antisense strand to SEQ ID NO: 1814977
guacugaggacaauauucu

SEQ ID NO: 1814979 - RNA, 19 nt, Artificial Sequence
  Description of Artificial Sequence: Synthetic oligonucleotide
  Sense strand starting at position 820 of SEQ ID NO: 1563495
cuguccucgcccguuagua

SEQ ID NO: 1814980 - RNA, 19 nt, Artificial Sequence
  Description of Artificial Sequence: Synthetic oligonucleotide
  Antisense strand to SEQ ID NO: 1814979
uacuaacgggcgaggacag

SEQ ID NO: 1814981 - RNA, 19 nt, Artificial Sequence
  Description of Artificial Sequence: Synthetic oligonucleotide
  Sense strand starting at position 821 of SEQ ID NO: 1563495
uguccucgcccguuaguau

SEQ ID NO: 1814982 - RNA, 19 nt, Artificial Sequence
  Description of Artificial Sequence: Synthetic oligonucleotide
  Antisense strand to SEQ ID NO: 1814981
auacuaacgggcgaggaca

SEQ ID NO: 1814983 - RNA, 19 nt, Artificial Sequence
  Description of Artificial Sequence: Synthetic oligonucleotide
  Sense strand starting at position 1395 of SEQ ID NO: 1563495
agaugaaacccauguccuu

SEQ ID NO: 1814984 - RNA, 19 nt, Artificial Sequence
  Description of Artificial Sequence: Synthetic oligonucleotide
  Antisense strand to SEQ ID NO: 1814983
aaggacauggguuucaucu

SEQ ID NO: 1814985 - RNA, 19 nt, Artificial Sequence
  Description of Artificial Sequence: Synthetic oligonucleotide
  Sense strand starting at position 1401 of SEQ ID NO: 1563495
aacccauguccuugggaca

SEQ ID NO: 1814986 - RNA, 19 nt, Artificial Sequence
  Description of Artificial Sequence: Synthetic oligonucleotide
  Antisense strand to SEQ ID NO: 1814985
ugucccaaggacauggguu

SEQ ID NO: 1814987 - RNA, 19 nt, Artificial Sequence
  Description of Artificial Sequence: Synthetic oligonucleotide
  Sense strand starting at position 1421 of SEQ ID NO: 1563495
ggugaaagaugucuggaca

SEQ ID NO: 1814988 - RNA, 19 nt, Artificial Sequence
  Description of Artificial Sequence: Synthetic oligonucleotide
  Antisense strand to SEQ ID NO: 1814987
uguccagacaucuuucacc

SEQ ID NO: 1814989 - RNA, 19 nt, Artificial Sequence
  Description of Artificial Sequence: Synthetic oligonucleotide
  Sense strand starting at position 1422 of SEQ ID NO: 1563495
gugaaagaugucuggacag

SEQ ID NO: 1814990 - RNA, 19 nt, Artificial Sequence
  Description of Artificial Sequence: Synthetic oligonucleotide
  Antisense strand to SEQ ID NO: 1814989
cuguccagacaucuuucac

SEQ ID NO: 1814991 - RNA, 19 nt, Artificial Sequence
  Description of Artificial Sequence: Synthetic oligonucleotide
  Sense strand starting at position 1618 of SEQ ID NO: 1563495
ggucucaucucaccaugga

SEQ ID NO: 1814992 - RNA, 19 nt, Artificial Sequence
  Description of Artificial Sequence: Synthetic oligonucleotide
  Antisense strand to SEQ ID NO: 1814991
uccauggugagaugagacc

SEQ ID NO: 1814993 - RNA, 19 nt, Artificial Sequence
  Description of Artificial Sequence: Synthetic oligonucleotide
  Sense strand starting at position 2019 of SEQ ID NO: 1563495
gggcuaagauuagucccau

SEQ ID NO: 1814994 - RNA, 19 nt, Artificial Sequence
  Description of Artificial Sequence: Synthetic oligonucleotide
  Antisense strand to SEQ ID NO: 1814993
augggacuaaucuuagccc

SEQ ID NO: 1814995 - RNA, 19 nt, Artificial Sequence
  Description of Artificial Sequence: Synthetic oligonucleotide
  Sense strand starting at position 2276 of SEQ ID NO: 1563495
gggugcagcggguauuuau

SEQ ID NO: 1814996 - RNA, 19 nt, Artificial Sequence
  Description of Artificial Sequence: Synthetic oligonucleotide
  Antisense strand to SEQ ID NO: 1814995
auaaauacccgcugcaccc

SEQ ID NO: 1814997 - RNA, 19 nt, Artificial Sequence
  Description of Artificial Sequence: Synthetic oligonucleotide
  Sense strand starting at position 3001 of SEQ ID NO: 1563495
aucauauuguucuccugga

SEQ ID NO: 1814998 - RNA, 19 nt, Artificial Sequence
  Description of Artificial Sequence: Synthetic oligonucleotide
  Antisense strand to SEQ ID NO: 1814997
uccaggagaacaauaugau

SEQ ID NO: 1814999 - RNA, 19 nt, Artificial Sequence
  Description of Artificial Sequence: Synthetic oligonucleotide
  Sense strand starting at position 3002 of SEQ ID NO: 1563495
ucauauuguucuccuggau

SEQ ID NO: 1815000 - RNA, 19 nt, Artificial Sequence
  Description of Artificial Sequence: Synthetic oligonucleotide
  Antisense strand to SEQ ID NO: 1814999
auccaggagaacaauauga

SEQ ID NO: 1815001 - RNA, 19 nt, Artificial Sequence
  Description of Artificial Sequence: Synthetic oligonucleotide
  Sense strand starting at position 3734 of SEQ ID NO: 1563495
uagggaacuccucagugca

SEQ ID NO: 1815002 - RNA, 19 nt, Artificial Sequence
  Description of Artificial Sequence: Synthetic oligonucleotide
  Antisense strand to SEQ ID NO: 1815001
ugcacugaggaguucccua

SEQ ID NO: 1815003 - RNA, 19 nt, Artificial Sequence
  Description of Artificial Sequence: Synthetic oligonucleotide
  Sense strand starting at position 3856 of SEQ ID NO: 1563495
acaauugugcuugagcaca

SEQ ID NO: 1815004 - RNA, 19 nt, Artificial Sequence
  Description of Artificial Sequence: Synthetic oligonucleotide
  Antisense strand to SEQ ID NO: 1815003
ugugcucaagcacaauugu

SEQ ID NO: 1815005 - RNA, 19 nt, Artificial Sequence
  Description of Artificial Sequence: Synthetic oligonucleotide
  Sense strand starting at position 854 of SEQ ID NO: 1563496
uucuuuccgggucaugaau

SEQ ID NO: 1815006 - RNA, 19 nt, Artificial Sequence
  Description of Artificial Sequence: Synthetic oligonucleotide
  Antisense strand to SEQ ID NO: 1815005
auucaugacccggaaagaa

SEQ ID NO: 1815007 - RNA, 19 nt, Artificial Sequence
  Description of Artificial Sequence: Synthetic oligonucleotide
  Sense strand starting at position 856 of SEQ ID NO: 1563496
cuuuccgggucaugaauau

SEQ ID NO: 1815008 - RNA, 19 nt, Artificial Sequence
  Description of Artificial Sequence: Synthetic oligonucleotide
  Antisense strand to SEQ ID NO: 1815007
auauucaugacccggaaag

SEQ ID NO: 1815009 - RNA, 19 nt, Artificial Sequence
  Description of Artificial Sequence: Synthetic oligonucleotide
  Sense strand starting at position 860 of SEQ ID NO: 1563496
ccgggucaugaauauguuu

SEQ ID NO: 1815010 - RNA, 19 nt, Artificial Sequence
  Description of Artificial Sequence: Synthetic oligonucleotide
  Antisense strand to SEQ ID NO: 1815009
aaacauauucaugacccgg

SEQ ID NO: 1815011 - RNA, 19 nt, Artificial Sequence
  Description of Artificial Sequence: Synthetic oligonucleotide
  Sense strand starting at position 886 of SEQ ID NO: 1563496
agagguaguagcugacauu

SEQ ID NO: 1815012 - RNA, 19 nt, Artificial Sequence
  Description of Artificial Sequence: Synthetic oligonucleotide
  Antisense strand to SEQ ID NO: 1815011
aaugucagcuacuaccucu

SEQ ID NO: 1815013 - RNA, 19 nt, Artificial Sequence
  Description of Artificial Sequence: Synthetic oligonucleotide
  Sense strand starting at position 895 of SEQ ID NO: 1563496
agcugacauugugacugua

SEQ ID NO: 1815014 - RNA, 19 nt, Artificial Sequence
  Description of Artificial Sequence: Synthetic oligonucleotide
  Antisense strand to SEQ ID NO: 1815013
uacagucacaaugucagcu

SEQ ID NO: 1815015 - RNA, 19 nt, Artificial Sequence
  Description of Artificial Sequence: Synthetic oligonucleotide
  Sense strand starting at position 897 of SEQ ID NO: 1563496
cugacauugugacuguauc

SEQ ID NO: 1815016 - RNA, 19 nt, Artificial Sequence
  Description of Artificial Sequence: Synthetic oligonucleotide
  Antisense strand to SEQ ID NO: 1815015
gauacagucacaaugucag

SEQ ID NO: 1815017 - RNA, 19 nt, Artificial Sequence
  Description of Artificial Sequence: Synthetic oligonucleotide
  Sense strand starting at position 898 of SEQ ID NO: 1563496
ugacauugugacuguauca

SEQ ID NO: 1815018 - RNA, 19 nt, Artificial Sequence
  Description of Artificial Sequence: Synthetic oligonucleotide
  Antisense strand to SEQ ID NO: 1815017
ugauacagucacaauguca

SEQ ID NO: 1815019 - RNA, 19 nt, Artificial Sequence
  Description of Artificial Sequence: Synthetic oligonucleotide
  Sense strand starting at position 908 of SEQ ID NO: 1563496
acuguaucagaugguauaa

SEQ ID NO: 1815020 - RNA, 19 nt, Artificial Sequence
  Description of Artificial Sequence: Synthetic oligonucleotide
  Antisense strand to SEQ ID NO: 1815019
uuauaccaucugauacagu

SEQ ID NO: 1815021 - RNA, 19 nt, Artificial Sequence
  Description of Artificial Sequence: Synthetic oligonucleotide
  Sense strand starting at position 994 of SEQ ID NO: 1563496
uuugccauacaguagauua

SEQ ID NO: 1815022 - RNA, 19 nt, Artificial Sequence
  Description of Artificial Sequence: Synthetic oligonucleotide
  Antisense strand to SEQ ID NO: 1815021
uaaucuacuguauggcaaa

SEQ ID NO: 1815023 - RNA, 19 nt, Artificial Sequence
  Description of Artificial Sequence: Synthetic oligonucleotide
  Sense strand starting at position 996 of SEQ ID NO: 1563496
ugccauacaguagauuaua

SEQ ID NO: 1815024 - RNA, 19 nt, Artificial Sequence
  Description of Artificial Sequence: Synthetic oligonucleotide
  Antisense strand to SEQ ID NO: 1815023
uauaaucuacuguauggca

SEQ ID NO: 1815025 - RNA, 19 nt, Artificial Sequence
  Description of Artificial Sequence: Synthetic oligonucleotide
  Sense strand starting at position 1027 of SEQ ID NO: 1563496
cacauaguaucauguagua

SEQ ID NO: 1815026 - RNA, 19 nt, Artificial Sequence
  Description of Artificial Sequence: Synthetic oligonucleotide
  Antisense strand to SEQ ID NO: 1815025
uacuacaugauacuaugug

SEQ ID NO: 1815027 - RNA, 19 nt, Artificial Sequence
  Description of Artificial Sequence: Synthetic oligonucleotide
  Sense strand starting at position 1032 of SEQ ID NO: 1563496
aguaucauguaguacugua

SEQ ID NO: 1815028 - RNA, 19 nt, Artificial Sequence
  Description of Artificial Sequence: Synthetic oligonucleotide
  Antisense strand to SEQ ID NO: 1815027
uacaguacuacaugauacu

SEQ ID NO: 1815029 - RNA, 19 nt, Artificial Sequence
  Description of Artificial Sequence: Synthetic oligonucleotide
  Sense strand starting at position 1046 of SEQ ID NO: 1563496
cuguaacuaugucaaauug

SEQ ID NO: 1815030 - RNA, 19 nt, Artificial Sequence
  Description of Artificial Sequence: Synthetic oligonucleotide
  Antisense strand to SEQ ID NO: 1815029
caauuugacauaguuacag

SEQ ID NO: 1815031 - RNA, 19 nt, Artificial Sequence
  Description of Artificial Sequence: Synthetic oligonucleotide
  Sense strand starting at position 1126 of SEQ ID NO: 1563496
gguggaucagagugugaug

SEQ ID NO: 1815032 - RNA, 19 nt, Artificial Sequence
  Description of Artificial Sequence: Synthetic oligonucleotide
  Antisense strand to SEQ ID NO: 1815031
caucacacucugauccacc

SEQ ID NO: 1815033 - RNA, 19 nt, Artificial Sequence
  Description of Artificial Sequence: Synthetic oligonucleotide
  Sense strand starting at position 2180 of SEQ ID NO: 1563496
ccagccucgucagaacaaa

SEQ ID NO: 1815034 - RNA, 19 nt, Artificial Sequence
  Description of Artificial Sequence: Synthetic oligonucleotide
  Antisense strand to SEQ ID NO: 1815033
uuuguucugacgaggcugg

SEQ ID NO: 1815035 - RNA, 19 nt, Artificial Sequence
  Description of Artificial Sequence: Synthetic oligonucleotide
  Sense strand starting at position 2260 of SEQ ID NO: 1563496
ggcugagacuuggauuugu

SEQ ID NO: 1815036 - RNA, 19 nt, Artificial Sequence
  Description of Artificial Sequence: Synthetic oligonucleotide
  Antisense strand to SEQ ID NO: 1815035
acaaauccaagucucagcc

SEQ ID NO: 1815037 - RNA, 19 nt, Artificial Sequence
  Description of Artificial Sequence: Synthetic oligonucleotide
  Sense strand starting at position 2457 of SEQ ID NO: 1563496
aggauauccugugaggaag

SEQ ID NO: 1815038 - RNA, 19 nt, Artificial Sequence
  Description of Artificial Sequence: Synthetic oligonucleotide
  Antisense strand to SEQ ID NO: 1815037
cuuccucacaggauauccu

SEQ ID NO: 1815039 - RNA, 19 nt, Artificial Sequence
  Description of Artificial Sequence: Synthetic oligonucleotide
  Sense strand starting at position 2459 of SEQ ID NO: 1563496
gauauccugugaggaaguu

SEQ ID NO: 1815040 - RNA, 19 nt, Artificial Sequence
  Description of Artificial Sequence: Synthetic oligonucleotide
  Antisense strand to SEQ ID NO: 1815039
aacuuccucacaggauauc

SEQ ID NO: 1815041 - RNA, 19 nt, Artificial Sequence
  Description of Artificial Sequence: Synthetic oligonucleotide
  Sense strand starting at position 2654 of SEQ ID NO: 1563496
gcuuccacuccugaacaga

SEQ ID NO: 1815042 - RNA, 19 nt, Artificial Sequence
  Description of Artificial Sequence: Synthetic oligonucleotide
  Antisense strand to SEQ ID NO: 1815041
ucuguucaggaguggaagc

SEQ ID NO: 1815043 - RNA, 19 nt, Artificial Sequence
  Description of Artificial Sequence: Synthetic oligonucleotide
  Sense strand starting at position 2673 of SEQ ID NO: 1563496
gagcuuaacuguccuagag

SEQ ID NO: 1815044 - RNA, 19 nt, Artificial Sequence
  Description of Artificial Sequence: Synthetic oligonucleotide
  Antisense strand to SEQ ID NO: 1815043
cucuaggacaguuaagcuc

SEQ ID NO: 1815045 - RNA, 19 nt, Artificial Sequence
  Description of Artificial Sequence: Synthetic oligonucleotide
  Sense strand starting at position 2763 of SEQ ID NO: 1563496
auagaugucacagguggau

SEQ ID NO: 1815046 - RNA, 19 nt, Artificial Sequence
  Description of Artificial Sequence: Synthetic oligonucleotide
  Antisense strand to SEQ ID NO: 1815045
auccaccugugacaucuau

SEQ ID NO: 1815047 - RNA, 19 nt, Artificial Sequence
  Description of Artificial Sequence: Synthetic oligonucleotide
  Sense strand starting at position 2832 of SEQ ID NO: 1563496
gcugguugcagugacagua

SEQ ID NO: 1815048 - RNA, 19 nt, Artificial Sequence
  Description of Artificial Sequence: Synthetic oligonucleotide
  Antisense strand to SEQ ID NO: 1815047
uacugucacugcaaccagc

SEQ ID NO: 1815049 - RNA, 19 nt, Artificial Sequence
  Description of Artificial Sequence: Synthetic oligonucleotide
  Sense strand starting at position 2866 of SEQ ID NO: 1563496
aagaaugggcauuguccaa

SEQ ID NO: 1815050 - RNA, 19 nt, Artificial Sequence
  Description of Artificial Sequence: Synthetic oligonucleotide
  Antisense strand to SEQ ID NO: 1815049
uuggacaaugcccauucuu

SEQ ID NO: 1815051 - RNA, 19 nt, Artificial Sequence
  Description of Artificial Sequence: Synthetic oligonucleotide
  Sense strand starting at position 2870 of SEQ ID NO: 1563496
augggcauuguccaaguau

SEQ ID NO: 1815052 - RNA, 19 nt, Artificial Sequence
  Description of Artificial Sequence: Synthetic oligonucleotide
  Antisense strand to SEQ ID NO: 1815051
auacuuggacaaugcccau

SEQ ID NO: 1815053 - RNA, 19 nt, Artificial Sequence
  Description of Artificial Sequence: Synthetic oligonucleotide
  Sense strand starting at position 2912 of SEQ ID NO: 1563496
ugcagugauuaguaagaug

SEQ ID NO: 1815054 - RNA, 19 nt, Artificial Sequence
  Description of Artificial Sequence: Synthetic oligonucleotide
  Antisense strand to SEQ ID NO: 1815053
caucuuacuaaucacugca

SEQ ID NO: 1815055 - RNA, 19 nt, Artificial Sequence
  Description of Artificial Sequence: Synthetic oligonucleotide
  Sense strand starting at position 2917 of SEQ ID NO: 1563496
ugauuaguaagauguggag

SEQ ID NO: 1815056 - RNA, 19 nt, Artificial Sequence
  Description of Artificial Sequence: Synthetic oligonucleotide
  Antisense strand to SEQ ID NO: 1815055
cuccacaucuuacuaauca

SEQ ID NO: 1815057 - RNA, 19 nt, Artificial Sequence
  Description of Artificial Sequence: Synthetic oligonucleotide
  Sense strand starting at position 2964 of SEQ ID NO: 1563496
acugaaugaucuggccuaa

SEQ ID NO: 1815058 - RNA, 19 nt, Artificial Sequence
  Description of Artificial Sequence: Synthetic oligonucleotide
  Antisense strand to SEQ ID NO: 1815057
uuaggccagaucauucagu

SEQ ID NO: 1815059 - RNA, 19 nt, Artificial Sequence
  Description of Artificial Sequence: Synthetic oligonucleotide
  Sense strand starting at position 2976 of SEQ ID NO: 1563496
ggccuaagggucugaaaga

SEQ ID NO: 1815060 - RNA, 19 nt, Artificial Sequence
  Description of Artificial Sequence: Synthetic oligonucleotide
  Antisense strand to SEQ ID NO: 1815059
ucuuucagacccuuaggcc

SEQ ID NO: 1815061 - RNA, 19 nt, Artificial Sequence
  Description of Artificial Sequence: Synthetic oligonucleotide
  Sense strand starting at position 2977 of SEQ ID NO: 1563496
gccuaagggucugaaagau

SEQ ID NO: 1815062 - RNA, 19 nt, Artificial Sequence
  Description of Artificial Sequence: Synthetic oligonucleotide
  Antisense strand to SEQ ID NO: 1815061
aucuuucagacccuuaggc

SEQ ID NO: 1815063 - RNA, 19 nt, Artificial Sequence
  Description of Artificial Sequence: Synthetic oligonucleotide
  Sense strand starting at position 3031 of SEQ ID NO: 1563496
gucccucauucccugagau

SEQ ID NO: 1815064 - RNA, 19 nt, Artificial Sequence
  Description of Artificial Sequence: Synthetic oligonucleotide
  Antisense strand to SEQ ID NO: 1815063
aucucagggaaugagggac

SEQ ID NO: 1815065 - RNA, 19 nt, Artificial Sequence
  Description of Artificial Sequence: Synthetic oligonucleotide
  Sense strand starting at position 3032 of SEQ ID NO: 1563496
ucccucauucccugagaug

SEQ ID NO: 1815066 - RNA, 19 nt, Artificial Sequence
  Description of Artificial Sequence: Synthetic oligonucleotide
  Antisense strand to SEQ ID NO: 1815065
caucucagggaaugaggga

SEQ ID NO: 1815067 - RNA, 19 nt, Artificial Sequence
  Description of Artificial Sequence: Synthetic oligonucleotide
  Sense strand starting at position 3102 of SEQ ID NO: 1563496
uuuccuguccucuagggau

SEQ ID NO: 1815068 - RNA, 19 nt, Artificial Sequence
  Description of Artificial Sequence: Synthetic oligonucleotide
  Antisense strand to SEQ ID NO: 1815067
aucccuagaggacaggaaa

SEQ ID NO: 1815069 - RNA, 19 nt, Artificial Sequence
  Description of Artificial Sequence: Synthetic oligonucleotide
  Sense strand starting at position 3651 of SEQ ID NO: 1563496
cuuggaaaguccucaacuc

SEQ ID NO: 1815070 - RNA, 19 nt, Artificial Sequence
  Description of Artificial Sequence: Synthetic oligonucleotide
  Antisense strand to SEQ ID NO: 1815069
gaguugaggacuuuccaag

SEQ ID NO: 1815071 - RNA, 19 nt, Artificial Sequence
  Description of Artificial Sequence: Synthetic oligonucleotide
  Sense strand starting at position 3652 of SEQ ID NO: 1563496
uuggaaaguccucaacucu

SEQ ID NO: 1815072 - RNA, 19 nt, Artificial Sequence
  Description of Artificial Sequence: Synthetic oligonucleotide
  Antisense strand to SEQ ID NO: 1815071
agaguugaggacuuuccaa

SEQ ID NO: 1815073 - RNA, 19 nt, Artificial Sequence
  Description of Artificial Sequence: Synthetic oligonucleotide
  Sense strand starting at position 3701 of SEQ ID NO: 1563496
gagccuuggcauuagaauu

SEQ ID NO: 1815074 - RNA, 19 nt, Artificial Sequence
  Description of Artificial Sequence: Synthetic oligonucleotide
  Antisense strand to SEQ ID NO: 1815073
aauucuaaugccaaggcuc

SEQ ID NO: 1815075 - RNA, 19 nt, Artificial Sequence
  Description of Artificial Sequence: Synthetic oligonucleotide
  Sense strand starting at position 3765 of SEQ ID NO: 1563496
gagacucauugagaacagu

SEQ ID NO: 1815076 - RNA, 19 nt, Artificial Sequence
  Description of Artificial Sequence: Synthetic oligonucleotide
  Antisense strand to SEQ ID NO: 1815075
acuguucucaaugagucuc

SEQ ID NO: 1815077 - RNA, 19 nt, Artificial Sequence
  Description of Artificial Sequence: Synthetic oligonucleotide
  Sense strand starting at position 3776 of SEQ ID NO: 1563496
agaacagugcguugucauu

SEQ ID NO: 1815078 - RNA, 19 nt, Artificial Sequence
  Description of Artificial Sequence: Synthetic oligonucleotide
  Antisense strand to SEQ ID NO: 1815077
aaugacaacgcacuguucu

SEQ ID NO: 1815079 - RNA, 19 nt, Artificial Sequence
  Description of Artificial Sequence: Synthetic oligonucleotide
  Sense strand starting at position 3782 of SEQ ID NO: 1563496
gugcguugucauuggucca

SEQ ID NO: 1815080 - RNA, 19 nt, Artificial Sequence
  Description of Artificial Sequence: Synthetic oligonucleotide
  Antisense strand to SEQ ID NO: 1815079
uggaccaaugacaacgcac

SEQ ID NO: 1815081 - RNA, 19 nt, Artificial Sequence
  Description of Artificial Sequence: Synthetic oligonucleotide
  Sense strand starting at position 3783 of SEQ ID NO: 1563496
ugcguugucauugguccau

SEQ ID NO: 1815082 - RNA, 19 nt, Artificial Sequence
  Description of Artificial Sequence: Synthetic oligonucleotide
  Antisense strand to SEQ ID NO: 1815081
auggaccaaugacaacgca

SEQ ID NO: 1815083 - RNA, 19 nt, Artificial Sequence
  Description of Artificial Sequence: Synthetic oligonucleotide
  Sense strand starting at position 3915 of SEQ ID NO: 1563496
cagggaggaucacagagau

SEQ ID NO: 1815084 - RNA, 19 nt, Artificial Sequence
  Description of Artificial Sequence: Synthetic oligonucleotide
  Antisense strand to SEQ ID NO: 1815083
aucucugugauccucccug

SEQ ID NO: 1815085 - RNA, 19 nt, Artificial Sequence
  Description of Artificial Sequence: Synthetic oligonucleotide
  Sense strand starting at position 295 of SEQ ID NO: 1563497
cagccagugcugggauauu

SEQ ID NO: 1815086 - RNA, 19 nt, Artificial Sequence
  Description of Artificial Sequence: Synthetic oligonucleotide
  Antisense strand to SEQ ID NO: 1815085
aauaucccagcacuggcug

SEQ ID NO: 1815087 - RNA, 19 nt, Artificial Sequence
  Description of Artificial Sequence: Synthetic oligonucleotide
  Sense strand starting at position 305 of SEQ ID NO: 1563497
ugggauauuauaggccuga

SEQ ID NO: 1815088 - RNA, 19 nt, Artificial Sequence
  Description of Artificial Sequence: Synthetic oligonucleotide
  Antisense strand to SEQ ID NO: 1815087
ucaggccuauaauauccca

SEQ ID NO: 1815089 - RNA, 19 nt, Artificial Sequence
  Description of Artificial Sequence: Synthetic oligonucleotide
  Sense strand starting at position 309 of SEQ ID NO: 1563497
auauuauaggccugaccca

SEQ ID NO: 1815090 - RNA, 19 nt, Artificial Sequence
  Description of Artificial Sequence: Synthetic oligonucleotide
  Antisense strand to SEQ ID NO: 1815089
ugggucaggccuauaauau

SEQ ID NO: 1815091 - RNA, 19 nt, Artificial Sequence
  Description of Artificial Sequence: Synthetic oligonucleotide
  Sense strand starting at position 547 of SEQ ID NO: 1563497
uugauagucucauucuguu

SEQ ID NO: 1815092 - RNA, 19 nt, Artificial Sequence
  Description of Artificial Sequence: Synthetic oligonucleotide
  Antisense strand to SEQ ID NO: 1815091
aacagaaugagacuaucaa

SEQ ID NO: 1815093 - RNA, 19 nt, Artificial Sequence
  Description of Artificial Sequence: Synthetic oligonucleotide
  Sense strand starting at position 1034 of SEQ ID NO: 1563497
ucaccauguuguuccaaga

SEQ ID NO: 1815094 - RNA, 19 nt, Artificial Sequence
  Description of Artificial Sequence: Synthetic oligonucleotide
  Antisense strand to SEQ ID NO: 1815093
ucuuggaacaacaugguga

SEQ ID NO: 1815095 - RNA, 19 nt, Artificial Sequence
  Description of Artificial Sequence: Synthetic oligonucleotide
  Sense strand starting at position 1119 of SEQ ID NO: 1563497
gugagauguucucuuuaag

SEQ ID NO: 1815096 - RNA, 19 nt, Artificial Sequence
  Description of Artificial Sequence: Synthetic oligonucleotide
  Antisense strand to SEQ ID NO: 1815095
cuuaaagagaacaucucac

SEQ ID NO: 1815097 - RNA, 19 nt, Artificial Sequence
  Description of Artificial Sequence: Synthetic oligonucleotide
  Sense strand starting at position 1150 of SEQ ID NO: 1563497
cagugaagggugugugcau

SEQ ID NO: 1815098 - RNA, 19 nt, Artificial Sequence
  Description of Artificial Sequence: Synthetic oligonucleotide
  Antisense strand to SEQ ID NO: 1815097
augcacacacccuucacug

SEQ ID NO: 1815099 - RNA, 19 nt, Artificial Sequence
  Description of Artificial Sequence: Synthetic oligonucleotide
  Sense strand starting at position 1151 of SEQ ID NO: 1563497
agugaagggugugugcauu

SEQ ID NO: 1815100 - RNA, 19 nt, Artificial Sequence
  Description of Artificial Sequence: Synthetic oligonucleotide
  Antisense strand to SEQ ID NO: 1815099
aaugcacacacccuucacu

SEQ ID NO: 1815101 - RNA, 19 nt, Artificial Sequence
  Description of Artificial Sequence: Synthetic oligonucleotide
  Sense strand starting at position 1176 of SEQ ID NO: 1563497
ggucucagauauggccaaa

SEQ ID NO: 1815102 - RNA, 19 nt, Artificial Sequence
  Description of Artificial Sequence: Synthetic oligonucleotide
  Antisense strand to SEQ ID NO: 1815101
uuuggccauaucugagacc

SEQ ID NO: 1815103 - RNA, 19 nt, Artificial Sequence
  Description of Artificial Sequence: Synthetic oligonucleotide
  Sense strand starting at position 1293 of SEQ ID NO: 1563497
ucaguuuaucuuugucuca

SEQ ID NO: 1815104 - RNA, 19 nt, Artificial Sequence
  Description of Artificial Sequence: Synthetic oligonucleotide
  Antisense strand to SEQ ID NO: 1815103
ugagacaaagauaaacuga

SEQ ID NO: 1815105 - RNA, 19 nt, Artificial Sequence
  Description of Artificial Sequence: Synthetic oligonucleotide
  Sense strand starting at position 1295 of SEQ ID NO: 1563497
aguuuaucuuugucucaca

SEQ ID NO: 1815106 - RNA, 19 nt, Artificial Sequence
  Description of Artificial Sequence: Synthetic oligonucleotide
  Antisense strand to SEQ ID NO: 1815105
ugugagacaaagauaaacu

SEQ ID NO: 1815107 - RNA, 19 nt, Artificial Sequence
  Description of Artificial Sequence: Synthetic oligonucleotide
  Sense strand starting at position 1547 of SEQ ID NO: 1563497
ggguuugaugucuguuucu

SEQ ID NO: 1815108 - RNA, 19 nt, Artificial Sequence
  Description of Artificial Sequence: Synthetic oligonucleotide
  Antisense strand to SEQ ID NO: 1815107
agaaacagacaucaaaccc

SEQ ID NO: 1815109 - RNA, 19 nt, Artificial Sequence
  Description of Artificial Sequence: Synthetic oligonucleotide
  Sense strand starting at position 1615 of SEQ ID NO: 1563497
gugccuauucugggauaua

SEQ ID NO: 1815110 - RNA, 19 nt, Artificial Sequence
  Description of Artificial Sequence: Synthetic oligonucleotide
  Antisense strand to SEQ ID NO: 1815109
uauaucccagaauaggcac

SEQ ID NO: 1815111 - RNA, 19 nt, Artificial Sequence
  Description of Artificial Sequence: Synthetic oligonucleotide
  Sense strand starting at position 1616 of SEQ ID NO: 1563497
ugccuauucugggauauac

SEQ ID NO: 1815112 - RNA, 19 nt, Artificial Sequence
  Description of Artificial Sequence: Synthetic oligonucleotide
  Antisense strand to SEQ ID NO: 1815111
guauaucccagaauaggca

SEQ ID NO: 1815113 - RNA, 19 nt, Artificial Sequence
  Description of Artificial Sequence: Synthetic oligonucleotide
  Sense strand starting at position 1624 of SEQ ID NO: 1563497
cugggauauacauggguau

SEQ ID NO: 1815114 - RNA, 19 nt, Artificial Sequence
  Description of Artificial Sequence: Synthetic oligonucleotide
  Antisense strand to SEQ ID NO: 1815113
auacccauguauaucccag

SEQ ID NO: 1815115 - RNA, 19 nt, Artificial Sequence
  Description of Artificial Sequence: Synthetic oligonucleotide
  Sense strand starting at position 1626 of SEQ ID NO: 1563497
gggauauacauggguaugu

SEQ ID NO: 1815116 - RNA, 19 nt, Artificial Sequence
  Description of Artificial Sequence: Synthetic oligonucleotide
  Antisense strand to SEQ ID NO: 1815115
acauacccauguauauccc

SEQ ID NO: 1815117 - RNA, 19 nt, Artificial Sequence
  Description of Artificial Sequence: Synthetic oligonucleotide
  Sense strand starting at position 1908 of SEQ ID NO: 1563497
ccuuaaguggaucgcgaua

SEQ ID NO: 1815118 - RNA, 19 nt, Artificial Sequence
  Description of Artificial Sequence: Synthetic oligonucleotide
  Antisense strand to SEQ ID NO: 1815117
uaucgcgauccacuuaagg

SEQ ID NO: 1815119 - RNA, 19 nt, Artificial Sequence
  Description of Artificial Sequence: Synthetic oligonucleotide
  Sense strand starting at position 1936 of SEQ ID NO: 1563497
agcagcuccugccugaaua

SEQ ID NO: 1815120 - RNA, 19 nt, Artificial Sequence
  Description of Artificial Sequence: Synthetic oligonucleotide
  Antisense strand to SEQ ID NO: 1815119
uauucaggcaggagcugcu

SEQ ID NO: 1815121 - RNA, 19 nt, Artificial Sequence
  Description of Artificial Sequence: Synthetic oligonucleotide
  Sense strand starting at position 2168 of SEQ ID NO: 1563497
acaugacagaccugugagu

SEQ ID NO: 1815122 - RNA, 19 nt, Artificial Sequence
  Description of Artificial Sequence: Synthetic oligonucleotide
  Antisense strand to SEQ ID NO: 1815121
acucacaggucugucaugu

SEQ ID NO: 1815123 - RNA, 19 nt, Artificial Sequence
  Description of Artificial Sequence: Synthetic oligonucleotide
  Sense strand starting at position 2170 of SEQ ID NO: 1563497
augacagaccugugaguca

SEQ ID NO: 1815124 - RNA, 19 nt, Artificial Sequence
  Description of Artificial Sequence: Synthetic oligonucleotide
  Antisense strand to SEQ ID NO: 1815123
ugacucacaggucugucau

SEQ ID NO: 1815125 - RNA, 19 nt, Artificial Sequence
  Description of Artificial Sequence: Synthetic oligonucleotide
  Sense strand starting at position 2313 of SEQ ID NO: 1563497
gaagucaugccugaugcca

SEQ ID NO: 1815126 - RNA, 19 nt, Artificial Sequence
  Description of Artificial Sequence: Synthetic oligonucleotide
  Antisense strand to SEQ ID NO: 1815125
uggcaucaggcaugacuuc

SEQ ID NO: 1815127 - RNA, 19 nt, Artificial Sequence
  Description of Artificial Sequence: Synthetic oligonucleotide
  Sense strand starting at position 2568 of SEQ ID NO: 1563497
aguaaugcuguugggacaa

SEQ ID NO: 1815128 - RNA, 19 nt, Artificial Sequence
  Description of Artificial Sequence: Synthetic oligonucleotide
  Antisense strand to SEQ ID NO: 1815127
uugucccaacagcauuacu

SEQ ID NO: 1815129 - RNA, 19 nt, Artificial Sequence
  Description of Artificial Sequence: Synthetic oligonucleotide
  Sense strand starting at position 2570 of SEQ ID NO: 1563497
uaaugcuguugggacaaau

SEQ ID NO: 1815130 - RNA, 19 nt, Artificial Sequence
  Description of Artificial Sequence: Synthetic oligonucleotide
  Antisense strand to SEQ ID NO: 1815129
auuugucccaacagcauua

SEQ ID NO: 1815131 - RNA, 19 nt, Artificial Sequence
  Description of Artificial Sequence: Synthetic oligonucleotide
  Sense strand starting at position 2646 of SEQ ID NO: 1563497
augggauggcuguagcuaa

SEQ ID NO: 1815132 - RNA, 19 nt, Artificial Sequence
  Description of Artificial Sequence: Synthetic oligonucleotide
  Antisense strand to SEQ ID NO: 1815131
uuagcuacagccaucccau

SEQ ID NO: 1815133 - RNA, 19 nt, Artificial Sequence
  Description of Artificial Sequence: Synthetic oligonucleotide
  Sense strand starting at position 2664 of SEQ ID NO: 1563497
auggauucgacgugguaau

SEQ ID NO: 1815134 - RNA, 19 nt, Artificial Sequence
  Description of Artificial Sequence: Synthetic oligonucleotide
  Antisense strand to SEQ ID NO: 1815133
auuaccacgucgaauccau

SEQ ID NO: 1815135 - RNA, 19 nt, Artificial Sequence
  Description of Artificial Sequence: Synthetic oligonucleotide
  Sense strand starting at position 2665 of SEQ ID NO: 1563497
uggauucgacgugguaaua

SEQ ID NO: 1815136 - RNA, 19 nt, Artificial Sequence
  Description of Artificial Sequence: Synthetic oligonucleotide
  Antisense strand to SEQ ID NO: 1815135
uauuaccacgucgaaucca

SEQ ID NO: 1815137 - RNA, 19 nt, Artificial Sequence
  Description of Artificial Sequence: Synthetic oligonucleotide
  Sense strand starting at position 2678 of SEQ ID NO: 1563497
guaauagaaggcuggacaa

SEQ ID NO: 1815138 - RNA, 19 nt, Artificial Sequence
  Description of Artificial Sequence: Synthetic oligonucleotide
  Antisense strand to SEQ ID NO: 1815137
uuguccagccuucuauuac

SEQ ID NO: 1815139 - RNA, 19 nt, Artificial Sequence
  Description of Artificial Sequence: Synthetic oligonucleotide
  Sense strand starting at position 3705 of SEQ ID NO: 1563497
uucuuuccgggucaugaau

SEQ ID NO: 1815140 - RNA, 19 nt, Artificial Sequence
  Description of Artificial Sequence: Synthetic oligonucleotide
  Antisense strand to SEQ ID NO: 1815139
auucaugacccggaaagaa

SEQ ID NO: 1815141 - RNA, 19 nt, Artificial Sequence
  Description of Artificial Sequence: Synthetic oligonucleotide
  Sense strand starting at position 3711 of SEQ ID NO: 1563497
ccgggucaugaauauguuu

SEQ ID NO: 1815142 - RNA, 19 nt, Artificial Sequence
  Description of Artificial Sequence: Synthetic oligonucleotide
  Antisense strand to SEQ ID NO: 1815141
aaacauauucaugacccgg

SEQ ID NO: 1815143 - RNA, 19 nt, Artificial Sequence
  Description of Artificial Sequence: Synthetic oligonucleotide
  Sense strand starting at position 3737 of SEQ ID NO: 1563497
agagguaguagcugacauu

SEQ ID NO: 1815144 - RNA, 19 nt, Artificial Sequence
  Description of Artificial Sequence: Synthetic oligonucleotide
  Antisense strand to SEQ ID NO: 1815143
aaugucagcuacuaccucu

SEQ ID NO: 1815145 - RNA, 19 nt, Artificial Sequence
  Description of Artificial Sequence: Synthetic oligonucleotide
  Sense strand starting at position 3746 of SEQ ID NO: 1563497
agcugacauugugacugua

SEQ ID NO: 1815146 - RNA, 19 nt, Artificial Sequence
  Description of Artificial Sequence: Synthetic oligonucleotide
  Antisense strand to SEQ ID NO: 1815145
uacagucacaaugucagcu

SEQ ID NO: 1815147 - RNA, 19 nt, Artificial Sequence
  Description of Artificial Sequence: Synthetic oligonucleotide
  Sense strand starting at position 3748 of SEQ ID NO: 1563497
cugacauugugacuguauc

SEQ ID NO: 1815148 - RNA, 19 nt, Artificial Sequence
  Description of Artificial Sequence: Synthetic oligonucleotide
  Antisense strand to SEQ ID NO: 1815147
gauacagucacaaugucag

SEQ ID NO: 1815149 - RNA, 19 nt, Artificial Sequence
  Description of Artificial Sequence: Synthetic oligonucleotide
  Sense strand starting at position 3749 of SEQ ID NO: 1563497
ugacauugugacuguauca

SEQ ID NO: 1815150 - RNA, 19 nt, Artificial Sequence
  Description of Artificial Sequence: Synthetic oligonucleotide
  Antisense strand to SEQ ID NO: 1815149
ugauacagucacaauguca

SEQ ID NO: 1815151 - RNA, 19 nt, Artificial Sequence
  Description of Artificial Sequence: Synthetic oligonucleotide
  Sense strand starting at position 3759 of SEQ ID NO: 1563497
acuguaucagaugguauaa

SEQ ID NO: 1815152 - RNA, 19 nt, Artificial Sequence
  Description of Artificial Sequence: Synthetic oligonucleotide
  Antisense strand to SEQ ID NO: 1815151
uuauaccaucugauacagu

SEQ ID NO: 1815153 - RNA, 19 nt, Artificial Sequence
  Description of Artificial Sequence: Synthetic oligonucleotide
  Sense strand starting at position 3845 of SEQ ID NO: 1563497
uuugccauacaguagauua

SEQ ID NO: 1815154 - RNA, 19 nt, Artificial Sequence
  Description of Artificial Sequence: Synthetic oligonucleotide
  Antisense strand to SEQ ID NO: 1815153
uaaucuacuguauggcaaa

SEQ ID NO: 1815155 - RNA, 19 nt, Artificial Sequence
  Description of Artificial Sequence: Synthetic oligonucleotide
  Sense strand starting at position 3847 of SEQ ID NO: 1563497
ugccauacaguagauuaua

SEQ ID NO: 1815156 - RNA, 19 nt, Artificial Sequence
  Description of Artificial Sequence: Synthetic oligonucleotide
  Antisense strand to SEQ ID NO: 1815155
uauaaucuacuguauggca

SEQ ID NO: 1815157 - RNA, 19 nt, Artificial Sequence
  Description of Artificial Sequence: Synthetic oligonucleotide
  Sense strand starting at position 3878 of SEQ ID NO: 1563497
cacauaguaucauguagua

SEQ ID NO: 1815158 - RNA, 19 nt, Artificial Sequence
  Description of Artificial Sequence: Synthetic oligonucleotide
  Antisense strand to SEQ ID NO: 1815157
uacuacaugauacuaugug

SEQ ID NO: 1815159 - RNA, 19 nt, Artificial Sequence
  Description of Artificial Sequence: Synthetic oligonucleotide
  Sense strand starting at position 3883 of SEQ ID NO: 1563497
aguaucauguaguacugua

SEQ ID NO: 1815160 - RNA, 19 nt, Artificial Sequence
  Description of Artificial Sequence: Synthetic oligonucleotide
  Antisense strand to SEQ ID NO: 1815159
uacaguacuacaugauacu

SEQ ID NO: 1815161 - RNA, 19 nt, Artificial Sequence
  Description of Artificial Sequence: Synthetic oligonucleotide
  Sense strand starting at position 3897 of SEQ ID NO: 1563497
cuguaacuaugucaaauug

SEQ ID NO: 1815162 - RNA, 19 nt, Artificial Sequence
  Description of Artificial Sequence: Synthetic oligonucleotide
  Antisense strand to SEQ ID NO: 1815161
caauuugacauaguuacag

SEQ ID NO: 1815163 - RNA, 19 nt, Artificial Sequence
  Description of Artificial Sequence: Synthetic oligonucleotide
  Sense strand starting at position 3977 of SEQ ID NO: 1563497
gguggaucagagugugaug

SEQ ID NO: 1815164 - RNA, 19 nt, Artificial Sequence
  Description of Artificial Sequence: Synthetic oligonucleotide
  Antisense strand to SEQ ID NO: 1815163
caucacacucugauccacc

SEQ ID NO: 1815165 - RNA, 19 nt, Artificial Sequence
  Description of Artificial Sequence: Synthetic oligonucleotide
  Sense strand starting at position 39 of SEQ ID NO: 1563498
aggucaagugcugaucaaa

SEQ ID NO: 1815166 - RNA, 19 nt, Artificial Sequence
  Description of Artificial Sequence: Synthetic oligonucleotide
  Antisense strand to SEQ ID NO: 1815165
uuugaucagcacuugaccu

SEQ ID NO: 1815167 - RNA, 19 nt, Artificial Sequence
  Description of Artificial Sequence: Synthetic oligonucleotide
  Sense strand starting at position 52 of SEQ ID NO: 1563498
aucaaaucccaguggaagu

SEQ ID NO: 1815168 - RNA, 19 nt, Artificial Sequence
  Description of Artificial Sequence: Synthetic oligonucleotide
  Antisense strand to SEQ ID NO: 1815167
acuuccacugggauuugau

SEQ ID NO: 1815169 - RNA, 19 nt, Artificial Sequence
  Description of Artificial Sequence: Synthetic oligonucleotide
  Sense strand starting at position 80 of SEQ ID NO: 1563498
cccauuuauucucgagaaa

SEQ ID NO: 1815170 - RNA, 19 nt, Artificial Sequence
  Description of Artificial Sequence: Synthetic oligonucleotide
  Antisense strand to SEQ ID NO: 1815169
uuucucgagaauaaauggg

SEQ ID NO: 1815171 - RNA, 19 nt, Artificial Sequence
  Description of Artificial Sequence: Synthetic oligonucleotide
  Sense strand starting at position 92 of SEQ ID NO: 1563498
cgagaaaucuggccaccua

SEQ ID NO: 1815172 - RNA, 19 nt, Artificial Sequence
  Description of Artificial Sequence: Synthetic oligonucleotide
  Antisense strand to SEQ ID NO: 1815171
uagguggccagauuucucg

SEQ ID NO: 1815173 - RNA, 19 nt, Artificial Sequence
  Description of Artificial Sequence: Synthetic oligonucleotide
  Sense strand starting at position 185 of SEQ ID NO: 1563498
aggaaagcguucucugcua

SEQ ID NO: 1815174 - RNA, 19 nt, Artificial Sequence
  Description of Artificial Sequence: Synthetic oligonucleotide
  Antisense strand to SEQ ID NO: 1815173
uagcagagaacgcuuuccu

SEQ ID NO: 1815175 - RNA, 19 nt, Artificial Sequence
  Description of Artificial Sequence: Synthetic oligonucleotide
  Sense strand starting at position 189 of SEQ ID NO: 1563498
aagcguucucugcuaggua

SEQ ID NO: 1815176 - RNA, 19 nt, Artificial Sequence
  Description of Artificial Sequence: Synthetic oligonucleotide
  Antisense strand to SEQ ID NO: 1815175
uaccuagcagagaacgcuu

SEQ ID NO: 1815177 - RNA, 19 nt, Artificial Sequence
  Description of Artificial Sequence: Synthetic oligonucleotide
  Sense strand starting at position 193 of SEQ ID NO: 1563498
guucucugcuagguagauu

SEQ ID NO: 1815178 - RNA, 19 nt, Artificial Sequence
  Description of Artificial Sequence: Synthetic oligonucleotide
  Antisense strand to SEQ ID NO: 1815177
aaucuaccuagcagagaac

SEQ ID NO: 1815179 - RNA, 19 nt, Artificial Sequence
  Description of Artificial Sequence: Synthetic oligonucleotide
  Sense strand starting at position 204 of SEQ ID NO: 1563498
gguagauugaaucacgugu

SEQ ID NO: 1815180 - RNA, 19 nt, Artificial Sequence
  Description of Artificial Sequence: Synthetic oligonucleotide
  Antisense strand to SEQ ID NO: 1815179
acacgugauucaaucuacc

SEQ ID NO: 1815181 - RNA, 19 nt, Artificial Sequence
  Description of Artificial Sequence: Synthetic oligonucleotide
  Sense strand starting at position 236 of SEQ ID NO: 1563498
agaugagagcccugguaua

SEQ ID NO: 1815182 - RNA, 19 nt, Artificial Sequence
  Description of Artificial Sequence: Synthetic oligonucleotide
  Antisense strand to SEQ ID NO: 1815181
uauaccagggcucucaucu

SEQ ID NO: 1815183 - RNA, 19 nt, Artificial Sequence
  Description of Artificial Sequence: Synthetic oligonucleotide
  Sense strand starting at position 250 of SEQ ID NO: 1563498
guauaaaugcucugcacac

SEQ ID NO: 1815184 - RNA, 19 nt, Artificial Sequence
  Description of Artificial Sequence: Synthetic oligonucleotide
  Antisense strand to SEQ ID NO: 1815183
gugugcagagcauuuauac

SEQ ID NO: 1815185 - RNA, 19 nt, Artificial Sequence
  Description of Artificial Sequence: Synthetic oligonucleotide
  Sense strand starting at position 281 of SEQ ID NO: 1563498
ucucuuaacuggcugugau

SEQ ID NO: 1815186 - RNA, 19 nt, Artificial Sequence
  Description of Artificial Sequence: Synthetic oligonucleotide
  Antisense strand to SEQ ID NO: 1815185
aucacagccaguuaagaga

SEQ ID NO: 1815187 - RNA, 19 nt, Artificial Sequence
  Description of Artificial Sequence: Synthetic oligonucleotide
  Sense strand starting at position 282 of SEQ ID NO: 1563498
cucuuaacuggcugugaug

SEQ ID NO: 1815188 - RNA, 19 nt, Artificial Sequence
  Description of Artificial Sequence: Synthetic oligonucleotide
  Antisense strand to SEQ ID NO: 1815187
caucacagccaguuaagag

SEQ ID NO: 1815189 - RNA, 19 nt, Artificial Sequence
  Description of Artificial Sequence: Synthetic oligonucleotide
  Sense strand starting at position 363 of SEQ ID NO: 1563498
agccaaguccauuaaagua

SEQ ID NO: 1815190 - RNA, 19 nt, Artificial Sequence
  Description of Artificial Sequence: Synthetic oligonucleotide
  Antisense strand to SEQ ID NO: 1815189
uacuuuaauggacuuggcu

SEQ ID NO: 1815191 - RNA, 19 nt, Artificial Sequence
  Description of Artificial Sequence: Synthetic oligonucleotide
  Sense strand starting at position 383 of SEQ ID NO: 1563498
cauuaaaggucuggauuua

SEQ ID NO: 1815192 - RNA, 19 nt, Artificial Sequence
  Description of Artificial Sequence: Synthetic oligonucleotide
  Antisense strand to SEQ ID NO: 1815191
uaaauccagaccuuuaaug

SEQ ID NO: 1815193 - RNA, 19 nt, Artificial Sequence
  Description of Artificial Sequence: Synthetic oligonucleotide
  Sense strand starting at position 457 of SEQ ID NO: 1563498
ucuuuaaagucacuuaggu

SEQ ID NO: 1815194 - RNA, 19 nt, Artificial Sequence
  Description of Artificial Sequence: Synthetic oligonucleotide
  Antisense strand to SEQ ID NO: 1815193
accuaagugacuuuaaaga

SEQ ID NO: 1815195 - RNA, 19 nt, Artificial Sequence
  Description of Artificial Sequence: Synthetic oligonucleotide
  Sense strand starting at position 496 of SEQ ID NO: 1563498
gggaucagaucuuuaucuc

SEQ ID NO: 1815196 - RNA, 19 nt, Artificial Sequence
  Description of Artificial Sequence: Synthetic oligonucleotide
  Antisense strand to SEQ ID NO: 1815195
gagauaaagaucugauccc

SEQ ID NO: 1815197 - RNA, 19 nt, Artificial Sequence
  Description of Artificial Sequence: Synthetic oligonucleotide
  Sense strand starting at position 519 of SEQ ID NO: 1563498
guacauaguuuaccuuuga

SEQ ID NO: 1815198 - RNA, 19 nt, Artificial Sequence
  Description of Artificial Sequence: Synthetic oligonucleotide
  Antisense strand to SEQ ID NO: 1815197
ucaaagguaaacuauguac

SEQ ID NO: 1815199 - RNA, 19 nt, Artificial Sequence
  Description of Artificial Sequence: Synthetic oligonucleotide
  Sense strand starting at position 523 of SEQ ID NO: 1563498
auaguuuaccuuugauccu

SEQ ID NO: 1815200 - RNA, 19 nt, Artificial Sequence
  Description of Artificial Sequence: Synthetic oligonucleotide
  Antisense strand to SEQ ID NO: 1815199
aggaucaaagguaaacuau

SEQ ID NO: 1815201 - RNA, 19 nt, Artificial Sequence
  Description of Artificial Sequence: Synthetic oligonucleotide
  Sense strand starting at position 662 of SEQ ID NO: 1563498
cugugaaguucccuuccga

SEQ ID NO: 1815202 - RNA, 19 nt, Artificial Sequence
  Description of Artificial Sequence: Synthetic oligonucleotide
  Antisense strand to SEQ ID NO: 1815201
ucggaagggaacuucacag

SEQ ID NO: 1815203 - RNA, 19 nt, Artificial Sequence
  Description of Artificial Sequence: Synthetic oligonucleotide
  Sense strand starting at position 709 of SEQ ID NO: 1563498
ucucuuaaacggugaaauu

SEQ ID NO: 1815204 - RNA, 19 nt, Artificial Sequence
  Description of Artificial Sequence: Synthetic oligonucleotide
  Antisense strand to SEQ ID NO: 1815203
aauuucaccguuuaagaga

SEQ ID NO: 1815205 - RNA, 19 nt, Artificial Sequence
  Description of Artificial Sequence: Synthetic oligonucleotide
  Sense strand starting at position 736 of SEQ ID NO: 1563498
gcaaacgacucgcuguaaa

SEQ ID NO: 1815206 - RNA, 19 nt, Artificial Sequence
  Description of Artificial Sequence: Synthetic oligonucleotide
  Antisense strand to SEQ ID NO: 1815205
uuuacagcgagucguuugc

SEQ ID NO: 1815207 - RNA, 19 nt, Artificial Sequence
  Description of Artificial Sequence: Synthetic oligonucleotide
  Sense strand starting at position 819 of SEQ ID NO: 1563498
acuaauuaaucaguccgau

SEQ ID NO: 1815208 - RNA, 19 nt, Artificial Sequence
  Description of Artificial Sequence: Synthetic oligonucleotide
  Antisense strand to SEQ ID NO: 1815207
aucggacugauuaauuagu

SEQ ID NO: 1815209 - RNA, 19 nt, Artificial Sequence
  Description of Artificial Sequence: Synthetic oligonucleotide
  Sense strand starting at position 848 of SEQ ID NO: 1563498
ggguuuguucgcuugucca

SEQ ID NO: 1815210 - RNA, 19 nt, Artificial Sequence
  Description of Artificial Sequence: Synthetic oligonucleotide
  Antisense strand to SEQ ID NO: 1815209
uggacaagcgaacaaaccc

SEQ ID NO: 1815211 - RNA, 19 nt, Artificial Sequence
  Description of Artificial Sequence: Synthetic oligonucleotide
  Sense strand starting at position 855 of SEQ ID NO: 1563498
uucgcuuguccaggaaacu

SEQ ID NO: 1815212 - RNA, 19 nt, Artificial Sequence
  Description of Artificial Sequence: Synthetic oligonucleotide
  Antisense strand to SEQ ID NO: 1815211
aguuuccuggacaagcgaa

SEQ ID NO: 1815213 - RNA, 19 nt, Artificial Sequence
  Description of Artificial Sequence: Synthetic oligonucleotide
  Sense strand starting at position 874 of SEQ ID NO: 1563498
ggcaacgagugucuugaaa

SEQ ID NO: 1815214 - RNA, 19 nt, Artificial Sequence
  Description of Artificial Sequence: Synthetic oligonucleotide
  Antisense strand to SEQ ID NO: 1815213
uuucaagacacucguugcc

SEQ ID NO: 1815215 - RNA, 19 nt, Artificial Sequence
  Description of Artificial Sequence: Synthetic oligonucleotide
  Sense strand starting at position 977 of SEQ ID NO: 1563498
gaggguucccagggaguca

SEQ ID NO: 1815216 - RNA, 19 nt, Artificial Sequence
  Description of Artificial Sequence: Synthetic oligonucleotide
  Antisense strand to SEQ ID NO: 1815215
ugacucccugggaacccuc

SEQ ID NO: 1815217 - RNA, 19 nt, Artificial Sequence
  Description of Artificial Sequence: Synthetic oligonucleotide
  Sense strand starting at position 990 of SEQ ID NO: 1563498
gagucagcgcgcuuucgaa

SEQ ID NO: 1815218 - RNA, 19 nt, Artificial Sequence
  Description of Artificial Sequence: Synthetic oligonucleotide
  Antisense strand to SEQ ID NO: 1815217
uucgaaagcgcgcugacuc

SEQ ID NO: 1815219 - RNA, 19 nt, Artificial Sequence
  Description of Artificial Sequence: Synthetic oligonucleotide
  Sense strand starting at position 1507 of SEQ ID NO: 1563498
gcgcgaggucagcucuuua

SEQ ID NO: 1815220 - RNA, 19 nt, Artificial Sequence
  Description of Artificial Sequence: Synthetic oligonucleotide
  Antisense strand to SEQ ID NO: 1815219
uaaagagcugaccucgcgc

SEQ ID NO: 1815221 - RNA, 19 nt, Artificial Sequence
  Description of Artificial Sequence: Synthetic oligonucleotide
  Sense strand starting at position 2752 of SEQ ID NO: 1563498
ucaguuggcucaccuaaca

SEQ ID NO: 1815222 - RNA, 19 nt, Artificial Sequence
  Description of Artificial Sequence: Synthetic oligonucleotide
  Antisense strand to SEQ ID NO: 1815221
uguuaggugagccaacuga

SEQ ID NO: 1815223 - RNA, 19 nt, Artificial Sequence
  Description of Artificial Sequence: Synthetic oligonucleotide
  Sense strand starting at position 2882 of SEQ ID NO: 1563498
gcaggugaucccuagguca

SEQ ID NO: 1815224 - RNA, 19 nt, Artificial Sequence
  Description of Artificial Sequence: Synthetic oligonucleotide
  Antisense strand to SEQ ID NO: 1815223
ugaccuagggaucaccugc

SEQ ID NO: 1815225 - RNA, 19 nt, Artificial Sequence
  Description of Artificial Sequence: Synthetic oligonucleotide
  Sense strand starting at position 3249 of SEQ ID NO: 1563498
agugaaaggcuccacugau

SEQ ID NO: 1815226 - RNA, 19 nt, Artificial Sequence
  Description of Artificial Sequence: Synthetic oligonucleotide
  Antisense strand to SEQ ID NO: 1815225
aucaguggagccuuucacu

SEQ ID NO: 1815227 - RNA, 19 nt, Artificial Sequence
  Description of Artificial Sequence: Synthetic oligonucleotide
  Sense strand starting at position 3444 of SEQ ID NO: 1563498
uggugaugguuucuuugaa

SEQ ID NO: 1815228 - RNA, 19 nt, Artificial Sequence
  Description of Artificial Sequence: Synthetic oligonucleotide
  Antisense strand to SEQ ID NO: 1815227
uucaaagaaaccaucacca

SEQ ID NO: 1815229 - RNA, 19 nt, Artificial Sequence
  Description of Artificial Sequence: Synthetic oligonucleotide
  Sense strand starting at position 3445 of SEQ ID NO: 1563498
ggugaugguuucuuugaac

SEQ ID NO: 1815230 - RNA, 19 nt, Artificial Sequence
  Description of Artificial Sequence: Synthetic oligonucleotide
  Antisense strand to SEQ ID NO: 1815229
guucaaagaaaccaucacc

SEQ ID NO: 1815231 - RNA, 19 nt, Artificial Sequence
  Description of Artificial Sequence: Synthetic oligonucleotide
  Sense strand starting at position 3474 of SEQ ID NO: 1563498
ccaagucucuucgcaguaa

SEQ ID NO: 1815232 - RNA, 19 nt, Artificial Sequence
  Description of Artificial Sequence: Synthetic oligonucleotide
  Antisense strand to SEQ ID NO: 1815231
uuacugcgaagagacuugg

SEQ ID NO: 1815233 - RNA, 19 nt, Artificial Sequence
  Description of Artificial Sequence: Synthetic oligonucleotide
  Sense strand starting at position 3618 of SEQ ID NO: 1563498
uuguuaauuguugcgugua

SEQ ID NO: 1815234 - RNA, 19 nt, Artificial Sequence
  Description of Artificial Sequence: Synthetic oligonucleotide
  Antisense strand to SEQ ID NO: 1815233
uacacgcaacaauuaacaa

SEQ ID NO: 1815235 - RNA, 19 nt, Artificial Sequence
  Description of Artificial Sequence: Synthetic oligonucleotide
  Sense strand starting at position 3631 of SEQ ID NO: 1563498
cguguaggcugaucuccaa

SEQ ID NO: 1815236 - RNA, 19 nt, Artificial Sequence
  Description of Artificial Sequence: Synthetic oligonucleotide
  Antisense strand to SEQ ID NO: 1815235
uuggagaucagccuacacg

SEQ ID NO: 1815237 - RNA, 19 nt, Artificial Sequence
  Description of Artificial Sequence: Synthetic oligonucleotide
  Sense strand starting at position 3634 of SEQ ID NO: 1563498
guaggcugaucuccaagaa

SEQ ID NO: 1815238 - RNA, 19 nt, Artificial Sequence
  Description of Artificial Sequence: Synthetic oligonucleotide
  Antisense strand to SEQ ID NO: 1815237
uucuuggagaucagccuac

SEQ ID NO: 1815239 - RNA, 19 nt, Artificial Sequence
  Description of Artificial Sequence: Synthetic oligonucleotide
  Sense strand starting at position 3694 of SEQ ID NO: 1563498
guugguuaccaccacaaua

SEQ ID NO: 1815240 - RNA, 19 nt, Artificial Sequence
  Description of Artificial Sequence: Synthetic oligonucleotide
  Antisense strand to SEQ ID NO: 1815239
uauuguggugguaaccaac

SEQ ID NO: 1815241 - RNA, 19 nt, Artificial Sequence
  Description of Artificial Sequence: Synthetic oligonucleotide
  Sense strand starting at position 3852 of SEQ ID NO: 1563498
ugacuagugggauggucua

SEQ ID NO: 1815242 - RNA, 19 nt, Artificial Sequence
  Description of Artificial Sequence: Synthetic oligonucleotide
  Antisense strand to SEQ ID NO: 1815241
uagaccaucccacuaguca

SEQ ID NO: 1815243 - RNA, 19 nt, Artificial Sequence
  Description of Artificial Sequence: Synthetic oligonucleotide
  Sense strand starting at position 3919 of SEQ ID NO: 1563498
ggaggguuccugggaaagu

SEQ ID NO: 1815244 - RNA, 19 nt, Artificial Sequence
  Description of Artificial Sequence: Synthetic oligonucleotide
  Antisense strand to SEQ ID NO: 1815243
acuuucccaggaacccucc

SEQ ID NO: 1815245 - RNA, 19 nt, Artificial Sequence
  Description of Artificial Sequence: Synthetic oligonucleotide
  Sense strand starting at position 68 of SEQ ID NO: 1563499
auggguuuccucugagugu

SEQ ID NO: 1815246 - RNA, 19 nt, Artificial Sequence
  Description of Artificial Sequence: Synthetic oligonucleotide
  Antisense strand to SEQ ID NO: 1815245
acacucagaggaaacccau

SEQ ID NO: 1815247 - RNA, 19 nt, Artificial Sequence
  Description of Artificial Sequence: Synthetic oligonucleotide
  Sense strand starting at position 70 of SEQ ID NO: 1563499
ggguuuccucugagugugu

SEQ ID NO: 1815248 - RNA, 19 nt, Artificial Sequence
  Description of Artificial Sequence: Synthetic oligonucleotide
  Antisense strand to SEQ ID NO: 1815247
acacacucagaggaaaccc

SEQ ID NO: 1815249 - RNA, 19 nt, Artificial Sequence
  Description of Artificial Sequence: Synthetic oligonucleotide
  Sense strand starting at position 81 of SEQ ID NO: 1563499
gaguguguaucccugagaa

SEQ ID NO: 1815250 - RNA, 19 nt, Artificial Sequence
  Description of Artificial Sequence: Synthetic oligonucleotide
  Antisense strand to SEQ ID NO: 1815249
uucucagggauacacacuc

SEQ ID NO: 1815251 - RNA, 19 nt, Artificial Sequence
  Description of Artificial Sequence: Synthetic oligonucleotide
  Sense strand starting at position 83 of SEQ ID NO: 1563499
guguguaucccugagaagu

SEQ ID NO: 1815252 - RNA, 19 nt, Artificial Sequence
  Description of Artificial Sequence: Synthetic oligonucleotide
  Antisense strand to SEQ ID NO: 1815251
acuucucagggauacacac

SEQ ID NO: 1815253 - RNA, 19 nt, Artificial Sequence
  Description of Artificial Sequence: Synthetic oligonucleotide
  Sense strand starting at position 183 of SEQ ID NO: 1563499
gagcauccauaguuagaag

SEQ ID NO: 1815254 - RNA, 19 nt, Artificial Sequence
  Description of Artificial Sequence: Synthetic oligonucleotide
  Antisense strand to SEQ ID NO: 1815253
cuucuaacuauggaugcuc

SEQ ID NO: 1815255 - RNA, 19 nt, Artificial Sequence
  Description of Artificial Sequence: Synthetic oligonucleotide
  Sense strand starting at position 211 of SEQ ID NO: 1563499
gcagaugugcucuccgcau

SEQ ID NO: 1815256 - RNA, 19 nt, Artificial Sequence
  Description of Artificial Sequence: Synthetic oligonucleotide
  Antisense strand to SEQ ID NO: 1815255
augcggagagcacaucugc

SEQ ID NO: 1815257 - RNA, 19 nt, Artificial Sequence
  Description of Artificial Sequence: Synthetic oligonucleotide
  Sense strand starting at position 285 of SEQ ID NO: 1563499
gguggacuugaaggguaau

SEQ ID NO: 1815258 - RNA, 19 nt, Artificial Sequence
  Description of Artificial Sequence: Synthetic oligonucleotide
  Antisense strand to SEQ ID NO: 1815257
auuacccuucaaguccacc

SEQ ID NO: 1815259 - RNA, 19 nt, Artificial Sequence
  Description of Artificial Sequence: Synthetic oligonucleotide
  Sense strand starting at position 298 of SEQ ID NO: 1563499
gguaaucugaccuggagca

SEQ ID NO: 1815260 - RNA, 19 nt, Artificial Sequence
  Description of Artificial Sequence: Synthetic oligonucleotide
  Antisense strand to SEQ ID NO: 1815259
ugcuccaggucagauuacc

SEQ ID NO: 1815261 - RNA, 19 nt, Artificial Sequence
  Description of Artificial Sequence: Synthetic oligonucleotide
  Sense strand starting at position 335 of SEQ ID NO: 1563499
gcugaaugccuagaaguac

SEQ ID NO: 1815262 - RNA, 19 nt, Artificial Sequence
  Description of Artificial Sequence: Synthetic oligonucleotide
  Antisense strand to SEQ ID NO: 1815261
guacuucuaggcauucagc

SEQ ID NO: 1815263 - RNA, 19 nt, Artificial Sequence
  Description of Artificial Sequence: Synthetic oligonucleotide
  Sense strand starting at position 350 of SEQ ID NO: 1563499
guacaaaucucacaggaag

SEQ ID NO: 1815264 - RNA, 19 nt, Artificial Sequence
  Description of Artificial Sequence: Synthetic oligonucleotide
  Antisense strand to SEQ ID NO: 1815263
cuuccugugagauuuguac

SEQ ID NO: 1815265 - RNA, 19 nt, Artificial Sequence
  Description of Artificial Sequence: Synthetic oligonucleotide
  Sense strand starting at position 397 of SEQ ID NO: 1563499
ccagcaaugguuuacagaa

SEQ ID NO: 1815266 - RNA, 19 nt, Artificial Sequence
  Description of Artificial Sequence: Synthetic oligonucleotide
  Antisense strand to SEQ ID NO: 1815265
uucuguaaaccauugcugg

SEQ ID NO: 1815267 - RNA, 19 nt, Artificial Sequence
  Description of Artificial Sequence: Synthetic oligonucleotide
  Sense strand starting at position 516 of SEQ ID NO: 1563499
cacggagguuuccuuagaa

SEQ ID NO: 1815268 - RNA, 19 nt, Artificial Sequence
  Description of Artificial Sequence: Synthetic oligonucleotide
  Antisense strand to SEQ ID NO: 1815267
uucuaaggaaaccuccgug

SEQ ID NO: 1815269 - RNA, 19 nt, Artificial Sequence
  Description of Artificial Sequence: Synthetic oligonucleotide
  Sense strand starting at position 528 of SEQ ID NO: 1563499
cuuagaaggcccugagauu

SEQ ID NO: 1815270 - RNA, 19 nt, Artificial Sequence
  Description of Artificial Sequence: Synthetic oligonucleotide
  Antisense strand to SEQ ID NO: 1815269
aaucucagggccuucuaag

SEQ ID NO: 1815271 - RNA, 19 nt, Artificial Sequence
  Description of Artificial Sequence: Synthetic oligonucleotide
  Sense strand starting at position 537 of SEQ ID NO: 1563499
cccugagauucucugggau

SEQ ID NO: 1815272 - RNA, 19 nt, Artificial Sequence
  Description of Artificial Sequence: Synthetic oligonucleotide
  Antisense strand to SEQ ID NO: 1815271
aucccagagaaucucaggg

SEQ ID NO: 1815273 - RNA, 19 nt, Artificial Sequence
  Description of Artificial Sequence: Synthetic oligonucleotide
  Sense strand starting at position 540 of SEQ ID NO: 1563499
ugagauucucugggaucau

SEQ ID NO: 1815274 - RNA, 19 nt, Artificial Sequence
  Description of Artificial Sequence: Synthetic oligonucleotide
  Antisense strand to SEQ ID NO: 1815273
augaucccagagaaucuca

SEQ ID NO: 1815275 - RNA, 19 nt, Artificial Sequence
  Description of Artificial Sequence: Synthetic oligonucleotide
  Sense strand starting at position 1092 of SEQ ID NO: 1563499
cugauuacaggguguagaa

SEQ ID NO: 1815276 - RNA, 19 nt, Artificial Sequence
  Description of Artificial Sequence: Synthetic oligonucleotide
  Antisense strand to SEQ ID NO: 1815275
uucuacacccuguaaucag

SEQ ID NO: 1815277 - RNA, 19 nt, Artificial Sequence
  Description of Artificial Sequence: Synthetic oligonucleotide
  Sense strand starting at position 1213 of SEQ ID NO: 1563499
uaggucagagccugguuua

SEQ ID NO: 1815278 - RNA, 19 nt, Artificial Sequence
  Description of Artificial Sequence: Synthetic oligonucleotide
  Antisense strand to SEQ ID NO: 1815277
uaaaccaggcucugaccua

SEQ ID NO: 1815279 - RNA, 19 nt, Artificial Sequence
  Description of Artificial Sequence: Synthetic oligonucleotide
  Sense strand starting at position 1255 of SEQ ID NO: 1563499
cugucugcuggccagaaua

SEQ ID NO: 1815280 - RNA, 19 nt, Artificial Sequence
  Description of Artificial Sequence: Synthetic oligonucleotide
  Antisense strand to SEQ ID NO: 1815279
uauucuggccagcagacag

SEQ ID NO: 1815281 - RNA, 19 nt, Artificial Sequence
  Description of Artificial Sequence: Synthetic oligonucleotide
  Sense strand starting at position 1257 of SEQ ID NO: 1563499
gucugcuggccagaauacu

SEQ ID NO: 1815282 - RNA, 19 nt, Artificial Sequence
  Description of Artificial Sequence: Synthetic oligonucleotide
  Antisense strand to SEQ ID NO: 1815281
aguauucuggccagcagac

SEQ ID NO: 1815283 - RNA, 19 nt, Artificial Sequence
  Description of Artificial Sequence: Synthetic oligonucleotide
  Sense strand starting at position 1371 of SEQ ID NO: 1563499
gaaguauacccuuggacaa

SEQ ID NO: 1815284 - RNA, 19 nt, Artificial Sequence
  Description of Artificial Sequence: Synthetic oligonucleotide
  Antisense strand to SEQ ID NO: 1815283
uuguccaaggguauacuuc

SEQ ID NO: 1815285 - RNA, 19 nt, Artificial Sequence
  Description of Artificial Sequence: Synthetic oligonucleotide
  Sense strand starting at position 1476 of SEQ ID NO: 1563499
agaccuuaguugcucaaau

SEQ ID NO: 1815286 - RNA, 19 nt, Artificial Sequence
  Description of Artificial Sequence: Synthetic oligonucleotide
  Antisense strand to SEQ ID NO: 1815285
auuugagcaacuaaggucu

SEQ ID NO: 1815287 - RNA, 19 nt, Artificial Sequence
  Description of Artificial Sequence: Synthetic oligonucleotide
  Sense strand starting at position 1501 of SEQ ID NO: 1563499
gaguuucuauucuugggca

SEQ ID NO: 1815288 - RNA, 19 nt, Artificial Sequence
  Description of Artificial Sequence: Synthetic oligonucleotide
  Antisense strand to SEQ ID NO: 1815287
ugcccaagaauagaaacuc

SEQ ID NO: 1815289 - RNA, 19 nt, Artificial Sequence
  Description of Artificial Sequence: Synthetic oligonucleotide
  Sense strand starting at position 1763 of SEQ ID NO: 1563499
aggccaaggcuuggaaaua

SEQ ID NO: 1815290 - RNA, 19 nt, Artificial Sequence
  Description of Artificial Sequence: Synthetic oligonucleotide
  Antisense strand to SEQ ID NO: 1815289
uauuuccaagccuuggccu

SEQ ID NO: 1815291 - RNA, 19 nt, Artificial Sequence
  Description of Artificial Sequence: Synthetic oligonucleotide
  Sense strand starting at position 2114 of SEQ ID NO: 1563499
gcggcucuuggagauguca

SEQ ID NO: 1815292 - RNA, 19 nt, Artificial Sequence
  Description of Artificial Sequence: Synthetic oligonucleotide
  Antisense strand to SEQ ID NO: 1815291
ugacaucuccaagagccgc

SEQ ID NO: 1815293 - RNA, 19 nt, Artificial Sequence
  Description of Artificial Sequence: Synthetic oligonucleotide
  Sense strand starting at position 2116 of SEQ ID NO: 1563499
ggcucuuggagaugucaau

SEQ ID NO: 1815294 - RNA, 19 nt, Artificial Sequence
  Description of Artificial Sequence: Synthetic oligonucleotide
  Antisense strand to SEQ ID NO: 1815293
auugacaucuccaagagcc

SEQ ID NO: 1815295 - RNA, 19 nt, Artificial Sequence
  Description of Artificial Sequence: Synthetic oligonucleotide
  Sense strand starting at position 2413 of SEQ ID NO: 1563499
uucuguguugaggguugaa

SEQ ID NO: 1815296 - RNA, 19 nt, Artificial Sequence
  Description of Artificial Sequence: Synthetic oligonucleotide
  Antisense strand to SEQ ID NO: 1815295
uucaacccucaacacagaa

SEQ ID NO: 1815297 - RNA, 19 nt, Artificial Sequence
  Description of Artificial Sequence: Synthetic oligonucleotide
  Sense strand starting at position 2416 of SEQ ID NO: 1563499
uguguugaggguugaaaca

SEQ ID NO: 1815298 - RNA, 19 nt, Artificial Sequence
  Description of Artificial Sequence: Synthetic oligonucleotide
  Antisense strand to SEQ ID NO: 1815297
uguuucaacccucaacaca

SEQ ID NO: 1815299 - RNA, 19 nt, Artificial Sequence
  Description of Artificial Sequence: Synthetic oligonucleotide
  Sense strand starting at position 2429 of SEQ ID NO: 1563499
gaaacacuguggucuggaa

SEQ ID NO: 1815300 - RNA, 19 nt, Artificial Sequence
  Description of Artificial Sequence: Synthetic oligonucleotide
  Antisense strand to SEQ ID NO: 1815299
uuccagaccacaguguuuc

SEQ ID NO: 1815301 - RNA, 19 nt, Artificial Sequence
  Description of Artificial Sequence: Synthetic oligonucleotide
  Sense strand starting at position 2433 of SEQ ID NO: 1563499
cacuguggucuggaaucau

SEQ ID NO: 1815302 - RNA, 19 nt, Artificial Sequence
  Description of Artificial Sequence: Synthetic oligonucleotide
  Antisense strand to SEQ ID NO: 1815301
augauuccagaccacagug

SEQ ID NO: 1815303 - RNA, 19 nt, Artificial Sequence
  Description of Artificial Sequence: Synthetic oligonucleotide
  Sense strand starting at position 2443 of SEQ ID NO: 1563499
uggaaucaucacugguacu

SEQ ID NO: 1815304 - RNA, 19 nt, Artificial Sequence
  Description of Artificial Sequence: Synthetic oligonucleotide
  Antisense strand to SEQ ID NO: 1815303
aguaccagugaugauucca

SEQ ID NO: 1815305 - RNA, 19 nt, Artificial Sequence
  Description of Artificial Sequence: Synthetic oligonucleotide
  Sense strand starting at position 2526 of SEQ ID NO: 1563499
uuagaucucacguguagaa

SEQ ID NO: 1815306 - RNA, 19 nt, Artificial Sequence
  Description of Artificial Sequence: Synthetic oligonucleotide
  Antisense strand to SEQ ID NO: 1815305
uucuacacgugagaucuaa

SEQ ID NO: 1815307 - RNA, 19 nt, Artificial Sequence
  Description of Artificial Sequence: Synthetic oligonucleotide
  Sense strand starting at position 2685 of SEQ ID NO: 1563499
acgcuuguuaaagagaaga

SEQ ID NO: 1815308 - RNA, 19 nt, Artificial Sequence
  Description of Artificial Sequence: Synthetic oligonucleotide
  Antisense strand to SEQ ID NO: 1815307
ucuucucuuuaacaagcgu

SEQ ID NO: 1815309 - RNA, 19 nt, Artificial Sequence
  Description of Artificial Sequence: Synthetic oligonucleotide
  Sense strand starting at position 2792 of SEQ ID NO: 1563499
acaguagguuacuuaauaa

SEQ ID NO: 1815310 - RNA, 19 nt, Artificial Sequence
  Description of Artificial Sequence: Synthetic oligonucleotide
  Antisense strand to SEQ ID NO: 1815309
uuauuaaguaaccuacugu

SEQ ID NO: 1815311 - RNA, 19 nt, Artificial Sequence
  Description of Artificial Sequence: Synthetic oligonucleotide
  Sense strand starting at position 3009 of SEQ ID NO: 1563499
uugggaguggguugcuuaa

SEQ ID NO: 1815312 - RNA, 19 nt, Artificial Sequence
  Description of Artificial Sequence: Synthetic oligonucleotide
  Antisense strand to SEQ ID NO: 1815311
uuaagcaacccacucccaa

SEQ ID NO: 1815313 - RNA, 19 nt, Artificial Sequence
  Description of Artificial Sequence: Synthetic oligonucleotide
  Sense strand starting at position 3011 of SEQ ID NO: 1563499
gggaguggguugcuuaagu

SEQ ID NO: 1815314 - RNA, 19 nt, Artificial Sequence
  Description of Artificial Sequence: Synthetic oligonucleotide
  Antisense strand to SEQ ID NO: 1815313
acuuaagcaacccacuccc

SEQ ID NO: 1815315 - RNA, 19 nt, Artificial Sequence
  Description of Artificial Sequence: Synthetic oligonucleotide
  Sense strand starting at position 3471 of SEQ ID NO: 1563499
uaggacuaguguuuacaaa

SEQ ID NO: 1815316 - RNA, 19 nt, Artificial Sequence
  Description of Artificial Sequence: Synthetic oligonucleotide
  Antisense strand to SEQ ID NO: 1815315
uuuguaaacacuaguccua

SEQ ID NO: 1815317 - RNA, 19 nt, Artificial Sequence
  Description of Artificial Sequence: Synthetic oligonucleotide
  Sense strand starting at position 3479 of SEQ ID NO: 1563499
guguuuacaaagugucuaa

SEQ ID NO: 1815318 - RNA, 19 nt, Artificial Sequence
  Description of Artificial Sequence: Synthetic oligonucleotide
  Antisense strand to SEQ ID NO: 1815317
uuagacacuuuguaaacac

SEQ ID NO: 1815319 - RNA, 19 nt, Artificial Sequence
  Description of Artificial Sequence: Synthetic oligonucleotide
  Sense strand starting at position 3636 of SEQ ID NO: 1563499
cuauguauacuaugcagaa

SEQ ID NO: 1815320 - RNA, 19 nt, Artificial Sequence
  Description of Artificial Sequence: Synthetic oligonucleotide
  Antisense strand to SEQ ID NO: 1815319
uucugcauaguauacauag

SEQ ID NO: 1815321 - RNA, 19 nt, Artificial Sequence
  Description of Artificial Sequence: Synthetic oligonucleotide
  Sense strand starting at position 3897 of SEQ ID NO: 1563499
cuagaaauauggccugauc

SEQ ID NO: 1815322 - RNA, 19 nt, Artificial Sequence
  Description of Artificial Sequence: Synthetic oligonucleotide
  Antisense strand to SEQ ID NO: 1815321
gaucaggccauauuucuag

SEQ ID NO: 1815323 - RNA, 19 nt, Artificial Sequence
  Description of Artificial Sequence: Synthetic oligonucleotide
  Sense strand starting at position 3899 of SEQ ID NO: 1563499
agaaauauggccugaucuc

SEQ ID NO: 1815324 - RNA, 19 nt, Artificial Sequence
  Description of Artificial Sequence: Synthetic oligonucleotide
  Antisense strand to SEQ ID NO: 1815323
gagaucaggccauauuucu

SEQ ID NO: 1815325 - RNA, 19 nt, Artificial Sequence
  Description of Artificial Sequence: Synthetic oligonucleotide
  Sense strand starting at position 264 of SEQ ID NO: 1563500
ugccauuaugaggaugagu

SEQ ID NO: 1815326 - RNA, 19 nt, Artificial Sequence
  Description of Artificial Sequence: Synthetic oligonucleotide
  Antisense strand to SEQ ID NO: 1815325
acucauccucauaauggca

SEQ ID NO: 1815327 - RNA, 19 nt, Artificial Sequence
  Description of Artificial Sequence: Synthetic oligonucleotide
  Sense strand starting at position 266 of SEQ ID NO: 1563500
ccauuaugaggaugagugu

SEQ ID NO: 1815328 - RNA, 19 nt, Artificial Sequence
  Description of Artificial Sequence: Synthetic oligonucleotide
  Antisense strand to SEQ ID NO: 1815327
acacucauccucauaaugg

SEQ ID NO: 1815329 - RNA, 19 nt, Artificial Sequence
  Description of Artificial Sequence: Synthetic oligonucleotide
  Sense strand starting at position 395 of SEQ ID NO: 1563500
ggagacaguugcuuugaca

SEQ ID NO: 1815330 - RNA, 19 nt, Artificial Sequence
  Description of Artificial Sequence: Synthetic oligonucleotide
  Antisense strand to SEQ ID NO: 1815329
ugucaaagcaacugucucc

SEQ ID NO: 1815331 - RNA, 19 nt, Artificial Sequence
  Description of Artificial Sequence: Synthetic oligonucleotide
  Sense strand starting at position 404 of SEQ ID NO: 1563500
ugcuuugacaggugaggaa

SEQ ID NO: 1815332 - RNA, 19 nt, Artificial Sequence
  Description of Artificial Sequence: Synthetic oligonucleotide
  Antisense strand to SEQ ID NO: 1815331
uuccucaccugucaaagca

SEQ ID NO: 1815333 - RNA, 19 nt, Artificial Sequence
  Description of Artificial Sequence: Synthetic oligonucleotide
  Sense strand starting at position 458 of SEQ ID NO: 1563500
ggagauguuagaggugaca

SEQ ID NO: 1815334 - RNA, 19 nt, Artificial Sequence
  Description of Artificial Sequence: Synthetic oligonucleotide
  Antisense strand to SEQ ID NO: 1815333
ugucaccucuaacaucucc

SEQ ID NO: 1815335 - RNA, 19 nt, Artificial Sequence
  Description of Artificial Sequence: Synthetic oligonucleotide
  Sense strand starting at position 565 of SEQ ID NO: 1563500
caguauaugcccugggaaa

SEQ ID NO: 1815336 - RNA, 19 nt, Artificial Sequence
  Description of Artificial Sequence: Synthetic oligonucleotide
  Antisense strand to SEQ ID NO: 1815335
uuucccagggcauauacug

SEQ ID NO: 1815337 - RNA, 19 nt, Artificial Sequence
  Description of Artificial Sequence: Synthetic oligonucleotide
  Sense strand starting at position 889 of SEQ ID NO: 1563500
ugccaagaugucuaaggcu

SEQ ID NO: 1815338 - RNA, 19 nt, Artificial Sequence
  Description of Artificial Sequence: Synthetic oligonucleotide
  Antisense strand to SEQ ID NO: 1815337
agccuuagacaucuuggca

SEQ ID NO: 1815339 - RNA, 19 nt, Artificial Sequence
  Description of Artificial Sequence: Synthetic oligonucleotide
  Sense strand starting at position 906 of SEQ ID NO: 1563500
cuuugacuuuggguuggaa

SEQ ID NO: 1815340 - RNA, 19 nt, Artificial Sequence
  Description of Artificial Sequence: Synthetic oligonucleotide
  Antisense strand to SEQ ID NO: 1815339
uuccaacccaaagucaaag

SEQ ID NO: 1815341 - RNA, 19 nt, Artificial Sequence
  Description of Artificial Sequence: Synthetic oligonucleotide
  Sense strand starting at position 909 of SEQ ID NO: 1563500
ugacuuuggguuggaaaga

SEQ ID NO: 1815342 - RNA, 19 nt, Artificial Sequence
  Description of Artificial Sequence: Synthetic oligonucleotide
  Antisense strand to SEQ ID NO: 1815341
ucuuuccaacccaaaguca

SEQ ID NO: 1815343 - RNA, 19 nt, Artificial Sequence
  Description of Artificial Sequence: Synthetic oligonucleotide
  Sense strand starting at position 922 of SEQ ID NO: 1563500
gaaagaaccgggugagauu

SEQ ID NO: 1815344 - RNA, 19 nt, Artificial Sequence
  Description of Artificial Sequence: Synthetic oligonucleotide
  Antisense strand to SEQ ID NO: 1815343
aaucucacccgguucuuuc

SEQ ID NO: 1815345 - RNA, 19 nt, Artificial Sequence
  Description of Artificial Sequence: Synthetic oligonucleotide
  Sense strand starting at position 990 of SEQ ID NO: 1563500
ccaggucugccacauguau

SEQ ID NO: 1815346 - RNA, 19 nt, Artificial Sequence
  Description of Artificial Sequence: Synthetic oligonucleotide
  Antisense strand to SEQ ID NO: 1815345
auacauguggcagaccugg

SEQ ID NO: 1815347 - RNA, 19 nt, Artificial Sequence
  Description of Artificial Sequence: Synthetic oligonucleotide
  Sense strand starting at position 1029 of SEQ ID NO: 1563500
augugagcugagcauuacu

SEQ ID NO: 1815348 - RNA, 19 nt, Artificial Sequence
  Description of Artificial Sequence: Synthetic oligonucleotide
  Antisense strand to SEQ ID NO: 1815347
aguaaugcucagcucacau

SEQ ID NO: 1815349 - RNA, 19 nt, Artificial Sequence
  Description of Artificial Sequence: Synthetic oligonucleotide
  Sense strand starting at position 2040 of SEQ ID NO: 1563500
gucacaaucccggacagau

SEQ ID NO: 1815350 - RNA, 19 nt, Artificial Sequence
  Description of Artificial Sequence: Synthetic oligonucleotide
  Antisense strand to SEQ ID NO: 1815349
aucuguccgggauugugac

SEQ ID NO: 1815351 - RNA, 19 nt, Artificial Sequence
  Description of Artificial Sequence: Synthetic oligonucleotide
  Sense strand starting at position 2252 of SEQ ID NO: 1563500
caauuauuggaccacguua

SEQ ID NO: 1815352 - RNA, 19 nt, Artificial Sequence
  Description of Artificial Sequence: Synthetic oligonucleotide
  Antisense strand to SEQ ID NO: 1815351
uaacgugguccaauaauug

SEQ ID NO: 1815353 - RNA, 19 nt, Artificial Sequence
  Description of Artificial Sequence: Synthetic oligonucleotide
  Sense strand starting at position 2254 of SEQ ID NO: 1563500
auuauuggaccacguuaaa

SEQ ID NO: 1815354 - RNA, 19 nt, Artificial Sequence
  Description of Artificial Sequence: Synthetic oligonucleotide
  Antisense strand to SEQ ID NO: 1815353
uuuaacgugguccaauaau

SEQ ID NO: 1815355 - RNA, 19 nt, Artificial Sequence
  Description of Artificial Sequence: Synthetic oligonucleotide
  Sense strand starting at position 2381 of SEQ ID NO: 1563500
gugauaugcuaaucucuau

SEQ ID NO: 1815356 - RNA, 19 nt, Artificial Sequence
  Description of Artificial Sequence: Synthetic oligonucleotide
  Antisense strand to SEQ ID NO: 1815355
auagagauuagcauaucac

SEQ ID NO: 1815357 - RNA, 19 nt, Artificial Sequence
  Description of Artificial Sequence: Synthetic oligonucleotide
  Sense strand starting at position 2435 of SEQ ID NO: 1563500
gguggacuggccugauacu

SEQ ID NO: 1815358 - RNA, 19 nt, Artificial Sequence
  Description of Artificial Sequence: Synthetic oligonucleotide
  Antisense strand to SEQ ID NO: 1815357
aguaucaggccaguccacc

SEQ ID NO: 1815359 - RNA, 19 nt, Artificial Sequence
  Description of Artificial Sequence: Synthetic oligonucleotide
  Sense strand starting at position 2436 of SEQ ID NO: 1563500
guggacuggccugauacuu

SEQ ID NO: 1815360 - RNA, 19 nt, Artificial Sequence
  Description of Artificial Sequence: Synthetic oligonucleotide
  Antisense strand to SEQ ID NO: 1815359
aaguaucaggccaguccac

SEQ ID NO: 1815361 - RNA, 19 nt, Artificial Sequence
  Description of Artificial Sequence: Synthetic oligonucleotide
  Sense strand starting at position 2445 of SEQ ID NO: 1563500
ccugauacuucuuuguuga

SEQ ID NO: 1815362 - RNA, 19 nt, Artificial Sequence
  Description of Artificial Sequence: Synthetic oligonucleotide
  Antisense strand to SEQ ID NO: 1815361
ucaacaaagaaguaucagg

SEQ ID NO: 1815363 - RNA, 19 nt, Artificial Sequence
  Description of Artificial Sequence: Synthetic oligonucleotide
  Sense strand starting at position 2446 of SEQ ID NO: 1563500
cugauacuucuuuguugau

SEQ ID NO: 1815364 - RNA, 19 nt, Artificial Sequence
  Description of Artificial Sequence: Synthetic oligonucleotide
  Antisense strand to SEQ ID NO: 1815363
aucaacaaagaaguaucag

SEQ ID NO: 1815365 - RNA, 19 nt, Artificial Sequence
  Description of Artificial Sequence: Synthetic oligonucleotide
  Sense strand starting at position 2447 of SEQ ID NO: 1563500
ugauacuucuuuguugauu

SEQ ID NO: 1815366 - RNA, 19 nt, Artificial Sequence
  Description of Artificial Sequence: Synthetic oligonucleotide
  Antisense strand to SEQ ID NO: 1815365
aaucaacaaagaaguauca

SEQ ID NO: 1815367 - RNA, 19 nt, Artificial Sequence
  Description of Artificial Sequence: Synthetic oligonucleotide
  Sense strand starting at position 2458 of SEQ ID NO: 1563500
uguugauuguaaccauaaa

SEQ ID NO: 1815368 - RNA, 19 nt, Artificial Sequence
  Description of Artificial Sequence: Synthetic oligonucleotide
  Antisense strand to SEQ ID NO: 1815367
uuuaugguuacaaucaaca

SEQ ID NO: 1815369 - RNA, 19 nt, Artificial Sequence
  Description of Artificial Sequence: Synthetic oligonucleotide
  Sense strand starting at position 2507 of SEQ ID NO: 1563500
cugguuguaagagagcauu

SEQ ID NO: 1815370 - RNA, 19 nt, Artificial Sequence
  Description of Artificial Sequence: Synthetic oligonucleotide
  Antisense strand to SEQ ID NO: 1815369
aaugcucucuuacaaccag

SEQ ID NO: 1815371 - RNA, 19 nt, Artificial Sequence
  Description of Artificial Sequence: Synthetic oligonucleotide
  Sense strand starting at position 2513 of SEQ ID NO: 1563500
guaagagagcauugcuaac

SEQ ID NO: 1815372 - RNA, 19 nt, Artificial Sequence
  Description of Artificial Sequence: Synthetic oligonucleotide
  Antisense strand to SEQ ID NO: 1815371
guuagcaaugcucucuuac

SEQ ID NO: 1815373 - RNA, 19 nt, Artificial Sequence
  Description of Artificial Sequence: Synthetic oligonucleotide
  Sense strand starting at position 2541 of SEQ ID NO: 1563500
gcccuuuaucuugaaguug

SEQ ID NO: 1815374 - RNA, 19 nt, Artificial Sequence
  Description of Artificial Sequence: Synthetic oligonucleotide
  Antisense strand to SEQ ID NO: 1815373
caacuucaagauaaagggc

SEQ ID NO: 1815375 - RNA, 19 nt, Artificial Sequence
  Description of Artificial Sequence: Synthetic oligonucleotide
  Sense strand starting at position 2573 of SEQ ID NO: 1563500
aguugugacuaauuuagcu

SEQ ID NO: 1815376 - RNA, 19 nt, Artificial Sequence
  Description of Artificial Sequence: Synthetic oligonucleotide
  Antisense strand to SEQ ID NO: 1815375
agcuaaauuagucacaacu

SEQ ID NO: 1815377 - RNA, 19 nt, Artificial Sequence
  Description of Artificial Sequence: Synthetic oligonucleotide
  Sense strand starting at position 2581 of SEQ ID NO: 1563500
cuaauuuagcugugucaua

SEQ ID NO: 1815378 - RNA, 19 nt, Artificial Sequence
  Description of Artificial Sequence: Synthetic oligonucleotide
  Antisense strand to SEQ ID NO: 1815377
uaugacacagcuaaauuag

SEQ ID NO: 1815379 - RNA, 19 nt, Artificial Sequence
  Description of Artificial Sequence: Synthetic oligonucleotide
  Sense strand starting at position 2582 of SEQ ID NO: 1563500
uaauuuagcugugucauag

SEQ ID NO: 1815380 - RNA, 19 nt, Artificial Sequence
  Description of Artificial Sequence: Synthetic oligonucleotide
  Antisense strand to SEQ ID NO: 1815379
cuaugacacagcuaaauua

SEQ ID NO: 1815381 - RNA, 19 nt, Artificial Sequence
  Description of Artificial Sequence: Synthetic oligonucleotide
  Sense strand starting at position 2608 of SEQ ID NO: 1563500
guacauacagcucaaauga

SEQ ID NO: 1815382 - RNA, 19 nt, Artificial Sequence
  Description of Artificial Sequence: Synthetic oligonucleotide
  Antisense strand to SEQ ID NO: 1815381
ucauuugagcuguauguac

SEQ ID NO: 1815383 - RNA, 19 nt, Artificial Sequence
  Description of Artificial Sequence: Synthetic oligonucleotide
  Sense strand starting at position 2622 of SEQ ID NO: 1563500
aaugacuuaccgcaugagu

SEQ ID NO: 1815384 - RNA, 19 nt, Artificial Sequence
  Description of Artificial Sequence: Synthetic oligonucleotide
  Antisense strand to SEQ ID NO: 1815383
acucaugcgguaagucauu

SEQ ID NO: 1815385 - RNA, 19 nt, Artificial Sequence
  Description of Artificial Sequence: Synthetic oligonucleotide
  Sense strand starting at position 2625 of SEQ ID NO: 1563500
gacuuaccgcaugagucua

SEQ ID NO: 1815386 - RNA, 19 nt, Artificial Sequence
  Description of Artificial Sequence: Synthetic oligonucleotide
  Antisense strand to SEQ ID NO: 1815385
uagacucaugcgguaaguc

SEQ ID NO: 1815387 - RNA, 19 nt, Artificial Sequence
  Description of Artificial Sequence: Synthetic oligonucleotide
  Sense strand starting at position 2702 of SEQ ID NO: 1563500
ccuacaugcuuugugaacu

SEQ ID NO: 1815388 - RNA, 19 nt, Artificial Sequence
  Description of Artificial Sequence: Synthetic oligonucleotide
  Antisense strand to SEQ ID NO: 1815387
aguucacaaagcauguagg

SEQ ID NO: 1815389 - RNA, 19 nt, Artificial Sequence
  Description of Artificial Sequence: Synthetic oligonucleotide
  Sense strand starting at position 2780 of SEQ ID NO: 1563500
aaguuaaugcuacauggua

SEQ ID NO: 1815390 - RNA, 19 nt, Artificial Sequence
  Description of Artificial Sequence: Synthetic oligonucleotide
  Antisense strand to SEQ ID NO: 1815389
uaccauguagcauuaacuu

SEQ ID NO: 1815391 - RNA, 19 nt, Artificial Sequence
  Description of Artificial Sequence: Synthetic oligonucleotide
  Sense strand starting at position 3238 of SEQ ID NO: 1563500
uugguauguguucaaaggu

SEQ ID NO: 1815392 - RNA, 19 nt, Artificial Sequence
  Description of Artificial Sequence: Synthetic oligonucleotide
  Antisense strand to SEQ ID NO: 1815391
accuuugaacacauaccaa

SEQ ID NO: 1815393 - RNA, 19 nt, Artificial Sequence
  Description of Artificial Sequence: Synthetic oligonucleotide
  Sense strand starting at position 3296 of SEQ ID NO: 1563500
ugcuuaugauggucaagga

SEQ ID NO: 1815394 - RNA, 19 nt, Artificial Sequence
  Description of Artificial Sequence: Synthetic oligonucleotide
  Antisense strand to SEQ ID NO: 1815393
uccuugaccaucauaagca

SEQ ID NO: 1815395 - RNA, 19 nt, Artificial Sequence
  Description of Artificial Sequence: Synthetic oligonucleotide
  Sense strand starting at position 3482 of SEQ ID NO: 1563500
cggagaagcuuuguaaucu

SEQ ID NO: 1815396 - RNA, 19 nt, Artificial Sequence
  Description of Artificial Sequence: Synthetic oligonucleotide
  Antisense strand to SEQ ID NO: 1815395
agauuacaaagcuucuccg

SEQ ID NO: 1815397 - RNA, 19 nt, Artificial Sequence
  Description of Artificial Sequence: Synthetic oligonucleotide
  Sense strand starting at position 3486 of SEQ ID NO: 1563500
gaagcuuuguaaucuaugu

SEQ ID NO: 1815398 - RNA, 19 nt, Artificial Sequence
  Description of Artificial Sequence: Synthetic oligonucleotide
  Antisense strand to SEQ ID NO: 1815397
acauagauuacaaagcuuc

SEQ ID NO: 1815399 - RNA, 19 nt, Artificial Sequence
  Description of Artificial Sequence: Synthetic oligonucleotide
  Sense strand starting at position 3490 of SEQ ID NO: 1563500
cuuuguaaucuauguagua

SEQ ID NO: 1815400 - RNA, 19 nt, Artificial Sequence
  Description of Artificial Sequence: Synthetic oligonucleotide
  Antisense strand to SEQ ID NO: 1815399
uacuacauagauuacaaag

SEQ ID NO: 1815401 - RNA, 19 nt, Artificial Sequence
  Description of Artificial Sequence: Synthetic oligonucleotide
  Sense strand starting at position 3527 of SEQ ID NO: 1563500
aguauuggagucuacuuau

SEQ ID NO: 1815402 - RNA, 19 nt, Artificial Sequence
  Description of Artificial Sequence: Synthetic oligonucleotide
  Antisense strand to SEQ ID NO: 1815401
auaaguagacuccaauacu

SEQ ID NO: 1815403 - RNA, 19 nt, Artificial Sequence
  Description of Artificial Sequence: Synthetic oligonucleotide
  Sense strand starting at position 3949 of SEQ ID NO: 1563500
aagcaugacccguguuaaa

SEQ ID NO: 1815404 - RNA, 19 nt, Artificial Sequence
  Description of Artificial Sequence: Synthetic oligonucleotide
  Antisense strand to SEQ ID NO: 1815403
uuuaacacgggucaugcuu

SEQ ID NO: 1815405 - RNA, 19 nt, Artificial Sequence
  Description of Artificial Sequence: Synthetic oligonucleotide
  Sense strand starting at position 400 of SEQ ID NO: 1563501
ugccaaauccagugucuuu

SEQ ID NO: 1815406 - RNA, 19 nt, Artificial Sequence
  Description of Artificial Sequence: Synthetic oligonucleotide
  Antisense strand to SEQ ID NO: 1815405
aaagacacuggauuuggca

SEQ ID NO: 1815407 - RNA, 19 nt, Artificial Sequence
  Description of Artificial Sequence: Synthetic oligonucleotide
  Sense strand starting at position 566 of SEQ ID NO: 1563501
cggcgcucgcggaagaaau

SEQ ID NO: 1815408 - RNA, 19 nt, Artificial Sequence
  Description of Artificial Sequence: Synthetic oligonucleotide
  Antisense strand to SEQ ID NO: 1815407
auuucuuccgcgagcgccg

SEQ ID NO: 1815409 - RNA, 19 nt, Artificial Sequence
  Description of Artificial Sequence: Synthetic oligonucleotide
  Sense strand starting at position 576 of SEQ ID NO: 1563501
ggaagaaaugcucguuaac

SEQ ID NO: 1815410 - RNA, 19 nt, Artificial Sequence
  Description of Artificial Sequence: Synthetic oligonucleotide
  Antisense strand to SEQ ID NO: 1815409
guuaacgagcauuucuucc

SEQ ID NO: 1815411 - RNA, 19 nt, Artificial Sequence
  Description of Artificial Sequence: Synthetic oligonucleotide
  Sense strand starting at position 579 of SEQ ID NO: 1563501
agaaaugcucguuaacaaa

SEQ ID NO: 1815412 - RNA, 19 nt, Artificial Sequence
  Description of Artificial Sequence: Synthetic oligonucleotide
  Antisense strand to SEQ ID NO: 1815411
uuuguuaacgagcauuucu

SEQ ID NO: 1815413 - RNA, 19 nt, Artificial Sequence
  Description of Artificial Sequence: Synthetic oligonucleotide
  Sense strand starting at position 618 of SEQ ID NO: 1563501
ccaauuguugccugaggga

SEQ ID NO: 1815414 - RNA, 19 nt, Artificial Sequence
  Description of Artificial Sequence: Synthetic oligonucleotide
  Antisense strand to SEQ ID NO: 1815413
ucccucaggcaacaauugg

SEQ ID NO: 1815415 - RNA, 19 nt, Artificial Sequence
  Description of Artificial Sequence: Synthetic oligonucleotide
  Sense strand starting at position 649 of SEQ ID NO: 1563501
uuuccuucugccgaucaca

SEQ ID NO: 1815416 - RNA, 19 nt, Artificial Sequence
  Description of Artificial Sequence: Synthetic oligonucleotide
  Antisense strand to SEQ ID NO: 1815415
ugugaucggcagaaggaaa

SEQ ID NO: 1815417 - RNA, 19 nt, Artificial Sequence
  Description of Artificial Sequence: Synthetic oligonucleotide
  Sense strand starting at position 930 of SEQ ID NO: 1563501
gugccuucuuuauuucuua

SEQ ID NO: 1815418 - RNA, 19 nt, Artificial Sequence
  Description of Artificial Sequence: Synthetic oligonucleotide
  Antisense strand to SEQ ID NO: 1815417
uaagaaauaaagaaggcac

SEQ ID NO: 1815419 - RNA, 19 nt, Artificial Sequence
  Description of Artificial Sequence: Synthetic oligonucleotide
  Sense strand starting at position 937 of SEQ ID NO: 1563501
cuuuauuucuuagggaaga

SEQ ID NO: 1815420 - RNA, 19 nt, Artificial Sequence
  Description of Artificial Sequence: Synthetic oligonucleotide
  Antisense strand to SEQ ID NO: 1815419
ucuucccuaagaaauaaag

SEQ ID NO: 1815421 - RNA, 19 nt, Artificial Sequence
  Description of Artificial Sequence: Synthetic oligonucleotide
  Sense strand starting at position 938 of SEQ ID NO: 1563501
uuuauuucuuagggaagag

SEQ ID NO: 1815422 - RNA, 19 nt, Artificial Sequence
  Description of Artificial Sequence: Synthetic oligonucleotide
  Antisense strand to SEQ ID NO: 1815421
cucuucccuaagaaauaaa

SEQ ID NO: 1815423 - RNA, 19 nt, Artificial Sequence
  Description of Artificial Sequence: Synthetic oligonucleotide
  Sense strand starting at position 1148 of SEQ ID NO: 1563501
gucgaaggcuauuugugau

SEQ ID NO: 1815424 - RNA, 19 nt, Artificial Sequence
  Description of Artificial Sequence: Synthetic oligonucleotide
  Antisense strand to SEQ ID NO: 1815423
aucacaaauagccuucgac

SEQ ID NO: 1815425 - RNA, 19 nt, Artificial Sequence
  Description of Artificial Sequence: Synthetic oligonucleotide
  Sense strand starting at position 1191 of SEQ ID NO: 1563501
gcgugaauccagcaggugu

SEQ ID NO: 1815426 - RNA, 19 nt, Artificial Sequence
  Description of Artificial Sequence: Synthetic oligonucleotide
  Antisense strand to SEQ ID NO: 1815425
acaccugcuggauucacgc

SEQ ID NO: 1815427 - RNA, 19 nt, Artificial Sequence
  Description of Artificial Sequence: Synthetic oligonucleotide
  Sense strand starting at position 1230 of SEQ ID NO: 1563501
gagagugcgcguuggagau

SEQ ID NO: 1815428 - RNA, 19 nt, Artificial Sequence
  Description of Artificial Sequence: Synthetic oligonucleotide
  Antisense strand to SEQ ID NO: 1815427
aucuccaacgcgcacucuc

SEQ ID NO: 1815429 - RNA, 19 nt, Artificial Sequence
  Description of Artificial Sequence: Synthetic oligonucleotide
  Sense strand starting at position 1366 of SEQ ID NO: 1563501
gugucuguaaugggcagau

SEQ ID NO: 1815430 - RNA, 19 nt, Artificial Sequence
  Description of Artificial Sequence: Synthetic oligonucleotide
  Antisense strand to SEQ ID NO: 1815429
aucugcccauuacagacac

SEQ ID NO: 1815431 - RNA, 19 nt, Artificial Sequence
  Description of Artificial Sequence: Synthetic oligonucleotide
  Sense strand starting at position 1581 of SEQ ID NO: 1563501
uguggugcgugguuuguau

SEQ ID NO: 1815432 - RNA, 19 nt, Artificial Sequence
  Description of Artificial Sequence: Synthetic oligonucleotide
  Antisense strand to SEQ ID NO: 1815431
auacaaaccacgcaccaca

SEQ ID NO: 1815433 - RNA, 19 nt, Artificial Sequence
  Description of Artificial Sequence: Synthetic oligonucleotide
  Sense strand starting at position 1721 of SEQ ID NO: 1563501
gugugcguugucaggacuu

SEQ ID NO: 1815434 - RNA, 19 nt, Artificial Sequence
  Description of Artificial Sequence: Synthetic oligonucleotide
  Antisense strand to SEQ ID NO: 1815433
aaguccugacaacgcacac

SEQ ID NO: 1815435 - RNA, 19 nt, Artificial Sequence
  Description of Artificial Sequence: Synthetic oligonucleotide
  Sense strand starting at position 2349 of SEQ ID NO: 1563501
gacgguuacgcgcagaauc

SEQ ID NO: 1815436 - RNA, 19 nt, Artificial Sequence
  Description of Artificial Sequence: Synthetic oligonucleotide
  Antisense strand to SEQ ID NO: 1815435
gauucugcgcguaaccguc

SEQ ID NO: 1815437 - RNA, 19 nt, Artificial Sequence
  Description of Artificial Sequence: Synthetic oligonucleotide
  Sense strand starting at position 2453 of SEQ ID NO: 1563501
ggguauaaagucuggcuga

SEQ ID NO: 1815438 - RNA, 19 nt, Artificial Sequence
  Description of Artificial Sequence: Synthetic oligonucleotide
  Antisense strand to SEQ ID NO: 1815437
ucagccagacuuuauaccc

SEQ ID NO: 1815439 - RNA, 19 nt, Artificial Sequence
  Description of Artificial Sequence: Synthetic oligonucleotide
  Sense strand starting at position 2509 of SEQ ID NO: 1563501
ugcagugucuccucucauu

SEQ ID NO: 1815440 - RNA, 19 nt, Artificial Sequence
  Description of Artificial Sequence: Synthetic oligonucleotide
  Antisense strand to SEQ ID NO: 1815439
aaugagaggagacacugca

SEQ ID NO: 1815441 - RNA, 19 nt, Artificial Sequence
  Description of Artificial Sequence: Synthetic oligonucleotide
  Sense strand starting at position 2520 of SEQ ID NO: 1563501
cucucauucucauguguca

SEQ ID NO: 1815442 - RNA, 19 nt, Artificial Sequence
  Description of Artificial Sequence: Synthetic oligonucleotide
  Antisense strand to SEQ ID NO: 1815441
ugacacaugagaaugagag

SEQ ID NO: 1815443 - RNA, 19 nt, Artificial Sequence
  Description of Artificial Sequence: Synthetic oligonucleotide
  Sense strand starting at position 2523 of SEQ ID NO: 1563501
ucauucucaugugucagau

SEQ ID NO: 1815444 - RNA, 19 nt, Artificial Sequence
  Description of Artificial Sequence: Synthetic oligonucleotide
  Antisense strand to SEQ ID NO: 1815443
aucugacacaugagaauga

SEQ ID NO: 1815445 - RNA, 19 nt, Artificial Sequence
  Description of Artificial Sequence: Synthetic oligonucleotide
  Sense strand starting at position 2532 of SEQ ID NO: 1563501
ugugucagauucuggcuaa

SEQ ID NO: 1815446 - RNA, 19 nt, Artificial Sequence
  Description of Artificial Sequence: Synthetic oligonucleotide
  Antisense strand to SEQ ID NO: 1815445
uuagccagaaucugacaca

SEQ ID NO: 1815447 - RNA, 19 nt, Artificial Sequence
  Description of Artificial Sequence: Synthetic oligonucleotide
  Sense strand starting at position 2533 of SEQ ID NO: 1563501
gugucagauucuggcuaau

SEQ ID NO: 1815448 - RNA, 19 nt, Artificial Sequence
  Description of Artificial Sequence: Synthetic oligonucleotide
  Antisense strand to SEQ ID NO: 1815447
auuagccagaaucugacac

SEQ ID NO: 1815449 - RNA, 19 nt, Artificial Sequence
  Description of Artificial Sequence: Synthetic oligonucleotide
  Sense strand starting at position 2535 of SEQ ID NO: 1563501
gucagauucuggcuaauag

SEQ ID NO: 1815450 - RNA, 19 nt, Artificial Sequence
  Description of Artificial Sequence: Synthetic oligonucleotide
  Antisense strand to SEQ ID NO: 1815449
cuauuagccagaaucugac

SEQ ID NO: 1815451 - RNA, 19 nt, Artificial Sequence
  Description of Artificial Sequence: Synthetic oligonucleotide
  Sense strand starting at position 2536 of SEQ ID NO: 1563501
ucagauucuggcuaauagu

SEQ ID NO: 1815452 - RNA, 19 nt, Artificial Sequence
  Description of Artificial Sequence: Synthetic oligonucleotide
  Antisense strand to SEQ ID NO: 1815451
acuauuagccagaaucuga

SEQ ID NO: 1815453 - RNA, 19 nt, Artificial Sequence
  Description of Artificial Sequence: Synthetic oligonucleotide
  Sense strand starting at position 2539 of SEQ ID NO: 1563501
gauucuggcuaauaguaau

SEQ ID NO: 1815454 - RNA, 19 nt, Artificial Sequence
  Description of Artificial Sequence: Synthetic oligonucleotide
  Antisense strand to SEQ ID NO: 1815453
auuacuauuagccagaauc

SEQ ID NO: 1815455 - RNA, 19 nt, Artificial Sequence
  Description of Artificial Sequence: Synthetic oligonucleotide
  Sense strand starting at position 2545 of SEQ ID NO: 1563501
ggcuaauaguaauagcauu

SEQ ID NO: 1815456 - RNA, 19 nt, Artificial Sequence
  Description of Artificial Sequence: Synthetic oligonucleotide
  Antisense strand to SEQ ID NO: 1815455
aaugcuauuacuauuagcc

SEQ ID NO: 1815457 - RNA, 19 nt, Artificial Sequence
  Description of Artificial Sequence: Synthetic oligonucleotide
  Sense strand starting at position 2798 of SEQ ID NO: 1563501
acaauaguguaguggcaga

SEQ ID NO: 1815458 - RNA, 19 nt, Artificial Sequence
  Description of Artificial Sequence: Synthetic oligonucleotide
  Antisense strand to SEQ ID NO: 1815457
ucugccacuacacuauugu

SEQ ID NO: 1815459 - RNA, 19 nt, Artificial Sequence
  Description of Artificial Sequence: Synthetic oligonucleotide
  Sense strand starting at position 2865 of SEQ ID NO: 1563501
gagugugagugcggaagau

SEQ ID NO: 1815460 - RNA, 19 nt, Artificial Sequence
  Description of Artificial Sequence: Synthetic oligonucleotide
  Antisense strand to SEQ ID NO: 1815459
aucuuccgcacucacacuc

SEQ ID NO: 1815461 - RNA, 19 nt, Artificial Sequence
  Description of Artificial Sequence: Synthetic oligonucleotide
  Sense strand starting at position 2866 of SEQ ID NO: 1563501
agugugagugcggaagauu

SEQ ID NO: 1815462 - RNA, 19 nt, Artificial Sequence
  Description of Artificial Sequence: Synthetic oligonucleotide
  Antisense strand to SEQ ID NO: 1815461
aaucuuccgcacucacacu

SEQ ID NO: 1815463 - RNA, 19 nt, Artificial Sequence
  Description of Artificial Sequence: Synthetic oligonucleotide
  Sense strand starting at position 3210 of SEQ ID NO: 1563501
ucuccauuuccugguaugu

SEQ ID NO: 1815464 - RNA, 19 nt, Artificial Sequence
  Description of Artificial Sequence: Synthetic oligonucleotide
  Antisense strand to SEQ ID NO: 1815463
acauaccaggaaauggaga

SEQ ID NO: 1815465 - RNA, 19 nt, Artificial Sequence
  Description of Artificial Sequence: Synthetic oligonucleotide
  Sense strand starting at position 3247 of SEQ ID NO: 1563501
gggaccaugugaucuccaa

SEQ ID NO: 1815466 - RNA, 19 nt, Artificial Sequence
  Description of Artificial Sequence: Synthetic oligonucleotide
  Antisense strand to SEQ ID NO: 1815465
uuggagaucacaugguccc

SEQ ID NO: 1815467 - RNA, 19 nt, Artificial Sequence
  Description of Artificial Sequence: Synthetic oligonucleotide
  Sense strand starting at position 3590 of SEQ ID NO: 1563501
gcuagacgugcugaaguua

SEQ ID NO: 1815468 - RNA, 19 nt, Artificial Sequence
  Description of Artificial Sequence: Synthetic oligonucleotide
  Antisense strand to SEQ ID NO: 1815467
uaacuucagcacgucuagc

SEQ ID NO: 1815469 - RNA, 19 nt, Artificial Sequence
  Description of Artificial Sequence: Synthetic oligonucleotide
  Sense strand starting at position 3608 of SEQ ID NO: 1563501
acggaaccuuuccuaagaa

SEQ ID NO: 1815470 - RNA, 19 nt, Artificial Sequence
  Description of Artificial Sequence: Synthetic oligonucleotide
  Antisense strand to SEQ ID NO: 1815469
uucuuaggaaagguuccgu

SEQ ID NO: 1815471 - RNA, 19 nt, Artificial Sequence
  Description of Artificial Sequence: Synthetic oligonucleotide
  Sense strand starting at position 3609 of SEQ ID NO: 1563501
cggaaccuuuccuaagaaa

SEQ ID NO: 1815472 - RNA, 19 nt, Artificial Sequence
  Description of Artificial Sequence: Synthetic oligonucleotide
  Antisense strand to SEQ ID NO: 1815471
uuucuuaggaaagguuccg

SEQ ID NO: 1815473 - RNA, 19 nt, Artificial Sequence
  Description of Artificial Sequence: Synthetic oligonucleotide
  Sense strand starting at position 3641 of SEQ ID NO: 1563501
gaagcugugcccuacaaac

SEQ ID NO: 1815474 - RNA, 19 nt, Artificial Sequence
  Description of Artificial Sequence: Synthetic oligonucleotide
  Antisense strand to SEQ ID NO: 1815473
guuuguagggcacagcuuc

SEQ ID NO: 1815475 - RNA, 19 nt, Artificial Sequence
  Description of Artificial Sequence: Synthetic oligonucleotide
  Sense strand starting at position 3790 of SEQ ID NO: 1563501
aggagcuucuagcaagguu

SEQ ID NO: 1815476 - RNA, 19 nt, Artificial Sequence
  Description of Artificial Sequence: Synthetic oligonucleotide
  Antisense strand to SEQ ID NO: 1815475
aaccuugcuagaagcuccu

SEQ ID NO: 1815477 - RNA, 19 nt, Artificial Sequence
  Description of Artificial Sequence: Synthetic oligonucleotide
  Sense strand starting at position 3798 of SEQ ID NO: 1563501
cuagcaagguuuguuaaca

SEQ ID NO: 1815478 - RNA, 19 nt, Artificial Sequence
  Description of Artificial Sequence: Synthetic oligonucleotide
  Antisense strand to SEQ ID NO: 1815477
uguuaacaaaccuugcuag

SEQ ID NO: 1815479 - RNA, 19 nt, Artificial Sequence
  Description of Artificial Sequence: Synthetic oligonucleotide
  Sense strand starting at position 3799 of SEQ ID NO: 1563501
uagcaagguuuguuaacau

SEQ ID NO: 1815480 - RNA, 19 nt, Artificial Sequence
  Description of Artificial Sequence: Synthetic oligonucleotide
  Antisense strand to SEQ ID NO: 1815479
auguuaacaaaccuugcua

SEQ ID NO: 1815481 - RNA, 19 nt, Artificial Sequence
  Description of Artificial Sequence: Synthetic oligonucleotide
  Sense strand starting at position 3828 of SEQ ID NO: 1563501
gccaccauccugugcuuua

SEQ ID NO: 1815482 - RNA, 19 nt, Artificial Sequence
  Description of Artificial Sequence: Synthetic oligonucleotide
  Antisense strand to SEQ ID NO: 1815481
uaaagcacaggaugguggc

SEQ ID NO: 1815483 - RNA, 19 nt, Artificial Sequence
  Description of Artificial Sequence: Synthetic oligonucleotide
  Sense strand starting at position 3871 of SEQ ID NO: 1563501
ggagaaacauuuggauuga

SEQ ID NO: 1815484 - RNA, 19 nt, Artificial Sequence
  Description of Artificial Sequence: Synthetic oligonucleotide
  Antisense strand to SEQ ID NO: 1815483
ucaauccaaauguuucucc

SEQ ID NO: 1815485 - RNA, 19 nt, Artificial Sequence
  Description of Artificial Sequence: Synthetic oligonucleotide
  Sense strand starting at position 30 of SEQ ID NO: 1563502
guacauauacuuuauagca

SEQ ID NO: 1815486 - RNA, 19 nt, Artificial Sequence
  Description of Artificial Sequence: Synthetic oligonucleotide
  Antisense strand to SEQ ID NO: 1815485
ugcuauaaaguauauguac

SEQ ID NO: 1815487 - RNA, 19 nt, Artificial Sequence
  Description of Artificial Sequence: Synthetic oligonucleotide
  Sense strand starting at position 213 of SEQ ID NO: 1563502
uauaaagaguuaguggaua

SEQ ID NO: 1815488 - RNA, 19 nt, Artificial Sequence
  Description of Artificial Sequence: Synthetic oligonucleotide
  Antisense strand to SEQ ID NO: 1815487
uauccacuaacucuuuaua

SEQ ID NO: 1815489 - RNA, 19 nt, Artificial Sequence
  Description of Artificial Sequence: Synthetic oligonucleotide
  Sense strand starting at position 582 of SEQ ID NO: 1563502
acaguaagguuucuaaguu

SEQ ID NO: 1815490 - RNA, 19 nt, Artificial Sequence
  Description of Artificial Sequence: Synthetic oligonucleotide
  Antisense strand to SEQ ID NO: 1815489
aacuuagaaaccuuacugu

SEQ ID NO: 1815491 - RNA, 19 nt, Artificial Sequence
  Description of Artificial Sequence: Synthetic oligonucleotide
  Sense strand starting at position 668 of SEQ ID NO: 1563502
auguaugacucaccucuuu

SEQ ID NO: 1815492 - RNA, 19 nt, Artificial Sequence
  Description of Artificial Sequence: Synthetic oligonucleotide
  Antisense strand to SEQ ID NO: 1815491
aaagaggugagucauacau

SEQ ID NO: 1815493 - RNA, 19 nt, Artificial Sequence
  Description of Artificial Sequence: Synthetic oligonucleotide
  Sense strand starting at position 698 of SEQ ID NO: 1563502
gggcuuccucagcauugaa

SEQ ID NO: 1815494 - RNA, 19 nt, Artificial Sequence
  Description of Artificial Sequence: Synthetic oligonucleotide
  Antisense strand to SEQ ID NO: 1815493
uucaaugcugaggaagccc

SEQ ID NO: 1815495 - RNA, 19 nt, Artificial Sequence
  Description of Artificial Sequence: Synthetic oligonucleotide
  Sense strand starting at position 799 of SEQ ID NO: 1563502
ggccuagacagguguuaaa

SEQ ID NO: 1815496 - RNA, 19 nt, Artificial Sequence
  Description of Artificial Sequence: Synthetic oligonucleotide
  Antisense strand to SEQ ID NO: 1815495
uuuaacaccugucuaggcc

SEQ ID NO: 1815497 - RNA, 19 nt, Artificial Sequence
  Description of Artificial Sequence: Synthetic oligonucleotide
  Sense strand starting at position 954 of SEQ ID NO: 1563502
cuuuauacuggugauucua

SEQ ID NO: 1815498 - RNA, 19 nt, Artificial Sequence
  Description of Artificial Sequence: Synthetic oligonucleotide
  Antisense strand to SEQ ID NO: 1815497
uagaaucaccaguauaaag

SEQ ID NO: 1815499 - RNA, 19 nt, Artificial Sequence
  Description of Artificial Sequence: Synthetic oligonucleotide
  Sense strand starting at position 956 of SEQ ID NO: 1563502
uuauacuggugauucuaau

SEQ ID NO: 1815500 - RNA, 19 nt, Artificial Sequence
  Description of Artificial Sequence: Synthetic oligonucleotide
  Antisense strand to SEQ ID NO: 1815499
auuagaaucaccaguauaa

SEQ ID NO: 1815501 - RNA, 19 nt, Artificial Sequence
  Description of Artificial Sequence: Synthetic oligonucleotide
  Sense strand starting at position 1030 of SEQ ID NO: 1563502
ugacuaugaggauguuaug

SEQ ID NO: 1815502 - RNA, 19 nt, Artificial Sequence
  Description of Artificial Sequence: Synthetic oligonucleotide
  Antisense strand to SEQ ID NO: 1815501
cauaacauccucauaguca

SEQ ID NO: 1815503 - RNA, 19 nt, Artificial Sequence
  Description of Artificial Sequence: Synthetic oligonucleotide
  Sense strand starting at position 1036 of SEQ ID NO: 1563502
ugaggauguuaugugucau

SEQ ID NO: 1815504 - RNA, 19 nt, Artificial Sequence
  Description of Artificial Sequence: Synthetic oligonucleotide
  Antisense strand to SEQ ID NO: 1815503
augacacauaacauccuca

SEQ ID NO: 1815505 - RNA, 19 nt, Artificial Sequence
  Description of Artificial Sequence: Synthetic oligonucleotide
  Sense strand starting at position 1037 of SEQ ID NO: 1563502
gaggauguuaugugucaua

SEQ ID NO: 1815506 - RNA, 19 nt, Artificial Sequence
  Description of Artificial Sequence: Synthetic oligonucleotide
  Antisense strand to SEQ ID NO: 1815505
uaugacacauaacauccuc

SEQ ID NO: 1815507 - RNA, 19 nt, Artificial Sequence
  Description of Artificial Sequence: Synthetic oligonucleotide
  Sense strand starting at position 1104 of SEQ ID NO: 1563502
ugaagagaaugcuuaguag

SEQ ID NO: 1815508 - RNA, 19 nt, Artificial Sequence
  Description of Artificial Sequence: Synthetic oligonucleotide
  Antisense strand to SEQ ID NO: 1815507
cuacuaagcauucucuuca

SEQ ID NO: 1815509 - RNA, 19 nt, Artificial Sequence
  Description of Artificial Sequence: Synthetic oligonucleotide
  Sense strand starting at position 1107 of SEQ ID NO: 1563502
agagaaugcuuaguagacu

SEQ ID NO: 1815510 - RNA, 19 nt, Artificial Sequence
  Description of Artificial Sequence: Synthetic oligonucleotide
  Antisense strand to SEQ ID NO: 1815509
agucuacuaagcauucucu

SEQ ID NO: 1815511 - RNA, 19 nt, Artificial Sequence
  Description of Artificial Sequence: Synthetic oligonucleotide
  Sense strand starting at position 1110 of SEQ ID NO: 1563502
gaaugcuuaguagacuauu

SEQ ID NO: 1815512 - RNA, 19 nt, Artificial Sequence
  Description of Artificial Sequence: Synthetic oligonucleotide
  Antisense strand to SEQ ID NO: 1815511
aauagucuacuaagcauuc

SEQ ID NO: 1815513 - RNA, 19 nt, Artificial Sequence
  Description of Artificial Sequence: Synthetic oligonucleotide
  Sense strand starting at position 1231 of SEQ ID NO: 1563502
acuuuaguacuauaaagug

SEQ ID NO: 1815514 - RNA, 19 nt, Artificial Sequence
  Description of Artificial Sequence: Synthetic oligonucleotide
  Antisense strand to SEQ ID NO: 1815513
cacuuuauaguacuaaagu

SEQ ID NO: 1815515 - RNA, 19 nt, Artificial Sequence
  Description of Artificial Sequence: Synthetic oligonucleotide
  Sense strand starting at position 1237 of SEQ ID NO: 1563502
guacuauaaaguggucuga

SEQ ID NO: 1815516 - RNA, 19 nt, Artificial Sequence
  Description of Artificial Sequence: Synthetic oligonucleotide
  Antisense strand to SEQ ID NO: 1815515
ucagaccacuuuauaguac

SEQ ID NO: 1815517 - RNA, 19 nt, Artificial Sequence
  Description of Artificial Sequence: Synthetic oligonucleotide
  Sense strand starting at position 1239 of SEQ ID NO: 1563502
acuauaaaguggucugaca

SEQ ID NO: 1815518 - RNA, 19 nt, Artificial Sequence
  Description of Artificial Sequence: Synthetic oligonucleotide
  Antisense strand to SEQ ID NO: 1815517
ugucagaccacuuuauagu

SEQ ID NO: 1815519 - RNA, 19 nt, Artificial Sequence
  Description of Artificial Sequence: Synthetic oligonucleotide
  Sense strand starting at position 1241 of SEQ ID NO: 1563502
uauaaaguggucugacaac

SEQ ID NO: 1815520 - RNA, 19 nt, Artificial Sequence
  Description of Artificial Sequence: Synthetic oligonucleotide
  Antisense strand to SEQ ID NO: 1815519
guugucagaccacuuuaua

SEQ ID NO: 1815521 - RNA, 19 nt, Artificial Sequence
  Description of Artificial Sequence: Synthetic oligonucleotide
  Sense strand starting at position 1320 of SEQ ID NO: 1563502
ucuggugaggguugggaaa

SEQ ID NO: 1815522 - RNA, 19 nt, Artificial Sequence
  Description of Artificial Sequence: Synthetic oligonucleotide
  Antisense strand to SEQ ID NO: 1815521
uuucccaacccucaccaga

SEQ ID NO: 1815523 - RNA, 19 nt, Artificial Sequence
  Description of Artificial Sequence: Synthetic oligonucleotide
  Sense strand starting at position 1333 of SEQ ID NO: 1563502
gggaaagccugagucagua

SEQ ID NO: 1815524 - RNA, 19 nt, Artificial Sequence
  Description of Artificial Sequence: Synthetic oligonucleotide
  Antisense strand to SEQ ID NO: 1815523
uacugacucaggcuuuccc

SEQ ID NO: 1815525 - RNA, 19 nt, Artificial Sequence
  Description of Artificial Sequence: Synthetic oligonucleotide
  Sense strand starting at position 1355 of SEQ ID NO: 1563502
aagggcucguaauccauaa

SEQ ID NO: 1815526 - RNA, 19 nt, Artificial Sequence
  Description of Artificial Sequence: Synthetic oligonucleotide
  Antisense strand to SEQ ID NO: 1815525
uuauggauuacgagcccuu

SEQ ID NO: 1815527 - RNA, 19 nt, Artificial Sequence
  Description of Artificial Sequence: Synthetic oligonucleotide
  Sense strand starting at position 1357 of SEQ ID NO: 1563502
gggcucguaauccauaaag

SEQ ID NO: 1815528 - RNA, 19 nt, Artificial Sequence
  Description of Artificial Sequence: Synthetic oligonucleotide
  Antisense strand to SEQ ID NO: 1815527
cuuuauggauuacgagccc

SEQ ID NO: 1815529 - RNA, 19 nt, Artificial Sequence
  Description of Artificial Sequence: Synthetic oligonucleotide
  Sense strand starting at position 2090 of SEQ ID NO: 1563502
cugcccuuucuggaaacaa

SEQ ID NO: 1815530 - RNA, 19 nt, Artificial Sequence
  Description of Artificial Sequence: Synthetic oligonucleotide
  Antisense strand to SEQ ID NO: 1815529
uuguuuccagaaagggcag

SEQ ID NO: 1815531 - RNA, 19 nt, Artificial Sequence
  Description of Artificial Sequence: Synthetic oligonucleotide
  Sense strand starting at position 2135 of SEQ ID NO: 1563502
gcgccaguguggaucagau

SEQ ID NO: 1815532 - RNA, 19 nt, Artificial Sequence
  Description of Artificial Sequence: Synthetic oligonucleotide
  Antisense strand to SEQ ID NO: 1815531
aucugauccacacuggcgc

SEQ ID NO: 1815533 - RNA, 19 nt, Artificial Sequence
  Description of Artificial Sequence: Synthetic oligonucleotide
  Sense strand starting at position 2213 of SEQ ID NO: 1563502
ugauuacuugcacguauuu

SEQ ID NO: 1815534 - RNA, 19 nt, Artificial Sequence
  Description of Artificial Sequence: Synthetic oligonucleotide
  Antisense strand to SEQ ID NO: 1815533
aaauacgugcaaguaauca

SEQ ID NO: 1815535 - RNA, 19 nt, Artificial Sequence
  Description of Artificial Sequence: Synthetic oligonucleotide
  Sense strand starting at position 2261 of SEQ ID NO: 1563502
guaguuaauuucgugguaa

SEQ ID NO: 1815536 - RNA, 19 nt, Artificial Sequence
  Description of Artificial Sequence: Synthetic oligonucleotide
  Antisense strand to SEQ ID NO: 1815535
uuaccacgaaauuaacuac

SEQ ID NO: 1815537 - RNA, 19 nt, Artificial Sequence
  Description of Artificial Sequence: Synthetic oligonucleotide
  Sense strand starting at position 2263 of SEQ ID NO: 1563502
aguuaauuucgugguaaac

SEQ ID NO: 1815538 - RNA, 19 nt, Artificial Sequence
  Description of Artificial Sequence: Synthetic oligonucleotide
  Antisense strand to SEQ ID NO: 1815537
guuuaccacgaaauuaacu

SEQ ID NO: 1815539 - RNA, 19 nt, Artificial Sequence
  Description of Artificial Sequence: Synthetic oligonucleotide
  Sense strand starting at position 2306 of SEQ ID NO: 1563502
cuagcuauguuacuuggaa

SEQ ID NO: 1815540 - RNA, 19 nt, Artificial Sequence
  Description of Artificial Sequence: Synthetic oligonucleotide
  Antisense strand to SEQ ID NO: 1815539
uuccaaguaacauagcuag

SEQ ID NO: 1815541 - RNA, 19 nt, Artificial Sequence
  Description of Artificial Sequence: Synthetic oligonucleotide
  Sense strand starting at position 2307 of SEQ ID NO: 1563502
uagcuauguuacuuggaaa

SEQ ID NO: 1815542 - RNA, 19 nt, Artificial Sequence
  Description of Artificial Sequence: Synthetic oligonucleotide
  Antisense strand to SEQ ID NO: 1815541
uuuccaaguaacauagcua

SEQ ID NO: 1815543 - RNA, 19 nt, Artificial Sequence
  Description of Artificial Sequence: Synthetic oligonucleotide
  Sense strand starting at position 2387 of SEQ ID NO: 1563502
acugguuguaaggaucuga

SEQ ID NO: 1815544 - RNA, 19 nt, Artificial Sequence
  Description of Artificial Sequence: Synthetic oligonucleotide
  Antisense strand to SEQ ID NO: 1815543
ucagauccuuacaaccagu

SEQ ID NO: 1815545 - RNA, 19 nt, Artificial Sequence
  Description of Artificial Sequence: Synthetic oligonucleotide
  Sense strand starting at position 2391 of SEQ ID NO: 1563502
guuguaaggaucugaugag

SEQ ID NO: 1815546 - RNA, 19 nt, Artificial Sequence
  Description of Artificial Sequence: Synthetic oligonucleotide
  Antisense strand to SEQ ID NO: 1815545
cucaucagauccuuacaac

SEQ ID NO: 1815547 - RNA, 19 nt, Artificial Sequence
  Description of Artificial Sequence: Synthetic oligonucleotide
  Sense strand starting at position 2432 of SEQ ID NO: 1563502
aguagaugcuucucaacaa

SEQ ID NO: 1815548 - RNA, 19 nt, Artificial Sequence
  Description of Artificial Sequence: Synthetic oligonucleotide
  Antisense strand to SEQ ID NO: 1815547
uuguugagaagcaucuacu

SEQ ID NO: 1815549 - RNA, 19 nt, Artificial Sequence
  Description of Artificial Sequence: Synthetic oligonucleotide
  Sense strand starting at position 2601 of SEQ ID NO: 1563502
aggaguuaguucuuccauc

SEQ ID NO: 1815550 - RNA, 19 nt, Artificial Sequence
  Description of Artificial Sequence: Synthetic oligonucleotide
  Antisense strand to SEQ ID NO: 1815549
gauggaagaacuaacuccu

SEQ ID NO: 1815551 - RNA, 19 nt, Artificial Sequence
  Description of Artificial Sequence: Synthetic oligonucleotide
  Sense strand starting at position 2602 of SEQ ID NO: 1563502
ggaguuaguucuuccauca

SEQ ID NO: 1815552 - RNA, 19 nt, Artificial Sequence
  Description of Artificial Sequence: Synthetic oligonucleotide
  Antisense strand to SEQ ID NO: 1815551
ugauggaagaacuaacucc

SEQ ID NO: 1815553 - RNA, 19 nt, Artificial Sequence
  Description of Artificial Sequence: Synthetic oligonucleotide
  Sense strand starting at position 2705 of SEQ ID NO: 1563502
gagcucaaguagucugaua

SEQ ID NO: 1815554 - RNA, 19 nt, Artificial Sequence
  Description of Artificial Sequence: Synthetic oligonucleotide
  Antisense strand to SEQ ID NO: 1815553
uaucagacuacuugagcuc

SEQ ID NO: 1815555 - RNA, 19 nt, Artificial Sequence
  Description of Artificial Sequence: Synthetic oligonucleotide
  Sense strand starting at position 2786 of SEQ ID NO: 1563502
aauguagugccuuaaagaa

SEQ ID NO: 1815556 - RNA, 19 nt, Artificial Sequence
  Description of Artificial Sequence: Synthetic oligonucleotide
  Antisense strand to SEQ ID NO: 1815555
uucuuuaaggcacuacauu

SEQ ID NO: 1815557 - RNA, 19 nt, Artificial Sequence
  Description of Artificial Sequence: Synthetic oligonucleotide
  Sense strand starting at position 3206 of SEQ ID NO: 1563502
ggcccauaaucaguuugau

SEQ ID NO: 1815558 - RNA, 19 nt, Artificial Sequence
  Description of Artificial Sequence: Synthetic oligonucleotide
  Antisense strand to SEQ ID NO: 1815557
aucaaacugauuaugggcc

SEQ ID NO: 1815559 - RNA, 19 nt, Artificial Sequence
  Description of Artificial Sequence: Synthetic oligonucleotide
  Sense strand starting at position 3785 of SEQ ID NO: 1563502
cuaugaaguaagcgugaaa

SEQ ID NO: 1815560 - RNA, 19 nt, Artificial Sequence
  Description of Artificial Sequence: Synthetic oligonucleotide
  Antisense strand to SEQ ID NO: 1815559
uuucacgcuuacuucauag

SEQ ID NO: 1815561 - RNA, 19 nt, Artificial Sequence
  Description of Artificial Sequence: Synthetic oligonucleotide
  Sense strand starting at position 3841 of SEQ ID NO: 1563502
gccucaguucuggagguca

SEQ ID NO: 1815562 - RNA, 19 nt, Artificial Sequence
  Description of Artificial Sequence: Synthetic oligonucleotide
  Antisense strand to SEQ ID NO: 1815561
ugaccuccagaacugaggc

SEQ ID NO: 1815563 - RNA, 19 nt, Artificial Sequence
  Description of Artificial Sequence: Synthetic oligonucleotide
  Sense strand starting at position 3942 of SEQ ID NO: 1563502
agagauugccugcauuccu

SEQ ID NO: 1815564 - RNA, 19 nt, Artificial Sequence
  Description of Artificial Sequence: Synthetic oligonucleotide
  Antisense strand to SEQ ID NO: 1815563
aggaaugcaggcaaucucu

SEQ ID NO: 1815565 - RNA, 19 nt, Artificial Sequence
  Description of Artificial Sequence: Synthetic oligonucleotide
  Sense strand starting at position 93 of SEQ ID NO: 1563503
aguacagaaugagauaaua

SEQ ID NO: 1815566 - RNA, 19 nt, Artificial Sequence
  Description of Artificial Sequence: Synthetic oligonucleotide
  Antisense strand to SEQ ID NO: 1815565
uauuaucucauucuguacu

SEQ ID NO: 1815567 - RNA, 19 nt, Artificial Sequence
  Description of Artificial Sequence: Synthetic oligonucleotide
  Sense strand starting at position 154 of SEQ ID NO: 1563503
gaccgaauuuaccaguuaa

SEQ ID NO: 1815568 - RNA, 19 nt, Artificial Sequence
  Description of Artificial Sequence: Synthetic oligonucleotide
  Antisense strand to SEQ ID NO: 1815567
uuaacugguaaauucgguc

SEQ ID NO: 1815569 - RNA, 19 nt, Artificial Sequence
  Description of Artificial Sequence: Synthetic oligonucleotide
  Sense strand starting at position 173 of SEQ ID NO: 1563503
cagacaggauuguaacacu

SEQ ID NO: 1815570 - RNA, 19 nt, Artificial Sequence
  Description of Artificial Sequence: Synthetic oligonucleotide
  Antisense strand to SEQ ID NO: 1815569
aguguuacaauccugucug

SEQ ID NO: 1815571 - RNA, 19 nt, Artificial Sequence
  Description of Artificial Sequence: Synthetic oligonucleotide
  Sense strand starting at position 549 of SEQ ID NO: 1563503
agguaauuccagugcuuug

SEQ ID NO: 1815572 - RNA, 19 nt, Artificial Sequence
  Description of Artificial Sequence: Synthetic oligonucleotide
  Antisense strand to SEQ ID NO: 1815571
caaagcacuggaauuaccu

SEQ ID NO: 1815573 - RNA, 19 nt, Artificial Sequence
  Description of Artificial Sequence: Synthetic oligonucleotide
  Sense strand starting at position 626 of SEQ ID NO: 1563503
cagcgaaacugucucuaaa

SEQ ID NO: 1815574 - RNA, 19 nt, Artificial Sequence
  Description of Artificial Sequence: Synthetic oligonucleotide
  Antisense strand to SEQ ID NO: 1815573
uuuagagacaguuucgcug

SEQ ID NO: 1815575 - RNA, 19 nt, Artificial Sequence
  Description of Artificial Sequence: Synthetic oligonucleotide
  Sense strand starting at position 778 of SEQ ID NO: 1563503
gucugagacucugccucua

SEQ ID NO: 1815576 - RNA, 19 nt, Artificial Sequence
  Description of Artificial Sequence: Synthetic oligonucleotide
  Antisense strand to SEQ ID NO: 1815575
uagaggcagagucucagac

SEQ ID NO: 1815577 - RNA, 19 nt, Artificial Sequence
  Description of Artificial Sequence: Synthetic oligonucleotide
  Sense strand starting at position 952 of SEQ ID NO: 1563503
uggcgugcgccuguaguua

SEQ ID NO: 1815578 - RNA, 19 nt, Artificial Sequence
  Description of Artificial Sequence: Synthetic oligonucleotide
  Antisense strand to SEQ ID NO: 1815577
uaacuacaggcgcacgcca

SEQ ID NO: 1815579 - RNA, 19 nt, Artificial Sequence
  Description of Artificial Sequence: Synthetic oligonucleotide
  Sense strand starting at position 1173 of SEQ ID NO: 1563503
gccauauuaugauguggua

SEQ ID NO: 1815580 - RNA, 19 nt, Artificial Sequence
  Description of Artificial Sequence: Synthetic oligonucleotide
  Antisense strand to SEQ ID NO: 1815579
uaccacaucauaauauggc

SEQ ID NO: 1815581 - RNA, 19 nt, Artificial Sequence
  Description of Artificial Sequence: Synthetic oligonucleotide
  Sense strand starting at position 1218 of SEQ ID NO: 1563503
gggucaaagucugguggga

SEQ ID NO: 1815582 - RNA, 19 nt, Artificial Sequence
  Description of Artificial Sequence: Synthetic oligonucleotide
  Antisense strand to SEQ ID NO: 1815581
ucccaccagacuuugaccc

SEQ ID NO: 1815583 - RNA, 19 nt, Artificial Sequence
  Description of Artificial Sequence: Synthetic oligonucleotide
  Sense strand starting at position 1310 of SEQ ID NO: 1563503
ggugucuuccuucaagggu

SEQ ID NO: 1815584 - RNA, 19 nt, Artificial Sequence
  Description of Artificial Sequence: Synthetic oligonucleotide
  Antisense strand to SEQ ID NO: 1815583
acccuugaaggaagacacc

SEQ ID NO: 1815585 - RNA, 19 nt, Artificial Sequence
  Description of Artificial Sequence: Synthetic oligonucleotide
  Sense strand starting at position 1370 of SEQ ID NO: 1563503
gggucacgguuugguaaga

SEQ ID NO: 1815586 - RNA, 19 nt, Artificial Sequence
  Description of Artificial Sequence: Synthetic oligonucleotide
  Antisense strand to SEQ ID NO: 1815585
ucuuaccaaaccgugaccc

SEQ ID NO: 1815587 - RNA, 19 nt, Artificial Sequence
  Description of Artificial Sequence: Synthetic oligonucleotide
  Sense strand starting at position 1528 of SEQ ID NO: 1563503
cggugccagcguuuggaaa

SEQ ID NO: 1815588 - RNA, 19 nt, Artificial Sequence
  Description of Artificial Sequence: Synthetic oligonucleotide
  Antisense strand to SEQ ID NO: 1815587
uuuccaaacgcuggcaccg

SEQ ID NO: 1815589 - RNA, 19 nt, Artificial Sequence
  Description of Artificial Sequence: Synthetic oligonucleotide
  Sense strand starting at position 1704 of SEQ ID NO: 1563503
ucuucuguccucuggacaa

SEQ ID NO: 1815590 - RNA, 19 nt, Artificial Sequence
  Description of Artificial Sequence: Synthetic oligonucleotide
  Antisense strand to SEQ ID NO: 1815589
uuguccagaggacagaaga

SEQ ID NO: 1815591 - RNA, 19 nt, Artificial Sequence
  Description of Artificial Sequence: Synthetic oligonucleotide
  Sense strand starting at position 2193 of SEQ ID NO: 1563503
cccuuaucagucgaucaaa

SEQ ID NO: 1815592 - RNA, 19 nt, Artificial Sequence
  Description of Artificial Sequence: Synthetic oligonucleotide
  Antisense strand to SEQ ID NO: 1815591
uuugaucgacugauaaggg

SEQ ID NO: 1815593 - RNA, 19 nt, Artificial Sequence
  Description of Artificial Sequence: Synthetic oligonucleotide
  Sense strand starting at position 2237 of SEQ ID NO: 1563503
cgcuucuuccgcuggugaa

SEQ ID NO: 1815594 - RNA, 19 nt, Artificial Sequence
  Description of Artificial Sequence: Synthetic oligonucleotide
  Antisense strand to SEQ ID NO: 1815593
uucaccagcggaagaagcg

SEQ ID NO: 1815595 - RNA, 19 nt, Artificial Sequence
  Description of Artificial Sequence: Synthetic oligonucleotide
  Sense strand starting at position 2238 of SEQ ID NO: 1563503
gcuucuuccgcuggugaaa

SEQ ID NO: 1815596 - RNA, 19 nt, Artificial Sequence
  Description of Artificial Sequence: Synthetic oligonucleotide
  Antisense strand to SEQ ID NO: 1815595
uuucaccagcggaagaagc

SEQ ID NO: 1815597 - RNA, 19 nt, Artificial Sequence
  Description of Artificial Sequence: Synthetic oligonucleotide
  Sense strand starting at position 2240 of SEQ ID NO: 1563503
uucuuccgcuggugaaauu

SEQ ID NO: 1815598 - RNA, 19 nt, Artificial Sequence
  Description of Artificial Sequence: Synthetic oligonucleotide
  Antisense strand to SEQ ID NO: 1815597
aauuucaccagcggaagaa

SEQ ID NO: 1815599 - RNA, 19 nt, Artificial Sequence
  Description of Artificial Sequence: Synthetic oligonucleotide
  Sense strand starting at position 2241 of SEQ ID NO: 1563503
ucuuccgcuggugaaauua

SEQ ID NO: 1815600 - RNA, 19 nt, Artificial Sequence
  Description of Artificial Sequence: Synthetic oligonucleotide
  Antisense strand to SEQ ID NO: 1815599
uaauuucaccagcggaaga

SEQ ID NO: 1815601 - RNA, 19 nt, Artificial Sequence
  Description of Artificial Sequence: Synthetic oligonucleotide
  Sense strand starting at position 2250 of SEQ ID NO: 1563503
ggugaaauuagcguugcgu

SEQ ID NO: 1815602 - RNA, 19 nt, Artificial Sequence
  Description of Artificial Sequence: Synthetic oligonucleotide
  Antisense strand to SEQ ID NO: 1815601
acgcaacgcuaauuucacc

SEQ ID NO: 1815603 - RNA, 19 nt, Artificial Sequence
  Description of Artificial Sequence: Synthetic oligonucleotide
  Sense strand starting at position 2251 of SEQ ID NO: 1563503
gugaaauuagcguugcguu

SEQ ID NO: 1815604 - RNA, 19 nt, Artificial Sequence
  Description of Artificial Sequence: Synthetic oligonucleotide
  Antisense strand to SEQ ID NO: 1815603
aacgcaacgcuaauuucac

SEQ ID NO: 1815605 - RNA, 19 nt, Artificial Sequence
  Description of Artificial Sequence: Synthetic oligonucleotide
  Sense strand starting at position 2312 of SEQ ID NO: 1563503
aguauaaugcaacgaaacu

SEQ ID NO: 1815606 - RNA, 19 nt, Artificial Sequence
  Description of Artificial Sequence: Synthetic oligonucleotide
  Antisense strand to SEQ ID NO: 1815605
aguuucguugcauuauacu

SEQ ID NO: 1815607 - RNA, 19 nt, Artificial Sequence
  Description of Artificial Sequence: Synthetic oligonucleotide
  Sense strand starting at position 2404 of SEQ ID NO: 1563503
ccuaauagcagcggucauu

SEQ ID NO: 1815608 - RNA, 19 nt, Artificial Sequence
  Description of Artificial Sequence: Synthetic oligonucleotide
  Antisense strand to SEQ ID NO: 1815607
aaugaccgcugcuauuagg

SEQ ID NO: 1815609 - RNA, 19 nt, Artificial Sequence
  Description of Artificial Sequence: Synthetic oligonucleotide
  Sense strand starting at position 2484 of SEQ ID NO: 1563503
gaccaauuggcaugaagac

SEQ ID NO: 1815610 - RNA, 19 nt, Artificial Sequence
  Description of Artificial Sequence: Synthetic oligonucleotide
  Antisense strand to SEQ ID NO: 1815609
gucuucaugccaauugguc

SEQ ID NO: 1815611 - RNA, 19 nt, Artificial Sequence
  Description of Artificial Sequence: Synthetic oligonucleotide
  Sense strand starting at position 2772 of SEQ ID NO: 1563503
ugucccugcccugaucaaa

SEQ ID NO: 1815612 - RNA, 19 nt, Artificial Sequence
  Description of Artificial Sequence: Synthetic oligonucleotide
  Antisense strand to SEQ ID NO: 1815611
uuugaucagggcagggaca

SEQ ID NO: 1815613 - RNA, 19 nt, Artificial Sequence
  Description of Artificial Sequence: Synthetic oligonucleotide
  Sense strand starting at position 2942 of SEQ ID NO: 1563503
cccucugagcagugaagaa

SEQ ID NO: 1815614 - RNA, 19 nt, Artificial Sequence
  Description of Artificial Sequence: Synthetic oligonucleotide
  Antisense strand to SEQ ID NO: 1815613
uucuucacugcucagaggg

SEQ ID NO: 1815615 - RNA, 19 nt, Artificial Sequence
  Description of Artificial Sequence: Synthetic oligonucleotide
  Sense strand starting at position 3467 of SEQ ID NO: 1563503
uccuuugcccaaggacauu

SEQ ID NO: 1815616 - RNA, 19 nt, Artificial Sequence
  Description of Artificial Sequence: Synthetic oligonucleotide
  Antisense strand to SEQ ID NO: 1815615
aauguccuugggcaaagga

SEQ ID NO: 1815617 - RNA, 19 nt, Artificial Sequence
  Description of Artificial Sequence: Synthetic oligonucleotide
  Sense strand starting at position 3476 of SEQ ID NO: 1563503
caaggacauuucugugacu

SEQ ID NO: 1815618 - RNA, 19 nt, Artificial Sequence
  Description of Artificial Sequence: Synthetic oligonucleotide
  Antisense strand to SEQ ID NO: 1815617
agucacagaaauguccuug

SEQ ID NO: 1815619 - RNA, 19 nt, Artificial Sequence
  Description of Artificial Sequence: Synthetic oligonucleotide
  Sense strand starting at position 3479 of SEQ ID NO: 1563503
ggacauuucugugacugcu

SEQ ID NO: 1815620 - RNA, 19 nt, Artificial Sequence
  Description of Artificial Sequence: Synthetic oligonucleotide
  Antisense strand to SEQ ID NO: 1815619
agcagucacagaaaugucc

SEQ ID NO: 1815621 - RNA, 19 nt, Artificial Sequence
  Description of Artificial Sequence: Synthetic oligonucleotide
  Sense strand starting at position 3596 of SEQ ID NO: 1563503
cccauucucugaccuguua

SEQ ID NO: 1815622 - RNA, 19 nt, Artificial Sequence
  Description of Artificial Sequence: Synthetic oligonucleotide
  Antisense strand to SEQ ID NO: 1815621
uaacaggucagagaauggg

SEQ ID NO: 1815623 - RNA, 19 nt, Artificial Sequence
  Description of Artificial Sequence: Synthetic oligonucleotide
  Sense strand starting at position 3678 of SEQ ID NO: 1563503
gugaauaggucauuccagu

SEQ ID NO: 1815624 - RNA, 19 nt, Artificial Sequence
  Description of Artificial Sequence: Synthetic oligonucleotide
  Antisense strand to SEQ ID NO: 1815623
acuggaaugaccuauucac

SEQ ID NO: 1815625 - RNA, 19 nt, Artificial Sequence
  Description of Artificial Sequence: Synthetic oligonucleotide
  Sense strand starting at position 1 of SEQ ID NO: 1563504
agcuacaauguuuaaaguu

SEQ ID NO: 1815626 - RNA, 19 nt, Artificial Sequence
  Description of Artificial Sequence: Synthetic oligonucleotide
  Antisense strand to SEQ ID NO: 1815625
aacuuuaaacauuguagcu

SEQ ID NO: 1815627 - RNA, 19 nt, Artificial Sequence
  Description of Artificial Sequence: Synthetic oligonucleotide
  Sense strand starting at position 65 of SEQ ID NO: 1563504
guuauauaaauuggagugu

SEQ ID NO: 1815628 - RNA, 19 nt, Artificial Sequence
  Description of Artificial Sequence: Synthetic oligonucleotide
  Antisense strand to SEQ ID NO: 1815627
acacuccaauuuauauaac

SEQ ID NO: 1815629 - RNA, 19 nt, Artificial Sequence
  Description of Artificial Sequence: Synthetic oligonucleotide
  Sense strand starting at position 69 of SEQ ID NO: 1563504
uauaaauuggagugugcua

SEQ ID NO: 1815630 - RNA, 19 nt, Artificial Sequence
  Description of Artificial Sequence: Synthetic oligonucleotide
  Antisense strand to SEQ ID NO: 1815629
uagcacacuccaauuuaua

SEQ ID NO: 1815631 - RNA, 19 nt, Artificial Sequence
  Description of Artificial Sequence: Synthetic oligonucleotide
  Sense strand starting at position 176 of SEQ ID NO: 1563504
ugaauaugaugucucuauc

SEQ ID NO: 1815632 - RNA, 19 nt, Artificial Sequence
  Description of Artificial Sequence: Synthetic oligonucleotide
  Antisense strand to SEQ ID NO: 1815631
gauagagacaucauauuca

SEQ ID NO: 1815633 - RNA, 19 nt, Artificial Sequence
  Description of Artificial Sequence: Synthetic oligonucleotide
  Sense strand starting at position 218 of SEQ ID NO: 1563504
gucaaaguggcacaaauaa

SEQ ID NO: 1815634 - RNA, 19 nt, Artificial Sequence
  Description of Artificial Sequence: Synthetic oligonucleotide
  Antisense strand to SEQ ID NO: 1815633
uuauuugugccacuuugac

SEQ ID NO: 1815635 - RNA, 19 nt, Artificial Sequence
  Description of Artificial Sequence: Synthetic oligonucleotide
  Sense strand starting at position 251 of SEQ ID NO: 1563504
ugacaaugacucuggaugu

SEQ ID NO: 1815636 - RNA, 19 nt, Artificial Sequence
  Description of Artificial Sequence: Synthetic oligonucleotide
  Antisense strand to SEQ ID NO: 1815635
acauccagagucauuguca

SEQ ID NO: 1815637 - RNA, 19 nt, Artificial Sequence
  Description of Artificial Sequence: Synthetic oligonucleotide
  Sense strand starting at position 307 of SEQ ID NO: 1563504
ggaacuuauuuguacaacu

SEQ ID NO: 1815638 - RNA, 19 nt, Artificial Sequence
  Description of Artificial Sequence: Synthetic oligonucleotide
  Antisense strand to SEQ ID NO: 1815637
aguuguacaaauaaguucc

SEQ ID NO: 1815639 - RNA, 19 nt, Artificial Sequence
  Description of Artificial Sequence: Synthetic oligonucleotide
  Sense strand starting at position 374 of SEQ ID NO: 1563504
ucgaaaggauccuuggaug

SEQ ID NO: 1815640 - RNA, 19 nt, Artificial Sequence
  Description of Artificial Sequence: Synthetic oligonucleotide
  Antisense strand to SEQ ID NO: 1815639
cauccaaggauccuuucga

SEQ ID NO: 1815641 - RNA, 19 nt, Artificial Sequence
  Description of Artificial Sequence: Synthetic oligonucleotide
  Sense strand starting at position 385 of SEQ ID NO: 1563504
cuuggaugcuucuccuaag

SEQ ID NO: 1815642 - RNA, 19 nt, Artificial Sequence
  Description of Artificial Sequence: Synthetic oligonucleotide
  Antisense strand to SEQ ID NO: 1815641
cuuaggagaagcauccaag

SEQ ID NO: 1815643 - RNA, 19 nt, Artificial Sequence
  Description of Artificial Sequence: Synthetic oligonucleotide
  Sense strand starting at position 423 of SEQ ID NO: 1563504
gacaguauuuacguuaagu

SEQ ID NO: 1815644 - RNA, 19 nt, Artificial Sequence
  Description of Artificial Sequence: Synthetic oligonucleotide
  Antisense strand to SEQ ID NO: 1815643
acuuaacguaaauacuguc

SEQ ID NO: 1815645 - RNA, 19 nt, Artificial Sequence
  Description of Artificial Sequence: Synthetic oligonucleotide
  Sense strand starting at position 433 of SEQ ID NO: 1563504
acguuaagugaacgaaauu

SEQ ID NO: 1815646 - RNA, 19 nt, Artificial Sequence
  Description of Artificial Sequence: Synthetic oligonucleotide
  Antisense strand to SEQ ID NO: 1815645
aauuucguucacuuaacgu

SEQ ID NO: 1815647 - RNA, 19 nt, Artificial Sequence
  Description of Artificial Sequence: Synthetic oligonucleotide
  Sense strand starting at position 501 of SEQ ID NO: 1563504
cuaauaguuugcuuauuag

SEQ ID NO: 1815648 - RNA, 19 nt, Artificial Sequence
  Description of Artificial Sequence: Synthetic oligonucleotide
  Antisense strand to SEQ ID NO: 1815647
cuaauaagcaaacuauuag

SEQ ID NO: 1815649 - RNA, 19 nt, Artificial Sequence
  Description of Artificial Sequence: Synthetic oligonucleotide
  Sense strand starting at position 570 of SEQ ID NO: 1563504
acgaguccugaguaauuau

SEQ ID NO: 1815650 - RNA, 19 nt, Artificial Sequence
  Description of Artificial Sequence: Synthetic oligonucleotide
  Antisense strand to SEQ ID NO: 1815649
auaauuacucaggacucgu

SEQ ID NO: 1815651 - RNA, 19 nt, Artificial Sequence
  Description of Artificial Sequence: Synthetic oligonucleotide
  Sense strand starting at position 577 of SEQ ID NO: 1563504
cugaguaauuauuccauug

SEQ ID NO: 1815652 - RNA, 19 nt, Artificial Sequence
  Description of Artificial Sequence: Synthetic oligonucleotide
  Antisense strand to SEQ ID NO: 1815651
caauggaauaauuacucag

SEQ ID NO: 1815653 - RNA, 19 nt, Artificial Sequence
  Description of Artificial Sequence: Synthetic oligonucleotide
  Sense strand starting at position 584 of SEQ ID NO: 1563504
auuauuccauuggcagauu

SEQ ID NO: 1815654 - RNA, 19 nt, Artificial Sequence
  Description of Artificial Sequence: Synthetic oligonucleotide
  Antisense strand to SEQ ID NO: 1815653
aaucugccaauggaauaau

SEQ ID NO: 1815655 - RNA, 19 nt, Artificial Sequence
  Description of Artificial Sequence: Synthetic oligonucleotide
  Sense strand starting at position 610 of SEQ ID NO: 1563504
ucaagcuaacaguaguaaa

SEQ ID NO: 1815656 - RNA, 19 nt, Artificial Sequence
  Description of Artificial Sequence: Synthetic oligonucleotide
  Antisense strand to SEQ ID NO: 1815655
uuuacuacuguuagcuuga

SEQ ID NO: 1815657 - RNA, 19 nt, Artificial Sequence
  Description of Artificial Sequence: Synthetic oligonucleotide
  Sense strand starting at position 733 of SEQ ID NO: 1563504
ucagaaguugucuagcaag

SEQ ID NO: 1815658 - RNA, 19 nt, Artificial Sequence
  Description of Artificial Sequence: Synthetic oligonucleotide
  Antisense strand to SEQ ID NO: 1815657
cuugcuagacaacuucuga

SEQ ID NO: 1815659 - RNA, 19 nt, Artificial Sequence
  Description of Artificial Sequence: Synthetic oligonucleotide
  Sense strand starting at position 781 of SEQ ID NO: 1563504
ggcgcugauccucacuaga

SEQ ID NO: 1815660 - RNA, 19 nt, Artificial Sequence
  Description of Artificial Sequence: Synthetic oligonucleotide
  Antisense strand to SEQ ID NO: 1815659
ucuagugaggaucagcgcc

SEQ ID NO: 1815661 - RNA, 19 nt, Artificial Sequence
  Description of Artificial Sequence: Synthetic oligonucleotide
  Sense strand starting at position 804 of SEQ ID NO: 1563504
cgaggacaaucagucucaa

SEQ ID NO: 1815662 - RNA, 19 nt, Artificial Sequence
  Description of Artificial Sequence: Synthetic oligonucleotide
  Antisense strand to SEQ ID NO: 1815661
uugagacugauuguccucg

SEQ ID NO: 1815663 - RNA, 19 nt, Artificial Sequence
  Description of Artificial Sequence: Synthetic oligonucleotide
  Sense strand starting at position 819 of SEQ ID NO: 1563504
ucaaauugcagguaagugu

SEQ ID NO: 1815664 - RNA, 19 nt, Artificial Sequence
  Description of Artificial Sequence: Synthetic oligonucleotide
  Antisense strand to SEQ ID NO: 1815663
acacuuaccugcaauuuga

SEQ ID NO: 1815665 - RNA, 19 nt, Artificial Sequence
  Description of Artificial Sequence: Synthetic oligonucleotide
  Sense strand starting at position 2284 of SEQ ID NO: 1563504
cuaagaauuugggaaccuu

SEQ ID NO: 1815666 - RNA, 19 nt, Artificial Sequence
  Description of Artificial Sequence: Synthetic oligonucleotide
  Antisense strand to SEQ ID NO: 1815665
aagguucccaaauucuuag

SEQ ID NO: 1815667 - RNA, 19 nt, Artificial Sequence
  Description of Artificial Sequence: Synthetic oligonucleotide
  Sense strand starting at position 2496 of SEQ ID NO: 1563504
aauggcucgcccgaagaaa

SEQ ID NO: 1815668 - RNA, 19 nt, Artificial Sequence
  Description of Artificial Sequence: Synthetic oligonucleotide
  Antisense strand to SEQ ID NO: 1815667
uuucuucgggcgagccauu

SEQ ID NO: 1815669 - RNA, 19 nt, Artificial Sequence
  Description of Artificial Sequence: Synthetic oligonucleotide
  Sense strand starting at position 2588 of SEQ ID NO: 1563504
ggcucaaucuaaguaacag

SEQ ID NO: 1815670 - RNA, 19 nt, Artificial Sequence
  Description of Artificial Sequence: Synthetic oligonucleotide
  Antisense strand to SEQ ID NO: 1815669
cuguuacuuagauugagcc

SEQ ID NO: 1815671 - RNA, 19 nt, Artificial Sequence
  Description of Artificial Sequence: Synthetic oligonucleotide
  Sense strand starting at position 2626 of SEQ ID NO: 1563504
gcggaacugaaaugauguu

SEQ ID NO: 1815672 - RNA, 19 nt, Artificial Sequence
  Description of Artificial Sequence: Synthetic oligonucleotide
  Antisense strand to SEQ ID NO: 1815671
aacaucauuucaguuccgc

SEQ ID NO: 1815673 - RNA, 19 nt, Artificial Sequence
  Description of Artificial Sequence: Synthetic oligonucleotide
  Sense strand starting at position 2635 of SEQ ID NO: 1563504
aaaugauguugucccuuga

SEQ ID NO: 1815674 - RNA, 19 nt, Artificial Sequence
  Description of Artificial Sequence: Synthetic oligonucleotide
  Antisense strand to SEQ ID NO: 1815673
ucaagggacaacaucauuu

SEQ ID NO: 1815675 - RNA, 19 nt, Artificial Sequence
  Description of Artificial Sequence: Synthetic oligonucleotide
  Sense strand starting at position 2709 of SEQ ID NO: 1563504
uaucgaucccuguacaaug

SEQ ID NO: 1815676 - RNA, 19 nt, Artificial Sequence
  Description of Artificial Sequence: Synthetic oligonucleotide
  Antisense strand to SEQ ID NO: 1815675
cauuguacagggaucgaua

SEQ ID NO: 1815677 - RNA, 19 nt, Artificial Sequence
  Description of Artificial Sequence: Synthetic oligonucleotide
  Sense strand starting at position 2792 of SEQ ID NO: 1563504
uggagaacguaugucuuca

SEQ ID NO: 1815678 - RNA, 19 nt, Artificial Sequence
  Description of Artificial Sequence: Synthetic oligonucleotide
  Antisense strand to SEQ ID NO: 1815677
ugaagacauacguucucca

SEQ ID NO: 1815679 - RNA, 19 nt, Artificial Sequence
  Description of Artificial Sequence: Synthetic oligonucleotide
  Sense strand starting at position 2855 of SEQ ID NO: 1563504
acaagugugguccacagaa

SEQ ID NO: 1815680 - RNA, 19 nt, Artificial Sequence
  Description of Artificial Sequence: Synthetic oligonucleotide
  Antisense strand to SEQ ID NO: 1815679
uucuguggaccacacuugu

SEQ ID NO: 1815681 - RNA, 19 nt, Artificial Sequence
  Description of Artificial Sequence: Synthetic oligonucleotide
  Sense strand starting at position 2857 of SEQ ID NO: 1563504
aagugugguccacagaaug

SEQ ID NO: 1815682 - RNA, 19 nt, Artificial Sequence
  Description of Artificial Sequence: Synthetic oligonucleotide
  Antisense strand to SEQ ID NO: 1815681
cauucuguggaccacacuu

SEQ ID NO: 1815683 - RNA, 19 nt, Artificial Sequence
  Description of Artificial Sequence: Synthetic oligonucleotide
  Sense strand starting at position 2935 of SEQ ID NO: 1563504
auccuucuccuggaguacu

SEQ ID NO: 1815684 - RNA, 19 nt, Artificial Sequence
  Description of Artificial Sequence: Synthetic oligonucleotide
  Antisense strand to SEQ ID NO: 1815683
aguacuccaggagaaggau

SEQ ID NO: 1815685 - RNA, 19 nt, Artificial Sequence
  Description of Artificial Sequence: Synthetic oligonucleotide
  Sense strand starting at position 2979 of SEQ ID NO: 1563504
ccaaauguuccagauguac

SEQ ID NO: 1815686 - RNA, 19 nt, Artificial Sequence
  Description of Artificial Sequence: Synthetic oligonucleotide
  Antisense strand to SEQ ID NO: 1815685
guacaucuggaacauuugg

SEQ ID NO: 1815687 - RNA, 19 nt, Artificial Sequence
  Description of Artificial Sequence: Synthetic oligonucleotide
  Sense strand starting at position 3135 of SEQ ID NO: 1563504
aagaguuacuagucugaga

SEQ ID NO: 1815688 - RNA, 19 nt, Artificial Sequence
  Description of Artificial Sequence: Synthetic oligonucleotide
  Antisense strand to SEQ ID NO: 1815687
ucucagacuaguaacucuu

SEQ ID NO: 1815689 - RNA, 19 nt, Artificial Sequence
  Description of Artificial Sequence: Synthetic oligonucleotide
  Sense strand starting at position 3137 of SEQ ID NO: 1563504
gaguuacuagucugagauu

SEQ ID NO: 1815690 - RNA, 19 nt, Artificial Sequence
  Description of Artificial Sequence: Synthetic oligonucleotide
  Antisense strand to SEQ ID NO: 1815689
aaucucagacuaguaacuc

SEQ ID NO: 1815691 - RNA, 19 nt, Artificial Sequence
  Description of Artificial Sequence: Synthetic oligonucleotide
  Sense strand starting at position 3222 of SEQ ID NO: 1563504
cguguuauugaguaaugaa

SEQ ID NO: 1815692 - RNA, 19 nt, Artificial Sequence
  Description of Artificial Sequence: Synthetic oligonucleotide
  Antisense strand to SEQ ID NO: 1815691
uucauuacucaauaacacg

SEQ ID NO: 1815693 - RNA, 19 nt, Artificial Sequence
  Description of Artificial Sequence: Synthetic oligonucleotide
  Sense strand starting at position 3273 of SEQ ID NO: 1563504
ucuugagugucaucaugga

SEQ ID NO: 1815694 - RNA, 19 nt, Artificial Sequence
  Description of Artificial Sequence: Synthetic oligonucleotide
  Antisense strand to SEQ ID NO: 1815693
uccaugaugacacucaaga

SEQ ID NO: 1815695 - RNA, 19 nt, Artificial Sequence
  Description of Artificial Sequence: Synthetic oligonucleotide
  Sense strand starting at position 3448 of SEQ ID NO: 1563504
ggucauaagccuuaaauau

SEQ ID NO: 1815696 - RNA, 19 nt, Artificial Sequence
  Description of Artificial Sequence: Synthetic oligonucleotide
  Antisense strand to SEQ ID NO: 1815695
auauuuaaggcuuaugacc

SEQ ID NO: 1815697 - RNA, 19 nt, Artificial Sequence
  Description of Artificial Sequence: Synthetic oligonucleotide
  Sense strand starting at position 3488 of SEQ ID NO: 1563504
ucuguacacuuugugaaug

SEQ ID NO: 1815698 - RNA, 19 nt, Artificial Sequence
  Description of Artificial Sequence: Synthetic oligonucleotide
  Antisense strand to SEQ ID NO: 1815697
cauucacaaaguguacaga

SEQ ID NO: 1815699 - RNA, 19 nt, Artificial Sequence
  Description of Artificial Sequence: Synthetic oligonucleotide
  Sense strand starting at position 3528 of SEQ ID NO: 1563504
cuuugugucgucucuuuaa

SEQ ID NO: 1815700 - RNA, 19 nt, Artificial Sequence
  Description of Artificial Sequence: Synthetic oligonucleotide
  Antisense strand to SEQ ID NO: 1815699
uuaaagagacgacacaaag

SEQ ID NO: 1815701 - RNA, 19 nt, Artificial Sequence
  Description of Artificial Sequence: Synthetic oligonucleotide
  Sense strand starting at position 3637 of SEQ ID NO: 1563504
gcuuguccaguccaggaau

SEQ ID NO: 1815702 - RNA, 19 nt, Artificial Sequence
  Description of Artificial Sequence: Synthetic oligonucleotide
  Antisense strand to SEQ ID NO: 1815701
auuccuggacuggacaagc

SEQ ID NO: 1815703 - RNA, 19 nt, Artificial Sequence
  Description of Artificial Sequence: Synthetic oligonucleotide
  Sense strand starting at position 3697 of SEQ ID NO: 1563504
aucacagcccgggauuauu

SEQ ID NO: 1815704 - RNA, 19 nt, Artificial Sequence
  Description of Artificial Sequence: Synthetic oligonucleotide
  Antisense strand to SEQ ID NO: 1815703
aauaaucccgggcugugau

SEQ ID NO: 1815705 - RNA, 19 nt, Artificial Sequence
  Description of Artificial Sequence: Synthetic oligonucleotide
  Sense strand starting at position 233 of SEQ ID NO: 1563505
uggcaaguuuaacuuccaa

SEQ ID NO: 1815706 - RNA, 19 nt, Artificial Sequence
  Description of Artificial Sequence: Synthetic oligonucleotide
  Antisense strand to SEQ ID NO: 1815705
uuggaaguuaaacuugcca

SEQ ID NO: 1815707 - RNA, 19 nt, Artificial Sequence
  Description of Artificial Sequence: Synthetic oligonucleotide
  Sense strand starting at position 376 of SEQ ID NO: 1563505
guugaaaucuuaucugugu

SEQ ID NO: 1815708 - RNA, 19 nt, Artificial Sequence
  Description of Artificial Sequence: Synthetic oligonucleotide
  Antisense strand to SEQ ID NO: 1815707
acacagauaagauuucaac

SEQ ID NO: 1815709 - RNA, 19 nt, Artificial Sequence
  Description of Artificial Sequence: Synthetic oligonucleotide
  Sense strand starting at position 540 of SEQ ID NO: 1563505
uccacuuuagccugaaguu

SEQ ID NO: 1815710 - RNA, 19 nt, Artificial Sequence
  Description of Artificial Sequence: Synthetic oligonucleotide
  Antisense strand to SEQ ID NO: 1815709
aacuucaggcuaaagugga

SEQ ID NO: 1815711 - RNA, 19 nt, Artificial Sequence
  Description of Artificial Sequence: Synthetic oligonucleotide
  Sense strand starting at position 541 of SEQ ID NO: 1563505
ccacuuuagccugaaguua

SEQ ID NO: 1815712 - RNA, 19 nt, Artificial Sequence
  Description of Artificial Sequence: Synthetic oligonucleotide
  Antisense strand to SEQ ID NO: 1815711
uaacuucaggcuaaagugg

SEQ ID NO: 1815713 - RNA, 19 nt, Artificial Sequence
  Description of Artificial Sequence: Synthetic oligonucleotide
  Sense strand starting at position 659 of SEQ ID NO: 1563505
ccugaaaggcguuacaauu

SEQ ID NO: 1815714 - RNA, 19 nt, Artificial Sequence
  Description of Artificial Sequence: Synthetic oligonucleotide
  Antisense strand to SEQ ID NO: 1815713
aauuguaacgccuuucagg

SEQ ID NO: 1815715 - RNA, 19 nt, Artificial Sequence
  Description of Artificial Sequence: Synthetic oligonucleotide
  Sense strand starting at position 911 of SEQ ID NO: 1563505
gugagucugcggaguugaa

SEQ ID NO: 1815716 - RNA, 19 nt, Artificial Sequence
  Description of Artificial Sequence: Synthetic oligonucleotide
  Antisense strand to SEQ ID NO: 1815715
uucaacuccgcagacucac

SEQ ID NO: 1815717 - RNA, 19 nt, Artificial Sequence
  Description of Artificial Sequence: Synthetic oligonucleotide
  Sense strand starting at position 1393 of SEQ ID NO: 1563505
acccuagaugcucaagguu

SEQ ID NO: 1815718 - RNA, 19 nt, Artificial Sequence
  Description of Artificial Sequence: Synthetic oligonucleotide
  Antisense strand to SEQ ID NO: 1815717
aaccuugagcaucuagggu

SEQ ID NO: 1815719 - RNA, 19 nt, Artificial Sequence
  Description of Artificial Sequence: Synthetic oligonucleotide
  Sense strand starting at position 1468 of SEQ ID NO: 1563505
ggaaauggcucgccaagau

SEQ ID NO: 1815720 - RNA, 19 nt, Artificial Sequence
  Description of Artificial Sequence: Synthetic oligonucleotide
  Antisense strand to SEQ ID NO: 1815719
aucuuggcgagccauuucc

SEQ ID NO: 1815721 - RNA, 19 nt, Artificial Sequence
  Description of Artificial Sequence: Synthetic oligonucleotide
  Sense strand starting at position 1525 of SEQ ID NO: 1563505
gcgcucuccggacacaaau

SEQ ID NO: 1815722 - RNA, 19 nt, Artificial Sequence
  Description of Artificial Sequence: Synthetic oligonucleotide
  Antisense strand to SEQ ID NO: 1815721
auuuguguccggagagcgc

SEQ ID NO: 1815723 - RNA, 19 nt, Artificial Sequence
  Description of Artificial Sequence: Synthetic oligonucleotide
  Sense strand starting at position 1608 of SEQ ID NO: 1563505
ggaucauccugaccugauu

SEQ ID NO: 1815724 - RNA, 19 nt, Artificial Sequence
  Description of Artificial Sequence: Synthetic oligonucleotide
  Antisense strand to SEQ ID NO: 1815723
aaucaggucaggaugaucc

SEQ ID NO: 1815725 - RNA, 19 nt, Artificial Sequence
  Description of Artificial Sequence: Synthetic oligonucleotide
  Sense strand starting at position 2028 of SEQ ID NO: 1563505
cagcuauuggacuguuuga

SEQ ID NO: 1815726 - RNA, 19 nt, Artificial Sequence
  Description of Artificial Sequence: Synthetic oligonucleotide
  Antisense strand to SEQ ID NO: 1815725
ucaaacaguccaauagcug

SEQ ID NO: 1815727 - RNA, 19 nt, Artificial Sequence
  Description of Artificial Sequence: Synthetic oligonucleotide
  Sense strand starting at position 2139 of SEQ ID NO: 1563505
gcaaaucuccugggacuga

SEQ ID NO: 1815728 - RNA, 19 nt, Artificial Sequence
  Description of Artificial Sequence: Synthetic oligonucleotide
  Antisense strand to SEQ ID NO: 1815727
ucagucccaggagauuugc

SEQ ID NO: 1815729 - RNA, 19 nt, Artificial Sequence
  Description of Artificial Sequence: Synthetic oligonucleotide
  Sense strand starting at position 2235 of SEQ ID NO: 1563505
agcucagcucaucaaaguu

SEQ ID NO: 1815730 - RNA, 19 nt, Artificial Sequence
  Description of Artificial Sequence: Synthetic oligonucleotide
  Antisense strand to SEQ ID NO: 1815729
aacuuugaugagcugagcu

SEQ ID NO: 1815731 - RNA, 19 nt, Artificial Sequence
  Description of Artificial Sequence: Synthetic oligonucleotide
  Sense strand starting at position 2385 of SEQ ID NO: 1563505
gguagauaggauugugaca

SEQ ID NO: 1815732 - RNA, 19 nt, Artificial Sequence
  Description of Artificial Sequence: Synthetic oligonucleotide
  Antisense strand to SEQ ID NO: 1815731
ugucacaauccuaucuacc

SEQ ID NO: 1815733 - RNA, 19 nt, Artificial Sequence
  Description of Artificial Sequence: Synthetic oligonucleotide
  Sense strand starting at position 2466 of SEQ ID NO: 1563505
ggcacucagcuuugaucau

SEQ ID NO: 1815734 - RNA, 19 nt, Artificial Sequence
  Description of Artificial Sequence: Synthetic oligonucleotide
  Antisense strand to SEQ ID NO: 1815733
augaucaaagcugagugcc

SEQ ID NO: 1815735 - RNA, 19 nt, Artificial Sequence
  Description of Artificial Sequence: Synthetic oligonucleotide
  Sense strand starting at position 2500 of SEQ ID NO: 1563505
cccugagugucuguacaag

SEQ ID NO: 1815736 - RNA, 19 nt, Artificial Sequence
  Description of Artificial Sequence: Synthetic oligonucleotide
  Antisense strand to SEQ ID NO: 1815735
cuuguacagacacucaggg

SEQ ID NO: 1815737 - RNA, 19 nt, Artificial Sequence
  Description of Artificial Sequence: Synthetic oligonucleotide
  Sense strand starting at position 2571 of SEQ ID NO: 1563505
ggaguuuauuaauccauga

SEQ ID NO: 1815738 - RNA, 19 nt, Artificial Sequence
  Description of Artificial Sequence: Synthetic oligonucleotide
  Antisense strand to SEQ ID NO: 1815737
ucauggauuaauaaacucc

SEQ ID NO: 1815739 - RNA, 19 nt, Artificial Sequence
  Description of Artificial Sequence: Synthetic oligonucleotide
  Sense strand starting at position 2595 of SEQ ID NO: 1563505
gaggcagcgguggauaaau

SEQ ID NO: 1815740 - RNA, 19 nt, Artificial Sequence
  Description of Artificial Sequence: Synthetic oligonucleotide
  Antisense strand to SEQ ID NO: 1815739
auuuauccaccgcugccuc

SEQ ID NO: 1815741 - RNA, 19 nt, Artificial Sequence
  Description of Artificial Sequence: Synthetic oligonucleotide
  Sense strand starting at position 2605 of SEQ ID NO: 1563505
uggauaaaucccgaaacgu

SEQ ID NO: 1815742 - RNA, 19 nt, Artificial Sequence
  Description of Artificial Sequence: Synthetic oligonucleotide
  Antisense strand to SEQ ID NO: 1815741
acguuucgggauuuaucca

SEQ ID NO: 1815743 - RNA, 19 nt, Artificial Sequence
  Description of Artificial Sequence: Synthetic oligonucleotide
  Sense strand starting at position 2618 of SEQ ID NO: 1563505
aaacguuacuagucccuga

SEQ ID NO: 1815744 - RNA, 19 nt, Artificial Sequence
  Description of Artificial Sequence: Synthetic oligonucleotide
  Antisense strand to SEQ ID NO: 1815743
ucagggacuaguaacguuu

SEQ ID NO: 1815745 - RNA, 19 nt, Artificial Sequence
  Description of Artificial Sequence: Synthetic oligonucleotide
  Sense strand starting at position 2622 of SEQ ID NO: 1563505
guuacuagucccugaccuu

SEQ ID NO: 1815746 - RNA, 19 nt, Artificial Sequence
  Description of Artificial Sequence: Synthetic oligonucleotide
  Antisense strand to SEQ ID NO: 1815745
aaggucagggacuaguaac

SEQ ID NO: 1815747 - RNA, 19 nt, Artificial Sequence
  Description of Artificial Sequence: Synthetic oligonucleotide
  Sense strand starting at position 2629 of SEQ ID NO: 1563505
gucccugaccuugaagagu

SEQ ID NO: 1815748 - RNA, 19 nt, Artificial Sequence
  Description of Artificial Sequence: Synthetic oligonucleotide
  Antisense strand to SEQ ID NO: 1815747
acucuucaaggucagggac

SEQ ID NO: 1815749 - RNA, 19 nt, Artificial Sequence
  Description of Artificial Sequence: Synthetic oligonucleotide
  Sense strand starting at position 2894 of SEQ ID NO: 1563505
auuaucagucucugaggga

SEQ ID NO: 1815750 - RNA, 19 nt, Artificial Sequence
  Description of Artificial Sequence: Synthetic oligonucleotide
  Antisense strand to SEQ ID NO: 1815749
ucccucagagacugauaau

SEQ ID NO: 1815751 - RNA, 19 nt, Artificial Sequence
  Description of Artificial Sequence: Synthetic oligonucleotide
  Sense strand starting at position 2951 of SEQ ID NO: 1563505
gguggagucucaguaaagc

SEQ ID NO: 1815752 - RNA, 19 nt, Artificial Sequence
  Description of Artificial Sequence: Synthetic oligonucleotide
  Antisense strand to SEQ ID NO: 1815751
gcuuuacugagacuccacc

SEQ ID NO: 1815753 - RNA, 19 nt, Artificial Sequence
  Description of Artificial Sequence: Synthetic oligonucleotide
  Sense strand starting at position 3189 of SEQ ID NO: 1563505
ucaggauucucuucuguaa

SEQ ID NO: 1815754 - RNA, 19 nt, Artificial Sequence
  Description of Artificial Sequence: Synthetic oligonucleotide
  Antisense strand to SEQ ID NO: 1815753
uuacagaagagaauccuga

SEQ ID NO: 1815755 - RNA, 19 nt, Artificial Sequence
  Description of Artificial Sequence: Synthetic oligonucleotide
  Sense strand starting at position 3193 of SEQ ID NO: 1563505
gauucucuucuguaaagug

SEQ ID NO: 1815756 - RNA, 19 nt, Artificial Sequence
  Description of Artificial Sequence: Synthetic oligonucleotide
  Antisense strand to SEQ ID NO: 1815755
cacuuuacagaagagaauc

SEQ ID NO: 1815757 - RNA, 19 nt, Artificial Sequence
  Description of Artificial Sequence: Synthetic oligonucleotide
  Sense strand starting at position 3278 of SEQ ID NO: 1563505
uguucauaugcguaaggag

SEQ ID NO: 1815758 - RNA, 19 nt, Artificial Sequence
  Description of Artificial Sequence: Synthetic oligonucleotide
  Antisense strand to SEQ ID NO: 1815757
cuccuuacgcauaugaaca

SEQ ID NO: 1815759 - RNA, 19 nt, Artificial Sequence
  Description of Artificial Sequence: Synthetic oligonucleotide
  Sense strand starting at position 3287 of SEQ ID NO: 1563505
gcguaaggagcuuagaaug

SEQ ID NO: 1815760 - RNA, 19 nt, Artificial Sequence
  Description of Artificial Sequence: Synthetic oligonucleotide
  Antisense strand to SEQ ID NO: 1815759
cauucuaagcuccuuacgc

SEQ ID NO: 1815761 - RNA, 19 nt, Artificial Sequence
  Description of Artificial Sequence: Synthetic oligonucleotide
  Sense strand starting at position 3302 of SEQ ID NO: 1563505
aaugauuucugggacguag

SEQ ID NO: 1815762 - RNA, 19 nt, Artificial Sequence
  Description of Artificial Sequence: Synthetic oligonucleotide
  Antisense strand to SEQ ID NO: 1815761
cuacgucccagaaaucauu

SEQ ID NO: 1815763 - RNA, 19 nt, Artificial Sequence
  Description of Artificial Sequence: Synthetic oligonucleotide
  Sense strand starting at position 3314 of SEQ ID NO: 1563505
gacguagugguauagaagu

SEQ ID NO: 1815764 - RNA, 19 nt, Artificial Sequence
  Description of Artificial Sequence: Synthetic oligonucleotide
  Antisense strand to SEQ ID NO: 1815763
acuucuauaccacuacguc

SEQ ID NO: 1815765 - RNA, 19 nt, Artificial Sequence
  Description of Artificial Sequence: Synthetic oligonucleotide
  Sense strand starting at position 3320 of SEQ ID NO: 1563505
gugguauagaaguguuuau

SEQ ID NO: 1815766 - RNA, 19 nt, Artificial Sequence
  Description of Artificial Sequence: Synthetic oligonucleotide
  Antisense strand to SEQ ID NO: 1815765
auaaacacuucuauaccac

SEQ ID NO: 1815767 - RNA, 19 nt, Artificial Sequence
  Description of Artificial Sequence: Synthetic oligonucleotide
  Sense strand starting at position 3377 of SEQ ID NO: 1563505
cugaaaucaucugugagau

SEQ ID NO: 1815768 - RNA, 19 nt, Artificial Sequence
  Description of Artificial Sequence: Synthetic oligonucleotide
  Antisense strand to SEQ ID NO: 1815767
aucucacagaugauuucag

SEQ ID NO: 1815769 - RNA, 19 nt, Artificial Sequence
  Description of Artificial Sequence: Synthetic oligonucleotide
  Sense strand starting at position 3378 of SEQ ID NO: 1563505
ugaaaucaucugugagauu

SEQ ID NO: 1815770 - RNA, 19 nt, Artificial Sequence
  Description of Artificial Sequence: Synthetic oligonucleotide
  Antisense strand to SEQ ID NO: 1815769
aaucucacagaugauuuca

SEQ ID NO: 1815771 - RNA, 19 nt, Artificial Sequence
  Description of Artificial Sequence: Synthetic oligonucleotide
  Sense strand starting at position 3723 of SEQ ID NO: 1563505
cacagauucugaguuagca

SEQ ID NO: 1815772 - RNA, 19 nt, Artificial Sequence
  Description of Artificial Sequence: Synthetic oligonucleotide
  Antisense strand to SEQ ID NO: 1815771
ugcuaacucagaaucugug

SEQ ID NO: 1815773 - RNA, 19 nt, Artificial Sequence
  Description of Artificial Sequence: Synthetic oligonucleotide
  Sense strand starting at position 3831 of SEQ ID NO: 1563505
agguuuagaagguggacaa

SEQ ID NO: 1815774 - RNA, 19 nt, Artificial Sequence
  Description of Artificial Sequence: Synthetic oligonucleotide
  Antisense strand to SEQ ID NO: 1815773
uuguccaccuucuaaaccu

SEQ ID NO: 1815775 - RNA, 19 nt, Artificial Sequence
  Description of Artificial Sequence: Synthetic oligonucleotide
  Sense strand starting at position 3904 of SEQ ID NO: 1563505
acaaccauucuaugagguu

SEQ ID NO: 1815776 - RNA, 19 nt, Artificial Sequence
  Description of Artificial Sequence: Synthetic oligonucleotide
  Antisense strand to SEQ ID NO: 1815775
aaccucauagaaugguugu

SEQ ID NO: 1815777 - RNA, 19 nt, Artificial Sequence
  Description of Artificial Sequence: Synthetic oligonucleotide
  Sense strand starting at position 3910 of SEQ ID NO: 1563505
auucuaugagguugagguu

SEQ ID NO: 1815778 - RNA, 19 nt, Artificial Sequence
  Description of Artificial Sequence: Synthetic oligonucleotide
  Antisense strand to SEQ ID NO: 1815777
aaccucaaccucauagaau

SEQ ID NO: 1815779 - RNA, 19 nt, Artificial Sequence
  Description of Artificial Sequence: Synthetic oligonucleotide
  Sense strand starting at position 3948 of SEQ ID NO: 1563505
ugaagaggcuccuuguacu

SEQ ID NO: 1815780 - RNA, 19 nt, Artificial Sequence
  Description of Artificial Sequence: Synthetic oligonucleotide
  Antisense strand to SEQ ID NO: 1815779
aguacaaggagccucuuca

SEQ ID NO: 1815781 - RNA, 19 nt, Artificial Sequence
  Description of Artificial Sequence: Synthetic oligonucleotide
  Sense strand starting at position 3965 of SEQ ID NO: 1563505
cucugugauucugccugga

SEQ ID NO: 1815782 - RNA, 19 nt, Artificial Sequence
  Description of Artificial Sequence: Synthetic oligonucleotide
  Antisense strand to SEQ ID NO: 1815781
uccaggcagaaucacagag

SEQ ID NO: 1815783 - RNA, 19 nt, Artificial Sequence
  Description of Artificial Sequence: Synthetic oligonucleotide
  Sense strand starting at position 3969 of SEQ ID NO: 1563505
gugauucugccuggaagua

SEQ ID NO: 1815784 - RNA, 19 nt, Artificial Sequence
  Description of Artificial Sequence: Synthetic oligonucleotide
  Antisense strand to SEQ ID NO: 1815783
uacuuccaggcagaaucac

SEQ ID NO: 1815785 - RNA, 19 nt, Artificial Sequence
  Description of Artificial Sequence: Synthetic oligonucleotide
  Sense strand starting at position 153 of SEQ ID NO: 1563506
ccugacuuugacuauugua

SEQ ID NO: 1815786 - RNA, 19 nt, Artificial Sequence
  Description of Artificial Sequence: Synthetic oligonucleotide
  Antisense strand to SEQ ID NO: 1815785
uacaauagucaaagucagg

SEQ ID NO: 1815787 - RNA, 19 nt, Artificial Sequence
  Description of Artificial Sequence: Synthetic oligonucleotide
  Sense strand starting at position 160 of SEQ ID NO: 1563506
uugacuauuguauggagau

SEQ ID NO: 1815788 - RNA, 19 nt, Artificial Sequence
  Description of Artificial Sequence: Synthetic oligonucleotide
  Antisense strand to SEQ ID NO: 1815787
aucuccauacaauagucaa

SEQ ID NO: 1815789 - RNA, 19 nt, Artificial Sequence
  Description of Artificial Sequence: Synthetic oligonucleotide
  Sense strand starting at position 174 of SEQ ID NO: 1563506
gagauaugaugcuuugagu

SEQ ID NO: 1815790 - RNA, 19 nt, Artificial Sequence
  Description of Artificial Sequence: Synthetic oligonucleotide
  Antisense strand to SEQ ID NO: 1815789
acucaaagcaucauaucuc

SEQ ID NO: 1815791 - RNA, 19 nt, Artificial Sequence
  Description of Artificial Sequence: Synthetic oligonucleotide
  Sense strand starting at position 224 of SEQ ID NO: 1563506
acagcaagauguccaauau

SEQ ID NO: 1815792 - RNA, 19 nt, Artificial Sequence
  Description of Artificial Sequence: Synthetic oligonucleotide
  Antisense strand to SEQ ID NO: 1815791
auauuggacaucuugcugu

SEQ ID NO: 1815793 - RNA, 19 nt, Artificial Sequence
  Description of Artificial Sequence: Synthetic oligonucleotide
  Sense strand starting at position 225 of SEQ ID NO: 1563506
cagcaagauguccaauaug

SEQ ID NO: 1815794 - RNA, 19 nt, Artificial Sequence
  Description of Artificial Sequence: Synthetic oligonucleotide
  Antisense strand to SEQ ID NO: 1815793
cauauuggacaucuugcug

SEQ ID NO: 1815795 - RNA, 19 nt, Artificial Sequence
  Description of Artificial Sequence: Synthetic oligonucleotide
  Sense strand starting at position 255 of SEQ ID NO: 1563506
gaggcugaguccuugauaa

SEQ ID NO: 1815796 - RNA, 19 nt, Artificial Sequence
  Description of Artificial Sequence: Synthetic oligonucleotide
  Antisense strand to SEQ ID NO: 1815795
uuaucaaggacucagccuc

SEQ ID NO: 1815797 - RNA, 19 nt, Artificial Sequence
  Description of Artificial Sequence: Synthetic oligonucleotide
  Sense strand starting at position 257 of SEQ ID NO: 1563506
ggcugaguccuugauaaca

SEQ ID NO: 1815798 - RNA, 19 nt, Artificial Sequence
  Description of Artificial Sequence: Synthetic oligonucleotide
  Antisense strand to SEQ ID NO: 1815797
uguuaucaaggacucagcc

SEQ ID NO: 1815799 - RNA, 19 nt, Artificial Sequence
  Description of Artificial Sequence: Synthetic oligonucleotide
  Sense strand starting at position 397 of SEQ ID NO: 1563506
uugauucugaggugaaaua

SEQ ID NO: 1815800 - RNA, 19 nt, Artificial Sequence
  Description of Artificial Sequence: Synthetic oligonucleotide
  Antisense strand to SEQ ID NO: 1815799
uauuucaccucagaaucaa

SEQ ID NO: 1815801 - RNA, 19 nt, Artificial Sequence
  Description of Artificial Sequence: Synthetic oligonucleotide
  Sense strand starting at position 552 of SEQ ID NO: 1563506
ugggauccuuuaucaacca

SEQ ID NO: 1815802 - RNA, 19 nt, Artificial Sequence
  Description of Artificial Sequence: Synthetic oligonucleotide
  Antisense strand to SEQ ID NO: 1815801
ugguugauaaaggauccca

SEQ ID NO: 1815803 - RNA, 19 nt, Artificial Sequence
  Description of Artificial Sequence: Synthetic oligonucleotide
  Sense strand starting at position 683 of SEQ ID NO: 1563506
ggaauaaagugggcuagau

SEQ ID NO: 1815804 - RNA, 19 nt, Artificial Sequence
  Description of Artificial Sequence: Synthetic oligonucleotide
  Antisense strand to SEQ ID NO: 1815803
aucuagcccacuuuauucc

SEQ ID NO: 1815805 - RNA, 19 nt, Artificial Sequence
  Description of Artificial Sequence: Synthetic oligonucleotide
  Sense strand starting at position 692 of SEQ ID NO: 1563506
ugggcuagauaauuauuau

SEQ ID NO: 1815806 - RNA, 19 nt, Artificial Sequence
  Description of Artificial Sequence: Synthetic oligonucleotide
  Antisense strand to SEQ ID NO: 1815805
auaauaauuaucuagccca

SEQ ID NO: 1815807 - RNA, 19 nt, Artificial Sequence
  Description of Artificial Sequence: Synthetic oligonucleotide
  Sense strand starting at position 941 of SEQ ID NO: 1563506
gggacucugcacuaguauc

SEQ ID NO: 1815808 - RNA, 19 nt, Artificial Sequence
  Description of Artificial Sequence: Synthetic oligonucleotide
  Antisense strand to SEQ ID NO: 1815807
gauacuagugcagaguccc

SEQ ID NO: 1815809 - RNA, 19 nt, Artificial Sequence
  Description of Artificial Sequence: Synthetic oligonucleotide
  Sense strand starting at position 1069 of SEQ ID NO: 1563506
ucauuuaucucuguaugug

SEQ ID NO: 1815810 - RNA, 19 nt, Artificial Sequence
  Description of Artificial Sequence: Synthetic oligonucleotide
  Antisense strand to SEQ ID NO: 1815809
cacauacagagauaaauga

SEQ ID NO: 1815811 - RNA, 19 nt, Artificial Sequence
  Description of Artificial Sequence: Synthetic oligonucleotide
  Sense strand starting at position 1244 of SEQ ID NO: 1563506
gagugugaauaugcagaaa

SEQ ID NO: 1815812 - RNA, 19 nt, Artificial Sequence
  Description of Artificial Sequence: Synthetic oligonucleotide
  Antisense strand to SEQ ID NO: 1815811
uuucugcauauucacacuc

SEQ ID NO: 1815813 - RNA, 19 nt, Artificial Sequence
  Description of Artificial Sequence: Synthetic oligonucleotide
  Sense strand starting at position 1438 of SEQ ID NO: 1563506
ccuuaucuuuaauugggau

SEQ ID NO: 1815814 - RNA, 19 nt, Artificial Sequence
  Description of Artificial Sequence: Synthetic oligonucleotide
  Antisense strand to SEQ ID NO: 1815813
aucccaauuaaagauaagg

SEQ ID NO: 1815815 - RNA, 19 nt, Artificial Sequence
  Description of Artificial Sequence: Synthetic oligonucleotide
  Sense strand starting at position 1603 of SEQ ID NO: 1563506
ugggccuugcuuuagauga

SEQ ID NO: 1815816 - RNA, 19 nt, Artificial Sequence
  Description of Artificial Sequence: Synthetic oligonucleotide
  Antisense strand to SEQ ID NO: 1815815
ucaucuaaagcaaggccca

SEQ ID NO: 1815817 - RNA, 19 nt, Artificial Sequence
  Description of Artificial Sequence: Synthetic oligonucleotide
  Sense strand starting at position 1608 of SEQ ID NO: 1563506
cuugcuuuagaugacagau

SEQ ID NO: 1815818 - RNA, 19 nt, Artificial Sequence
  Description of Artificial Sequence: Synthetic oligonucleotide
  Antisense strand to SEQ ID NO: 1815817
aucugucaucuaaagcaag

SEQ ID NO: 1815819 - RNA, 19 nt, Artificial Sequence
  Description of Artificial Sequence: Synthetic oligonucleotide
  Sense strand starting at position 1652 of SEQ ID NO: 1563506
gggucucugcauuacacau

SEQ ID NO: 1815820 - RNA, 19 nt, Artificial Sequence
  Description of Artificial Sequence: Synthetic oligonucleotide
  Antisense strand to SEQ ID NO: 1815819
auguguaaugcagagaccc

SEQ ID NO: 1815821 - RNA, 19 nt, Artificial Sequence
  Description of Artificial Sequence: Synthetic oligonucleotide
  Sense strand starting at position 1687 of SEQ ID NO: 1563506
cuguuaucucauggaaacu

SEQ ID NO: 1815822 - RNA, 19 nt, Artificial Sequence
  Description of Artificial Sequence: Synthetic oligonucleotide
  Antisense strand to SEQ ID NO: 1815821
aguuuccaugagauaacag

SEQ ID NO: 1815823 - RNA, 19 nt, Artificial Sequence
  Description of Artificial Sequence: Synthetic oligonucleotide
  Sense strand starting at position 1699 of SEQ ID NO: 1563506
ggaaacuucccuugaccuu

SEQ ID NO: 1815824 - RNA, 19 nt, Artificial Sequence
  Description of Artificial Sequence: Synthetic oligonucleotide
  Antisense strand to SEQ ID NO: 1815823
aaggucaagggaaguuucc

SEQ ID NO: 1815825 - RNA, 19 nt, Artificial Sequence
  Description of Artificial Sequence: Synthetic oligonucleotide
  Sense strand starting at position 1741 of SEQ ID NO: 1563506
cuggaaucaugacugcuau

SEQ ID NO: 1815826 - RNA, 19 nt, Artificial Sequence
  Description of Artificial Sequence: Synthetic oligonucleotide
  Antisense strand to SEQ ID NO: 1815825
auagcagucaugauuccag

SEQ ID NO: 1815827 - RNA, 19 nt, Artificial Sequence
  Description of Artificial Sequence: Synthetic oligonucleotide
  Sense strand starting at position 1742 of SEQ ID NO: 1563506
uggaaucaugacugcuauu

SEQ ID NO: 1815828 - RNA, 19 nt, Artificial Sequence
  Description of Artificial Sequence: Synthetic oligonucleotide
  Antisense strand to SEQ ID NO: 1815827
aauagcagucaugauucca

SEQ ID NO: 1815829 - RNA, 19 nt, Artificial Sequence
  Description of Artificial Sequence: Synthetic oligonucleotide
  Sense strand starting at position 1790 of SEQ ID NO: 1563506
gcugaacuggaucagucau

SEQ ID NO: 1815830 - RNA, 19 nt, Artificial Sequence
  Description of Artificial Sequence: Synthetic oligonucleotide
  Antisense strand to SEQ ID NO: 1815829
augacugauccaguucagc

SEQ ID NO: 1815831 - RNA, 19 nt, Artificial Sequence
  Description of Artificial Sequence: Synthetic oligonucleotide
  Sense strand starting at position 1792 of SEQ ID NO: 1563506
ugaacuggaucagucauaa

SEQ ID NO: 1815832 - RNA, 19 nt, Artificial Sequence
  Description of Artificial Sequence: Synthetic oligonucleotide
  Antisense strand to SEQ ID NO: 1815831
uuaugacugauccaguuca

SEQ ID NO: 1815833 - RNA, 19 nt, Artificial Sequence
  Description of Artificial Sequence: Synthetic oligonucleotide
  Sense strand starting at position 2138 of SEQ ID NO: 1563506
agaguuaaugcuuauguag

SEQ ID NO: 1815834 - RNA, 19 nt, Artificial Sequence
  Description of Artificial Sequence: Synthetic oligonucleotide
  Antisense strand to SEQ ID NO: 1815833
cuacauaagcauuaacucu

SEQ ID NO: 1815835 - RNA, 19 nt, Artificial Sequence
  Description of Artificial Sequence: Synthetic oligonucleotide
  Sense strand starting at position 2467 of SEQ ID NO: 1563506
auccaugugagguaagcau

SEQ ID NO: 1815836 - RNA, 19 nt, Artificial Sequence
  Description of Artificial Sequence: Synthetic oligonucleotide
  Antisense strand to SEQ ID NO: 1815835
augcuuaccucacauggau

SEQ ID NO: 1815837 - RNA, 19 nt, Artificial Sequence
  Description of Artificial Sequence: Synthetic oligonucleotide
  Sense strand starting at position 2471 of SEQ ID NO: 1563506
augugagguaagcauuaua

SEQ ID NO: 1815838 - RNA, 19 nt, Artificial Sequence
  Description of Artificial Sequence: Synthetic oligonucleotide
  Antisense strand to SEQ ID NO: 1815837
uauaaugcuuaccucacau

SEQ ID NO: 1815839 - RNA, 19 nt, Artificial Sequence
  Description of Artificial Sequence: Synthetic oligonucleotide
  Sense strand starting at position 2589 of SEQ ID NO: 1563506
uucugucuuaggcagaaug

SEQ ID NO: 1815840 - RNA, 19 nt, Artificial Sequence
  Description of Artificial Sequence: Synthetic oligonucleotide
  Antisense strand to SEQ ID NO: 1815839
cauucugccuaagacagaa

SEQ ID NO: 1815841 - RNA, 19 nt, Artificial Sequence
  Description of Artificial Sequence: Synthetic oligonucleotide
  Sense strand starting at position 2679 of SEQ ID NO: 1563506
agauaauaguucuuggaau

SEQ ID NO: 1815842 - RNA, 19 nt, Artificial Sequence
  Description of Artificial Sequence: Synthetic oligonucleotide
  Antisense strand to SEQ ID NO: 1815841
auuccaagaacuauuaucu

SEQ ID NO: 1815843 - RNA, 19 nt, Artificial Sequence
  Description of Artificial Sequence: Synthetic oligonucleotide
  Sense strand starting at position 2681 of SEQ ID NO: 1563506
auaauaguucuuggaauac

SEQ ID NO: 1815844 - RNA, 19 nt, Artificial Sequence
  Description of Artificial Sequence: Synthetic oligonucleotide
  Antisense strand to SEQ ID NO: 1815843
guauuccaagaacuauuau

SEQ ID NO: 1815845 - RNA, 19 nt, Artificial Sequence
  Description of Artificial Sequence: Synthetic oligonucleotide
  Sense strand starting at position 2810 of SEQ ID NO: 1563506
ucgguuacuuaaucuaaga

SEQ ID NO: 1815846 - RNA, 19 nt, Artificial Sequence
  Description of Artificial Sequence: Synthetic oligonucleotide
  Antisense strand to SEQ ID NO: 1815845
ucuuagauuaaguaaccga

SEQ ID NO: 1815847 - RNA, 19 nt, Artificial Sequence
  Description of Artificial Sequence: Synthetic oligonucleotide
  Sense strand starting at position 2863 of SEQ ID NO: 1563506
agcucuugggaggguuaaa

SEQ ID NO: 1815848 - RNA, 19 nt, Artificial Sequence
  Description of Artificial Sequence: Synthetic oligonucleotide
  Antisense strand to SEQ ID NO: 1815847
uuuaacccucccaagagcu

SEQ ID NO: 1815849 - RNA, 19 nt, Artificial Sequence
  Description of Artificial Sequence: Synthetic oligonucleotide
  Sense strand starting at position 2927 of SEQ ID NO: 1563506
gacagaguuaaguaugcag

SEQ ID NO: 1815850 - RNA, 19 nt, Artificial Sequence
  Description of Artificial Sequence: Synthetic oligonucleotide
  Antisense strand to SEQ ID NO: 1815849
cugcauacuuaacucuguc

SEQ ID NO: 1815851 - RNA, 19 nt, Artificial Sequence
  Description of Artificial Sequence: Synthetic oligonucleotide
  Sense strand starting at position 2929 of SEQ ID NO: 1563506
cagaguuaaguaugcagaa

SEQ ID NO: 1815852 - RNA, 19 nt, Artificial Sequence
  Description of Artificial Sequence: Synthetic oligonucleotide
  Antisense strand to SEQ ID NO: 1815851
uucugcauacuuaacucug

SEQ ID NO: 1815853 - RNA, 19 nt, Artificial Sequence
  Description of Artificial Sequence: Synthetic oligonucleotide
  Sense strand starting at position 2949 of SEQ ID NO: 1563506
gguugucuucuacaaagag

SEQ ID NO: 1815854 - RNA, 19 nt, Artificial Sequence
  Description of Artificial Sequence: Synthetic oligonucleotide
  Antisense strand to SEQ ID NO: 1815853
cucuuuguagaagacaacc

SEQ ID NO: 1815855 - RNA, 19 nt, Artificial Sequence
  Description of Artificial Sequence: Synthetic oligonucleotide
  Sense strand starting at position 3005 of SEQ ID NO: 1563506
ggcuuauccuacucaaaga

SEQ ID NO: 1815856 - RNA, 19 nt, Artificial Sequence
  Description of Artificial Sequence: Synthetic oligonucleotide
  Antisense strand to SEQ ID NO: 1815855
ucuuugaguaggauaagcc

SEQ ID NO: 1815857 - RNA, 19 nt, Artificial Sequence
  Description of Artificial Sequence: Synthetic oligonucleotide
  Sense strand starting at position 3482 of SEQ ID NO: 1563506
aggaaacugcucuggacaa

SEQ ID NO: 1815858 - RNA, 19 nt, Artificial Sequence
  Description of Artificial Sequence: Synthetic oligonucleotide
  Antisense strand to SEQ ID NO: 1815857
uuguccagagcaguuuccu

SEQ ID NO: 1815859 - RNA, 19 nt, Artificial Sequence
  Description of Artificial Sequence: Synthetic oligonucleotide
  Sense strand starting at position 3624 of SEQ ID NO: 1563506
auuugagggucugagacau

SEQ ID NO: 1815860 - RNA, 19 nt, Artificial Sequence
  Description of Artificial Sequence: Synthetic oligonucleotide
  Antisense strand to SEQ ID NO: 1815859
augucucagacccucaaau

SEQ ID NO: 1815861 - RNA, 19 nt, Artificial Sequence
  Description of Artificial Sequence: Synthetic oligonucleotide
  Sense strand starting at position 3729 of SEQ ID NO: 1563506
gaaaccucugucuaggcaa

SEQ ID NO: 1815862 - RNA, 19 nt, Artificial Sequence
  Description of Artificial Sequence: Synthetic oligonucleotide
  Antisense strand to SEQ ID NO: 1815861
uugccuagacagagguuuc

SEQ ID NO: 1815863 - RNA, 19 nt, Artificial Sequence
  Description of Artificial Sequence: Synthetic oligonucleotide
  Sense strand starting at position 3896 of SEQ ID NO: 1563506
gcucuuguugcagugcaau

SEQ ID NO: 1815864 - RNA, 19 nt, Artificial Sequence
  Description of Artificial Sequence: Synthetic oligonucleotide
  Antisense strand to SEQ ID NO: 1815863
auugcacugcaacaagagc

SEQ ID NO: 1815865 - RNA, 19 nt, Artificial Sequence
  Description of Artificial Sequence: Synthetic oligonucleotide
  Sense strand starting at position 51 of SEQ ID NO: 1563507
gguacauacucuuucuauu

SEQ ID NO: 1815866 - RNA, 19 nt, Artificial Sequence
  Description of Artificial Sequence: Synthetic oligonucleotide
  Antisense strand to SEQ ID NO: 1815865
aauagaaagaguauguacc

SEQ ID NO: 1815867 - RNA, 19 nt, Artificial Sequence
  Description of Artificial Sequence: Synthetic oligonucleotide
  Sense strand starting at position 68 of SEQ ID NO: 1563507
uugcguuauccacagaagu

SEQ ID NO: 1815868 - RNA, 19 nt, Artificial Sequence
  Description of Artificial Sequence: Synthetic oligonucleotide
  Antisense strand to SEQ ID NO: 1815867
acuucuguggauaacgcaa

SEQ ID NO: 1815869 - RNA, 19 nt, Artificial Sequence
  Description of Artificial Sequence: Synthetic oligonucleotide
  Sense strand starting at position 70 of SEQ ID NO: 1563507
gcguuauccacagaaguga

SEQ ID NO: 1815870 - RNA, 19 nt, Artificial Sequence
  Description of Artificial Sequence: Synthetic oligonucleotide
  Antisense strand to SEQ ID NO: 1815869
ucacuucuguggauaacgc

SEQ ID NO: 1815871 - RNA, 19 nt, Artificial Sequence
  Description of Artificial Sequence: Synthetic oligonucleotide
  Sense strand starting at position 104 of SEQ ID NO: 1563507
ccuuguaaggucuaagcca

SEQ ID NO: 1815872 - RNA, 19 nt, Artificial Sequence
  Description of Artificial Sequence: Synthetic oligonucleotide
  Antisense strand to SEQ ID NO: 1815871
uggcuuagaccuuacaagg

SEQ ID NO: 1815873 - RNA, 19 nt, Artificial Sequence
  Description of Artificial Sequence: Synthetic oligonucleotide
  Sense strand starting at position 181 of SEQ ID NO: 1563507
cuacaaaguucuguagauu

SEQ ID NO: 1815874 - RNA, 19 nt, Artificial Sequence
  Description of Artificial Sequence: Synthetic oligonucleotide
  Antisense strand to SEQ ID NO: 1815873
aaucuacagaacuuuguag

SEQ ID NO: 1815875 - RNA, 19 nt, Artificial Sequence
  Description of Artificial Sequence: Synthetic oligonucleotide
  Sense strand starting at position 207 of SEQ ID NO: 1563507
ugugauggcuuguuaaauu

SEQ ID NO: 1815876 - RNA, 19 nt, Artificial Sequence
  Description of Artificial Sequence: Synthetic oligonucleotide
  Antisense strand to SEQ ID NO: 1815875
aauuuaacaagccaucaca

SEQ ID NO: 1815877 - RNA, 19 nt, Artificial Sequence
  Description of Artificial Sequence: Synthetic oligonucleotide
  Sense strand starting at position 481 of SEQ ID NO: 1563507
uggcaaguuuaacuuccaa

SEQ ID NO: 1815878 - RNA, 19 nt, Artificial Sequence
  Description of Artificial Sequence: Synthetic oligonucleotide
  Antisense strand to SEQ ID NO: 1815877
uuggaaguuaaacuugcca

SEQ ID NO: 1815879 - RNA, 19 nt, Artificial Sequence
  Description of Artificial Sequence: Synthetic oligonucleotide
  Sense strand starting at position 624 of SEQ ID NO: 1563507
guugaaaucuuaucugugu

SEQ ID NO: 1815880 - RNA, 19 nt, Artificial Sequence
  Description of Artificial Sequence: Synthetic oligonucleotide
  Antisense strand to SEQ ID NO: 1815879
acacagauaagauuucaac

SEQ ID NO: 1815881 - RNA, 19 nt, Artificial Sequence
  Description of Artificial Sequence: Synthetic oligonucleotide
  Sense strand starting at position 788 of SEQ ID NO: 1563507
uccacuuuagccugaaguu

SEQ ID NO: 1815882 - RNA, 19 nt, Artificial Sequence
  Description of Artificial Sequence: Synthetic oligonucleotide
  Antisense strand to SEQ ID NO: 1815881
aacuucaggcuaaagugga

SEQ ID NO: 1815883 - RNA, 19 nt, Artificial Sequence
  Description of Artificial Sequence: Synthetic oligonucleotide
  Sense strand starting at position 789 of SEQ ID NO: 1563507
ccacuuuagccugaaguua

SEQ ID NO: 1815884 - RNA, 19 nt, Artificial Sequence
  Description of Artificial Sequence: Synthetic oligonucleotide
  Antisense strand to SEQ ID NO: 1815883
uaacuucaggcuaaagugg

SEQ ID NO: 1815885 - RNA, 19 nt, Artificial Sequence
  Description of Artificial Sequence: Synthetic oligonucleotide
  Sense strand starting at position 907 of SEQ ID NO: 1563507
ccugaaaggcguuacaauu

SEQ ID NO: 1815886 - RNA, 19 nt, Artificial Sequence
  Description of Artificial Sequence: Synthetic oligonucleotide
  Antisense strand to SEQ ID NO: 1815885
aauuguaacgccuuucagg

SEQ ID NO: 1815887 - RNA, 19 nt, Artificial Sequence
  Description of Artificial Sequence: Synthetic oligonucleotide
  Sense strand starting at position 1159 of SEQ ID NO: 1563507
gugagucugcggaguugaa

SEQ ID NO: 1815888 - RNA, 19 nt, Artificial Sequence
  Description of Artificial Sequence: Synthetic oligonucleotide
  Antisense strand to SEQ ID NO: 1815887
uucaacuccgcagacucac

SEQ ID NO: 1815889 - RNA, 19 nt, Artificial Sequence
  Description of Artificial Sequence: Synthetic oligonucleotide
  Sense strand starting at position 1641 of SEQ ID NO: 1563507
acccuagaugcucaagguu

SEQ ID NO: 1815890 - RNA, 19 nt, Artificial Sequence
  Description of Artificial Sequence: Synthetic oligonucleotide
  Antisense strand to SEQ ID NO: 1815889
aaccuugagcaucuagggu

SEQ ID NO: 1815891 - RNA, 19 nt, Artificial Sequence
  Description of Artificial Sequence: Synthetic oligonucleotide
  Sense strand starting at position 1716 of SEQ ID NO: 1563507
ggaaauggcucgccaagau

SEQ ID NO: 1815892 - RNA, 19 nt, Artificial Sequence
  Description of Artificial Sequence: Synthetic oligonucleotide
  Antisense strand to SEQ ID NO: 1815891
aucuuggcgagccauuucc

SEQ ID NO: 1815893 - RNA, 19 nt, Artificial Sequence
  Description of Artificial Sequence: Synthetic oligonucleotide
  Sense strand starting at position 1773 of SEQ ID NO: 1563507
gcgcucuccggacacaaau

SEQ ID NO: 1815894 - RNA, 19 nt, Artificial Sequence
  Description of Artificial Sequence: Synthetic oligonucleotide
  Antisense strand to SEQ ID NO: 1815893
auuuguguccggagagcgc

SEQ ID NO: 1815895 - RNA, 19 nt, Artificial Sequence
  Description of Artificial Sequence: Synthetic oligonucleotide
  Sense strand starting at position 1856 of SEQ ID NO: 1563507
ggaucauccugaccugauu

SEQ ID NO: 1815896 - RNA, 19 nt, Artificial Sequence
  Description of Artificial Sequence: Synthetic oligonucleotide
  Antisense strand to SEQ ID NO: 1815895
aaucaggucaggaugaucc

SEQ ID NO: 1815897 - RNA, 19 nt, Artificial Sequence
  Description of Artificial Sequence: Synthetic oligonucleotide
  Sense strand starting at position 2276 of SEQ ID NO: 1563507
cagcuauuggacuguuuga

SEQ ID NO: 1815898 - RNA, 19 nt, Artificial Sequence
  Description of Artificial Sequence: Synthetic oligonucleotide
  Antisense strand to SEQ ID NO: 1815897
ucaaacaguccaauagcug

SEQ ID NO: 1815899 - RNA, 19 nt, Artificial Sequence
  Description of Artificial Sequence: Synthetic oligonucleotide
  Sense strand starting at position 2387 of SEQ ID NO: 1563507
gcaaaucuccugggacuga

SEQ ID NO: 1815900 - RNA, 19 nt, Artificial Sequence
  Description of Artificial Sequence: Synthetic oligonucleotide
  Antisense strand to SEQ ID NO: 1815899
ucagucccaggagauuugc

SEQ ID NO: 1815901 - RNA, 19 nt, Artificial Sequence
  Description of Artificial Sequence: Synthetic oligonucleotide
  Sense strand starting at position 2483 of SEQ ID NO: 1563507
agcucagcucaucaaaguu

SEQ ID NO: 1815902 - RNA, 19 nt, Artificial Sequence
  Description of Artificial Sequence: Synthetic oligonucleotide
  Antisense strand to SEQ ID NO: 1815901
aacuuugaugagcugagcu

SEQ ID NO: 1815903 - RNA, 19 nt, Artificial Sequence
  Description of Artificial Sequence: Synthetic oligonucleotide
  Sense strand starting at position 2633 of SEQ ID NO: 1563507
gguagauaggauugugaca

SEQ ID NO: 1815904 - RNA, 19 nt, Artificial Sequence
  Description of Artificial Sequence: Synthetic oligonucleotide
  Antisense strand to SEQ ID NO: 1815903
ugucacaauccuaucuacc

SEQ ID NO: 1815905 - RNA, 19 nt, Artificial Sequence
  Description of Artificial Sequence: Synthetic oligonucleotide
  Sense strand starting at position 2714 of SEQ ID NO: 1563507
ggcacucagcuuugaucau

SEQ ID NO: 1815906 - RNA, 19 nt, Artificial Sequence
  Description of Artificial Sequence: Synthetic oligonucleotide
  Antisense strand to SEQ ID NO: 1815905
augaucaaagcugagugcc

SEQ ID NO: 1815907 - RNA, 19 nt, Artificial Sequence
  Description of Artificial Sequence: Synthetic oligonucleotide
  Sense strand starting at position 2748 of SEQ ID NO: 1563507
cccugagugucuguacaag

SEQ ID NO: 1815908 - RNA, 19 nt, Artificial Sequence
  Description of Artificial Sequence: Synthetic oligonucleotide
  Antisense strand to SEQ ID NO: 1815907
cuuguacagacacucaggg

SEQ ID NO: 1815909 - RNA, 19 nt, Artificial Sequence
  Description of Artificial Sequence: Synthetic oligonucleotide
  Sense strand starting at position 2819 of SEQ ID NO: 1563507
ggaguuuauuaauccauga

SEQ ID NO: 1815910 - RNA, 19 nt, Artificial Sequence
  Description of Artificial Sequence: Synthetic oligonucleotide
  Antisense strand to SEQ ID NO: 1815909
ucauggauuaauaaacucc

SEQ ID NO: 1815911 - RNA, 19 nt, Artificial Sequence
  Description of Artificial Sequence: Synthetic oligonucleotide
  Sense strand starting at position 2843 of SEQ ID NO: 1563507
gaggcagcgguggauaaau

SEQ ID NO: 1815912 - RNA, 19 nt, Artificial Sequence
  Description of Artificial Sequence: Synthetic oligonucleotide
  Antisense strand to SEQ ID NO: 1815911
auuuauccaccgcugccuc

SEQ ID NO: 1815913 - RNA, 19 nt, Artificial Sequence
  Description of Artificial Sequence: Synthetic oligonucleotide
  Sense strand starting at position 2853 of SEQ ID NO: 1563507
uggauaaaucccgaaacgu

SEQ ID NO: 1815914 - RNA, 19 nt, Artificial Sequence
  Description of Artificial Sequence: Synthetic oligonucleotide
  Antisense strand to SEQ ID NO: 1815913
acguuucgggauuuaucca

SEQ ID NO: 1815915 - RNA, 19 nt, Artificial Sequence
  Description of Artificial Sequence: Synthetic oligonucleotide
  Sense strand starting at position 2866 of SEQ ID NO: 1563507
aaacguuacuagucccuga

SEQ ID NO: 1815916 - RNA, 19 nt, Artificial Sequence
  Description of Artificial Sequence: Synthetic oligonucleotide
  Antisense strand to SEQ ID NO: 1815915
ucagggacuaguaacguuu

SEQ ID NO: 1815917 - RNA, 19 nt, Artificial Sequence
  Description of Artificial Sequence: Synthetic oligonucleotide
  Sense strand starting at position 2870 of SEQ ID NO: 1563507
guuacuagucccugaccuu

SEQ ID NO: 1815918 - RNA, 19 nt, Artificial Sequence
  Description of Artificial Sequence: Synthetic oligonucleotide
  Antisense strand to SEQ ID NO: 1815917
aaggucagggacuaguaac

SEQ ID NO: 1815919 - RNA, 19 nt, Artificial Sequence
  Description of Artificial Sequence: Synthetic oligonucleotide
  Sense strand starting at position 2877 of SEQ ID NO: 1563507
gucccugaccuugaagagu

SEQ ID NO: 1815920 - RNA, 19 nt, Artificial Sequence
  Description of Artificial Sequence: Synthetic oligonucleotide
  Antisense strand to SEQ ID NO: 1815919
acucuucaaggucagggac

SEQ ID NO: 1815921 - RNA, 19 nt, Artificial Sequence
  Description of Artificial Sequence: Synthetic oligonucleotide
  Sense strand starting at position 3142 of SEQ ID NO: 1563507
auuaucagucucugaggga

SEQ ID NO: 1815922 - RNA, 19 nt, Artificial Sequence
  Description of Artificial Sequence: Synthetic oligonucleotide
  Antisense strand to SEQ ID NO: 1815921
ucccucagagacugauaau

SEQ ID NO: 1815923 - RNA, 19 nt, Artificial Sequence
  Description of Artificial Sequence: Synthetic oligonucleotide
  Sense strand starting at position 3199 of SEQ ID NO: 1563507
gguggagucucaguaaagc

SEQ ID NO: 1815924 - RNA, 19 nt, Artificial Sequence
  Description of Artificial Sequence: Synthetic oligonucleotide
  Antisense strand to SEQ ID NO: 1815923
gcuuuacugagacuccacc

SEQ ID NO: 1815925 - RNA, 19 nt, Artificial Sequence
  Description of Artificial Sequence: Synthetic oligonucleotide
  Sense strand starting at position 3437 of SEQ ID NO: 1563507
ucaggauucucuucuguaa

SEQ ID NO: 1815926 - RNA, 19 nt, Artificial Sequence
  Description of Artificial Sequence: Synthetic oligonucleotide
  Antisense strand to SEQ ID NO: 1815925
uuacagaagagaauccuga

SEQ ID NO: 1815927 - RNA, 19 nt, Artificial Sequence
  Description of Artificial Sequence: Synthetic oligonucleotide
  Sense strand starting at position 3441 of SEQ ID NO: 1563507
gauucucuucuguaaagug

SEQ ID NO: 1815928 - RNA, 19 nt, Artificial Sequence
  Description of Artificial Sequence: Synthetic oligonucleotide
  Antisense strand to SEQ ID NO: 1815927
cacuuuacagaagagaauc

SEQ ID NO: 1815929 - RNA, 19 nt, Artificial Sequence
  Description of Artificial Sequence: Synthetic oligonucleotide
  Sense strand starting at position 3526 of SEQ ID NO: 1563507
uguucauaugcguaaggag

SEQ ID NO: 1815930 - RNA, 19 nt, Artificial Sequence
  Description of Artificial Sequence: Synthetic oligonucleotide
  Antisense strand to SEQ ID NO: 1815929
cuccuuacgcauaugaaca

SEQ ID NO: 1815931 - RNA, 19 nt, Artificial Sequence
  Description of Artificial Sequence: Synthetic oligonucleotide
  Sense strand starting at position 3535 of SEQ ID NO: 1563507
gcguaaggagcuuagaaug

SEQ ID NO: 1815932 - RNA, 19 nt, Artificial Sequence
  Description of Artificial Sequence: Synthetic oligonucleotide
  Antisense strand to SEQ ID NO: 1815931
cauucuaagcuccuuacgc

SEQ ID NO: 1815933 - RNA, 19 nt, Artificial Sequence
  Description of Artificial Sequence: Synthetic oligonucleotide
  Sense strand starting at position 3550 of SEQ ID NO: 1563507
aaugauuucugggacguag

SEQ ID NO: 1815934 - RNA, 19 nt, Artificial Sequence
  Description of Artificial Sequence: Synthetic oligonucleotide
  Antisense strand to SEQ ID NO: 1815933
cuacgucccagaaaucauu

SEQ ID NO: 1815935 - RNA, 19 nt, Artificial Sequence
  Description of Artificial Sequence: Synthetic oligonucleotide
  Sense strand starting at position 3562 of SEQ ID NO: 1563507
gacguagugguauagaagu

SEQ ID NO: 1815936 - RNA, 19 nt, Artificial Sequence
  Description of Artificial Sequence: Synthetic oligonucleotide
  Antisense strand to SEQ ID NO: 1815935
acuucuauaccacuacguc

SEQ ID NO: 1815937 - RNA, 19 nt, Artificial Sequence
  Description of Artificial Sequence: Synthetic oligonucleotide
  Sense strand starting at position 3568 of SEQ ID NO: 1563507
gugguauagaaguguuuau

SEQ ID NO: 1815938 - RNA, 19 nt, Artificial Sequence
  Description of Artificial Sequence: Synthetic oligonucleotide
  Antisense strand to SEQ ID NO: 1815937
auaaacacuucuauaccac

SEQ ID NO: 1815939 - RNA, 19 nt, Artificial Sequence
  Description of Artificial Sequence: Synthetic oligonucleotide
  Sense strand starting at position 3625 of SEQ ID NO: 1563507
cugaaaucaucugugagau

SEQ ID NO: 1815940 - RNA, 19 nt, Artificial Sequence
  Description of Artificial Sequence: Synthetic oligonucleotide
  Antisense strand to SEQ ID NO: 1815939
aucucacagaugauuucag

SEQ ID NO: 1815941 - RNA, 19 nt, Artificial Sequence
  Description of Artificial Sequence: Synthetic oligonucleotide
  Sense strand starting at position 3626 of SEQ ID NO: 1563507
ugaaaucaucugugagauu

SEQ ID NO: 1815942 - RNA, 19 nt, Artificial Sequence
  Description of Artificial Sequence: Synthetic oligonucleotide
  Antisense strand to SEQ ID NO: 1815941
aaucucacagaugauuuca

SEQ ID NO: 1815943 - RNA, 19 nt, Artificial Sequence
  Description of Artificial Sequence: Synthetic oligonucleotide
  Sense strand starting at position 3971 of SEQ ID NO: 1563507
cacagauucugaguuagca

SEQ ID NO: 1815944 - RNA, 19 nt, Artificial Sequence
  Description of Artificial Sequence: Synthetic oligonucleotide
  Antisense strand to SEQ ID NO: 1815943
ugcuaacucagaaucugug

SEQ ID NO: 1815945 - RNA, 19 nt, Artificial Sequence
  Description of Artificial Sequence: Synthetic oligonucleotide
  Sense strand starting at position 237 of SEQ ID NO: 1563508
uuaaucacugcacgugaga

SEQ ID NO: 1815946 - RNA, 19 nt, Artificial Sequence
  Description of Artificial Sequence: Synthetic oligonucleotide
  Antisense strand to SEQ ID NO: 1815945
ucucacgugcagugauuaa

SEQ ID NO: 1815947 - RNA, 19 nt, Artificial Sequence
  Description of Artificial Sequence: Synthetic oligonucleotide
  Sense strand starting at position 246 of SEQ ID NO: 1563508
gcacgugagagcuaugaua

SEQ ID NO: 1815948 - RNA, 19 nt, Artificial Sequence
  Description of Artificial Sequence: Synthetic oligonucleotide
  Antisense strand to SEQ ID NO: 1815947
uaucauagcucucacgugc

SEQ ID NO: 1815949 - RNA, 19 nt, Artificial Sequence
  Description of Artificial Sequence: Synthetic oligonucleotide
  Sense strand starting at position 248 of SEQ ID NO: 1563508
acgugagagcuaugauacu

SEQ ID NO: 1815950 - RNA, 19 nt, Artificial Sequence
  Description of Artificial Sequence: Synthetic oligonucleotide
  Antisense strand to SEQ ID NO: 1815949
aguaucauagcucucacgu

SEQ ID NO: 1815951 - RNA, 19 nt, Artificial Sequence
  Description of Artificial Sequence: Synthetic oligonucleotide
  Sense strand starting at position 254 of SEQ ID NO: 1563508
gagcuaugauacuucugca

SEQ ID NO: 1815952 - RNA, 19 nt, Artificial Sequence
  Description of Artificial Sequence: Synthetic oligonucleotide
  Antisense strand to SEQ ID NO: 1815951
ugcagaaguaucauagcuc

SEQ ID NO: 1815953 - RNA, 19 nt, Artificial Sequence
  Description of Artificial Sequence: Synthetic oligonucleotide
  Sense strand starting at position 261 of SEQ ID NO: 1563508
gauacuucugcaggaggca

SEQ ID NO: 1815954 - RNA, 19 nt, Artificial Sequence
  Description of Artificial Sequence: Synthetic oligonucleotide
  Antisense strand to SEQ ID NO: 1815953
ugccuccugcagaaguauc

SEQ ID NO: 1815955 - RNA, 19 nt, Artificial Sequence
  Description of Artificial Sequence: Synthetic oligonucleotide
  Sense strand starting at position 279 of SEQ ID NO: 1563508
aggcacugguaaucagagu

SEQ ID NO: 1815956 - RNA, 19 nt, Artificial Sequence
  Description of Artificial Sequence: Synthetic oligonucleotide
  Antisense strand to SEQ ID NO: 1815955
acucugauuaccagugccu

SEQ ID NO: 1815957 - RNA, 19 nt, Artificial Sequence
  Description of Artificial Sequence: Synthetic oligonucleotide
  Sense strand starting at position 445 of SEQ ID NO: 1563508
gggcaaugcuaugcuggaa

SEQ ID NO: 1815958 - RNA, 19 nt, Artificial Sequence
  Description of Artificial Sequence: Synthetic oligonucleotide
  Antisense strand to SEQ ID NO: 1815957
uuccagcauagcauugccc

SEQ ID NO: 1815959 - RNA, 19 nt, Artificial Sequence
  Description of Artificial Sequence: Synthetic oligonucleotide
  Sense strand starting at position 599 of SEQ ID NO: 1563508
uacagacaguguuuggaaa

SEQ ID NO: 1815960 - RNA, 19 nt, Artificial Sequence
  Description of Artificial Sequence: Synthetic oligonucleotide
  Antisense strand to SEQ ID NO: 1815959
uuuccaaacacugucugua

SEQ ID NO: 1815961 - RNA, 19 nt, Artificial Sequence
  Description of Artificial Sequence: Synthetic oligonucleotide
  Sense strand starting at position 720 of SEQ ID NO: 1563508
ggaauuagcuucuccugca

SEQ ID NO: 1815962 - RNA, 19 nt, Artificial Sequence
  Description of Artificial Sequence: Synthetic oligonucleotide
  Antisense strand to SEQ ID NO: 1815961
ugcaggagaagcuaauucc

SEQ ID NO: 1815963 - RNA, 19 nt, Artificial Sequence
  Description of Artificial Sequence: Synthetic oligonucleotide
  Sense strand starting at position 765 of SEQ ID NO: 1563508
gguaguaaccaguauaaac

SEQ ID NO: 1815964 - RNA, 19 nt, Artificial Sequence
  Description of Artificial Sequence: Synthetic oligonucleotide
  Antisense strand to SEQ ID NO: 1815963
guuuauacugguuacuacc

SEQ ID NO: 1815965 - RNA, 19 nt, Artificial Sequence
  Description of Artificial Sequence: Synthetic oligonucleotide
  Sense strand starting at position 811 of SEQ ID NO: 1563508
guuuaaaugaggugcuauu

SEQ ID NO: 1815966 - RNA, 19 nt, Artificial Sequence
  Description of Artificial Sequence: Synthetic oligonucleotide
  Antisense strand to SEQ ID NO: 1815965
aauagcaccucauuuaaac

SEQ ID NO: 1815967 - RNA, 19 nt, Artificial Sequence
  Description of Artificial Sequence: Synthetic oligonucleotide
  Sense strand starting at position 820 of SEQ ID NO: 1563508
aggugcuauuuauuggcaa

SEQ ID NO: 1815968 - RNA, 19 nt, Artificial Sequence
  Description of Artificial Sequence: Synthetic oligonucleotide
  Antisense strand to SEQ ID NO: 1815967
uugccaauaaauagcaccu

SEQ ID NO: 1815969 - RNA, 19 nt, Artificial Sequence
  Description of Artificial Sequence: Synthetic oligonucleotide
  Sense strand starting at position 1266 of SEQ ID NO: 1563508
ggugccugucucuauaaag

SEQ ID NO: 1815970 - RNA, 19 nt, Artificial Sequence
  Description of Artificial Sequence: Synthetic oligonucleotide
  Antisense strand to SEQ ID NO: 1815969
cuuuauagagacaggcacc

SEQ ID NO: 1815971 - RNA, 19 nt, Artificial Sequence
  Description of Artificial Sequence: Synthetic oligonucleotide
  Sense strand starting at position 1275 of SEQ ID NO: 1563508
cucuauaaaguuugggagu

SEQ ID NO: 1815972 - RNA, 19 nt, Artificial Sequence
  Description of Artificial Sequence: Synthetic oligonucleotide
  Antisense strand to SEQ ID NO: 1815971
acucccaaacuuuauagag

SEQ ID NO: 1815973 - RNA, 19 nt, Artificial Sequence
  Description of Artificial Sequence: Synthetic oligonucleotide
  Sense strand starting at position 1364 of SEQ ID NO: 1563508
ugauaauugaaacgguauc

SEQ ID NO: 1815974 - RNA, 19 nt, Artificial Sequence
  Description of Artificial Sequence: Synthetic oligonucleotide
  Antisense strand to SEQ ID NO: 1815973
gauaccguuucaauuauca

SEQ ID NO: 1815975 - RNA, 19 nt, Artificial Sequence
  Description of Artificial Sequence: Synthetic oligonucleotide
  Sense strand starting at position 1431 of SEQ ID NO: 1563508
gagacaagguugcuugaaa

SEQ ID NO: 1815976 - RNA, 19 nt, Artificial Sequence
  Description of Artificial Sequence: Synthetic oligonucleotide
  Antisense strand to SEQ ID NO: 1815975
uuucaagcaaccuugucuc

SEQ ID NO: 1815977 - RNA, 19 nt, Artificial Sequence
  Description of Artificial Sequence: Synthetic oligonucleotide
  Sense strand starting at position 1432 of SEQ ID NO: 1563508
agacaagguugcuugaaag

SEQ ID NO: 1815978 - RNA, 19 nt, Artificial Sequence
  Description of Artificial Sequence: Synthetic oligonucleotide
  Antisense strand to SEQ ID NO: 1815977
cuuucaagcaaccuugucu

SEQ ID NO: 1815979 - RNA, 19 nt, Artificial Sequence
  Description of Artificial Sequence: Synthetic oligonucleotide
  Sense strand starting at position 1487 of SEQ ID NO: 1563508
gccucaguuuccucaauag

SEQ ID NO: 1815980 - RNA, 19 nt, Artificial Sequence
  Description of Artificial Sequence: Synthetic oligonucleotide
  Antisense strand to SEQ ID NO: 1815979
cuauugaggaaacugaggc

SEQ ID NO: 1815981 - RNA, 19 nt, Artificial Sequence
  Description of Artificial Sequence: Synthetic oligonucleotide
  Sense strand starting at position 1497 of SEQ ID NO: 1563508
ccucaauaguaacugggaa

SEQ ID NO: 1815982 - RNA, 19 nt, Artificial Sequence
  Description of Artificial Sequence: Synthetic oligonucleotide
  Antisense strand to SEQ ID NO: 1815981
uucccaguuacuauugagg

SEQ ID NO: 1815983 - RNA, 19 nt, Artificial Sequence
  Description of Artificial Sequence: Synthetic oligonucleotide
  Sense strand starting at position 1555 of SEQ ID NO: 1563508
ugcugcauaaggugauuaa

SEQ ID NO: 1815984 - RNA, 19 nt, Artificial Sequence
  Description of Artificial Sequence: Synthetic oligonucleotide
  Antisense strand to SEQ ID NO: 1815983
uuaaucaccuuaugcagca

SEQ ID NO: 1815985 - RNA, 19 nt, Artificial Sequence
  Description of Artificial Sequence: Synthetic oligonucleotide
  Sense strand starting at position 1556 of SEQ ID NO: 1563508
gcugcauaaggugauuaaa

SEQ ID NO: 1815986 - RNA, 19 nt, Artificial Sequence
  Description of Artificial Sequence: Synthetic oligonucleotide
  Antisense strand to SEQ ID NO: 1815985
uuuaaucaccuuaugcagc

SEQ ID NO: 1815987 - RNA, 19 nt, Artificial Sequence
  Description of Artificial Sequence: Synthetic oligonucleotide
  Sense strand starting at position 1559 of SEQ ID NO: 1563508
gcauaaggugauuaaagca

SEQ ID NO: 1815988 - RNA, 19 nt, Artificial Sequence
  Description of Artificial Sequence: Synthetic oligonucleotide
  Antisense strand to SEQ ID NO: 1815987
ugcuuuaaucaccuuaugc

SEQ ID NO: 1815989 - RNA, 19 nt, Artificial Sequence
  Description of Artificial Sequence: Synthetic oligonucleotide
  Sense strand starting at position 1580 of SEQ ID NO: 1563508
gcgccuggcacacauuaaa

SEQ ID NO: 1815990 - RNA, 19 nt, Artificial Sequence
  Description of Artificial Sequence: Synthetic oligonucleotide
  Antisense strand to SEQ ID NO: 1815989
uuuaaugugugccaggcgc

SEQ ID NO: 1815991 - RNA, 19 nt, Artificial Sequence
  Description of Artificial Sequence: Synthetic oligonucleotide
  Sense strand starting at position 1604 of SEQ ID NO: 1563508
aaugguuaucgucacuauu

SEQ ID NO: 1815992 - RNA, 19 nt, Artificial Sequence
  Description of Artificial Sequence: Synthetic oligonucleotide
  Antisense strand to SEQ ID NO: 1815991
aauagugacgauaaccauu

SEQ ID NO: 1815993 - RNA, 19 nt, Artificial Sequence
  Description of Artificial Sequence: Synthetic oligonucleotide
  Sense strand starting at position 1607 of SEQ ID NO: 1563508
gguuaucgucacuauuauu

SEQ ID NO: 1815994 - RNA, 19 nt, Artificial Sequence
  Description of Artificial Sequence: Synthetic oligonucleotide
  Antisense strand to SEQ ID NO: 1815993
aauaauagugacgauaacc

SEQ ID NO: 1815995 - RNA, 19 nt, Artificial Sequence
  Description of Artificial Sequence: Synthetic oligonucleotide
  Sense strand starting at position 1612 of SEQ ID NO: 1563508
ucgucacuauuauuuguua

SEQ ID NO: 1815996 - RNA, 19 nt, Artificial Sequence
  Description of Artificial Sequence: Synthetic oligonucleotide
  Antisense strand to SEQ ID NO: 1815995
uaacaaauaauagugacga

SEQ ID NO: 1815997 - RNA, 19 nt, Artificial Sequence
  Description of Artificial Sequence: Synthetic oligonucleotide
  Sense strand starting at position 1716 of SEQ ID NO: 1563508
agaagcagccuauaaaguu

SEQ ID NO: 1815998 - RNA, 19 nt, Artificial Sequence
  Description of Artificial Sequence: Synthetic oligonucleotide
  Antisense strand to SEQ ID NO: 1815997
aacuuuauaggcugcuucu

SEQ ID NO: 1815999 - RNA, 19 nt, Artificial Sequence
  Description of Artificial Sequence: Synthetic oligonucleotide
  Sense strand starting at position 1726 of SEQ ID NO: 1563508
uauaaaguuugguccaagu

SEQ ID NO: 1816000 - RNA, 19 nt, Artificial Sequence
  Description of Artificial Sequence: Synthetic oligonucleotide
  Antisense strand to SEQ ID NO: 1815999
acuuggaccaaacuuuaua

SEQ ID NO: 1816001 - RNA, 19 nt, Artificial Sequence
  Description of Artificial Sequence: Synthetic oligonucleotide
  Sense strand starting at position 1728 of SEQ ID NO: 1563508
uaaaguuugguccaaguug

SEQ ID NO: 1816002 - RNA, 19 nt, Artificial Sequence
  Description of Artificial Sequence: Synthetic oligonucleotide
  Antisense strand to SEQ ID NO: 1816001
caacuuggaccaaacuuua

SEQ ID NO: 1816003 - RNA, 19 nt, Artificial Sequence
  Description of Artificial Sequence: Synthetic oligonucleotide
  Sense strand starting at position 2167 of SEQ ID NO: 1563508
ggagucuucucucugcaca

SEQ ID NO: 1816004 - RNA, 19 nt, Artificial Sequence
  Description of Artificial Sequence: Synthetic oligonucleotide
  Antisense strand to SEQ ID NO: 1816003
ugugcagagagaagacucc

SEQ ID NO: 1816005 - RNA, 19 nt, Artificial Sequence
  Description of Artificial Sequence: Synthetic oligonucleotide
  Sense strand starting at position 2397 of SEQ ID NO: 1563508
uccuauguugcauagacau

SEQ ID NO: 1816006 - RNA, 19 nt, Artificial Sequence
  Description of Artificial Sequence: Synthetic oligonucleotide
  Antisense strand to SEQ ID NO: 1816005
augucuaugcaacauagga

SEQ ID NO: 1816007 - RNA, 19 nt, Artificial Sequence
  Description of Artificial Sequence: Synthetic oligonucleotide
  Sense strand starting at position 2459 of SEQ ID NO: 1563508
ccacauauacccugacgaa

SEQ ID NO: 1816008 - RNA, 19 nt, Artificial Sequence
  Description of Artificial Sequence: Synthetic oligonucleotide
  Antisense strand to SEQ ID NO: 1816007
uucgucaggguauaugugg

SEQ ID NO: 1816009 - RNA, 19 nt, Artificial Sequence
  Description of Artificial Sequence: Synthetic oligonucleotide
  Sense strand starting at position 2691 of SEQ ID NO: 1563508
gaacuaaacguuuguaagg

SEQ ID NO: 1816010 - RNA, 19 nt, Artificial Sequence
  Description of Artificial Sequence: Synthetic oligonucleotide
  Antisense strand to SEQ ID NO: 1816009
ccuuacaaacguuuaguuc

SEQ ID NO: 1816011 - RNA, 19 nt, Artificial Sequence
  Description of Artificial Sequence: Synthetic oligonucleotide
  Sense strand starting at position 2870 of SEQ ID NO: 1563508
gucaccaccucgucuauuu

SEQ ID NO: 1816012 - RNA, 19 nt, Artificial Sequence
  Description of Artificial Sequence: Synthetic oligonucleotide
  Antisense strand to SEQ ID NO: 1816011
aaauagacgagguggugac

SEQ ID NO: 1816013 - RNA, 19 nt, Artificial Sequence
  Description of Artificial Sequence: Synthetic oligonucleotide
  Sense strand starting at position 3056 of SEQ ID NO: 1563508
uggugaaacuccuuauagc

SEQ ID NO: 1816014 - RNA, 19 nt, Artificial Sequence
  Description of Artificial Sequence: Synthetic oligonucleotide
  Antisense strand to SEQ ID NO: 1816013
gcuauaaggaguuucacca

SEQ ID NO: 1816015 - RNA, 19 nt, Artificial Sequence
  Description of Artificial Sequence: Synthetic oligonucleotide
  Sense strand starting at position 3146 of SEQ ID NO: 1563508
cuacuccagcucugagaaa

SEQ ID NO: 1816016 - RNA, 19 nt, Artificial Sequence
  Description of Artificial Sequence: Synthetic oligonucleotide
  Antisense strand to SEQ ID NO: 1816015
uuucucagagcuggaguag

SEQ ID NO: 1816017 - RNA, 19 nt, Artificial Sequence
  Description of Artificial Sequence: Synthetic oligonucleotide
  Sense strand starting at position 3220 of SEQ ID NO: 1563508
auaacacuaucgucuagaa

SEQ ID NO: 1816018 - RNA, 19 nt, Artificial Sequence
  Description of Artificial Sequence: Synthetic oligonucleotide
  Antisense strand to SEQ ID NO: 1816017
uucuagacgauaguguuau

SEQ ID NO: 1816019 - RNA, 19 nt, Artificial Sequence
  Description of Artificial Sequence: Synthetic oligonucleotide
  Sense strand starting at position 3424 of SEQ ID NO: 1563508
uuaccuguuuacuugacau

SEQ ID NO: 1816020 - RNA, 19 nt, Artificial Sequence
  Description of Artificial Sequence: Synthetic oligonucleotide
  Antisense strand to SEQ ID NO: 1816019
augucaaguaaacagguaa

SEQ ID NO: 1816021 - RNA, 19 nt, Artificial Sequence
  Description of Artificial Sequence: Synthetic oligonucleotide
  Sense strand starting at position 3914 of SEQ ID NO: 1563508
aaacgcauuguaugauuau

SEQ ID NO: 1816022 - RNA, 19 nt, Artificial Sequence
  Description of Artificial Sequence: Synthetic oligonucleotide
  Antisense strand to SEQ ID NO: 1816021
auaaucauacaaugcguuu

SEQ ID NO: 1816023 - RNA, 19 nt, Artificial Sequence
  Description of Artificial Sequence: Synthetic oligonucleotide
  Sense strand starting at position 3956 of SEQ ID NO: 1563508
cucucaucuguugaugaca

SEQ ID NO: 1816024 - RNA, 19 nt, Artificial Sequence
  Description of Artificial Sequence: Synthetic oligonucleotide
  Antisense strand to SEQ ID NO: 1816023
ugucaucaacagaugagag

SEQ ID NO: 1816025 - RNA, 19 nt, Artificial Sequence
  Description of Artificial Sequence: Synthetic oligonucleotide
  Sense strand starting at position 134 of SEQ ID NO: 1563509
gguaguugugcagaggaag

SEQ ID NO: 1816026 - RNA, 19 nt, Artificial Sequence
  Description of Artificial Sequence: Synthetic oligonucleotide
  Antisense strand to SEQ ID NO: 1816025
cuuccucugcacaacuacc

SEQ ID NO: 1816027 - RNA, 19 nt, Artificial Sequence
  Description of Artificial Sequence: Synthetic oligonucleotide
  Sense strand starting at position 165 of SEQ ID NO: 1563509
aagaaaggauguccuuuau

SEQ ID NO: 1816028 - RNA, 19 nt, Artificial Sequence
  Description of Artificial Sequence: Synthetic oligonucleotide
  Antisense strand to SEQ ID NO: 1816027
auaaaggacauccuuucuu

SEQ ID NO: 1816029 - RNA, 19 nt, Artificial Sequence
  Description of Artificial Sequence: Synthetic oligonucleotide
  Sense strand starting at position 171 of SEQ ID NO: 1563509
ggauguccuuuauauagcu

SEQ ID NO: 1816030 - RNA, 19 nt, Artificial Sequence
  Description of Artificial Sequence: Synthetic oligonucleotide
  Antisense strand to SEQ ID NO: 1816029
agcuauauaaaggacaucc

SEQ ID NO: 1816031 - RNA, 19 nt, Artificial Sequence
  Description of Artificial Sequence: Synthetic oligonucleotide
  Sense strand starting at position 1077 of SEQ ID NO: 1563509
ggagauaaguuacucacuu

SEQ ID NO: 1816032 - RNA, 19 nt, Artificial Sequence
  Description of Artificial Sequence: Synthetic oligonucleotide
  Antisense strand to SEQ ID NO: 1816031
aagugaguaacuuaucucc

SEQ ID NO: 1816033 - RNA, 19 nt, Artificial Sequence
  Description of Artificial Sequence: Synthetic oligonucleotide
  Sense strand starting at position 1078 of SEQ ID NO: 1563509
gagauaaguuacucacuug

SEQ ID NO: 1816034 - RNA, 19 nt, Artificial Sequence
  Description of Artificial Sequence: Synthetic oligonucleotide
  Antisense strand to SEQ ID NO: 1816033
caagugaguaacuuaucuc

SEQ ID NO: 1816035 - RNA, 19 nt, Artificial Sequence
  Description of Artificial Sequence: Synthetic oligonucleotide
  Sense strand starting at position 2200 of SEQ ID NO: 1563509
ucaguccuguucccagaga

SEQ ID NO: 1816036 - RNA, 19 nt, Artificial Sequence
  Description of Artificial Sequence: Synthetic oligonucleotide
  Antisense strand to SEQ ID NO: 1816035
ucucugggaacaggacuga

SEQ ID NO: 1816037 - RNA, 19 nt, Artificial Sequence
  Description of Artificial Sequence: Synthetic oligonucleotide
  Sense strand starting at position 2682 of SEQ ID NO: 1563509
aagauuuagucuuguccug

SEQ ID NO: 1816038 - RNA, 19 nt, Artificial Sequence
  Description of Artificial Sequence: Synthetic oligonucleotide
  Antisense strand to SEQ ID NO: 1816037
caggacaagacuaaaucuu

SEQ ID NO: 1816039 - RNA, 19 nt, Artificial Sequence
  Description of Artificial Sequence: Synthetic oligonucleotide
  Sense strand starting at position 2684 of SEQ ID NO: 1563509
gauuuagucuuguccuguc

SEQ ID NO: 1816040 - RNA, 19 nt, Artificial Sequence
  Description of Artificial Sequence: Synthetic oligonucleotide
  Antisense strand to SEQ ID NO: 1816039
gacaggacaagacuaaauc

SEQ ID NO: 1816041 - RNA, 19 nt, Artificial Sequence
  Description of Artificial Sequence: Synthetic oligonucleotide
  Sense strand starting at position 2687 of SEQ ID NO: 1563509
uuagucuuguccuguccga

SEQ ID NO: 1816042 - RNA, 19 nt, Artificial Sequence
  Description of Artificial Sequence: Synthetic oligonucleotide
  Antisense strand to SEQ ID NO: 1816041
ucggacaggacaagacuaa

SEQ ID NO: 1816043 - RNA, 19 nt, Artificial Sequence
  Description of Artificial Sequence: Synthetic oligonucleotide
  Sense strand starting at position 2746 of SEQ ID NO: 1563509
agggcacgucgauaaagaa

SEQ ID NO: 1816044 - RNA, 19 nt, Artificial Sequence
  Description of Artificial Sequence: Synthetic oligonucleotide
  Antisense strand to SEQ ID NO: 1816043
uucuuuaucgacgugcccu

SEQ ID NO: 1816045 - RNA, 19 nt, Artificial Sequence
  Description of Artificial Sequence: Synthetic oligonucleotide
  Sense strand starting at position 2932 of SEQ ID NO: 1563509
gcuuauaacuuggcucgau

SEQ ID NO: 1816046 - RNA, 19 nt, Artificial Sequence
  Description of Artificial Sequence: Synthetic oligonucleotide
  Antisense strand to SEQ ID NO: 1816045
aucgagccaaguuauaagc

SEQ ID NO: 1816047 - RNA, 19 nt, Artificial Sequence
  Description of Artificial Sequence: Synthetic oligonucleotide
  Sense strand starting at position 3005 of SEQ ID NO: 1563509
gacguacccacgugcuaau

SEQ ID NO: 1816048 - RNA, 19 nt, Artificial Sequence
  Description of Artificial Sequence: Synthetic oligonucleotide
  Antisense strand to SEQ ID NO: 1816047
auuagcacguggguacguc

SEQ ID NO: 1816049 - RNA, 19 nt, Artificial Sequence
  Description of Artificial Sequence: Synthetic oligonucleotide
  Sense strand starting at position 3034 of SEQ ID NO: 1563509
gcuggacuuccauagcacu

SEQ ID NO: 1816050 - RNA, 19 nt, Artificial Sequence
  Description of Artificial Sequence: Synthetic oligonucleotide
  Antisense strand to SEQ ID NO: 1816049
agugcuauggaaguccagc

SEQ ID NO: 1816051 - RNA, 19 nt, Artificial Sequence
  Description of Artificial Sequence: Synthetic oligonucleotide
  Sense strand starting at position 3073 of SEQ ID NO: 1563509
cggagcuugccauagcaca

SEQ ID NO: 1816052 - RNA, 19 nt, Artificial Sequence
  Description of Artificial Sequence: Synthetic oligonucleotide
  Antisense strand to SEQ ID NO: 1816051
ugugcuauggcaagcuccg

SEQ ID NO: 1816053 - RNA, 19 nt, Artificial Sequence
  Description of Artificial Sequence: Synthetic oligonucleotide
  Sense strand starting at position 3155 of SEQ ID NO: 1563509
cuagaaggauaucugaguu

SEQ ID NO: 1816054 - RNA, 19 nt, Artificial Sequence
  Description of Artificial Sequence: Synthetic oligonucleotide
  Antisense strand to SEQ ID NO: 1816053
aacucagauauccuucuag

SEQ ID NO: 1816055 - RNA, 19 nt, Artificial Sequence
  Description of Artificial Sequence: Synthetic oligonucleotide
  Sense strand starting at position 3241 of SEQ ID NO: 1563509
ugagcaacauucccaaagu

SEQ ID NO: 1816056 - RNA, 19 nt, Artificial Sequence
  Description of Artificial Sequence: Synthetic oligonucleotide
  Antisense strand to SEQ ID NO: 1816055
acuuugggaauguugcuca

SEQ ID NO: 1816057 - RNA, 19 nt, Artificial Sequence
  Description of Artificial Sequence: Synthetic oligonucleotide
  Sense strand starting at position 3283 of SEQ ID NO: 1563509
uguccaucaucucgcuuaa

SEQ ID NO: 1816058 - RNA, 19 nt, Artificial Sequence
  Description of Artificial Sequence: Synthetic oligonucleotide
  Antisense strand to SEQ ID NO: 1816057
uuaagcgagaugauggaca

SEQ ID NO: 1816059 - RNA, 19 nt, Artificial Sequence
  Description of Artificial Sequence: Synthetic oligonucleotide
  Sense strand starting at position 3294 of SEQ ID NO: 1563509
ucgcuuaauaggugacuga

SEQ ID NO: 1816060 - RNA, 19 nt, Artificial Sequence
  Description of Artificial Sequence: Synthetic oligonucleotide
  Antisense strand to SEQ ID NO: 1816059
ucagucaccuauuaagcga

SEQ ID NO: 1816061 - RNA, 19 nt, Artificial Sequence
  Description of Artificial Sequence: Synthetic oligonucleotide
  Sense strand starting at position 3298 of SEQ ID NO: 1563509
uuaauaggugacugagcua

SEQ ID NO: 1816062 - RNA, 19 nt, Artificial Sequence
  Description of Artificial Sequence: Synthetic oligonucleotide
  Antisense strand to SEQ ID NO: 1816061
uagcucagucaccuauuaa

SEQ ID NO: 1816063 - RNA, 19 nt, Artificial Sequence
  Description of Artificial Sequence: Synthetic oligonucleotide
  Sense strand starting at position 3317 of SEQ ID NO: 1563509
cugcguuucucaguggauc

SEQ ID NO: 1816064 - RNA, 19 nt, Artificial Sequence
  Description of Artificial Sequence: Synthetic oligonucleotide
  Antisense strand to SEQ ID NO: 1816063
gauccacugagaaacgcag

SEQ ID NO: 1816065 - RNA, 19 nt, Artificial Sequence
  Description of Artificial Sequence: Synthetic oligonucleotide
  Sense strand starting at position 3328 of SEQ ID NO: 1563509
aguggauccucugaugauc

SEQ ID NO: 1816066 - RNA, 19 nt, Artificial Sequence
  Description of Artificial Sequence: Synthetic oligonucleotide
  Antisense strand to SEQ ID NO: 1816065
gaucaucagaggauccacu

SEQ ID NO: 1816067 - RNA, 19 nt, Artificial Sequence
  Description of Artificial Sequence: Synthetic oligonucleotide
  Sense strand starting at position 3339 of SEQ ID NO: 1563509
ugaugaucuuuguggcugu

SEQ ID NO: 1816068 - RNA, 19 nt, Artificial Sequence
  Description of Artificial Sequence: Synthetic oligonucleotide
  Antisense strand to SEQ ID NO: 1816067
acagccacaaagaucauca

SEQ ID NO: 1816069 - RNA, 19 nt, Artificial Sequence
  Description of Artificial Sequence: Synthetic oligonucleotide
  Sense strand starting at position 3340 of SEQ ID NO: 1563509
gaugaucuuuguggcugua

SEQ ID NO: 1816070 - RNA, 19 nt, Artificial Sequence
  Description of Artificial Sequence: Synthetic oligonucleotide
  Antisense strand to SEQ ID NO: 1816069
uacagccacaaagaucauc

SEQ ID NO: 1816071 - RNA, 19 nt, Artificial Sequence
  Description of Artificial Sequence: Synthetic oligonucleotide
  Sense strand starting at position 3342 of SEQ ID NO: 1563509
ugaucuuuguggcuguaga

SEQ ID NO: 1816072 - RNA, 19 nt, Artificial Sequence
  Description of Artificial Sequence: Synthetic oligonucleotide
  Antisense strand to SEQ ID NO: 1816071
ucuacagccacaaagauca

SEQ ID NO: 1816073 - RNA, 19 nt, Artificial Sequence
  Description of Artificial Sequence: Synthetic oligonucleotide
  Sense strand starting at position 3352 of SEQ ID NO: 1563509
ggcuguagaggugggaaua

SEQ ID NO: 1816074 - RNA, 19 nt, Artificial Sequence
  Description of Artificial Sequence: Synthetic oligonucleotide
  Antisense strand to SEQ ID NO: 1816073
uauucccaccucuacagcc

SEQ ID NO: 1816075 - RNA, 19 nt, Artificial Sequence
  Description of Artificial Sequence: Synthetic oligonucleotide
  Sense strand starting at position 3584 of SEQ ID NO: 1563509
guagucuagcugggagacu

SEQ ID NO: 1816076 - RNA, 19 nt, Artificial Sequence
  Description of Artificial Sequence: Synthetic oligonucleotide
  Antisense strand to SEQ ID NO: 1816075
agucucccagcuagacuac

SEQ ID NO: 1816077 - RNA, 19 nt, Artificial Sequence
  Description of Artificial Sequence: Synthetic oligonucleotide
  Sense strand starting at position 3670 of SEQ ID NO: 1563509
ugccuacuauugucaagaa

SEQ ID NO: 1816078 - RNA, 19 nt, Artificial Sequence
  Description of Artificial Sequence: Synthetic oligonucleotide
  Antisense strand to SEQ ID NO: 1816077
uucuugacaauaguaggca

SEQ ID NO: 1816079 - RNA, 19 nt, Artificial Sequence
  Description of Artificial Sequence: Synthetic oligonucleotide
  Sense strand starting at position 3671 of SEQ ID NO: 1563509
gccuacuauugucaagaac

SEQ ID NO: 1816080 - RNA, 19 nt, Artificial Sequence
  Description of Artificial Sequence: Synthetic oligonucleotide
  Antisense strand to SEQ ID NO: 1816079
guucuugacaauaguaggc

SEQ ID NO: 1816081 - RNA, 19 nt, Artificial Sequence
  Description of Artificial Sequence: Synthetic oligonucleotide
  Sense strand starting at position 3778 of SEQ ID NO: 1563509
agugacucaucugagauca

SEQ ID NO: 1816082 - RNA, 19 nt, Artificial Sequence
  Description of Artificial Sequence: Synthetic oligonucleotide
  Antisense strand to SEQ ID NO: 1816081
ugaucucagaugagucacu

SEQ ID NO: 1816083 - RNA, 19 nt, Artificial Sequence
  Description of Artificial Sequence: Synthetic oligonucleotide
  Sense strand starting at position 3798 of SEQ ID NO: 1563509
caagcugaucaguggugaa

SEQ ID NO: 1816084 - RNA, 19 nt, Artificial Sequence
  Description of Artificial Sequence: Synthetic oligonucleotide
  Antisense strand to SEQ ID NO: 1816083
uucaccacugaucagcuug

SEQ ID NO: 1816085 - RNA, 19 nt, Artificial Sequence
  Description of Artificial Sequence: Synthetic oligonucleotide
  Sense strand starting at position 3821 of SEQ ID NO: 1563509
ggauuugacuccugggaca

SEQ ID NO: 1816086 - RNA, 19 nt, Artificial Sequence
  Description of Artificial Sequence: Synthetic oligonucleotide
  Antisense strand to SEQ ID NO: 1816085
ugucccaggagucaaaucc

SEQ ID NO: 1816087 - RNA, 19 nt, Artificial Sequence
  Description of Artificial Sequence: Synthetic oligonucleotide
  Sense strand starting at position 3833 of SEQ ID NO: 1563509
ugggacaucugucuccaaa

SEQ ID NO: 1816088 - RNA, 19 nt, Artificial Sequence
  Description of Artificial Sequence: Synthetic oligonucleotide
  Antisense strand to SEQ ID NO: 1816087
uuuggagacagauguccca

SEQ ID NO: 1816089 - RNA, 19 nt, Artificial Sequence
  Description of Artificial Sequence: Synthetic oligonucleotide
  Sense strand starting at position 3870 of SEQ ID NO: 1563509
guaccauacuggcucaaau

SEQ ID NO: 1816090 - RNA, 19 nt, Artificial Sequence
  Description of Artificial Sequence: Synthetic oligonucleotide
  Antisense strand to SEQ ID NO: 1816089
auuugagccaguaugguac

SEQ ID NO: 1816091 - RNA, 19 nt, Artificial Sequence
  Description of Artificial Sequence: Synthetic oligonucleotide
  Sense strand starting at position 4 of SEQ ID NO: 1563510
guuugcuggccgcuaaaga

SEQ ID NO: 1816092 - RNA, 19 nt, Artificial Sequence
  Description of Artificial Sequence: Synthetic oligonucleotide
  Antisense strand to SEQ ID NO: 1816091
ucuuuagcggccagcaaac

SEQ ID NO: 1816093 - RNA, 19 nt, Artificial Sequence
  Description of Artificial Sequence: Synthetic oligonucleotide
  Sense strand starting at position 107 of SEQ ID NO: 1563510
augugauuaugagcaaauu

SEQ ID NO: 1816094 - RNA, 19 nt, Artificial Sequence
  Description of Artificial Sequence: Synthetic oligonucleotide
  Antisense strand to SEQ ID NO: 1816093
aauuugcucauaaucacau

SEQ ID NO: 1816095 - RNA, 19 nt, Artificial Sequence
  Description of Artificial Sequence: Synthetic oligonucleotide
  Sense strand starting at position 108 of SEQ ID NO: 1563510
ugugauuaugagcaaauug

SEQ ID NO: 1816096 - RNA, 19 nt, Artificial Sequence
  Description of Artificial Sequence: Synthetic oligonucleotide
  Antisense strand to SEQ ID NO: 1816095
caauuugcucauaaucaca

SEQ ID NO: 1816097 - RNA, 19 nt, Artificial Sequence
  Description of Artificial Sequence: Synthetic oligonucleotide
  Sense strand starting at position 179 of SEQ ID NO: 1563510
uucuaagaaccugguuuga

SEQ ID NO: 1816098 - RNA, 19 nt, Artificial Sequence
  Description of Artificial Sequence: Synthetic oligonucleotide
  Antisense strand to SEQ ID NO: 1816097
ucaaaccagguucuuagaa

SEQ ID NO: 1816099 - RNA, 19 nt, Artificial Sequence
  Description of Artificial Sequence: Synthetic oligonucleotide
  Sense strand starting at position 292 of SEQ ID NO: 1563510
ucgagaagccuguaccaaa

SEQ ID NO: 1816100 - RNA, 19 nt, Artificial Sequence
  Description of Artificial Sequence: Synthetic oligonucleotide
  Antisense strand to SEQ ID NO: 1816099
uuugguacaggcuucucga

SEQ ID NO: 1816101 - RNA, 19 nt, Artificial Sequence
  Description of Artificial Sequence: Synthetic oligonucleotide
  Sense strand starting at position 492 of SEQ ID NO: 1563510
cuaguaucuagugaguaga

SEQ ID NO: 1816102 - RNA, 19 nt, Artificial Sequence
  Description of Artificial Sequence: Synthetic oligonucleotide
  Antisense strand to SEQ ID NO: 1816101
ucuacucacuagauacuag

SEQ ID NO: 1816103 - RNA, 19 nt, Artificial Sequence
  Description of Artificial Sequence: Synthetic oligonucleotide
  Sense strand starting at position 586 of SEQ ID NO: 1563510
ccgaaaggucaauaaugcu

SEQ ID NO: 1816104 - RNA, 19 nt, Artificial Sequence
  Description of Artificial Sequence: Synthetic oligonucleotide
  Antisense strand to SEQ ID NO: 1816103
agcauuauugaccuuucgg

SEQ ID NO: 1816105 - RNA, 19 nt, Artificial Sequence
  Description of Artificial Sequence: Synthetic oligonucleotide
  Sense strand starting at position 627 of SEQ ID NO: 1563510
guggacaccuaaguagaaa

SEQ ID NO: 1816106 - RNA, 19 nt, Artificial Sequence
  Description of Artificial Sequence: Synthetic oligonucleotide
  Antisense strand to SEQ ID NO: 1816105
uuucuacuuagguguccac

SEQ ID NO: 1816107 - RNA, 19 nt, Artificial Sequence
  Description of Artificial Sequence: Synthetic oligonucleotide
  Sense strand starting at position 732 of SEQ ID NO: 1563510
cagaauaccuagguuugca

SEQ ID NO: 1816108 - RNA, 19 nt, Artificial Sequence
  Description of Artificial Sequence: Synthetic oligonucleotide
  Antisense strand to SEQ ID NO: 1816107
ugcaaaccuagguauucug

SEQ ID NO: 1816109 - RNA, 19 nt, Artificial Sequence
  Description of Artificial Sequence: Synthetic oligonucleotide
  Sense strand starting at position 882 of SEQ ID NO: 1563510
guagguuaauaguccugaa

SEQ ID NO: 1816110 - RNA, 19 nt, Artificial Sequence
  Description of Artificial Sequence: Synthetic oligonucleotide
  Antisense strand to SEQ ID NO: 1816109
uucaggacuauuaaccuac

SEQ ID NO: 1816111 - RNA, 19 nt, Artificial Sequence
  Description of Artificial Sequence: Synthetic oligonucleotide
  Sense strand starting at position 894 of SEQ ID NO: 1563510
uccugaagugcuuagaaca

SEQ ID NO: 1816112 - RNA, 19 nt, Artificial Sequence
  Description of Artificial Sequence: Synthetic oligonucleotide
  Antisense strand to SEQ ID NO: 1816111
uguucuaagcacuucagga

SEQ ID NO: 1816113 - RNA, 19 nt, Artificial Sequence
  Description of Artificial Sequence: Synthetic oligonucleotide
  Sense strand starting at position 1044 of SEQ ID NO: 1563510
caagaaugagaaugguugu

SEQ ID NO: 1816114 - RNA, 19 nt, Artificial Sequence
  Description of Artificial Sequence: Synthetic oligonucleotide
  Antisense strand to SEQ ID NO: 1816113
acaaccauucucauucuug

SEQ ID NO: 1816115 - RNA, 19 nt, Artificial Sequence
  Description of Artificial Sequence: Synthetic oligonucleotide
  Sense strand starting at position 1047 of SEQ ID NO: 1563510
gaaugagaaugguugucau

SEQ ID NO: 1816116 - RNA, 19 nt, Artificial Sequence
  Description of Artificial Sequence: Synthetic oligonucleotide
  Antisense strand to SEQ ID NO: 1816115
augacaaccauucucauuc

SEQ ID NO: 1816117 - RNA, 19 nt, Artificial Sequence
  Description of Artificial Sequence: Synthetic oligonucleotide
  Sense strand starting at position 1050 of SEQ ID NO: 1563510
ugagaaugguugucaucug

SEQ ID NO: 1816118 - RNA, 19 nt, Artificial Sequence
  Description of Artificial Sequence: Synthetic oligonucleotide
  Antisense strand to SEQ ID NO: 1816117
cagaugacaaccauucuca

SEQ ID NO: 1816119 - RNA, 19 nt, Artificial Sequence
  Description of Artificial Sequence: Synthetic oligonucleotide
  Sense strand starting at position 1136 of SEQ ID NO: 1563510
ggcucagcucaagaacagu

SEQ ID NO: 1816120 - RNA, 19 nt, Artificial Sequence
  Description of Artificial Sequence: Synthetic oligonucleotide
  Antisense strand to SEQ ID NO: 1816119
acuguucuugagcugagcc

SEQ ID NO: 1816121 - RNA, 19 nt, Artificial Sequence
  Description of Artificial Sequence: Synthetic oligonucleotide
  Sense strand starting at position 1424 of SEQ ID NO: 1563510
ggagcuaacuaggugcaaa

SEQ ID NO: 1816122 - RNA, 19 nt, Artificial Sequence
  Description of Artificial Sequence: Synthetic oligonucleotide
  Antisense strand to SEQ ID NO: 1816121
uuugcaccuaguuagcucc

SEQ ID NO: 1816123 - RNA, 19 nt, Artificial Sequence
  Description of Artificial Sequence: Synthetic oligonucleotide
  Sense strand starting at position 2325 of SEQ ID NO: 1563510
cccugucauuuggcaagua

SEQ ID NO: 1816124 - RNA, 19 nt, Artificial Sequence
  Description of Artificial Sequence: Synthetic oligonucleotide
  Antisense strand to SEQ ID NO: 1816123
uacuugccaaaugacaggg

SEQ ID NO: 1816125 - RNA, 19 nt, Artificial Sequence
  Description of Artificial Sequence: Synthetic oligonucleotide
  Sense strand starting at position 2401 of SEQ ID NO: 1563510
uauaguaaccagugcagaa

SEQ ID NO: 1816126 - RNA, 19 nt, Artificial Sequence
  Description of Artificial Sequence: Synthetic oligonucleotide
  Antisense strand to SEQ ID NO: 1816125
uucugcacugguuacuaua

SEQ ID NO: 1816127 - RNA, 19 nt, Artificial Sequence
  Description of Artificial Sequence: Synthetic oligonucleotide
  Sense strand starting at position 2403 of SEQ ID NO: 1563510
uaguaaccagugcagaaau

SEQ ID NO: 1816128 - RNA, 19 nt, Artificial Sequence
  Description of Artificial Sequence: Synthetic oligonucleotide
  Antisense strand to SEQ ID NO: 1816127
auuucugcacugguuacua

SEQ ID NO: 1816129 - RNA, 19 nt, Artificial Sequence
  Description of Artificial Sequence: Synthetic oligonucleotide
  Sense strand starting at position 2507 of SEQ ID NO: 1563510
augaaugacugaucccuuu

SEQ ID NO: 1816130 - RNA, 19 nt, Artificial Sequence
  Description of Artificial Sequence: Synthetic oligonucleotide
  Antisense strand to SEQ ID NO: 1816129
aaagggaucagucauucau

SEQ ID NO: 1816131 - RNA, 19 nt, Artificial Sequence
  Description of Artificial Sequence: Synthetic oligonucleotide
  Sense strand starting at position 2731 of SEQ ID NO: 1563510
guccaaggcgaaugagaaa

SEQ ID NO: 1816132 - RNA, 19 nt, Artificial Sequence
  Description of Artificial Sequence: Synthetic oligonucleotide
  Antisense strand to SEQ ID NO: 1816131
uuucucauucgccuuggac

SEQ ID NO: 1816133 - RNA, 19 nt, Artificial Sequence
  Description of Artificial Sequence: Synthetic oligonucleotide
  Sense strand starting at position 2777 of SEQ ID NO: 1563510
gcagaucuauagcuugaag

SEQ ID NO: 1816134 - RNA, 19 nt, Artificial Sequence
  Description of Artificial Sequence: Synthetic oligonucleotide
  Antisense strand to SEQ ID NO: 1816133
cuucaagcuauagaucugc

SEQ ID NO: 1816135 - RNA, 19 nt, Artificial Sequence
  Description of Artificial Sequence: Synthetic oligonucleotide
  Sense strand starting at position 2898 of SEQ ID NO: 1563510
gugauaguccucugacaca

SEQ ID NO: 1816136 - RNA, 19 nt, Artificial Sequence
  Description of Artificial Sequence: Synthetic oligonucleotide
  Antisense strand to SEQ ID NO: 1816135
ugugucagaggacuaucac

SEQ ID NO: 1816137 - RNA, 19 nt, Artificial Sequence
  Description of Artificial Sequence: Synthetic oligonucleotide
  Sense strand starting at position 2961 of SEQ ID NO: 1563510
agaggagguuuaucuugau

SEQ ID NO: 1816138 - RNA, 19 nt, Artificial Sequence
  Description of Artificial Sequence: Synthetic oligonucleotide
  Antisense strand to SEQ ID NO: 1816137
aucaagauaaaccuccucu

SEQ ID NO: 1816139 - RNA, 19 nt, Artificial Sequence
  Description of Artificial Sequence: Synthetic oligonucleotide
  Sense strand starting at position 2967 of SEQ ID NO: 1563510
gguuuaucuugauuggaag

SEQ ID NO: 1816140 - RNA, 19 nt, Artificial Sequence
  Description of Artificial Sequence: Synthetic oligonucleotide
  Antisense strand to SEQ ID NO: 1816139
cuuccaaucaagauaaacc

SEQ ID NO: 1816141 - RNA, 19 nt, Artificial Sequence
  Description of Artificial Sequence: Synthetic oligonucleotide
  Sense strand starting at position 3004 of SEQ ID NO: 1563510
aggcauaugccuuaauucu

SEQ ID NO: 1816142 - RNA, 19 nt, Artificial Sequence
  Description of Artificial Sequence: Synthetic oligonucleotide
  Antisense strand to SEQ ID NO: 1816141
agaauuaaggcauaugccu

SEQ ID NO: 1816143 - RNA, 19 nt, Artificial Sequence
  Description of Artificial Sequence: Synthetic oligonucleotide
  Sense strand starting at position 3013 of SEQ ID NO: 1563510
ccuuaauucuggccaauga

SEQ ID NO: 1816144 - RNA, 19 nt, Artificial Sequence
  Description of Artificial Sequence: Synthetic oligonucleotide
  Antisense strand to SEQ ID NO: 1816143
ucauuggccagaauuaagg

SEQ ID NO: 1816145 - RNA, 19 nt, Artificial Sequence
  Description of Artificial Sequence: Synthetic oligonucleotide
  Sense strand starting at position 3052 of SEQ ID NO: 1563510
gggagauucuugcugcaga

SEQ ID NO: 1816146 - RNA, 19 nt, Artificial Sequence
  Description of Artificial Sequence: Synthetic oligonucleotide
  Antisense strand to SEQ ID NO: 1816145
ucugcagcaagaaucuccc

SEQ ID NO: 1816147 - RNA, 19 nt, Artificial Sequence
  Description of Artificial Sequence: Synthetic oligonucleotide
  Sense strand starting at position 3055 of SEQ ID NO: 1563510
agauucuugcugcagaauc

SEQ ID NO: 1816148 - RNA, 19 nt, Artificial Sequence
  Description of Artificial Sequence: Synthetic oligonucleotide
  Antisense strand to SEQ ID NO: 1816147
gauucugcagcaagaaucu

SEQ ID NO: 1816149 - RNA, 19 nt, Artificial Sequence
  Description of Artificial Sequence: Synthetic oligonucleotide
  Sense strand starting at position 3105 of SEQ ID NO: 1563510
gugcaagccauguuuaguu

SEQ ID NO: 1816150 - RNA, 19 nt, Artificial Sequence
  Description of Artificial Sequence: Synthetic oligonucleotide
  Antisense strand to SEQ ID NO: 1816149
aacuaaacauggcuugcac

SEQ ID NO: 1816151 - RNA, 19 nt, Artificial Sequence
  Description of Artificial Sequence: Synthetic oligonucleotide
  Sense strand starting at position 3163 of SEQ ID NO: 1563510
caguauucuuggguaacua

SEQ ID NO: 1816152 - RNA, 19 nt, Artificial Sequence
  Description of Artificial Sequence: Synthetic oligonucleotide
  Antisense strand to SEQ ID NO: 1816151
uaguuacccaagaauacug

SEQ ID NO: 1816153 - RNA, 19 nt, Artificial Sequence
  Description of Artificial Sequence: Synthetic oligonucleotide
  Sense strand starting at position 3164 of SEQ ID NO: 1563510
aguauucuuggguaacuag

SEQ ID NO: 1816154 - RNA, 19 nt, Artificial Sequence
  Description of Artificial Sequence: Synthetic oligonucleotide
  Antisense strand to SEQ ID NO: 1816153
cuaguuacccaagaauacu

SEQ ID NO: 1816155 - RNA, 19 nt, Artificial Sequence
  Description of Artificial Sequence: Synthetic oligonucleotide
  Sense strand starting at position 3231 of SEQ ID NO: 1563510
acacauauguuaucugauu

SEQ ID NO: 1816156 - RNA, 19 nt, Artificial Sequence
  Description of Artificial Sequence: Synthetic oligonucleotide
  Antisense strand to SEQ ID NO: 1816155
aaucagauaacauaugugu

SEQ ID NO: 1816157 - RNA, 19 nt, Artificial Sequence
  Description of Artificial Sequence: Synthetic oligonucleotide
  Sense strand starting at position 3237 of SEQ ID NO: 1563510
auguuaucugauugaacau

SEQ ID NO: 1816158 - RNA, 19 nt, Artificial Sequence
  Description of Artificial Sequence: Synthetic oligonucleotide
  Antisense strand to SEQ ID NO: 1816157
auguucaaucagauaacau

SEQ ID NO: 1816159 - RNA, 19 nt, Artificial Sequence
  Description of Artificial Sequence: Synthetic oligonucleotide
  Sense strand starting at position 3309 of SEQ ID NO: 1563510
aacugagucggagagguua

SEQ ID NO: 1816160 - RNA, 19 nt, Artificial Sequence
  Description of Artificial Sequence: Synthetic oligonucleotide
  Antisense strand to SEQ ID NO: 1816159
uaaccucuccgacucaguu

SEQ ID NO: 1816161 - RNA, 19 nt, Artificial Sequence
  Description of Artificial Sequence: Synthetic oligonucleotide
  Sense strand starting at position 3403 of SEQ ID NO: 1563510
ggcucugcugcuguuauau

SEQ ID NO: 1816162 - RNA, 19 nt, Artificial Sequence
  Description of Artificial Sequence: Synthetic oligonucleotide
  Antisense strand to SEQ ID NO: 1816161
auauaacagcagcagagcc

SEQ ID NO: 1816163 - RNA, 19 nt, Artificial Sequence
  Description of Artificial Sequence: Synthetic oligonucleotide
  Sense strand starting at position 3599 of SEQ ID NO: 1563510
acucuauaccugugaggau

SEQ ID NO: 1816164 - RNA, 19 nt, Artificial Sequence
  Description of Artificial Sequence: Synthetic oligonucleotide
  Antisense strand to SEQ ID NO: 1816163
auccucacagguauagagu

SEQ ID NO: 1816165 - RNA, 19 nt, Artificial Sequence
  Description of Artificial Sequence: Synthetic oligonucleotide
  Sense strand starting at position 3699 of SEQ ID NO: 1563510
uaguuuauucuggagguac

SEQ ID NO: 1816166 - RNA, 19 nt, Artificial Sequence
  Description of Artificial Sequence: Synthetic oligonucleotide
  Antisense strand to SEQ ID NO: 1816165
guaccuccagaauaaacua

SEQ ID NO: 1816167 - RNA, 19 nt, Artificial Sequence
  Description of Artificial Sequence: Synthetic oligonucleotide
  Sense strand starting at position 3701 of SEQ ID NO: 1563510
guuuauucuggagguacag

SEQ ID NO: 1816168 - RNA, 19 nt, Artificial Sequence
  Description of Artificial Sequence: Synthetic oligonucleotide
  Antisense strand to SEQ ID NO: 1816167
cuguaccuccagaauaaac

SEQ ID NO: 1816169 - RNA, 19 nt, Artificial Sequence
  Description of Artificial Sequence: Synthetic oligonucleotide
  Sense strand starting at position 3771 of SEQ ID NO: 1563510
ggcauauauuaaguuauca

SEQ ID NO: 1816170 - RNA, 19 nt, Artificial Sequence
  Description of Artificial Sequence: Synthetic oligonucleotide
  Antisense strand to SEQ ID NO: 1816169
ugauaacuuaauauaugcc

SEQ ID NO: 1816171 - RNA, 19 nt, Artificial Sequence
  Description of Artificial Sequence: Synthetic oligonucleotide
  Sense strand starting at position 20 of SEQ ID NO: 1563511
aguaauggguucccaggua

SEQ ID NO: 1816172 - RNA, 19 nt, Artificial Sequence
  Description of Artificial Sequence: Synthetic oligonucleotide
  Antisense strand to SEQ ID NO: 1816171
uaccugggaacccauuacu

SEQ ID NO: 1816173 - RNA, 19 nt, Artificial Sequence
  Description of Artificial Sequence: Synthetic oligonucleotide
  Sense strand starting at position 25 of SEQ ID NO: 1563511
uggguucccagguauauca

SEQ ID NO: 1816174 - RNA, 19 nt, Artificial Sequence
  Description of Artificial Sequence: Synthetic oligonucleotide
  Antisense strand to SEQ ID NO: 1816173
ugauauaccugggaaccca

SEQ ID NO: 1816175 - RNA, 19 nt, Artificial Sequence
  Description of Artificial Sequence: Synthetic oligonucleotide
  Sense strand starting at position 384 of SEQ ID NO: 1563511
ggagguaggugacuuaaac

SEQ ID NO: 1816176 - RNA, 19 nt, Artificial Sequence
  Description of Artificial Sequence: Synthetic oligonucleotide
  Antisense strand to SEQ ID NO: 1816175
guuuaagucaccuaccucc

SEQ ID NO: 1816177 - RNA, 19 nt, Artificial Sequence
  Description of Artificial Sequence: Synthetic oligonucleotide
  Sense strand starting at position 441 of SEQ ID NO: 1563511
cuggcaauccaaugagauu

SEQ ID NO: 1816178 - RNA, 19 nt, Artificial Sequence
  Description of Artificial Sequence: Synthetic oligonucleotide
  Antisense strand to SEQ ID NO: 1816177
aaucucauuggauugccag

SEQ ID NO: 1816179 - RNA, 19 nt, Artificial Sequence
  Description of Artificial Sequence: Synthetic oligonucleotide
  Sense strand starting at position 667 of SEQ ID NO: 1563511
ccaacuugugcacagaaca

SEQ ID NO: 1816180 - RNA, 19 nt, Artificial Sequence
  Description of Artificial Sequence: Synthetic oligonucleotide
  Antisense strand to SEQ ID NO: 1816179
uguucugugcacaaguugg

SEQ ID NO: 1816181 - RNA, 19 nt, Artificial Sequence
  Description of Artificial Sequence: Synthetic oligonucleotide
  Sense strand starting at position 744 of SEQ ID NO: 1563511
gguagaaucccuggagcca

SEQ ID NO: 1816182 - RNA, 19 nt, Artificial Sequence
  Description of Artificial Sequence: Synthetic oligonucleotide
  Antisense strand to SEQ ID NO: 1816181
uggcuccagggauucuacc

SEQ ID NO: 1816183 - RNA, 19 nt, Artificial Sequence
  Description of Artificial Sequence: Synthetic oligonucleotide
  Sense strand starting at position 862 of SEQ ID NO: 1563511
gcuccucuccuguaggaaa

SEQ ID NO: 1816184 - RNA, 19 nt, Artificial Sequence
  Description of Artificial Sequence: Synthetic oligonucleotide
  Antisense strand to SEQ ID NO: 1816183
uuuccuacaggagaggagc

SEQ ID NO: 1816185 - RNA, 19 nt, Artificial Sequence
  Description of Artificial Sequence: Synthetic oligonucleotide
  Sense strand starting at position 921 of SEQ ID NO: 1563511
aaguuauacggcuauuaaa

SEQ ID NO: 1816186 - RNA, 19 nt, Artificial Sequence
  Description of Artificial Sequence: Synthetic oligonucleotide
  Antisense strand to SEQ ID NO: 1816185
uuuaauagccguauaacuu

SEQ ID NO: 1816187 - RNA, 19 nt, Artificial Sequence
  Description of Artificial Sequence: Synthetic oligonucleotide
  Sense strand starting at position 1080 of SEQ ID NO: 1563511
aacgcuuagccucagaaug

SEQ ID NO: 1816188 - RNA, 19 nt, Artificial Sequence
  Description of Artificial Sequence: Synthetic oligonucleotide
  Antisense strand to SEQ ID NO: 1816187
cauucugaggcuaagcguu

SEQ ID NO: 1816189 - RNA, 19 nt, Artificial Sequence
  Description of Artificial Sequence: Synthetic oligonucleotide
  Sense strand starting at position 1112 of SEQ ID NO: 1563511
uuaggucuuuauucucaca

SEQ ID NO: 1816190 - RNA, 19 nt, Artificial Sequence
  Description of Artificial Sequence: Synthetic oligonucleotide
  Antisense strand to SEQ ID NO: 1816189
ugugagaauaaagaccuaa

SEQ ID NO: 1816191 - RNA, 19 nt, Artificial Sequence
  Description of Artificial Sequence: Synthetic oligonucleotide
  Sense strand starting at position 1344 of SEQ ID NO: 1563511
guaccuggugcucacgaau

SEQ ID NO: 1816192 - RNA, 19 nt, Artificial Sequence
  Description of Artificial Sequence: Synthetic oligonucleotide
  Antisense strand to SEQ ID NO: 1816191
auucgugagcaccagguac

SEQ ID NO: 1816193 - RNA, 19 nt, Artificial Sequence
  Description of Artificial Sequence: Synthetic oligonucleotide
  Sense strand starting at position 1364 of SEQ ID NO: 1563511
cagacagcacucugaaagu

SEQ ID NO: 1816194 - RNA, 19 nt, Artificial Sequence
  Description of Artificial Sequence: Synthetic oligonucleotide
  Antisense strand to SEQ ID NO: 1816193
acuuucagagugcugucug

SEQ ID NO: 1816195 - RNA, 19 nt, Artificial Sequence
  Description of Artificial Sequence: Synthetic oligonucleotide
  Sense strand starting at position 1387 of SEQ ID NO: 1563511
aacggcuuccagggauuau

SEQ ID NO: 1816196 - RNA, 19 nt, Artificial Sequence
  Description of Artificial Sequence: Synthetic oligonucleotide
  Antisense strand to SEQ ID NO: 1816195
auaaucccuggaagccguu

SEQ ID NO: 1816197 - RNA, 19 nt, Artificial Sequence
  Description of Artificial Sequence: Synthetic oligonucleotide
  Sense strand starting at position 1388 of SEQ ID NO: 1563511
acggcuuccagggauuaua

SEQ ID NO: 1816198 - RNA, 19 nt, Artificial Sequence
  Description of Artificial Sequence: Synthetic oligonucleotide
  Antisense strand to SEQ ID NO: 1816197
uauaaucccuggaagccgu

SEQ ID NO: 1816199 - RNA, 19 nt, Artificial Sequence
  Description of Artificial Sequence: Synthetic oligonucleotide
  Sense strand starting at position 1696 of SEQ ID NO: 1563511
cugggugaccugcaaucua

SEQ ID NO: 1816200 - RNA, 19 nt, Artificial Sequence
  Description of Artificial Sequence: Synthetic oligonucleotide
  Antisense strand to SEQ ID NO: 1816199
uagauugcaggucacccag

SEQ ID NO: 1816201 - RNA, 19 nt, Artificial Sequence
  Description of Artificial Sequence: Synthetic oligonucleotide
  Sense strand starting at position 1768 of SEQ ID NO: 1563511
cggcauuaccuuuauucuu

SEQ ID NO: 1816202 - RNA, 19 nt, Artificial Sequence
  Description of Artificial Sequence: Synthetic oligonucleotide
  Antisense strand to SEQ ID NO: 1816201
aagaauaaagguaaugccg

SEQ ID NO: 1816203 - RNA, 19 nt, Artificial Sequence
  Description of Artificial Sequence: Synthetic oligonucleotide
  Sense strand starting at position 2189 of SEQ ID NO: 1563511
gggagagacucugcgucau

SEQ ID NO: 1816204 - RNA, 19 nt, Artificial Sequence
  Description of Artificial Sequence: Synthetic oligonucleotide
  Antisense strand to SEQ ID NO: 1816203
augacgcagagucucuccc

SEQ ID NO: 1816205 - RNA, 19 nt, Artificial Sequence
  Description of Artificial Sequence: Synthetic oligonucleotide
  Sense strand starting at position 2191 of SEQ ID NO: 1563511
gagagacucugcgucauag

SEQ ID NO: 1816206 - RNA, 19 nt, Artificial Sequence
  Description of Artificial Sequence: Synthetic oligonucleotide
  Antisense strand to SEQ ID NO: 1816205
cuaugacgcagagucucuc

SEQ ID NO: 1816207 - RNA, 19 nt, Artificial Sequence
  Description of Artificial Sequence: Synthetic oligonucleotide
  Sense strand starting at position 2193 of SEQ ID NO: 1563511
gagacucugcgucauagaa

SEQ ID NO: 1816208 - RNA, 19 nt, Artificial Sequence
  Description of Artificial Sequence: Synthetic oligonucleotide
  Antisense strand to SEQ ID NO: 1816207
uucuaugacgcagagucuc

SEQ ID NO: 1816209 - RNA, 19 nt, Artificial Sequence
  Description of Artificial Sequence: Synthetic oligonucleotide
  Sense strand starting at position 2278 of SEQ ID NO: 1563511
gcgucucccgguuucacaa

SEQ ID NO: 1816210 - RNA, 19 nt, Artificial Sequence
  Description of Artificial Sequence: Synthetic oligonucleotide
  Antisense strand to SEQ ID NO: 1816209
uugugaaaccgggagacgc

SEQ ID NO: 1816211 - RNA, 19 nt, Artificial Sequence
  Description of Artificial Sequence: Synthetic oligonucleotide
  Sense strand starting at position 2305 of SEQ ID NO: 1563511
cucguuaaccucgugguua

SEQ ID NO: 1816212 - RNA, 19 nt, Artificial Sequence
  Description of Artificial Sequence: Synthetic oligonucleotide
  Antisense strand to SEQ ID NO: 1816211
uaaccacgagguuaacgag

SEQ ID NO: 1816213 - RNA, 19 nt, Artificial Sequence
  Description of Artificial Sequence: Synthetic oligonucleotide
  Sense strand starting at position 2374 of SEQ ID NO: 1563511
gacggagucuugcucuaga

SEQ ID NO: 1816214 - RNA, 19 nt, Artificial Sequence
  Description of Artificial Sequence: Synthetic oligonucleotide
  Antisense strand to SEQ ID NO: 1816213
ucuagagcaagacuccguc

SEQ ID NO: 1816215 - RNA, 19 nt, Artificial Sequence
  Description of Artificial Sequence: Synthetic oligonucleotide
  Sense strand starting at position 2377 of SEQ ID NO: 1563511
ggagucuugcucuagaguc

SEQ ID NO: 1816216 - RNA, 19 nt, Artificial Sequence
  Description of Artificial Sequence: Synthetic oligonucleotide
  Antisense strand to SEQ ID NO: 1816215
gacucuagagcaagacucc

SEQ ID NO: 1816217 - RNA, 19 nt, Artificial Sequence
  Description of Artificial Sequence: Synthetic oligonucleotide
  Sense strand starting at position 3065 of SEQ ID NO: 1563511
uguuauuacucuuuaaguc

SEQ ID NO: 1816218 - RNA, 19 nt, Artificial Sequence
  Description of Artificial Sequence: Synthetic oligonucleotide
  Antisense strand to SEQ ID NO: 1816217
gacuuaaagaguaauaaca

SEQ ID NO: 1816219 - RNA, 19 nt, Artificial Sequence
  Description of Artificial Sequence: Synthetic oligonucleotide
  Sense strand starting at position 3066 of SEQ ID NO: 1563511
guuauuacucuuuaagucu

SEQ ID NO: 1816220 - RNA, 19 nt, Artificial Sequence
  Description of Artificial Sequence: Synthetic oligonucleotide
  Antisense strand to SEQ ID NO: 1816219
agacuuaaagaguaauaac

SEQ ID NO: 1816221 - RNA, 19 nt, Artificial Sequence
  Description of Artificial Sequence: Synthetic oligonucleotide
  Sense strand starting at position 3088 of SEQ ID NO: 1563511
uguccuaccucacuguaaa

SEQ ID NO: 1816222 - RNA, 19 nt, Artificial Sequence
  Description of Artificial Sequence: Synthetic oligonucleotide
  Antisense strand to SEQ ID NO: 1816221
uuuacagugagguaggaca

SEQ ID NO: 1816223 - RNA, 19 nt, Artificial Sequence
  Description of Artificial Sequence: Synthetic oligonucleotide
  Sense strand starting at position 3089 of SEQ ID NO: 1563511
guccuaccucacuguaaac

SEQ ID NO: 1816224 - RNA, 19 nt, Artificial Sequence
  Description of Artificial Sequence: Synthetic oligonucleotide
  Antisense strand to SEQ ID NO: 1816223
guuuacagugagguaggac

SEQ ID NO: 1816225 - RNA, 19 nt, Artificial Sequence
  Description of Artificial Sequence: Synthetic oligonucleotide
  Sense strand starting at position 3158 of SEQ ID NO: 1563511
gaaugucuggcacauaaua

SEQ ID NO: 1816226 - RNA, 19 nt, Artificial Sequence
  Description of Artificial Sequence: Synthetic oligonucleotide
  Antisense strand to SEQ ID NO: 1816225
uauuaugugccagacauuc

SEQ ID NO: 1816227 - RNA, 19 nt, Artificial Sequence
  Description of Artificial Sequence: Synthetic oligonucleotide
  Sense strand starting at position 3230 of SEQ ID NO: 1563511
caauguuaaugggcugaau

SEQ ID NO: 1816228 - RNA, 19 nt, Artificial Sequence
  Description of Artificial Sequence: Synthetic oligonucleotide
  Antisense strand to SEQ ID NO: 1816227
auucagcccauuaacauug

SEQ ID NO: 1816229 - RNA, 19 nt, Artificial Sequence
  Description of Artificial Sequence: Synthetic oligonucleotide
  Sense strand starting at position 3232 of SEQ ID NO: 1563511
auguuaaugggcugaauug

SEQ ID NO: 1816230 - RNA, 19 nt, Artificial Sequence
  Description of Artificial Sequence: Synthetic oligonucleotide
  Antisense strand to SEQ ID NO: 1816229
caauucagcccauuaacau

SEQ ID NO: 1816231 - RNA, 19 nt, Artificial Sequence
  Description of Artificial Sequence: Synthetic oligonucleotide
  Sense strand starting at position 3233 of SEQ ID NO: 1563511
uguuaaugggcugaauugu

SEQ ID NO: 1816232 - RNA, 19 nt, Artificial Sequence
  Description of Artificial Sequence: Synthetic oligonucleotide
  Antisense strand to SEQ ID NO: 1816231
acaauucagcccauuaaca

SEQ ID NO: 1816233 - RNA, 19 nt, Artificial Sequence
  Description of Artificial Sequence: Synthetic oligonucleotide
  Sense strand starting at position 3288 of SEQ ID NO: 1563511
ccaguaacucaaugugacu

SEQ ID NO: 1816234 - RNA, 19 nt, Artificial Sequence
  Description of Artificial Sequence: Synthetic oligonucleotide
  Antisense strand to SEQ ID NO: 1816233
agucacauugaguuacugg

SEQ ID NO: 1816235 - RNA, 19 nt, Artificial Sequence
  Description of Artificial Sequence: Synthetic oligonucleotide
  Sense strand starting at position 3332 of SEQ ID NO: 1563511
acgugauuaaauugaaaug

SEQ ID NO: 1816236 - RNA, 19 nt, Artificial Sequence
  Description of Artificial Sequence: Synthetic oligonucleotide
  Antisense strand to SEQ ID NO: 1816235
cauuucaauuuaaucacgu

SEQ ID NO: 1816237 - RNA, 19 nt, Artificial Sequence
  Description of Artificial Sequence: Synthetic oligonucleotide
  Sense strand starting at position 3608 of SEQ ID NO: 1563511
ugggcuguacucuacaaga

SEQ ID NO: 1816238 - RNA, 19 nt, Artificial Sequence
  Description of Artificial Sequence: Synthetic oligonucleotide
  Antisense strand to SEQ ID NO: 1816237
ucuuguagaguacagccca

SEQ ID NO: 1816239 - RNA, 19 nt, Artificial Sequence
  Description of Artificial Sequence: Synthetic oligonucleotide
  Sense strand starting at position 3610 of SEQ ID NO: 1563511
ggcuguacucuacaagauu

SEQ ID NO: 1816240 - RNA, 19 nt, Artificial Sequence
  Description of Artificial Sequence: Synthetic oligonucleotide
  Antisense strand to SEQ ID NO: 1816239
aaucuuguagaguacagcc

SEQ ID NO: 1816241 - RNA, 19 nt, Artificial Sequence
  Description of Artificial Sequence: Synthetic oligonucleotide
  Sense strand starting at position 3775 of SEQ ID NO: 1563511
ggcagcgucaaccagaaau

SEQ ID NO: 1816242 - RNA, 19 nt, Artificial Sequence
  Description of Artificial Sequence: Synthetic oligonucleotide
  Antisense strand to SEQ ID NO: 1816241
auuucugguugacgcugcc

SEQ ID NO: 1816243 - RNA, 19 nt, Artificial Sequence
  Description of Artificial Sequence: Synthetic oligonucleotide
  Sense strand starting at position 3777 of SEQ ID NO: 1563511
cagcgucaaccagaaaugu

SEQ ID NO: 1816244 - RNA, 19 nt, Artificial Sequence
  Description of Artificial Sequence: Synthetic oligonucleotide
  Antisense strand to SEQ ID NO: 1816243
acauuucugguugacgcug

SEQ ID NO: 1816245 - RNA, 19 nt, Artificial Sequence
  Description of Artificial Sequence: Synthetic oligonucleotide
  Sense strand starting at position 3786 of SEQ ID NO: 1563511
ccagaaauguuucugguug

SEQ ID NO: 1816246 - RNA, 19 nt, Artificial Sequence
  Description of Artificial Sequence: Synthetic oligonucleotide
  Antisense strand to SEQ ID NO: 1816245
caaccagaaacauuucugg

SEQ ID NO: 1816247 - RNA, 19 nt, Artificial Sequence
  Description of Artificial Sequence: Synthetic oligonucleotide
  Sense strand starting at position 3790 of SEQ ID NO: 1563511
aaauguuucugguugucau

SEQ ID NO: 1816248 - RNA, 19 nt, Artificial Sequence
  Description of Artificial Sequence: Synthetic oligonucleotide
  Antisense strand to SEQ ID NO: 1816247
augacaaccagaaacauuu

SEQ ID NO: 1816249 - RNA, 19 nt, Artificial Sequence
  Description of Artificial Sequence: Synthetic oligonucleotide
  Sense strand starting at position 3801 of SEQ ID NO: 1563511
guugucauaacuugaggag

SEQ ID NO: 1816250 - RNA, 19 nt, Artificial Sequence
  Description of Artificial Sequence: Synthetic oligonucleotide
  Antisense strand to SEQ ID NO: 1816249
cuccucaaguuaugacaac

SEQ ID NO: 1816251 - RNA, 19 nt, Artificial Sequence
  Description of Artificial Sequence: Synthetic oligonucleotide
  Sense strand starting at position 12 of SEQ ID NO: 1563512
cuagaaacguguucucaua

SEQ ID NO: 1816252 - RNA, 19 nt, Artificial Sequence
  Description of Artificial Sequence: Synthetic oligonucleotide
  Antisense strand to SEQ ID NO: 1816251
uaugagaacacguuucuag

SEQ ID NO: 1816253 - RNA, 19 nt, Artificial Sequence
  Description of Artificial Sequence: Synthetic oligonucleotide
  Sense strand starting at position 14 of SEQ ID NO: 1563512
agaaacguguucucauaua

SEQ ID NO: 1816254 - RNA, 19 nt, Artificial Sequence
  Description of Artificial Sequence: Synthetic oligonucleotide
  Antisense strand to SEQ ID NO: 1816253
uauaugagaacacguuucu

SEQ ID NO: 1816255 - RNA, 19 nt, Artificial Sequence
  Description of Artificial Sequence: Synthetic oligonucleotide
  Sense strand starting at position 19 of SEQ ID NO: 1563512
cguguucucauauaggacu

SEQ ID NO: 1816256 - RNA, 19 nt, Artificial Sequence
  Description of Artificial Sequence: Synthetic oligonucleotide
  Antisense strand to SEQ ID NO: 1816255
aguccuauaugagaacacg

SEQ ID NO: 1816257 - RNA, 19 nt, Artificial Sequence
  Description of Artificial Sequence: Synthetic oligonucleotide
  Sense strand starting at position 22 of SEQ ID NO: 1563512
guucucauauaggacuuaa

SEQ ID NO: 1816258 - RNA, 19 nt, Artificial Sequence
  Description of Artificial Sequence: Synthetic oligonucleotide
  Antisense strand to SEQ ID NO: 1816257
uuaaguccuauaugagaac

SEQ ID NO: 1816259 - RNA, 19 nt, Artificial Sequence
  Description of Artificial Sequence: Synthetic oligonucleotide
  Sense strand starting at position 124 of SEQ ID NO: 1563512
augcaaugcccugaucaca

SEQ ID NO: 1816260 - RNA, 19 nt, Artificial Sequence
  Description of Artificial Sequence: Synthetic oligonucleotide
  Antisense strand to SEQ ID NO: 1816259
ugugaucagggcauugcau

SEQ ID NO: 1816261 - RNA, 19 nt, Artificial Sequence
  Description of Artificial Sequence: Synthetic oligonucleotide
  Sense strand starting at position 368 of SEQ ID NO: 1563512
cggccagaacuuuauauau

SEQ ID NO: 1816262 - RNA, 19 nt, Artificial Sequence
  Description of Artificial Sequence: Synthetic oligonucleotide
  Antisense strand to SEQ ID NO: 1816261
auauauaaaguucuggccg

SEQ ID NO: 1816263 - RNA, 19 nt, Artificial Sequence
  Description of Artificial Sequence: Synthetic oligonucleotide
  Sense strand starting at position 421 of SEQ ID NO: 1563512
uaugaugggcccugacaca

SEQ ID NO: 1816264 - RNA, 19 nt, Artificial Sequence
  Description of Artificial Sequence: Synthetic oligonucleotide
  Antisense strand to SEQ ID NO: 1816263
ugugucagggcccaucaua

SEQ ID NO: 1816265 - RNA, 19 nt, Artificial Sequence
  Description of Artificial Sequence: Synthetic oligonucleotide
  Sense strand starting at position 574 of SEQ ID NO: 1563512
agguuagguuaugcuccaa

SEQ ID NO: 1816266 - RNA, 19 nt, Artificial Sequence
  Description of Artificial Sequence: Synthetic oligonucleotide
  Antisense strand to SEQ ID NO: 1816265
uuggagcauaaccuaaccu

SEQ ID NO: 1816267 - RNA, 19 nt, Artificial Sequence
  Description of Artificial Sequence: Synthetic oligonucleotide
  Sense strand starting at position 651 of SEQ ID NO: 1563512
uugggcuuuguuugcauua

SEQ ID NO: 1816268 - RNA, 19 nt, Artificial Sequence
  Description of Artificial Sequence: Synthetic oligonucleotide
  Antisense strand to SEQ ID NO: 1816267
uaaugcaaacaaagcccaa

SEQ ID NO: 1816269 - RNA, 19 nt, Artificial Sequence
  Description of Artificial Sequence: Synthetic oligonucleotide
  Sense strand starting at position 674 of SEQ ID NO: 1563512
auuaaagcuccagacugua

SEQ ID NO: 1816270 - RNA, 19 nt, Artificial Sequence
  Description of Artificial Sequence: Synthetic oligonucleotide
  Antisense strand to SEQ ID NO: 1816269
uacagucuggagcuuuaau

SEQ ID NO: 1816271 - RNA, 19 nt, Artificial Sequence
  Description of Artificial Sequence: Synthetic oligonucleotide
  Sense strand starting at position 687 of SEQ ID NO: 1563512
acuguaauacuguaacuuu

SEQ ID NO: 1816272 - RNA, 19 nt, Artificial Sequence
  Description of Artificial Sequence: Synthetic oligonucleotide
  Antisense strand to SEQ ID NO: 1816271
aaaguuacaguauuacagu

SEQ ID NO: 1816273 - RNA, 19 nt, Artificial Sequence
  Description of Artificial Sequence: Synthetic oligonucleotide
  Sense strand starting at position 800 of SEQ ID NO: 1563512
aacugugcuguuuguacaa

SEQ ID NO: 1816274 - RNA, 19 nt, Artificial Sequence
  Description of Artificial Sequence: Synthetic oligonucleotide
  Antisense strand to SEQ ID NO: 1816273
uuguacaaacagcacaguu

SEQ ID NO: 1816275 - RNA, 19 nt, Artificial Sequence
  Description of Artificial Sequence: Synthetic oligonucleotide
  Sense strand starting at position 851 of SEQ ID NO: 1563512
cguaacuucuccucuaaag

SEQ ID NO: 1816276 - RNA, 19 nt, Artificial Sequence
  Description of Artificial Sequence: Synthetic oligonucleotide
  Antisense strand to SEQ ID NO: 1816275
cuuuagaggagaaguuacg

SEQ ID NO: 1816277 - RNA, 19 nt, Artificial Sequence
  Description of Artificial Sequence: Synthetic oligonucleotide
  Sense strand starting at position 952 of SEQ ID NO: 1563512
gaaauaauccuguguguca

SEQ ID NO: 1816278 - RNA, 19 nt, Artificial Sequence
  Description of Artificial Sequence: Synthetic oligonucleotide
  Antisense strand to SEQ ID NO: 1816277
ugacacacaggauuauuuc

SEQ ID NO: 1816279 - RNA, 19 nt, Artificial Sequence
  Description of Artificial Sequence: Synthetic oligonucleotide
  Sense strand starting at position 1225 of SEQ ID NO: 1563512
aauuaauuguuggagacca

SEQ ID NO: 1816280 - RNA, 19 nt, Artificial Sequence
  Description of Artificial Sequence: Synthetic oligonucleotide
  Antisense strand to SEQ ID NO: 1816279
uggucuccaacaauuaauu

SEQ ID NO: 1816281 - RNA, 19 nt, Artificial Sequence
  Description of Artificial Sequence: Synthetic oligonucleotide
  Sense strand starting at position 1243 of SEQ ID NO: 1563512
aagguuaggucucuuaagu

SEQ ID NO: 1816282 - RNA, 19 nt, Artificial Sequence
  Description of Artificial Sequence: Synthetic oligonucleotide
  Antisense strand to SEQ ID NO: 1816281
acuuaagagaccuaaccuu

SEQ ID NO: 1816283 - RNA, 19 nt, Artificial Sequence
  Description of Artificial Sequence: Synthetic oligonucleotide
  Sense strand starting at position 1326 of SEQ ID NO: 1563512
gguaacauccugcaaugaa

SEQ ID NO: 1816284 - RNA, 19 nt, Artificial Sequence
  Description of Artificial Sequence: Synthetic oligonucleotide
  Antisense strand to SEQ ID NO: 1816283
uucauugcaggauguuacc

SEQ ID NO: 1816285 - RNA, 19 nt, Artificial Sequence
  Description of Artificial Sequence: Synthetic oligonucleotide
  Sense strand starting at position 1391 of SEQ ID NO: 1563512
ugacuuuacguuugcuauc

SEQ ID NO: 1816286 - RNA, 19 nt, Artificial Sequence
  Description of Artificial Sequence: Synthetic oligonucleotide
  Antisense strand to SEQ ID NO: 1816285
gauagcaaacguaaaguca

SEQ ID NO: 1816287 - RNA, 19 nt, Artificial Sequence
  Description of Artificial Sequence: Synthetic oligonucleotide
  Sense strand starting at position 1393 of SEQ ID NO: 1563512
acuuuacguuugcuaucua

SEQ ID NO: 1816288 - RNA, 19 nt, Artificial Sequence
  Description of Artificial Sequence: Synthetic oligonucleotide
  Antisense strand to SEQ ID NO: 1816287
uagauagcaaacguaaagu

SEQ ID NO: 1816289 - RNA, 19 nt, Artificial Sequence
  Description of Artificial Sequence: Synthetic oligonucleotide
  Sense strand starting at position 1585 of SEQ ID NO: 1563512
ugggaacauuagcacuaaa

SEQ ID NO: 1816290 - RNA, 19 nt, Artificial Sequence
  Description of Artificial Sequence: Synthetic oligonucleotide
  Antisense strand to SEQ ID NO: 1816289
uuuagugcuaauguuccca

SEQ ID NO: 1816291 - RNA, 19 nt, Artificial Sequence
  Description of Artificial Sequence: Synthetic oligonucleotide
  Sense strand starting at position 2116 of SEQ ID NO: 1563512
uggacaucucuccgcuuga

SEQ ID NO: 1816292 - RNA, 19 nt, Artificial Sequence
  Description of Artificial Sequence: Synthetic oligonucleotide
  Antisense strand to SEQ ID NO: 1816291
ucaagcggagagaugucca

SEQ ID NO: 1816293 - RNA, 19 nt, Artificial Sequence
  Description of Artificial Sequence: Synthetic oligonucleotide
  Sense strand starting at position 2117 of SEQ ID NO: 1563512
ggacaucucuccgcuugaa

SEQ ID NO: 1816294 - RNA, 19 nt, Artificial Sequence
  Description of Artificial Sequence: Synthetic oligonucleotide
  Antisense strand to SEQ ID NO: 1816293
uucaagcggagagaugucc

SEQ ID NO: 1816295 - RNA, 19 nt, Artificial Sequence
  Description of Artificial Sequence: Synthetic oligonucleotide
  Sense strand starting at position 2339 of SEQ ID NO: 1563512
ucccgaaaccugggaauca

SEQ ID NO: 1816296 - RNA, 19 nt, Artificial Sequence
  Description of Artificial Sequence: Synthetic oligonucleotide
  Antisense strand to SEQ ID NO: 1816295
ugauucccagguuucggga

SEQ ID NO: 1816297 - RNA, 19 nt, Artificial Sequence
  Description of Artificial Sequence: Synthetic oligonucleotide
  Sense strand starting at position 2482 of SEQ ID NO: 1563512
gggcucuuggcugggagaa

SEQ ID NO: 1816298 - RNA, 19 nt, Artificial Sequence
  Description of Artificial Sequence: Synthetic oligonucleotide
  Antisense strand to SEQ ID NO: 1816297
uucucccagccaagagccc

SEQ ID NO: 1816299 - RNA, 19 nt, Artificial Sequence
  Description of Artificial Sequence: Synthetic oligonucleotide
  Sense strand starting at position 2597 of SEQ ID NO: 1563512
cccagcuuguucccagaga

SEQ ID NO: 1816300 - RNA, 19 nt, Artificial Sequence
  Description of Artificial Sequence: Synthetic oligonucleotide
  Antisense strand to SEQ ID NO: 1816299
ucucugggaacaagcuggg

SEQ ID NO: 1816301 - RNA, 19 nt, Artificial Sequence
  Description of Artificial Sequence: Synthetic oligonucleotide
  Sense strand starting at position 2602 of SEQ ID NO: 1563512
cuuguucccagagagcgau

SEQ ID NO: 1816302 - RNA, 19 nt, Artificial Sequence
  Description of Artificial Sequence: Synthetic oligonucleotide
  Antisense strand to SEQ ID NO: 1816301
aucgcucucugggaacaag

SEQ ID NO: 1816303 - RNA, 19 nt, Artificial Sequence
  Description of Artificial Sequence: Synthetic oligonucleotide
  Sense strand starting at position 2652 of SEQ ID NO: 1563512
guuagauugcguucccagu

SEQ ID NO: 1816304 - RNA, 19 nt, Artificial Sequence
  Description of Artificial Sequence: Synthetic oligonucleotide
  Antisense strand to SEQ ID NO: 1816303
acugggaacgcaaucuaac

SEQ ID NO: 1816305 - RNA, 19 nt, Artificial Sequence
  Description of Artificial Sequence: Synthetic oligonucleotide
  Sense strand starting at position 2654 of SEQ ID NO: 1563512
uagauugcguucccaguga

SEQ ID NO: 1816306 - RNA, 19 nt, Artificial Sequence
  Description of Artificial Sequence: Synthetic oligonucleotide
  Antisense strand to SEQ ID NO: 1816305
ucacugggaacgcaaucua

SEQ ID NO: 1816307 - RNA, 19 nt, Artificial Sequence
  Description of Artificial Sequence: Synthetic oligonucleotide
  Sense strand starting at position 2658 of SEQ ID NO: 1563512
uugcguucccagugaauau

SEQ ID NO: 1816308 - RNA, 19 nt, Artificial Sequence
  Description of Artificial Sequence: Synthetic oligonucleotide
  Antisense strand to SEQ ID NO: 1816307
auauucacugggaacgcaa

SEQ ID NO: 1816309 - RNA, 19 nt, Artificial Sequence
  Description of Artificial Sequence: Synthetic oligonucleotide
  Sense strand starting at position 2659 of SEQ ID NO: 1563512
ugcguucccagugaauaua

SEQ ID NO: 1816310 - RNA, 19 nt, Artificial Sequence
  Description of Artificial Sequence: Synthetic oligonucleotide
  Antisense strand to SEQ ID NO: 1816309
uauauucacugggaacgca

SEQ ID NO: 1816311 - RNA, 19 nt, Artificial Sequence
  Description of Artificial Sequence: Synthetic oligonucleotide
  Sense strand starting at position 2668 of SEQ ID NO: 1563512
agugaauauagcuaggugu

SEQ ID NO: 1816312 - RNA, 19 nt, Artificial Sequence
  Description of Artificial Sequence: Synthetic oligonucleotide
  Antisense strand to SEQ ID NO: 1816311
acaccuagcuauauucacu

SEQ ID NO: 1816313 - RNA, 19 nt, Artificial Sequence
  Description of Artificial Sequence: Synthetic oligonucleotide
  Sense strand starting at position 2672 of SEQ ID NO: 1563512
aauauagcuaggugucgua

SEQ ID NO: 1816314 - RNA, 19 nt, Artificial Sequence
  Description of Artificial Sequence: Synthetic oligonucleotide
  Antisense strand to SEQ ID NO: 1816313
uacgacaccuagcuauauu

SEQ ID NO: 1816315 - RNA, 19 nt, Artificial Sequence
  Description of Artificial Sequence: Synthetic oligonucleotide
  Sense strand starting at position 2767 of SEQ ID NO: 1563512
cucgauuaccgauaaaucg

SEQ ID NO: 1816316 - RNA, 19 nt, Artificial Sequence
  Description of Artificial Sequence: Synthetic oligonucleotide
  Antisense strand to SEQ ID NO: 1816315
cgauuuaucgguaaucgag

SEQ ID NO: 1816317 - RNA, 19 nt, Artificial Sequence
  Description of Artificial Sequence: Synthetic oligonucleotide
  Sense strand starting at position 2843 of SEQ ID NO: 1563512
gcaguugagugauuuguuu

SEQ ID NO: 1816318 - RNA, 19 nt, Artificial Sequence
  Description of Artificial Sequence: Synthetic oligonucleotide
  Antisense strand to SEQ ID NO: 1816317
aaacaaaucacucaacugc

SEQ ID NO: 1816319 - RNA, 19 nt, Artificial Sequence
  Description of Artificial Sequence: Synthetic oligonucleotide
  Sense strand starting at position 3033 of SEQ ID NO: 1563512
acuuuagaauacuuguaag

SEQ ID NO: 1816320 - RNA, 19 nt, Artificial Sequence
  Description of Artificial Sequence: Synthetic oligonucleotide
  Antisense strand to SEQ ID NO: 1816319
cuuacaaguauucuaaagu

SEQ ID NO: 1816321 - RNA, 19 nt, Artificial Sequence
  Description of Artificial Sequence: Synthetic oligonucleotide
  Sense strand starting at position 3036 of SEQ ID NO: 1563512
uuagaauacuuguaaguag

SEQ ID NO: 1816322 - RNA, 19 nt, Artificial Sequence
  Description of Artificial Sequence: Synthetic oligonucleotide
  Antisense strand to SEQ ID NO: 1816321
cuacuuacaaguauucuaa

SEQ ID NO: 1816323 - RNA, 19 nt, Artificial Sequence
  Description of Artificial Sequence: Synthetic oligonucleotide
  Sense strand starting at position 3039 of SEQ ID NO: 1563512
gaauacuuguaaguaguca

SEQ ID NO: 1816324 - RNA, 19 nt, Artificial Sequence
  Description of Artificial Sequence: Synthetic oligonucleotide
  Antisense strand to SEQ ID NO: 1816323
ugacuacuuacaaguauuc

SEQ ID NO: 1816325 - RNA, 19 nt, Artificial Sequence
  Description of Artificial Sequence: Synthetic oligonucleotide
  Sense strand starting at position 3043 of SEQ ID NO: 1563512
acuuguaaguagucaucaa

SEQ ID NO: 1816326 - RNA, 19 nt, Artificial Sequence
  Description of Artificial Sequence: Synthetic oligonucleotide
  Antisense strand to SEQ ID NO: 1816325
uugaugacuacuuacaagu

SEQ ID NO: 1816327 - RNA, 19 nt, Artificial Sequence
  Description of Artificial Sequence: Synthetic oligonucleotide
  Sense strand starting at position 3047 of SEQ ID NO: 1563512
guaaguagucaucaaguua

SEQ ID NO: 1816328 - RNA, 19 nt, Artificial Sequence
  Description of Artificial Sequence: Synthetic oligonucleotide
  Antisense strand to SEQ ID NO: 1816327
uaacuugaugacuacuuac

SEQ ID NO: 1816329 - RNA, 19 nt, Artificial Sequence
  Description of Artificial Sequence: Synthetic oligonucleotide
  Sense strand starting at position 3054 of SEQ ID NO: 1563512
gucaucaaguuagcuuauu

SEQ ID NO: 1816330 - RNA, 19 nt, Artificial Sequence
  Description of Artificial Sequence: Synthetic oligonucleotide
  Antisense strand to SEQ ID NO: 1816329
aauaagcuaacuugaugac

SEQ ID NO: 1816331 - RNA, 19 nt, Artificial Sequence
  Description of Artificial Sequence: Synthetic oligonucleotide
  Sense strand starting at position 201 of SEQ ID NO: 1563513
ggaaguccucccugauaau

SEQ ID NO: 1816332 - RNA, 19 nt, Artificial Sequence
  Description of Artificial Sequence: Synthetic oligonucleotide
  Antisense strand to SEQ ID NO: 1816331
auuaucagggaggacuucc

SEQ ID NO: 1816333 - RNA, 19 nt, Artificial Sequence
  Description of Artificial Sequence: Synthetic oligonucleotide
  Sense strand starting at position 281 of SEQ ID NO: 1563513
auuaaugguugagaaagca

SEQ ID NO: 1816334 - RNA, 19 nt, Artificial Sequence
  Description of Artificial Sequence: Synthetic oligonucleotide
  Antisense strand to SEQ ID NO: 1816333
ugcuuucucaaccauuaau

SEQ ID NO: 1816335 - RNA, 19 nt, Artificial Sequence
  Description of Artificial Sequence: Synthetic oligonucleotide
  Sense strand starting at position 347 of SEQ ID NO: 1563513
gcauucuugcugggcauau

SEQ ID NO: 1816336 - RNA, 19 nt, Artificial Sequence
  Description of Artificial Sequence: Synthetic oligonucleotide
  Antisense strand to SEQ ID NO: 1816335
auaugcccagcaagaaugc

SEQ ID NO: 1816337 - RNA, 19 nt, Artificial Sequence
  Description of Artificial Sequence: Synthetic oligonucleotide
  Sense strand starting at position 613 of SEQ ID NO: 1563513
aaucgagaaguccaagguu

SEQ ID NO: 1816338 - RNA, 19 nt, Artificial Sequence
  Description of Artificial Sequence: Synthetic oligonucleotide
  Antisense strand to SEQ ID NO: 1816337
aaccuuggacuucucgauu

SEQ ID NO: 1816339 - RNA, 19 nt, Artificial Sequence
  Description of Artificial Sequence: Synthetic oligonucleotide
  Sense strand starting at position 616 of SEQ ID NO: 1563513
cgagaaguccaagguuaac

SEQ ID NO: 1816340 - RNA, 19 nt, Artificial Sequence
  Description of Artificial Sequence: Synthetic oligonucleotide
  Antisense strand to SEQ ID NO: 1816339
guuaaccuuggacuucucg

SEQ ID NO: 1816341 - RNA, 19 nt, Artificial Sequence
  Description of Artificial Sequence: Synthetic oligonucleotide
  Sense strand starting at position 628 of SEQ ID NO: 1563513
gguuaacuguucuuuccca

SEQ ID NO: 1816342 - RNA, 19 nt, Artificial Sequence
  Description of Artificial Sequence: Synthetic oligonucleotide
  Antisense strand to SEQ ID NO: 1816341
ugggaaagaacaguuaacc

SEQ ID NO: 1816343 - RNA, 19 nt, Artificial Sequence
  Description of Artificial Sequence: Synthetic oligonucleotide
  Sense strand starting at position 850 of SEQ ID NO: 1563513
aggugacucuggucaggaa

SEQ ID NO: 1816344 - RNA, 19 nt, Artificial Sequence
  Description of Artificial Sequence: Synthetic oligonucleotide
  Antisense strand to SEQ ID NO: 1816343
uuccugaccagagucaccu

SEQ ID NO: 1816345 - RNA, 19 nt, Artificial Sequence
  Description of Artificial Sequence: Synthetic oligonucleotide
  Sense strand starting at position 880 of SEQ ID NO: 1563513
ggcauacgguggugagaaa

SEQ ID NO: 1816346 - RNA, 19 nt, Artificial Sequence
  Description of Artificial Sequence: Synthetic oligonucleotide
  Antisense strand to SEQ ID NO: 1816345
uuucucaccaccguaugcc

SEQ ID NO: 1816347 - RNA, 19 nt, Artificial Sequence
  Description of Artificial Sequence: Synthetic oligonucleotide
  Sense strand starting at position 1155 of SEQ ID NO: 1563513
gcgauccaguucuccacau

SEQ ID NO: 1816348 - RNA, 19 nt, Artificial Sequence
  Description of Artificial Sequence: Synthetic oligonucleotide
  Antisense strand to SEQ ID NO: 1816347
auguggagaacuggaucgc

SEQ ID NO: 1816349 - RNA, 19 nt, Artificial Sequence
  Description of Artificial Sequence: Synthetic oligonucleotide
  Sense strand starting at position 2319 of SEQ ID NO: 1563513
cgaggcaucucgguggaaa

SEQ ID NO: 1816350 - RNA, 19 nt, Artificial Sequence
  Description of Artificial Sequence: Synthetic oligonucleotide
  Antisense strand to SEQ ID NO: 1816349
uuuccaccgagaugccucg

SEQ ID NO: 1816351 - RNA, 19 nt, Artificial Sequence
  Description of Artificial Sequence: Synthetic oligonucleotide
  Sense strand starting at position 2320 of SEQ ID NO: 1563513
gaggcaucucgguggaaac

SEQ ID NO: 1816352 - RNA, 19 nt, Artificial Sequence
  Description of Artificial Sequence: Synthetic oligonucleotide
  Antisense strand to SEQ ID NO: 1816351
guuuccaccgagaugccuc

SEQ ID NO: 1816353 - RNA, 19 nt, Artificial Sequence
  Description of Artificial Sequence: Synthetic oligonucleotide
  Sense strand starting at position 2321 of SEQ ID NO: 1563513
aggcaucucgguggaaaca

SEQ ID NO: 1816354 - RNA, 19 nt, Artificial Sequence
  Description of Artificial Sequence: Synthetic oligonucleotide
  Antisense strand to SEQ ID NO: 1816353
uguuuccaccgagaugccu

SEQ ID NO: 1816355 - RNA, 19 nt, Artificial Sequence
  Description of Artificial Sequence: Synthetic oligonucleotide
  Sense strand starting at position 2686 of SEQ ID NO: 1563513
cccugcgcuccacauuauu

SEQ ID NO: 1816356 - RNA, 19 nt, Artificial Sequence
  Description of Artificial Sequence: Synthetic oligonucleotide
  Antisense strand to SEQ ID NO: 1816355
aauaauguggagcgcaggg

SEQ ID NO: 1816357 - RNA, 19 nt, Artificial Sequence
  Description of Artificial Sequence: Synthetic oligonucleotide
  Sense strand starting at position 2762 of SEQ ID NO: 1563513
gcgagaugcccagaggaua

SEQ ID NO: 1816358 - RNA, 19 nt, Artificial Sequence
  Description of Artificial Sequence: Synthetic oligonucleotide
  Antisense strand to SEQ ID NO: 1816357
uauccucugggcaucucgc

SEQ ID NO: 1816359 - RNA, 19 nt, Artificial Sequence
  Description of Artificial Sequence: Synthetic oligonucleotide
  Sense strand starting at position 2807 of SEQ ID NO: 1563513
cgcagaauccugggcguaa

SEQ ID NO: 1816360 - RNA, 19 nt, Artificial Sequence
  Description of Artificial Sequence: Synthetic oligonucleotide
  Antisense strand to SEQ ID NO: 1816359
uuacgcccaggauucugcg

SEQ ID NO: 1816361 - RNA, 19 nt, Artificial Sequence
  Description of Artificial Sequence: Synthetic oligonucleotide
  Sense strand starting at position 2808 of SEQ ID NO: 1563513
gcagaauccugggcguaac

SEQ ID NO: 1816362 - RNA, 19 nt, Artificial Sequence
  Description of Artificial Sequence: Synthetic oligonucleotide
  Antisense strand to SEQ ID NO: 1816361
guuacgcccaggauucugc

SEQ ID NO: 1816363 - RNA, 19 nt, Artificial Sequence
  Description of Artificial Sequence: Synthetic oligonucleotide
  Sense strand starting at position 2809 of SEQ ID NO: 1563513
cagaauccugggcguaaca

SEQ ID NO: 1816364 - RNA, 19 nt, Artificial Sequence
  Description of Artificial Sequence: Synthetic oligonucleotide
  Antisense strand to SEQ ID NO: 1816363
uguuacgcccaggauucug

SEQ ID NO: 1816365 - RNA, 19 nt, Artificial Sequence
  Description of Artificial Sequence: Synthetic oligonucleotide
  Sense strand starting at position 2839 of SEQ ID NO: 1563513
uggagaguuucggcgacuu

SEQ ID NO: 1816366 - RNA, 19 nt, Artificial Sequence
  Description of Artificial Sequence: Synthetic oligonucleotide
  Antisense strand to SEQ ID NO: 1816365
aagucgccgaaacucucca

SEQ ID NO: 1816367 - RNA, 19 nt, Artificial Sequence
  Description of Artificial Sequence: Synthetic oligonucleotide
  Sense strand starting at position 2841 of SEQ ID NO: 1563513
gagaguuucggcgacuucu

SEQ ID NO: 1816368 - RNA, 19 nt, Artificial Sequence
  Description of Artificial Sequence: Synthetic oligonucleotide
  Antisense strand to SEQ ID NO: 1816367
agaagucgccgaaacucuc

SEQ ID NO: 1816369 - RNA, 19 nt, Artificial Sequence
  Description of Artificial Sequence: Synthetic oligonucleotide
  Sense strand starting at position 2876 of SEQ ID NO: 1563513
aggacuccugcgggaaguu

SEQ ID NO: 1816370 - RNA, 19 nt, Artificial Sequence
  Description of Artificial Sequence: Synthetic oligonucleotide
  Antisense strand to SEQ ID NO: 1816369
aacuucccgcaggaguccu

SEQ ID NO: 1816371 - RNA, 19 nt, Artificial Sequence
  Description of Artificial Sequence: Synthetic oligonucleotide
  Sense strand starting at position 2903 of SEQ ID NO: 1563513
ggacgcuggcaagauauga

SEQ ID NO: 1816372 - RNA, 19 nt, Artificial Sequence
  Description of Artificial Sequence: Synthetic oligonucleotide
  Antisense strand to SEQ ID NO: 1816371
ucauaucuugccagcgucc

SEQ ID NO: 1816373 - RNA, 19 nt, Artificial Sequence
  Description of Artificial Sequence: Synthetic oligonucleotide
  Sense strand starting at position 2907 of SEQ ID NO: 1563513
gcuggcaagauaugaguca

SEQ ID NO: 1816374 - RNA, 19 nt, Artificial Sequence
  Description of Artificial Sequence: Synthetic oligonucleotide
  Antisense strand to SEQ ID NO: 1816373
ugacucauaucuugccagc

SEQ ID NO: 1816375 - RNA, 19 nt, Artificial Sequence
  Description of Artificial Sequence: Synthetic oligonucleotide
  Sense strand starting at position 3134 of SEQ ID NO: 1563513
cuacgugggucugcugaua

SEQ ID NO: 1816376 - RNA, 19 nt, Artificial Sequence
  Description of Artificial Sequence: Synthetic oligonucleotide
  Antisense strand to SEQ ID NO: 1816375
uaucagcagacccacguag

SEQ ID NO: 1816377 - RNA, 19 nt, Artificial Sequence
  Description of Artificial Sequence: Synthetic oligonucleotide
  Sense strand starting at position 3137 of SEQ ID NO: 1563513
cgugggucugcugauagga

SEQ ID NO: 1816378 - RNA, 19 nt, Artificial Sequence
  Description of Artificial Sequence: Synthetic oligonucleotide
  Antisense strand to SEQ ID NO: 1816377
uccuaucagcagacccacg

SEQ ID NO: 1816379 - RNA, 19 nt, Artificial Sequence
  Description of Artificial Sequence: Synthetic oligonucleotide
  Sense strand starting at position 3163 of SEQ ID NO: 1563513
gagagagugcgcugggaau

SEQ ID NO: 1816380 - RNA, 19 nt, Artificial Sequence
  Description of Artificial Sequence: Synthetic oligonucleotide
  Antisense strand to SEQ ID NO: 1816379
auucccagcgcacucucuc

SEQ ID NO: 1816381 - RNA, 19 nt, Artificial Sequence
  Description of Artificial Sequence: Synthetic oligonucleotide
  Sense strand starting at position 3175 of SEQ ID NO: 1563513
ugggaauuguuacucugua

SEQ ID NO: 1816382 - RNA, 19 nt, Artificial Sequence
  Description of Artificial Sequence: Synthetic oligonucleotide
  Antisense strand to SEQ ID NO: 1816381
uacagaguaacaauuccca

SEQ ID NO: 1816383 - RNA, 19 nt, Artificial Sequence
  Description of Artificial Sequence: Synthetic oligonucleotide
  Sense strand starting at position 3176 of SEQ ID NO: 1563513
gggaauuguuacucuguau

SEQ ID NO: 1816384 - RNA, 19 nt, Artificial Sequence
  Description of Artificial Sequence: Synthetic oligonucleotide
  Antisense strand to SEQ ID NO: 1816383
auacagaguaacaauuccc

SEQ ID NO: 1816385 - RNA, 19 nt, Artificial Sequence
  Description of Artificial Sequence: Synthetic oligonucleotide
  Sense strand starting at position 3180 of SEQ ID NO: 1563513
auuguuacucuguauaguu

SEQ ID NO: 1816386 - RNA, 19 nt, Artificial Sequence
  Description of Artificial Sequence: Synthetic oligonucleotide
  Antisense strand to SEQ ID NO: 1816385
aacuauacagaguaacaau

SEQ ID NO: 1816387 - RNA, 19 nt, Artificial Sequence
  Description of Artificial Sequence: Synthetic oligonucleotide
  Sense strand starting at position 3230 of SEQ ID NO: 1563513
aggccuaagccuuggcaga

SEQ ID NO: 1816388 - RNA, 19 nt, Artificial Sequence
  Description of Artificial Sequence: Synthetic oligonucleotide
  Antisense strand to SEQ ID NO: 1816387
ucugccaaggcuuaggccu

SEQ ID NO: 1816389 - RNA, 19 nt, Artificial Sequence
  Description of Artificial Sequence: Synthetic oligonucleotide
  Sense strand starting at position 3231 of SEQ ID NO: 1563513
ggccuaagccuuggcagaa

SEQ ID NO: 1816390 - RNA, 19 nt, Artificial Sequence
  Description of Artificial Sequence: Synthetic oligonucleotide
  Antisense strand to SEQ ID NO: 1816389
uucugccaaggcuuaggcc

SEQ ID NO: 1816391 - RNA, 19 nt, Artificial Sequence
  Description of Artificial Sequence: Synthetic oligonucleotide
  Sense strand starting at position 3232 of SEQ ID NO: 1563513
gccuaagccuuggcagaaa

SEQ ID NO: 1816392 - RNA, 19 nt, Artificial Sequence
  Description of Artificial Sequence: Synthetic oligonucleotide
  Antisense strand to SEQ ID NO: 1816391
uuucugccaaggcuuaggc

SEQ ID NO: 1816393 - RNA, 19 nt, Artificial Sequence
  Description of Artificial Sequence: Synthetic oligonucleotide
  Sense strand starting at position 3286 of SEQ ID NO: 1563513
uucuaaagggcuugagguu

SEQ ID NO: 1816394 - RNA, 19 nt, Artificial Sequence
  Description of Artificial Sequence: Synthetic oligonucleotide
  Antisense strand to SEQ ID NO: 1816393
aaccucaagcccuuuagaa

SEQ ID NO: 1816395 - RNA, 19 nt, Artificial Sequence
  Description of Artificial Sequence: Synthetic oligonucleotide
  Sense strand starting at position 3337 of SEQ ID NO: 1563513
cuucuccugccuugggaaa

SEQ ID NO: 1816396 - RNA, 19 nt, Artificial Sequence
  Description of Artificial Sequence: Synthetic oligonucleotide
  Antisense strand to SEQ ID NO: 1816395
uuucccaaggcaggagaag

SEQ ID NO: 1816397 - RNA, 19 nt, Artificial Sequence
  Description of Artificial Sequence: Synthetic oligonucleotide
  Sense strand starting at position 3394 of SEQ ID NO: 1563513
gguggaugauggccacaaa

SEQ ID NO: 1816398 - RNA, 19 nt, Artificial Sequence
  Description of Artificial Sequence: Synthetic oligonucleotide
  Antisense strand to SEQ ID NO: 1816397
uuuguggccaucauccacc

SEQ ID NO: 1816399 - RNA, 19 nt, Artificial Sequence
  Description of Artificial Sequence: Synthetic oligonucleotide
  Sense strand starting at position 3437 of SEQ ID NO: 1563513
aaggaaagauccuguggcu

SEQ ID NO: 1816400 - RNA, 19 nt, Artificial Sequence
  Description of Artificial Sequence: Synthetic oligonucleotide
  Antisense strand to SEQ ID NO: 1816399
agccacaggaucuuuccuu

SEQ ID NO: 1816401 - RNA, 19 nt, Artificial Sequence
  Description of Artificial Sequence: Synthetic oligonucleotide
  Sense strand starting at position 3474 of SEQ ID NO: 1563513
cugagaccuccuggauacu

SEQ ID NO: 1816402 - RNA, 19 nt, Artificial Sequence
  Description of Artificial Sequence: Synthetic oligonucleotide
  Antisense strand to SEQ ID NO: 1816401
aguauccaggaggucucag

SEQ ID NO: 1816403 - RNA, 19 nt, Artificial Sequence
  Description of Artificial Sequence: Synthetic oligonucleotide
  Sense strand starting at position 3480 of SEQ ID NO: 1563513
ccuccuggauacucagaau

SEQ ID NO: 1816404 - RNA, 19 nt, Artificial Sequence
  Description of Artificial Sequence: Synthetic oligonucleotide
  Antisense strand to SEQ ID NO: 1816403
auucugaguauccaggagg

SEQ ID NO: 1816405 - RNA, 19 nt, Artificial Sequence
  Description of Artificial Sequence: Synthetic oligonucleotide
  Sense strand starting at position 3483 of SEQ ID NO: 1563513
ccuggauacucagaaucaa

SEQ ID NO: 1816406 - RNA, 19 nt, Artificial Sequence
  Description of Artificial Sequence: Synthetic oligonucleotide
  Antisense strand to SEQ ID NO: 1816405
uugauucugaguauccagg

SEQ ID NO: 1816407 - RNA, 19 nt, Artificial Sequence
  Description of Artificial Sequence: Synthetic oligonucleotide
  Sense strand starting at position 3731 of SEQ ID NO: 1563513
agagcucaguggucuguaa

SEQ ID NO: 1816408 - RNA, 19 nt, Artificial Sequence
  Description of Artificial Sequence: Synthetic oligonucleotide
  Antisense strand to SEQ ID NO: 1816407
uuacagaccacugagcucu

SEQ ID NO: 1816409 - RNA, 19 nt, Artificial Sequence
  Description of Artificial Sequence: Synthetic oligonucleotide
  Sense strand starting at position 3738 of SEQ ID NO: 1563513
aguggucuguaaccucaga

SEQ ID NO: 1816410 - RNA, 19 nt, Artificial Sequence
  Description of Artificial Sequence: Synthetic oligonucleotide
  Antisense strand to SEQ ID NO: 1816409
ucugagguuacagaccacu

SEQ ID NO: 1816411 - RNA, 19 nt, Artificial Sequence
  Description of Artificial Sequence: Synthetic oligonucleotide
  Sense strand starting at position 98 of SEQ ID NO: 1563514
gacagaagccacuguguca

SEQ ID NO: 1816412 - RNA, 19 nt, Artificial Sequence
  Description of Artificial Sequence: Synthetic oligonucleotide
  Antisense strand to SEQ ID NO: 1816411
ugacacaguggcuucuguc

SEQ ID NO: 1816413 - RNA, 19 nt, Artificial Sequence
  Description of Artificial Sequence: Synthetic oligonucleotide
  Sense strand starting at position 105 of SEQ ID NO: 1563514
gccacugugucaccacuua

SEQ ID NO: 1816414 - RNA, 19 nt, Artificial Sequence
  Description of Artificial Sequence: Synthetic oligonucleotide
  Antisense strand to SEQ ID NO: 1816413
uaaguggugacacaguggc

SEQ ID NO: 1816415 - RNA, 19 nt, Artificial Sequence
  Description of Artificial Sequence: Synthetic oligonucleotide
  Sense strand starting at position 177 of SEQ ID NO: 1563514
gccaguuccugagcaacca

SEQ ID NO: 1816416 - RNA, 19 nt, Artificial Sequence
  Description of Artificial Sequence: Synthetic oligonucleotide
  Antisense strand to SEQ ID NO: 1816415
ugguugcucaggaacuggc

SEQ ID NO: 1816417 - RNA, 19 nt, Artificial Sequence
  Description of Artificial Sequence: Synthetic oligonucleotide
  Sense strand starting at position 414 of SEQ ID NO: 1563514
ggaaguccucccugauaau

SEQ ID NO: 1816418 - RNA, 19 nt, Artificial Sequence
  Description of Artificial Sequence: Synthetic oligonucleotide
  Antisense strand to SEQ ID NO: 1816417
auuaucagggaggacuucc

SEQ ID NO: 1816419 - RNA, 19 nt, Artificial Sequence
  Description of Artificial Sequence: Synthetic oligonucleotide
  Sense strand starting at position 494 of SEQ ID NO: 1563514
auuaaugguugagaaagca

SEQ ID NO: 1816420 - RNA, 19 nt, Artificial Sequence
  Description of Artificial Sequence: Synthetic oligonucleotide
  Antisense strand to SEQ ID NO: 1816419
ugcuuucucaaccauuaau

SEQ ID NO: 1816421 - RNA, 19 nt, Artificial Sequence
  Description of Artificial Sequence: Synthetic oligonucleotide
  Sense strand starting at position 560 of SEQ ID NO: 1563514
gcauucuugcugggcauau

SEQ ID NO: 1816422 - RNA, 19 nt, Artificial Sequence
  Description of Artificial Sequence: Synthetic oligonucleotide
  Antisense strand to SEQ ID NO: 1816421
auaugcccagcaagaaugc

SEQ ID NO: 1816423 - RNA, 19 nt, Artificial Sequence
  Description of Artificial Sequence: Synthetic oligonucleotide
  Sense strand starting at position 826 of SEQ ID NO: 1563514
aaucgagaaguccaagguu

SEQ ID NO: 1816424 - RNA, 19 nt, Artificial Sequence
  Description of Artificial Sequence: Synthetic oligonucleotide
  Antisense strand to SEQ ID NO: 1816423
aaccuuggacuucucgauu

SEQ ID NO: 1816425 - RNA, 19 nt, Artificial Sequence
  Description of Artificial Sequence: Synthetic oligonucleotide
  Sense strand starting at position 829 of SEQ ID NO: 1563514
cgagaaguccaagguuaac

SEQ ID NO: 1816426 - RNA, 19 nt, Artificial Sequence
  Description of Artificial Sequence: Synthetic oligonucleotide
  Antisense strand to SEQ ID NO: 1816425
guuaaccuuggacuucucg

SEQ ID NO: 1816427 - RNA, 19 nt, Artificial Sequence
  Description of Artificial Sequence: Synthetic oligonucleotide
  Sense strand starting at position 841 of SEQ ID NO: 1563514
gguuaacuguucuuuccca

SEQ ID NO: 1816428 - RNA, 19 nt, Artificial Sequence
  Description of Artificial Sequence: Synthetic oligonucleotide
  Antisense strand to SEQ ID NO: 1816427
ugggaaagaacaguuaacc

SEQ ID NO: 1816429 - RNA, 19 nt, Artificial Sequence
  Description of Artificial Sequence: Synthetic oligonucleotide
  Sense strand starting at position 1063 of SEQ ID NO: 1563514
aggugacucuggucaggaa

SEQ ID NO: 1816430 - RNA, 19 nt, Artificial Sequence
  Description of Artificial Sequence: Synthetic oligonucleotide
  Antisense strand to SEQ ID NO: 1816429
uuccugaccagagucaccu

SEQ ID NO: 1816431 - RNA, 19 nt, Artificial Sequence
  Description of Artificial Sequence: Synthetic oligonucleotide
  Sense strand starting at position 1368 of SEQ ID NO: 1563514
gcgauccaguucuccacau

SEQ ID NO: 1816432 - RNA, 19 nt, Artificial Sequence
  Description of Artificial Sequence: Synthetic oligonucleotide
  Antisense strand to SEQ ID NO: 1816431
auguggagaacuggaucgc

SEQ ID NO: 1816433 - RNA, 19 nt, Artificial Sequence
  Description of Artificial Sequence: Synthetic oligonucleotide
  Sense strand starting at position 2532 of SEQ ID NO: 1563514
cgaggcaucucgguggaaa

SEQ ID NO: 1816434 - RNA, 19 nt, Artificial Sequence
  Description of Artificial Sequence: Synthetic oligonucleotide
  Antisense strand to SEQ ID NO: 1816433
uuuccaccgagaugccucg

SEQ ID NO: 1816435 - RNA, 19 nt, Artificial Sequence
  Description of Artificial Sequence: Synthetic oligonucleotide
  Sense strand starting at position 2533 of SEQ ID NO: 1563514
gaggcaucucgguggaaac

SEQ ID NO: 1816436 - RNA, 19 nt, Artificial Sequence
  Description of Artificial Sequence: Synthetic oligonucleotide
  Antisense strand to SEQ ID NO: 1816435
guuuccaccgagaugccuc

SEQ ID NO: 1816437 - RNA, 19 nt, Artificial Sequence
  Description of Artificial Sequence: Synthetic oligonucleotide
  Sense strand starting at position 2534 of SEQ ID NO: 1563514
aggcaucucgguggaaaca

SEQ ID NO: 1816438 - RNA, 19 nt, Artificial Sequence
  Description of Artificial Sequence: Synthetic oligonucleotide
  Antisense strand to SEQ ID NO: 1816437
uguuuccaccgagaugccu

SEQ ID NO: 1816439 - RNA, 19 nt, Artificial Sequence
  Description of Artificial Sequence: Synthetic oligonucleotide
  Sense strand starting at position 2899 of SEQ ID NO: 1563514
cccugcgcuccacauuauu

SEQ ID NO: 1816440 - RNA, 19 nt, Artificial Sequence
  Description of Artificial Sequence: Synthetic oligonucleotide
  Antisense strand to SEQ ID NO: 1816439
aauaauguggagcgcaggg

SEQ ID NO: 1816441 - RNA, 19 nt, Artificial Sequence
  Description of Artificial Sequence: Synthetic oligonucleotide
  Sense strand starting at position 2975 of SEQ ID NO: 1563514
gcgagaugcccagaggaua

SEQ ID NO: 1816442 - RNA, 19 nt, Artificial Sequence
  Description of Artificial Sequence: Synthetic oligonucleotide
  Antisense strand to SEQ ID NO: 1816441
uauccucugggcaucucgc

SEQ ID NO: 1816443 - RNA, 19 nt, Artificial Sequence
  Description of Artificial Sequence: Synthetic oligonucleotide
  Sense strand starting at position 3021 of SEQ ID NO: 1563514
gcagaauccugggcguaac

SEQ ID NO: 1816444 - RNA, 19 nt, Artificial Sequence
  Description of Artificial Sequence: Synthetic oligonucleotide
  Antisense strand to SEQ ID NO: 1816443
guuacgcccaggauucugc

SEQ ID NO: 1816445 - RNA, 19 nt, Artificial Sequence
  Description of Artificial Sequence: Synthetic oligonucleotide
  Sense strand starting at position 3022 of SEQ ID NO: 1563514
cagaauccugggcguaaca

SEQ ID NO: 1816446 - RNA, 19 nt, Artificial Sequence
  Description of Artificial Sequence: Synthetic oligonucleotide
  Antisense strand to SEQ ID NO: 1816445
uguuacgcccaggauucug

SEQ ID NO: 1816447 - RNA, 19 nt, Artificial Sequence
  Description of Artificial Sequence: Synthetic oligonucleotide
  Sense strand starting at position 3052 of SEQ ID NO: 1563514
uggagaguuucggcgacuu

SEQ ID NO: 1816448 - RNA, 19 nt, Artificial Sequence
  Description of Artificial Sequence: Synthetic oligonucleotide
  Antisense strand to SEQ ID NO: 1816447
aagucgccgaaacucucca

SEQ ID NO: 1816449 - RNA, 19 nt, Artificial Sequence
  Description of Artificial Sequence: Synthetic oligonucleotide
  Sense strand starting at position 3054 of SEQ ID NO: 1563514
gagaguuucggcgacuucu

SEQ ID NO: 1816450 - RNA, 19 nt, Artificial Sequence
  Description of Artificial Sequence: Synthetic oligonucleotide
  Antisense strand to SEQ ID NO: 1816449
agaagucgccgaaacucuc

SEQ ID NO: 1816451 - RNA, 19 nt, Artificial Sequence
  Description of Artificial Sequence: Synthetic oligonucleotide
  Sense strand starting at position 3089 of SEQ ID NO: 1563514
aggacuccugcgggaaguu

SEQ ID NO: 1816452 - RNA, 19 nt, Artificial Sequence
  Description of Artificial Sequence: Synthetic oligonucleotide
  Antisense strand to SEQ ID NO: 1816451
aacuucccgcaggaguccu

SEQ ID NO: 1816453 - RNA, 19 nt, Artificial Sequence
  Description of Artificial Sequence: Synthetic oligonucleotide
  Sense strand starting at position 3116 of SEQ ID NO: 1563514
ggacgcuggcaagauauga

SEQ ID NO: 1816454 - RNA, 19 nt, Artificial Sequence
  Description of Artificial Sequence: Synthetic oligonucleotide
  Antisense strand to SEQ ID NO: 1816453
ucauaucuugccagcgucc

SEQ ID NO: 1816455 - RNA, 19 nt, Artificial Sequence
  Description of Artificial Sequence: Synthetic oligonucleotide
  Sense strand starting at position 3120 of SEQ ID NO: 1563514
gcuggcaagauaugaguca

SEQ ID NO: 1816456 - RNA, 19 nt, Artificial Sequence
  Description of Artificial Sequence: Synthetic oligonucleotide
  Antisense strand to SEQ ID NO: 1816455
ugacucauaucuugccagc

SEQ ID NO: 1816457 - RNA, 19 nt, Artificial Sequence
  Description of Artificial Sequence: Synthetic oligonucleotide
  Sense strand starting at position 3347 of SEQ ID NO: 1563514
cuacgugggucugcugaua

SEQ ID NO: 1816458 - RNA, 19 nt, Artificial Sequence
  Description of Artificial Sequence: Synthetic oligonucleotide
  Antisense strand to SEQ ID NO: 1816457
uaucagcagacccacguag

SEQ ID NO: 1816459 - RNA, 19 nt, Artificial Sequence
  Description of Artificial Sequence: Synthetic oligonucleotide
  Sense strand starting at position 3350 of SEQ ID NO: 1563514
cgugggucugcugauagga

SEQ ID NO: 1816460 - RNA, 19 nt, Artificial Sequence
  Description of Artificial Sequence: Synthetic oligonucleotide
  Antisense strand to SEQ ID NO: 1816459
uccuaucagcagacccacg

SEQ ID NO: 1816461 - RNA, 19 nt, Artificial Sequence
  Description of Artificial Sequence: Synthetic oligonucleotide
  Sense strand starting at position 3376 of SEQ ID NO: 1563514
gagagagugcgcugggaau

SEQ ID NO: 1816462 - RNA, 19 nt, Artificial Sequence
  Description of Artificial Sequence: Synthetic oligonucleotide
  Antisense strand to SEQ ID NO: 1816461
auucccagcgcacucucuc

SEQ ID NO: 1816463 - RNA, 19 nt, Artificial Sequence
  Description of Artificial Sequence: Synthetic oligonucleotide
  Sense strand starting at position 3388 of SEQ ID NO: 1563514
ugggaauuguuacucugua

SEQ ID NO: 1816464 - RNA, 19 nt, Artificial Sequence
  Description of Artificial Sequence: Synthetic oligonucleotide
  Antisense strand to SEQ ID NO: 1816463
uacagaguaacaauuccca

SEQ ID NO: 1816465 - RNA, 19 nt, Artificial Sequence
  Description of Artificial Sequence: Synthetic oligonucleotide
  Sense strand starting at position 3389 of SEQ ID NO: 1563514
gggaauuguuacucuguau

SEQ ID NO: 1816466 - RNA, 19 nt, Artificial Sequence
  Description of Artificial Sequence: Synthetic oligonucleotide
  Antisense strand to SEQ ID NO: 1816465
auacagaguaacaauuccc

SEQ ID NO: 1816467 - RNA, 19 nt, Artificial Sequence
  Description of Artificial Sequence: Synthetic oligonucleotide
  Sense strand starting at position 3393 of SEQ ID NO: 1563514
auuguuacucuguauaguu

SEQ ID NO: 1816468 - RNA, 19 nt, Artificial Sequence
  Description of Artificial Sequence: Synthetic oligonucleotide
  Antisense strand to SEQ ID NO: 1816467
aacuauacagaguaacaau

SEQ ID NO: 1816469 - RNA, 19 nt, Artificial Sequence
  Description of Artificial Sequence: Synthetic oligonucleotide
  Sense strand starting at position 3443 of SEQ ID NO: 1563514
aggccuaagccuuggcaga

SEQ ID NO: 1816470 - RNA, 19 nt, Artificial Sequence
  Description of Artificial Sequence: Synthetic oligonucleotide
  Antisense strand to SEQ ID NO: 1816469
ucugccaaggcuuaggccu

SEQ ID NO: 1816471 - RNA, 19 nt, Artificial Sequence
  Description of Artificial Sequence: Synthetic oligonucleotide
  Sense strand starting at position 3444 of SEQ ID NO: 1563514
ggccuaagccuuggcagaa

SEQ ID NO: 1816472 - RNA, 19 nt, Artificial Sequence
  Description of Artificial Sequence: Synthetic oligonucleotide
  Antisense strand to SEQ ID NO: 1816471
uucugccaaggcuuaggcc

SEQ ID NO: 1816473 - RNA, 19 nt, Artificial Sequence
  Description of Artificial Sequence: Synthetic oligonucleotide
  Sense strand starting at position 3445 of SEQ ID NO: 1563514
gccuaagccuuggcagaaa

SEQ ID NO: 1816474 - RNA, 19 nt, Artificial Sequence
  Description of Artificial Sequence: Synthetic oligonucleotide
  Antisense strand to SEQ ID NO: 1816473
uuucugccaaggcuuaggc

SEQ ID NO: 1816475 - RNA, 19 nt, Artificial Sequence
  Description of Artificial Sequence: Synthetic oligonucleotide
  Sense strand starting at position 3499 of SEQ ID NO: 1563514
uucuaaagggcuugagguu

SEQ ID NO: 1816476 - RNA, 19 nt, Artificial Sequence
  Description of Artificial Sequence: Synthetic oligonucleotide
  Antisense strand to SEQ ID NO: 1816475
aaccucaagcccuuuagaa

SEQ ID NO: 1816477 - RNA, 19 nt, Artificial Sequence
  Description of Artificial Sequence: Synthetic oligonucleotide
  Sense strand starting at position 3550 of SEQ ID NO: 1563514
cuucuccugccuugggaaa

SEQ ID NO: 1816478 - RNA, 19 nt, Artificial Sequence
  Description of Artificial Sequence: Synthetic oligonucleotide
  Antisense strand to SEQ ID NO: 1816477
uuucccaaggcaggagaag

SEQ ID NO: 1816479 - RNA, 19 nt, Artificial Sequence
  Description of Artificial Sequence: Synthetic oligonucleotide
  Sense strand starting at position 3607 of SEQ ID NO: 1563514
gguggaugauggccacaaa

SEQ ID NO: 1816480 - RNA, 19 nt, Artificial Sequence
  Description of Artificial Sequence: Synthetic oligonucleotide
  Antisense strand to SEQ ID NO: 1816479
uuuguggccaucauccacc

SEQ ID NO: 1816481 - RNA, 19 nt, Artificial Sequence
  Description of Artificial Sequence: Synthetic oligonucleotide
  Sense strand starting at position 3687 of SEQ ID NO: 1563514
cugagaccuccuggauacu

SEQ ID NO: 1816482 - RNA, 19 nt, Artificial Sequence
  Description of Artificial Sequence: Synthetic oligonucleotide
  Antisense strand to SEQ ID NO: 1816481
aguauccaggaggucucag

SEQ ID NO: 1816483 - RNA, 19 nt, Artificial Sequence
  Description of Artificial Sequence: Synthetic oligonucleotide
  Sense strand starting at position 3693 of SEQ ID NO: 1563514
ccuccuggauacucagaau

SEQ ID NO: 1816484 - RNA, 19 nt, Artificial Sequence
  Description of Artificial Sequence: Synthetic oligonucleotide
  Antisense strand to SEQ ID NO: 1816483
auucugaguauccaggagg

SEQ ID NO: 1816485 - RNA, 19 nt, Artificial Sequence
  Description of Artificial Sequence: Synthetic oligonucleotide
  Sense strand starting at position 3696 of SEQ ID NO: 1563514
ccuggauacucagaaucaa

SEQ ID NO: 1816486 - RNA, 19 nt, Artificial Sequence
  Description of Artificial Sequence: Synthetic oligonucleotide
  Antisense strand to SEQ ID NO: 1816485
uugauucugaguauccagg

SEQ ID NO: 1816487 - RNA, 19 nt, Artificial Sequence
  Description of Artificial Sequence: Synthetic oligonucleotide
  Sense strand starting at position 3944 of SEQ ID NO: 1563514
agagcucaguggucuguaa

SEQ ID NO: 1816488 - RNA, 19 nt, Artificial Sequence
  Description of Artificial Sequence: Synthetic oligonucleotide
  Antisense strand to SEQ ID NO: 1816487
uuacagaccacugagcucu

SEQ ID NO: 1816489 - RNA, 19 nt, Artificial Sequence
  Description of Artificial Sequence: Synthetic oligonucleotide
  Sense strand starting at position 3951 of SEQ ID NO: 1563514
aguggucuguaaccucaga

SEQ ID NO: 1816490 - RNA, 19 nt, Artificial Sequence
  Description of Artificial Sequence: Synthetic oligonucleotide
  Antisense strand to SEQ ID NO: 1816489
ucugagguuacagaccacu

SEQ ID NO: 1816491 - RNA, 19 nt, Artificial Sequence
  Description of Artificial Sequence: Synthetic oligonucleotide
  Sense strand starting at position 21 of SEQ ID NO: 1563515
ggcccaugccugcuauguu

SEQ ID NO: 1816492 - RNA, 19 nt, Artificial Sequence
  Description of Artificial Sequence: Synthetic oligonucleotide
  Antisense strand to SEQ ID NO: 1816491
aacauagcaggcaugggcc

SEQ ID NO: 1816493 - RNA, 19 nt, Artificial Sequence
  Description of Artificial Sequence: Synthetic oligonucleotide
  Sense strand starting at position 101 of SEQ ID NO: 1563515
gcgguaaugcuagaaaggu

SEQ ID NO: 1816494 - RNA, 19 nt, Artificial Sequence
  Description of Artificial Sequence: Synthetic oligonucleotide
  Antisense strand to SEQ ID NO: 1816493
accuuucuagcauuaccgc

SEQ ID NO: 1816495 - RNA, 19 nt, Artificial Sequence
  Description of Artificial Sequence: Synthetic oligonucleotide
  Sense strand starting at position 110 of SEQ ID NO: 1563515
cuagaaagguuacuuguuu

SEQ ID NO: 1816496 - RNA, 19 nt, Artificial Sequence
  Description of Artificial Sequence: Synthetic oligonucleotide
  Antisense strand to SEQ ID NO: 1816495
aaacaaguaaccuuucuag

SEQ ID NO: 1816497 - RNA, 19 nt, Artificial Sequence
  Description of Artificial Sequence: Synthetic oligonucleotide
  Sense strand starting at position 165 of SEQ ID NO: 1563515
aagggauucuaguucugau

SEQ ID NO: 1816498 - RNA, 19 nt, Artificial Sequence
  Description of Artificial Sequence: Synthetic oligonucleotide
  Antisense strand to SEQ ID NO: 1816497
aucagaacuagaaucccuu

SEQ ID NO: 1816499 - RNA, 19 nt, Artificial Sequence
  Description of Artificial Sequence: Synthetic oligonucleotide
  Sense strand starting at position 223 of SEQ ID NO: 1563515
gugguuaaaucacucaucu

SEQ ID NO: 1816500 - RNA, 19 nt, Artificial Sequence
  Description of Artificial Sequence: Synthetic oligonucleotide
  Antisense strand to SEQ ID NO: 1816499
agaugagugauuuaaccac

SEQ ID NO: 1816501 - RNA, 19 nt, Artificial Sequence
  Description of Artificial Sequence: Synthetic oligonucleotide
  Sense strand starting at position 451 of SEQ ID NO: 1563515
gccaccuuugaguaaggaa

SEQ ID NO: 1816502 - RNA, 19 nt, Artificial Sequence
  Description of Artificial Sequence: Synthetic oligonucleotide
  Antisense strand to SEQ ID NO: 1816501
uuccuuacucaaagguggc

SEQ ID NO: 1816503 - RNA, 19 nt, Artificial Sequence
  Description of Artificial Sequence: Synthetic oligonucleotide
  Sense strand starting at position 454 of SEQ ID NO: 1563515
accuuugaguaaggaauuu

SEQ ID NO: 1816504 - RNA, 19 nt, Artificial Sequence
  Description of Artificial Sequence: Synthetic oligonucleotide
  Antisense strand to SEQ ID NO: 1816503
aaauuccuuacucaaaggu

SEQ ID NO: 1816505 - RNA, 19 nt, Artificial Sequence
  Description of Artificial Sequence: Synthetic oligonucleotide
  Sense strand starting at position 546 of SEQ ID NO: 1563515
augaaacacucugccugau

SEQ ID NO: 1816506 - RNA, 19 nt, Artificial Sequence
  Description of Artificial Sequence: Synthetic oligonucleotide
  Antisense strand to SEQ ID NO: 1816505
aucaggcagaguguuucau

SEQ ID NO: 1816507 - RNA, 19 nt, Artificial Sequence
  Description of Artificial Sequence: Synthetic oligonucleotide
  Sense strand starting at position 718 of SEQ ID NO: 1563515
cguacagugcuccaucaca

SEQ ID NO: 1816508 - RNA, 19 nt, Artificial Sequence
  Description of Artificial Sequence: Synthetic oligonucleotide
  Antisense strand to SEQ ID NO: 1816507
ugugauggagcacuguacg

SEQ ID NO: 1816509 - RNA, 19 nt, Artificial Sequence
  Description of Artificial Sequence: Synthetic oligonucleotide
  Sense strand starting at position 1152 of SEQ ID NO: 1563515
gggcaauggacugauagcu

SEQ ID NO: 1816510 - RNA, 19 nt, Artificial Sequence
  Description of Artificial Sequence: Synthetic oligonucleotide
  Antisense strand to SEQ ID NO: 1816509
agcuaucaguccauugccc

SEQ ID NO: 1816511 - RNA, 19 nt, Artificial Sequence
  Description of Artificial Sequence: Synthetic oligonucleotide
  Sense strand starting at position 1166 of SEQ ID NO: 1563515
uagcuaaagggacgugaau

SEQ ID NO: 1816512 - RNA, 19 nt, Artificial Sequence
  Description of Artificial Sequence: Synthetic oligonucleotide
  Antisense strand to SEQ ID NO: 1816511
auucacgucccuuuagcua

SEQ ID NO: 1816513 - RNA, 19 nt, Artificial Sequence
  Description of Artificial Sequence: Synthetic oligonucleotide
  Sense strand starting at position 1304 of SEQ ID NO: 1563515
cagguagacucacuguuaa

SEQ ID NO: 1816514 - RNA, 19 nt, Artificial Sequence
  Description of Artificial Sequence: Synthetic oligonucleotide
  Antisense strand to SEQ ID NO: 1816513
uuaacagugagucuaccug

SEQ ID NO: 1816515 - RNA, 19 nt, Artificial Sequence
  Description of Artificial Sequence: Synthetic oligonucleotide
  Sense strand starting at position 1397 of SEQ ID NO: 1563515
acggacgggucuccugaaa

SEQ ID NO: 1816516 - RNA, 19 nt, Artificial Sequence
  Description of Artificial Sequence: Synthetic oligonucleotide
  Antisense strand to SEQ ID NO: 1816515
uuucaggagacccguccgu

SEQ ID NO: 1816517 - RNA, 19 nt, Artificial Sequence
  Description of Artificial Sequence: Synthetic oligonucleotide
  Sense strand starting at position 1481 of SEQ ID NO: 1563515
aggcuagcucccuauaagu

SEQ ID NO: 1816518 - RNA, 19 nt, Artificial Sequence
  Description of Artificial Sequence: Synthetic oligonucleotide
  Antisense strand to SEQ ID NO: 1816517
acuuauagggagcuagccu

SEQ ID NO: 1816519 - RNA, 19 nt, Artificial Sequence
  Description of Artificial Sequence: Synthetic oligonucleotide
  Sense strand starting at position 1590 of SEQ ID NO: 1563515
cgcagaccgauccauuaua

SEQ ID NO: 1816520 - RNA, 19 nt, Artificial Sequence
  Description of Artificial Sequence: Synthetic oligonucleotide
  Antisense strand to SEQ ID NO: 1816519
uauaauggaucggucugcg

SEQ ID NO: 1816521 - RNA, 19 nt, Artificial Sequence
  Description of Artificial Sequence: Synthetic oligonucleotide
  Sense strand starting at position 1653 of SEQ ID NO: 1563515
gacgaagggcuugagcaau

SEQ ID NO: 1816522 - RNA, 19 nt, Artificial Sequence
  Description of Artificial Sequence: Synthetic oligonucleotide
  Antisense strand to SEQ ID NO: 1816521
auugcucaagcccuucguc

SEQ ID NO: 1816523 - RNA, 19 nt, Artificial Sequence
  Description of Artificial Sequence: Synthetic oligonucleotide
  Sense strand starting at position 2034 of SEQ ID NO: 1563515
uggccaaagcgcuauuaau

SEQ ID NO: 1816524 - RNA, 19 nt, Artificial Sequence
  Description of Artificial Sequence: Synthetic oligonucleotide
  Antisense strand to SEQ ID NO: 1816523
auuaauagcgcuuuggcca

SEQ ID NO: 1816525 - RNA, 19 nt, Artificial Sequence
  Description of Artificial Sequence: Synthetic oligonucleotide
  Sense strand starting at position 2496 of SEQ ID NO: 1563515
cagcucuacgguuagacaa

SEQ ID NO: 1816526 - RNA, 19 nt, Artificial Sequence
  Description of Artificial Sequence: Synthetic oligonucleotide
  Antisense strand to SEQ ID NO: 1816525
uugucuaaccguagagcug

SEQ ID NO: 1816527 - RNA, 19 nt, Artificial Sequence
  Description of Artificial Sequence: Synthetic oligonucleotide
  Sense strand starting at position 2514 of SEQ ID NO: 1563515
agaccauagagcuggguaa

SEQ ID NO: 1816528 - RNA, 19 nt, Artificial Sequence
  Description of Artificial Sequence: Synthetic oligonucleotide
  Antisense strand to SEQ ID NO: 1816527
uuacccagcucuauggucu

SEQ ID NO: 1816529 - RNA, 19 nt, Artificial Sequence
  Description of Artificial Sequence: Synthetic oligonucleotide
  Sense strand starting at position 2515 of SEQ ID NO: 1563515
gaccauagagcuggguaaa

SEQ ID NO: 1816530 - RNA, 19 nt, Artificial Sequence
  Description of Artificial Sequence: Synthetic oligonucleotide
  Antisense strand to SEQ ID NO: 1816529
uuuacccagcucuaugguc

SEQ ID NO: 1816531 - RNA, 19 nt, Artificial Sequence
  Description of Artificial Sequence: Synthetic oligonucleotide
  Sense strand starting at position 2590 of SEQ ID NO: 1563515
agagcauugaguggcagaa

SEQ ID NO: 1816532 - RNA, 19 nt, Artificial Sequence
  Description of Artificial Sequence: Synthetic oligonucleotide
  Antisense strand to SEQ ID NO: 1816531
uucugccacucaaugcucu

SEQ ID NO: 1816533 - RNA, 19 nt, Artificial Sequence
  Description of Artificial Sequence: Synthetic oligonucleotide
  Sense strand starting at position 2832 of SEQ ID NO: 1563515
ggaaugauuggguguguga

SEQ ID NO: 1816534 - RNA, 19 nt, Artificial Sequence
  Description of Artificial Sequence: Synthetic oligonucleotide
  Antisense strand to SEQ ID NO: 1816533
ucacacacccaaucauucc

SEQ ID NO: 1816535 - RNA, 19 nt, Artificial Sequence
  Description of Artificial Sequence: Synthetic oligonucleotide
  Sense strand starting at position 2834 of SEQ ID NO: 1563515
aaugauugggugugugaaa

SEQ ID NO: 1816536 - RNA, 19 nt, Artificial Sequence
  Description of Artificial Sequence: Synthetic oligonucleotide
  Antisense strand to SEQ ID NO: 1816535
uuucacacacccaaucauu

SEQ ID NO: 1816537 - RNA, 19 nt, Artificial Sequence
  Description of Artificial Sequence: Synthetic oligonucleotide
  Sense strand starting at position 2872 of SEQ ID NO: 1563515
uugauuguugugggaauga

SEQ ID NO: 1816538 - RNA, 19 nt, Artificial Sequence
  Description of Artificial Sequence: Synthetic oligonucleotide
  Antisense strand to SEQ ID NO: 1816537
ucauucccacaacaaucaa

SEQ ID NO: 1816539 - RNA, 19 nt, Artificial Sequence
  Description of Artificial Sequence: Synthetic oligonucleotide
  Sense strand starting at position 2934 of SEQ ID NO: 1563515
aaggguggcgucuaggaaa

SEQ ID NO: 1816540 - RNA, 19 nt, Artificial Sequence
  Description of Artificial Sequence: Synthetic oligonucleotide
  Antisense strand to SEQ ID NO: 1816539
uuuccuagacgccacccuu

SEQ ID NO: 1816541 - RNA, 19 nt, Artificial Sequence
  Description of Artificial Sequence: Synthetic oligonucleotide
  Sense strand starting at position 2983 of SEQ ID NO: 1563515
ccagguugccaagaugaca

SEQ ID NO: 1816542 - RNA, 19 nt, Artificial Sequence
  Description of Artificial Sequence: Synthetic oligonucleotide
  Antisense strand to SEQ ID NO: 1816541
ugucaucuuggcaaccugg

SEQ ID NO: 1816543 - RNA, 19 nt, Artificial Sequence
  Description of Artificial Sequence: Synthetic oligonucleotide
  Sense strand starting at position 3106 of SEQ ID NO: 1563515
cugggucucucaguaacuu

SEQ ID NO: 1816544 - RNA, 19 nt, Artificial Sequence
  Description of Artificial Sequence: Synthetic oligonucleotide
  Antisense strand to SEQ ID NO: 1816543
aaguuacugagagacccag

SEQ ID NO: 1816545 - RNA, 19 nt, Artificial Sequence
  Description of Artificial Sequence: Synthetic oligonucleotide
  Sense strand starting at position 3107 of SEQ ID NO: 1563515
ugggucucucaguaacuuu

SEQ ID NO: 1816546 - RNA, 19 nt, Artificial Sequence
  Description of Artificial Sequence: Synthetic oligonucleotide
  Antisense strand to SEQ ID NO: 1816545
aaaguuacugagagaccca

SEQ ID NO: 1816547 - RNA, 19 nt, Artificial Sequence
  Description of Artificial Sequence: Synthetic oligonucleotide
  Sense strand starting at position 3118 of SEQ ID NO: 1563515
guaacuuugugcccuagga

SEQ ID NO: 1816548 - RNA, 19 nt, Artificial Sequence
  Description of Artificial Sequence: Synthetic oligonucleotide
  Antisense strand to SEQ ID NO: 1816547
uccuagggcacaaaguuac

SEQ ID NO: 1816549 - RNA, 19 nt, Artificial Sequence
  Description of Artificial Sequence: Synthetic oligonucleotide
  Sense strand starting at position 3206 of SEQ ID NO: 1563515
gcucuuuaaugucugagga

SEQ ID NO: 1816550 - RNA, 19 nt, Artificial Sequence
  Description of Artificial Sequence: Synthetic oligonucleotide
  Antisense strand to SEQ ID NO: 1816549
uccucagacauuaaagagc

SEQ ID NO: 1816551 - RNA, 19 nt, Artificial Sequence
  Description of Artificial Sequence: Synthetic oligonucleotide
  Sense strand starting at position 3207 of SEQ ID NO: 1563515
cucuuuaaugucugaggau

SEQ ID NO: 1816552 - RNA, 19 nt, Artificial Sequence
  Description of Artificial Sequence: Synthetic oligonucleotide
  Antisense strand to SEQ ID NO: 1816551
auccucagacauuaaagag

SEQ ID NO: 1816553 - RNA, 19 nt, Artificial Sequence
  Description of Artificial Sequence: Synthetic oligonucleotide
  Sense strand starting at position 3242 of SEQ ID NO: 1563515
uggugaggcuucucuggga

SEQ ID NO: 1816554 - RNA, 19 nt, Artificial Sequence
  Description of Artificial Sequence: Synthetic oligonucleotide
  Antisense strand to SEQ ID NO: 1816553
ucccagagaagccucacca

SEQ ID NO: 1816555 - RNA, 19 nt, Artificial Sequence
  Description of Artificial Sequence: Synthetic oligonucleotide
  Sense strand starting at position 3246 of SEQ ID NO: 1563515
gaggcuucucugggaaauu

SEQ ID NO: 1816556 - RNA, 19 nt, Artificial Sequence
  Description of Artificial Sequence: Synthetic oligonucleotide
  Antisense strand to SEQ ID NO: 1816555
aauuucccagagaagccuc

SEQ ID NO: 1816557 - RNA, 19 nt, Artificial Sequence
  Description of Artificial Sequence: Synthetic oligonucleotide
  Sense strand starting at position 3387 of SEQ ID NO: 1563515
gaaagaugguccuucccuu

SEQ ID NO: 1816558 - RNA, 19 nt, Artificial Sequence
  Description of Artificial Sequence: Synthetic oligonucleotide
  Antisense strand to SEQ ID NO: 1816557
aagggaaggaccaucuuuc

SEQ ID NO: 1816559 - RNA, 19 nt, Artificial Sequence
  Description of Artificial Sequence: Synthetic oligonucleotide
  Sense strand starting at position 3491 of SEQ ID NO: 1563515
ggauaugggcuuugauauu

SEQ ID NO: 1816560 - RNA, 19 nt, Artificial Sequence
  Description of Artificial Sequence: Synthetic oligonucleotide
  Antisense strand to SEQ ID NO: 1816559
aauaucaaagcccauaucc

SEQ ID NO: 1816561 - RNA, 19 nt, Artificial Sequence
  Description of Artificial Sequence: Synthetic oligonucleotide
  Sense strand starting at position 3530 of SEQ ID NO: 1563515
uguugcugagccuagagaa

SEQ ID NO: 1816562 - RNA, 19 nt, Artificial Sequence
  Description of Artificial Sequence: Synthetic oligonucleotide
  Antisense strand to SEQ ID NO: 1816561
uucucuaggcucagcaaca

SEQ ID NO: 1816563 - RNA, 19 nt, Artificial Sequence
  Description of Artificial Sequence: Synthetic oligonucleotide
  Sense strand starting at position 3643 of SEQ ID NO: 1563515
ggcucauuccuauguggaa

SEQ ID NO: 1816564 - RNA, 19 nt, Artificial Sequence
  Description of Artificial Sequence: Synthetic oligonucleotide
  Antisense strand to SEQ ID NO: 1816563
uuccacauaggaaugagcc

SEQ ID NO: 1816565 - RNA, 19 nt, Artificial Sequence
  Description of Artificial Sequence: Synthetic oligonucleotide
  Sense strand starting at position 3644 of SEQ ID NO: 1563515
gcucauuccuauguggaaa

SEQ ID NO: 1816566 - RNA, 19 nt, Artificial Sequence
  Description of Artificial Sequence: Synthetic oligonucleotide
  Antisense strand to SEQ ID NO: 1816565
uuuccacauaggaaugagc

SEQ ID NO: 1816567 - RNA, 19 nt, Artificial Sequence
  Description of Artificial Sequence: Synthetic oligonucleotide
  Sense strand starting at position 3936 of SEQ ID NO: 1563515
uggcuucacggagaagcau

SEQ ID NO: 1816568 - RNA, 19 nt, Artificial Sequence
  Description of Artificial Sequence: Synthetic oligonucleotide
  Antisense strand to SEQ ID NO: 1816567
augcuucuccgugaagcca

SEQ ID NO: 1816569 - RNA, 19 nt, Artificial Sequence
  Description of Artificial Sequence: Synthetic oligonucleotide
  Sense strand starting at position 3945 of SEQ ID NO: 1563515
ggagaagcauuugaguaaa

SEQ ID NO: 1816570 - RNA, 19 nt, Artificial Sequence
  Description of Artificial Sequence: Synthetic oligonucleotide
  Antisense strand to SEQ ID NO: 1816569
uuuacucaaaugcuucucc

SEQ ID NO: 1816571 - RNA, 19 nt, Artificial Sequence
  Description of Artificial Sequence: Synthetic oligonucleotide
  Sense strand starting at position 348 of SEQ ID NO: 1563516
gggcguucccugaggcaaa

SEQ ID NO: 1816572 - RNA, 19 nt, Artificial Sequence
  Description of Artificial Sequence: Synthetic oligonucleotide
  Antisense strand to SEQ ID NO: 1816571
uuugccucagggaacgccc

SEQ ID NO: 1816573 - RNA, 19 nt, Artificial Sequence
  Description of Artificial Sequence: Synthetic oligonucleotide
  Sense strand starting at position 540 of SEQ ID NO: 1563516
ucaugucccucaguccaaa

SEQ ID NO: 1816574 - RNA, 19 nt, Artificial Sequence
  Description of Artificial Sequence: Synthetic oligonucleotide
  Antisense strand to SEQ ID NO: 1816573
uuuggacugagggacauga

SEQ ID NO: 1816575 - RNA, 19 nt, Artificial Sequence
  Description of Artificial Sequence: Synthetic oligonucleotide
  Sense strand starting at position 703 of SEQ ID NO: 1563516
caggaagagucugagccua

SEQ ID NO: 1816576 - RNA, 19 nt, Artificial Sequence
  Description of Artificial Sequence: Synthetic oligonucleotide
  Antisense strand to SEQ ID NO: 1816575
uaggcucagacucuuccug

SEQ ID NO: 1816577 - RNA, 19 nt, Artificial Sequence
  Description of Artificial Sequence: Synthetic oligonucleotide
  Sense strand starting at position 705 of SEQ ID NO: 1563516
ggaagagucugagccuaga

SEQ ID NO: 1816578 - RNA, 19 nt, Artificial Sequence
  Description of Artificial Sequence: Synthetic oligonucleotide
  Antisense strand to SEQ ID NO: 1816577
ucuaggcucagacucuucc

SEQ ID NO: 1816579 - RNA, 19 nt, Artificial Sequence
  Description of Artificial Sequence: Synthetic oligonucleotide
  Sense strand starting at position 1056 of SEQ ID NO: 1563516
gccugauggcccuaaucug

SEQ ID NO: 1816580 - RNA, 19 nt, Artificial Sequence
  Description of Artificial Sequence: Synthetic oligonucleotide
  Antisense strand to SEQ ID NO: 1816579
cagauuagggccaucaggc

SEQ ID NO: 1816581 - RNA, 19 nt, Artificial Sequence
  Description of Artificial Sequence: Synthetic oligonucleotide
  Sense strand starting at position 1215 of SEQ ID NO: 1563516
uuacccuugcucugguaga

SEQ ID NO: 1816582 - RNA, 19 nt, Artificial Sequence
  Description of Artificial Sequence: Synthetic oligonucleotide
  Antisense strand to SEQ ID NO: 1816581
ucuaccagagcaaggguaa

SEQ ID NO: 1816583 - RNA, 19 nt, Artificial Sequence
  Description of Artificial Sequence: Synthetic oligonucleotide
  Sense strand starting at position 1432 of SEQ ID NO: 1563516
cgaggcucucaccagagaa

SEQ ID NO: 1816584 - RNA, 19 nt, Artificial Sequence
  Description of Artificial Sequence: Synthetic oligonucleotide
  Antisense strand to SEQ ID NO: 1816583
uucucuggugagagccucg

SEQ ID NO: 1816585 - RNA, 19 nt, Artificial Sequence
  Description of Artificial Sequence: Synthetic oligonucleotide
  Sense strand starting at position 2037 of SEQ ID NO: 1563516
acgucaucaacgcgaggau

SEQ ID NO: 1816586 - RNA, 19 nt, Artificial Sequence
  Description of Artificial Sequence: Synthetic oligonucleotide
  Antisense strand to SEQ ID NO: 1816585
auccucgcguugaugacgu

SEQ ID NO: 1816587 - RNA, 19 nt, Artificial Sequence
  Description of Artificial Sequence: Synthetic oligonucleotide
  Sense strand starting at position 2038 of SEQ ID NO: 1563516
cgucaucaacgcgaggauu

SEQ ID NO: 1816588 - RNA, 19 nt, Artificial Sequence
  Description of Artificial Sequence: Synthetic oligonucleotide
  Antisense strand to SEQ ID NO: 1816587
aauccucgcguugaugacg

SEQ ID NO: 1816589 - RNA, 19 nt, Artificial Sequence
  Description of Artificial Sequence: Synthetic oligonucleotide
  Sense strand starting at position 2160 of SEQ ID NO: 1563516
gggauuggcuagugaugga

SEQ ID NO: 1816590 - RNA, 19 nt, Artificial Sequence
  Description of Artificial Sequence: Synthetic oligonucleotide
  Antisense strand to SEQ ID NO: 1816589
uccaucacuagccaauccc

SEQ ID NO: 1816591 - RNA, 19 nt, Artificial Sequence
  Description of Artificial Sequence: Synthetic oligonucleotide
  Sense strand starting at position 3285 of SEQ ID NO: 1563516
gggccuugaucagauauug

SEQ ID NO: 1816592 - RNA, 19 nt, Artificial Sequence
  Description of Artificial Sequence: Synthetic oligonucleotide
  Antisense strand to SEQ ID NO: 1816591
caauaucugaucaaggccc

SEQ ID NO: 1816593 - RNA, 19 nt, Artificial Sequence
  Description of Artificial Sequence: Synthetic oligonucleotide
  Sense strand starting at position 3294 of SEQ ID NO: 1563516
ucagauauuggcugucuca

SEQ ID NO: 1816594 - RNA, 19 nt, Artificial Sequence
  Description of Artificial Sequence: Synthetic oligonucleotide
  Antisense strand to SEQ ID NO: 1816593
ugagacagccaauaucuga

SEQ ID NO: 1816595 - RNA, 19 nt, Artificial Sequence
  Description of Artificial Sequence: Synthetic oligonucleotide
  Sense strand starting at position 3301 of SEQ ID NO: 1563516
uuggcugucucauggagaa

SEQ ID NO: 1816596 - RNA, 19 nt, Artificial Sequence
  Description of Artificial Sequence: Synthetic oligonucleotide
  Antisense strand to SEQ ID NO: 1816595
uucuccaugagacagccaa

SEQ ID NO: 1816597 - RNA, 19 nt, Artificial Sequence
  Description of Artificial Sequence: Synthetic oligonucleotide
  Sense strand starting at position 3303 of SEQ ID NO: 1563516
ggcugucucauggagaaga

SEQ ID NO: 1816598 - RNA, 19 nt, Artificial Sequence
  Description of Artificial Sequence: Synthetic oligonucleotide
  Antisense strand to SEQ ID NO: 1816597
ucuucuccaugagacagcc

SEQ ID NO: 1816599 - RNA, 19 nt, Artificial Sequence
  Description of Artificial Sequence: Synthetic oligonucleotide
  Sense strand starting at position 3873 of SEQ ID NO: 1563516
accagucauccauggaggu

SEQ ID NO: 1816600 - RNA, 19 nt, Artificial Sequence
  Description of Artificial Sequence: Synthetic oligonucleotide
  Antisense strand to SEQ ID NO: 1816599
accuccauggaugacuggu

SEQ ID NO: 1816601 - RNA, 19 nt, Artificial Sequence
  Description of Artificial Sequence: Synthetic oligonucleotide
  Sense strand starting at position 3874 of SEQ ID NO: 1563516
ccagucauccauggagguu

SEQ ID NO: 1816602 - RNA, 19 nt, Artificial Sequence
  Description of Artificial Sequence: Synthetic oligonucleotide
  Antisense strand to SEQ ID NO: 1816601
aaccuccauggaugacugg

SEQ ID NO: 1816603 - RNA, 19 nt, Artificial Sequence
  Description of Artificial Sequence: Synthetic oligonucleotide
  Sense strand starting at position 3961 of SEQ ID NO: 1563516
acgcaaagauccuaacaaa

SEQ ID NO: 1816604 - RNA, 19 nt, Artificial Sequence
  Description of Artificial Sequence: Synthetic oligonucleotide
  Antisense strand to SEQ ID NO: 1816603
uuuguuaggaucuuugcgu

SEQ ID NO: 1816605 - RNA, 19 nt, Artificial Sequence
  Description of Artificial Sequence: Synthetic oligonucleotide
  Sense strand starting at position 11 of SEQ ID NO: 1563517
augugacuuuaaguagauu

SEQ ID NO: 1816606 - RNA, 19 nt, Artificial Sequence
  Description of Artificial Sequence: Synthetic oligonucleotide
  Antisense strand to SEQ ID NO: 1816605
aaucuacuuaaagucacau

SEQ ID NO: 1816607 - RNA, 19 nt, Artificial Sequence
  Description of Artificial Sequence: Synthetic oligonucleotide
  Sense strand starting at position 14 of SEQ ID NO: 1563517
ugacuuuaaguagauuguu

SEQ ID NO: 1816608 - RNA, 19 nt, Artificial Sequence
  Description of Artificial Sequence: Synthetic oligonucleotide
  Antisense strand to SEQ ID NO: 1816607
aacaaucuacuuaaaguca

SEQ ID NO: 1816609 - RNA, 19 nt, Artificial Sequence
  Description of Artificial Sequence: Synthetic oligonucleotide
  Sense strand starting at position 117 of SEQ ID NO: 1563517
caaaguauuuaugaugaug

SEQ ID NO: 1816610 - RNA, 19 nt, Artificial Sequence
  Description of Artificial Sequence: Synthetic oligonucleotide
  Antisense strand to SEQ ID NO: 1816609
caucaucauaaauacuuug

SEQ ID NO: 1816611 - RNA, 19 nt, Artificial Sequence
  Description of Artificial Sequence: Synthetic oligonucleotide
  Sense strand starting at position 140 of SEQ ID NO: 1563517
ggacauuauguggguucaa

SEQ ID NO: 1816612 - RNA, 19 nt, Artificial Sequence
  Description of Artificial Sequence: Synthetic oligonucleotide
  Antisense strand to SEQ ID NO: 1816611
uugaacccacauaaugucc

SEQ ID NO: 1816613 - RNA, 19 nt, Artificial Sequence
  Description of Artificial Sequence: Synthetic oligonucleotide
  Sense strand starting at position 279 of SEQ ID NO: 1563517
agcuauagacuguagcuaa

SEQ ID NO: 1816614 - RNA, 19 nt, Artificial Sequence
  Description of Artificial Sequence: Synthetic oligonucleotide
  Antisense strand to SEQ ID NO: 1816613
uuagcuacagucuauagcu

SEQ ID NO: 1816615 - RNA, 19 nt, Artificial Sequence
  Description of Artificial Sequence: Synthetic oligonucleotide
  Sense strand starting at position 292 of SEQ ID NO: 1563517
agcuaagaauagcuacaaa

SEQ ID NO: 1816616 - RNA, 19 nt, Artificial Sequence
  Description of Artificial Sequence: Synthetic oligonucleotide
  Antisense strand to SEQ ID NO: 1816615
uuuguagcuauucuuagcu

SEQ ID NO: 1816617 - RNA, 19 nt, Artificial Sequence
  Description of Artificial Sequence: Synthetic oligonucleotide
  Sense strand starting at position 324 of SEQ ID NO: 1563517
agacaagcuucuucuugga

SEQ ID NO: 1816618 - RNA, 19 nt, Artificial Sequence
  Description of Artificial Sequence: Synthetic oligonucleotide
  Antisense strand to SEQ ID NO: 1816617
uccaagaagaagcuugucu

SEQ ID NO: 1816619 - RNA, 19 nt, Artificial Sequence
  Description of Artificial Sequence: Synthetic oligonucleotide
  Sense strand starting at position 326 of SEQ ID NO: 1563517
acaagcuucuucuuggauu

SEQ ID NO: 1816620 - RNA, 19 nt, Artificial Sequence
  Description of Artificial Sequence: Synthetic oligonucleotide
  Antisense strand to SEQ ID NO: 1816619
aauccaagaagaagcuugu

SEQ ID NO: 1816621 - RNA, 19 nt, Artificial Sequence
  Description of Artificial Sequence: Synthetic oligonucleotide
  Sense strand starting at position 380 of SEQ ID NO: 1563517
uguguucuccaagaauuga

SEQ ID NO: 1816622 - RNA, 19 nt, Artificial Sequence
  Description of Artificial Sequence: Synthetic oligonucleotide
  Antisense strand to SEQ ID NO: 1816621
ucaauucuuggagaacaca

SEQ ID NO: 1816623 - RNA, 19 nt, Artificial Sequence
  Description of Artificial Sequence: Synthetic oligonucleotide
  Sense strand starting at position 403 of SEQ ID NO: 1563517
aaaucagguucccuaggau

SEQ ID NO: 1816624 - RNA, 19 nt, Artificial Sequence
  Description of Artificial Sequence: Synthetic oligonucleotide
  Antisense strand to SEQ ID NO: 1816623
auccuagggaaccugauuu

SEQ ID NO: 1816625 - RNA, 19 nt, Artificial Sequence
  Description of Artificial Sequence: Synthetic oligonucleotide
  Sense strand starting at position 406 of SEQ ID NO: 1563517
ucagguucccuaggaugaa

SEQ ID NO: 1816626 - RNA, 19 nt, Artificial Sequence
  Description of Artificial Sequence: Synthetic oligonucleotide
  Antisense strand to SEQ ID NO: 1816625
uucauccuagggaaccuga

SEQ ID NO: 1816627 - RNA, 19 nt, Artificial Sequence
  Description of Artificial Sequence: Synthetic oligonucleotide
  Sense strand starting at position 479 of SEQ ID NO: 1563517
auauccaaacuauguguau

SEQ ID NO: 1816628 - RNA, 19 nt, Artificial Sequence
  Description of Artificial Sequence: Synthetic oligonucleotide
  Antisense strand to SEQ ID NO: 1816627
auacacauaguuuggauau

SEQ ID NO: 1816629 - RNA, 19 nt, Artificial Sequence
  Description of Artificial Sequence: Synthetic oligonucleotide
  Sense strand starting at position 483 of SEQ ID NO: 1563517
ccaaacuauguguauguuu

SEQ ID NO: 1816630 - RNA, 19 nt, Artificial Sequence
  Description of Artificial Sequence: Synthetic oligonucleotide
  Antisense strand to SEQ ID NO: 1816629
aaacauacacauaguuugg

SEQ ID NO: 1816631 - RNA, 19 nt, Artificial Sequence
  Description of Artificial Sequence: Synthetic oligonucleotide
  Sense strand starting at position 550 of SEQ ID NO: 1563517
cccaguauauuugugcuga

SEQ ID NO: 1816632 - RNA, 19 nt, Artificial Sequence
  Description of Artificial Sequence: Synthetic oligonucleotide
  Antisense strand to SEQ ID NO: 1816631
ucagcacaaauauacuggg

SEQ ID NO: 1816633 - RNA, 19 nt, Artificial Sequence
  Description of Artificial Sequence: Synthetic oligonucleotide
  Sense strand starting at position 751 of SEQ ID NO: 1563517
ggaugagggcuucagcacu

SEQ ID NO: 1816634 - RNA, 19 nt, Artificial Sequence
  Description of Artificial Sequence: Synthetic oligonucleotide
  Antisense strand to SEQ ID NO: 1816633
agugcugaagcccucaucc

SEQ ID NO: 1816635 - RNA, 19 nt, Artificial Sequence
  Description of Artificial Sequence: Synthetic oligonucleotide
  Sense strand starting at position 1172 of SEQ ID NO: 1563517
ccaguaaagagauggcgau

SEQ ID NO: 1816636 - RNA, 19 nt, Artificial Sequence
  Description of Artificial Sequence: Synthetic oligonucleotide
  Antisense strand to SEQ ID NO: 1816635
aucgccaucucuuuacugg

SEQ ID NO: 1816637 - RNA, 19 nt, Artificial Sequence
  Description of Artificial Sequence: Synthetic oligonucleotide
  Sense strand starting at position 1351 of SEQ ID NO: 1563517
caauuccugcgguaagaau

SEQ ID NO: 1816638 - RNA, 19 nt, Artificial Sequence
  Description of Artificial Sequence: Synthetic oligonucleotide
  Antisense strand to SEQ ID NO: 1816637
auucuuaccgcaggaauug

SEQ ID NO: 1816639 - RNA, 19 nt, Artificial Sequence
  Description of Artificial Sequence: Synthetic oligonucleotide
  Sense strand starting at position 1750 of SEQ ID NO: 1563517
cgaagcgcuaguccuuaua

SEQ ID NO: 1816640 - RNA, 19 nt, Artificial Sequence
  Description of Artificial Sequence: Synthetic oligonucleotide
  Antisense strand to SEQ ID NO: 1816639
uauaaggacuagcgcuucg

SEQ ID NO: 1816641 - RNA, 19 nt, Artificial Sequence
  Description of Artificial Sequence: Synthetic oligonucleotide
  Sense strand starting at position 1931 of SEQ ID NO: 1563517
cggcgucuccuauuggcua

SEQ ID NO: 1816642 - RNA, 19 nt, Artificial Sequence
  Description of Artificial Sequence: Synthetic oligonucleotide
  Antisense strand to SEQ ID NO: 1816641
uagccaauaggagacgccg

SEQ ID NO: 1816643 - RNA, 19 nt, Artificial Sequence
  Description of Artificial Sequence: Synthetic oligonucleotide
  Sense strand starting at position 1993 of SEQ ID NO: 1563517
ggaaauguaguuugagguc

SEQ ID NO: 1816644 - RNA, 19 nt, Artificial Sequence
  Description of Artificial Sequence: Synthetic oligonucleotide
  Antisense strand to SEQ ID NO: 1816643
gaccucaaacuacauuucc

SEQ ID NO: 1816645 - RNA, 19 nt, Artificial Sequence
  Description of Artificial Sequence: Synthetic oligonucleotide
  Sense strand starting at position 2093 of SEQ ID NO: 1563517
ggaguugcgggacacuuau

SEQ ID NO: 1816646 - RNA, 19 nt, Artificial Sequence
  Description of Artificial Sequence: Synthetic oligonucleotide
  Antisense strand to SEQ ID NO: 1816645
auaagugucccgcaacucc

SEQ ID NO: 1816647 - RNA, 19 nt, Artificial Sequence
  Description of Artificial Sequence: Synthetic oligonucleotide
  Sense strand starting at position 2173 of SEQ ID NO: 1563517
ggguauucuggguauugua

SEQ ID NO: 1816648 - RNA, 19 nt, Artificial Sequence
  Description of Artificial Sequence: Synthetic oligonucleotide
  Antisense strand to SEQ ID NO: 1816647
uacaauacccagaauaccc

SEQ ID NO: 1816649 - RNA, 19 nt, Artificial Sequence
  Description of Artificial Sequence: Synthetic oligonucleotide
  Sense strand starting at position 2196 of SEQ ID NO: 1563517
gggugcacugucuagagaa

SEQ ID NO: 1816650 - RNA, 19 nt, Artificial Sequence
  Description of Artificial Sequence: Synthetic oligonucleotide
  Antisense strand to SEQ ID NO: 1816649
uucucuagacagugcaccc

SEQ ID NO: 1816651 - RNA, 19 nt, Artificial Sequence
  Description of Artificial Sequence: Synthetic oligonucleotide
  Sense strand starting at position 2198 of SEQ ID NO: 1563517
gugcacugucuagagaauc

SEQ ID NO: 1816652 - RNA, 19 nt, Artificial Sequence
  Description of Artificial Sequence: Synthetic oligonucleotide
  Antisense strand to SEQ ID NO: 1816651
gauucucuagacagugcac

SEQ ID NO: 1816653 - RNA, 19 nt, Artificial Sequence
  Description of Artificial Sequence: Synthetic oligonucleotide
  Sense strand starting at position 2278 of SEQ ID NO: 1563517
gucgguuaagcucuuagca

SEQ ID NO: 1816654 - RNA, 19 nt, Artificial Sequence
  Description of Artificial Sequence: Synthetic oligonucleotide
  Antisense strand to SEQ ID NO: 1816653
ugcuaagagcuuaaccgac

SEQ ID NO: 1816655 - RNA, 19 nt, Artificial Sequence
  Description of Artificial Sequence: Synthetic oligonucleotide
  Sense strand starting at position 2439 of SEQ ID NO: 1563517
gugaaccaccugcauuaaa

SEQ ID NO: 1816656 - RNA, 19 nt, Artificial Sequence
  Description of Artificial Sequence: Synthetic oligonucleotide
  Antisense strand to SEQ ID NO: 1816655
uuuaaugcaggugguucac

SEQ ID NO: 1816657 - RNA, 19 nt, Artificial Sequence
  Description of Artificial Sequence: Synthetic oligonucleotide
  Sense strand starting at position 2529 of SEQ ID NO: 1563517
ugucauaaauaggcauaga

SEQ ID NO: 1816658 - RNA, 19 nt, Artificial Sequence
  Description of Artificial Sequence: Synthetic oligonucleotide
  Antisense strand to SEQ ID NO: 1816657
ucuaugccuauuuaugaca

SEQ ID NO: 1816659 - RNA, 19 nt, Artificial Sequence
  Description of Artificial Sequence: Synthetic oligonucleotide
  Sense strand starting at position 2540 of SEQ ID NO: 1563517
ggcauagaaaugugaucua

SEQ ID NO: 1816660 - RNA, 19 nt, Artificial Sequence
  Description of Artificial Sequence: Synthetic oligonucleotide
  Antisense strand to SEQ ID NO: 1816659
uagaucacauuucuaugcc

SEQ ID NO: 1816661 - RNA, 19 nt, Artificial Sequence
  Description of Artificial Sequence: Synthetic oligonucleotide
  Sense strand starting at position 2676 of SEQ ID NO: 1563517
aguacaaacgaguaacuau

SEQ ID NO: 1816662 - RNA, 19 nt, Artificial Sequence
  Description of Artificial Sequence: Synthetic oligonucleotide
  Antisense strand to SEQ ID NO: 1816661
auaguuacucguuuguacu

SEQ ID NO: 1816663 - RNA, 19 nt, Artificial Sequence
  Description of Artificial Sequence: Synthetic oligonucleotide
  Sense strand starting at position 2691 of SEQ ID NO: 1563517
cuauaugugucuuuaagaa

SEQ ID NO: 1816664 - RNA, 19 nt, Artificial Sequence
  Description of Artificial Sequence: Synthetic oligonucleotide
  Antisense strand to SEQ ID NO: 1816663
uucuuaaagacacauauag

SEQ ID NO: 1816665 - RNA, 19 nt, Artificial Sequence
  Description of Artificial Sequence: Synthetic oligonucleotide
  Sense strand starting at position 2734 of SEQ ID NO: 1563517
guuacaagagcuggauaaa

SEQ ID NO: 1816666 - RNA, 19 nt, Artificial Sequence
  Description of Artificial Sequence: Synthetic oligonucleotide
  Antisense strand to SEQ ID NO: 1816665
uuuauccagcucuuguaac

SEQ ID NO: 1816667 - RNA, 19 nt, Artificial Sequence
  Description of Artificial Sequence: Synthetic oligonucleotide
  Sense strand starting at position 2975 of SEQ ID NO: 1563517
ugagguaauugcccaauau

SEQ ID NO: 1816668 - RNA, 19 nt, Artificial Sequence
  Description of Artificial Sequence: Synthetic oligonucleotide
  Antisense strand to SEQ ID NO: 1816667
auauugggcaauuaccuca

SEQ ID NO: 1816669 - RNA, 19 nt, Artificial Sequence
  Description of Artificial Sequence: Synthetic oligonucleotide
  Sense strand starting at position 2976 of SEQ ID NO: 1563517
gagguaauugcccaauauu

SEQ ID NO: 1816670 - RNA, 19 nt, Artificial Sequence
  Description of Artificial Sequence: Synthetic oligonucleotide
  Antisense strand to SEQ ID NO: 1816669
aauauugggcaauuaccuc

SEQ ID NO: 1816671 - RNA, 19 nt, Artificial Sequence
  Description of Artificial Sequence: Synthetic oligonucleotide
  Sense strand starting at position 3146 of SEQ ID NO: 1563517
aguuguaguagaggagaau

SEQ ID NO: 1816672 - RNA, 19 nt, Artificial Sequence
  Description of Artificial Sequence: Synthetic oligonucleotide
  Antisense strand to SEQ ID NO: 1816671
auucuccucuacuacaacu

SEQ ID NO: 1816673 - RNA, 19 nt, Artificial Sequence
  Description of Artificial Sequence: Synthetic oligonucleotide
  Sense strand starting at position 3181 of SEQ ID NO: 1563517
augaguauacaaugugcaa

SEQ ID NO: 1816674 - RNA, 19 nt, Artificial Sequence
  Description of Artificial Sequence: Synthetic oligonucleotide
  Antisense strand to SEQ ID NO: 1816673
uugcacauuguauacucau

SEQ ID NO: 1816675 - RNA, 19 nt, Artificial Sequence
  Description of Artificial Sequence: Synthetic oligonucleotide
  Sense strand starting at position 3246 of SEQ ID NO: 1563517
ggaagaacuuguucuacuu

SEQ ID NO: 1816676 - RNA, 19 nt, Artificial Sequence
  Description of Artificial Sequence: Synthetic oligonucleotide
  Antisense strand to SEQ ID NO: 1816675
aaguagaacaaguucuucc

SEQ ID NO: 1816677 - RNA, 19 nt, Artificial Sequence
  Description of Artificial Sequence: Synthetic oligonucleotide
  Sense strand starting at position 3256 of SEQ ID NO: 1563517
guucuacuucuggagaacu

SEQ ID NO: 1816678 - RNA, 19 nt, Artificial Sequence
  Description of Artificial Sequence: Synthetic oligonucleotide
  Antisense strand to SEQ ID NO: 1816677
aguucuccagaaguagaac

SEQ ID NO: 1816679 - RNA, 19 nt, Artificial Sequence
  Description of Artificial Sequence: Synthetic oligonucleotide
  Sense strand starting at position 3351 of SEQ ID NO: 1563517
ggcauaaaggcaugaaaga

SEQ ID NO: 1816680 - RNA, 19 nt, Artificial Sequence
  Description of Artificial Sequence: Synthetic oligonucleotide
  Antisense strand to SEQ ID NO: 1816679
ucuuucaugccuuuaugcc

SEQ ID NO: 1816681 - RNA, 19 nt, Artificial Sequence
  Description of Artificial Sequence: Synthetic oligonucleotide
  Sense strand starting at position 3468 of SEQ ID NO: 1563517
agagaaccaucagaggaau

SEQ ID NO: 1816682 - RNA, 19 nt, Artificial Sequence
  Description of Artificial Sequence: Synthetic oligonucleotide
  Antisense strand to SEQ ID NO: 1816681
auuccucugaugguucucu

SEQ ID NO: 1816683 - RNA, 19 nt, Artificial Sequence
  Description of Artificial Sequence: Synthetic oligonucleotide
  Sense strand starting at position 3543 of SEQ ID NO: 1563517
aacacauagcuaggguauu

SEQ ID NO: 1816684 - RNA, 19 nt, Artificial Sequence
  Description of Artificial Sequence: Synthetic oligonucleotide
  Antisense strand to SEQ ID NO: 1816683
aauacccuagcuauguguu

SEQ ID NO: 1816685 - RNA, 19 nt, Artificial Sequence
  Description of Artificial Sequence: Synthetic oligonucleotide
  Sense strand starting at position 4 of SEQ ID NO: 1563518
ucacguggucuguuagcca

SEQ ID NO: 1816686 - RNA, 19 nt, Artificial Sequence
  Description of Artificial Sequence: Synthetic oligonucleotide
  Antisense strand to SEQ ID NO: 1816685
uggcuaacagaccacguga

SEQ ID NO: 1816687 - RNA, 19 nt, Artificial Sequence
  Description of Artificial Sequence: Synthetic oligonucleotide
  Sense strand starting at position 7 of SEQ ID NO: 1563518
cguggucuguuagccauua

SEQ ID NO: 1816688 - RNA, 19 nt, Artificial Sequence
  Description of Artificial Sequence: Synthetic oligonucleotide
  Antisense strand to SEQ ID NO: 1816687
uaauggcuaacagaccacg

SEQ ID NO: 1816689 - RNA, 19 nt, Artificial Sequence
  Description of Artificial Sequence: Synthetic oligonucleotide
  Sense strand starting at position 8 of SEQ ID NO: 1563518
guggucuguuagccauuau

SEQ ID NO: 1816690 - RNA, 19 nt, Artificial Sequence
  Description of Artificial Sequence: Synthetic oligonucleotide
  Antisense strand to SEQ ID NO: 1816689
auaauggcuaacagaccac

SEQ ID NO: 1816691 - RNA, 19 nt, Artificial Sequence
  Description of Artificial Sequence: Synthetic oligonucleotide
  Sense strand starting at position 12 of SEQ ID NO: 1563518
ucuguuagccauuaucauu

SEQ ID NO: 1816692 - RNA, 19 nt, Artificial Sequence
  Description of Artificial Sequence: Synthetic oligonucleotide
  Antisense strand to SEQ ID NO: 1816691
aaugauaauggcuaacaga

SEQ ID NO: 1816693 - RNA, 19 nt, Artificial Sequence
  Description of Artificial Sequence: Synthetic oligonucleotide
  Sense strand starting at position 15 of SEQ ID NO: 1563518
guuagccauuaucauuaga

SEQ ID NO: 1816694 - RNA, 19 nt, Artificial Sequence
  Description of Artificial Sequence: Synthetic oligonucleotide
  Antisense strand to SEQ ID NO: 1816693
ucuaaugauaauggcuaac

SEQ ID NO: 1816695 - RNA, 19 nt, Artificial Sequence
  Description of Artificial Sequence: Synthetic oligonucleotide
  Sense strand starting at position 127 of SEQ ID NO: 1563518
agcccucaugaagguuaua

SEQ ID NO: 1816696 - RNA, 19 nt, Artificial Sequence
  Description of Artificial Sequence: Synthetic oligonucleotide
  Antisense strand to SEQ ID NO: 1816695
uauaaccuucaugagggcu

SEQ ID NO: 1816697 - RNA, 19 nt, Artificial Sequence
  Description of Artificial Sequence: Synthetic oligonucleotide
  Sense strand starting at position 492 of SEQ ID NO: 1563518
agugaacuauaugucagua

SEQ ID NO: 1816698 - RNA, 19 nt, Artificial Sequence
  Description of Artificial Sequence: Synthetic oligonucleotide
  Antisense strand to SEQ ID NO: 1816697
uacugacauauaguucacu

SEQ ID NO: 1816699 - RNA, 19 nt, Artificial Sequence
  Description of Artificial Sequence: Synthetic oligonucleotide
  Sense strand starting at position 502 of SEQ ID NO: 1563518
augucaguagcgggugaua

SEQ ID NO: 1816700 - RNA, 19 nt, Artificial Sequence
  Description of Artificial Sequence: Synthetic oligonucleotide
  Antisense strand to SEQ ID NO: 1816699
uaucacccgcuacugacau

SEQ ID NO: 1816701 - RNA, 19 nt, Artificial Sequence
  Description of Artificial Sequence: Synthetic oligonucleotide
  Sense strand starting at position 504 of SEQ ID NO: 1563518
gucaguagcgggugauaag

SEQ ID NO: 1816702 - RNA, 19 nt, Artificial Sequence
  Description of Artificial Sequence: Synthetic oligonucleotide
  Antisense strand to SEQ ID NO: 1816701
cuuaucacccgcuacugac

SEQ ID NO: 1816703 - RNA, 19 nt, Artificial Sequence
  Description of Artificial Sequence: Synthetic oligonucleotide
  Sense strand starting at position 513 of SEQ ID NO: 1563518
gggugauaagcaugcagaa

SEQ ID NO: 1816704 - RNA, 19 nt, Artificial Sequence
  Description of Artificial Sequence: Synthetic oligonucleotide
  Antisense strand to SEQ ID NO: 1816703
uucugcaugcuuaucaccc

SEQ ID NO: 1816705 - RNA, 19 nt, Artificial Sequence
  Description of Artificial Sequence: Synthetic oligonucleotide
  Sense strand starting at position 586 of SEQ ID NO: 1563518
ucaagaaucuuccuucgug

SEQ ID NO: 1816706 - RNA, 19 nt, Artificial Sequence
  Description of Artificial Sequence: Synthetic oligonucleotide
  Antisense strand to SEQ ID NO: 1816705
cacgaaggaagauucuuga

SEQ ID NO: 1816707 - RNA, 19 nt, Artificial Sequence
  Description of Artificial Sequence: Synthetic oligonucleotide
  Sense strand starting at position 601 of SEQ ID NO: 1563518
cgugccaggcauugugaua

SEQ ID NO: 1816708 - RNA, 19 nt, Artificial Sequence
  Description of Artificial Sequence: Synthetic oligonucleotide
  Antisense strand to SEQ ID NO: 1816707
uaucacaaugccuggcacg

SEQ ID NO: 1816709 - RNA, 19 nt, Artificial Sequence
  Description of Artificial Sequence: Synthetic oligonucleotide
  Sense strand starting at position 606 of SEQ ID NO: 1563518
caggcauugugauauggca

SEQ ID NO: 1816710 - RNA, 19 nt, Artificial Sequence
  Description of Artificial Sequence: Synthetic oligonucleotide
  Antisense strand to SEQ ID NO: 1816709
ugccauaucacaaugccug

SEQ ID NO: 1816711 - RNA, 19 nt, Artificial Sequence
  Description of Artificial Sequence: Synthetic oligonucleotide
  Sense strand starting at position 608 of SEQ ID NO: 1563518
ggcauugugauauggcagu

SEQ ID NO: 1816712 - RNA, 19 nt, Artificial Sequence
  Description of Artificial Sequence: Synthetic oligonucleotide
  Antisense strand to SEQ ID NO: 1816711
acugccauaucacaaugcc

SEQ ID NO: 1816713 - RNA, 19 nt, Artificial Sequence
  Description of Artificial Sequence: Synthetic oligonucleotide
  Sense strand starting at position 649 of SEQ ID NO: 1563518
ugcccuugugaggauugga

SEQ ID NO: 1816714 - RNA, 19 nt, Artificial Sequence
  Description of Artificial Sequence: Synthetic oligonucleotide
  Antisense strand to SEQ ID NO: 1816713
uccaauccucacaagggca

SEQ ID NO: 1816715 - RNA, 19 nt, Artificial Sequence
  Description of Artificial Sequence: Synthetic oligonucleotide
  Sense strand starting at position 659 of SEQ ID NO: 1563518
aggauuggauucuggcaga

SEQ ID NO: 1816716 - RNA, 19 nt, Artificial Sequence
  Description of Artificial Sequence: Synthetic oligonucleotide
  Antisense strand to SEQ ID NO: 1816715
ucugccagaauccaauccu

SEQ ID NO: 1816717 - RNA, 19 nt, Artificial Sequence
  Description of Artificial Sequence: Synthetic oligonucleotide
  Sense strand starting at position 662 of SEQ ID NO: 1563518
auuggauucuggcagagag

SEQ ID NO: 1816718 - RNA, 19 nt, Artificial Sequence
  Description of Artificial Sequence: Synthetic oligonucleotide
  Antisense strand to SEQ ID NO: 1816717
cucucugccagaauccaau

SEQ ID NO: 1816719 - RNA, 19 nt, Artificial Sequence
  Description of Artificial Sequence: Synthetic oligonucleotide
  Sense strand starting at position 707 of SEQ ID NO: 1563518
aaggaaguugcauguucga

SEQ ID NO: 1816720 - RNA, 19 nt, Artificial Sequence
  Description of Artificial Sequence: Synthetic oligonucleotide
  Antisense strand to SEQ ID NO: 1816719
ucgaacaugcaacuuccuu

SEQ ID NO: 1816721 - RNA, 19 nt, Artificial Sequence
  Description of Artificial Sequence: Synthetic oligonucleotide
  Sense strand starting at position 710 of SEQ ID NO: 1563518
gaaguugcauguucgaaga

SEQ ID NO: 1816722 - RNA, 19 nt, Artificial Sequence
  Description of Artificial Sequence: Synthetic oligonucleotide
  Antisense strand to SEQ ID NO: 1816721
ucuucgaacaugcaacuuc

SEQ ID NO: 1816723 - RNA, 19 nt, Artificial Sequence
  Description of Artificial Sequence: Synthetic oligonucleotide
  Sense strand starting at position 713 of SEQ ID NO: 1563518
guugcauguucgaagagga

SEQ ID NO: 1816724 - RNA, 19 nt, Artificial Sequence
  Description of Artificial Sequence: Synthetic oligonucleotide
  Antisense strand to SEQ ID NO: 1816723
uccucuucgaacaugcaac

SEQ ID NO: 1816725 - RNA, 19 nt, Artificial Sequence
  Description of Artificial Sequence: Synthetic oligonucleotide
  Sense strand starting at position 738 of SEQ ID NO: 1563518
cacggcagguggucaauua

SEQ ID NO: 1816726 - RNA, 19 nt, Artificial Sequence
  Description of Artificial Sequence: Synthetic oligonucleotide
  Antisense strand to SEQ ID NO: 1816725
uaauugaccaccugccgug

SEQ ID NO: 1816727 - RNA, 19 nt, Artificial Sequence
  Description of Artificial Sequence: Synthetic oligonucleotide
  Sense strand starting at position 902 of SEQ ID NO: 1563518
ggaugguggcuucgagguu

SEQ ID NO: 1816728 - RNA, 19 nt, Artificial Sequence
  Description of Artificial Sequence: Synthetic oligonucleotide
  Antisense strand to SEQ ID NO: 1816727
aaccucgaagccaccaucc

SEQ ID NO: 1816729 - RNA, 19 nt, Artificial Sequence
  Description of Artificial Sequence: Synthetic oligonucleotide
  Sense strand starting at position 986 of SEQ ID NO: 1563518
guccucagcucugagggau

SEQ ID NO: 1816730 - RNA, 19 nt, Artificial Sequence
  Description of Artificial Sequence: Synthetic oligonucleotide
  Antisense strand to SEQ ID NO: 1816729
aucccucagagcugaggac

SEQ ID NO: 1816731 - RNA, 19 nt, Artificial Sequence
  Description of Artificial Sequence: Synthetic oligonucleotide
  Sense strand starting at position 999 of SEQ ID NO: 1563518
agggaucccugggaauagu

SEQ ID NO: 1816732 - RNA, 19 nt, Artificial Sequence
  Description of Artificial Sequence: Synthetic oligonucleotide
  Antisense strand to SEQ ID NO: 1816731
acuauucccagggaucccu

SEQ ID NO: 1816733 - RNA, 19 nt, Artificial Sequence
  Description of Artificial Sequence: Synthetic oligonucleotide
  Sense strand starting at position 1203 of SEQ ID NO: 1563518
caucuuuagggauggguca

SEQ ID NO: 1816734 - RNA, 19 nt, Artificial Sequence
  Description of Artificial Sequence: Synthetic oligonucleotide
  Antisense strand to SEQ ID NO: 1816733
ugacccaucccuaaagaug

SEQ ID NO: 1816735 - RNA, 19 nt, Artificial Sequence
  Description of Artificial Sequence: Synthetic oligonucleotide
  Sense strand starting at position 1205 of SEQ ID NO: 1563518
ucuuuagggaugggucaga

SEQ ID NO: 1816736 - RNA, 19 nt, Artificial Sequence
  Description of Artificial Sequence: Synthetic oligonucleotide
  Antisense strand to SEQ ID NO: 1816735
ucugacccaucccuaaaga

SEQ ID NO: 1816737 - RNA, 19 nt, Artificial Sequence
  Description of Artificial Sequence: Synthetic oligonucleotide
  Sense strand starting at position 1236 of SEQ ID NO: 1563518
ggucgaggcugccucuuaa

SEQ ID NO: 1816738 - RNA, 19 nt, Artificial Sequence
  Description of Artificial Sequence: Synthetic oligonucleotide
  Antisense strand to SEQ ID NO: 1816737
uuaagaggcagccucgacc

SEQ ID NO: 1816739 - RNA, 19 nt, Artificial Sequence
  Description of Artificial Sequence: Synthetic oligonucleotide
  Sense strand starting at position 2317 of SEQ ID NO: 1563518
gggagaguuggguguuaga

SEQ ID NO: 1816740 - RNA, 19 nt, Artificial Sequence
  Description of Artificial Sequence: Synthetic oligonucleotide
  Antisense strand to SEQ ID NO: 1816739
ucuaacacccaacucuccc

SEQ ID NO: 1816741 - RNA, 19 nt, Artificial Sequence
  Description of Artificial Sequence: Synthetic oligonucleotide
  Sense strand starting at position 2320 of SEQ ID NO: 1563518
agaguuggguguuagauuu

SEQ ID NO: 1816742 - RNA, 19 nt, Artificial Sequence
  Description of Artificial Sequence: Synthetic oligonucleotide
  Antisense strand to SEQ ID NO: 1816741
aaaucuaacacccaacucu

SEQ ID NO: 1816743 - RNA, 19 nt, Artificial Sequence
  Description of Artificial Sequence: Synthetic oligonucleotide
  Sense strand starting at position 2421 of SEQ ID NO: 1563518
uuugguagcucuggagaaa

SEQ ID NO: 1816744 - RNA, 19 nt, Artificial Sequence
  Description of Artificial Sequence: Synthetic oligonucleotide
  Antisense strand to SEQ ID NO: 1816743
uuucuccagagcuaccaaa

SEQ ID NO: 1816745 - RNA, 19 nt, Artificial Sequence
  Description of Artificial Sequence: Synthetic oligonucleotide
  Sense strand starting at position 2457 of SEQ ID NO: 1563518
gggucauucugucagggaa

SEQ ID NO: 1816746 - RNA, 19 nt, Artificial Sequence
  Description of Artificial Sequence: Synthetic oligonucleotide
  Antisense strand to SEQ ID NO: 1816745
uucccugacagaaugaccc

SEQ ID NO: 1816747 - RNA, 19 nt, Artificial Sequence
  Description of Artificial Sequence: Synthetic oligonucleotide
  Sense strand starting at position 2459 of SEQ ID NO: 1563518
gucauucugucagggaaga

SEQ ID NO: 1816748 - RNA, 19 nt, Artificial Sequence
  Description of Artificial Sequence: Synthetic oligonucleotide
  Antisense strand to SEQ ID NO: 1816747
ucuucccugacagaaugac

SEQ ID NO: 1816749 - RNA, 19 nt, Artificial Sequence
  Description of Artificial Sequence: Synthetic oligonucleotide
  Sense strand starting at position 2460 of SEQ ID NO: 1563518
ucauucugucagggaagaa

SEQ ID NO: 1816750 - RNA, 19 nt, Artificial Sequence
  Description of Artificial Sequence: Synthetic oligonucleotide
  Antisense strand to SEQ ID NO: 1816749
uucuucccugacagaauga

SEQ ID NO: 1816751 - RNA, 19 nt, Artificial Sequence
  Description of Artificial Sequence: Synthetic oligonucleotide
  Sense strand starting at position 2493 of SEQ ID NO: 1563518
ggcggcugccugucaaacu

SEQ ID NO: 1816752 - RNA, 19 nt, Artificial Sequence
  Description of Artificial Sequence: Synthetic oligonucleotide
  Antisense strand to SEQ ID NO: 1816751
aguuugacaggcagccgcc

SEQ ID NO: 1816753 - RNA, 19 nt, Artificial Sequence
  Description of Artificial Sequence: Synthetic oligonucleotide
  Sense strand starting at position 2550 of SEQ ID NO: 1563518
augcacaguccugaucaau

SEQ ID NO: 1816754 - RNA, 19 nt, Artificial Sequence
  Description of Artificial Sequence: Synthetic oligonucleotide
  Antisense strand to SEQ ID NO: 1816753
auugaucaggacugugcau

SEQ ID NO: 1816755 - RNA, 19 nt, Artificial Sequence
  Description of Artificial Sequence: Synthetic oligonucleotide
  Sense strand starting at position 2983 of SEQ ID NO: 1563518
uggucagcuugggaucaua

SEQ ID NO: 1816756 - RNA, 19 nt, Artificial Sequence
  Description of Artificial Sequence: Synthetic oligonucleotide
  Antisense strand to SEQ ID NO: 1816755
uaugaucccaagcugacca

SEQ ID NO: 1816757 - RNA, 19 nt, Artificial Sequence
  Description of Artificial Sequence: Synthetic oligonucleotide
  Sense strand starting at position 3023 of SEQ ID NO: 1563518
cuggaaaccucagauccaa

SEQ ID NO: 1816758 - RNA, 19 nt, Artificial Sequence
  Description of Artificial Sequence: Synthetic oligonucleotide
  Antisense strand to SEQ ID NO: 1816757
uuggaucugagguuuccag

SEQ ID NO: 1816759 - RNA, 19 nt, Artificial Sequence
  Description of Artificial Sequence: Synthetic oligonucleotide
  Sense strand starting at position 3301 of SEQ ID NO: 1563518
cugugaggcuccuauuuau

SEQ ID NO: 1816760 - RNA, 19 nt, Artificial Sequence
  Description of Artificial Sequence: Synthetic oligonucleotide
  Antisense strand to SEQ ID NO: 1816759
auaaauaggagccucacag

SEQ ID NO: 1816761 - RNA, 19 nt, Artificial Sequence
  Description of Artificial Sequence: Synthetic oligonucleotide
  Sense strand starting at position 3307 of SEQ ID NO: 1563518
ggcuccuauuuauaaggca

SEQ ID NO: 1816762 - RNA, 19 nt, Artificial Sequence
  Description of Artificial Sequence: Synthetic oligonucleotide
  Antisense strand to SEQ ID NO: 1816761
ugccuuauaaauaggagcc

SEQ ID NO: 1816763 - RNA, 19 nt, Artificial Sequence
  Description of Artificial Sequence: Synthetic oligonucleotide
  Sense strand starting at position 3373 of SEQ ID NO: 1563518
agucaagauggcugcucua

SEQ ID NO: 1816764 - RNA, 19 nt, Artificial Sequence
  Description of Artificial Sequence: Synthetic oligonucleotide
  Antisense strand to SEQ ID NO: 1816763
uagagcagccaucuugacu

SEQ ID NO: 1816765 - RNA, 19 nt, Artificial Sequence
  Description of Artificial Sequence: Synthetic oligonucleotide
  Sense strand starting at position 793 of SEQ ID NO: 1563519
aauaaauuggcuggacaug

SEQ ID NO: 1816766 - RNA, 19 nt, Artificial Sequence
  Description of Artificial Sequence: Synthetic oligonucleotide
  Antisense strand to SEQ ID NO: 1816765
cauguccagccaauuuauu

SEQ ID NO: 1816767 - RNA, 19 nt, Artificial Sequence
  Description of Artificial Sequence: Synthetic oligonucleotide
  Sense strand starting at position 1020 of SEQ ID NO: 1563519
gggaguuuguuuaauggga

SEQ ID NO: 1816768 - RNA, 19 nt, Artificial Sequence
  Description of Artificial Sequence: Synthetic oligonucleotide
  Antisense strand to SEQ ID NO: 1816767
ucccauuaaacaaacuccc

SEQ ID NO: 1816769 - RNA, 19 nt, Artificial Sequence
  Description of Artificial Sequence: Synthetic oligonucleotide
  Sense strand starting at position 1024 of SEQ ID NO: 1563519
guuuguuuaaugggaguag

SEQ ID NO: 1816770 - RNA, 19 nt, Artificial Sequence
  Description of Artificial Sequence: Synthetic oligonucleotide
  Antisense strand to SEQ ID NO: 1816769
cuacucccauuaaacaaac

SEQ ID NO: 1816771 - RNA, 19 nt, Artificial Sequence
  Description of Artificial Sequence: Synthetic oligonucleotide
  Sense strand starting at position 1028 of SEQ ID NO: 1563519
guuuaaugggaguaguuuc

SEQ ID NO: 1816772 - RNA, 19 nt, Artificial Sequence
  Description of Artificial Sequence: Synthetic oligonucleotide
  Antisense strand to SEQ ID NO: 1816771
gaaacuacucccauuaaac

SEQ ID NO: 1816773 - RNA, 19 nt, Artificial Sequence
  Description of Artificial Sequence: Synthetic oligonucleotide
  Sense strand starting at position 1104 of SEQ ID NO: 1563519
uguagucaacacuacugaa

SEQ ID NO: 1816774 - RNA, 19 nt, Artificial Sequence
  Description of Artificial Sequence: Synthetic oligonucleotide
  Antisense strand to SEQ ID NO: 1816773
uucaguaguguugacuaca

SEQ ID NO: 1816775 - RNA, 19 nt, Artificial Sequence
  Description of Artificial Sequence: Synthetic oligonucleotide
  Sense strand starting at position 1280 of SEQ ID NO: 1563519
acuggugaauguuuacuca

SEQ ID NO: 1816776 - RNA, 19 nt, Artificial Sequence
  Description of Artificial Sequence: Synthetic oligonucleotide
  Antisense strand to SEQ ID NO: 1816775
ugaguaaacauucaccagu

SEQ ID NO: 1816777 - RNA, 19 nt, Artificial Sequence
  Description of Artificial Sequence: Synthetic oligonucleotide
  Sense strand starting at position 1438 of SEQ ID NO: 1563519
aguaauuauugcuuuacag

SEQ ID NO: 1816778 - RNA, 19 nt, Artificial Sequence
  Description of Artificial Sequence: Synthetic oligonucleotide
  Antisense strand to SEQ ID NO: 1816777
cuguaaagcaauaauuacu

SEQ ID NO: 1816779 - RNA, 19 nt, Artificial Sequence
  Description of Artificial Sequence: Synthetic oligonucleotide
  Sense strand starting at position 1457 of SEQ ID NO: 1563519
auccguuuccacuacuaga

SEQ ID NO: 1816780 - RNA, 19 nt, Artificial Sequence
  Description of Artificial Sequence: Synthetic oligonucleotide
  Antisense strand to SEQ ID NO: 1816779
ucuaguaguggaaacggau

SEQ ID NO: 1816781 - RNA, 19 nt, Artificial Sequence
  Description of Artificial Sequence: Synthetic oligonucleotide
  Sense strand starting at position 1528 of SEQ ID NO: 1563519
agacuuagggcuugauaag

SEQ ID NO: 1816782 - RNA, 19 nt, Artificial Sequence
  Description of Artificial Sequence: Synthetic oligonucleotide
  Antisense strand to SEQ ID NO: 1816781
cuuaucaagcccuaagucu

SEQ ID NO: 1816783 - RNA, 19 nt, Artificial Sequence
  Description of Artificial Sequence: Synthetic oligonucleotide
  Sense strand starting at position 1534 of SEQ ID NO: 1563519
agggcuugauaagcugaaa

SEQ ID NO: 1816784 - RNA, 19 nt, Artificial Sequence
  Description of Artificial Sequence: Synthetic oligonucleotide
  Antisense strand to SEQ ID NO: 1816783
uuucagcuuaucaagcccu

SEQ ID NO: 1816785 - RNA, 19 nt, Artificial Sequence
  Description of Artificial Sequence: Synthetic oligonucleotide
  Sense strand starting at position 1557 of SEQ ID NO: 1563519
ucaagaagggcuugauuaa

SEQ ID NO: 1816786 - RNA, 19 nt, Artificial Sequence
  Description of Artificial Sequence: Synthetic oligonucleotide
  Antisense strand to SEQ ID NO: 1816785
uuaaucaagcccuucuuga

SEQ ID NO: 1816787 - RNA, 19 nt, Artificial Sequence
  Description of Artificial Sequence: Synthetic oligonucleotide
  Sense strand starting at position 1668 of SEQ ID NO: 1563519
gucaaacauccagagcuga

SEQ ID NO: 1816788 - RNA, 19 nt, Artificial Sequence
  Description of Artificial Sequence: Synthetic oligonucleotide
  Antisense strand to SEQ ID NO: 1816787
ucagcucuggauguuugac

SEQ ID NO: 1816789 - RNA, 19 nt, Artificial Sequence
  Description of Artificial Sequence: Synthetic oligonucleotide
  Sense strand starting at position 1829 of SEQ ID NO: 1563519
gacauaccuuagguaauga

SEQ ID NO: 1816790 - RNA, 19 nt, Artificial Sequence
  Description of Artificial Sequence: Synthetic oligonucleotide
  Antisense strand to SEQ ID NO: 1816789
ucauuaccuaagguauguc

SEQ ID NO: 1816791 - RNA, 19 nt, Artificial Sequence
  Description of Artificial Sequence: Synthetic oligonucleotide
  Sense strand starting at position 1965 of SEQ ID NO: 1563519
gagcuuggagcuuagaguu

SEQ ID NO: 1816792 - RNA, 19 nt, Artificial Sequence
  Description of Artificial Sequence: Synthetic oligonucleotide
  Antisense strand to SEQ ID NO: 1816791
aacucuaagcuccaagcuc

SEQ ID NO: 1816793 - RNA, 19 nt, Artificial Sequence
  Description of Artificial Sequence: Synthetic oligonucleotide
  Sense strand starting at position 1988 of SEQ ID NO: 1563519
gcuugaauuucgcucacuc

SEQ ID NO: 1816794 - RNA, 19 nt, Artificial Sequence
  Description of Artificial Sequence: Synthetic oligonucleotide
  Antisense strand to SEQ ID NO: 1816793
gagugagcgaaauucaagc

SEQ ID NO: 1816795 - RNA, 19 nt, Artificial Sequence
  Description of Artificial Sequence: Synthetic oligonucleotide
  Sense strand starting at position 2162 of SEQ ID NO: 1563519
gaucucugccuucgagaca

SEQ ID NO: 1816796 - RNA, 19 nt, Artificial Sequence
  Description of Artificial Sequence: Synthetic oligonucleotide
  Antisense strand to SEQ ID NO: 1816795
ugucucgaaggcagagauc

SEQ ID NO: 1816797 - RNA, 19 nt, Artificial Sequence
  Description of Artificial Sequence: Synthetic oligonucleotide
  Sense strand starting at position 2181 of SEQ ID NO: 1563519
cggagugugcugccucagu

SEQ ID NO: 1816798 - RNA, 19 nt, Artificial Sequence
  Description of Artificial Sequence: Synthetic oligonucleotide
  Antisense strand to SEQ ID NO: 1816797
acugaggcagcacacuccg

SEQ ID NO: 1816799 - RNA, 19 nt, Artificial Sequence
  Description of Artificial Sequence: Synthetic oligonucleotide
  Sense strand starting at position 2198 of SEQ ID NO: 1563519
gucugugaucccucgcguu

SEQ ID NO: 1816800 - RNA, 19 nt, Artificial Sequence
  Description of Artificial Sequence: Synthetic oligonucleotide
  Antisense strand to SEQ ID NO: 1816799
aacgcgagggaucacagac

SEQ ID NO: 1816801 - RNA, 19 nt, Artificial Sequence
  Description of Artificial Sequence: Synthetic oligonucleotide
  Sense strand starting at position 2202 of SEQ ID NO: 1563519
gugaucccucgcguuucaa

SEQ ID NO: 1816802 - RNA, 19 nt, Artificial Sequence
  Description of Artificial Sequence: Synthetic oligonucleotide
  Antisense strand to SEQ ID NO: 1816801
uugaaacgcgagggaucac

SEQ ID NO: 1816803 - RNA, 19 nt, Artificial Sequence
  Description of Artificial Sequence: Synthetic oligonucleotide
  Sense strand starting at position 2258 of SEQ ID NO: 1563519
gugcgugugccaucauugu

SEQ ID NO: 1816804 - RNA, 19 nt, Artificial Sequence
  Description of Artificial Sequence: Synthetic oligonucleotide
  Antisense strand to SEQ ID NO: 1816803
acaaugauggcacacgcac

SEQ ID NO: 1816805 - RNA, 19 nt, Artificial Sequence
  Description of Artificial Sequence: Synthetic oligonucleotide
  Sense strand starting at position 2268 of SEQ ID NO: 1563519
caucauugugaguggagga

SEQ ID NO: 1816806 - RNA, 19 nt, Artificial Sequence
  Description of Artificial Sequence: Synthetic oligonucleotide
  Antisense strand to SEQ ID NO: 1816805
uccuccacucacaaugaug

SEQ ID NO: 1816807 - RNA, 19 nt, Artificial Sequence
  Description of Artificial Sequence: Synthetic oligonucleotide
  Sense strand starting at position 2281 of SEQ ID NO: 1563519
ggaggagacugcccgauau

SEQ ID NO: 1816808 - RNA, 19 nt, Artificial Sequence
  Description of Artificial Sequence: Synthetic oligonucleotide
  Antisense strand to SEQ ID NO: 1816807
auaucgggcagucuccucc

SEQ ID NO: 1816809 - RNA, 19 nt, Artificial Sequence
  Description of Artificial Sequence: Synthetic oligonucleotide
  Sense strand starting at position 2285 of SEQ ID NO: 1563519
gagacugcccgauaugauc

SEQ ID NO: 1816810 - RNA, 19 nt, Artificial Sequence
  Description of Artificial Sequence: Synthetic oligonucleotide
  Antisense strand to SEQ ID NO: 1816809
gaucauaucgggcagucuc

SEQ ID NO: 1816811 - RNA, 19 nt, Artificial Sequence
  Description of Artificial Sequence: Synthetic oligonucleotide
  Sense strand starting at position 2409 of SEQ ID NO: 1563519
cacugaccgugcuuugaau

SEQ ID NO: 1816812 - RNA, 19 nt, Artificial Sequence
  Description of Artificial Sequence: Synthetic oligonucleotide
  Antisense strand to SEQ ID NO: 1816811
auucaaagcacggucagug

SEQ ID NO: 1816813 - RNA, 19 nt, Artificial Sequence
  Description of Artificial Sequence: Synthetic oligonucleotide
  Sense strand starting at position 2441 of SEQ ID NO: 1563519
gaggcauagucccugugau

SEQ ID NO: 1816814 - RNA, 19 nt, Artificial Sequence
  Description of Artificial Sequence: Synthetic oligonucleotide
  Antisense strand to SEQ ID NO: 1816813
aucacagggacuaugccuc

SEQ ID NO: 1816815 - RNA, 19 nt, Artificial Sequence
  Description of Artificial Sequence: Synthetic oligonucleotide
  Sense strand starting at position 2442 of SEQ ID NO: 1563519
aggcauagucccugugauu

SEQ ID NO: 1816816 - RNA, 19 nt, Artificial Sequence
  Description of Artificial Sequence: Synthetic oligonucleotide
  Antisense strand to SEQ ID NO: 1816815
aaucacagggacuaugccu

SEQ ID NO: 1816817 - RNA, 19 nt, Artificial Sequence
  Description of Artificial Sequence: Synthetic oligonucleotide
  Sense strand starting at position 2934 of SEQ ID NO: 1563519
ggcguuaugcuguauuuau

SEQ ID NO: 1816818 - RNA, 19 nt, Artificial Sequence
  Description of Artificial Sequence: Synthetic oligonucleotide
  Antisense strand to SEQ ID NO: 1816817
auaaauacagcauaacgcc

SEQ ID NO: 1816819 - RNA, 19 nt, Artificial Sequence
  Description of Artificial Sequence: Synthetic oligonucleotide
  Sense strand starting at position 3180 of SEQ ID NO: 1563519
gaaguagugcuguggucau

SEQ ID NO: 1816820 - RNA, 19 nt, Artificial Sequence
  Description of Artificial Sequence: Synthetic oligonucleotide
  Antisense strand to SEQ ID NO: 1816819
augaccacagcacuacuuc

SEQ ID NO: 1816821 - RNA, 19 nt, Artificial Sequence
  Description of Artificial Sequence: Synthetic oligonucleotide
  Sense strand starting at position 3184 of SEQ ID NO: 1563519
uagugcuguggucaucauu

SEQ ID NO: 1816822 - RNA, 19 nt, Artificial Sequence
  Description of Artificial Sequence: Synthetic oligonucleotide
  Antisense strand to SEQ ID NO: 1816821
aaugaugaccacagcacua

SEQ ID NO: 1816823 - RNA, 19 nt, Artificial Sequence
  Description of Artificial Sequence: Synthetic oligonucleotide
  Sense strand starting at position 3271 of SEQ ID NO: 1563519
agcuuaaggaaaugugauu

SEQ ID NO: 1816824 - RNA, 19 nt, Artificial Sequence
  Description of Artificial Sequence: Synthetic oligonucleotide
  Antisense strand to SEQ ID NO: 1816823
aaucacauuuccuuaagcu

SEQ ID NO: 1816825 - RNA, 19 nt, Artificial Sequence
  Description of Artificial Sequence: Synthetic oligonucleotide
  Sense strand starting at position 3276 of SEQ ID NO: 1563519
aaggaaaugugauugaguu

SEQ ID NO: 1816826 - RNA, 19 nt, Artificial Sequence
  Description of Artificial Sequence: Synthetic oligonucleotide
  Antisense strand to SEQ ID NO: 1816825
aacucaaucacauuuccuu

SEQ ID NO: 1816827 - RNA, 19 nt, Artificial Sequence
  Description of Artificial Sequence: Synthetic oligonucleotide
  Sense strand starting at position 3277 of SEQ ID NO: 1563519
aggaaaugugauugaguuu

SEQ ID NO: 1816828 - RNA, 19 nt, Artificial Sequence
  Description of Artificial Sequence: Synthetic oligonucleotide
  Antisense strand to SEQ ID NO: 1816827
aaacucaaucacauuuccu

SEQ ID NO: 1816829 - RNA, 19 nt, Artificial Sequence
  Description of Artificial Sequence: Synthetic oligonucleotide
  Sense strand starting at position 3286 of SEQ ID NO: 1563519
gauugaguuuaaguggcuu

SEQ ID NO: 1816830 - RNA, 19 nt, Artificial Sequence
  Description of Artificial Sequence: Synthetic oligonucleotide
  Antisense strand to SEQ ID NO: 1816829
aagccacuuaaacucaauc

SEQ ID NO: 1816831 - RNA, 19 nt, Artificial Sequence
  Description of Artificial Sequence: Synthetic oligonucleotide
  Sense strand starting at position 3325 of SEQ ID NO: 1563519
gagguugugggccaacaaa

SEQ ID NO: 1816832 - RNA, 19 nt, Artificial Sequence
  Description of Artificial Sequence: Synthetic oligonucleotide
  Antisense strand to SEQ ID NO: 1816831
uuuguuggcccacaaccuc

SEQ ID NO: 1816833 - RNA, 19 nt, Artificial Sequence
  Description of Artificial Sequence: Synthetic oligonucleotide
  Sense strand starting at position 3435 of SEQ ID NO: 1563519
ccagucauacaucauaugu

SEQ ID NO: 1816834 - RNA, 19 nt, Artificial Sequence
  Description of Artificial Sequence: Synthetic oligonucleotide
  Antisense strand to SEQ ID NO: 1816833
acauaugauguaugacugg

SEQ ID NO: 1816835 - RNA, 19 nt, Artificial Sequence
  Description of Artificial Sequence: Synthetic oligonucleotide
  Sense strand starting at position 3481 of SEQ ID NO: 1563519
uuuauagaccguuaugagu

SEQ ID NO: 1816836 - RNA, 19 nt, Artificial Sequence
  Description of Artificial Sequence: Synthetic oligonucleotide
  Antisense strand to SEQ ID NO: 1816835
acucauaacggucuauaaa

SEQ ID NO: 1816837 - RNA, 19 nt, Artificial Sequence
  Description of Artificial Sequence: Synthetic oligonucleotide
  Sense strand starting at position 3521 of SEQ ID NO: 1563519
gguucaguggcucacugaa

SEQ ID NO: 1816838 - RNA, 19 nt, Artificial Sequence
  Description of Artificial Sequence: Synthetic oligonucleotide
  Antisense strand to SEQ ID NO: 1816837
uucagugagccacugaacc

SEQ ID NO: 1816839 - RNA, 19 nt, Artificial Sequence
  Description of Artificial Sequence: Synthetic oligonucleotide
  Sense strand starting at position 3851 of SEQ ID NO: 1563519
ugguuuguaugacuuuaag

SEQ ID NO: 1816840 - RNA, 19 nt, Artificial Sequence
  Description of Artificial Sequence: Synthetic oligonucleotide
  Antisense strand to SEQ ID NO: 1816839
cuuaaagucauacaaacca

SEQ ID NO: 1816841 - RNA, 19 nt, Artificial Sequence
  Description of Artificial Sequence: Synthetic oligonucleotide
  Sense strand starting at position 3863 of SEQ ID NO: 1563519
cuuuaaggccuuuauuaag

SEQ ID NO: 1816842 - RNA, 19 nt, Artificial Sequence
  Description of Artificial Sequence: Synthetic oligonucleotide
  Antisense strand to SEQ ID NO: 1816841
cuuaauaaaggccuuaaag

SEQ ID NO: 1816843 - RNA, 19 nt, Artificial Sequence
  Description of Artificial Sequence: Synthetic oligonucleotide
  Sense strand starting at position 3955 of SEQ ID NO: 1563519
uaagcuuccugagcuagga

SEQ ID NO: 1816844 - RNA, 19 nt, Artificial Sequence
  Description of Artificial Sequence: Synthetic oligonucleotide
  Antisense strand to SEQ ID NO: 1816843
uccuagcucaggaagcuua

SEQ ID NO: 1816845 - RNA, 19 nt, Artificial Sequence
  Description of Artificial Sequence: Synthetic oligonucleotide
  Sense strand starting at position 9 of SEQ ID NO: 1563520
guugcugaggucaggaguu

SEQ ID NO: 1816846 - RNA, 19 nt, Artificial Sequence
  Description of Artificial Sequence: Synthetic oligonucleotide
  Antisense strand to SEQ ID NO: 1816845
aacuccugaccucagcaac

SEQ ID NO: 1816847 - RNA, 19 nt, Artificial Sequence
  Description of Artificial Sequence: Synthetic oligonucleotide
  Sense strand starting at position 296 of SEQ ID NO: 1563520
cuguaauacgguugggacu

SEQ ID NO: 1816848 - RNA, 19 nt, Artificial Sequence
  Description of Artificial Sequence: Synthetic oligonucleotide
  Antisense strand to SEQ ID NO: 1816847
agucccaaccguauuacag

SEQ ID NO: 1816849 - RNA, 19 nt, Artificial Sequence
  Description of Artificial Sequence: Synthetic oligonucleotide
  Sense strand starting at position 392 of SEQ ID NO: 1563520
gaugguuuguuagcugaau

SEQ ID NO: 1816850 - RNA, 19 nt, Artificial Sequence
  Description of Artificial Sequence: Synthetic oligonucleotide
  Antisense strand to SEQ ID NO: 1816849
auucagcuaacaaaccauc

SEQ ID NO: 1816851 - RNA, 19 nt, Artificial Sequence
  Description of Artificial Sequence: Synthetic oligonucleotide
  Sense strand starting at position 393 of SEQ ID NO: 1563520
augguuuguuagcugaaua

SEQ ID NO: 1816852 - RNA, 19 nt, Artificial Sequence
  Description of Artificial Sequence: Synthetic oligonucleotide
  Antisense strand to SEQ ID NO: 1816851
uauucagcuaacaaaccau

SEQ ID NO: 1816853 - RNA, 19 nt, Artificial Sequence
  Description of Artificial Sequence: Synthetic oligonucleotide
  Sense strand starting at position 398 of SEQ ID NO: 1563520
uuguuagcugaauaugacu

SEQ ID NO: 1816854 - RNA, 19 nt, Artificial Sequence
  Description of Artificial Sequence: Synthetic oligonucleotide
  Antisense strand to SEQ ID NO: 1816853
agucauauucagcuaacaa

SEQ ID NO: 1816855 - RNA, 19 nt, Artificial Sequence
  Description of Artificial Sequence: Synthetic oligonucleotide
  Sense strand starting at position 403 of SEQ ID NO: 1563520
agcugaauaugacucaauu

SEQ ID NO: 1816856 - RNA, 19 nt, Artificial Sequence
  Description of Artificial Sequence: Synthetic oligonucleotide
  Antisense strand to SEQ ID NO: 1816855
aauugagucauauucagcu

SEQ ID NO: 1816857 - RNA, 19 nt, Artificial Sequence
  Description of Artificial Sequence: Synthetic oligonucleotide
  Sense strand starting at position 419 of SEQ ID NO: 1563520
auucuucuguuugugaaac

SEQ ID NO: 1816858 - RNA, 19 nt, Artificial Sequence
  Description of Artificial Sequence: Synthetic oligonucleotide
  Antisense strand to SEQ ID NO: 1816857
guuucacaaacagaagaau

SEQ ID NO: 1816859 - RNA, 19 nt, Artificial Sequence
  Description of Artificial Sequence: Synthetic oligonucleotide
  Sense strand starting at position 453 of SEQ ID NO: 1563520
uggaaaucuuuccuuggga

SEQ ID NO: 1816860 - RNA, 19 nt, Artificial Sequence
  Description of Artificial Sequence: Synthetic oligonucleotide
  Antisense strand to SEQ ID NO: 1816859
ucccaaggaaagauuucca

SEQ ID NO: 1816861 - RNA, 19 nt, Artificial Sequence
  Description of Artificial Sequence: Synthetic oligonucleotide
  Sense strand starting at position 456 of SEQ ID NO: 1563520
aaaucuuuccuugggaagu

SEQ ID NO: 1816862 - RNA, 19 nt, Artificial Sequence
  Description of Artificial Sequence: Synthetic oligonucleotide
  Antisense strand to SEQ ID NO: 1816861
acuucccaaggaaagauuu

SEQ ID NO: 1816863 - RNA, 19 nt, Artificial Sequence
  Description of Artificial Sequence: Synthetic oligonucleotide
  Sense strand starting at position 521 of SEQ ID NO: 1563520
uuuaaagcgcuguauugaa

SEQ ID NO: 1816864 - RNA, 19 nt, Artificial Sequence
  Description of Artificial Sequence: Synthetic oligonucleotide
  Antisense strand to SEQ ID NO: 1816863
uucaauacagcgcuuuaaa

SEQ ID NO: 1816865 - RNA, 19 nt, Artificial Sequence
  Description of Artificial Sequence: Synthetic oligonucleotide
  Sense strand starting at position 531 of SEQ ID NO: 1563520
uguauugaaccacaguauu

SEQ ID NO: 1816866 - RNA, 19 nt, Artificial Sequence
  Description of Artificial Sequence: Synthetic oligonucleotide
  Antisense strand to SEQ ID NO: 1816865
aauacugugguucaauaca

SEQ ID NO: 1816867 - RNA, 19 nt, Artificial Sequence
  Description of Artificial Sequence: Synthetic oligonucleotide
  Sense strand starting at position 543 of SEQ ID NO: 1563520
caguauuucuguuuaucgu

SEQ ID NO: 1816868 - RNA, 19 nt, Artificial Sequence
  Description of Artificial Sequence: Synthetic oligonucleotide
  Antisense strand to SEQ ID NO: 1816867
acgauaaacagaaauacug

SEQ ID NO: 1816869 - RNA, 19 nt, Artificial Sequence
  Description of Artificial Sequence: Synthetic oligonucleotide
  Sense strand starting at position 544 of SEQ ID NO: 1563520
aguauuucuguuuaucgua

SEQ ID NO: 1816870 - RNA, 19 nt, Artificial Sequence
  Description of Artificial Sequence: Synthetic oligonucleotide
  Antisense strand to SEQ ID NO: 1816869
uacgauaaacagaaauacu

SEQ ID NO: 1816871 - RNA, 19 nt, Artificial Sequence
  Description of Artificial Sequence: Synthetic oligonucleotide
  Sense strand starting at position 1009 of SEQ ID NO: 1563520
aacccauggugagcaaauu

SEQ ID NO: 1816872 - RNA, 19 nt, Artificial Sequence
  Description of Artificial Sequence: Synthetic oligonucleotide
  Antisense strand to SEQ ID NO: 1816871
aauuugcucaccauggguu

SEQ ID NO: 1816873 - RNA, 19 nt, Artificial Sequence
  Description of Artificial Sequence: Synthetic oligonucleotide
  Sense strand starting at position 1647 of SEQ ID NO: 1563520
guaaguuucucaucuggga

SEQ ID NO: 1816874 - RNA, 19 nt, Artificial Sequence
  Description of Artificial Sequence: Synthetic oligonucleotide
  Antisense strand to SEQ ID NO: 1816873
ucccagaugagaaacuuac

SEQ ID NO: 1816875 - RNA, 19 nt, Artificial Sequence
  Description of Artificial Sequence: Synthetic oligonucleotide
  Sense strand starting at position 1894 of SEQ ID NO: 1563520
ccaauaucacugugggugu

SEQ ID NO: 1816876 - RNA, 19 nt, Artificial Sequence
  Description of Artificial Sequence: Synthetic oligonucleotide
  Antisense strand to SEQ ID NO: 1816875
acacccacagugauauugg

SEQ ID NO: 1816877 - RNA, 19 nt, Artificial Sequence
  Description of Artificial Sequence: Synthetic oligonucleotide
  Sense strand starting at position 1907 of SEQ ID NO: 1563520
ggguguacccgcgaagaga

SEQ ID NO: 1816878 - RNA, 19 nt, Artificial Sequence
  Description of Artificial Sequence: Synthetic oligonucleotide
  Antisense strand to SEQ ID NO: 1816877
ucucuucgcggguacaccc

SEQ ID NO: 1816879 - RNA, 19 nt, Artificial Sequence
  Description of Artificial Sequence: Synthetic oligonucleotide
  Sense strand starting at position 1932 of SEQ ID NO: 1563520
gcuucaagcgcugucgaua

SEQ ID NO: 1816880 - RNA, 19 nt, Artificial Sequence
  Description of Artificial Sequence: Synthetic oligonucleotide
  Antisense strand to SEQ ID NO: 1816879
uaucgacagcgcuugaagc

SEQ ID NO: 1816881 - RNA, 19 nt, Artificial Sequence
  Description of Artificial Sequence: Synthetic oligonucleotide
  Sense strand starting at position 1933 of SEQ ID NO: 1563520
cuucaagcgcugucgauaa

SEQ ID NO: 1816882 - RNA, 19 nt, Artificial Sequence
  Description of Artificial Sequence: Synthetic oligonucleotide
  Antisense strand to SEQ ID NO: 1816881
uuaucgacagcgcuugaag

SEQ ID NO: 1816883 - RNA, 19 nt, Artificial Sequence
  Description of Artificial Sequence: Synthetic oligonucleotide
  Sense strand starting at position 2539 of SEQ ID NO: 1563520
gagagauggcguugaggaa

SEQ ID NO: 1816884 - RNA, 19 nt, Artificial Sequence
  Description of Artificial Sequence: Synthetic oligonucleotide
  Antisense strand to SEQ ID NO: 1816883
uuccucaacgccaucucuc

SEQ ID NO: 1816885 - RNA, 19 nt, Artificial Sequence
  Description of Artificial Sequence: Synthetic oligonucleotide
  Sense strand starting at position 2552 of SEQ ID NO: 1563520
gaggaaagcgcggaaaguu

SEQ ID NO: 1816886 - RNA, 19 nt, Artificial Sequence
  Description of Artificial Sequence: Synthetic oligonucleotide
  Antisense strand to SEQ ID NO: 1816885
aacuuuccgcgcuuuccuc

SEQ ID NO: 1816887 - RNA, 19 nt, Artificial Sequence
  Description of Artificial Sequence: Synthetic oligonucleotide
  Sense strand starting at position 2593 of SEQ ID NO: 1563520
ugaacuuguuagucuacca

SEQ ID NO: 1816888 - RNA, 19 nt, Artificial Sequence
  Description of Artificial Sequence: Synthetic oligonucleotide
  Antisense strand to SEQ ID NO: 1816887
ugguagacuaacaaguuca

SEQ ID NO: 1816889 - RNA, 19 nt, Artificial Sequence
  Description of Artificial Sequence: Synthetic oligonucleotide
  Sense strand starting at position 2667 of SEQ ID NO: 1563520
aggacuaucuaguucugua

SEQ ID NO: 1816890 - RNA, 19 nt, Artificial Sequence
  Description of Artificial Sequence: Synthetic oligonucleotide
  Antisense strand to SEQ ID NO: 1816889
uacagaacuagauaguccu

SEQ ID NO: 1816891 - RNA, 19 nt, Artificial Sequence
  Description of Artificial Sequence: Synthetic oligonucleotide
  Sense strand starting at position 2672 of SEQ ID NO: 1563520
uaucuaguucuguacaguu

SEQ ID NO: 1816892 - RNA, 19 nt, Artificial Sequence
  Description of Artificial Sequence: Synthetic oligonucleotide
  Antisense strand to SEQ ID NO: 1816891
aacuguacagaacuagaua

SEQ ID NO: 1816893 - RNA, 19 nt, Artificial Sequence
  Description of Artificial Sequence: Synthetic oligonucleotide
  Sense strand starting at position 2708 of SEQ ID NO: 1563520
agugauaaggugcaaugau

SEQ ID NO: 1816894 - RNA, 19 nt, Artificial Sequence
  Description of Artificial Sequence: Synthetic oligonucleotide
  Antisense strand to SEQ ID NO: 1816893
aucauugcaccuuaucacu

SEQ ID NO: 1816895 - RNA, 19 nt, Artificial Sequence
  Description of Artificial Sequence: Synthetic oligonucleotide
  Sense strand starting at position 2716 of SEQ ID NO: 1563520
ggugcaaugauuggcuaga

SEQ ID NO: 1816896 - RNA, 19 nt, Artificial Sequence
  Description of Artificial Sequence: Synthetic oligonucleotide
  Antisense strand to SEQ ID NO: 1816895
ucuagccaaucauugcacc

SEQ ID NO: 1816897 - RNA, 19 nt, Artificial Sequence
  Description of Artificial Sequence: Synthetic oligonucleotide
  Sense strand starting at position 2717 of SEQ ID NO: 1563520
gugcaaugauuggcuagaa

SEQ ID NO: 1816898 - RNA, 19 nt, Artificial Sequence
  Description of Artificial Sequence: Synthetic oligonucleotide
  Antisense strand to SEQ ID NO: 1816897
uucuagccaaucauugcac

SEQ ID NO: 1816899 - RNA, 19 nt, Artificial Sequence
  Description of Artificial Sequence: Synthetic oligonucleotide
  Sense strand starting at position 2718 of SEQ ID NO: 1563520
ugcaaugauuggcuagaag

SEQ ID NO: 1816900 - RNA, 19 nt, Artificial Sequence
  Description of Artificial Sequence: Synthetic oligonucleotide
  Antisense strand to SEQ ID NO: 1816899
cuucuagccaaucauugca

SEQ ID NO: 1816901 - RNA, 19 nt, Artificial Sequence
  Description of Artificial Sequence: Synthetic oligonucleotide
  Sense strand starting at position 2736 of SEQ ID NO: 1563520
ggcugcuugcucuggauuu

SEQ ID NO: 1816902 - RNA, 19 nt, Artificial Sequence
  Description of Artificial Sequence: Synthetic oligonucleotide
  Antisense strand to SEQ ID NO: 1816901
aaauccagagcaagcagcc

SEQ ID NO: 1816903 - RNA, 19 nt, Artificial Sequence
  Description of Artificial Sequence: Synthetic oligonucleotide
  Sense strand starting at position 2900 of SEQ ID NO: 1563520
uaugucagagugcaaguau

SEQ ID NO: 1816904 - RNA, 19 nt, Artificial Sequence
  Description of Artificial Sequence: Synthetic oligonucleotide
  Antisense strand to SEQ ID NO: 1816903
auacuugcacucugacaua

SEQ ID NO: 1816905 - RNA, 19 nt, Artificial Sequence
  Description of Artificial Sequence: Synthetic oligonucleotide
  Sense strand starting at position 2920 of SEQ ID NO: 1563520
gaaaucugcuaagugcaua

SEQ ID NO: 1816906 - RNA, 19 nt, Artificial Sequence
  Description of Artificial Sequence: Synthetic oligonucleotide
  Antisense strand to SEQ ID NO: 1816905
uaugcacuuagcagauuuc

SEQ ID NO: 1816907 - RNA, 19 nt, Artificial Sequence
  Description of Artificial Sequence: Synthetic oligonucleotide
  Sense strand starting at position 3012 of SEQ ID NO: 1563520
gguuccugcgcuucuuauu

SEQ ID NO: 1816908 - RNA, 19 nt, Artificial Sequence
  Description of Artificial Sequence: Synthetic oligonucleotide
  Antisense strand to SEQ ID NO: 1816907
aauaagaagcgcaggaacc

SEQ ID NO: 1816909 - RNA, 19 nt, Artificial Sequence
  Description of Artificial Sequence: Synthetic oligonucleotide
  Sense strand starting at position 3173 of SEQ ID NO: 1563520
cugaauucuugcuccauag

SEQ ID NO: 1816910 - RNA, 19 nt, Artificial Sequence
  Description of Artificial Sequence: Synthetic oligonucleotide
  Antisense strand to SEQ ID NO: 1816909
cuauggagcaagaauucag

SEQ ID NO: 1816911 - RNA, 19 nt, Artificial Sequence
  Description of Artificial Sequence: Synthetic oligonucleotide
  Sense strand starting at position 3175 of SEQ ID NO: 1563520
gaauucuugcuccauagug

SEQ ID NO: 1816912 - RNA, 19 nt, Artificial Sequence
  Description of Artificial Sequence: Synthetic oligonucleotide
  Antisense strand to SEQ ID NO: 1816911
cacuauggagcaagaauuc

SEQ ID NO: 1816913 - RNA, 19 nt, Artificial Sequence
  Description of Artificial Sequence: Synthetic oligonucleotide
  Sense strand starting at position 3177 of SEQ ID NO: 1563520
auucuugcuccauagugau

SEQ ID NO: 1816914 - RNA, 19 nt, Artificial Sequence
  Description of Artificial Sequence: Synthetic oligonucleotide
  Antisense strand to SEQ ID NO: 1816913
aucacuauggagcaagaau

SEQ ID NO: 1816915 - RNA, 19 nt, Artificial Sequence
  Description of Artificial Sequence: Synthetic oligonucleotide
  Sense strand starting at position 3207 of SEQ ID NO: 1563520
aaaguccugggcuaugauu

SEQ ID NO: 1816916 - RNA, 19 nt, Artificial Sequence
  Description of Artificial Sequence: Synthetic oligonucleotide
  Antisense strand to SEQ ID NO: 1816915
aaucauagcccaggacuuu

SEQ ID NO: 1816917 - RNA, 19 nt, Artificial Sequence
  Description of Artificial Sequence: Synthetic oligonucleotide
  Sense strand starting at position 3209 of SEQ ID NO: 1563520
aguccugggcuaugauuga

SEQ ID NO: 1816918 - RNA, 19 nt, Artificial Sequence
  Description of Artificial Sequence: Synthetic oligonucleotide
  Antisense strand to SEQ ID NO: 1816917
ucaaucauagcccaggacu

SEQ ID NO: 1816919 - RNA, 19 nt, Artificial Sequence
  Description of Artificial Sequence: Synthetic oligonucleotide
  Sense strand starting at position 3222 of SEQ ID NO: 1563520
gauugaaggcuguaugguu

SEQ ID NO: 1816920 - RNA, 19 nt, Artificial Sequence
  Description of Artificial Sequence: Synthetic oligonucleotide
  Antisense strand to SEQ ID NO: 1816919
aaccauacagccuucaauc

SEQ ID NO: 1816921 - RNA, 19 nt, Artificial Sequence
  Description of Artificial Sequence: Synthetic oligonucleotide
  Sense strand starting at position 3307 of SEQ ID NO: 1563520
ucuguagacuuaguuacua

SEQ ID NO: 1816922 - RNA, 19 nt, Artificial Sequence
  Description of Artificial Sequence: Synthetic oligonucleotide
  Antisense strand to SEQ ID NO: 1816921
uaguaacuaagucuacaga

SEQ ID NO: 1816923 - RNA, 19 nt, Artificial Sequence
  Description of Artificial Sequence: Synthetic oligonucleotide
  Sense strand starting at position 3412 of SEQ ID NO: 1563520
gacaguagacccugucuca

SEQ ID NO: 1816924 - RNA, 19 nt, Artificial Sequence
  Description of Artificial Sequence: Synthetic oligonucleotide
  Antisense strand to SEQ ID NO: 1816923
ugagacagggucuacuguc

SEQ ID NO: 1816925 - RNA, 19 nt, Artificial Sequence
  Description of Artificial Sequence: Synthetic oligonucleotide
  Sense strand starting at position 151 of SEQ ID NO: 1563521
ucauacuucgaugguagaa

SEQ ID NO: 1816926 - RNA, 19 nt, Artificial Sequence
  Description of Artificial Sequence: Synthetic oligonucleotide
  Antisense strand to SEQ ID NO: 1816925
uucuaccaucgaaguauga

SEQ ID NO: 1816927 - RNA, 19 nt, Artificial Sequence
  Description of Artificial Sequence: Synthetic oligonucleotide
  Sense strand starting at position 182 of SEQ ID NO: 1563521
uucugaccucuuuggaaau

SEQ ID NO: 1816928 - RNA, 19 nt, Artificial Sequence
  Description of Artificial Sequence: Synthetic oligonucleotide
  Antisense strand to SEQ ID NO: 1816927
auuuccaaagaggucagaa

SEQ ID NO: 1816929 - RNA, 19 nt, Artificial Sequence
  Description of Artificial Sequence: Synthetic oligonucleotide
  Sense strand starting at position 212 of SEQ ID NO: 1563521
aggaaacauucccuucguu

SEQ ID NO: 1816930 - RNA, 19 nt, Artificial Sequence
  Description of Artificial Sequence: Synthetic oligonucleotide
  Antisense strand to SEQ ID NO: 1816929
aacgaagggaauguuuccu

SEQ ID NO: 1816931 - RNA, 19 nt, Artificial Sequence
  Description of Artificial Sequence: Synthetic oligonucleotide
  Sense strand starting at position 342 of SEQ ID NO: 1563521
gugauacagccauaccaua

SEQ ID NO: 1816932 - RNA, 19 nt, Artificial Sequence
  Description of Artificial Sequence: Synthetic oligonucleotide
  Antisense strand to SEQ ID NO: 1816931
uaugguauggcuguaucac

SEQ ID NO: 1816933 - RNA, 19 nt, Artificial Sequence
  Description of Artificial Sequence: Synthetic oligonucleotide
  Sense strand starting at position 424 of SEQ ID NO: 1563521
acguguuaaugagugagaa

SEQ ID NO: 1816934 - RNA, 19 nt, Artificial Sequence
  Description of Artificial Sequence: Synthetic oligonucleotide
  Antisense strand to SEQ ID NO: 1816933
uucucacucauuaacacgu

SEQ ID NO: 1816935 - RNA, 19 nt, Artificial Sequence
  Description of Artificial Sequence: Synthetic oligonucleotide
  Sense strand starting at position 425 of SEQ ID NO: 1563521
cguguuaaugagugagaaa

SEQ ID NO: 1816936 - RNA, 19 nt, Artificial Sequence
  Description of Artificial Sequence: Synthetic oligonucleotide
  Antisense strand to SEQ ID NO: 1816935
uuucucacucauuaacacg

SEQ ID NO: 1816937 - RNA, 19 nt, Artificial Sequence
  Description of Artificial Sequence: Synthetic oligonucleotide
  Sense strand starting at position 426 of SEQ ID NO: 1563521
guguuaaugagugagaaau

SEQ ID NO: 1816938 - RNA, 19 nt, Artificial Sequence
  Description of Artificial Sequence: Synthetic oligonucleotide
  Antisense strand to SEQ ID NO: 1816937
auuucucacucauuaacac

SEQ ID NO: 1816939 - RNA, 19 nt, Artificial Sequence
  Description of Artificial Sequence: Synthetic oligonucleotide
  Sense strand starting at position 1054 of SEQ ID NO: 1563521
gacaguagauugcuuucua

SEQ ID NO: 1816940 - RNA, 19 nt, Artificial Sequence
  Description of Artificial Sequence: Synthetic oligonucleotide
  Antisense strand to SEQ ID NO: 1816939
uagaaagcaaucuacuguc

SEQ ID NO: 1816941 - RNA, 19 nt, Artificial Sequence
  Description of Artificial Sequence: Synthetic oligonucleotide
  Sense strand starting at position 1314 of SEQ ID NO: 1563521
gugugugauauugauugga

SEQ ID NO: 1816942 - RNA, 19 nt, Artificial Sequence
  Description of Artificial Sequence: Synthetic oligonucleotide
  Antisense strand to SEQ ID NO: 1816941
uccaaucaauaucacacac

SEQ ID NO: 1816943 - RNA, 19 nt, Artificial Sequence
  Description of Artificial Sequence: Synthetic oligonucleotide
  Sense strand starting at position 1316 of SEQ ID NO: 1563521
gugugauauugauuggauu

SEQ ID NO: 1816944 - RNA, 19 nt, Artificial Sequence
  Description of Artificial Sequence: Synthetic oligonucleotide
  Antisense strand to SEQ ID NO: 1816943
aauccaaucaauaucacac

SEQ ID NO: 1816945 - RNA, 19 nt, Artificial Sequence
  Description of Artificial Sequence: Synthetic oligonucleotide
  Sense strand starting at position 1341 of SEQ ID NO: 1563521
ccuugauucucucuaugga

SEQ ID NO: 1816946 - RNA, 19 nt, Artificial Sequence
  Description of Artificial Sequence: Synthetic oligonucleotide
  Antisense strand to SEQ ID NO: 1816945
uccauagagagaaucaagg

SEQ ID NO: 1816947 - RNA, 19 nt, Artificial Sequence
  Description of Artificial Sequence: Synthetic oligonucleotide
  Sense strand starting at position 1409 of SEQ ID NO: 1563521
cuacuccagucucuagauu

SEQ ID NO: 1816948 - RNA, 19 nt, Artificial Sequence
  Description of Artificial Sequence: Synthetic oligonucleotide
  Antisense strand to SEQ ID NO: 1816947
aaucuagagacuggaguag

SEQ ID NO: 1816949 - RNA, 19 nt, Artificial Sequence
  Description of Artificial Sequence: Synthetic oligonucleotide
  Sense strand starting at position 1436 of SEQ ID NO: 1563521
gcagcauaugacgaagaga

SEQ ID NO: 1816950 - RNA, 19 nt, Artificial Sequence
  Description of Artificial Sequence: Synthetic oligonucleotide
  Antisense strand to SEQ ID NO: 1816949
ucucuucgucauaugcugc

SEQ ID NO: 1816951 - RNA, 19 nt, Artificial Sequence
  Description of Artificial Sequence: Synthetic oligonucleotide
  Sense strand starting at position 1507 of SEQ ID NO: 1563521
agaauuggcaguuagcauu

SEQ ID NO: 1816952 - RNA, 19 nt, Artificial Sequence
  Description of Artificial Sequence: Synthetic oligonucleotide
  Antisense strand to SEQ ID NO: 1816951
aaugcuaacugccaauucu

SEQ ID NO: 1816953 - RNA, 19 nt, Artificial Sequence
  Description of Artificial Sequence: Synthetic oligonucleotide
  Sense strand starting at position 1709 of SEQ ID NO: 1563521
cgagaucacuuugcauaua

SEQ ID NO: 1816954 - RNA, 19 nt, Artificial Sequence
  Description of Artificial Sequence: Synthetic oligonucleotide
  Antisense strand to SEQ ID NO: 1816953
uauaugcaaagugaucucg

SEQ ID NO: 1816955 - RNA, 19 nt, Artificial Sequence
  Description of Artificial Sequence: Synthetic oligonucleotide
  Sense strand starting at position 1817 of SEQ ID NO: 1563521
gcucuauuugcaugacuua

SEQ ID NO: 1816956 - RNA, 19 nt, Artificial Sequence
  Description of Artificial Sequence: Synthetic oligonucleotide
  Antisense strand to SEQ ID NO: 1816955
uaagucaugcaaauagagc

SEQ ID NO: 1816957 - RNA, 19 nt, Artificial Sequence
  Description of Artificial Sequence: Synthetic oligonucleotide
  Sense strand starting at position 1938 of SEQ ID NO: 1563521
gucccaauuucuuugcaga

SEQ ID NO: 1816958 - RNA, 19 nt, Artificial Sequence
  Description of Artificial Sequence: Synthetic oligonucleotide
  Antisense strand to SEQ ID NO: 1816957
ucugcaaagaaauugggac

SEQ ID NO: 1816959 - RNA, 19 nt, Artificial Sequence
  Description of Artificial Sequence: Synthetic oligonucleotide
  Sense strand starting at position 1998 of SEQ ID NO: 1563521
agcaguaaccgauaggauu

SEQ ID NO: 1816960 - RNA, 19 nt, Artificial Sequence
  Description of Artificial Sequence: Synthetic oligonucleotide
  Antisense strand to SEQ ID NO: 1816959
aauccuaucgguuacugcu

SEQ ID NO: 1816961 - RNA, 19 nt, Artificial Sequence
  Description of Artificial Sequence: Synthetic oligonucleotide
  Sense strand starting at position 2116 of SEQ ID NO: 1563521
auaagucugcuuuaaucag

SEQ ID NO: 1816962 - RNA, 19 nt, Artificial Sequence
  Description of Artificial Sequence: Synthetic oligonucleotide
  Antisense strand to SEQ ID NO: 1816961
cugauuaaagcagacuuau

SEQ ID NO: 1816963 - RNA, 19 nt, Artificial Sequence
  Description of Artificial Sequence: Synthetic oligonucleotide
  Sense strand starting at position 2184 of SEQ ID NO: 1563521
gcuuuaauuugugcuccua

SEQ ID NO: 1816964 - RNA, 19 nt, Artificial Sequence
  Description of Artificial Sequence: Synthetic oligonucleotide
  Antisense strand to SEQ ID NO: 1816963
uaggagcacaaauuaaagc

SEQ ID NO: 1816965 - RNA, 19 nt, Artificial Sequence
  Description of Artificial Sequence: Synthetic oligonucleotide
  Sense strand starting at position 2253 of SEQ ID NO: 1563521
cuggauguugucgaagauu

SEQ ID NO: 1816966 - RNA, 19 nt, Artificial Sequence
  Description of Artificial Sequence: Synthetic oligonucleotide
  Antisense strand to SEQ ID NO: 1816965
aaucuucgacaacauccag

SEQ ID NO: 1816967 - RNA, 19 nt, Artificial Sequence
  Description of Artificial Sequence: Synthetic oligonucleotide
  Sense strand starting at position 2256 of SEQ ID NO: 1563521
gauguugucgaagauucua

SEQ ID NO: 1816968 - RNA, 19 nt, Artificial Sequence
  Description of Artificial Sequence: Synthetic oligonucleotide
  Antisense strand to SEQ ID NO: 1816967
uagaaucuucgacaacauc

SEQ ID NO: 1816969 - RNA, 19 nt, Artificial Sequence
  Description of Artificial Sequence: Synthetic oligonucleotide
  Sense strand starting at position 2603 of SEQ ID NO: 1563521
aucucacucugguuauacu

SEQ ID NO: 1816970 - RNA, 19 nt, Artificial Sequence
  Description of Artificial Sequence: Synthetic oligonucleotide
  Antisense strand to SEQ ID NO: 1816969
aguauaaccagagugagau

SEQ ID NO: 1816971 - RNA, 19 nt, Artificial Sequence
  Description of Artificial Sequence: Synthetic oligonucleotide
  Sense strand starting at position 2710 of SEQ ID NO: 1563521
cccagauuuccacguaguu

SEQ ID NO: 1816972 - RNA, 19 nt, Artificial Sequence
  Description of Artificial Sequence: Synthetic oligonucleotide
  Antisense strand to SEQ ID NO: 1816971
aacuacguggaaaucuggg

SEQ ID NO: 1816973 - RNA, 19 nt, Artificial Sequence
  Description of Artificial Sequence: Synthetic oligonucleotide
  Sense strand starting at position 2952 of SEQ ID NO: 1563521
ggcccagguauaggauaua

SEQ ID NO: 1816974 - RNA, 19 nt, Artificial Sequence
  Description of Artificial Sequence: Synthetic oligonucleotide
  Antisense strand to SEQ ID NO: 1816973
uauauccuauaccugggcc

SEQ ID NO: 1816975 - RNA, 19 nt, Artificial Sequence
  Description of Artificial Sequence: Synthetic oligonucleotide
  Sense strand starting at position 3019 of SEQ ID NO: 1563521
gguuaauguuuauuaggga

SEQ ID NO: 1816976 - RNA, 19 nt, Artificial Sequence
  Description of Artificial Sequence: Synthetic oligonucleotide
  Antisense strand to SEQ ID NO: 1816975
ucccuaauaaacauuaacc

SEQ ID NO: 1816977 - RNA, 19 nt, Artificial Sequence
  Description of Artificial Sequence: Synthetic oligonucleotide
  Sense strand starting at position 3057 of SEQ ID NO: 1563521
ggccucaaaguguaagaga

SEQ ID NO: 1816978 - RNA, 19 nt, Artificial Sequence
  Description of Artificial Sequence: Synthetic oligonucleotide
  Antisense strand to SEQ ID NO: 1816977
ucucuuacacuuugaggcc

SEQ ID NO: 1816979 - RNA, 19 nt, Artificial Sequence
  Description of Artificial Sequence: Synthetic oligonucleotide
  Sense strand starting at position 3091 of SEQ ID NO: 1563521
ugaucaggguugcuauaaa

SEQ ID NO: 1816980 - RNA, 19 nt, Artificial Sequence
  Description of Artificial Sequence: Synthetic oligonucleotide
  Antisense strand to SEQ ID NO: 1816979
uuuauagcaacccugauca

SEQ ID NO: 1816981 - RNA, 19 nt, Artificial Sequence
  Description of Artificial Sequence: Synthetic oligonucleotide
  Sense strand starting at position 3144 of SEQ ID NO: 1563521
gaauguguuagggagcaau

SEQ ID NO: 1816982 - RNA, 19 nt, Artificial Sequence
  Description of Artificial Sequence: Synthetic oligonucleotide
  Antisense strand to SEQ ID NO: 1816981
auugcucccuaacacauuc

SEQ ID NO: 1816983 - RNA, 19 nt, Artificial Sequence
  Description of Artificial Sequence: Synthetic oligonucleotide
  Sense strand starting at position 3156 of SEQ ID NO: 1563521
gagcaauugguauauuguc

SEQ ID NO: 1816984 - RNA, 19 nt, Artificial Sequence
  Description of Artificial Sequence: Synthetic oligonucleotide
  Antisense strand to SEQ ID NO: 1816983
gacaauauaccaauugcuc

SEQ ID NO: 1816985 - RNA, 19 nt, Artificial Sequence
  Description of Artificial Sequence: Synthetic oligonucleotide
  Sense strand starting at position 3324 of SEQ ID NO: 1563521
gggugaugaaacugaagca

SEQ ID NO: 1816986 - RNA, 19 nt, Artificial Sequence
  Description of Artificial Sequence: Synthetic oligonucleotide
  Antisense strand to SEQ ID NO: 1816985
ugcuucaguuucaucaccc

SEQ ID NO: 1816987 - RNA, 19 nt, Artificial Sequence
  Description of Artificial Sequence: Synthetic oligonucleotide
  Sense strand starting at position 3405 of SEQ ID NO: 1563521
guacucuggcuccagaagu

SEQ ID NO: 1816988 - RNA, 19 nt, Artificial Sequence
  Description of Artificial Sequence: Synthetic oligonucleotide
  Antisense strand to SEQ ID NO: 1816987
acuucuggagccagaguac

SEQ ID NO: 1816989 - RNA, 19 nt, Artificial Sequence
  Description of Artificial Sequence: Synthetic oligonucleotide
  Sense strand starting at position 3531 of SEQ ID NO: 1563521
guuacaguacagggugaua

SEQ ID NO: 1816990 - RNA, 19 nt, Artificial Sequence
  Description of Artificial Sequence: Synthetic oligonucleotide
  Antisense strand to SEQ ID NO: 1816989
uaucacccuguacuguaac

SEQ ID NO: 1816991 - RNA, 19 nt, Artificial Sequence
  Description of Artificial Sequence: Synthetic oligonucleotide
  Sense strand starting at position 3533 of SEQ ID NO: 1563521
uacaguacagggugauaaa

SEQ ID NO: 1816992 - RNA, 19 nt, Artificial Sequence
  Description of Artificial Sequence: Synthetic oligonucleotide
  Antisense strand to SEQ ID NO: 1816991
uuuaucacccuguacugua

SEQ ID NO: 1816993 - RNA, 19 nt, Artificial Sequence
  Description of Artificial Sequence: Synthetic oligonucleotide
  Sense strand starting at position 3604 of SEQ ID NO: 1563521
ccgcaaaguggauacagau

SEQ ID NO: 1816994 - RNA, 19 nt, Artificial Sequence
  Description of Artificial Sequence: Synthetic oligonucleotide
  Antisense strand to SEQ ID NO: 1816993
aucuguauccacuuugcgg

SEQ ID NO: 1816995 - RNA, 19 nt, Artificial Sequence
  Description of Artificial Sequence: Synthetic oligonucleotide
  Sense strand starting at position 3709 of SEQ ID NO: 1563521
cuggguacacauugaugaa

SEQ ID NO: 1816996 - RNA, 19 nt, Artificial Sequence
  Description of Artificial Sequence: Synthetic oligonucleotide
  Antisense strand to SEQ ID NO: 1816995
uucaucaauguguacccag

SEQ ID NO: 1816997 - RNA, 19 nt, Artificial Sequence
  Description of Artificial Sequence: Synthetic oligonucleotide
  Sense strand starting at position 3876 of SEQ ID NO: 1563521
gagguuagucauggaaagu

SEQ ID NO: 1816998 - RNA, 19 nt, Artificial Sequence
  Description of Artificial Sequence: Synthetic oligonucleotide
  Antisense strand to SEQ ID NO: 1816997
acuuuccaugacuaaccuc

SEQ ID NO: 1816999 - RNA, 19 nt, Artificial Sequence
  Description of Artificial Sequence: Synthetic oligonucleotide
  Sense strand starting at position 3877 of SEQ ID NO: 1563521
agguuagucauggaaaguu

SEQ ID NO: 1817000 - RNA, 19 nt, Artificial Sequence
  Description of Artificial Sequence: Synthetic oligonucleotide
  Antisense strand to SEQ ID NO: 1816999
aacuuuccaugacuaaccu

SEQ ID NO: 1817001 - RNA, 19 nt, Artificial Sequence
  Description of Artificial Sequence: Synthetic oligonucleotide
  Sense strand starting at position 3961 of SEQ ID NO: 1563521
ccggguugugaguagagga

SEQ ID NO: 1817002 - RNA, 19 nt, Artificial Sequence
  Description of Artificial Sequence: Synthetic oligonucleotide
  Antisense strand to SEQ ID NO: 1817001
uccucuacucacaacccgg

SEQ ID NO: 1817003 - RNA, 19 nt, Artificial Sequence
  Description of Artificial Sequence: Synthetic oligonucleotide
  Sense strand starting at position 3977 of SEQ ID NO: 1563521
ggaggguggugaucagaau

SEQ ID NO: 1817004 - RNA, 19 nt, Artificial Sequence
  Description of Artificial Sequence: Synthetic oligonucleotide
  Antisense strand to SEQ ID NO: 1817003
auucugaucaccacccucc

SEQ ID NO: 1817005 - RNA, 19 nt, Artificial Sequence
  Description of Artificial Sequence: Synthetic oligonucleotide
  Sense strand starting at position 1405 of SEQ ID NO: 1563522
gcagucucuccgggugaca

SEQ ID NO: 1817006 - RNA, 19 nt, Artificial Sequence
  Description of Artificial Sequence: Synthetic oligonucleotide
  Antisense strand to SEQ ID NO: 1817005
ugucacccggagagacugc

SEQ ID NO: 1817007 - RNA, 19 nt, Artificial Sequence
  Description of Artificial Sequence: Synthetic oligonucleotide
  Sense strand starting at position 1684 of SEQ ID NO: 1563522
ucuagaaaugcgcagacau

SEQ ID NO: 1817008 - RNA, 19 nt, Artificial Sequence
  Description of Artificial Sequence: Synthetic oligonucleotide
  Antisense strand to SEQ ID NO: 1817007
augucugcgcauuucuaga

SEQ ID NO: 1817009 - RNA, 19 nt, Artificial Sequence
  Description of Artificial Sequence: Synthetic oligonucleotide
  Sense strand starting at position 1713 of SEQ ID NO: 1563522
ucacgaguuucguuugggu

SEQ ID NO: 1817010 - RNA, 19 nt, Artificial Sequence
  Description of Artificial Sequence: Synthetic oligonucleotide
  Antisense strand to SEQ ID NO: 1817009
acccaaacgaaacucguga

SEQ ID NO: 1817011 - RNA, 19 nt, Artificial Sequence
  Description of Artificial Sequence: Synthetic oligonucleotide
  Sense strand starting at position 1715 of SEQ ID NO: 1563522
acgaguuucguuuggguca

SEQ ID NO: 1817012 - RNA, 19 nt, Artificial Sequence
  Description of Artificial Sequence: Synthetic oligonucleotide
  Antisense strand to SEQ ID NO: 1817011
ugacccaaacgaaacucgu

SEQ ID NO: 1817013 - RNA, 19 nt, Artificial Sequence
  Description of Artificial Sequence: Synthetic oligonucleotide
  Sense strand starting at position 1716 of SEQ ID NO: 1563522
cgaguuucguuugggucau

SEQ ID NO: 1817014 - RNA, 19 nt, Artificial Sequence
  Description of Artificial Sequence: Synthetic oligonucleotide
  Antisense strand to SEQ ID NO: 1817013
augacccaaacgaaacucg

SEQ ID NO: 1817015 - RNA, 19 nt, Artificial Sequence
  Description of Artificial Sequence: Synthetic oligonucleotide
  Sense strand starting at position 2335 of SEQ ID NO: 1563523
cgaaacucgugacccuaau

SEQ ID NO: 1817016 - RNA, 19 nt, Artificial Sequence
  Description of Artificial Sequence: Synthetic oligonucleotide
  Antisense strand to SEQ ID NO: 1817015
auuagggucacgaguuucg

SEQ ID NO: 1817017 - RNA, 19 nt, Artificial Sequence
  Description of Artificial Sequence: Synthetic oligonucleotide
  Sense strand starting at position 2362 of SEQ ID NO: 1563523
ugcgcauuucuagacuguu

SEQ ID NO: 1817018 - RNA, 19 nt, Artificial Sequence
  Description of Artificial Sequence: Synthetic oligonucleotide
  Antisense strand to SEQ ID NO: 1817017
aacagucuagaaaugcgca

SEQ ID NO: 1817019 - RNA, 19 nt, Artificial Sequence
  Description of Artificial Sequence: Synthetic oligonucleotide
  Sense strand starting at position 2332 of SEQ ID NO: 1563524
aaaggaaacucgugacccu

SEQ ID NO: 1817020 - RNA, 19 nt, Artificial Sequence
  Description of Artificial Sequence: Synthetic oligonucleotide
  Antisense strand to SEQ ID NO: 1817019
agggucacgaguuuccuuu

SEQ ID NO: 1817021 - RNA, 19 nt, Artificial Sequence
  Description of Artificial Sequence: Synthetic oligonucleotide
  Sense strand starting at position 2335 of SEQ ID NO: 1563524
ggaaacucgugacccuaau

SEQ ID NO: 1817022 - RNA, 19 nt, Artificial Sequence
  Description of Artificial Sequence: Synthetic oligonucleotide
  Antisense strand to SEQ ID NO: 1817021
auuagggucacgaguuucc

SEQ ID NO: 1817023 - RNA, 19 nt, Artificial Sequence
  Description of Artificial Sequence: Synthetic oligonucleotide
  Sense strand starting at position 2362 of SEQ ID NO: 1563524
ugcgcauuucuggacuguu

SEQ ID NO: 1817024 - RNA, 19 nt, Artificial Sequence
  Description of Artificial Sequence: Synthetic oligonucleotide
  Antisense strand to SEQ ID NO: 1817023
aacaguccagaaaugcgca

SEQ ID NO: 1817025 - RNA, 19 nt, Artificial Sequence
  Description of Artificial Sequence: Synthetic oligonucleotide
  Sense strand starting at position 3 of SEQ ID NO: 1563525
ugugauccagacugcauau

SEQ ID NO: 1817026 - RNA, 19 nt, Artificial Sequence
  Description of Artificial Sequence: Synthetic oligonucleotide
  Antisense strand to SEQ ID NO: 1817025
auaugcagucuggaucaca

SEQ ID NO: 1817027 - RNA, 19 nt, Artificial Sequence
  Description of Artificial Sequence: Synthetic oligonucleotide
  Sense strand starting at position 16 of SEQ ID NO: 1563525
gcauauaccucugcgaaug

SEQ ID NO: 1817028 - RNA, 19 nt, Artificial Sequence
  Description of Artificial Sequence: Synthetic oligonucleotide
  Antisense strand to SEQ ID NO: 1817027
cauucgcagagguauaugc

SEQ ID NO: 1817029 - RNA, 19 nt, Artificial Sequence
  Description of Artificial Sequence: Synthetic oligonucleotide
  Sense strand starting at position 35 of SEQ ID NO: 1563525
gaaccagaaccgugaauuc

SEQ ID NO: 1817030 - RNA, 19 nt, Artificial Sequence
  Description of Artificial Sequence: Synthetic oligonucleotide
  Antisense strand to SEQ ID NO: 1817029
gaauucacgguucugguuc

SEQ ID NO: 1817031 - RNA, 19 nt, Artificial Sequence
  Description of Artificial Sequence: Synthetic oligonucleotide
  Sense strand starting at position 45 of SEQ ID NO: 1563525
cgugaauuccaaugcaaau

SEQ ID NO: 1817032 - RNA, 19 nt, Artificial Sequence
  Description of Artificial Sequence: Synthetic oligonucleotide
  Antisense strand to SEQ ID NO: 1817031
auuugcauuggaauucacg

SEQ ID NO: 1817033 - RNA, 19 nt, Artificial Sequence
  Description of Artificial Sequence: Synthetic oligonucleotide
  Sense strand starting at position 121 of SEQ ID NO: 1563525
uacggagcacaucauagau

SEQ ID NO: 1817034 - RNA, 19 nt, Artificial Sequence
  Description of Artificial Sequence: Synthetic oligonucleotide
  Antisense strand to SEQ ID NO: 1817033
aucuaugaugugcuccgua

SEQ ID NO: 1817035 - RNA, 19 nt, Artificial Sequence
  Description of Artificial Sequence: Synthetic oligonucleotide
  Sense strand starting at position 134 of SEQ ID NO: 1563525
auagaugaucucugcaggu

SEQ ID NO: 1817036 - RNA, 19 nt, Artificial Sequence
  Description of Artificial Sequence: Synthetic oligonucleotide
  Antisense strand to SEQ ID NO: 1817035
accugcagagaucaucuau

SEQ ID NO: 1817037 - RNA, 19 nt, Artificial Sequence
  Description of Artificial Sequence: Synthetic oligonucleotide
  Sense strand starting at position 151 of SEQ ID NO: 1563525
guucguugcccacauagga

SEQ ID NO: 1817038 - RNA, 19 nt, Artificial Sequence
  Description of Artificial Sequence: Synthetic oligonucleotide
  Antisense strand to SEQ ID NO: 1817037
uccuaugugggcaacgaac

SEQ ID NO: 1817039 - RNA, 19 nt, Artificial Sequence
  Description of Artificial Sequence: Synthetic oligonucleotide
  Sense strand starting at position 302 of SEQ ID NO: 1563525
ggaguacaagaguagcuuu

SEQ ID NO: 1817040 - RNA, 19 nt, Artificial Sequence
  Description of Artificial Sequence: Synthetic oligonucleotide
  Antisense strand to SEQ ID NO: 1817039
aaagcuacucuuguacucc

SEQ ID NO: 1817041 - RNA, 19 nt, Artificial Sequence
  Description of Artificial Sequence: Synthetic oligonucleotide
  Sense strand starting at position 305 of SEQ ID NO: 1563525
guacaagaguagcuuuauc

SEQ ID NO: 1817042 - RNA, 19 nt, Artificial Sequence
  Description of Artificial Sequence: Synthetic oligonucleotide
  Antisense strand to SEQ ID NO: 1817041
gauaaagcuacucuuguac

SEQ ID NO: 1817043 - RNA, 19 nt, Artificial Sequence
  Description of Artificial Sequence: Synthetic oligonucleotide
  Sense strand starting at position 310 of SEQ ID NO: 1563525
agaguagcuuuaucaugga

SEQ ID NO: 1817044 - RNA, 19 nt, Artificial Sequence
  Description of Artificial Sequence: Synthetic oligonucleotide
  Antisense strand to SEQ ID NO: 1817043
uccaugauaaagcuacucu

SEQ ID NO: 1817045 - RNA, 19 nt, Artificial Sequence
  Description of Artificial Sequence: Synthetic oligonucleotide
  Sense strand starting at position 325 of SEQ ID NO: 1563525
uggauuuagggcugugguu

SEQ ID NO: 1817046 - RNA, 19 nt, Artificial Sequence
  Description of Artificial Sequence: Synthetic oligonucleotide
  Antisense strand to SEQ ID NO: 1817045
aaccacagcccuaaaucca

SEQ ID NO: 1817047 - RNA, 19 nt, Artificial Sequence
  Description of Artificial Sequence: Synthetic oligonucleotide
  Sense strand starting at position 430 of SEQ ID NO: 1563525
acaggaauauguuaagaag

SEQ ID NO: 1817048 - RNA, 19 nt, Artificial Sequence
  Description of Artificial Sequence: Synthetic oligonucleotide
  Antisense strand to SEQ ID NO: 1817047
cuucuuaacauauuccugu

SEQ ID NO: 1817049 - RNA, 19 nt, Artificial Sequence
  Description of Artificial Sequence: Synthetic oligonucleotide
  Sense strand starting at position 772 of SEQ ID NO: 1563525
gcaugagguuugguaacag

SEQ ID NO: 1817050 - RNA, 19 nt, Artificial Sequence
  Description of Artificial Sequence: Synthetic oligonucleotide
  Antisense strand to SEQ ID NO: 1817049
cuguuaccaaaccucaugc

SEQ ID NO: 1817051 - RNA, 19 nt, Artificial Sequence
  Description of Artificial Sequence: Synthetic oligonucleotide
  Sense strand starting at position 788 of SEQ ID NO: 1563525
caggcaaagucaucugguu

SEQ ID NO: 1817052 - RNA, 19 nt, Artificial Sequence
  Description of Artificial Sequence: Synthetic oligonucleotide
  Antisense strand to SEQ ID NO: 1817051
aaccagaugacuuugccug

SEQ ID NO: 1817053 - RNA, 19 nt, Artificial Sequence
  Description of Artificial Sequence: Synthetic oligonucleotide
  Sense strand starting at position 790 of SEQ ID NO: 1563525
ggcaaagucaucugguuaa

SEQ ID NO: 1817054 - RNA, 19 nt, Artificial Sequence
  Description of Artificial Sequence: Synthetic oligonucleotide
  Antisense strand to SEQ ID NO: 1817053
uuaaccagaugacuuugcc

SEQ ID NO: 1817055 - RNA, 19 nt, Artificial Sequence
  Description of Artificial Sequence: Synthetic oligonucleotide
  Sense strand starting at position 793 of SEQ ID NO: 1563525
aaagucaucugguuaacgu

SEQ ID NO: 1817056 - RNA, 19 nt, Artificial Sequence
  Description of Artificial Sequence: Synthetic oligonucleotide
  Antisense strand to SEQ ID NO: 1817055
acguuaaccagaugacuuu

SEQ ID NO: 1817057 - RNA, 19 nt, Artificial Sequence
  Description of Artificial Sequence: Synthetic oligonucleotide
  Sense strand starting at position 800 of SEQ ID NO: 1563525
ucugguuaacgugacugau

SEQ ID NO: 1817058 - RNA, 19 nt, Artificial Sequence
  Description of Artificial Sequence: Synthetic oligonucleotide
  Antisense strand to SEQ ID NO: 1817057
aucagucacguuaaccaga

SEQ ID NO: 1817059 - RNA, 19 nt, Artificial Sequence
  Description of Artificial Sequence: Synthetic oligonucleotide
  Sense strand starting at position 803 of SEQ ID NO: 1563525
gguuaacgugacugaugca

SEQ ID NO: 1817060 - RNA, 19 nt, Artificial Sequence
  Description of Artificial Sequence: Synthetic oligonucleotide
  Antisense strand to SEQ ID NO: 1817059
ugcaucagucacguuaacc

SEQ ID NO: 1817061 - RNA, 19 nt, Artificial Sequence
  Description of Artificial Sequence: Synthetic oligonucleotide
  Sense strand starting at position 804 of SEQ ID NO: 1563525
guuaacgugacugaugcaa

SEQ ID NO: 1817062 - RNA, 19 nt, Artificial Sequence
  Description of Artificial Sequence: Synthetic oligonucleotide
  Antisense strand to SEQ ID NO: 1817061
uugcaucagucacguuaac

SEQ ID NO: 1817063 - RNA, 19 nt, Artificial Sequence
  Description of Artificial Sequence: Synthetic oligonucleotide
  Sense strand starting at position 890 of SEQ ID NO: 1563525
gggagaugguuucuugcag

SEQ ID NO: 1817064 - RNA, 19 nt, Artificial Sequence
  Description of Artificial Sequence: Synthetic oligonucleotide
  Antisense strand to SEQ ID NO: 1817063
cugcaagaaaccaucuccc

SEQ ID NO: 1817065 - RNA, 19 nt, Artificial Sequence
  Description of Artificial Sequence: Synthetic oligonucleotide
  Sense strand starting at position 891 of SEQ ID NO: 1563525
ggagaugguuucuugcaga

SEQ ID NO: 1817066 - RNA, 19 nt, Artificial Sequence
  Description of Artificial Sequence: Synthetic oligonucleotide
  Antisense strand to SEQ ID NO: 1817065
ucugcaagaaaccaucucc

SEQ ID NO: 1817067 - RNA, 19 nt, Artificial Sequence
  Description of Artificial Sequence: Synthetic oligonucleotide
  Sense strand starting at position 996 of SEQ ID NO: 1563525
guggguagccaugaccaaa

SEQ ID NO: 1817068 - RNA, 19 nt, Artificial Sequence
  Description of Artificial Sequence: Synthetic oligonucleotide
  Antisense strand to SEQ ID NO: 1817067
uuuggucauggcuacccac

SEQ ID NO: 1817069 - RNA, 19 nt, Artificial Sequence
  Description of Artificial Sequence: Synthetic oligonucleotide
  Sense strand starting at position 1028 of SEQ ID NO: 1563525
gaaagagcuccucgggaag

SEQ ID NO: 1817070 - RNA, 19 nt, Artificial Sequence
  Description of Artificial Sequence: Synthetic oligonucleotide
  Antisense strand to SEQ ID NO: 1817069
cuucccgaggagcucuuuc

SEQ ID NO: 1817071 - RNA, 19 nt, Artificial Sequence
  Description of Artificial Sequence: Synthetic oligonucleotide
  Sense strand starting at position 1088 of SEQ ID NO: 1563525
aggaguacuucuccagggu

SEQ ID NO: 1817072 - RNA, 19 nt, Artificial Sequence
  Description of Artificial Sequence: Synthetic oligonucleotide
  Antisense strand to SEQ ID NO: 1817071
acccuggagaaguacuccu

SEQ ID NO: 1817073 - RNA, 19 nt, Artificial Sequence
  Description of Artificial Sequence: Synthetic oligonucleotide
  Sense strand starting at position 2278 of SEQ ID NO: 1563525
aguggucuagguugcuaaa

SEQ ID NO: 1817074 - RNA, 19 nt, Artificial Sequence
  Description of Artificial Sequence: Synthetic oligonucleotide
  Antisense strand to SEQ ID NO: 1817073
uuuagcaaccuagaccacu

SEQ ID NO: 1817075 - RNA, 19 nt, Artificial Sequence
  Description of Artificial Sequence: Synthetic oligonucleotide
  Sense strand starting at position 2334 of SEQ ID NO: 1563525
ggaaacucgugacccuaau

SEQ ID NO: 1817076 - RNA, 19 nt, Artificial Sequence
  Description of Artificial Sequence: Synthetic oligonucleotide
  Antisense strand to SEQ ID NO: 1817075
auuagggucacgaguuucc

SEQ ID NO: 1817077 - RNA, 19 nt, Artificial Sequence
  Description of Artificial Sequence: Synthetic oligonucleotide
  Sense strand starting at position 2361 of SEQ ID NO: 1563525
ugcgcauuucuggacuguu

SEQ ID NO: 1817078 - RNA, 19 nt, Artificial Sequence
  Description of Artificial Sequence: Synthetic oligonucleotide
  Antisense strand to SEQ ID NO: 1817077
aacaguccagaaaugcgca

SEQ ID NO: 1817079 - RNA, 19 nt, Artificial Sequence
  Description of Artificial Sequence: Synthetic oligonucleotide
  Sense strand starting at position 2574 of SEQ ID NO: 1563525
ggcccugacuugcucagaa

SEQ ID NO: 1817080 - RNA, 19 nt, Artificial Sequence
  Description of Artificial Sequence: Synthetic oligonucleotide
  Antisense strand to SEQ ID NO: 1817079
uucugagcaagucagggcc

SEQ ID NO: 1817081 - RNA, 19 nt, Artificial Sequence
  Description of Artificial Sequence: Synthetic oligonucleotide
  Sense strand starting at position 2795 of SEQ ID NO: 1563525
gcagauggcuuccuugaaa

SEQ ID NO: 1817082 - RNA, 19 nt, Artificial Sequence
  Description of Artificial Sequence: Synthetic oligonucleotide
  Antisense strand to SEQ ID NO: 1817081
uuucaaggaagccaucugc

SEQ ID NO: 1817083 - RNA, 19 nt, Artificial Sequence
  Description of Artificial Sequence: Synthetic oligonucleotide
  Sense strand starting at position 3119 of SEQ ID NO: 1563525
gccgucagguacucaauaa

SEQ ID NO: 1817084 - RNA, 19 nt, Artificial Sequence
  Description of Artificial Sequence: Synthetic oligonucleotide
  Antisense strand to SEQ ID NO: 1817083
uuauugaguaccugacggc

SEQ ID NO: 1817085 - RNA, 19 nt, Artificial Sequence
  Description of Artificial Sequence: Synthetic oligonucleotide
  Sense strand starting at position 3323 of SEQ ID NO: 1563525
gagugugcuaucucggcuu

SEQ ID NO: 1817086 - RNA, 19 nt, Artificial Sequence
  Description of Artificial Sequence: Synthetic oligonucleotide
  Antisense strand to SEQ ID NO: 1817085
aagccgagauagcacacuc

SEQ ID NO: 1817087 - RNA, 19 nt, Artificial Sequence
  Description of Artificial Sequence: Synthetic oligonucleotide
  Sense strand starting at position 3372 of SEQ ID NO: 1563525
gacaguuaccgcguccagu

SEQ ID NO: 1817088 - RNA, 19 nt, Artificial Sequence
  Description of Artificial Sequence: Synthetic oligonucleotide
  Antisense strand to SEQ ID NO: 1817087
acuggacgcgguaacuguc

SEQ ID NO: 1817089 - RNA, 19 nt, Artificial Sequence
  Description of Artificial Sequence: Synthetic oligonucleotide
  Sense strand starting at position 3373 of SEQ ID NO: 1563525
acaguuaccgcguccagua

SEQ ID NO: 1817090 - RNA, 19 nt, Artificial Sequence
  Description of Artificial Sequence: Synthetic oligonucleotide
  Antisense strand to SEQ ID NO: 1817089
uacuggacgcgguaacugu

SEQ ID NO: 1817091 - RNA, 19 nt, Artificial Sequence
  Description of Artificial Sequence: Synthetic oligonucleotide
  Sense strand starting at position 3385 of SEQ ID NO: 1563525
uccaguacuguguauccua

SEQ ID NO: 1817092 - RNA, 19 nt, Artificial Sequence
  Description of Artificial Sequence: Synthetic oligonucleotide
  Antisense strand to SEQ ID NO: 1817091
uaggauacacaguacugga

SEQ ID NO: 1817093 - RNA, 19 nt, Artificial Sequence
  Description of Artificial Sequence: Synthetic oligonucleotide
  Sense strand starting at position 3629 of SEQ ID NO: 1563525
ucucuuugccagugggaac

SEQ ID NO: 1817094 - RNA, 19 nt, Artificial Sequence
  Description of Artificial Sequence: Synthetic oligonucleotide
  Antisense strand to SEQ ID NO: 1817093
guucccacuggcaaagaga

SEQ ID NO: 1817095 - RNA, 19 nt, Artificial Sequence
  Description of Artificial Sequence: Synthetic oligonucleotide
  Sense strand starting at position 3641 of SEQ ID NO: 1563525
ugggaacuuucccuuucua

SEQ ID NO: 1817096 - RNA, 19 nt, Artificial Sequence
  Description of Artificial Sequence: Synthetic oligonucleotide
  Antisense strand to SEQ ID NO: 1817095
uagaaagggaaaguuccca

SEQ ID NO: 1817097 - RNA, 19 nt, Artificial Sequence
  Description of Artificial Sequence: Synthetic oligonucleotide
  Sense strand starting at position 3899 of SEQ ID NO: 1563525
ucccgauagucccuggcaa

SEQ ID NO: 1817098 - RNA, 19 nt, Artificial Sequence
  Description of Artificial Sequence: Synthetic oligonucleotide
  Antisense strand to SEQ ID NO: 1817097
uugccagggacuaucggga

SEQ ID NO: 1817099 - RNA, 19 nt, Artificial Sequence
  Description of Artificial Sequence: Synthetic oligonucleotide
  Sense strand starting at position 3932 of SEQ ID NO: 1563525
gcuuucuguccauagaggu

SEQ ID NO: 1817100 - RNA, 19 nt, Artificial Sequence
  Description of Artificial Sequence: Synthetic oligonucleotide
  Antisense strand to SEQ ID NO: 1817099
accucuauggacagaaagc

SEQ ID NO: 1817101 - RNA, 19 nt, Artificial Sequence
  Description of Artificial Sequence: Synthetic oligonucleotide
  Sense strand starting at position 3967 of SEQ ID NO: 1563525
uuuccuauagauggaauua

SEQ ID NO: 1817102 - RNA, 19 nt, Artificial Sequence
  Description of Artificial Sequence: Synthetic oligonucleotide
  Antisense strand to SEQ ID NO: 1817101
uaauuccaucuauaggaaa

SEQ ID NO: 1817103 - RNA, 19 nt, Artificial Sequence
  Description of Artificial Sequence: Synthetic oligonucleotide
  Sense strand starting at position 3977 of SEQ ID NO: 1563525
auggaauuauacgaccaaa

SEQ ID NO: 1817104 - RNA, 19 nt, Artificial Sequence
  Description of Artificial Sequence: Synthetic oligonucleotide
  Antisense strand to SEQ ID NO: 1817103
uuuggucguauaauuccau

SEQ ID NO: 1817105 - RNA, 19 nt, Artificial Sequence
  Description of Artificial Sequence: Synthetic oligonucleotide
  Sense strand starting at position 2350 of SEQ ID NO: 1563526
cgaaacucgugacccuaau

SEQ ID NO: 1817106 - RNA, 19 nt, Artificial Sequence
  Description of Artificial Sequence: Synthetic oligonucleotide
  Antisense strand to SEQ ID NO: 1817105
auuagggucacgaguuucg

SEQ ID NO: 1817107 - RNA, 19 nt, Artificial Sequence
  Description of Artificial Sequence: Synthetic oligonucleotide
  Sense strand starting at position 2377 of SEQ ID NO: 1563526
ugcgcauuucuagacuguu

SEQ ID NO: 1817108 - RNA, 19 nt, Artificial Sequence
  Description of Artificial Sequence: Synthetic oligonucleotide
  Antisense strand to SEQ ID NO: 1817107
aacagucuagaaaugcgca

SEQ ID NO: 1817109 - RNA, 19 nt, Artificial Sequence
  Description of Artificial Sequence: Synthetic oligonucleotide
  Sense strand starting at position 2347 of SEQ ID NO: 1563527
aaaggaaacucgugacccu

SEQ ID NO: 1817110 - RNA, 19 nt, Artificial Sequence
  Description of Artificial Sequence: Synthetic oligonucleotide
  Antisense strand to SEQ ID NO: 1817109
agggucacgaguuuccuuu

SEQ ID NO: 1817111 - RNA, 19 nt, Artificial Sequence
  Description of Artificial Sequence: Synthetic oligonucleotide
  Sense strand starting at position 2350 of SEQ ID NO: 1563527
ggaaacucgugacccuaau

SEQ ID NO: 1817112 - RNA, 19 nt, Artificial Sequence
  Description of Artificial Sequence: Synthetic oligonucleotide
  Antisense strand to SEQ ID NO: 1817111
auuagggucacgaguuucc

SEQ ID NO: 1817113 - RNA, 19 nt, Artificial Sequence
  Description of Artificial Sequence: Synthetic oligonucleotide
  Sense strand starting at position 2377 of SEQ ID NO: 1563527
ugcgcauuucuggacuguu

SEQ ID NO: 1817114 - RNA, 19 nt, Artificial Sequence
  Description of Artificial Sequence: Synthetic oligonucleotide
  Antisense strand to SEQ ID NO: 1817113
aacaguccagaaaugcgca

SEQ ID NO: 1817115 - RNA, 19 nt, Artificial Sequence
  Description of Artificial Sequence: Synthetic oligonucleotide
  Sense strand starting at position 13 of SEQ ID NO: 1563528
gcuguugugauccagacug

SEQ ID NO: 1817116 - RNA, 19 nt, Artificial Sequence
  Description of Artificial Sequence: Synthetic oligonucleotide
  Antisense strand to SEQ ID NO: 1817115
cagucuggaucacaacagc

SEQ ID NO: 1817117 - RNA, 19 nt, Artificial Sequence
  Description of Artificial Sequence: Synthetic oligonucleotide
  Sense strand starting at position 15 of SEQ ID NO: 1563528
uguugugauccagacugca

SEQ ID NO: 1817118 - RNA, 19 nt, Artificial Sequence
  Description of Artificial Sequence: Synthetic oligonucleotide
  Antisense strand to SEQ ID NO: 1817117
ugcagucuggaucacaaca

SEQ ID NO: 1817119 - RNA, 19 nt, Artificial Sequence
  Description of Artificial Sequence: Synthetic oligonucleotide
  Sense strand starting at position 18 of SEQ ID NO: 1563528
ugugauccagacugcauau

SEQ ID NO: 1817120 - RNA, 19 nt, Artificial Sequence
  Description of Artificial Sequence: Synthetic oligonucleotide
  Antisense strand to SEQ ID NO: 1817119
auaugcagucuggaucaca

SEQ ID NO: 1817121 - RNA, 19 nt, Artificial Sequence
  Description of Artificial Sequence: Synthetic oligonucleotide
  Sense strand starting at position 31 of SEQ ID NO: 1563528
gcauauaccucugcgaaug

SEQ ID NO: 1817122 - RNA, 19 nt, Artificial Sequence
  Description of Artificial Sequence: Synthetic oligonucleotide
  Antisense strand to SEQ ID NO: 1817121
cauucgcagagguauaugc

SEQ ID NO: 1817123 - RNA, 19 nt, Artificial Sequence
  Description of Artificial Sequence: Synthetic oligonucleotide
  Sense strand starting at position 50 of SEQ ID NO: 1563528
gaaccagaaccgugaauuc

SEQ ID NO: 1817124 - RNA, 19 nt, Artificial Sequence
  Description of Artificial Sequence: Synthetic oligonucleotide
  Antisense strand to SEQ ID NO: 1817123
gaauucacgguucugguuc

SEQ ID NO: 1817125 - RNA, 19 nt, Artificial Sequence
  Description of Artificial Sequence: Synthetic oligonucleotide
  Sense strand starting at position 60 of SEQ ID NO: 1563528
cgugaauuccaaugcaaau

SEQ ID NO: 1817126 - RNA, 19 nt, Artificial Sequence
  Description of Artificial Sequence: Synthetic oligonucleotide
  Antisense strand to SEQ ID NO: 1817125
auuugcauuggaauucacg

SEQ ID NO: 1817127 - RNA, 19 nt, Artificial Sequence
  Description of Artificial Sequence: Synthetic oligonucleotide
  Sense strand starting at position 136 of SEQ ID NO: 1563528
uacggagcacaucauagau

SEQ ID NO: 1817128 - RNA, 19 nt, Artificial Sequence
  Description of Artificial Sequence: Synthetic oligonucleotide
  Antisense strand to SEQ ID NO: 1817127
aucuaugaugugcuccgua

SEQ ID NO: 1817129 - RNA, 19 nt, Artificial Sequence
  Description of Artificial Sequence: Synthetic oligonucleotide
  Sense strand starting at position 149 of SEQ ID NO: 1563528
auagaugaucucugcaggu

SEQ ID NO: 1817130 - RNA, 19 nt, Artificial Sequence
  Description of Artificial Sequence: Synthetic oligonucleotide
  Antisense strand to SEQ ID NO: 1817129
accugcagagaucaucuau

SEQ ID NO: 1817131 - RNA, 19 nt, Artificial Sequence
  Description of Artificial Sequence: Synthetic oligonucleotide
  Sense strand starting at position 166 of SEQ ID NO: 1563528
guucguugcccacauagga

SEQ ID NO: 1817132 - RNA, 19 nt, Artificial Sequence
  Description of Artificial Sequence: Synthetic oligonucleotide
  Antisense strand to SEQ ID NO: 1817131
uccuaugugggcaacgaac

SEQ ID NO: 1817133 - RNA, 19 nt, Artificial Sequence
  Description of Artificial Sequence: Synthetic oligonucleotide
  Sense strand starting at position 317 of SEQ ID NO: 1563528
ggaguacaagaguagcuuu

SEQ ID NO: 1817134 - RNA, 19 nt, Artificial Sequence
  Description of Artificial Sequence: Synthetic oligonucleotide
  Antisense strand to SEQ ID NO: 1817133
aaagcuacucuuguacucc

SEQ ID NO: 1817135 - RNA, 19 nt, Artificial Sequence
  Description of Artificial Sequence: Synthetic oligonucleotide
  Sense strand starting at position 320 of SEQ ID NO: 1563528
guacaagaguagcuuuauc

SEQ ID NO: 1817136 - RNA, 19 nt, Artificial Sequence
  Description of Artificial Sequence: Synthetic oligonucleotide
  Antisense strand to SEQ ID NO: 1817135
gauaaagcuacucuuguac

SEQ ID NO: 1817137 - RNA, 19 nt, Artificial Sequence
  Description of Artificial Sequence: Synthetic oligonucleotide
  Sense strand starting at position 325 of SEQ ID NO: 1563528
agaguagcuuuaucaugga

SEQ ID NO: 1817138 - RNA, 19 nt, Artificial Sequence
  Description of Artificial Sequence: Synthetic oligonucleotide
  Antisense strand to SEQ ID NO: 1817137
uccaugauaaagcuacucu

SEQ ID NO: 1817139 - RNA, 19 nt, Artificial Sequence
  Description of Artificial Sequence: Synthetic oligonucleotide
  Sense strand starting at position 340 of SEQ ID NO: 1563528
uggauuuagggcugugguu

SEQ ID NO: 1817140 - RNA, 19 nt, Artificial Sequence
  Description of Artificial Sequence: Synthetic oligonucleotide
  Antisense strand to SEQ ID NO: 1817139
aaccacagcccuaaaucca

SEQ ID NO: 1817141 - RNA, 19 nt, Artificial Sequence
  Description of Artificial Sequence: Synthetic oligonucleotide
  Sense strand starting at position 445 of SEQ ID NO: 1563528
acaggaauauguuaagaag

SEQ ID NO: 1817142 - RNA, 19 nt, Artificial Sequence
  Description of Artificial Sequence: Synthetic oligonucleotide
  Antisense strand to SEQ ID NO: 1817141
cuucuuaacauauuccugu

SEQ ID NO: 1817143 - RNA, 19 nt, Artificial Sequence
  Description of Artificial Sequence: Synthetic oligonucleotide
  Sense strand starting at position 787 of SEQ ID NO: 1563528
gcaugagguuugguaacag

SEQ ID NO: 1817144 - RNA, 19 nt, Artificial Sequence
  Description of Artificial Sequence: Synthetic oligonucleotide
  Antisense strand to SEQ ID NO: 1817143
cuguuaccaaaccucaugc

SEQ ID NO: 1817145 - RNA, 19 nt, Artificial Sequence
  Description of Artificial Sequence: Synthetic oligonucleotide
  Sense strand starting at position 803 of SEQ ID NO: 1563528
caggcaaagucaucugguu

SEQ ID NO: 1817146 - RNA, 19 nt, Artificial Sequence
  Description of Artificial Sequence: Synthetic oligonucleotide
  Antisense strand to SEQ ID NO: 1817145
aaccagaugacuuugccug

SEQ ID NO: 1817147 - RNA, 19 nt, Artificial Sequence
  Description of Artificial Sequence: Synthetic oligonucleotide
  Sense strand starting at position 805 of SEQ ID NO: 1563528
ggcaaagucaucugguuaa

SEQ ID NO: 1817148 - RNA, 19 nt, Artificial Sequence
  Description of Artificial Sequence: Synthetic oligonucleotide
  Antisense strand to SEQ ID NO: 1817147
uuaaccagaugacuuugcc

SEQ ID NO: 1817149 - RNA, 19 nt, Artificial Sequence
  Description of Artificial Sequence: Synthetic oligonucleotide
  Sense strand starting at position 808 of SEQ ID NO: 1563528
aaagucaucugguuaacgu

SEQ ID NO: 1817150 - RNA, 19 nt, Artificial Sequence
  Description of Artificial Sequence: Synthetic oligonucleotide
  Antisense strand to SEQ ID NO: 1817149
acguuaaccagaugacuuu

SEQ ID NO: 1817151 - RNA, 19 nt, Artificial Sequence
  Description of Artificial Sequence: Synthetic oligonucleotide
  Sense strand starting at position 815 of SEQ ID NO: 1563528
ucugguuaacgugacugau

SEQ ID NO: 1817152 - RNA, 19 nt, Artificial Sequence
  Description of Artificial Sequence: Synthetic oligonucleotide
  Antisense strand to SEQ ID NO: 1817151
aucagucacguuaaccaga

SEQ ID NO: 1817153 - RNA, 19 nt, Artificial Sequence
  Description of Artificial Sequence: Synthetic oligonucleotide
  Sense strand starting at position 818 of SEQ ID NO: 1563528
gguuaacgugacugaugca

SEQ ID NO: 1817154 - RNA, 19 nt, Artificial Sequence
  Description of Artificial Sequence: Synthetic oligonucleotide
  Antisense strand to SEQ ID NO: 1817153
ugcaucagucacguuaacc

SEQ ID NO: 1817155 - RNA, 19 nt, Artificial Sequence
  Description of Artificial Sequence: Synthetic oligonucleotide
  Sense strand starting at position 819 of SEQ ID NO: 1563528
guuaacgugacugaugcaa

SEQ ID NO: 1817156 - RNA, 19 nt, Artificial Sequence
  Description of Artificial Sequence: Synthetic oligonucleotide
  Antisense strand to SEQ ID NO: 1817155
uugcaucagucacguuaac

SEQ ID NO: 1817157 - RNA, 19 nt, Artificial Sequence
  Description of Artificial Sequence: Synthetic oligonucleotide
  Sense strand starting at position 905 of SEQ ID NO: 1563528
gggagaugguuucuugcag

SEQ ID NO: 1817158 - RNA, 19 nt, Artificial Sequence
  Description of Artificial Sequence: Synthetic oligonucleotide
  Antisense strand to SEQ ID NO: 1817157
cugcaagaaaccaucuccc

SEQ ID NO: 1817159 - RNA, 19 nt, Artificial Sequence
  Description of Artificial Sequence: Synthetic oligonucleotide
  Sense strand starting at position 906 of SEQ ID NO: 1563528
ggagaugguuucuugcaga

SEQ ID NO: 1817160 - RNA, 19 nt, Artificial Sequence
  Description of Artificial Sequence: Synthetic oligonucleotide
  Antisense strand to SEQ ID NO: 1817159
ucugcaagaaaccaucucc

SEQ ID NO: 1817161 - RNA, 19 nt, Artificial Sequence
  Description of Artificial Sequence: Synthetic oligonucleotide
  Sense strand starting at position 1011 of SEQ ID NO: 1563528
guggguagccaugaccaaa

SEQ ID NO: 1817162 - RNA, 19 nt, Artificial Sequence
  Description of Artificial Sequence: Synthetic oligonucleotide
  Antisense strand to SEQ ID NO: 1817161
uuuggucauggcuacccac

SEQ ID NO: 1817163 - RNA, 19 nt, Artificial Sequence
  Description of Artificial Sequence: Synthetic oligonucleotide
  Sense strand starting at position 1043 of SEQ ID NO: 1563528
gaaagagcuccucgggaag

SEQ ID NO: 1817164 - RNA, 19 nt, Artificial Sequence
  Description of Artificial Sequence: Synthetic oligonucleotide
  Antisense strand to SEQ ID NO: 1817163
cuucccgaggagcucuuuc

SEQ ID NO: 1817165 - RNA, 19 nt, Artificial Sequence
  Description of Artificial Sequence: Synthetic oligonucleotide
  Sense strand starting at position 1103 of SEQ ID NO: 1563528
aggaguacuucuccagggu

SEQ ID NO: 1817166 - RNA, 19 nt, Artificial Sequence
  Description of Artificial Sequence: Synthetic oligonucleotide
  Antisense strand to SEQ ID NO: 1817165
acccuggagaaguacuccu

SEQ ID NO: 1817167 - RNA, 19 nt, Artificial Sequence
  Description of Artificial Sequence: Synthetic oligonucleotide
  Sense strand starting at position 2293 of SEQ ID NO: 1563528
aguggucuagguugcuaaa

SEQ ID NO: 1817168 - RNA, 19 nt, Artificial Sequence
  Description of Artificial Sequence: Synthetic oligonucleotide
  Antisense strand to SEQ ID NO: 1817167
uuuagcaaccuagaccacu

SEQ ID NO: 1817169 - RNA, 19 nt, Artificial Sequence
  Description of Artificial Sequence: Synthetic oligonucleotide
  Sense strand starting at position 2349 of SEQ ID NO: 1563528
ggaaacucgugacccuaau

SEQ ID NO: 1817170 - RNA, 19 nt, Artificial Sequence
  Description of Artificial Sequence: Synthetic oligonucleotide
  Antisense strand to SEQ ID NO: 1817169
auuagggucacgaguuucc

SEQ ID NO: 1817171 - RNA, 19 nt, Artificial Sequence
  Description of Artificial Sequence: Synthetic oligonucleotide
  Sense strand starting at position 2376 of SEQ ID NO: 1563528
ugcgcauuucuggacuguu

SEQ ID NO: 1817172 - RNA, 19 nt, Artificial Sequence
  Description of Artificial Sequence: Synthetic oligonucleotide
  Antisense strand to SEQ ID NO: 1817171
aacaguccagaaaugcgca

SEQ ID NO: 1817173 - RNA, 19 nt, Artificial Sequence
  Description of Artificial Sequence: Synthetic oligonucleotide
  Sense strand starting at position 2589 of SEQ ID NO: 1563528
ggcccugacuugcucagaa

SEQ ID NO: 1817174 - RNA, 19 nt, Artificial Sequence
  Description of Artificial Sequence: Synthetic oligonucleotide
  Antisense strand to SEQ ID NO: 1817173
uucugagcaagucagggcc

SEQ ID NO: 1817175 - RNA, 19 nt, Artificial Sequence
  Description of Artificial Sequence: Synthetic oligonucleotide
  Sense strand starting at position 2810 of SEQ ID NO: 1563528
gcagauggcuuccuugaaa

SEQ ID NO: 1817176 - RNA, 19 nt, Artificial Sequence
  Description of Artificial Sequence: Synthetic oligonucleotide
  Antisense strand to SEQ ID NO: 1817175
uuucaaggaagccaucugc

SEQ ID NO: 1817177 - RNA, 19 nt, Artificial Sequence
  Description of Artificial Sequence: Synthetic oligonucleotide
  Sense strand starting at position 3134 of SEQ ID NO: 1563528
gccgucagguacucaauaa

SEQ ID NO: 1817178 - RNA, 19 nt, Artificial Sequence
  Description of Artificial Sequence: Synthetic oligonucleotide
  Antisense strand to SEQ ID NO: 1817177
uuauugaguaccugacggc

SEQ ID NO: 1817179 - RNA, 19 nt, Artificial Sequence
  Description of Artificial Sequence: Synthetic oligonucleotide
  Sense strand starting at position 3338 of SEQ ID NO: 1563528
gagugugcuaucucggcuu

SEQ ID NO: 1817180 - RNA, 19 nt, Artificial Sequence
  Description of Artificial Sequence: Synthetic oligonucleotide
  Antisense strand to SEQ ID NO: 1817179
aagccgagauagcacacuc

SEQ ID NO: 1817181 - RNA, 19 nt, Artificial Sequence
  Description of Artificial Sequence: Synthetic oligonucleotide
  Sense strand starting at position 3387 of SEQ ID NO: 1563528
gacaguuaccgcguccagu

SEQ ID NO: 1817182 - RNA, 19 nt, Artificial Sequence
  Description of Artificial Sequence: Synthetic oligonucleotide
  Antisense strand to SEQ ID NO: 1817181
acuggacgcgguaacuguc

SEQ ID NO: 1817183 - RNA, 19 nt, Artificial Sequence
  Description of Artificial Sequence: Synthetic oligonucleotide
  Sense strand starting at position 3388 of SEQ ID NO: 1563528
acaguuaccgcguccagua

SEQ ID NO: 1817184 - RNA, 19 nt, Artificial Sequence
  Description of Artificial Sequence: Synthetic oligonucleotide
  Antisense strand to SEQ ID NO: 1817183
uacuggacgcgguaacugu

SEQ ID NO: 1817185 - RNA, 19 nt, Artificial Sequence
  Description of Artificial Sequence: Synthetic oligonucleotide
  Sense strand starting at position 3400 of SEQ ID NO: 1563528
uccaguacuguguauccua

SEQ ID NO: 1817186 - RNA, 19 nt, Artificial Sequence
  Description of Artificial Sequence: Synthetic oligonucleotide
  Antisense strand to SEQ ID NO: 1817185
uaggauacacaguacugga

SEQ ID NO: 1817187 - RNA, 19 nt, Artificial Sequence
  Description of Artificial Sequence: Synthetic oligonucleotide
  Sense strand starting at position 3644 of SEQ ID NO: 1563528
ucucuuugccagugggaac

SEQ ID NO: 1817188 - RNA, 19 nt, Artificial Sequence
  Description of Artificial Sequence: Synthetic oligonucleotide
  Antisense strand to SEQ ID NO: 1817187
guucccacuggcaaagaga

SEQ ID NO: 1817189 - RNA, 19 nt, Artificial Sequence
  Description of Artificial Sequence: Synthetic oligonucleotide
  Sense strand starting at position 3656 of SEQ ID NO: 1563528
ugggaacuuucccuuucua

SEQ ID NO: 1817190 - RNA, 19 nt, Artificial Sequence
  Description of Artificial Sequence: Synthetic oligonucleotide
  Antisense strand to SEQ ID NO: 1817189
uagaaagggaaaguuccca

SEQ ID NO: 1817191 - RNA, 19 nt, Artificial Sequence
  Description of Artificial Sequence: Synthetic oligonucleotide
  Sense strand starting at position 3947 of SEQ ID NO: 1563528
gcuuucuguccauagaggu

SEQ ID NO: 1817192 - RNA, 19 nt, Artificial Sequence
  Description of Artificial Sequence: Synthetic oligonucleotide
  Antisense strand to SEQ ID NO: 1817191
accucuauggacagaaagc

SEQ ID NO: 1817193 - RNA, 19 nt, Artificial Sequence
  Description of Artificial Sequence: Synthetic oligonucleotide
  Sense strand starting at position 3982 of SEQ ID NO: 1563528
uuuccuauagauggaauua

SEQ ID NO: 1817194 - RNA, 19 nt, Artificial Sequence
  Description of Artificial Sequence: Synthetic oligonucleotide
  Antisense strand to SEQ ID NO: 1817193
uaauuccaucuauaggaaa

SEQ ID NO: 1817195 - RNA, 19 nt, Artificial Sequence
  Description of Artificial Sequence: Synthetic oligonucleotide
  Sense strand starting at position 2350 of SEQ ID NO: 1563529
cgaaacucgugacccuaau

SEQ ID NO: 1817196 - RNA, 19 nt, Artificial Sequence
  Description of Artificial Sequence: Synthetic oligonucleotide
  Antisense strand to SEQ ID NO: 1817195
auuagggucacgaguuucg

SEQ ID NO: 1817197 - RNA, 19 nt, Artificial Sequence
  Description of Artificial Sequence: Synthetic oligonucleotide
  Sense strand starting at position 2377 of SEQ ID NO: 1563529
ugcgcauuucuagacuguu

SEQ ID NO: 1817198 - RNA, 19 nt, Artificial Sequence
  Description of Artificial Sequence: Synthetic oligonucleotide
  Antisense strand to SEQ ID NO: 1817197
aacagucuagaaaugcgca

SEQ ID NO: 1817199 - RNA, 19 nt, Artificial Sequence
  Description of Artificial Sequence: Synthetic oligonucleotide
  Sense strand starting at position 2347 of SEQ ID NO: 1563530
aaaggaaacucgugacccu

SEQ ID NO: 1817200 - RNA, 19 nt, Artificial Sequence
  Description of Artificial Sequence: Synthetic oligonucleotide
  Antisense strand to SEQ ID NO: 1817199
agggucacgaguuuccuuu

SEQ ID NO: 1817201 - RNA, 19 nt, Artificial Sequence
  Description of Artificial Sequence: Synthetic oligonucleotide
  Sense strand starting at position 2350 of SEQ ID NO: 1563530
ggaaacucgugacccuaau

SEQ ID NO: 1817202 - RNA, 19 nt, Artificial Sequence
  Description of Artificial Sequence: Synthetic oligonucleotide
  Antisense strand to SEQ ID NO: 1817201
auuagggucacgaguuucc

SEQ ID NO: 1817203 - RNA, 19 nt, Artificial Sequence
  Description of Artificial Sequence: Synthetic oligonucleotide
  Sense strand starting at position 2377 of SEQ ID NO: 1563530
ugcgcauuucuggacuguu

SEQ ID NO: 1817204 - RNA, 19 nt, Artificial Sequence
  Description of Artificial Sequence: Synthetic oligonucleotide
  Antisense strand to SEQ ID NO: 1817203
aacaguccagaaaugcgca

SEQ ID NO: 1817205 - RNA, 19 nt, Artificial Sequence
  Description of Artificial Sequence: Synthetic oligonucleotide
  Sense strand starting at position 13 of SEQ ID NO: 1563531
gcuguugugauccagacug

SEQ ID NO: 1817206 - RNA, 19 nt, Artificial Sequence
  Description of Artificial Sequence: Synthetic oligonucleotide
  Antisense strand to SEQ ID NO: 1817205
cagucuggaucacaacagc

SEQ ID NO: 1817207 - RNA, 19 nt, Artificial Sequence
  Description of Artificial Sequence: Synthetic oligonucleotide
  Sense strand starting at position 15 of SEQ ID NO: 1563531
uguugugauccagacugca

SEQ ID NO: 1817208 - RNA, 19 nt, Artificial Sequence
  Description of Artificial Sequence: Synthetic oligonucleotide
  Antisense strand to SEQ ID NO: 1817207
ugcagucuggaucacaaca

SEQ ID NO: 1817209 - RNA, 19 nt, Artificial Sequence
  Description of Artificial Sequence: Synthetic oligonucleotide
  Sense strand starting at position 18 of SEQ ID NO: 1563531
ugugauccagacugcauau

SEQ ID NO: 1817210 - RNA, 19 nt, Artificial Sequence
  Description of Artificial Sequence: Synthetic oligonucleotide
  Antisense strand to SEQ ID NO: 1817209
auaugcagucuggaucaca

SEQ ID NO: 1817211 - RNA, 19 nt, Artificial Sequence
  Description of Artificial Sequence: Synthetic oligonucleotide
  Sense strand starting at position 31 of SEQ ID NO: 1563531
gcauauaccucugcgaaug

SEQ ID NO: 1817212 - RNA, 19 nt, Artificial Sequence
  Description of Artificial Sequence: Synthetic oligonucleotide
  Antisense strand to SEQ ID NO: 1817211
cauucgcagagguauaugc

SEQ ID NO: 1817213 - RNA, 19 nt, Artificial Sequence
  Description of Artificial Sequence: Synthetic oligonucleotide
  Sense strand starting at position 50 of SEQ ID NO: 1563531
gaaccagaaccgugaauuc

SEQ ID NO: 1817214 - RNA, 19 nt, Artificial Sequence
  Description of Artificial Sequence: Synthetic oligonucleotide
  Antisense strand to SEQ ID NO: 1817213
gaauucacgguucugguuc

SEQ ID NO: 1817215 - RNA, 19 nt, Artificial Sequence
  Description of Artificial Sequence: Synthetic oligonucleotide
  Sense strand starting at position 60 of SEQ ID NO: 1563531
cgugaauuccaaugcaaau

SEQ ID NO: 1817216 - RNA, 19 nt, Artificial Sequence
  Description of Artificial Sequence: Synthetic oligonucleotide
  Antisense strand to SEQ ID NO: 1817215
auuugcauuggaauucacg

SEQ ID NO: 1817217 - RNA, 19 nt, Artificial Sequence
  Description of Artificial Sequence: Synthetic oligonucleotide
  Sense strand starting at position 136 of SEQ ID NO: 1563531
uacggagcacaucauagau

SEQ ID NO: 1817218 - RNA, 19 nt, Artificial Sequence
  Description of Artificial Sequence: Synthetic oligonucleotide
  Antisense strand to SEQ ID NO: 1817217
aucuaugaugugcuccgua

SEQ ID NO: 1817219 - RNA, 19 nt, Artificial Sequence
  Description of Artificial Sequence: Synthetic oligonucleotide
  Sense strand starting at position 149 of SEQ ID NO: 1563531
auagaugaucucugcaggu

SEQ ID NO: 1817220 - RNA, 19 nt, Artificial Sequence
  Description of Artificial Sequence: Synthetic oligonucleotide
  Antisense strand to SEQ ID NO: 1817219
accugcagagaucaucuau

SEQ ID NO: 1817221 - RNA, 19 nt, Artificial Sequence
  Description of Artificial Sequence: Synthetic oligonucleotide
  Sense strand starting at position 166 of SEQ ID NO: 1563531
guucguugcccacauagga

SEQ ID NO: 1817222 - RNA, 19 nt, Artificial Sequence
  Description of Artificial Sequence: Synthetic oligonucleotide
  Antisense strand to SEQ ID NO: 1817221
uccuaugugggcaacgaac

SEQ ID NO: 1817223 - RNA, 19 nt, Artificial Sequence
  Description of Artificial Sequence: Synthetic oligonucleotide
  Sense strand starting at position 317 of SEQ ID NO: 1563531
ggaguacaagaguagcuuu

SEQ ID NO: 1817224 - RNA, 19 nt, Artificial Sequence
  Description of Artificial Sequence: Synthetic oligonucleotide
  Antisense strand to SEQ ID NO: 1817223
aaagcuacucuuguacucc

SEQ ID NO: 1817225 - RNA, 19 nt, Artificial Sequence
  Description of Artificial Sequence: Synthetic oligonucleotide
  Sense strand starting at position 320 of SEQ ID NO: 1563531
guacaagaguagcuuuauc

SEQ ID NO: 1817226 - RNA, 19 nt, Artificial Sequence
  Description of Artificial Sequence: Synthetic oligonucleotide
  Antisense strand to SEQ ID NO: 1817225
gauaaagcuacucuuguac

SEQ ID NO: 1817227 - RNA, 19 nt, Artificial Sequence
  Description of Artificial Sequence: Synthetic oligonucleotide
  Sense strand starting at position 325 of SEQ ID NO: 1563531
agaguagcuuuaucaugga

SEQ ID NO: 1817228 - RNA, 19 nt, Artificial Sequence
  Description of Artificial Sequence: Synthetic oligonucleotide
  Antisense strand to SEQ ID NO: 1817227
uccaugauaaagcuacucu

SEQ ID NO: 1817229 - RNA, 19 nt, Artificial Sequence
  Description of Artificial Sequence: Synthetic oligonucleotide
  Sense strand starting at position 340 of SEQ ID NO: 1563531
uggauuuagggcugugguu

SEQ ID NO: 1817230 - RNA, 19 nt, Artificial Sequence
  Description of Artificial Sequence: Synthetic oligonucleotide
  Antisense strand to SEQ ID NO: 1817229
aaccacagcccuaaaucca

SEQ ID NO: 1817231 - RNA, 19 nt, Artificial Sequence
  Description of Artificial Sequence: Synthetic oligonucleotide
  Sense strand starting at position 445 of SEQ ID NO: 1563531
acaggaauauguuaagaag

SEQ ID NO: 1817232 - RNA, 19 nt, Artificial Sequence
  Description of Artificial Sequence: Synthetic oligonucleotide
  Antisense strand to SEQ ID NO: 1817231
cuucuuaacauauuccugu

SEQ ID NO: 1817233 - RNA, 19 nt, Artificial Sequence
  Description of Artificial Sequence: Synthetic oligonucleotide
  Sense strand starting at position 787 of SEQ ID NO: 1563531
gcaugagguuugguaacag

SEQ ID NO: 1817234 - RNA, 19 nt, Artificial Sequence
  Description of Artificial Sequence: Synthetic oligonucleotide
  Antisense strand to SEQ ID NO: 1817233
cuguuaccaaaccucaugc

SEQ ID NO: 1817235 - RNA, 19 nt, Artificial Sequence
  Description of Artificial Sequence: Synthetic oligonucleotide
  Sense strand starting at position 803 of SEQ ID NO: 1563531
caggcaaagucaucugguu

SEQ ID NO: 1817236 - RNA, 19 nt, Artificial Sequence
  Description of Artificial Sequence: Synthetic oligonucleotide
  Antisense strand to SEQ ID NO: 1817235
aaccagaugacuuugccug

SEQ ID NO: 1817237 - RNA, 19 nt, Artificial Sequence
  Description of Artificial Sequence: Synthetic oligonucleotide
  Sense strand starting at position 805 of SEQ ID NO: 1563531
ggcaaagucaucugguuaa

SEQ ID NO: 1817238 - RNA, 19 nt, Artificial Sequence
  Description of Artificial Sequence: Synthetic oligonucleotide
  Antisense strand to SEQ ID NO: 1817237
uuaaccagaugacuuugcc

SEQ ID NO: 1817239 - RNA, 19 nt, Artificial Sequence
  Description of Artificial Sequence: Synthetic oligonucleotide
  Sense strand starting at position 808 of SEQ ID NO: 1563531
aaagucaucugguuaacgu

SEQ ID NO: 1817240 - RNA, 19 nt, Artificial Sequence
  Description of Artificial Sequence: Synthetic oligonucleotide
  Antisense strand to SEQ ID NO: 1817239
acguuaaccagaugacuuu

SEQ ID NO: 1817241 - RNA, 19 nt, Artificial Sequence
  Description of Artificial Sequence: Synthetic oligonucleotide
  Sense strand starting at position 815 of SEQ ID NO: 1563531
ucugguuaacgugacugau

SEQ ID NO: 1817242 - RNA, 19 nt, Artificial Sequence
  Description of Artificial Sequence: Synthetic oligonucleotide
  Antisense strand to SEQ ID NO: 1817241
aucagucacguuaaccaga

SEQ ID NO: 1817243 - RNA, 19 nt, Artificial Sequence
  Description of Artificial Sequence: Synthetic oligonucleotide
  Sense strand starting at position 818 of SEQ ID NO: 1563531
gguuaacgugacugaugca

SEQ ID NO: 1817244 - RNA, 19 nt, Artificial Sequence
  Description of Artificial Sequence: Synthetic oligonucleotide
  Antisense strand to SEQ ID NO: 1817243
ugcaucagucacguuaacc

SEQ ID NO: 1817245 - RNA, 19 nt, Artificial Sequence
  Description of Artificial Sequence: Synthetic oligonucleotide
  Sense strand starting at position 819 of SEQ ID NO: 1563531
guuaacgugacugaugcaa

SEQ ID NO: 1817246 - RNA, 19 nt, Artificial Sequence
  Description of Artificial Sequence: Synthetic oligonucleotide
  Antisense strand to SEQ ID NO: 1817245
uugcaucagucacguuaac

SEQ ID NO: 1817247 - RNA, 19 nt, Artificial Sequence
  Description of Artificial Sequence: Synthetic oligonucleotide
  Sense strand starting at position 905 of SEQ ID NO: 1563531
gggagaugguuucuugcag

SEQ ID NO: 1817248 - RNA, 19 nt, Artificial Sequence
  Description of Artificial Sequence: Synthetic oligonucleotide
  Antisense strand to SEQ ID NO: 1817247
cugcaagaaaccaucuccc

SEQ ID NO: 1817249 - RNA, 19 nt, Artificial Sequence
  Description of Artificial Sequence: Synthetic oligonucleotide
  Sense strand starting at position 906 of SEQ ID NO: 1563531
ggagaugguuucuugcaga

SEQ ID NO: 1817250 - RNA, 19 nt, Artificial Sequence
  Description of Artificial Sequence: Synthetic oligonucleotide
  Antisense strand to SEQ ID NO: 1817249
ucugcaagaaaccaucucc

SEQ ID NO: 1817251 - RNA, 19 nt, Artificial Sequence
  Description of Artificial Sequence: Synthetic oligonucleotide
  Sense strand starting at position 1011 of SEQ ID NO: 1563531
guggguagccaugaccaaa

SEQ ID NO: 1817252 - RNA, 19 nt, Artificial Sequence
  Description of Artificial Sequence: Synthetic oligonucleotide
  Antisense strand to SEQ ID NO: 1817251
uuuggucauggcuacccac

SEQ ID NO: 1817253 - RNA, 19 nt, Artificial Sequence
  Description of Artificial Sequence: Synthetic oligonucleotide
  Sense strand starting at position 1043 of SEQ ID NO: 1563531
gaaagagcuccucgggaag

SEQ ID NO: 1817254 - RNA, 19 nt, Artificial Sequence
  Description of Artificial Sequence: Synthetic oligonucleotide
  Antisense strand to SEQ ID NO: 1817253
cuucccgaggagcucuuuc

SEQ ID NO: 1817255 - RNA, 19 nt, Artificial Sequence
  Description of Artificial Sequence: Synthetic oligonucleotide
  Sense strand starting at position 1103 of SEQ ID NO: 1563531
aggaguacuucuccagggu

SEQ ID NO: 1817256 - RNA, 19 nt, Artificial Sequence
  Description of Artificial Sequence: Synthetic oligonucleotide
  Antisense strand to SEQ ID NO: 1817255
acccuggagaaguacuccu

SEQ ID NO: 1817257 - RNA, 19 nt, Artificial Sequence
  Description of Artificial Sequence: Synthetic oligonucleotide
  Sense strand starting at position 2293 of SEQ ID NO: 1563531
aguggucuagguugcuaaa

SEQ ID NO: 1817258 - RNA, 19 nt, Artificial Sequence
  Description of Artificial Sequence: Synthetic oligonucleotide
  Antisense strand to SEQ ID NO: 1817257
uuuagcaaccuagaccacu

SEQ ID NO: 1817259 - RNA, 19 nt, Artificial Sequence
  Description of Artificial Sequence: Synthetic oligonucleotide
  Sense strand starting at position 2349 of SEQ ID NO: 1563531
ggaaacucgugacccuaau

SEQ ID NO: 1817260 - RNA, 19 nt, Artificial Sequence
  Description of Artificial Sequence: Synthetic oligonucleotide
  Antisense strand to SEQ ID NO: 1817259
auuagggucacgaguuucc

SEQ ID NO: 1817261 - RNA, 19 nt, Artificial Sequence
  Description of Artificial Sequence: Synthetic oligonucleotide
  Sense strand starting at position 2376 of SEQ ID NO: 1563531
ugcgcauuucuggacuguu

SEQ ID NO: 1817262 - RNA, 19 nt, Artificial Sequence
  Description of Artificial Sequence: Synthetic oligonucleotide
  Antisense strand to SEQ ID NO: 1817261
aacaguccagaaaugcgca

SEQ ID NO: 1817263 - RNA, 19 nt, Artificial Sequence
  Description of Artificial Sequence: Synthetic oligonucleotide
  Sense strand starting at position 2589 of SEQ ID NO: 1563531
ggcccugacuugcucagaa

SEQ ID NO: 1817264 - RNA, 19 nt, Artificial Sequence
  Description of Artificial Sequence: Synthetic oligonucleotide
  Antisense strand to SEQ ID NO: 1817263
uucugagcaagucagggcc

SEQ ID NO: 1817265 - RNA, 19 nt, Artificial Sequence
  Description of Artificial Sequence: Synthetic oligonucleotide
  Sense strand starting at position 2810 of SEQ ID NO: 1563531
gcagauggcuuccuugaaa

SEQ ID NO: 1817266 - RNA, 19 nt, Artificial Sequence
  Description of Artificial Sequence: Synthetic oligonucleotide
  Antisense strand to SEQ ID NO: 1817265
uuucaaggaagccaucugc

SEQ ID NO: 1817267 - RNA, 19 nt, Artificial Sequence
  Description of Artificial Sequence: Synthetic oligonucleotide
  Sense strand starting at position 3134 of SEQ ID NO: 1563531
gccgucagguacucaauaa

SEQ ID NO: 1817268 - RNA, 19 nt, Artificial Sequence
  Description of Artificial Sequence: Synthetic oligonucleotide
  Antisense strand to SEQ ID NO: 1817267
uuauugaguaccugacggc

SEQ ID NO: 1817269 - RNA, 19 nt, Artificial Sequence
  Description of Artificial Sequence: Synthetic oligonucleotide
  Sense strand starting at position 3338 of SEQ ID NO: 1563531
gagugugcuaucucggcuu

SEQ ID NO: 1817270 - RNA, 19 nt, Artificial Sequence
  Description of Artificial Sequence: Synthetic oligonucleotide
  Antisense strand to SEQ ID NO: 1817269
aagccgagauagcacacuc

SEQ ID NO: 1817271 - RNA, 19 nt, Artificial Sequence
  Description of Artificial Sequence: Synthetic oligonucleotide
  Sense strand starting at position 3387 of SEQ ID NO: 1563531
gacaguuaccgcguccagu

SEQ ID NO: 1817272 - RNA, 19 nt, Artificial Sequence
  Description of Artificial Sequence: Synthetic oligonucleotide
  Antisense strand to SEQ ID NO: 1817271
acuggacgcgguaacuguc

SEQ ID NO: 1817273 - RNA, 19 nt, Artificial Sequence
  Description of Artificial Sequence: Synthetic oligonucleotide
  Sense strand starting at position 3388 of SEQ ID NO: 1563531
acaguuaccgcguccagua

SEQ ID NO: 1817274 - RNA, 19 nt, Artificial Sequence
  Description of Artificial Sequence: Synthetic oligonucleotide
  Antisense strand to SEQ ID NO: 1817273
uacuggacgcgguaacugu

SEQ ID NO: 1817275 - RNA, 19 nt, Artificial Sequence
  Description of Artificial Sequence: Synthetic oligonucleotide
  Sense strand starting at position 3400 of SEQ ID NO: 1563531
uccaguacuguguauccua

SEQ ID NO: 1817276 - RNA, 19 nt, Artificial Sequence
  Description of Artificial Sequence: Synthetic oligonucleotide
  Antisense strand to SEQ ID NO: 1817275
uaggauacacaguacugga

SEQ ID NO: 1817277 - RNA, 19 nt, Artificial Sequence
  Description of Artificial Sequence: Synthetic oligonucleotide
  Sense strand starting at position 3644 of SEQ ID NO: 1563531
ucucuuugccagugggaac

SEQ ID NO: 1817278 - RNA, 19 nt, Artificial Sequence
  Description of Artificial Sequence: Synthetic oligonucleotide
  Antisense strand to SEQ ID NO: 1817277
guucccacuggcaaagaga

SEQ ID NO: 1817279 - RNA, 19 nt, Artificial Sequence
  Description of Artificial Sequence: Synthetic oligonucleotide
  Sense strand starting at position 3656 of SEQ ID NO: 1563531
ugggaacuuucccuuucua

SEQ ID NO: 1817280 - RNA, 19 nt, Artificial Sequence
  Description of Artificial Sequence: Synthetic oligonucleotide
  Antisense strand to SEQ ID NO: 1817279
uagaaagggaaaguuccca

SEQ ID NO: 1817281 - RNA, 19 nt, Artificial Sequence
  Description of Artificial Sequence: Synthetic oligonucleotide
  Sense strand starting at position 3947 of SEQ ID NO: 1563531
gcuuucuguccauagaggu

SEQ ID NO: 1817282 - RNA, 19 nt, Artificial Sequence
  Description of Artificial Sequence: Synthetic oligonucleotide
  Antisense strand to SEQ ID NO: 1817281
accucuauggacagaaagc

SEQ ID NO: 1817283 - RNA, 19 nt, Artificial Sequence
  Description of Artificial Sequence: Synthetic oligonucleotide
  Sense strand starting at position 3982 of SEQ ID NO: 1563531
uuuccuauagauggaauua

SEQ ID NO: 1817284 - RNA, 19 nt, Artificial Sequence
  Description of Artificial Sequence: Synthetic oligonucleotide
  Antisense strand to SEQ ID NO: 1817283
uaauuccaucuauaggaaa

SEQ ID NO: 1817285 - RNA, 19 nt, Artificial Sequence
  Description of Artificial Sequence: Synthetic oligonucleotide
  Sense strand starting at position 85 of SEQ ID NO: 1563532
ucucuaugaucccuuagua

SEQ ID NO: 1817286 - RNA, 19 nt, Artificial Sequence
  Description of Artificial Sequence: Synthetic oligonucleotide
  Antisense strand to SEQ ID NO: 1817285
uacuaagggaucauagaga

SEQ ID NO: 1817287 - RNA, 19 nt, Artificial Sequence
  Description of Artificial Sequence: Synthetic oligonucleotide
  Sense strand starting at position 154 of SEQ ID NO: 1563532
gcugcuuuagaucaaagag

SEQ ID NO: 1817288 - RNA, 19 nt, Artificial Sequence
  Description of Artificial Sequence: Synthetic oligonucleotide
  Antisense strand to SEQ ID NO: 1817287
cucuuugaucuaaagcagc

SEQ ID NO: 1817289 - RNA, 19 nt, Artificial Sequence
  Description of Artificial Sequence: Synthetic oligonucleotide
  Sense strand starting at position 235 of SEQ ID NO: 1563532
cucaguaaugucugaauga

SEQ ID NO: 1817290 - RNA, 19 nt, Artificial Sequence
  Description of Artificial Sequence: Synthetic oligonucleotide
  Antisense strand to SEQ ID NO: 1817289
ucauucagacauuacugag

SEQ ID NO: 1817291 - RNA, 19 nt, Artificial Sequence
  Description of Artificial Sequence: Synthetic oligonucleotide
  Sense strand starting at position 252 of SEQ ID NO: 1563532
gaaggacaucuuugaugca

SEQ ID NO: 1817292 - RNA, 19 nt, Artificial Sequence
  Description of Artificial Sequence: Synthetic oligonucleotide
  Antisense strand to SEQ ID NO: 1817291
ugcaucaaagauguccuuc

SEQ ID NO: 1817293 - RNA, 19 nt, Artificial Sequence
  Description of Artificial Sequence: Synthetic oligonucleotide
  Sense strand starting at position 400 of SEQ ID NO: 1563532
uuuagaagccaaugagagu

SEQ ID NO: 1817294 - RNA, 19 nt, Artificial Sequence
  Description of Artificial Sequence: Synthetic oligonucleotide
  Antisense strand to SEQ ID NO: 1817293
acucucauuggcuucuaaa

SEQ ID NO: 1817295 - RNA, 19 nt, Artificial Sequence
  Description of Artificial Sequence: Synthetic oligonucleotide
  Sense strand starting at position 429 of SEQ ID NO: 1563532
aagagagugcugcauuaau

SEQ ID NO: 1817296 - RNA, 19 nt, Artificial Sequence
  Description of Artificial Sequence: Synthetic oligonucleotide
  Antisense strand to SEQ ID NO: 1817295
auuaaugcagcacucucuu

SEQ ID NO: 1817297 - RNA, 19 nt, Artificial Sequence
  Description of Artificial Sequence: Synthetic oligonucleotide
  Sense strand starting at position 553 of SEQ ID NO: 1563532
gggaucguauacuuaacuu

SEQ ID NO: 1817298 - RNA, 19 nt, Artificial Sequence
  Description of Artificial Sequence: Synthetic oligonucleotide
  Antisense strand to SEQ ID NO: 1817297
aaguuaaguauacgauccc

SEQ ID NO: 1817299 - RNA, 19 nt, Artificial Sequence
  Description of Artificial Sequence: Synthetic oligonucleotide
  Sense strand starting at position 781 of SEQ ID NO: 1563532
gcuuuauguccugcuuugu

SEQ ID NO: 1817300 - RNA, 19 nt, Artificial Sequence
  Description of Artificial Sequence: Synthetic oligonucleotide
  Antisense strand to SEQ ID NO: 1817299
acaaagcaggacauaaagc

SEQ ID NO: 1817301 - RNA, 19 nt, Artificial Sequence
  Description of Artificial Sequence: Synthetic oligonucleotide
  Sense strand starting at position 906 of SEQ ID NO: 1563532
cugacaucaugucuggagu

SEQ ID NO: 1817302 - RNA, 19 nt, Artificial Sequence
  Description of Artificial Sequence: Synthetic oligonucleotide
  Antisense strand to SEQ ID NO: 1817301
acuccagacaugaugucag

SEQ ID NO: 1817303 - RNA, 19 nt, Artificial Sequence
  Description of Artificial Sequence: Synthetic oligonucleotide
  Sense strand starting at position 1017 of SEQ ID NO: 1563532
uugacaaguaagugugaua

SEQ ID NO: 1817304 - RNA, 19 nt, Artificial Sequence
  Description of Artificial Sequence: Synthetic oligonucleotide
  Antisense strand to SEQ ID NO: 1817303
uaucacacuuacuugucaa

SEQ ID NO: 1817305 - RNA, 19 nt, Artificial Sequence
  Description of Artificial Sequence: Synthetic oligonucleotide
  Sense strand starting at position 1032 of SEQ ID NO: 1563532
gauaaaugcuuccugugag

SEQ ID NO: 1817306 - RNA, 19 nt, Artificial Sequence
  Description of Artificial Sequence: Synthetic oligonucleotide
  Antisense strand to SEQ ID NO: 1817305
cucacaggaagcauuuauc

SEQ ID NO: 1817307 - RNA, 19 nt, Artificial Sequence
  Description of Artificial Sequence: Synthetic oligonucleotide
  Sense strand starting at position 1059 of SEQ ID NO: 1563532
guuuguccaaaugggauaa

SEQ ID NO: 1817308 - RNA, 19 nt, Artificial Sequence
  Description of Artificial Sequence: Synthetic oligonucleotide
  Antisense strand to SEQ ID NO: 1817307
uuaucccauuuggacaaac

SEQ ID NO: 1817309 - RNA, 19 nt, Artificial Sequence
  Description of Artificial Sequence: Synthetic oligonucleotide
  Sense strand starting at position 1211 of SEQ ID NO: 1563532
gaacucaacugaguauugu

SEQ ID NO: 1817310 - RNA, 19 nt, Artificial Sequence
  Description of Artificial Sequence: Synthetic oligonucleotide
  Antisense strand to SEQ ID NO: 1817309
acaauacucaguugaguuc

SEQ ID NO: 1817311 - RNA, 19 nt, Artificial Sequence
  Description of Artificial Sequence: Synthetic oligonucleotide
  Sense strand starting at position 1246 of SEQ ID NO: 1563532
acuccaagauguuugacau

SEQ ID NO: 1817312 - RNA, 19 nt, Artificial Sequence
  Description of Artificial Sequence: Synthetic oligonucleotide
  Antisense strand to SEQ ID NO: 1817311
augucaaacaucuuggagu

SEQ ID NO: 1817313 - RNA, 19 nt, Artificial Sequence
  Description of Artificial Sequence: Synthetic oligonucleotide
  Sense strand starting at position 1247 of SEQ ID NO: 1563532
cuccaagauguuugacaua

SEQ ID NO: 1817314 - RNA, 19 nt, Artificial Sequence
  Description of Artificial Sequence: Synthetic oligonucleotide
  Antisense strand to SEQ ID NO: 1817313
uaugucaaacaucuuggag

SEQ ID NO: 1817315 - RNA, 19 nt, Artificial Sequence
  Description of Artificial Sequence: Synthetic oligonucleotide
  Sense strand starting at position 1638 of SEQ ID NO: 1563532
ugaacugaacaguguuuau

SEQ ID NO: 1817316 - RNA, 19 nt, Artificial Sequence
  Description of Artificial Sequence: Synthetic oligonucleotide
  Antisense strand to SEQ ID NO: 1817315
auaaacacuguucaguuca

SEQ ID NO: 1817317 - RNA, 19 nt, Artificial Sequence
  Description of Artificial Sequence: Synthetic oligonucleotide
  Sense strand starting at position 1641 of SEQ ID NO: 1563532
acugaacaguguuuauuaa

SEQ ID NO: 1817318 - RNA, 19 nt, Artificial Sequence
  Description of Artificial Sequence: Synthetic oligonucleotide
  Antisense strand to SEQ ID NO: 1817317
uuaauaaacacuguucagu

SEQ ID NO: 1817319 - RNA, 19 nt, Artificial Sequence
  Description of Artificial Sequence: Synthetic oligonucleotide
  Sense strand starting at position 1642 of SEQ ID NO: 1563532
cugaacaguguuuauuaaa

SEQ ID NO: 1817320 - RNA, 19 nt, Artificial Sequence
  Description of Artificial Sequence: Synthetic oligonucleotide
  Antisense strand to SEQ ID NO: 1817319
uuuaauaaacacuguucag

SEQ ID NO: 1817321 - RNA, 19 nt, Artificial Sequence
  Description of Artificial Sequence: Synthetic oligonucleotide
  Sense strand starting at position 1673 of SEQ ID NO: 1563532
auaagcauugucgaucuau

SEQ ID NO: 1817322 - RNA, 19 nt, Artificial Sequence
  Description of Artificial Sequence: Synthetic oligonucleotide
  Antisense strand to SEQ ID NO: 1817321
auagaucgacaaugcuuau

SEQ ID NO: 1817323 - RNA, 19 nt, Artificial Sequence
  Description of Artificial Sequence: Synthetic oligonucleotide
  Sense strand starting at position 1753 of SEQ ID NO: 1563532
gcgugcuggcuguuagacu

SEQ ID NO: 1817324 - RNA, 19 nt, Artificial Sequence
  Description of Artificial Sequence: Synthetic oligonucleotide
  Antisense strand to SEQ ID NO: 1817323
agucuaacagccagcacgc

SEQ ID NO: 1817325 - RNA, 19 nt, Artificial Sequence
  Description of Artificial Sequence: Synthetic oligonucleotide
  Sense strand starting at position 1997 of SEQ ID NO: 1563532
gugguaaggucgauuaguu

SEQ ID NO: 1817326 - RNA, 19 nt, Artificial Sequence
  Description of Artificial Sequence: Synthetic oligonucleotide
  Antisense strand to SEQ ID NO: 1817325
aacuaaucgaccuuaccac

SEQ ID NO: 1817327 - RNA, 19 nt, Artificial Sequence
  Description of Artificial Sequence: Synthetic oligonucleotide
  Sense strand starting at position 2098 of SEQ ID NO: 1563532
ggccucuugggacaaguga

SEQ ID NO: 1817328 - RNA, 19 nt, Artificial Sequence
  Description of Artificial Sequence: Synthetic oligonucleotide
  Antisense strand to SEQ ID NO: 1817327
ucacuugucccaagaggcc

SEQ ID NO: 1817329 - RNA, 19 nt, Artificial Sequence
  Description of Artificial Sequence: Synthetic oligonucleotide
  Sense strand starting at position 2118 of SEQ ID NO: 1563532
gagaaugggcaguggucau

SEQ ID NO: 1817330 - RNA, 19 nt, Artificial Sequence
  Description of Artificial Sequence: Synthetic oligonucleotide
  Antisense strand to SEQ ID NO: 1817329
augaccacugcccauucuc

SEQ ID NO: 1817331 - RNA, 19 nt, Artificial Sequence
  Description of Artificial Sequence: Synthetic oligonucleotide
  Sense strand starting at position 2122 of SEQ ID NO: 1563532
augggcaguggucauuauu

SEQ ID NO: 1817332 - RNA, 19 nt, Artificial Sequence
  Description of Artificial Sequence: Synthetic oligonucleotide
  Antisense strand to SEQ ID NO: 1817331
aauaaugaccacugcccau

SEQ ID NO: 1817333 - RNA, 19 nt, Artificial Sequence
  Description of Artificial Sequence: Synthetic oligonucleotide
  Sense strand starting at position 2125 of SEQ ID NO: 1563532
ggcaguggucauuauuaaa

SEQ ID NO: 1817334 - RNA, 19 nt, Artificial Sequence
  Description of Artificial Sequence: Synthetic oligonucleotide
  Antisense strand to SEQ ID NO: 1817333
uuuaauaaugaccacugcc

SEQ ID NO: 1817335 - RNA, 19 nt, Artificial Sequence
  Description of Artificial Sequence: Synthetic oligonucleotide
  Sense strand starting at position 2181 of SEQ ID NO: 1563532
ugauuugagucugaaacag

SEQ ID NO: 1817336 - RNA, 19 nt, Artificial Sequence
  Description of Artificial Sequence: Synthetic oligonucleotide
  Antisense strand to SEQ ID NO: 1817335
cuguuucagacucaaauca

SEQ ID NO: 1817337 - RNA, 19 nt, Artificial Sequence
  Description of Artificial Sequence: Synthetic oligonucleotide
  Sense strand starting at position 2285 of SEQ ID NO: 1563532
uuugucagagagcaaugau

SEQ ID NO: 1817338 - RNA, 19 nt, Artificial Sequence
  Description of Artificial Sequence: Synthetic oligonucleotide
  Antisense strand to SEQ ID NO: 1817337
aucauugcucucugacaaa

SEQ ID NO: 1817339 - RNA, 19 nt, Artificial Sequence
  Description of Artificial Sequence: Synthetic oligonucleotide
  Sense strand starting at position 2288 of SEQ ID NO: 1563532
gucagagagcaaugauguu

SEQ ID NO: 1817340 - RNA, 19 nt, Artificial Sequence
  Description of Artificial Sequence: Synthetic oligonucleotide
  Antisense strand to SEQ ID NO: 1817339
aacaucauugcucucugac

SEQ ID NO: 1817341 - RNA, 19 nt, Artificial Sequence
  Description of Artificial Sequence: Synthetic oligonucleotide
  Sense strand starting at position 2294 of SEQ ID NO: 1563532
gagcaaugauguuuaccaa

SEQ ID NO: 1817342 - RNA, 19 nt, Artificial Sequence
  Description of Artificial Sequence: Synthetic oligonucleotide
  Antisense strand to SEQ ID NO: 1817341
uugguaaacaucauugcuc

SEQ ID NO: 1817343 - RNA, 19 nt, Artificial Sequence
  Description of Artificial Sequence: Synthetic oligonucleotide
  Sense strand starting at position 2295 of SEQ ID NO: 1563532
agcaaugauguuuaccaaa

SEQ ID NO: 1817344 - RNA, 19 nt, Artificial Sequence
  Description of Artificial Sequence: Synthetic oligonucleotide
  Antisense strand to SEQ ID NO: 1817343
uuugguaaacaucauugcu

SEQ ID NO: 1817345 - RNA, 19 nt, Artificial Sequence
  Description of Artificial Sequence: Synthetic oligonucleotide
  Sense strand starting at position 2347 of SEQ ID NO: 1563532
guaugagugguccaguuag

SEQ ID NO: 1817346 - RNA, 19 nt, Artificial Sequence
  Description of Artificial Sequence: Synthetic oligonucleotide
  Antisense strand to SEQ ID NO: 1817345
cuaacuggaccacucauac

SEQ ID NO: 1817347 - RNA, 19 nt, Artificial Sequence
  Description of Artificial Sequence: Synthetic oligonucleotide
  Sense strand starting at position 2383 of SEQ ID NO: 1563532
acugucagauucuuaaggu

SEQ ID NO: 1817348 - RNA, 19 nt, Artificial Sequence
  Description of Artificial Sequence: Synthetic oligonucleotide
  Antisense strand to SEQ ID NO: 1817347
accuuaagaaucugacagu

SEQ ID NO: 1817349 - RNA, 19 nt, Artificial Sequence
  Description of Artificial Sequence: Synthetic oligonucleotide
  Sense strand starting at position 2642 of SEQ ID NO: 1563532
uuagauuuaugcccaugcu

SEQ ID NO: 1817350 - RNA, 19 nt, Artificial Sequence
  Description of Artificial Sequence: Synthetic oligonucleotide
  Antisense strand to SEQ ID NO: 1817349
agcaugggcauaaaucuaa

SEQ ID NO: 1817351 - RNA, 19 nt, Artificial Sequence
  Description of Artificial Sequence: Synthetic oligonucleotide
  Sense strand starting at position 2684 of SEQ ID NO: 1563532
aaaguaugauguuuaaguc

SEQ ID NO: 1817352 - RNA, 19 nt, Artificial Sequence
  Description of Artificial Sequence: Synthetic oligonucleotide
  Antisense strand to SEQ ID NO: 1817351
gacuuaaacaucauacuuu

SEQ ID NO: 1817353 - RNA, 19 nt, Artificial Sequence
  Description of Artificial Sequence: Synthetic oligonucleotide
  Sense strand starting at position 2780 of SEQ ID NO: 1563532
cuauccuuccucgauugaa

SEQ ID NO: 1817354 - RNA, 19 nt, Artificial Sequence
  Description of Artificial Sequence: Synthetic oligonucleotide
  Antisense strand to SEQ ID NO: 1817353
uucaaucgaggaaggauag

SEQ ID NO: 1817355 - RNA, 19 nt, Artificial Sequence
  Description of Artificial Sequence: Synthetic oligonucleotide
  Sense strand starting at position 2822 of SEQ ID NO: 1563532
gucaguuaaccauauuguu

SEQ ID NO: 1817356 - RNA, 19 nt, Artificial Sequence
  Description of Artificial Sequence: Synthetic oligonucleotide
  Antisense strand to SEQ ID NO: 1817355
aacaauaugguuaacugac

SEQ ID NO: 1817357 - RNA, 19 nt, Artificial Sequence
  Description of Artificial Sequence: Synthetic oligonucleotide
  Sense strand starting at position 2942 of SEQ ID NO: 1563532
acuuuauauuagguagagu

SEQ ID NO: 1817358 - RNA, 19 nt, Artificial Sequence
  Description of Artificial Sequence: Synthetic oligonucleotide
  Antisense strand to SEQ ID NO: 1817357
acucuaccuaauauaaagu

SEQ ID NO: 1817359 - RNA, 19 nt, Artificial Sequence
  Description of Artificial Sequence: Synthetic oligonucleotide
  Sense strand starting at position 3919 of SEQ ID NO: 1563532
uuuagauucuagguauuag

SEQ ID NO: 1817360 - RNA, 19 nt, Artificial Sequence
  Description of Artificial Sequence: Synthetic oligonucleotide
  Antisense strand to SEQ ID NO: 1817359
cuaauaccuagaaucuaaa

SEQ ID NO: 1817361 - RNA, 19 nt, Artificial Sequence
  Description of Artificial Sequence: Synthetic oligonucleotide
  Sense strand starting at position 3931 of SEQ ID NO: 1563532
guauuagcccuuggacaga

SEQ ID NO: 1817362 - RNA, 19 nt, Artificial Sequence
  Description of Artificial Sequence: Synthetic oligonucleotide
  Antisense strand to SEQ ID NO: 1817361
ucuguccaagggcuaauac

SEQ ID NO: 1817363 - RNA, 19 nt, Artificial Sequence
  Description of Artificial Sequence: Synthetic oligonucleotide
  Sense strand starting at position 3936 of SEQ ID NO: 1563532
agcccuuggacagaugagu

SEQ ID NO: 1817364 - RNA, 19 nt, Artificial Sequence
  Description of Artificial Sequence: Synthetic oligonucleotide
  Antisense strand to SEQ ID NO: 1817363
acucaucuguccaagggcu

SEQ ID NO: 1817365 - RNA, 19 nt, Artificial Sequence
  Description of Artificial Sequence: Synthetic oligonucleotide
  Sense strand starting at position 724 of SEQ ID NO: 1563533
caggauaugucuuugaaag

SEQ ID NO: 1817366 - RNA, 19 nt, Artificial Sequence
  Description of Artificial Sequence: Synthetic oligonucleotide
  Antisense strand to SEQ ID NO: 1817365
cuuucaaagacauauccug

SEQ ID NO: 1817367 - RNA, 19 nt, Artificial Sequence
  Description of Artificial Sequence: Synthetic oligonucleotide
  Sense strand starting at position 797 of SEQ ID NO: 1563533
ugagauaguauuugcugca

SEQ ID NO: 1817368 - RNA, 19 nt, Artificial Sequence
  Description of Artificial Sequence: Synthetic oligonucleotide
  Antisense strand to SEQ ID NO: 1817367
ugcagcaaauacuaucuca

SEQ ID NO: 1817369 - RNA, 19 nt, Artificial Sequence
  Description of Artificial Sequence: Synthetic oligonucleotide
  Sense strand starting at position 798 of SEQ ID NO: 1563533
gagauaguauuugcugcau

SEQ ID NO: 1817370 - RNA, 19 nt, Artificial Sequence
  Description of Artificial Sequence: Synthetic oligonucleotide
  Antisense strand to SEQ ID NO: 1817369
augcagcaaauacuaucuc

SEQ ID NO: 1817371 - RNA, 19 nt, Artificial Sequence
  Description of Artificial Sequence: Synthetic oligonucleotide
  Sense strand starting at position 932 of SEQ ID NO: 1563533
agcucaagaucuccaggua

SEQ ID NO: 1817372 - RNA, 19 nt, Artificial Sequence
  Description of Artificial Sequence: Synthetic oligonucleotide
  Antisense strand to SEQ ID NO: 1817371
uaccuggagaucuugagcu

SEQ ID NO: 1817373 - RNA, 19 nt, Artificial Sequence
  Description of Artificial Sequence: Synthetic oligonucleotide
  Sense strand starting at position 933 of SEQ ID NO: 1563533
gcucaagaucuccagguaa

SEQ ID NO: 1817374 - RNA, 19 nt, Artificial Sequence
  Description of Artificial Sequence: Synthetic oligonucleotide
  Antisense strand to SEQ ID NO: 1817373
uuaccuggagaucuugagc

SEQ ID NO: 1817375 - RNA, 19 nt, Artificial Sequence
  Description of Artificial Sequence: Synthetic oligonucleotide
  Sense strand starting at position 1110 of SEQ ID NO: 1563533
aacugcauccgugaaauag

SEQ ID NO: 1817376 - RNA, 19 nt, Artificial Sequence
  Description of Artificial Sequence: Synthetic oligonucleotide
  Antisense strand to SEQ ID NO: 1817375
cuauuucacggaugcaguu

SEQ ID NO: 1817377 - RNA, 19 nt, Artificial Sequence
  Description of Artificial Sequence: Synthetic oligonucleotide
  Sense strand starting at position 1114 of SEQ ID NO: 1563533
gcauccgugaaauagaaua

SEQ ID NO: 1817378 - RNA, 19 nt, Artificial Sequence
  Description of Artificial Sequence: Synthetic oligonucleotide
  Antisense strand to SEQ ID NO: 1817377
uauucuauuucacggaugc

SEQ ID NO: 1817379 - RNA, 19 nt, Artificial Sequence
  Description of Artificial Sequence: Synthetic oligonucleotide
  Sense strand starting at position 1119 of SEQ ID NO: 1563533
cgugaaauagaauauguuu

SEQ ID NO: 1817380 - RNA, 19 nt, Artificial Sequence
  Description of Artificial Sequence: Synthetic oligonucleotide
  Antisense strand to SEQ ID NO: 1817379
aaacauauucuauuucacg

SEQ ID NO: 1817381 - RNA, 19 nt, Artificial Sequence
  Description of Artificial Sequence: Synthetic oligonucleotide
  Sense strand starting at position 1342 of SEQ ID NO: 1563533
acugacuuuccauagcuga

SEQ ID NO: 1817382 - RNA, 19 nt, Artificial Sequence
  Description of Artificial Sequence: Synthetic oligonucleotide
  Antisense strand to SEQ ID NO: 1817381
ucagcuauggaaagucagu

SEQ ID NO: 1817383 - RNA, 19 nt, Artificial Sequence
  Description of Artificial Sequence: Synthetic oligonucleotide
  Sense strand starting at position 1355 of SEQ ID NO: 1563533
agcugagaaucaguuugaa

SEQ ID NO: 1817384 - RNA, 19 nt, Artificial Sequence
  Description of Artificial Sequence: Synthetic oligonucleotide
  Antisense strand to SEQ ID NO: 1817383
uucaaacugauucucagcu

SEQ ID NO: 1817385 - RNA, 19 nt, Artificial Sequence
  Description of Artificial Sequence: Synthetic oligonucleotide
  Sense strand starting at position 1358 of SEQ ID NO: 1563533
ugagaaucaguuugaaauu

SEQ ID NO: 1817386 - RNA, 19 nt, Artificial Sequence
  Description of Artificial Sequence: Synthetic oligonucleotide
  Antisense strand to SEQ ID NO: 1817385
aauuucaaacugauucuca

SEQ ID NO: 1817387 - RNA, 19 nt, Artificial Sequence
  Description of Artificial Sequence: Synthetic oligonucleotide
  Sense strand starting at position 1474 of SEQ ID NO: 1563533
aguaaauguccuugguaaa

SEQ ID NO: 1817388 - RNA, 19 nt, Artificial Sequence
  Description of Artificial Sequence: Synthetic oligonucleotide
  Antisense strand to SEQ ID NO: 1817387
uuuaccaaggacauuuacu

SEQ ID NO: 1817389 - RNA, 19 nt, Artificial Sequence
  Description of Artificial Sequence: Synthetic oligonucleotide
  Sense strand starting at position 2011 of SEQ ID NO: 1563533
agggcuccuagccagagau

SEQ ID NO: 1817390 - RNA, 19 nt, Artificial Sequence
  Description of Artificial Sequence: Synthetic oligonucleotide
  Antisense strand to SEQ ID NO: 1817389
aucucuggcuaggagcccu

SEQ ID NO: 1817391 - RNA, 19 nt, Artificial Sequence
  Description of Artificial Sequence: Synthetic oligonucleotide
  Sense strand starting at position 2074 of SEQ ID NO: 1563533
gucguuagugcuguuguaa

SEQ ID NO: 1817392 - RNA, 19 nt, Artificial Sequence
  Description of Artificial Sequence: Synthetic oligonucleotide
  Antisense strand to SEQ ID NO: 1817391
uuacaacagcacuaacgac

SEQ ID NO: 1817393 - RNA, 19 nt, Artificial Sequence
  Description of Artificial Sequence: Synthetic oligonucleotide
  Sense strand starting at position 2075 of SEQ ID NO: 1563533
ucguuagugcuguuguaac

SEQ ID NO: 1817394 - RNA, 19 nt, Artificial Sequence
  Description of Artificial Sequence: Synthetic oligonucleotide
  Antisense strand to SEQ ID NO: 1817393
guuacaacagcacuaacga

SEQ ID NO: 1817395 - RNA, 19 nt, Artificial Sequence
  Description of Artificial Sequence: Synthetic oligonucleotide
  Sense strand starting at position 2121 of SEQ ID NO: 1563533
gaacacuggccuuggaauu

SEQ ID NO: 1817396 - RNA, 19 nt, Artificial Sequence
  Description of Artificial Sequence: Synthetic oligonucleotide
  Antisense strand to SEQ ID NO: 1817395
aauuccaaggccaguguuc

SEQ ID NO: 1817397 - RNA, 19 nt, Artificial Sequence
  Description of Artificial Sequence: Synthetic oligonucleotide
  Sense strand starting at position 2187 of SEQ ID NO: 1563533
cuagucaguuuacucauaa

SEQ ID NO: 1817398 - RNA, 19 nt, Artificial Sequence
  Description of Artificial Sequence: Synthetic oligonucleotide
  Antisense strand to SEQ ID NO: 1817397
uuaugaguaaacugacuag

SEQ ID NO: 1817399 - RNA, 19 nt, Artificial Sequence
  Description of Artificial Sequence: Synthetic oligonucleotide
  Sense strand starting at position 2531 of SEQ ID NO: 1563533
uugacauauccaugugaau

SEQ ID NO: 1817400 - RNA, 19 nt, Artificial Sequence
  Description of Artificial Sequence: Synthetic oligonucleotide
  Antisense strand to SEQ ID NO: 1817399
auucacauggauaugucaa

SEQ ID NO: 1817401 - RNA, 19 nt, Artificial Sequence
  Description of Artificial Sequence: Synthetic oligonucleotide
  Sense strand starting at position 2542 of SEQ ID NO: 1563533
augugaaugucuuccagau

SEQ ID NO: 1817402 - RNA, 19 nt, Artificial Sequence
  Description of Artificial Sequence: Synthetic oligonucleotide
  Antisense strand to SEQ ID NO: 1817401
aucuggaagacauucacau

SEQ ID NO: 1817403 - RNA, 19 nt, Artificial Sequence
  Description of Artificial Sequence: Synthetic oligonucleotide
  Sense strand starting at position 2546 of SEQ ID NO: 1563533
gaaugucuuccagaucguu

SEQ ID NO: 1817404 - RNA, 19 nt, Artificial Sequence
  Description of Artificial Sequence: Synthetic oligonucleotide
  Antisense strand to SEQ ID NO: 1817403
aacgaucuggaagacauuc

SEQ ID NO: 1817405 - RNA, 19 nt, Artificial Sequence
  Description of Artificial Sequence: Synthetic oligonucleotide
  Sense strand starting at position 2743 of SEQ ID NO: 1563533
cucagaucucacugagguu

SEQ ID NO: 1817406 - RNA, 19 nt, Artificial Sequence
  Description of Artificial Sequence: Synthetic oligonucleotide
  Antisense strand to SEQ ID NO: 1817405
aaccucagugagaucugag

SEQ ID NO: 1817407 - RNA, 19 nt, Artificial Sequence
  Description of Artificial Sequence: Synthetic oligonucleotide
  Sense strand starting at position 3241 of SEQ ID NO: 1563533
agaacagggucauucuaau

SEQ ID NO: 1817408 - RNA, 19 nt, Artificial Sequence
  Description of Artificial Sequence: Synthetic oligonucleotide
  Antisense strand to SEQ ID NO: 1817407
auuagaaugacccuguucu

SEQ ID NO: 1817409 - RNA, 19 nt, Artificial Sequence
  Description of Artificial Sequence: Synthetic oligonucleotide
  Sense strand starting at position 3324 of SEQ ID NO: 1563533
gaagguaugugauuaugag

SEQ ID NO: 1817410 - RNA, 19 nt, Artificial Sequence
  Description of Artificial Sequence: Synthetic oligonucleotide
  Antisense strand to SEQ ID NO: 1817409
cucauaaucacauaccuuc

SEQ ID NO: 1817411 - RNA, 19 nt, Artificial Sequence
  Description of Artificial Sequence: Synthetic oligonucleotide
  Sense strand starting at position 3336 of SEQ ID NO: 1563533
uuaugagauaaugagcguu

SEQ ID NO: 1817412 - RNA, 19 nt, Artificial Sequence
  Description of Artificial Sequence: Synthetic oligonucleotide
  Antisense strand to SEQ ID NO: 1817411
aacgcucauuaucucauaa

SEQ ID NO: 1817413 - RNA, 19 nt, Artificial Sequence
  Description of Artificial Sequence: Synthetic oligonucleotide
  Sense strand starting at position 3338 of SEQ ID NO: 1563533
augagauaaugagcguuga

SEQ ID NO: 1817414 - RNA, 19 nt, Artificial Sequence
  Description of Artificial Sequence: Synthetic oligonucleotide
  Antisense strand to SEQ ID NO: 1817413
ucaacgcucauuaucucau

SEQ ID NO: 1817415 - RNA, 19 nt, Artificial Sequence
  Description of Artificial Sequence: Synthetic oligonucleotide
  Sense strand starting at position 3339 of SEQ ID NO: 1563533
ugagauaaugagcguugaa

SEQ ID NO: 1817416 - RNA, 19 nt, Artificial Sequence
  Description of Artificial Sequence: Synthetic oligonucleotide
  Antisense strand to SEQ ID NO: 1817415
uucaacgcucauuaucuca

SEQ ID NO: 1817417 - RNA, 19 nt, Artificial Sequence
  Description of Artificial Sequence: Synthetic oligonucleotide
  Sense strand starting at position 3342 of SEQ ID NO: 1563533
gauaaugagcguugaagau

SEQ ID NO: 1817418 - RNA, 19 nt, Artificial Sequence
  Description of Artificial Sequence: Synthetic oligonucleotide
  Antisense strand to SEQ ID NO: 1817417
aucuucaacgcucauuauc

SEQ ID NO: 1817419 - RNA, 19 nt, Artificial Sequence
  Description of Artificial Sequence: Synthetic oligonucleotide
  Sense strand starting at position 3348 of SEQ ID NO: 1563533
gagcguugaagauagggau

SEQ ID NO: 1817420 - RNA, 19 nt, Artificial Sequence
  Description of Artificial Sequence: Synthetic oligonucleotide
  Antisense strand to SEQ ID NO: 1817419
aucccuaucuucaacgcuc

SEQ ID NO: 1817421 - RNA, 19 nt, Artificial Sequence
  Description of Artificial Sequence: Synthetic oligonucleotide
  Sense strand starting at position 3383 of SEQ ID NO: 1563533
aggucuuggguaggugaaa

SEQ ID NO: 1817422 - RNA, 19 nt, Artificial Sequence
  Description of Artificial Sequence: Synthetic oligonucleotide
  Antisense strand to SEQ ID NO: 1817421
uuucaccuacccaagaccu

SEQ ID NO: 1817423 - RNA, 19 nt, Artificial Sequence
  Description of Artificial Sequence: Synthetic oligonucleotide
  Sense strand starting at position 3384 of SEQ ID NO: 1563533
ggucuuggguaggugaaau

SEQ ID NO: 1817424 - RNA, 19 nt, Artificial Sequence
  Description of Artificial Sequence: Synthetic oligonucleotide
  Antisense strand to SEQ ID NO: 1817423
auuucaccuacccaagacc

SEQ ID NO: 1817425 - RNA, 19 nt, Artificial Sequence
  Description of Artificial Sequence: Synthetic oligonucleotide
  Sense strand starting at position 3396 of SEQ ID NO: 1563533
gugaaaugacaacgucauc

SEQ ID NO: 1817426 - RNA, 19 nt, Artificial Sequence
  Description of Artificial Sequence: Synthetic oligonucleotide
  Antisense strand to SEQ ID NO: 1817425
gaugacguugucauuucac

SEQ ID NO: 1817427 - RNA, 19 nt, Artificial Sequence
  Description of Artificial Sequence: Synthetic oligonucleotide
  Sense strand starting at position 3435 of SEQ ID NO: 1563533
ugcagaacuuagguugaua

SEQ ID NO: 1817428 - RNA, 19 nt, Artificial Sequence
  Description of Artificial Sequence: Synthetic oligonucleotide
  Antisense strand to SEQ ID NO: 1817427
uaucaaccuaaguucugca

SEQ ID NO: 1817429 - RNA, 19 nt, Artificial Sequence
  Description of Artificial Sequence: Synthetic oligonucleotide
  Sense strand starting at position 3437 of SEQ ID NO: 1563533
cagaacuuagguugauacu

SEQ ID NO: 1817430 - RNA, 19 nt, Artificial Sequence
  Description of Artificial Sequence: Synthetic oligonucleotide
  Antisense strand to SEQ ID NO: 1817429
aguaucaaccuaaguucug

SEQ ID NO: 1817431 - RNA, 19 nt, Artificial Sequence
  Description of Artificial Sequence: Synthetic oligonucleotide
  Sense strand starting at position 3553 of SEQ ID NO: 1563533
gauaaagcagguugucaua

SEQ ID NO: 1817432 - RNA, 19 nt, Artificial Sequence
  Description of Artificial Sequence: Synthetic oligonucleotide
  Antisense strand to SEQ ID NO: 1817431
uaugacaaccugcuuuauc

SEQ ID NO: 1817433 - RNA, 19 nt, Artificial Sequence
  Description of Artificial Sequence: Synthetic oligonucleotide
  Sense strand starting at position 3555 of SEQ ID NO: 1563533
uaaagcagguugucauaau

SEQ ID NO: 1817434 - RNA, 19 nt, Artificial Sequence
  Description of Artificial Sequence: Synthetic oligonucleotide
  Antisense strand to SEQ ID NO: 1817433
auuaugacaaccugcuuua

SEQ ID NO: 1817435 - RNA, 19 nt, Artificial Sequence
  Description of Artificial Sequence: Synthetic oligonucleotide
  Sense strand starting at position 3613 of SEQ ID NO: 1563533
agugaaacuuccuuaccag

SEQ ID NO: 1817436 - RNA, 19 nt, Artificial Sequence
  Description of Artificial Sequence: Synthetic oligonucleotide
  Antisense strand to SEQ ID NO: 1817435
cugguaaggaaguuucacu

SEQ ID NO: 1817437 - RNA, 19 nt, Artificial Sequence
  Description of Artificial Sequence: Synthetic oligonucleotide
  Sense strand starting at position 3779 of SEQ ID NO: 1563533
uccagcacucauuauguuu

SEQ ID NO: 1817438 - RNA, 19 nt, Artificial Sequence
  Description of Artificial Sequence: Synthetic oligonucleotide
  Antisense strand to SEQ ID NO: 1817437
aaacauaaugagugcugga

SEQ ID NO: 1817439 - RNA, 19 nt, Artificial Sequence
  Description of Artificial Sequence: Synthetic oligonucleotide
  Sense strand starting at position 3815 of SEQ ID NO: 1563533
acuuaaugucccuaggugu

SEQ ID NO: 1817440 - RNA, 19 nt, Artificial Sequence
  Description of Artificial Sequence: Synthetic oligonucleotide
  Antisense strand to SEQ ID NO: 1817439
acaccuagggacauuaagu

SEQ ID NO: 1817441 - RNA, 19 nt, Artificial Sequence
  Description of Artificial Sequence: Synthetic oligonucleotide
  Sense strand starting at position 3953 of SEQ ID NO: 1563533
auaguuagaccauguuaag

SEQ ID NO: 1817442 - RNA, 19 nt, Artificial Sequence
  Description of Artificial Sequence: Synthetic oligonucleotide
  Antisense strand to SEQ ID NO: 1817441
cuuaacauggucuaacuau

SEQ ID NO: 1817443 - RNA, 19 nt, Artificial Sequence
  Description of Artificial Sequence: Synthetic oligonucleotide
  Sense strand starting at position 3959 of SEQ ID NO: 1563533
agaccauguuaaguauauu

SEQ ID NO: 1817444 - RNA, 19 nt, Artificial Sequence
  Description of Artificial Sequence: Synthetic oligonucleotide
  Antisense strand to SEQ ID NO: 1817443
aauauacuuaacauggucu

SEQ ID NO: 1817445 - RNA, 19 nt, Artificial Sequence
  Description of Artificial Sequence: Synthetic oligonucleotide
  Sense strand starting at position 85 of SEQ ID NO: 1563534
ggaugcuuaaauuguaaag

SEQ ID NO: 1817446 - RNA, 19 nt, Artificial Sequence
  Description of Artificial Sequence: Synthetic oligonucleotide
  Antisense strand to SEQ ID NO: 1817445
cuuuacaauuuaagcaucc

SEQ ID NO: 1817447 - RNA, 19 nt, Artificial Sequence
  Description of Artificial Sequence: Synthetic oligonucleotide
  Sense strand starting at position 96 of SEQ ID NO: 1563534
uuguaaagccgugacaaca

SEQ ID NO: 1817448 - RNA, 19 nt, Artificial Sequence
  Description of Artificial Sequence: Synthetic oligonucleotide
  Antisense strand to SEQ ID NO: 1817447
uguugucacggcuuuacaa

SEQ ID NO: 1817449 - RNA, 19 nt, Artificial Sequence
  Description of Artificial Sequence: Synthetic oligonucleotide
  Sense strand starting at position 307 of SEQ ID NO: 1563534
ugaggaauuuaauagcuaa

SEQ ID NO: 1817450 - RNA, 19 nt, Artificial Sequence
  Description of Artificial Sequence: Synthetic oligonucleotide
  Antisense strand to SEQ ID NO: 1817449
uuagcuauuaaauuccuca

SEQ ID NO: 1817451 - RNA, 19 nt, Artificial Sequence
  Description of Artificial Sequence: Synthetic oligonucleotide
  Sense strand starting at position 372 of SEQ ID NO: 1563534
guuacaauuccaggguaag

SEQ ID NO: 1817452 - RNA, 19 nt, Artificial Sequence
  Description of Artificial Sequence: Synthetic oligonucleotide
  Antisense strand to SEQ ID NO: 1817451
cuuacccuggaauuguaac

SEQ ID NO: 1817453 - RNA, 19 nt, Artificial Sequence
  Description of Artificial Sequence: Synthetic oligonucleotide
  Sense strand starting at position 373 of SEQ ID NO: 1563534
uuacaauuccaggguaagu

SEQ ID NO: 1817454 - RNA, 19 nt, Artificial Sequence
  Description of Artificial Sequence: Synthetic oligonucleotide
  Antisense strand to SEQ ID NO: 1817453
acuuacccuggaauuguaa

SEQ ID NO: 1817455 - RNA, 19 nt, Artificial Sequence
  Description of Artificial Sequence: Synthetic oligonucleotide
  Sense strand starting at position 426 of SEQ ID NO: 1563534
gugugucugccagugucua

SEQ ID NO: 1817456 - RNA, 19 nt, Artificial Sequence
  Description of Artificial Sequence: Synthetic oligonucleotide
  Antisense strand to SEQ ID NO: 1817455
uagacacuggcagacacac

SEQ ID NO: 1817457 - RNA, 19 nt, Artificial Sequence
  Description of Artificial Sequence: Synthetic oligonucleotide
  Sense strand starting at position 452 of SEQ ID NO: 1563534
guucuuaugccaguggugu

SEQ ID NO: 1817458 - RNA, 19 nt, Artificial Sequence
  Description of Artificial Sequence: Synthetic oligonucleotide
  Antisense strand to SEQ ID NO: 1817457
acaccacuggcauaagaac

SEQ ID NO: 1817459 - RNA, 19 nt, Artificial Sequence
  Description of Artificial Sequence: Synthetic oligonucleotide
  Sense strand starting at position 545 of SEQ ID NO: 1563534
ugacauaguuacuccacua

SEQ ID NO: 1817460 - RNA, 19 nt, Artificial Sequence
  Description of Artificial Sequence: Synthetic oligonucleotide
  Antisense strand to SEQ ID NO: 1817459
uaguggaguaacuauguca

SEQ ID NO: 1817461 - RNA, 19 nt, Artificial Sequence
  Description of Artificial Sequence: Synthetic oligonucleotide
  Sense strand starting at position 560 of SEQ ID NO: 1563534
acuagauugucaccaugag

SEQ ID NO: 1817462 - RNA, 19 nt, Artificial Sequence
  Description of Artificial Sequence: Synthetic oligonucleotide
  Antisense strand to SEQ ID NO: 1817461
cucauggugacaaucuagu

SEQ ID NO: 1817463 - RNA, 19 nt, Artificial Sequence
  Description of Artificial Sequence: Synthetic oligonucleotide
  Sense strand starting at position 574 of SEQ ID NO: 1563534
augagauuguggcugauua

SEQ ID NO: 1817464 - RNA, 19 nt, Artificial Sequence
  Description of Artificial Sequence: Synthetic oligonucleotide
  Antisense strand to SEQ ID NO: 1817463
uaaucagccacaaucucau

SEQ ID NO: 1817465 - RNA, 19 nt, Artificial Sequence
  Description of Artificial Sequence: Synthetic oligonucleotide
  Sense strand starting at position 576 of SEQ ID NO: 1563534
gagauuguggcugauuacu

SEQ ID NO: 1817466 - RNA, 19 nt, Artificial Sequence
  Description of Artificial Sequence: Synthetic oligonucleotide
  Antisense strand to SEQ ID NO: 1817465
aguaaucagccacaaucuc

SEQ ID NO: 1817467 - RNA, 19 nt, Artificial Sequence
  Description of Artificial Sequence: Synthetic oligonucleotide
  Sense strand starting at position 585 of SEQ ID NO: 1563534
gcugauuacuuccuugaaa

SEQ ID NO: 1817468 - RNA, 19 nt, Artificial Sequence
  Description of Artificial Sequence: Synthetic oligonucleotide
  Antisense strand to SEQ ID NO: 1817467
uuucaaggaaguaaucagc

SEQ ID NO: 1817469 - RNA, 19 nt, Artificial Sequence
  Description of Artificial Sequence: Synthetic oligonucleotide
  Sense strand starting at position 660 of SEQ ID NO: 1563534
guuccuugucaauaaguaa

SEQ ID NO: 1817470 - RNA, 19 nt, Artificial Sequence
  Description of Artificial Sequence: Synthetic oligonucleotide
  Antisense strand to SEQ ID NO: 1817469
uuacuuauugacaaggaac

SEQ ID NO: 1817471 - RNA, 19 nt, Artificial Sequence
  Description of Artificial Sequence: Synthetic oligonucleotide
  Sense strand starting at position 667 of SEQ ID NO: 1563534
gucaauaaguaaucagauu

SEQ ID NO: 1817472 - RNA, 19 nt, Artificial Sequence
  Description of Artificial Sequence: Synthetic oligonucleotide
  Antisense strand to SEQ ID NO: 1817471
aaucugauuacuuauugac

SEQ ID NO: 1817473 - RNA, 19 nt, Artificial Sequence
  Description of Artificial Sequence: Synthetic oligonucleotide
  Sense strand starting at position 766 of SEQ ID NO: 1563534
uccuaagaauggcugaguu

SEQ ID NO: 1817474 - RNA, 19 nt, Artificial Sequence
  Description of Artificial Sequence: Synthetic oligonucleotide
  Antisense strand to SEQ ID NO: 1817473
aacucagccauucuuagga

SEQ ID NO: 1817475 - RNA, 19 nt, Artificial Sequence
  Description of Artificial Sequence: Synthetic oligonucleotide
  Sense strand starting at position 768 of SEQ ID NO: 1563534
cuaagaauggcugaguuua

SEQ ID NO: 1817476 - RNA, 19 nt, Artificial Sequence
  Description of Artificial Sequence: Synthetic oligonucleotide
  Antisense strand to SEQ ID NO: 1817475
uaaacucagccauucuuag

SEQ ID NO: 1817477 - RNA, 19 nt, Artificial Sequence
  Description of Artificial Sequence: Synthetic oligonucleotide
  Sense strand starting at position 770 of SEQ ID NO: 1563534
aagaauggcugaguuuacu

SEQ ID NO: 1817478 - RNA, 19 nt, Artificial Sequence
  Description of Artificial Sequence: Synthetic oligonucleotide
  Antisense strand to SEQ ID NO: 1817477
aguaaacucagccauucuu

SEQ ID NO: 1817479 - RNA, 19 nt, Artificial Sequence
  Description of Artificial Sequence: Synthetic oligonucleotide
  Sense strand starting at position 820 of SEQ ID NO: 1563534
uucucaucucuaggagacu

SEQ ID NO: 1817480 - RNA, 19 nt, Artificial Sequence
  Description of Artificial Sequence: Synthetic oligonucleotide
  Antisense strand to SEQ ID NO: 1817479
agucuccuagagaugagaa

SEQ ID NO: 1817481 - RNA, 19 nt, Artificial Sequence
  Description of Artificial Sequence: Synthetic oligonucleotide
  Sense strand starting at position 1100 of SEQ ID NO: 1563534
uuugucuuugaucauggua

SEQ ID NO: 1817482 - RNA, 19 nt, Artificial Sequence
  Description of Artificial Sequence: Synthetic oligonucleotide
  Antisense strand to SEQ ID NO: 1817481
uaccaugaucaaagacaaa

SEQ ID NO: 1817483 - RNA, 19 nt, Artificial Sequence
  Description of Artificial Sequence: Synthetic oligonucleotide
  Sense strand starting at position 1228 of SEQ ID NO: 1563534
aagugugaagcugaguuua

SEQ ID NO: 1817484 - RNA, 19 nt, Artificial Sequence
  Description of Artificial Sequence: Synthetic oligonucleotide
  Antisense strand to SEQ ID NO: 1817483
uaaacucagcuucacacuu

SEQ ID NO: 1817485 - RNA, 19 nt, Artificial Sequence
  Description of Artificial Sequence: Synthetic oligonucleotide
  Sense strand starting at position 1359 of SEQ ID NO: 1563534
gugaucggacuguggauaa

SEQ ID NO: 1817486 - RNA, 19 nt, Artificial Sequence
  Description of Artificial Sequence: Synthetic oligonucleotide
  Antisense strand to SEQ ID NO: 1817485
uuauccacaguccgaucac

SEQ ID NO: 1817487 - RNA, 19 nt, Artificial Sequence
  Description of Artificial Sequence: Synthetic oligonucleotide
  Sense strand starting at position 1363 of SEQ ID NO: 1563534
ucggacuguggauaagauu

SEQ ID NO: 1817488 - RNA, 19 nt, Artificial Sequence
  Description of Artificial Sequence: Synthetic oligonucleotide
  Antisense strand to SEQ ID NO: 1817487
aaucuuauccacaguccga

SEQ ID NO: 1817489 - RNA, 19 nt, Artificial Sequence
  Description of Artificial Sequence: Synthetic oligonucleotide
  Sense strand starting at position 1372 of SEQ ID NO: 1563534
ggauaagauugguuuccuu

SEQ ID NO: 1817490 - RNA, 19 nt, Artificial Sequence
  Description of Artificial Sequence: Synthetic oligonucleotide
  Antisense strand to SEQ ID NO: 1817489
aaggaaaccaaucuuaucc

SEQ ID NO: 1817491 - RNA, 19 nt, Artificial Sequence
  Description of Artificial Sequence: Synthetic oligonucleotide
  Sense strand starting at position 1481 of SEQ ID NO: 1563534
cccaguaacacguggagaa

SEQ ID NO: 1817492 - RNA, 19 nt, Artificial Sequence
  Description of Artificial Sequence: Synthetic oligonucleotide
  Antisense strand to SEQ ID NO: 1817491
uucuccacguguuacuggg

SEQ ID NO: 1817493 - RNA, 19 nt, Artificial Sequence
  Description of Artificial Sequence: Synthetic oligonucleotide
  Sense strand starting at position 1482 of SEQ ID NO: 1563534
ccaguaacacguggagaaa

SEQ ID NO: 1817494 - RNA, 19 nt, Artificial Sequence
  Description of Artificial Sequence: Synthetic oligonucleotide
  Antisense strand to SEQ ID NO: 1817493
uuucuccacguguuacugg

SEQ ID NO: 1817495 - RNA, 19 nt, Artificial Sequence
  Description of Artificial Sequence: Synthetic oligonucleotide
  Sense strand starting at position 1853 of SEQ ID NO: 1563534
ccgagaucuuggcugagaa

SEQ ID NO: 1817496 - RNA, 19 nt, Artificial Sequence
  Description of Artificial Sequence: Synthetic oligonucleotide
  Antisense strand to SEQ ID NO: 1817495
uucucagccaagaucucgg

SEQ ID NO: 1817497 - RNA, 19 nt, Artificial Sequence
  Description of Artificial Sequence: Synthetic oligonucleotide
  Sense strand starting at position 1854 of SEQ ID NO: 1563534
cgagaucuuggcugagaaa

SEQ ID NO: 1817498 - RNA, 19 nt, Artificial Sequence
  Description of Artificial Sequence: Synthetic oligonucleotide
  Antisense strand to SEQ ID NO: 1817497
uuucucagccaagaucucg

SEQ ID NO: 1817499 - RNA, 19 nt, Artificial Sequence
  Description of Artificial Sequence: Synthetic oligonucleotide
  Sense strand starting at position 2219 of SEQ ID NO: 1563534
ugccaaucccauggacauu

SEQ ID NO: 1817500 - RNA, 19 nt, Artificial Sequence
  Description of Artificial Sequence: Synthetic oligonucleotide
  Antisense strand to SEQ ID NO: 1817499
aauguccaugggauuggca

SEQ ID NO: 1817501 - RNA, 19 nt, Artificial Sequence
  Description of Artificial Sequence: Synthetic oligonucleotide
  Sense strand starting at position 2947 of SEQ ID NO: 1563534
aagggaucauccuuugcag

SEQ ID NO: 1817502 - RNA, 19 nt, Artificial Sequence
  Description of Artificial Sequence: Synthetic oligonucleotide
  Antisense strand to SEQ ID NO: 1817501
cugcaaaggaugaucccuu

SEQ ID NO: 1817503 - RNA, 19 nt, Artificial Sequence
  Description of Artificial Sequence: Synthetic oligonucleotide
  Sense strand starting at position 2990 of SEQ ID NO: 1563534
guuccucuaucuguauuua

SEQ ID NO: 1817504 - RNA, 19 nt, Artificial Sequence
  Description of Artificial Sequence: Synthetic oligonucleotide
  Antisense strand to SEQ ID NO: 1817503
uaaauacagauagaggaac

SEQ ID NO: 1817505 - RNA, 19 nt, Artificial Sequence
  Description of Artificial Sequence: Synthetic oligonucleotide
  Sense strand starting at position 3027 of SEQ ID NO: 1563534
aagggagugcuagaguuua

SEQ ID NO: 1817506 - RNA, 19 nt, Artificial Sequence
  Description of Artificial Sequence: Synthetic oligonucleotide
  Antisense strand to SEQ ID NO: 1817505
uaaacucuagcacucccuu

SEQ ID NO: 1817507 - RNA, 19 nt, Artificial Sequence
  Description of Artificial Sequence: Synthetic oligonucleotide
  Sense strand starting at position 3067 of SEQ ID NO: 1563534
uuaaguaggugaucucaca

SEQ ID NO: 1817508 - RNA, 19 nt, Artificial Sequence
  Description of Artificial Sequence: Synthetic oligonucleotide
  Antisense strand to SEQ ID NO: 1817507
ugugagaucaccuacuuaa

SEQ ID NO: 1817509 - RNA, 19 nt, Artificial Sequence
  Description of Artificial Sequence: Synthetic oligonucleotide
  Sense strand starting at position 3090 of SEQ ID NO: 1563534
gcugcauucccugaggaug

SEQ ID NO: 1817510 - RNA, 19 nt, Artificial Sequence
  Description of Artificial Sequence: Synthetic oligonucleotide
  Antisense strand to SEQ ID NO: 1817509
cauccucagggaaugcagc

SEQ ID NO: 1817511 - RNA, 19 nt, Artificial Sequence
  Description of Artificial Sequence: Synthetic oligonucleotide
  Sense strand starting at position 3289 of SEQ ID NO: 1563534
uaagucaguuuaguuagaa

SEQ ID NO: 1817512 - RNA, 19 nt, Artificial Sequence
  Description of Artificial Sequence: Synthetic oligonucleotide
  Antisense strand to SEQ ID NO: 1817511
uucuaacuaaacugacuua

SEQ ID NO: 1817513 - RNA, 19 nt, Artificial Sequence
  Description of Artificial Sequence: Synthetic oligonucleotide
  Sense strand starting at position 3290 of SEQ ID NO: 1563534
aagucaguuuaguuagaau

SEQ ID NO: 1817514 - RNA, 19 nt, Artificial Sequence
  Description of Artificial Sequence: Synthetic oligonucleotide
  Antisense strand to SEQ ID NO: 1817513
auucuaacuaaacugacuu

SEQ ID NO: 1817515 - RNA, 19 nt, Artificial Sequence
  Description of Artificial Sequence: Synthetic oligonucleotide
  Sense strand starting at position 3317 of SEQ ID NO: 1563534
aucaauaucucaguuaggu

SEQ ID NO: 1817516 - RNA, 19 nt, Artificial Sequence
  Description of Artificial Sequence: Synthetic oligonucleotide
  Antisense strand to SEQ ID NO: 1817515
accuaacugagauauugau

SEQ ID NO: 1817517 - RNA, 19 nt, Artificial Sequence
  Description of Artificial Sequence: Synthetic oligonucleotide
  Sense strand starting at position 3747 of SEQ ID NO: 1563534
caugcuaucgucuacaaag

SEQ ID NO: 1817518 - RNA, 19 nt, Artificial Sequence
  Description of Artificial Sequence: Synthetic oligonucleotide
  Antisense strand to SEQ ID NO: 1817517
cuuuguagacgauagcaug

SEQ ID NO: 1817519 - RNA, 19 nt, Artificial Sequence
  Description of Artificial Sequence: Synthetic oligonucleotide
  Sense strand starting at position 3767 of SEQ ID NO: 1563534
gggcaaauagaugguuaga

SEQ ID NO: 1817520 - RNA, 19 nt, Artificial Sequence
  Description of Artificial Sequence: Synthetic oligonucleotide
  Antisense strand to SEQ ID NO: 1817519
ucuaaccaucuauuugccc

SEQ ID NO: 1817521 - RNA, 19 nt, Artificial Sequence
  Description of Artificial Sequence: Synthetic oligonucleotide
  Sense strand starting at position 3769 of SEQ ID NO: 1563534
gcaaauagaugguuagaaa

SEQ ID NO: 1817522 - RNA, 19 nt, Artificial Sequence
  Description of Artificial Sequence: Synthetic oligonucleotide
  Antisense strand to SEQ ID NO: 1817521
uuucuaaccaucuauuugc

SEQ ID NO: 1817523 - RNA, 19 nt, Artificial Sequence
  Description of Artificial Sequence: Synthetic oligonucleotide
  Sense strand starting at position 3889 of SEQ ID NO: 1563534
auggaaaguggcugauuca

SEQ ID NO: 1817524 - RNA, 19 nt, Artificial Sequence
  Description of Artificial Sequence: Synthetic oligonucleotide
  Antisense strand to SEQ ID NO: 1817523
ugaaucagccacuuuccau

SEQ ID NO: 1817525 - RNA, 19 nt, Artificial Sequence
  Description of Artificial Sequence: Synthetic oligonucleotide
  Sense strand starting at position 17 of SEQ ID NO: 1563535
aagauaggguuucucuuau

SEQ ID NO: 1817526 - RNA, 19 nt, Artificial Sequence
  Description of Artificial Sequence: Synthetic oligonucleotide
  Antisense strand to SEQ ID NO: 1817525
auaagagaaacccuaucuu

SEQ ID NO: 1817527 - RNA, 19 nt, Artificial Sequence
  Description of Artificial Sequence: Synthetic oligonucleotide
  Sense strand starting at position 146 of SEQ ID NO: 1563535
ggaugcuuaaauuguaaag

SEQ ID NO: 1817528 - RNA, 19 nt, Artificial Sequence
  Description of Artificial Sequence: Synthetic oligonucleotide
  Antisense strand to SEQ ID NO: 1817527
cuuuacaauuuaagcaucc

SEQ ID NO: 1817529 - RNA, 19 nt, Artificial Sequence
  Description of Artificial Sequence: Synthetic oligonucleotide
  Sense strand starting at position 368 of SEQ ID NO: 1563535
ugaggaauuuaauagcuaa

SEQ ID NO: 1817530 - RNA, 19 nt, Artificial Sequence
  Description of Artificial Sequence: Synthetic oligonucleotide
  Antisense strand to SEQ ID NO: 1817529
uuagcuauuaaauuccuca

SEQ ID NO: 1817531 - RNA, 19 nt, Artificial Sequence
  Description of Artificial Sequence: Synthetic oligonucleotide
  Sense strand starting at position 433 of SEQ ID NO: 1563535
guuacaauuccaggguaag

SEQ ID NO: 1817532 - RNA, 19 nt, Artificial Sequence
  Description of Artificial Sequence: Synthetic oligonucleotide
  Antisense strand to SEQ ID NO: 1817531
cuuacccuggaauuguaac

SEQ ID NO: 1817533 - RNA, 19 nt, Artificial Sequence
  Description of Artificial Sequence: Synthetic oligonucleotide
  Sense strand starting at position 434 of SEQ ID NO: 1563535
uuacaauuccaggguaagu

SEQ ID NO: 1817534 - RNA, 19 nt, Artificial Sequence
  Description of Artificial Sequence: Synthetic oligonucleotide
  Antisense strand to SEQ ID NO: 1817533
acuuacccuggaauuguaa

SEQ ID NO: 1817535 - RNA, 19 nt, Artificial Sequence
  Description of Artificial Sequence: Synthetic oligonucleotide
  Sense strand starting at position 487 of SEQ ID NO: 1563535
gugugucugccagugucua

SEQ ID NO: 1817536 - RNA, 19 nt, Artificial Sequence
  Description of Artificial Sequence: Synthetic oligonucleotide
  Antisense strand to SEQ ID NO: 1817535
uagacacuggcagacacac

SEQ ID NO: 1817537 - RNA, 19 nt, Artificial Sequence
  Description of Artificial Sequence: Synthetic oligonucleotide
  Sense strand starting at position 513 of SEQ ID NO: 1563535
guucuuaugccaguggugu

SEQ ID NO: 1817538 - RNA, 19 nt, Artificial Sequence
  Description of Artificial Sequence: Synthetic oligonucleotide
  Antisense strand to SEQ ID NO: 1817537
acaccacuggcauaagaac

SEQ ID NO: 1817539 - RNA, 19 nt, Artificial Sequence
  Description of Artificial Sequence: Synthetic oligonucleotide
  Sense strand starting at position 606 of SEQ ID NO: 1563535
ugacauaguuacuccacua

SEQ ID NO: 1817540 - RNA, 19 nt, Artificial Sequence
  Description of Artificial Sequence: Synthetic oligonucleotide
  Antisense strand to SEQ ID NO: 1817539
uaguggaguaacuauguca

SEQ ID NO: 1817541 - RNA, 19 nt, Artificial Sequence
  Description of Artificial Sequence: Synthetic oligonucleotide
  Sense strand starting at position 621 of SEQ ID NO: 1563535
acuagauugucaccaugag

SEQ ID NO: 1817542 - RNA, 19 nt, Artificial Sequence
  Description of Artificial Sequence: Synthetic oligonucleotide
  Antisense strand to SEQ ID NO: 1817541
cucauggugacaaucuagu

SEQ ID NO: 1817543 - RNA, 19 nt, Artificial Sequence
  Description of Artificial Sequence: Synthetic oligonucleotide
  Sense strand starting at position 635 of SEQ ID NO: 1563535
augagauuguggcugauua

SEQ ID NO: 1817544 - RNA, 19 nt, Artificial Sequence
  Description of Artificial Sequence: Synthetic oligonucleotide
  Antisense strand to SEQ ID NO: 1817543
uaaucagccacaaucucau

SEQ ID NO: 1817545 - RNA, 19 nt, Artificial Sequence
  Description of Artificial Sequence: Synthetic oligonucleotide
  Sense strand starting at position 637 of SEQ ID NO: 1563535
gagauuguggcugauuacu

SEQ ID NO: 1817546 - RNA, 19 nt, Artificial Sequence
  Description of Artificial Sequence: Synthetic oligonucleotide
  Antisense strand to SEQ ID NO: 1817545
aguaaucagccacaaucuc

SEQ ID NO: 1817547 - RNA, 19 nt, Artificial Sequence
  Description of Artificial Sequence: Synthetic oligonucleotide
  Sense strand starting at position 646 of SEQ ID NO: 1563535
gcugauuacuuccuugaaa

SEQ ID NO: 1817548 - RNA, 19 nt, Artificial Sequence
  Description of Artificial Sequence: Synthetic oligonucleotide
  Antisense strand to SEQ ID NO: 1817547
uuucaaggaaguaaucagc

SEQ ID NO: 1817549 - RNA, 19 nt, Artificial Sequence
  Description of Artificial Sequence: Synthetic oligonucleotide
  Sense strand starting at position 721 of SEQ ID NO: 1563535
guuccuugucaauaaguaa

SEQ ID NO: 1817550 - RNA, 19 nt, Artificial Sequence
  Description of Artificial Sequence: Synthetic oligonucleotide
  Antisense strand to SEQ ID NO: 1817549
uuacuuauugacaaggaac

SEQ ID NO: 1817551 - RNA, 19 nt, Artificial Sequence
  Description of Artificial Sequence: Synthetic oligonucleotide
  Sense strand starting at position 728 of SEQ ID NO: 1563535
gucaauaaguaaucagauu

SEQ ID NO: 1817552 - RNA, 19 nt, Artificial Sequence
  Description of Artificial Sequence: Synthetic oligonucleotide
  Antisense strand to SEQ ID NO: 1817551
aaucugauuacuuauugac

SEQ ID NO: 1817553 - RNA, 19 nt, Artificial Sequence
  Description of Artificial Sequence: Synthetic oligonucleotide
  Sense strand starting at position 827 of SEQ ID NO: 1563535
uccuaagaauggcugaguu

SEQ ID NO: 1817554 - RNA, 19 nt, Artificial Sequence
  Description of Artificial Sequence: Synthetic oligonucleotide
  Antisense strand to SEQ ID NO: 1817553
aacucagccauucuuagga

SEQ ID NO: 1817555 - RNA, 19 nt, Artificial Sequence
  Description of Artificial Sequence: Synthetic oligonucleotide
  Sense strand starting at position 829 of SEQ ID NO: 1563535
cuaagaauggcugaguuua

SEQ ID NO: 1817556 - RNA, 19 nt, Artificial Sequence
  Description of Artificial Sequence: Synthetic oligonucleotide
  Antisense strand to SEQ ID NO: 1817555
uaaacucagccauucuuag

SEQ ID NO: 1817557 - RNA, 19 nt, Artificial Sequence
  Description of Artificial Sequence: Synthetic oligonucleotide
  Sense strand starting at position 831 of SEQ ID NO: 1563535
aagaauggcugaguuuacu

SEQ ID NO: 1817558 - RNA, 19 nt, Artificial Sequence
  Description of Artificial Sequence: Synthetic oligonucleotide
  Antisense strand to SEQ ID NO: 1817557
aguaaacucagccauucuu

SEQ ID NO: 1817559 - RNA, 19 nt, Artificial Sequence
  Description of Artificial Sequence: Synthetic oligonucleotide
  Sense strand starting at position 881 of SEQ ID NO: 1563535
uucucaucucuaggagacu

SEQ ID NO: 1817560 - RNA, 19 nt, Artificial Sequence
  Description of Artificial Sequence: Synthetic oligonucleotide
  Antisense strand to SEQ ID NO: 1817559
agucuccuagagaugagaa

SEQ ID NO: 1817561 - RNA, 19 nt, Artificial Sequence
  Description of Artificial Sequence: Synthetic oligonucleotide
  Sense strand starting at position 1161 of SEQ ID NO: 1563535
uuugucuuugaucauggua

SEQ ID NO: 1817562 - RNA, 19 nt, Artificial Sequence
  Description of Artificial Sequence: Synthetic oligonucleotide
  Antisense strand to SEQ ID NO: 1817561
uaccaugaucaaagacaaa

SEQ ID NO: 1817563 - RNA, 19 nt, Artificial Sequence
  Description of Artificial Sequence: Synthetic oligonucleotide
  Sense strand starting at position 1289 of SEQ ID NO: 1563535
aagugugaagcugaguuua

SEQ ID NO: 1817564 - RNA, 19 nt, Artificial Sequence
  Description of Artificial Sequence: Synthetic oligonucleotide
  Antisense strand to SEQ ID NO: 1817563
uaaacucagcuucacacuu

SEQ ID NO: 1817565 - RNA, 19 nt, Artificial Sequence
  Description of Artificial Sequence: Synthetic oligonucleotide
  Sense strand starting at position 1420 of SEQ ID NO: 1563535
gugaucggacuguggauaa

SEQ ID NO: 1817566 - RNA, 19 nt, Artificial Sequence
  Description of Artificial Sequence: Synthetic oligonucleotide
  Antisense strand to SEQ ID NO: 1817565
uuauccacaguccgaucac

SEQ ID NO: 1817567 - RNA, 19 nt, Artificial Sequence
  Description of Artificial Sequence: Synthetic oligonucleotide
  Sense strand starting at position 1424 of SEQ ID NO: 1563535
ucggacuguggauaagauu

SEQ ID NO: 1817568 - RNA, 19 nt, Artificial Sequence
  Description of Artificial Sequence: Synthetic oligonucleotide
  Antisense strand to SEQ ID NO: 1817567
aaucuuauccacaguccga

SEQ ID NO: 1817569 - RNA, 19 nt, Artificial Sequence
  Description of Artificial Sequence: Synthetic oligonucleotide
  Sense strand starting at position 1433 of SEQ ID NO: 1563535
ggauaagauugguuuccuu

SEQ ID NO: 1817570 - RNA, 19 nt, Artificial Sequence
  Description of Artificial Sequence: Synthetic oligonucleotide
  Antisense strand to SEQ ID NO: 1817569
aaggaaaccaaucuuaucc

SEQ ID NO: 1817571 - RNA, 19 nt, Artificial Sequence
  Description of Artificial Sequence: Synthetic oligonucleotide
  Sense strand starting at position 1542 of SEQ ID NO: 1563535
cccaguaacacguggagaa

SEQ ID NO: 1817572 - RNA, 19 nt, Artificial Sequence
  Description of Artificial Sequence: Synthetic oligonucleotide
  Antisense strand to SEQ ID NO: 1817571
uucuccacguguuacuggg

SEQ ID NO: 1817573 - RNA, 19 nt, Artificial Sequence
  Description of Artificial Sequence: Synthetic oligonucleotide
  Sense strand starting at position 1543 of SEQ ID NO: 1563535
ccaguaacacguggagaaa

SEQ ID NO: 1817574 - RNA, 19 nt, Artificial Sequence
  Description of Artificial Sequence: Synthetic oligonucleotide
  Antisense strand to SEQ ID NO: 1817573
uuucuccacguguuacugg

SEQ ID NO: 1817575 - RNA, 19 nt, Artificial Sequence
  Description of Artificial Sequence: Synthetic oligonucleotide
  Sense strand starting at position 1914 of SEQ ID NO: 1563535
ccgagaucuuggcugagaa

SEQ ID NO: 1817576 - RNA, 19 nt, Artificial Sequence
  Description of Artificial Sequence: Synthetic oligonucleotide
  Antisense strand to SEQ ID NO: 1817575
uucucagccaagaucucgg

SEQ ID NO: 1817577 - RNA, 19 nt, Artificial Sequence
  Description of Artificial Sequence: Synthetic oligonucleotide
  Sense strand starting at position 1915 of SEQ ID NO: 1563535
cgagaucuuggcugagaaa

SEQ ID NO: 1817578 - RNA, 19 nt, Artificial Sequence
  Description of Artificial Sequence: Synthetic oligonucleotide
  Antisense strand to SEQ ID NO: 1817577
uuucucagccaagaucucg

SEQ ID NO: 1817579 - RNA, 19 nt, Artificial Sequence
  Description of Artificial Sequence: Synthetic oligonucleotide
  Sense strand starting at position 2280 of SEQ ID NO: 1563535
ugccaaucccauggacauu

SEQ ID NO: 1817580 - RNA, 19 nt, Artificial Sequence
  Description of Artificial Sequence: Synthetic oligonucleotide
  Antisense strand to SEQ ID NO: 1817579
aauguccaugggauuggca

SEQ ID NO: 1817581 - RNA, 19 nt, Artificial Sequence
  Description of Artificial Sequence: Synthetic oligonucleotide
  Sense strand starting at position 3008 of SEQ ID NO: 1563535
aagggaucauccuuugcag

SEQ ID NO: 1817582 - RNA, 19 nt, Artificial Sequence
  Description of Artificial Sequence: Synthetic oligonucleotide
  Antisense strand to SEQ ID NO: 1817581
cugcaaaggaugaucccuu

SEQ ID NO: 1817583 - RNA, 19 nt, Artificial Sequence
  Description of Artificial Sequence: Synthetic oligonucleotide
  Sense strand starting at position 3051 of SEQ ID NO: 1563535
guuccucuaucuguauuua

SEQ ID NO: 1817584 - RNA, 19 nt, Artificial Sequence
  Description of Artificial Sequence: Synthetic oligonucleotide
  Antisense strand to SEQ ID NO: 1817583
uaaauacagauagaggaac

SEQ ID NO: 1817585 - RNA, 19 nt, Artificial Sequence
  Description of Artificial Sequence: Synthetic oligonucleotide
  Sense strand starting at position 3088 of SEQ ID NO: 1563535
aagggagugcuagaguuua

SEQ ID NO: 1817586 - RNA, 19 nt, Artificial Sequence
  Description of Artificial Sequence: Synthetic oligonucleotide
  Antisense strand to SEQ ID NO: 1817585
uaaacucuagcacucccuu

SEQ ID NO: 1817587 - RNA, 19 nt, Artificial Sequence
  Description of Artificial Sequence: Synthetic oligonucleotide
  Sense strand starting at position 3128 of SEQ ID NO: 1563535
uuaaguaggugaucucaca

SEQ ID NO: 1817588 - RNA, 19 nt, Artificial Sequence
  Description of Artificial Sequence: Synthetic oligonucleotide
  Antisense strand to SEQ ID NO: 1817587
ugugagaucaccuacuuaa

SEQ ID NO: 1817589 - RNA, 19 nt, Artificial Sequence
  Description of Artificial Sequence: Synthetic oligonucleotide
  Sense strand starting at position 3151 of SEQ ID NO: 1563535
gcugcauucccugaggaug

SEQ ID NO: 1817590 - RNA, 19 nt, Artificial Sequence
  Description of Artificial Sequence: Synthetic oligonucleotide
  Antisense strand to SEQ ID NO: 1817589
cauccucagggaaugcagc

SEQ ID NO: 1817591 - RNA, 19 nt, Artificial Sequence
  Description of Artificial Sequence: Synthetic oligonucleotide
  Sense strand starting at position 3350 of SEQ ID NO: 1563535
uaagucaguuuaguuagaa

SEQ ID NO: 1817592 - RNA, 19 nt, Artificial Sequence
  Description of Artificial Sequence: Synthetic oligonucleotide
  Antisense strand to SEQ ID NO: 1817591
uucuaacuaaacugacuua

SEQ ID NO: 1817593 - RNA, 19 nt, Artificial Sequence
  Description of Artificial Sequence: Synthetic oligonucleotide
  Sense strand starting at position 3351 of SEQ ID NO: 1563535
aagucaguuuaguuagaau

SEQ ID NO: 1817594 - RNA, 19 nt, Artificial Sequence
  Description of Artificial Sequence: Synthetic oligonucleotide
  Antisense strand to SEQ ID NO: 1817593
auucuaacuaaacugacuu

SEQ ID NO: 1817595 - RNA, 19 nt, Artificial Sequence
  Description of Artificial Sequence: Synthetic oligonucleotide
  Sense strand starting at position 3378 of SEQ ID NO: 1563535
aucaauaucucaguuaggu

SEQ ID NO: 1817596 - RNA, 19 nt, Artificial Sequence
  Description of Artificial Sequence: Synthetic oligonucleotide
  Antisense strand to SEQ ID NO: 1817595
accuaacugagauauugau

SEQ ID NO: 1817597 - RNA, 19 nt, Artificial Sequence
  Description of Artificial Sequence: Synthetic oligonucleotide
  Sense strand starting at position 3808 of SEQ ID NO: 1563535
caugcuaucgucuacaaag

SEQ ID NO: 1817598 - RNA, 19 nt, Artificial Sequence
  Description of Artificial Sequence: Synthetic oligonucleotide
  Antisense strand to SEQ ID NO: 1817597
cuuuguagacgauagcaug

SEQ ID NO: 1817599 - RNA, 19 nt, Artificial Sequence
  Description of Artificial Sequence: Synthetic oligonucleotide
  Sense strand starting at position 3828 of SEQ ID NO: 1563535
gggcaaauagaugguuaga

SEQ ID NO: 1817600 - RNA, 19 nt, Artificial Sequence
  Description of Artificial Sequence: Synthetic oligonucleotide
  Antisense strand to SEQ ID NO: 1817599
ucuaaccaucuauuugccc

SEQ ID NO: 1817601 - RNA, 19 nt, Artificial Sequence
  Description of Artificial Sequence: Synthetic oligonucleotide
  Sense strand starting at position 3830 of SEQ ID NO: 1563535
gcaaauagaugguuagaaa

SEQ ID NO: 1817602 - RNA, 19 nt, Artificial Sequence
  Description of Artificial Sequence: Synthetic oligonucleotide
  Antisense strand to SEQ ID NO: 1817601
uuucuaaccaucuauuugc

SEQ ID NO: 1817603 - RNA, 19 nt, Artificial Sequence
  Description of Artificial Sequence: Synthetic oligonucleotide
  Sense strand starting at position 3950 of SEQ ID NO: 1563535
auggaaaguggcugauuca

SEQ ID NO: 1817604 - RNA, 19 nt, Artificial Sequence
  Description of Artificial Sequence: Synthetic oligonucleotide
  Antisense strand to SEQ ID NO: 1817603
ugaaucagccacuuuccau

SEQ ID NO: 1817605 - RNA, 19 nt, Artificial Sequence
  Description of Artificial Sequence: Synthetic oligonucleotide
  Sense strand starting at position 3 of SEQ ID NO: 1563536
aggcaaucugaccauacuu

SEQ ID NO: 1817606 - RNA, 19 nt, Artificial Sequence
  Description of Artificial Sequence: Synthetic oligonucleotide
  Antisense strand to SEQ ID NO: 1817605
aaguauggucagauugccu

SEQ ID NO: 1817607 - RNA, 19 nt, Artificial Sequence
  Description of Artificial Sequence: Synthetic oligonucleotide
  Sense strand starting at position 23 of SEQ ID NO: 1563536
cuaccucuguaucuugaga

SEQ ID NO: 1817608 - RNA, 19 nt, Artificial Sequence
  Description of Artificial Sequence: Synthetic oligonucleotide
  Antisense strand to SEQ ID NO: 1817607
ucucaagauacagagguag

SEQ ID NO: 1817609 - RNA, 19 nt, Artificial Sequence
  Description of Artificial Sequence: Synthetic oligonucleotide
  Sense strand starting at position 49 of SEQ ID NO: 1563536
aagauaggguuucucuuau

SEQ ID NO: 1817610 - RNA, 19 nt, Artificial Sequence
  Description of Artificial Sequence: Synthetic oligonucleotide
  Antisense strand to SEQ ID NO: 1817609
auaagagaaacccuaucuu

SEQ ID NO: 1817611 - RNA, 19 nt, Artificial Sequence
  Description of Artificial Sequence: Synthetic oligonucleotide
  Sense strand starting at position 178 of SEQ ID NO: 1563536
ggaugcuuaaauuguaaag

SEQ ID NO: 1817612 - RNA, 19 nt, Artificial Sequence
  Description of Artificial Sequence: Synthetic oligonucleotide
  Antisense strand to SEQ ID NO: 1817611
cuuuacaauuuaagcaucc

SEQ ID NO: 1817613 - RNA, 19 nt, Artificial Sequence
  Description of Artificial Sequence: Synthetic oligonucleotide
  Sense strand starting at position 400 of SEQ ID NO: 1563536
ugaggaauuuaauagcuaa

SEQ ID NO: 1817614 - RNA, 19 nt, Artificial Sequence
  Description of Artificial Sequence: Synthetic oligonucleotide
  Antisense strand to SEQ ID NO: 1817613
uuagcuauuaaauuccuca

SEQ ID NO: 1817615 - RNA, 19 nt, Artificial Sequence
  Description of Artificial Sequence: Synthetic oligonucleotide
  Sense strand starting at position 465 of SEQ ID NO: 1563536
guuacaauuccaggguaag

SEQ ID NO: 1817616 - RNA, 19 nt, Artificial Sequence
  Description of Artificial Sequence: Synthetic oligonucleotide
  Antisense strand to SEQ ID NO: 1817615
cuuacccuggaauuguaac

SEQ ID NO: 1817617 - RNA, 19 nt, Artificial Sequence
  Description of Artificial Sequence: Synthetic oligonucleotide
  Sense strand starting at position 466 of SEQ ID NO: 1563536
uuacaauuccaggguaagu

SEQ ID NO: 1817618 - RNA, 19 nt, Artificial Sequence
  Description of Artificial Sequence: Synthetic oligonucleotide
  Antisense strand to SEQ ID NO: 1817617
acuuacccuggaauuguaa

SEQ ID NO: 1817619 - RNA, 19 nt, Artificial Sequence
  Description of Artificial Sequence: Synthetic oligonucleotide
  Sense strand starting at position 519 of SEQ ID NO: 1563536
gugugucugccagugucua

SEQ ID NO: 1817620 - RNA, 19 nt, Artificial Sequence
  Description of Artificial Sequence: Synthetic oligonucleotide
  Antisense strand to SEQ ID NO: 1817619
uagacacuggcagacacac

SEQ ID NO: 1817621 - RNA, 19 nt, Artificial Sequence
  Description of Artificial Sequence: Synthetic oligonucleotide
  Sense strand starting at position 545 of SEQ ID NO: 1563536
guucuuaugccaguggugu

SEQ ID NO: 1817622 - RNA, 19 nt, Artificial Sequence
  Description of Artificial Sequence: Synthetic oligonucleotide
  Antisense strand to SEQ ID NO: 1817621
acaccacuggcauaagaac

SEQ ID NO: 1817623 - RNA, 19 nt, Artificial Sequence
  Description of Artificial Sequence: Synthetic oligonucleotide
  Sense strand starting at position 638 of SEQ ID NO: 1563536
ugacauaguuacuccacua

SEQ ID NO: 1817624 - RNA, 19 nt, Artificial Sequence
  Description of Artificial Sequence: Synthetic oligonucleotide
  Antisense strand to SEQ ID NO: 1817623
uaguggaguaacuauguca

SEQ ID NO: 1817625 - RNA, 19 nt, Artificial Sequence
  Description of Artificial Sequence: Synthetic oligonucleotide
  Sense strand starting at position 653 of SEQ ID NO: 1563536
acuagauugucaccaugag

SEQ ID NO: 1817626 - RNA, 19 nt, Artificial Sequence
  Description of Artificial Sequence: Synthetic oligonucleotide
  Antisense strand to SEQ ID NO: 1817625
cucauggugacaaucuagu

SEQ ID NO: 1817627 - RNA, 19 nt, Artificial Sequence
  Description of Artificial Sequence: Synthetic oligonucleotide
  Sense strand starting at position 667 of SEQ ID NO: 1563536
augagauuguggcugauua

SEQ ID NO: 1817628 - RNA, 19 nt, Artificial Sequence
  Description of Artificial Sequence: Synthetic oligonucleotide
  Antisense strand to SEQ ID NO: 1817627
uaaucagccacaaucucau

SEQ ID NO: 1817629 - RNA, 19 nt, Artificial Sequence
  Description of Artificial Sequence: Synthetic oligonucleotide
  Sense strand starting at position 669 of SEQ ID NO: 1563536
gagauuguggcugauuacu

SEQ ID NO: 1817630 - RNA, 19 nt, Artificial Sequence
  Description of Artificial Sequence: Synthetic oligonucleotide
  Antisense strand to SEQ ID NO: 1817629
aguaaucagccacaaucuc

SEQ ID NO: 1817631 - RNA, 19 nt, Artificial Sequence
  Description of Artificial Sequence: Synthetic oligonucleotide
  Sense strand starting at position 678 of SEQ ID NO: 1563536
gcugauuacuuccuugaaa

SEQ ID NO: 1817632 - RNA, 19 nt, Artificial Sequence
  Description of Artificial Sequence: Synthetic oligonucleotide
  Antisense strand to SEQ ID NO: 1817631
uuucaaggaaguaaucagc

SEQ ID NO: 1817633 - RNA, 19 nt, Artificial Sequence
  Description of Artificial Sequence: Synthetic oligonucleotide
  Sense strand starting at position 753 of SEQ ID NO: 1563536
guuccuugucaauaaguaa

SEQ ID NO: 1817634 - RNA, 19 nt, Artificial Sequence
  Description of Artificial Sequence: Synthetic oligonucleotide
  Antisense strand to SEQ ID NO: 1817633
uuacuuauugacaaggaac

SEQ ID NO: 1817635 - RNA, 19 nt, Artificial Sequence
  Description of Artificial Sequence: Synthetic oligonucleotide
  Sense strand starting at position 760 of SEQ ID NO: 1563536
gucaauaaguaaucagauu

SEQ ID NO: 1817636 - RNA, 19 nt, Artificial Sequence
  Description of Artificial Sequence: Synthetic oligonucleotide
  Antisense strand to SEQ ID NO: 1817635
aaucugauuacuuauugac

SEQ ID NO: 1817637 - RNA, 19 nt, Artificial Sequence
  Description of Artificial Sequence: Synthetic oligonucleotide
  Sense strand starting at position 861 of SEQ ID NO: 1563536
cuaagaauggcugaguuua

SEQ ID NO: 1817638 - RNA, 19 nt, Artificial Sequence
  Description of Artificial Sequence: Synthetic oligonucleotide
  Antisense strand to SEQ ID NO: 1817637
uaaacucagccauucuuag

SEQ ID NO: 1817639 - RNA, 19 nt, Artificial Sequence
  Description of Artificial Sequence: Synthetic oligonucleotide
  Sense strand starting at position 863 of SEQ ID NO: 1563536
aagaauggcugaguuuacu

SEQ ID NO: 1817640 - RNA, 19 nt, Artificial Sequence
  Description of Artificial Sequence: Synthetic oligonucleotide
  Antisense strand to SEQ ID NO: 1817639
aguaaacucagccauucuu

SEQ ID NO: 1817641 - RNA, 19 nt, Artificial Sequence
  Description of Artificial Sequence: Synthetic oligonucleotide
  Sense strand starting at position 913 of SEQ ID NO: 1563536
uucucaucucuaggagacu

SEQ ID NO: 1817642 - RNA, 19 nt, Artificial Sequence
  Description of Artificial Sequence: Synthetic oligonucleotide
  Antisense strand to SEQ ID NO: 1817641
agucuccuagagaugagaa

SEQ ID NO: 1817643 - RNA, 19 nt, Artificial Sequence
  Description of Artificial Sequence: Synthetic oligonucleotide
  Sense strand starting at position 1193 of SEQ ID NO: 1563536
uuugucuuugaucauggua

SEQ ID NO: 1817644 - RNA, 19 nt, Artificial Sequence
  Description of Artificial Sequence: Synthetic oligonucleotide
  Antisense strand to SEQ ID NO: 1817643
uaccaugaucaaagacaaa

SEQ ID NO: 1817645 - RNA, 19 nt, Artificial Sequence
  Description of Artificial Sequence: Synthetic oligonucleotide
  Sense strand starting at position 1321 of SEQ ID NO: 1563536
aagugugaagcugaguuua

SEQ ID NO: 1817646 - RNA, 19 nt, Artificial Sequence
  Description of Artificial Sequence: Synthetic oligonucleotide
  Antisense strand to SEQ ID NO: 1817645
uaaacucagcuucacacuu

SEQ ID NO: 1817647 - RNA, 19 nt, Artificial Sequence
  Description of Artificial Sequence: Synthetic oligonucleotide
  Sense strand starting at position 1456 of SEQ ID NO: 1563536
ucggacuguggauaagauu

SEQ ID NO: 1817648 - RNA, 19 nt, Artificial Sequence
  Description of Artificial Sequence: Synthetic oligonucleotide
  Antisense strand to SEQ ID NO: 1817647
aaucuuauccacaguccga

SEQ ID NO: 1817649 - RNA, 19 nt, Artificial Sequence
  Description of Artificial Sequence: Synthetic oligonucleotide
  Sense strand starting at position 1465 of SEQ ID NO: 1563536
ggauaagauugguuuccuu

SEQ ID NO: 1817650 - RNA, 19 nt, Artificial Sequence
  Description of Artificial Sequence: Synthetic oligonucleotide
  Antisense strand to SEQ ID NO: 1817649
aaggaaaccaaucuuaucc

SEQ ID NO: 1817651 - RNA, 19 nt, Artificial Sequence
  Description of Artificial Sequence: Synthetic oligonucleotide
  Sense strand starting at position 1574 of SEQ ID NO: 1563536
cccaguaacacguggagaa

SEQ ID NO: 1817652 - RNA, 19 nt, Artificial Sequence
  Description of Artificial Sequence: Synthetic oligonucleotide
  Antisense strand to SEQ ID NO: 1817651
uucuccacguguuacuggg

SEQ ID NO: 1817653 - RNA, 19 nt, Artificial Sequence
  Description of Artificial Sequence: Synthetic oligonucleotide
  Sense strand starting at position 1575 of SEQ ID NO: 1563536
ccaguaacacguggagaaa

SEQ ID NO: 1817654 - RNA, 19 nt, Artificial Sequence
  Description of Artificial Sequence: Synthetic oligonucleotide
  Antisense strand to SEQ ID NO: 1817653
uuucuccacguguuacugg

SEQ ID NO: 1817655 - RNA, 19 nt, Artificial Sequence
  Description of Artificial Sequence: Synthetic oligonucleotide
  Sense strand starting at position 1946 of SEQ ID NO: 1563536
ccgagaucuuggcugagaa

SEQ ID NO: 1817656 - RNA, 19 nt, Artificial Sequence
  Description of Artificial Sequence: Synthetic oligonucleotide
  Antisense strand to SEQ ID NO: 1817655
uucucagccaagaucucgg

SEQ ID NO: 1817657 - RNA, 19 nt, Artificial Sequence
  Description of Artificial Sequence: Synthetic oligonucleotide
  Sense strand starting at position 1947 of SEQ ID NO: 1563536
cgagaucuuggcugagaaa

SEQ ID NO: 1817658 - RNA, 19 nt, Artificial Sequence
  Description of Artificial Sequence: Synthetic oligonucleotide
  Antisense strand to SEQ ID NO: 1817657
uuucucagccaagaucucg

SEQ ID NO: 1817659 - RNA, 19 nt, Artificial Sequence
  Description of Artificial Sequence: Synthetic oligonucleotide
  Sense strand starting at position 2312 of SEQ ID NO: 1563536
ugccaaucccauggacauu

SEQ ID NO: 1817660 - RNA, 19 nt, Artificial Sequence
  Description of Artificial Sequence: Synthetic oligonucleotide
  Antisense strand to SEQ ID NO: 1817659
aauguccaugggauuggca

SEQ ID NO: 1817661 - RNA, 19 nt, Artificial Sequence
  Description of Artificial Sequence: Synthetic oligonucleotide
  Sense strand starting at position 3040 of SEQ ID NO: 1563536
aagggaucauccuuugcag

SEQ ID NO: 1817662 - RNA, 19 nt, Artificial Sequence
  Description of Artificial Sequence: Synthetic oligonucleotide
  Antisense strand to SEQ ID NO: 1817661
cugcaaaggaugaucccuu

SEQ ID NO: 1817663 - RNA, 19 nt, Artificial Sequence
  Description of Artificial Sequence: Synthetic oligonucleotide
  Sense strand starting at position 3083 of SEQ ID NO: 1563536
guuccucuaucuguauuua

SEQ ID NO: 1817664 - RNA, 19 nt, Artificial Sequence
  Description of Artificial Sequence: Synthetic oligonucleotide
  Antisense strand to SEQ ID NO: 1817663
uaaauacagauagaggaac

SEQ ID NO: 1817665 - RNA, 19 nt, Artificial Sequence
  Description of Artificial Sequence: Synthetic oligonucleotide
  Sense strand starting at position 3120 of SEQ ID NO: 1563536
aagggagugcuagaguuua

SEQ ID NO: 1817666 - RNA, 19 nt, Artificial Sequence
  Description of Artificial Sequence: Synthetic oligonucleotide
  Antisense strand to SEQ ID NO: 1817665
uaaacucuagcacucccuu

SEQ ID NO: 1817667 - RNA, 19 nt, Artificial Sequence
  Description of Artificial Sequence: Synthetic oligonucleotide
  Sense strand starting at position 3160 of SEQ ID NO: 1563536
uuaaguaggugaucucaca

SEQ ID NO: 1817668 - RNA, 19 nt, Artificial Sequence
  Description of Artificial Sequence: Synthetic oligonucleotide
  Antisense strand to SEQ ID NO: 1817667
ugugagaucaccuacuuaa

SEQ ID NO: 1817669 - RNA, 19 nt, Artificial Sequence
  Description of Artificial Sequence: Synthetic oligonucleotide
  Sense strand starting at position 3183 of SEQ ID NO: 1563536
gcugcauucccugaggaug

SEQ ID NO: 1817670 - RNA, 19 nt, Artificial Sequence
  Description of Artificial Sequence: Synthetic oligonucleotide
  Antisense strand to SEQ ID NO: 1817669
cauccucagggaaugcagc

SEQ ID NO: 1817671 - RNA, 19 nt, Artificial Sequence
  Description of Artificial Sequence: Synthetic oligonucleotide
  Sense strand starting at position 3382 of SEQ ID NO: 1563536
uaagucaguuuaguuagaa

SEQ ID NO: 1817672 - RNA, 19 nt, Artificial Sequence
  Description of Artificial Sequence: Synthetic oligonucleotide
  Antisense strand to SEQ ID NO: 1817671
uucuaacuaaacugacuua

SEQ ID NO: 1817673 - RNA, 19 nt, Artificial Sequence
  Description of Artificial Sequence: Synthetic oligonucleotide
  Sense strand starting at position 3383 of SEQ ID NO: 1563536
aagucaguuuaguuagaau

SEQ ID NO: 1817674 - RNA, 19 nt, Artificial Sequence
  Description of Artificial Sequence: Synthetic oligonucleotide
  Antisense strand to SEQ ID NO: 1817673
auucuaacuaaacugacuu

SEQ ID NO: 1817675 - RNA, 19 nt, Artificial Sequence
  Description of Artificial Sequence: Synthetic oligonucleotide
  Sense strand starting at position 3410 of SEQ ID NO: 1563536
aucaauaucucaguuaggu

SEQ ID NO: 1817676 - RNA, 19 nt, Artificial Sequence
  Description of Artificial Sequence: Synthetic oligonucleotide
  Antisense strand to SEQ ID NO: 1817675
accuaacugagauauugau

SEQ ID NO: 1817677 - RNA, 19 nt, Artificial Sequence
  Description of Artificial Sequence: Synthetic oligonucleotide
  Sense strand starting at position 3840 of SEQ ID NO: 1563536
caugcuaucgucuacaaag

SEQ ID NO: 1817678 - RNA, 19 nt, Artificial Sequence
  Description of Artificial Sequence: Synthetic oligonucleotide
  Antisense strand to SEQ ID NO: 1817677
cuuuguagacgauagcaug

SEQ ID NO: 1817679 - RNA, 19 nt, Artificial Sequence
  Description of Artificial Sequence: Synthetic oligonucleotide
  Sense strand starting at position 3860 of SEQ ID NO: 1563536
gggcaaauagaugguuaga

SEQ ID NO: 1817680 - RNA, 19 nt, Artificial Sequence
  Description of Artificial Sequence: Synthetic oligonucleotide
  Antisense strand to SEQ ID NO: 1817679
ucuaaccaucuauuugccc

SEQ ID NO: 1817681 - RNA, 19 nt, Artificial Sequence
  Description of Artificial Sequence: Synthetic oligonucleotide
  Sense strand starting at position 3862 of SEQ ID NO: 1563536
gcaaauagaugguuagaaa

SEQ ID NO: 1817682 - RNA, 19 nt, Artificial Sequence
  Description of Artificial Sequence: Synthetic oligonucleotide
  Antisense strand to SEQ ID NO: 1817681
uuucuaaccaucuauuugc

SEQ ID NO: 1817683 - RNA, 19 nt, Artificial Sequence
  Description of Artificial Sequence: Synthetic oligonucleotide
  Sense strand starting at position 3982 of SEQ ID NO: 1563536
auggaaaguggcugauuca

SEQ ID NO: 1817684 - RNA, 19 nt, Artificial Sequence
  Description of Artificial Sequence: Synthetic oligonucleotide
  Antisense strand to SEQ ID NO: 1817683
ugaaucagccacuuuccau

SEQ ID NO: 1817685 - RNA, 19 nt, Artificial Sequence
  Description of Artificial Sequence: Synthetic oligonucleotide
  Sense strand starting at position 398 of SEQ ID NO: 1563537
guccgacuucuucagggaa

SEQ ID NO: 1817686 - RNA, 19 nt, Artificial Sequence
  Description of Artificial Sequence: Synthetic oligonucleotide
  Antisense strand to SEQ ID NO: 1817685
uucccugaagaagucggac

SEQ ID NO: 1817687 - RNA, 19 nt, Artificial Sequence
  Description of Artificial Sequence: Synthetic oligonucleotide
  Sense strand starting at position 480 of SEQ ID NO: 1563537
guacuuacugucuggacca

SEQ ID NO: 1817688 - RNA, 19 nt, Artificial Sequence
  Description of Artificial Sequence: Synthetic oligonucleotide
  Antisense strand to SEQ ID NO: 1817687
ugguccagacaguaaguac

SEQ ID NO: 1817689 - RNA, 19 nt, Artificial Sequence
  Description of Artificial Sequence: Synthetic oligonucleotide
  Sense strand starting at position 482 of SEQ ID NO: 1563537
acuuacugucuggaccaua

SEQ ID NO: 1817690 - RNA, 19 nt, Artificial Sequence
  Description of Artificial Sequence: Synthetic oligonucleotide
  Antisense strand to SEQ ID NO: 1817689
uaugguccagacaguaagu

SEQ ID NO: 1817691 - RNA, 19 nt, Artificial Sequence
  Description of Artificial Sequence: Synthetic oligonucleotide
  Sense strand starting at position 576 of SEQ ID NO: 1563537
ugucucacaugucuuuaaa

SEQ ID NO: 1817692 - RNA, 19 nt, Artificial Sequence
  Description of Artificial Sequence: Synthetic oligonucleotide
  Antisense strand to SEQ ID NO: 1817691
uuuaaagacaugugagaca

SEQ ID NO: 1817693 - RNA, 19 nt, Artificial Sequence
  Description of Artificial Sequence: Synthetic oligonucleotide
  Sense strand starting at position 597 of SEQ ID NO: 1563537
ccuuacacucagugaguua

SEQ ID NO: 1817694 - RNA, 19 nt, Artificial Sequence
  Description of Artificial Sequence: Synthetic oligonucleotide
  Antisense strand to SEQ ID NO: 1817693
uaacucacugaguguaagg

SEQ ID NO: 1817695 - RNA, 19 nt, Artificial Sequence
  Description of Artificial Sequence: Synthetic oligonucleotide
  Sense strand starting at position 611 of SEQ ID NO: 1563537
aguuaauacuugcugaaca

SEQ ID NO: 1817696 - RNA, 19 nt, Artificial Sequence
  Description of Artificial Sequence: Synthetic oligonucleotide
  Antisense strand to SEQ ID NO: 1817695
uguucagcaaguauuaacu

SEQ ID NO: 1817697 - RNA, 19 nt, Artificial Sequence
  Description of Artificial Sequence: Synthetic oligonucleotide
  Sense strand starting at position 613 of SEQ ID NO: 1563537
uuaauacuugcugaacagu

SEQ ID NO: 1817698 - RNA, 19 nt, Artificial Sequence
  Description of Artificial Sequence: Synthetic oligonucleotide
  Antisense strand to SEQ ID NO: 1817697
acuguucagcaaguauuaa

SEQ ID NO: 1817699 - RNA, 19 nt, Artificial Sequence
  Description of Artificial Sequence: Synthetic oligonucleotide
  Sense strand starting at position 675 of SEQ ID NO: 1563537
gaagaagaugcauguugaa

SEQ ID NO: 1817700 - RNA, 19 nt, Artificial Sequence
  Description of Artificial Sequence: Synthetic oligonucleotide
  Antisense strand to SEQ ID NO: 1817699
uucaacaugcaucuucuuc

SEQ ID NO: 1817701 - RNA, 19 nt, Artificial Sequence
  Description of Artificial Sequence: Synthetic oligonucleotide
  Sense strand starting at position 792 of SEQ ID NO: 1563537
agugauuuacugcgagguu

SEQ ID NO: 1817702 - RNA, 19 nt, Artificial Sequence
  Description of Artificial Sequence: Synthetic oligonucleotide
  Antisense strand to SEQ ID NO: 1817701
aaccucgcaguaaaucacu

SEQ ID NO: 1817703 - RNA, 19 nt, Artificial Sequence
  Description of Artificial Sequence: Synthetic oligonucleotide
  Sense strand starting at position 828 of SEQ ID NO: 1563537
agagaugucaacuggcaaa

SEQ ID NO: 1817704 - RNA, 19 nt, Artificial Sequence
  Description of Artificial Sequence: Synthetic oligonucleotide
  Antisense strand to SEQ ID NO: 1817703
uuugccaguugacaucucu

SEQ ID NO: 1817705 - RNA, 19 nt, Artificial Sequence
  Description of Artificial Sequence: Synthetic oligonucleotide
  Sense strand starting at position 858 of SEQ ID NO: 1563537
ggcauuucaguuugaggca

SEQ ID NO: 1817706 - RNA, 19 nt, Artificial Sequence
  Description of Artificial Sequence: Synthetic oligonucleotide
  Antisense strand to SEQ ID NO: 1817705
ugccucaaacugaaaugcc

SEQ ID NO: 1817707 - RNA, 19 nt, Artificial Sequence
  Description of Artificial Sequence: Synthetic oligonucleotide
  Sense strand starting at position 916 of SEQ ID NO: 1563537
ugacuagauucugcugaaa

SEQ ID NO: 1817708 - RNA, 19 nt, Artificial Sequence
  Description of Artificial Sequence: Synthetic oligonucleotide
  Antisense strand to SEQ ID NO: 1817707
uuucagcagaaucuaguca

SEQ ID NO: 1817709 - RNA, 19 nt, Artificial Sequence
  Description of Artificial Sequence: Synthetic oligonucleotide
  Sense strand starting at position 919 of SEQ ID NO: 1563537
cuagauucugcugaaaccu

SEQ ID NO: 1817710 - RNA, 19 nt, Artificial Sequence
  Description of Artificial Sequence: Synthetic oligonucleotide
  Antisense strand to SEQ ID NO: 1817709
agguuucagcagaaucuag

SEQ ID NO: 1817711 - RNA, 19 nt, Artificial Sequence
  Description of Artificial Sequence: Synthetic oligonucleotide
  Sense strand starting at position 989 of SEQ ID NO: 1563537
ugaguagagauauggccau

SEQ ID NO: 1817712 - RNA, 19 nt, Artificial Sequence
  Description of Artificial Sequence: Synthetic oligonucleotide
  Antisense strand to SEQ ID NO: 1817711
auggccauaucucuacuca

SEQ ID NO: 1817713 - RNA, 19 nt, Artificial Sequence
  Description of Artificial Sequence: Synthetic oligonucleotide
  Sense strand starting at position 995 of SEQ ID NO: 1563537
gagauauggccauguaggu

SEQ ID NO: 1817714 - RNA, 19 nt, Artificial Sequence
  Description of Artificial Sequence: Synthetic oligonucleotide
  Antisense strand to SEQ ID NO: 1817713
accuacauggccauaucuc

SEQ ID NO: 1817715 - RNA, 19 nt, Artificial Sequence
  Description of Artificial Sequence: Synthetic oligonucleotide
  Sense strand starting at position 1146 of SEQ ID NO: 1563537
guaggugguuagguauuua

SEQ ID NO: 1817716 - RNA, 19 nt, Artificial Sequence
  Description of Artificial Sequence: Synthetic oligonucleotide
  Antisense strand to SEQ ID NO: 1817715
uaaauaccuaaccaccuac

SEQ ID NO: 1817717 - RNA, 19 nt, Artificial Sequence
  Description of Artificial Sequence: Synthetic oligonucleotide
  Sense strand starting at position 1158 of SEQ ID NO: 1563537
guauuuaguugggagggaa

SEQ ID NO: 1817718 - RNA, 19 nt, Artificial Sequence
  Description of Artificial Sequence: Synthetic oligonucleotide
  Antisense strand to SEQ ID NO: 1817717
uucccucccaacuaaauac

SEQ ID NO: 1817719 - RNA, 19 nt, Artificial Sequence
  Description of Artificial Sequence: Synthetic oligonucleotide
  Sense strand starting at position 2366 of SEQ ID NO: 1563537
ucucuauggccuuaggaua

SEQ ID NO: 1817720 - RNA, 19 nt, Artificial Sequence
  Description of Artificial Sequence: Synthetic oligonucleotide
  Antisense strand to SEQ ID NO: 1817719
uauccuaaggccauagaga

SEQ ID NO: 1817721 - RNA, 19 nt, Artificial Sequence
  Description of Artificial Sequence: Synthetic oligonucleotide
  Sense strand starting at position 2377 of SEQ ID NO: 1563537
uuaggauauagucgaggaa

SEQ ID NO: 1817722 - RNA, 19 nt, Artificial Sequence
  Description of Artificial Sequence: Synthetic oligonucleotide
  Antisense strand to SEQ ID NO: 1817721
uuccucgacuauauccuaa

SEQ ID NO: 1817723 - RNA, 19 nt, Artificial Sequence
  Description of Artificial Sequence: Synthetic oligonucleotide
  Sense strand starting at position 2380 of SEQ ID NO: 1563537
ggauauagucgaggaacca

SEQ ID NO: 1817724 - RNA, 19 nt, Artificial Sequence
  Description of Artificial Sequence: Synthetic oligonucleotide
  Antisense strand to SEQ ID NO: 1817723
ugguuccucgacuauaucc

SEQ ID NO: 1817725 - RNA, 19 nt, Artificial Sequence
  Description of Artificial Sequence: Synthetic oligonucleotide
  Sense strand starting at position 2452 of SEQ ID NO: 1563537
gaugaugaguguuuaggag

SEQ ID NO: 1817726 - RNA, 19 nt, Artificial Sequence
  Description of Artificial Sequence: Synthetic oligonucleotide
  Antisense strand to SEQ ID NO: 1817725
cuccuaaacacucaucauc

SEQ ID NO: 1817727 - RNA, 19 nt, Artificial Sequence
  Description of Artificial Sequence: Synthetic oligonucleotide
  Sense strand starting at position 2494 of SEQ ID NO: 1563537
cacugaguugcuuagguua

SEQ ID NO: 1817728 - RNA, 19 nt, Artificial Sequence
  Description of Artificial Sequence: Synthetic oligonucleotide
  Antisense strand to SEQ ID NO: 1817727
uaaccuaagcaacucagug

SEQ ID NO: 1817729 - RNA, 19 nt, Artificial Sequence
  Description of Artificial Sequence: Synthetic oligonucleotide
  Sense strand starting at position 2497 of SEQ ID NO: 1563537
ugaguugcuuagguuauuu

SEQ ID NO: 1817730 - RNA, 19 nt, Artificial Sequence
  Description of Artificial Sequence: Synthetic oligonucleotide
  Antisense strand to SEQ ID NO: 1817729
aaauaaccuaagcaacuca

SEQ ID NO: 1817731 - RNA, 19 nt, Artificial Sequence
  Description of Artificial Sequence: Synthetic oligonucleotide
  Sense strand starting at position 2558 of SEQ ID NO: 1563537
gcaucaugggaauggaagu

SEQ ID NO: 1817732 - RNA, 19 nt, Artificial Sequence
  Description of Artificial Sequence: Synthetic oligonucleotide
  Antisense strand to SEQ ID NO: 1817731
acuuccauucccaugaugc

SEQ ID NO: 1817733 - RNA, 19 nt, Artificial Sequence
  Description of Artificial Sequence: Synthetic oligonucleotide
  Sense strand starting at position 2571 of SEQ ID NO: 1563537
ggaaguuagaguggauuga

SEQ ID NO: 1817734 - RNA, 19 nt, Artificial Sequence
  Description of Artificial Sequence: Synthetic oligonucleotide
  Antisense strand to SEQ ID NO: 1817733
ucaauccacucuaacuucc

SEQ ID NO: 1817735 - RNA, 19 nt, Artificial Sequence
  Description of Artificial Sequence: Synthetic oligonucleotide
  Sense strand starting at position 2575 of SEQ ID NO: 1563537
guuagaguggauugacuga

SEQ ID NO: 1817736 - RNA, 19 nt, Artificial Sequence
  Description of Artificial Sequence: Synthetic oligonucleotide
  Antisense strand to SEQ ID NO: 1817735
ucagucaauccacucuaac

SEQ ID NO: 1817737 - RNA, 19 nt, Artificial Sequence
  Description of Artificial Sequence: Synthetic oligonucleotide
  Sense strand starting at position 3028 of SEQ ID NO: 1563537
aguuaaaucgaauauccuu

SEQ ID NO: 1817738 - RNA, 19 nt, Artificial Sequence
  Description of Artificial Sequence: Synthetic oligonucleotide
  Antisense strand to SEQ ID NO: 1817737
aaggauauucgauuuaacu

SEQ ID NO: 1817739 - RNA, 19 nt, Artificial Sequence
  Description of Artificial Sequence: Synthetic oligonucleotide
  Sense strand starting at position 3057 of SEQ ID NO: 1563537
ucucuuugggcagggagau

SEQ ID NO: 1817740 - RNA, 19 nt, Artificial Sequence
  Description of Artificial Sequence: Synthetic oligonucleotide
  Antisense strand to SEQ ID NO: 1817739
aucucccugcccaaagaga

SEQ ID NO: 1817741 - RNA, 19 nt, Artificial Sequence
  Description of Artificial Sequence: Synthetic oligonucleotide
  Sense strand starting at position 3058 of SEQ ID NO: 1563537
cucuuugggcagggagaua

SEQ ID NO: 1817742 - RNA, 19 nt, Artificial Sequence
  Description of Artificial Sequence: Synthetic oligonucleotide
  Antisense strand to SEQ ID NO: 1817741
uaucucccugcccaaagag

SEQ ID NO: 1817743 - RNA, 19 nt, Artificial Sequence
  Description of Artificial Sequence: Synthetic oligonucleotide
  Sense strand starting at position 3362 of SEQ ID NO: 1563537
augaguaguagccagaucu

SEQ ID NO: 1817744 - RNA, 19 nt, Artificial Sequence
  Description of Artificial Sequence: Synthetic oligonucleotide
  Antisense strand to SEQ ID NO: 1817743
agaucuggcuacuacucau

SEQ ID NO: 1817745 - RNA, 19 nt, Artificial Sequence
  Description of Artificial Sequence: Synthetic oligonucleotide
  Sense strand starting at position 3373 of SEQ ID NO: 1563537
ccagaucuggcuuggaacu

SEQ ID NO: 1817746 - RNA, 19 nt, Artificial Sequence
  Description of Artificial Sequence: Synthetic oligonucleotide
  Antisense strand to SEQ ID NO: 1817745
aguuccaagccagaucugg

SEQ ID NO: 1817747 - RNA, 19 nt, Artificial Sequence
  Description of Artificial Sequence: Synthetic oligonucleotide
  Sense strand starting at position 3407 of SEQ ID NO: 1563537
gauaauggcaggcagaguu

SEQ ID NO: 1817748 - RNA, 19 nt, Artificial Sequence
  Description of Artificial Sequence: Synthetic oligonucleotide
  Antisense strand to SEQ ID NO: 1817747
aacucugccugccauuauc

SEQ ID NO: 1817749 - RNA, 19 nt, Artificial Sequence
  Description of Artificial Sequence: Synthetic oligonucleotide
  Sense strand starting at position 3444 of SEQ ID NO: 1563537
acccaagagugaucgggau

SEQ ID NO: 1817750 - RNA, 19 nt, Artificial Sequence
  Description of Artificial Sequence: Synthetic oligonucleotide
  Antisense strand to SEQ ID NO: 1817749
aucccgaucacucuugggu

SEQ ID NO: 1817751 - RNA, 19 nt, Artificial Sequence
  Description of Artificial Sequence: Synthetic oligonucleotide
  Sense strand starting at position 3446 of SEQ ID NO: 1563537
ccaagagugaucgggauga

SEQ ID NO: 1817752 - RNA, 19 nt, Artificial Sequence
  Description of Artificial Sequence: Synthetic oligonucleotide
  Antisense strand to SEQ ID NO: 1817751
ucaucccgaucacucuugg

SEQ ID NO: 1817753 - RNA, 19 nt, Artificial Sequence
  Description of Artificial Sequence: Synthetic oligonucleotide
  Sense strand starting at position 3450 of SEQ ID NO: 1563537
gagugaucgggaugaauga

SEQ ID NO: 1817754 - RNA, 19 nt, Artificial Sequence
  Description of Artificial Sequence: Synthetic oligonucleotide
  Antisense strand to SEQ ID NO: 1817753
ucauucaucccgaucacuc

SEQ ID NO: 1817755 - RNA, 19 nt, Artificial Sequence
  Description of Artificial Sequence: Synthetic oligonucleotide
  Sense strand starting at position 3551 of SEQ ID NO: 1563537
caagccagauugucaaaga

SEQ ID NO: 1817756 - RNA, 19 nt, Artificial Sequence
  Description of Artificial Sequence: Synthetic oligonucleotide
  Antisense strand to SEQ ID NO: 1817755
ucuuugacaaucuggcuug

SEQ ID NO: 1817757 - RNA, 19 nt, Artificial Sequence
  Description of Artificial Sequence: Synthetic oligonucleotide
  Sense strand starting at position 3591 of SEQ ID NO: 1563537
guacauaguuaacucuuga

SEQ ID NO: 1817758 - RNA, 19 nt, Artificial Sequence
  Description of Artificial Sequence: Synthetic oligonucleotide
  Antisense strand to SEQ ID NO: 1817757
ucaagaguuaacuauguac

SEQ ID NO: 1817759 - RNA, 19 nt, Artificial Sequence
  Description of Artificial Sequence: Synthetic oligonucleotide
  Sense strand starting at position 3849 of SEQ ID NO: 1563537
ucuagaaauuugcaauuag

SEQ ID NO: 1817760 - RNA, 19 nt, Artificial Sequence
  Description of Artificial Sequence: Synthetic oligonucleotide
  Antisense strand to SEQ ID NO: 1817759
cuaauugcaaauuucuaga

SEQ ID NO: 1817761 - RNA, 19 nt, Artificial Sequence
  Description of Artificial Sequence: Synthetic oligonucleotide
  Sense strand starting at position 3944 of SEQ ID NO: 1563537
gaaagaugcuggucugcag

SEQ ID NO: 1817762 - RNA, 19 nt, Artificial Sequence
  Description of Artificial Sequence: Synthetic oligonucleotide
  Antisense strand to SEQ ID NO: 1817761
cugcagaccagcaucuuuc

SEQ ID NO: 1817763 - RNA, 19 nt, Artificial Sequence
  Description of Artificial Sequence: Synthetic oligonucleotide
  Sense strand starting at position 3947 of SEQ ID NO: 1563537
agaugcuggucugcagaaa

SEQ ID NO: 1817764 - RNA, 19 nt, Artificial Sequence
  Description of Artificial Sequence: Synthetic oligonucleotide
  Antisense strand to SEQ ID NO: 1817763
uuucugcagaccagcaucu

SEQ ID NO: 1817765 - RNA, 19 nt, Artificial Sequence
  Description of Artificial Sequence: Synthetic oligonucleotide
  Sense strand starting at position 421 of SEQ ID NO: 1563538
guccgacuucuucagggaa

SEQ ID NO: 1817766 - RNA, 19 nt, Artificial Sequence
  Description of Artificial Sequence: Synthetic oligonucleotide
  Antisense strand to SEQ ID NO: 1817765
uucccugaagaagucggac

SEQ ID NO: 1817767 - RNA, 19 nt, Artificial Sequence
  Description of Artificial Sequence: Synthetic oligonucleotide
  Sense strand starting at position 503 of SEQ ID NO: 1563538
guacuuacugucuggacca

SEQ ID NO: 1817768 - RNA, 19 nt, Artificial Sequence
  Description of Artificial Sequence: Synthetic oligonucleotide
  Antisense strand to SEQ ID NO: 1817767
ugguccagacaguaaguac

SEQ ID NO: 1817769 - RNA, 19 nt, Artificial Sequence
  Description of Artificial Sequence: Synthetic oligonucleotide
  Sense strand starting at position 505 of SEQ ID NO: 1563538
acuuacugucuggaccaua

SEQ ID NO: 1817770 - RNA, 19 nt, Artificial Sequence
  Description of Artificial Sequence: Synthetic oligonucleotide
  Antisense strand to SEQ ID NO: 1817769
uaugguccagacaguaagu

SEQ ID NO: 1817771 - RNA, 19 nt, Artificial Sequence
  Description of Artificial Sequence: Synthetic oligonucleotide
  Sense strand starting at position 599 of SEQ ID NO: 1563538
ugucucacaugucuuuaaa

SEQ ID NO: 1817772 - RNA, 19 nt, Artificial Sequence
  Description of Artificial Sequence: Synthetic oligonucleotide
  Antisense strand to SEQ ID NO: 1817771
uuuaaagacaugugagaca

SEQ ID NO: 1817773 - RNA, 19 nt, Artificial Sequence
  Description of Artificial Sequence: Synthetic oligonucleotide
  Sense strand starting at position 620 of SEQ ID NO: 1563538
ccuuacacucagugaguua

SEQ ID NO: 1817774 - RNA, 19 nt, Artificial Sequence
  Description of Artificial Sequence: Synthetic oligonucleotide
  Antisense strand to SEQ ID NO: 1817773
uaacucacugaguguaagg

SEQ ID NO: 1817775 - RNA, 19 nt, Artificial Sequence
  Description of Artificial Sequence: Synthetic oligonucleotide
  Sense strand starting at position 634 of SEQ ID NO: 1563538
aguuaauacuugcugaaca

SEQ ID NO: 1817776 - RNA, 19 nt, Artificial Sequence
  Description of Artificial Sequence: Synthetic oligonucleotide
  Antisense strand to SEQ ID NO: 1817775
uguucagcaaguauuaacu

SEQ ID NO: 1817777 - RNA, 19 nt, Artificial Sequence
  Description of Artificial Sequence: Synthetic oligonucleotide
  Sense strand starting at position 636 of SEQ ID NO: 1563538
uuaauacuugcugaacagu

SEQ ID NO: 1817778 - RNA, 19 nt, Artificial Sequence
  Description of Artificial Sequence: Synthetic oligonucleotide
  Antisense strand to SEQ ID NO: 1817777
acuguucagcaaguauuaa

SEQ ID NO: 1817779 - RNA, 19 nt, Artificial Sequence
  Description of Artificial Sequence: Synthetic oligonucleotide
  Sense strand starting at position 698 of SEQ ID NO: 1563538
gaagaagaugcauguugaa

SEQ ID NO: 1817780 - RNA, 19 nt, Artificial Sequence
  Description of Artificial Sequence: Synthetic oligonucleotide
  Antisense strand to SEQ ID NO: 1817779
uucaacaugcaucuucuuc

SEQ ID NO: 1817781 - RNA, 19 nt, Artificial Sequence
  Description of Artificial Sequence: Synthetic oligonucleotide
  Sense strand starting at position 815 of SEQ ID NO: 1563538
agugauuuacugcgagguu

SEQ ID NO: 1817782 - RNA, 19 nt, Artificial Sequence
  Description of Artificial Sequence: Synthetic oligonucleotide
  Antisense strand to SEQ ID NO: 1817781
aaccucgcaguaaaucacu

SEQ ID NO: 1817783 - RNA, 19 nt, Artificial Sequence
  Description of Artificial Sequence: Synthetic oligonucleotide
  Sense strand starting at position 851 of SEQ ID NO: 1563538
agagaugucaacuggcaaa

SEQ ID NO: 1817784 - RNA, 19 nt, Artificial Sequence
  Description of Artificial Sequence: Synthetic oligonucleotide
  Antisense strand to SEQ ID NO: 1817783
uuugccaguugacaucucu

SEQ ID NO: 1817785 - RNA, 19 nt, Artificial Sequence
  Description of Artificial Sequence: Synthetic oligonucleotide
  Sense strand starting at position 881 of SEQ ID NO: 1563538
ggcauuucaguuugaggca

SEQ ID NO: 1817786 - RNA, 19 nt, Artificial Sequence
  Description of Artificial Sequence: Synthetic oligonucleotide
  Antisense strand to SEQ ID NO: 1817785
ugccucaaacugaaaugcc

SEQ ID NO: 1817787 - RNA, 19 nt, Artificial Sequence
  Description of Artificial Sequence: Synthetic oligonucleotide
  Sense strand starting at position 939 of SEQ ID NO: 1563538
ugacuagauucugcugaaa

SEQ ID NO: 1817788 - RNA, 19 nt, Artificial Sequence
  Description of Artificial Sequence: Synthetic oligonucleotide
  Antisense strand to SEQ ID NO: 1817787
uuucagcagaaucuaguca

SEQ ID NO: 1817789 - RNA, 19 nt, Artificial Sequence
  Description of Artificial Sequence: Synthetic oligonucleotide
  Sense strand starting at position 942 of SEQ ID NO: 1563538
cuagauucugcugaaaccu

SEQ ID NO: 1817790 - RNA, 19 nt, Artificial Sequence
  Description of Artificial Sequence: Synthetic oligonucleotide
  Antisense strand to SEQ ID NO: 1817789
agguuucagcagaaucuag

SEQ ID NO: 1817791 - RNA, 19 nt, Artificial Sequence
  Description of Artificial Sequence: Synthetic oligonucleotide
  Sense strand starting at position 1012 of SEQ ID NO: 1563538
ugaguagagauauggccau

SEQ ID NO: 1817792 - RNA, 19 nt, Artificial Sequence
  Description of Artificial Sequence: Synthetic oligonucleotide
  Antisense strand to SEQ ID NO: 1817791
auggccauaucucuacuca

SEQ ID NO: 1817793 - RNA, 19 nt, Artificial Sequence
  Description of Artificial Sequence: Synthetic oligonucleotide
  Sense strand starting at position 1018 of SEQ ID NO: 1563538
gagauauggccauguaggu

SEQ ID NO: 1817794 - RNA, 19 nt, Artificial Sequence
  Description of Artificial Sequence: Synthetic oligonucleotide
  Antisense strand to SEQ ID NO: 1817793
accuacauggccauaucuc

SEQ ID NO: 1817795 - RNA, 19 nt, Artificial Sequence
  Description of Artificial Sequence: Synthetic oligonucleotide
  Sense strand starting at position 1169 of SEQ ID NO: 1563538
guaggugguuagguauuua

SEQ ID NO: 1817796 - RNA, 19 nt, Artificial Sequence
  Description of Artificial Sequence: Synthetic oligonucleotide
  Antisense strand to SEQ ID NO: 1817795
uaaauaccuaaccaccuac

SEQ ID NO: 1817797 - RNA, 19 nt, Artificial Sequence
  Description of Artificial Sequence: Synthetic oligonucleotide
  Sense strand starting at position 1181 of SEQ ID NO: 1563538
guauuuaguugggagggaa

SEQ ID NO: 1817798 - RNA, 19 nt, Artificial Sequence
  Description of Artificial Sequence: Synthetic oligonucleotide
  Antisense strand to SEQ ID NO: 1817797
uucccucccaacuaaauac

SEQ ID NO: 1817799 - RNA, 19 nt, Artificial Sequence
  Description of Artificial Sequence: Synthetic oligonucleotide
  Sense strand starting at position 2389 of SEQ ID NO: 1563538
ucucuauggccuuaggaua

SEQ ID NO: 1817800 - RNA, 19 nt, Artificial Sequence
  Description of Artificial Sequence: Synthetic oligonucleotide
  Antisense strand to SEQ ID NO: 1817799
uauccuaaggccauagaga

SEQ ID NO: 1817801 - RNA, 19 nt, Artificial Sequence
  Description of Artificial Sequence: Synthetic oligonucleotide
  Sense strand starting at position 2400 of SEQ ID NO: 1563538
uuaggauauagucgaggaa

SEQ ID NO: 1817802 - RNA, 19 nt, Artificial Sequence
  Description of Artificial Sequence: Synthetic oligonucleotide
  Antisense strand to SEQ ID NO: 1817801
uuccucgacuauauccuaa

SEQ ID NO: 1817803 - RNA, 19 nt, Artificial Sequence
  Description of Artificial Sequence: Synthetic oligonucleotide
  Sense strand starting at position 2403 of SEQ ID NO: 1563538
ggauauagucgaggaacca

SEQ ID NO: 1817804 - RNA, 19 nt, Artificial Sequence
  Description of Artificial Sequence: Synthetic oligonucleotide
  Antisense strand to SEQ ID NO: 1817803
ugguuccucgacuauaucc

SEQ ID NO: 1817805 - RNA, 19 nt, Artificial Sequence
  Description of Artificial Sequence: Synthetic oligonucleotide
  Sense strand starting at position 2475 of SEQ ID NO: 1563538
gaugaugaguguuuaggag

SEQ ID NO: 1817806 - RNA, 19 nt, Artificial Sequence
  Description of Artificial Sequence: Synthetic oligonucleotide
  Antisense strand to SEQ ID NO: 1817805
cuccuaaacacucaucauc

SEQ ID NO: 1817807 - RNA, 19 nt, Artificial Sequence
  Description of Artificial Sequence: Synthetic oligonucleotide
  Sense strand starting at position 2517 of SEQ ID NO: 1563538
cacugaguugcuuagguua

SEQ ID NO: 1817808 - RNA, 19 nt, Artificial Sequence
  Description of Artificial Sequence: Synthetic oligonucleotide
  Antisense strand to SEQ ID NO: 1817807
uaaccuaagcaacucagug

SEQ ID NO: 1817809 - RNA, 19 nt, Artificial Sequence
  Description of Artificial Sequence: Synthetic oligonucleotide
  Sense strand starting at position 2520 of SEQ ID NO: 1563538
ugaguugcuuagguuauuu

SEQ ID NO: 1817810 - RNA, 19 nt, Artificial Sequence
  Description of Artificial Sequence: Synthetic oligonucleotide
  Antisense strand to SEQ ID NO: 1817809
aaauaaccuaagcaacuca

SEQ ID NO: 1817811 - RNA, 19 nt, Artificial Sequence
  Description of Artificial Sequence: Synthetic oligonucleotide
  Sense strand starting at position 2581 of SEQ ID NO: 1563538
gcaucaugggaauggaagu

SEQ ID NO: 1817812 - RNA, 19 nt, Artificial Sequence
  Description of Artificial Sequence: Synthetic oligonucleotide
  Antisense strand to SEQ ID NO: 1817811
acuuccauucccaugaugc

SEQ ID NO: 1817813 - RNA, 19 nt, Artificial Sequence
  Description of Artificial Sequence: Synthetic oligonucleotide
  Sense strand starting at position 2594 of SEQ ID NO: 1563538
ggaaguuagaguggauuga

SEQ ID NO: 1817814 - RNA, 19 nt, Artificial Sequence
  Description of Artificial Sequence: Synthetic oligonucleotide
  Antisense strand to SEQ ID NO: 1817813
ucaauccacucuaacuucc

SEQ ID NO: 1817815 - RNA, 19 nt, Artificial Sequence
  Description of Artificial Sequence: Synthetic oligonucleotide
  Sense strand starting at position 2598 of SEQ ID NO: 1563538
guuagaguggauugacuga

SEQ ID NO: 1817816 - RNA, 19 nt, Artificial Sequence
  Description of Artificial Sequence: Synthetic oligonucleotide
  Antisense strand to SEQ ID NO: 1817815
ucagucaauccacucuaac

SEQ ID NO: 1817817 - RNA, 19 nt, Artificial Sequence
  Description of Artificial Sequence: Synthetic oligonucleotide
  Sense strand starting at position 3051 of SEQ ID NO: 1563538
aguuaaaucgaauauccuu

SEQ ID NO: 1817818 - RNA, 19 nt, Artificial Sequence
  Description of Artificial Sequence: Synthetic oligonucleotide
  Antisense strand to SEQ ID NO: 1817817
aaggauauucgauuuaacu

SEQ ID NO: 1817819 - RNA, 19 nt, Artificial Sequence
  Description of Artificial Sequence: Synthetic oligonucleotide
  Sense strand starting at position 3080 of SEQ ID NO: 1563538
ucucuuugggcagggagau

SEQ ID NO: 1817820 - RNA, 19 nt, Artificial Sequence
  Description of Artificial Sequence: Synthetic oligonucleotide
  Antisense strand to SEQ ID NO: 1817819
aucucccugcccaaagaga

SEQ ID NO: 1817821 - RNA, 19 nt, Artificial Sequence
  Description of Artificial Sequence: Synthetic oligonucleotide
  Sense strand starting at position 3081 of SEQ ID NO: 1563538
cucuuugggcagggagaua

SEQ ID NO: 1817822 - RNA, 19 nt, Artificial Sequence
  Description of Artificial Sequence: Synthetic oligonucleotide
  Antisense strand to SEQ ID NO: 1817821
uaucucccugcccaaagag

SEQ ID NO: 1817823 - RNA, 19 nt, Artificial Sequence
  Description of Artificial Sequence: Synthetic oligonucleotide
  Sense strand starting at position 3385 of SEQ ID NO: 1563538
augaguaguagccagaucu

SEQ ID NO: 1817824 - RNA, 19 nt, Artificial Sequence
  Description of Artificial Sequence: Synthetic oligonucleotide
  Antisense strand to SEQ ID NO: 1817823
agaucuggcuacuacucau

SEQ ID NO: 1817825 - RNA, 19 nt, Artificial Sequence
  Description of Artificial Sequence: Synthetic oligonucleotide
  Sense strand starting at position 3396 of SEQ ID NO: 1563538
ccagaucuggcuuggaacu

SEQ ID NO: 1817826 - RNA, 19 nt, Artificial Sequence
  Description of Artificial Sequence: Synthetic oligonucleotide
  Antisense strand to SEQ ID NO: 1817825
aguuccaagccagaucugg

SEQ ID NO: 1817827 - RNA, 19 nt, Artificial Sequence
  Description of Artificial Sequence: Synthetic oligonucleotide
  Sense strand starting at position 3430 of SEQ ID NO: 1563538
gauaauggcaggcagaguu

SEQ ID NO: 1817828 - RNA, 19 nt, Artificial Sequence
  Description of Artificial Sequence: Synthetic oligonucleotide
  Antisense strand to SEQ ID NO: 1817827
aacucugccugccauuauc

SEQ ID NO: 1817829 - RNA, 19 nt, Artificial Sequence
  Description of Artificial Sequence: Synthetic oligonucleotide
  Sense strand starting at position 3467 of SEQ ID NO: 1563538
acccaagagugaucgggau

SEQ ID NO: 1817830 - RNA, 19 nt, Artificial Sequence
  Description of Artificial Sequence: Synthetic oligonucleotide
  Antisense strand to SEQ ID NO: 1817829
aucccgaucacucuugggu

SEQ ID NO: 1817831 - RNA, 19 nt, Artificial Sequence
  Description of Artificial Sequence: Synthetic oligonucleotide
  Sense strand starting at position 3469 of SEQ ID NO: 1563538
ccaagagugaucgggauga

SEQ ID NO: 1817832 - RNA, 19 nt, Artificial Sequence
  Description of Artificial Sequence: Synthetic oligonucleotide
  Antisense strand to SEQ ID NO: 1817831
ucaucccgaucacucuugg

SEQ ID NO: 1817833 - RNA, 19 nt, Artificial Sequence
  Description of Artificial Sequence: Synthetic oligonucleotide
  Sense strand starting at position 3473 of SEQ ID NO: 1563538
gagugaucgggaugaauga

SEQ ID NO: 1817834 - RNA, 19 nt, Artificial Sequence
  Description of Artificial Sequence: Synthetic oligonucleotide
  Antisense strand to SEQ ID NO: 1817833
ucauucaucccgaucacuc

SEQ ID NO: 1817835 - RNA, 19 nt, Artificial Sequence
  Description of Artificial Sequence: Synthetic oligonucleotide
  Sense strand starting at position 3574 of SEQ ID NO: 1563538
caagccagauugucaaaga

SEQ ID NO: 1817836 - RNA, 19 nt, Artificial Sequence
  Description of Artificial Sequence: Synthetic oligonucleotide
  Antisense strand to SEQ ID NO: 1817835
ucuuugacaaucuggcuug

SEQ ID NO: 1817837 - RNA, 19 nt, Artificial Sequence
  Description of Artificial Sequence: Synthetic oligonucleotide
  Sense strand starting at position 3614 of SEQ ID NO: 1563538
guacauaguuaacucuuga

SEQ ID NO: 1817838 - RNA, 19 nt, Artificial Sequence
  Description of Artificial Sequence: Synthetic oligonucleotide
  Antisense strand to SEQ ID NO: 1817837
ucaagaguuaacuauguac

SEQ ID NO: 1817839 - RNA, 19 nt, Artificial Sequence
  Description of Artificial Sequence: Synthetic oligonucleotide
  Sense strand starting at position 3872 of SEQ ID NO: 1563538
ucuagaaauuugcaauuag

SEQ ID NO: 1817840 - RNA, 19 nt, Artificial Sequence
  Description of Artificial Sequence: Synthetic oligonucleotide
  Antisense strand to SEQ ID NO: 1817839
cuaauugcaaauuucuaga

SEQ ID NO: 1817841 - RNA, 19 nt, Artificial Sequence
  Description of Artificial Sequence: Synthetic oligonucleotide
  Sense strand starting at position 3967 of SEQ ID NO: 1563538
gaaagaugcuggucugcag

SEQ ID NO: 1817842 - RNA, 19 nt, Artificial Sequence
  Description of Artificial Sequence: Synthetic oligonucleotide
  Antisense strand to SEQ ID NO: 1817841
cugcagaccagcaucuuuc

SEQ ID NO: 1817843 - RNA, 19 nt, Artificial Sequence
  Description of Artificial Sequence: Synthetic oligonucleotide
  Sense strand starting at position 3970 of SEQ ID NO: 1563538
agaugcuggucugcagaaa

SEQ ID NO: 1817844 - RNA, 19 nt, Artificial Sequence
  Description of Artificial Sequence: Synthetic oligonucleotide
  Antisense strand to SEQ ID NO: 1817843
uuucugcagaccagcaucu

SEQ ID NO: 1817845 - RNA, 19 nt, Artificial Sequence
  Description of Artificial Sequence: Synthetic oligonucleotide
  Sense strand starting at position 74 of SEQ ID NO: 1563539
aggauuaucucuuucuuug

SEQ ID NO: 1817846 - RNA, 19 nt, Artificial Sequence
  Description of Artificial Sequence: Synthetic oligonucleotide
  Antisense strand to SEQ ID NO: 1817845
caaagaaagagauaauccu

SEQ ID NO: 1817847 - RNA, 19 nt, Artificial Sequence
  Description of Artificial Sequence: Synthetic oligonucleotide
  Sense strand starting at position 122 of SEQ ID NO: 1563539
ggcuaauuguacucucauc

SEQ ID NO: 1817848 - RNA, 19 nt, Artificial Sequence
  Description of Artificial Sequence: Synthetic oligonucleotide
  Antisense strand to SEQ ID NO: 1817847
gaugagaguacaauuagcc

SEQ ID NO: 1817849 - RNA, 19 nt, Artificial Sequence
  Description of Artificial Sequence: Synthetic oligonucleotide
  Sense strand starting at position 182 of SEQ ID NO: 1563539
uuggcucucuaccuaagau

SEQ ID NO: 1817850 - RNA, 19 nt, Artificial Sequence
  Description of Artificial Sequence: Synthetic oligonucleotide
  Antisense strand to SEQ ID NO: 1817849
aucuuagguagagagccaa

SEQ ID NO: 1817851 - RNA, 19 nt, Artificial Sequence
  Description of Artificial Sequence: Synthetic oligonucleotide
  Sense strand starting at position 286 of SEQ ID NO: 1563539
acagacccucgaugacuua

SEQ ID NO: 1817852 - RNA, 19 nt, Artificial Sequence
  Description of Artificial Sequence: Synthetic oligonucleotide
  Antisense strand to SEQ ID NO: 1817851
uaagucaucgagggucugu

SEQ ID NO: 1817853 - RNA, 19 nt, Artificial Sequence
  Description of Artificial Sequence: Synthetic oligonucleotide
  Sense strand starting at position 293 of SEQ ID NO: 1563539
cucgaugacuuauugacau

SEQ ID NO: 1817854 - RNA, 19 nt, Artificial Sequence
  Description of Artificial Sequence: Synthetic oligonucleotide
  Antisense strand to SEQ ID NO: 1817853
augucaauaagucaucgag

SEQ ID NO: 1817855 - RNA, 19 nt, Artificial Sequence
  Description of Artificial Sequence: Synthetic oligonucleotide
  Sense strand starting at position 297 of SEQ ID NO: 1563539
augacuuauugacaugaaa

SEQ ID NO: 1817856 - RNA, 19 nt, Artificial Sequence
  Description of Artificial Sequence: Synthetic oligonucleotide
  Antisense strand to SEQ ID NO: 1817855
uuucaugucaauaagucau

SEQ ID NO: 1817857 - RNA, 19 nt, Artificial Sequence
  Description of Artificial Sequence: Synthetic oligonucleotide
  Sense strand starting at position 477 of SEQ ID NO: 1563539
cacguacuacgaugugaac

SEQ ID NO: 1817858 - RNA, 19 nt, Artificial Sequence
  Description of Artificial Sequence: Synthetic oligonucleotide
  Antisense strand to SEQ ID NO: 1817857
guucacaucguaguacgug

SEQ ID NO: 1817859 - RNA, 19 nt, Artificial Sequence
  Description of Artificial Sequence: Synthetic oligonucleotide
  Sense strand starting at position 479 of SEQ ID NO: 1563539
cguacuacgaugugaacau

SEQ ID NO: 1817860 - RNA, 19 nt, Artificial Sequence
  Description of Artificial Sequence: Synthetic oligonucleotide
  Antisense strand to SEQ ID NO: 1817859
auguucacaucguaguacg

SEQ ID NO: 1817861 - RNA, 19 nt, Artificial Sequence
  Description of Artificial Sequence: Synthetic oligonucleotide
  Sense strand starting at position 550 of SEQ ID NO: 1563539
uguuaaugccaggauuccu

SEQ ID NO: 1817862 - RNA, 19 nt, Artificial Sequence
  Description of Artificial Sequence: Synthetic oligonucleotide
  Antisense strand to SEQ ID NO: 1817861
aggaauccuggcauuaaca

SEQ ID NO: 1817863 - RNA, 19 nt, Artificial Sequence
  Description of Artificial Sequence: Synthetic oligonucleotide
  Sense strand starting at position 639 of SEQ ID NO: 1563539
ucugacauucccuggugua

SEQ ID NO: 1817864 - RNA, 19 nt, Artificial Sequence
  Description of Artificial Sequence: Synthetic oligonucleotide
  Antisense strand to SEQ ID NO: 1817863
uacaccagggaaugucaga

SEQ ID NO: 1817865 - RNA, 19 nt, Artificial Sequence
  Description of Artificial Sequence: Synthetic oligonucleotide
  Sense strand starting at position 640 of SEQ ID NO: 1563539
cugacauucccugguguaa

SEQ ID NO: 1817866 - RNA, 19 nt, Artificial Sequence
  Description of Artificial Sequence: Synthetic oligonucleotide
  Antisense strand to SEQ ID NO: 1817865
uuacaccagggaaugucag

SEQ ID NO: 1817867 - RNA, 19 nt, Artificial Sequence
  Description of Artificial Sequence: Synthetic oligonucleotide
  Sense strand starting at position 644 of SEQ ID NO: 1563539
cauucccugguguaaguua

SEQ ID NO: 1817868 - RNA, 19 nt, Artificial Sequence
  Description of Artificial Sequence: Synthetic oligonucleotide
  Antisense strand to SEQ ID NO: 1817867
uaacuuacaccagggaaug

SEQ ID NO: 1817869 - RNA, 19 nt, Artificial Sequence
  Description of Artificial Sequence: Synthetic oligonucleotide
  Sense strand starting at position 853 of SEQ ID NO: 1563539
cccaaaugagcucaaacgu

SEQ ID NO: 1817870 - RNA, 19 nt, Artificial Sequence
  Description of Artificial Sequence: Synthetic oligonucleotide
  Antisense strand to SEQ ID NO: 1817869
acguuugagcucauuuggg

SEQ ID NO: 1817871 - RNA, 19 nt, Artificial Sequence
  Description of Artificial Sequence: Synthetic oligonucleotide
  Sense strand starting at position 866 of SEQ ID NO: 1563539
aaacgugcacuuuaaggaa

SEQ ID NO: 1817872 - RNA, 19 nt, Artificial Sequence
  Description of Artificial Sequence: Synthetic oligonucleotide
  Antisense strand to SEQ ID NO: 1817871
uuccuuaaagugcacguuu

SEQ ID NO: 1817873 - RNA, 19 nt, Artificial Sequence
  Description of Artificial Sequence: Synthetic oligonucleotide
  Sense strand starting at position 882 of SEQ ID NO: 1563539
gaaggaagauugcuugcau

SEQ ID NO: 1817874 - RNA, 19 nt, Artificial Sequence
  Description of Artificial Sequence: Synthetic oligonucleotide
  Antisense strand to SEQ ID NO: 1817873
augcaagcaaucuuccuuc

SEQ ID NO: 1817875 - RNA, 19 nt, Artificial Sequence
  Description of Artificial Sequence: Synthetic oligonucleotide
  Sense strand starting at position 883 of SEQ ID NO: 1563539
aaggaagauugcuugcaug

SEQ ID NO: 1817876 - RNA, 19 nt, Artificial Sequence
  Description of Artificial Sequence: Synthetic oligonucleotide
  Antisense strand to SEQ ID NO: 1817875
caugcaagcaaucuuccuu

SEQ ID NO: 1817877 - RNA, 19 nt, Artificial Sequence
  Description of Artificial Sequence: Synthetic oligonucleotide
  Sense strand starting at position 979 of SEQ ID NO: 1563539
gcuggaucuccucaggguu

SEQ ID NO: 1817878 - RNA, 19 nt, Artificial Sequence
  Description of Artificial Sequence: Synthetic oligonucleotide
  Antisense strand to SEQ ID NO: 1817877
aacccugaggagauccagc

SEQ ID NO: 1817879 - RNA, 19 nt, Artificial Sequence
  Description of Artificial Sequence: Synthetic oligonucleotide
  Sense strand starting at position 1038 of SEQ ID NO: 1563539
ucuccugagccaugucaga

SEQ ID NO: 1817880 - RNA, 19 nt, Artificial Sequence
  Description of Artificial Sequence: Synthetic oligonucleotide
  Antisense strand to SEQ ID NO: 1817879
ucugacauggcucaggaga

SEQ ID NO: 1817881 - RNA, 19 nt, Artificial Sequence
  Description of Artificial Sequence: Synthetic oligonucleotide
  Sense strand starting at position 2238 of SEQ ID NO: 1563539
aucagcuuucaggaggagu

SEQ ID NO: 1817882 - RNA, 19 nt, Artificial Sequence
  Description of Artificial Sequence: Synthetic oligonucleotide
  Antisense strand to SEQ ID NO: 1817881
acuccuccugaaagcugau

SEQ ID NO: 1817883 - RNA, 19 nt, Artificial Sequence
  Description of Artificial Sequence: Synthetic oligonucleotide
  Sense strand starting at position 2249 of SEQ ID NO: 1563539
ggaggaguuugggccaaua

SEQ ID NO: 1817884 - RNA, 19 nt, Artificial Sequence
  Description of Artificial Sequence: Synthetic oligonucleotide
  Antisense strand to SEQ ID NO: 1817883
uauuggcccaaacuccucc

SEQ ID NO: 1817885 - RNA, 19 nt, Artificial Sequence
  Description of Artificial Sequence: Synthetic oligonucleotide
  Sense strand starting at position 2251 of SEQ ID NO: 1563539
aggaguuugggccaauauu

SEQ ID NO: 1817886 - RNA, 19 nt, Artificial Sequence
  Description of Artificial Sequence: Synthetic oligonucleotide
  Antisense strand to SEQ ID NO: 1817885
aauauuggcccaaacuccu

SEQ ID NO: 1817887 - RNA, 19 nt, Artificial Sequence
  Description of Artificial Sequence: Synthetic oligonucleotide
  Sense strand starting at position 2412 of SEQ ID NO: 1563539
cauccauucggaugcacua

SEQ ID NO: 1817888 - RNA, 19 nt, Artificial Sequence
  Description of Artificial Sequence: Synthetic oligonucleotide
  Antisense strand to SEQ ID NO: 1817887
uagugcauccgaauggaug

SEQ ID NO: 1817889 - RNA, 19 nt, Artificial Sequence
  Description of Artificial Sequence: Synthetic oligonucleotide
  Sense strand starting at position 2474 of SEQ ID NO: 1563539
agcgaauaucaugacaguu

SEQ ID NO: 1817890 - RNA, 19 nt, Artificial Sequence
  Description of Artificial Sequence: Synthetic oligonucleotide
  Antisense strand to SEQ ID NO: 1817889
aacugucaugauauucgcu

SEQ ID NO: 1817891 - RNA, 19 nt, Artificial Sequence
  Description of Artificial Sequence: Synthetic oligonucleotide
  Sense strand starting at position 2493 of SEQ ID NO: 1563539
cguauagcuaaugagaaac

SEQ ID NO: 1817892 - RNA, 19 nt, Artificial Sequence
  Description of Artificial Sequence: Synthetic oligonucleotide
  Antisense strand to SEQ ID NO: 1817891
guuucucauuagcuauacg

SEQ ID NO: 1817893 - RNA, 19 nt, Artificial Sequence
  Description of Artificial Sequence: Synthetic oligonucleotide
  Sense strand starting at position 3088 of SEQ ID NO: 1563539
aaagaaauuuacggagaca

SEQ ID NO: 1817894 - RNA, 19 nt, Artificial Sequence
  Description of Artificial Sequence: Synthetic oligonucleotide
  Antisense strand to SEQ ID NO: 1817893
ugucuccguaaauuucuuu

SEQ ID NO: 1817895 - RNA, 19 nt, Artificial Sequence
  Description of Artificial Sequence: Synthetic oligonucleotide
  Sense strand starting at position 3124 of SEQ ID NO: 1563539
gcagauuuauuagagaaua

SEQ ID NO: 1817896 - RNA, 19 nt, Artificial Sequence
  Description of Artificial Sequence: Synthetic oligonucleotide
  Antisense strand to SEQ ID NO: 1817895
uauucucuaauaaaucugc

SEQ ID NO: 1817897 - RNA, 19 nt, Artificial Sequence
  Description of Artificial Sequence: Synthetic oligonucleotide
  Sense strand starting at position 3182 of SEQ ID NO: 1563539
agaggagcugucugcaaag

SEQ ID NO: 1817898 - RNA, 19 nt, Artificial Sequence
  Description of Artificial Sequence: Synthetic oligonucleotide
  Antisense strand to SEQ ID NO: 1817897
cuuugcagacagcuccucu

SEQ ID NO: 1817899 - RNA, 19 nt, Artificial Sequence
  Description of Artificial Sequence: Synthetic oligonucleotide
  Sense strand starting at position 3362 of SEQ ID NO: 1563539
gcuuauucucaggacucca

SEQ ID NO: 1817900 - RNA, 19 nt, Artificial Sequence
  Description of Artificial Sequence: Synthetic oligonucleotide
  Antisense strand to SEQ ID NO: 1817899
uggaguccugagaauaagc

SEQ ID NO: 1817901 - RNA, 19 nt, Artificial Sequence
  Description of Artificial Sequence: Synthetic oligonucleotide
  Sense strand starting at position 3523 of SEQ ID NO: 1563539
gugggucauugucccagau

SEQ ID NO: 1817902 - RNA, 19 nt, Artificial Sequence
  Description of Artificial Sequence: Synthetic oligonucleotide
  Antisense strand to SEQ ID NO: 1817901
aucugggacaaugacccac

SEQ ID NO: 1817903 - RNA, 19 nt, Artificial Sequence
  Description of Artificial Sequence: Synthetic oligonucleotide
  Sense strand starting at position 3527 of SEQ ID NO: 1563539
gucauugucccagauugug

SEQ ID NO: 1817904 - RNA, 19 nt, Artificial Sequence
  Description of Artificial Sequence: Synthetic oligonucleotide
  Antisense strand to SEQ ID NO: 1817903
cacaaucugggacaaugac

SEQ ID NO: 1817905 - RNA, 19 nt, Artificial Sequence
  Description of Artificial Sequence: Synthetic oligonucleotide
  Sense strand starting at position 3558 of SEQ ID NO: 1563539
uugaaucuugcuggaggaa

SEQ ID NO: 1817906 - RNA, 19 nt, Artificial Sequence
  Description of Artificial Sequence: Synthetic oligonucleotide
  Antisense strand to SEQ ID NO: 1817905
uuccuccagcaagauucaa

SEQ ID NO: 1817907 - RNA, 19 nt, Artificial Sequence
  Description of Artificial Sequence: Synthetic oligonucleotide
  Sense strand starting at position 3666 of SEQ ID NO: 1563539
gggagagacugauauccca

SEQ ID NO: 1817908 - RNA, 19 nt, Artificial Sequence
  Description of Artificial Sequence: Synthetic oligonucleotide
  Antisense strand to SEQ ID NO: 1817907
ugggauaucagucucuccc

SEQ ID NO: 1817909 - RNA, 19 nt, Artificial Sequence
  Description of Artificial Sequence: Synthetic oligonucleotide
  Sense strand starting at position 3702 of SEQ ID NO: 1563539
agugaaacugcugaauucu

SEQ ID NO: 1817910 - RNA, 19 nt, Artificial Sequence
  Description of Artificial Sequence: Synthetic oligonucleotide
  Antisense strand to SEQ ID NO: 1817909
agaauucagcaguuucacu

SEQ ID NO: 1817911 - RNA, 19 nt, Artificial Sequence
  Description of Artificial Sequence: Synthetic oligonucleotide
  Sense strand starting at position 3788 of SEQ ID NO: 1563539
aaccauuugcagugugacu

SEQ ID NO: 1817912 - RNA, 19 nt, Artificial Sequence
  Description of Artificial Sequence: Synthetic oligonucleotide
  Antisense strand to SEQ ID NO: 1817911
agucacacugcaaaugguu

SEQ ID NO: 1817913 - RNA, 19 nt, Artificial Sequence
  Description of Artificial Sequence: Synthetic oligonucleotide
  Sense strand starting at position 3830 of SEQ ID NO: 1563539
uuaguuagccuggaaguua

SEQ ID NO: 1817914 - RNA, 19 nt, Artificial Sequence
  Description of Artificial Sequence: Synthetic oligonucleotide
  Antisense strand to SEQ ID NO: 1817913
uaacuuccaggcuaacuaa

SEQ ID NO: 1817915 - RNA, 19 nt, Artificial Sequence
  Description of Artificial Sequence: Synthetic oligonucleotide
  Sense strand starting at position 3886 of SEQ ID NO: 1563539
agaagaguguauucagggu

SEQ ID NO: 1817916 - RNA, 19 nt, Artificial Sequence
  Description of Artificial Sequence: Synthetic oligonucleotide
  Antisense strand to SEQ ID NO: 1817915
acccugaauacacucuucu

SEQ ID NO: 1817917 - RNA, 19 nt, Artificial Sequence
  Description of Artificial Sequence: Synthetic oligonucleotide
  Sense strand starting at position 3890 of SEQ ID NO: 1563539
gaguguauucaggguuaug

SEQ ID NO: 1817918 - RNA, 19 nt, Artificial Sequence
  Description of Artificial Sequence: Synthetic oligonucleotide
  Antisense strand to SEQ ID NO: 1817917
cauaacccugaauacacuc

SEQ ID NO: 1817919 - RNA, 19 nt, Artificial Sequence
  Description of Artificial Sequence: Synthetic oligonucleotide
  Sense strand starting at position 3893 of SEQ ID NO: 1563539
uguauucaggguuaugagu

SEQ ID NO: 1817920 - RNA, 19 nt, Artificial Sequence
  Description of Artificial Sequence: Synthetic oligonucleotide
  Antisense strand to SEQ ID NO: 1817919
acucauaacccugaauaca

SEQ ID NO: 1817921 - RNA, 19 nt, Artificial Sequence
  Description of Artificial Sequence: Synthetic oligonucleotide
  Sense strand starting at position 3906 of SEQ ID NO: 1563539
augaguauagcaggugaau

SEQ ID NO: 1817922 - RNA, 19 nt, Artificial Sequence
  Description of Artificial Sequence: Synthetic oligonucleotide
  Antisense strand to SEQ ID NO: 1817921
auucaccugcuauacucau

SEQ ID NO: 1817923 - RNA, 19 nt, Artificial Sequence
  Description of Artificial Sequence: Synthetic oligonucleotide
  Sense strand starting at position 3908 of SEQ ID NO: 1563539
gaguauagcaggugaauac

SEQ ID NO: 1817924 - RNA, 19 nt, Artificial Sequence
  Description of Artificial Sequence: Synthetic oligonucleotide
  Antisense strand to SEQ ID NO: 1817923
guauucaccugcuauacuc

SEQ ID NO: 1817925 - RNA, 19 nt, Artificial Sequence
  Description of Artificial Sequence: Synthetic oligonucleotide
  Sense strand starting at position 45 of SEQ ID NO: 1563540
ggcuaauuguacucucauc

SEQ ID NO: 1817926 - RNA, 19 nt, Artificial Sequence
  Description of Artificial Sequence: Synthetic oligonucleotide
  Antisense strand to SEQ ID NO: 1817925
gaugagaguacaauuagcc

SEQ ID NO: 1817927 - RNA, 19 nt, Artificial Sequence
  Description of Artificial Sequence: Synthetic oligonucleotide
  Sense strand starting at position 105 of SEQ ID NO: 1563540
uuggcucucuaccuaagau

SEQ ID NO: 1817928 - RNA, 19 nt, Artificial Sequence
  Description of Artificial Sequence: Synthetic oligonucleotide
  Antisense strand to SEQ ID NO: 1817927
aucuuagguagagagccaa

SEQ ID NO: 1817929 - RNA, 19 nt, Artificial Sequence
  Description of Artificial Sequence: Synthetic oligonucleotide
  Sense strand starting at position 209 of SEQ ID NO: 1563540
acagacccucgaugacuua

SEQ ID NO: 1817930 - RNA, 19 nt, Artificial Sequence
  Description of Artificial Sequence: Synthetic oligonucleotide
  Antisense strand to SEQ ID NO: 1817929
uaagucaucgagggucugu

SEQ ID NO: 1817931 - RNA, 19 nt, Artificial Sequence
  Description of Artificial Sequence: Synthetic oligonucleotide
  Sense strand starting at position 216 of SEQ ID NO: 1563540
cucgaugacuuauugacau

SEQ ID NO: 1817932 - RNA, 19 nt, Artificial Sequence
  Description of Artificial Sequence: Synthetic oligonucleotide
  Antisense strand to SEQ ID NO: 1817931
augucaauaagucaucgag

SEQ ID NO: 1817933 - RNA, 19 nt, Artificial Sequence
  Description of Artificial Sequence: Synthetic oligonucleotide
  Sense strand starting at position 220 of SEQ ID NO: 1563540
augacuuauugacaugaaa

SEQ ID NO: 1817934 - RNA, 19 nt, Artificial Sequence
  Description of Artificial Sequence: Synthetic oligonucleotide
  Antisense strand to SEQ ID NO: 1817933
uuucaugucaauaagucau

SEQ ID NO: 1817935 - RNA, 19 nt, Artificial Sequence
  Description of Artificial Sequence: Synthetic oligonucleotide
  Sense strand starting at position 400 of SEQ ID NO: 1563540
cacguacuacgaugugaac

SEQ ID NO: 1817936 - RNA, 19 nt, Artificial Sequence
  Description of Artificial Sequence: Synthetic oligonucleotide
  Antisense strand to SEQ ID NO: 1817935
guucacaucguaguacgug

SEQ ID NO: 1817937 - RNA, 19 nt, Artificial Sequence
  Description of Artificial Sequence: Synthetic oligonucleotide
  Sense strand starting at position 402 of SEQ ID NO: 1563540
cguacuacgaugugaacau

SEQ ID NO: 1817938 - RNA, 19 nt, Artificial Sequence
  Description of Artificial Sequence: Synthetic oligonucleotide
  Antisense strand to SEQ ID NO: 1817937
auguucacaucguaguacg

SEQ ID NO: 1817939 - RNA, 19 nt, Artificial Sequence
  Description of Artificial Sequence: Synthetic oligonucleotide
  Sense strand starting at position 473 of SEQ ID NO: 1563540
uguuaaugccaggauuccu

SEQ ID NO: 1817940 - RNA, 19 nt, Artificial Sequence
  Description of Artificial Sequence: Synthetic oligonucleotide
  Antisense strand to SEQ ID NO: 1817939
aggaauccuggcauuaaca

SEQ ID NO: 1817941 - RNA, 19 nt, Artificial Sequence
  Description of Artificial Sequence: Synthetic oligonucleotide
  Sense strand starting at position 562 of SEQ ID NO: 1563540
ucugacauucccuggugua

SEQ ID NO: 1817942 - RNA, 19 nt, Artificial Sequence
  Description of Artificial Sequence: Synthetic oligonucleotide
  Antisense strand to SEQ ID NO: 1817941
uacaccagggaaugucaga

SEQ ID NO: 1817943 - RNA, 19 nt, Artificial Sequence
  Description of Artificial Sequence: Synthetic oligonucleotide
  Sense strand starting at position 563 of SEQ ID NO: 1563540
cugacauucccugguguaa

SEQ ID NO: 1817944 - RNA, 19 nt, Artificial Sequence
  Description of Artificial Sequence: Synthetic oligonucleotide
  Antisense strand to SEQ ID NO: 1817943
uuacaccagggaaugucag

SEQ ID NO: 1817945 - RNA, 19 nt, Artificial Sequence
  Description of Artificial Sequence: Synthetic oligonucleotide
  Sense strand starting at position 567 of SEQ ID NO: 1563540
cauucccugguguaaguua

SEQ ID NO: 1817946 - RNA, 19 nt, Artificial Sequence
  Description of Artificial Sequence: Synthetic oligonucleotide
  Antisense strand to SEQ ID NO: 1817945
uaacuuacaccagggaaug

SEQ ID NO: 1817947 - RNA, 19 nt, Artificial Sequence
  Description of Artificial Sequence: Synthetic oligonucleotide
  Sense strand starting at position 776 of SEQ ID NO: 1563540
cccaaaugagcucaaacgu

SEQ ID NO: 1817948 - RNA, 19 nt, Artificial Sequence
  Description of Artificial Sequence: Synthetic oligonucleotide
  Antisense strand to SEQ ID NO: 1817947
acguuugagcucauuuggg

SEQ ID NO: 1817949 - RNA, 19 nt, Artificial Sequence
  Description of Artificial Sequence: Synthetic oligonucleotide
  Sense strand starting at position 789 of SEQ ID NO: 1563540
aaacgugcacuuuaaggaa

SEQ ID NO: 1817950 - RNA, 19 nt, Artificial Sequence
  Description of Artificial Sequence: Synthetic oligonucleotide
  Antisense strand to SEQ ID NO: 1817949
uuccuuaaagugcacguuu

SEQ ID NO: 1817951 - RNA, 19 nt, Artificial Sequence
  Description of Artificial Sequence: Synthetic oligonucleotide
  Sense strand starting at position 805 of SEQ ID NO: 1563540
gaaggaagauugcuugcau

SEQ ID NO: 1817952 - RNA, 19 nt, Artificial Sequence
  Description of Artificial Sequence: Synthetic oligonucleotide
  Antisense strand to SEQ ID NO: 1817951
augcaagcaaucuuccuuc

SEQ ID NO: 1817953 - RNA, 19 nt, Artificial Sequence
  Description of Artificial Sequence: Synthetic oligonucleotide
  Sense strand starting at position 806 of SEQ ID NO: 1563540
aaggaagauugcuugcaug

SEQ ID NO: 1817954 - RNA, 19 nt, Artificial Sequence
  Description of Artificial Sequence: Synthetic oligonucleotide
  Antisense strand to SEQ ID NO: 1817953
caugcaagcaaucuuccuu

SEQ ID NO: 1817955 - RNA, 19 nt, Artificial Sequence
  Description of Artificial Sequence: Synthetic oligonucleotide
  Sense strand starting at position 902 of SEQ ID NO: 1563540
gcuggaucuccucaggguu

SEQ ID NO: 1817956 - RNA, 19 nt, Artificial Sequence
  Description of Artificial Sequence: Synthetic oligonucleotide
  Antisense strand to SEQ ID NO: 1817955
aacccugaggagauccagc

SEQ ID NO: 1817957 - RNA, 19 nt, Artificial Sequence
  Description of Artificial Sequence: Synthetic oligonucleotide
  Sense strand starting at position 961 of SEQ ID NO: 1563540
ucuccugagccaugucaga

SEQ ID NO: 1817958 - RNA, 19 nt, Artificial Sequence
  Description of Artificial Sequence: Synthetic oligonucleotide
  Antisense strand to SEQ ID NO: 1817957
ucugacauggcucaggaga

SEQ ID NO: 1817959 - RNA, 19 nt, Artificial Sequence
  Description of Artificial Sequence: Synthetic oligonucleotide
  Sense strand starting at position 2161 of SEQ ID NO: 1563540
aucagcuuucaggaggagu

SEQ ID NO: 1817960 - RNA, 19 nt, Artificial Sequence
  Description of Artificial Sequence: Synthetic oligonucleotide
  Antisense strand to SEQ ID NO: 1817959
acuccuccugaaagcugau

SEQ ID NO: 1817961 - RNA, 19 nt, Artificial Sequence
  Description of Artificial Sequence: Synthetic oligonucleotide
  Sense strand starting at position 2172 of SEQ ID NO: 1563540
ggaggaguuugggccaaua

SEQ ID NO: 1817962 - RNA, 19 nt, Artificial Sequence
  Description of Artificial Sequence: Synthetic oligonucleotide
  Antisense strand to SEQ ID NO: 1817961
uauuggcccaaacuccucc

SEQ ID NO: 1817963 - RNA, 19 nt, Artificial Sequence
  Description of Artificial Sequence: Synthetic oligonucleotide
  Sense strand starting at position 2174 of SEQ ID NO: 1563540
aggaguuugggccaauauu

SEQ ID NO: 1817964 - RNA, 19 nt, Artificial Sequence
  Description of Artificial Sequence: Synthetic oligonucleotide
  Antisense strand to SEQ ID NO: 1817963
aauauuggcccaaacuccu

SEQ ID NO: 1817965 - RNA, 19 nt, Artificial Sequence
  Description of Artificial Sequence: Synthetic oligonucleotide
  Sense strand starting at position 2335 of SEQ ID NO: 1563540
cauccauucggaugcacua

SEQ ID NO: 1817966 - RNA, 19 nt, Artificial Sequence
  Description of Artificial Sequence: Synthetic oligonucleotide
  Antisense strand to SEQ ID NO: 1817965
uagugcauccgaauggaug

SEQ ID NO: 1817967 - RNA, 19 nt, Artificial Sequence
  Description of Artificial Sequence: Synthetic oligonucleotide
  Sense strand starting at position 2397 of SEQ ID NO: 1563540
agcgaauaucaugacaguu

SEQ ID NO: 1817968 - RNA, 19 nt, Artificial Sequence
  Description of Artificial Sequence: Synthetic oligonucleotide
  Antisense strand to SEQ ID NO: 1817967
aacugucaugauauucgcu

SEQ ID NO: 1817969 - RNA, 19 nt, Artificial Sequence
  Description of Artificial Sequence: Synthetic oligonucleotide
  Sense strand starting at position 2416 of SEQ ID NO: 1563540
cguauagcuaaugagaaac

SEQ ID NO: 1817970 - RNA, 19 nt, Artificial Sequence
  Description of Artificial Sequence: Synthetic oligonucleotide
  Antisense strand to SEQ ID NO: 1817969
guuucucauuagcuauacg

SEQ ID NO: 1817971 - RNA, 19 nt, Artificial Sequence
  Description of Artificial Sequence: Synthetic oligonucleotide
  Sense strand starting at position 3011 of SEQ ID NO: 1563540
aaagaaauuuacggagaca

SEQ ID NO: 1817972 - RNA, 19 nt, Artificial Sequence
  Description of Artificial Sequence: Synthetic oligonucleotide
  Antisense strand to SEQ ID NO: 1817971
ugucuccguaaauuucuuu

SEQ ID NO: 1817973 - RNA, 19 nt, Artificial Sequence
  Description of Artificial Sequence: Synthetic oligonucleotide
  Sense strand starting at position 3047 of SEQ ID NO: 1563540
gcagauuuauuagagaaua

SEQ ID NO: 1817974 - RNA, 19 nt, Artificial Sequence
  Description of Artificial Sequence: Synthetic oligonucleotide
  Antisense strand to SEQ ID NO: 1817973
uauucucuaauaaaucugc

SEQ ID NO: 1817975 - RNA, 19 nt, Artificial Sequence
  Description of Artificial Sequence: Synthetic oligonucleotide
  Sense strand starting at position 3105 of SEQ ID NO: 1563540
agaggagcugucugcaaag

SEQ ID NO: 1817976 - RNA, 19 nt, Artificial Sequence
  Description of Artificial Sequence: Synthetic oligonucleotide
  Antisense strand to SEQ ID NO: 1817975
cuuugcagacagcuccucu

SEQ ID NO: 1817977 - RNA, 19 nt, Artificial Sequence
  Description of Artificial Sequence: Synthetic oligonucleotide
  Sense strand starting at position 3285 of SEQ ID NO: 1563540
gcuuauucucaggacucca

SEQ ID NO: 1817978 - RNA, 19 nt, Artificial Sequence
  Description of Artificial Sequence: Synthetic oligonucleotide
  Antisense strand to SEQ ID NO: 1817977
uggaguccugagaauaagc

SEQ ID NO: 1817979 - RNA, 19 nt, Artificial Sequence
  Description of Artificial Sequence: Synthetic oligonucleotide
  Sense strand starting at position 3446 of SEQ ID NO: 1563540
gugggucauugucccagau

SEQ ID NO: 1817980 - RNA, 19 nt, Artificial Sequence
  Description of Artificial Sequence: Synthetic oligonucleotide
  Antisense strand to SEQ ID NO: 1817979
aucugggacaaugacccac

SEQ ID NO: 1817981 - RNA, 19 nt, Artificial Sequence
  Description of Artificial Sequence: Synthetic oligonucleotide
  Sense strand starting at position 3450 of SEQ ID NO: 1563540
gucauugucccagauugug

SEQ ID NO: 1817982 - RNA, 19 nt, Artificial Sequence
  Description of Artificial Sequence: Synthetic oligonucleotide
  Antisense strand to SEQ ID NO: 1817981
cacaaucugggacaaugac

SEQ ID NO: 1817983 - RNA, 19 nt, Artificial Sequence
  Description of Artificial Sequence: Synthetic oligonucleotide
  Sense strand starting at position 3481 of SEQ ID NO: 1563540
uugaaucuugcuggaggaa

SEQ ID NO: 1817984 - RNA, 19 nt, Artificial Sequence
  Description of Artificial Sequence: Synthetic oligonucleotide
  Antisense strand to SEQ ID NO: 1817983
uuccuccagcaagauucaa

SEQ ID NO: 1817985 - RNA, 19 nt, Artificial Sequence
  Description of Artificial Sequence: Synthetic oligonucleotide
  Sense strand starting at position 3589 of SEQ ID NO: 1563540
gggagagacugauauccca

SEQ ID NO: 1817986 - RNA, 19 nt, Artificial Sequence
  Description of Artificial Sequence: Synthetic oligonucleotide
  Antisense strand to SEQ ID NO: 1817985
ugggauaucagucucuccc

SEQ ID NO: 1817987 - RNA, 19 nt, Artificial Sequence
  Description of Artificial Sequence: Synthetic oligonucleotide
  Sense strand starting at position 3625 of SEQ ID NO: 1563540
agugaaacugcugaauucu

SEQ ID NO: 1817988 - RNA, 19 nt, Artificial Sequence
  Description of Artificial Sequence: Synthetic oligonucleotide
  Antisense strand to SEQ ID NO: 1817987
agaauucagcaguuucacu

SEQ ID NO: 1817989 - RNA, 19 nt, Artificial Sequence
  Description of Artificial Sequence: Synthetic oligonucleotide
  Sense strand starting at position 3711 of SEQ ID NO: 1563540
aaccauuugcagugugacu

SEQ ID NO: 1817990 - RNA, 19 nt, Artificial Sequence
  Description of Artificial Sequence: Synthetic oligonucleotide
  Antisense strand to SEQ ID NO: 1817989
agucacacugcaaaugguu

SEQ ID NO: 1817991 - RNA, 19 nt, Artificial Sequence
  Description of Artificial Sequence: Synthetic oligonucleotide
  Sense strand starting at position 3753 of SEQ ID NO: 1563540
uuaguuagccuggaaguua

SEQ ID NO: 1817992 - RNA, 19 nt, Artificial Sequence
  Description of Artificial Sequence: Synthetic oligonucleotide
  Antisense strand to SEQ ID NO: 1817991
uaacuuccaggcuaacuaa

SEQ ID NO: 1817993 - RNA, 19 nt, Artificial Sequence
  Description of Artificial Sequence: Synthetic oligonucleotide
  Sense strand starting at position 3809 of SEQ ID NO: 1563540
agaagaguguauucagggu

SEQ ID NO: 1817994 - RNA, 19 nt, Artificial Sequence
  Description of Artificial Sequence: Synthetic oligonucleotide
  Antisense strand to SEQ ID NO: 1817993
acccugaauacacucuucu

SEQ ID NO: 1817995 - RNA, 19 nt, Artificial Sequence
  Description of Artificial Sequence: Synthetic oligonucleotide
  Sense strand starting at position 3813 of SEQ ID NO: 1563540
gaguguauucaggguuaug

SEQ ID NO: 1817996 - RNA, 19 nt, Artificial Sequence
  Description of Artificial Sequence: Synthetic oligonucleotide
  Antisense strand to SEQ ID NO: 1817995
cauaacccugaauacacuc

SEQ ID NO: 1817997 - RNA, 19 nt, Artificial Sequence
  Description of Artificial Sequence: Synthetic oligonucleotide
  Sense strand starting at position 3816 of SEQ ID NO: 1563540
uguauucaggguuaugagu

SEQ ID NO: 1817998 - RNA, 19 nt, Artificial Sequence
  Description of Artificial Sequence: Synthetic oligonucleotide
  Antisense strand to SEQ ID NO: 1817997
acucauaacccugaauaca

SEQ ID NO: 1817999 - RNA, 19 nt, Artificial Sequence
  Description of Artificial Sequence: Synthetic oligonucleotide
  Sense strand starting at position 3829 of SEQ ID NO: 1563540
augaguauagcaggugaau

SEQ ID NO: 1818000 - RNA, 19 nt, Artificial Sequence
  Description of Artificial Sequence: Synthetic oligonucleotide
  Antisense strand to SEQ ID NO: 1817999
auucaccugcuauacucau

SEQ ID NO: 1818001 - RNA, 19 nt, Artificial Sequence
  Description of Artificial Sequence: Synthetic oligonucleotide
  Sense strand starting at position 3831 of SEQ ID NO: 1563540
gaguauagcaggugaauac

SEQ ID NO: 1818002 - RNA, 19 nt, Artificial Sequence
  Description of Artificial Sequence: Synthetic oligonucleotide
  Antisense strand to SEQ ID NO: 1818001
guauucaccugcuauacuc

SEQ ID NO: 1818003 - RNA, 19 nt, Artificial Sequence
  Description of Artificial Sequence: Synthetic oligonucleotide
  Sense strand starting at position 3921 of SEQ ID NO: 1563540
agcguacagaauuaaguua

SEQ ID NO: 1818004 - RNA, 19 nt, Artificial Sequence
  Description of Artificial Sequence: Synthetic oligonucleotide
  Antisense strand to SEQ ID NO: 1818003
uaacuuaauucuguacgcu

SEQ ID NO: 1818005 - RNA, 19 nt, Artificial Sequence
  Description of Artificial Sequence: Synthetic oligonucleotide
  Sense strand starting at position 226 of SEQ ID NO: 1563541
augagaugcuucuugagac

SEQ ID NO: 1818006 - RNA, 19 nt, Artificial Sequence
  Description of Artificial Sequence: Synthetic oligonucleotide
  Antisense strand to SEQ ID NO: 1818005
gucucaagaagcaucucau

SEQ ID NO: 1818007 - RNA, 19 nt, Artificial Sequence
  Description of Artificial Sequence: Synthetic oligonucleotide
  Sense strand starting at position 268 of SEQ ID NO: 1563541
gagaaauguggaugugucu

SEQ ID NO: 1818008 - RNA, 19 nt, Artificial Sequence
  Description of Artificial Sequence: Synthetic oligonucleotide
  Antisense strand to SEQ ID NO: 1818007
agacacauccacauuucuc

SEQ ID NO: 1818009 - RNA, 19 nt, Artificial Sequence
  Description of Artificial Sequence: Synthetic oligonucleotide
  Sense strand starting at position 271 of SEQ ID NO: 1563541
aaauguggaugugucuuaa

SEQ ID NO: 1818010 - RNA, 19 nt, Artificial Sequence
  Description of Artificial Sequence: Synthetic oligonucleotide
  Antisense strand to SEQ ID NO: 1818009
uuaagacacauccacauuu

SEQ ID NO: 1818011 - RNA, 19 nt, Artificial Sequence
  Description of Artificial Sequence: Synthetic oligonucleotide
  Sense strand starting at position 281 of SEQ ID NO: 1563541
gugucuuaaacccauuggu

SEQ ID NO: 1818012 - RNA, 19 nt, Artificial Sequence
  Description of Artificial Sequence: Synthetic oligonucleotide
  Antisense strand to SEQ ID NO: 1818011
accaauggguuuaagacac

SEQ ID NO: 1818013 - RNA, 19 nt, Artificial Sequence
  Description of Artificial Sequence: Synthetic oligonucleotide
  Sense strand starting at position 284 of SEQ ID NO: 1563541
ucuuaaacccauugguaga

SEQ ID NO: 1818014 - RNA, 19 nt, Artificial Sequence
  Description of Artificial Sequence: Synthetic oligonucleotide
  Antisense strand to SEQ ID NO: 1818013
ucuaccaauggguuuaaga

SEQ ID NO: 1818015 - RNA, 19 nt, Artificial Sequence
  Description of Artificial Sequence: Synthetic oligonucleotide
  Sense strand starting at position 351 of SEQ ID NO: 1563541
gggcgaugcccacaauaag

SEQ ID NO: 1818016 - RNA, 19 nt, Artificial Sequence
  Description of Artificial Sequence: Synthetic oligonucleotide
  Antisense strand to SEQ ID NO: 1818015
cuuauugugggcaucgccc

SEQ ID NO: 1818017 - RNA, 19 nt, Artificial Sequence
  Description of Artificial Sequence: Synthetic oligonucleotide
  Sense strand starting at position 481 of SEQ ID NO: 1563541
gguuaaaugacucauucgu

SEQ ID NO: 1818018 - RNA, 19 nt, Artificial Sequence
  Description of Artificial Sequence: Synthetic oligonucleotide
  Antisense strand to SEQ ID NO: 1818017
acgaaugagucauuuaacc

SEQ ID NO: 1818019 - RNA, 19 nt, Artificial Sequence
  Description of Artificial Sequence: Synthetic oligonucleotide
  Sense strand starting at position 483 of SEQ ID NO: 1563541
uuaaaugacucauucguga

SEQ ID NO: 1818020 - RNA, 19 nt, Artificial Sequence
  Description of Artificial Sequence: Synthetic oligonucleotide
  Antisense strand to SEQ ID NO: 1818019
ucacgaaugagucauuuaa

SEQ ID NO: 1818021 - RNA, 19 nt, Artificial Sequence
  Description of Artificial Sequence: Synthetic oligonucleotide
  Sense strand starting at position 486 of SEQ ID NO: 1563541
aaugacucauucgugauca

SEQ ID NO: 1818022 - RNA, 19 nt, Artificial Sequence
  Description of Artificial Sequence: Synthetic oligonucleotide
  Antisense strand to SEQ ID NO: 1818021
ugaucacgaaugagucauu

SEQ ID NO: 1818023 - RNA, 19 nt, Artificial Sequence
  Description of Artificial Sequence: Synthetic oligonucleotide
  Sense strand starting at position 488 of SEQ ID NO: 1563541
ugacucauucgugaucaua

SEQ ID NO: 1818024 - RNA, 19 nt, Artificial Sequence
  Description of Artificial Sequence: Synthetic oligonucleotide
  Antisense strand to SEQ ID NO: 1818023
uaugaucacgaaugaguca

SEQ ID NO: 1818025 - RNA, 19 nt, Artificial Sequence
  Description of Artificial Sequence: Synthetic oligonucleotide
  Sense strand starting at position 497 of SEQ ID NO: 1563541
cgugaucauagcuaguuag

SEQ ID NO: 1818026 - RNA, 19 nt, Artificial Sequence
  Description of Artificial Sequence: Synthetic oligonucleotide
  Antisense strand to SEQ ID NO: 1818025
cuaacuagcuaugaucacg

SEQ ID NO: 1818027 - RNA, 19 nt, Artificial Sequence
  Description of Artificial Sequence: Synthetic oligonucleotide
  Sense strand starting at position 500 of SEQ ID NO: 1563541
gaucauagcuaguuaguga

SEQ ID NO: 1818028 - RNA, 19 nt, Artificial Sequence
  Description of Artificial Sequence: Synthetic oligonucleotide
  Antisense strand to SEQ ID NO: 1818027
ucacuaacuagcuaugauc

SEQ ID NO: 1818029 - RNA, 19 nt, Artificial Sequence
  Description of Artificial Sequence: Synthetic oligonucleotide
  Sense strand starting at position 639 of SEQ ID NO: 1563541
ggucaauagaauugcugaa

SEQ ID NO: 1818030 - RNA, 19 nt, Artificial Sequence
  Description of Artificial Sequence: Synthetic oligonucleotide
  Antisense strand to SEQ ID NO: 1818029
uucagcaauucuauugacc

SEQ ID NO: 1818031 - RNA, 19 nt, Artificial Sequence
  Description of Artificial Sequence: Synthetic oligonucleotide
  Sense strand starting at position 641 of SEQ ID NO: 1563541
ucaauagaauugcugaagu

SEQ ID NO: 1818032 - RNA, 19 nt, Artificial Sequence
  Description of Artificial Sequence: Synthetic oligonucleotide
  Antisense strand to SEQ ID NO: 1818031
acuucagcaauucuauuga

SEQ ID NO: 1818033 - RNA, 19 nt, Artificial Sequence
  Description of Artificial Sequence: Synthetic oligonucleotide
  Sense strand starting at position 651 of SEQ ID NO: 1563541
ugcugaagucccuagcaau

SEQ ID NO: 1818034 - RNA, 19 nt, Artificial Sequence
  Description of Artificial Sequence: Synthetic oligonucleotide
  Antisense strand to SEQ ID NO: 1818033
auugcuagggacuucagca

SEQ ID NO: 1818035 - RNA, 19 nt, Artificial Sequence
  Description of Artificial Sequence: Synthetic oligonucleotide
  Sense strand starting at position 708 of SEQ ID NO: 1563541
accaguuuauuguuauagu

SEQ ID NO: 1818036 - RNA, 19 nt, Artificial Sequence
  Description of Artificial Sequence: Synthetic oligonucleotide
  Antisense strand to SEQ ID NO: 1818035
acuauaacaauaaacuggu

SEQ ID NO: 1818037 - RNA, 19 nt, Artificial Sequence
  Description of Artificial Sequence: Synthetic oligonucleotide
  Sense strand starting at position 874 of SEQ ID NO: 1563541
aggauuaucucuuucuuug

SEQ ID NO: 1818038 - RNA, 19 nt, Artificial Sequence
  Description of Artificial Sequence: Synthetic oligonucleotide
  Antisense strand to SEQ ID NO: 1818037
caaagaaagagauaauccu

SEQ ID NO: 1818039 - RNA, 19 nt, Artificial Sequence
  Description of Artificial Sequence: Synthetic oligonucleotide
  Sense strand starting at position 922 of SEQ ID NO: 1563541
ggcuaauuguacucucauc

SEQ ID NO: 1818040 - RNA, 19 nt, Artificial Sequence
  Description of Artificial Sequence: Synthetic oligonucleotide
  Antisense strand to SEQ ID NO: 1818039
gaugagaguacaauuagcc

SEQ ID NO: 1818041 - RNA, 19 nt, Artificial Sequence
  Description of Artificial Sequence: Synthetic oligonucleotide
  Sense strand starting at position 982 of SEQ ID NO: 1563541
uuggcucucuaccuaagau

SEQ ID NO: 1818042 - RNA, 19 nt, Artificial Sequence
  Description of Artificial Sequence: Synthetic oligonucleotide
  Antisense strand to SEQ ID NO: 1818041
aucuuagguagagagccaa

SEQ ID NO: 1818043 - RNA, 19 nt, Artificial Sequence
  Description of Artificial Sequence: Synthetic oligonucleotide
  Sense strand starting at position 1086 of SEQ ID NO: 1563541
acagacccucgaugacuua

SEQ ID NO: 1818044 - RNA, 19 nt, Artificial Sequence
  Description of Artificial Sequence: Synthetic oligonucleotide
  Antisense strand to SEQ ID NO: 1818043
uaagucaucgagggucugu

SEQ ID NO: 1818045 - RNA, 19 nt, Artificial Sequence
  Description of Artificial Sequence: Synthetic oligonucleotide
  Sense strand starting at position 1093 of SEQ ID NO: 1563541
cucgaugacuuauugacau

SEQ ID NO: 1818046 - RNA, 19 nt, Artificial Sequence
  Description of Artificial Sequence: Synthetic oligonucleotide
  Antisense strand to SEQ ID NO: 1818045
augucaauaagucaucgag

SEQ ID NO: 1818047 - RNA, 19 nt, Artificial Sequence
  Description of Artificial Sequence: Synthetic oligonucleotide
  Sense strand starting at position 1350 of SEQ ID NO: 1563541
uguuaaugccaggauuccu

SEQ ID NO: 1818048 - RNA, 19 nt, Artificial Sequence
  Description of Artificial Sequence: Synthetic oligonucleotide
  Antisense strand to SEQ ID NO: 1818047
aggaauccuggcauuaaca

SEQ ID NO: 1818049 - RNA, 19 nt, Artificial Sequence
  Description of Artificial Sequence: Synthetic oligonucleotide
  Sense strand starting at position 1439 of SEQ ID NO: 1563541
ucugacauucccuggugua

SEQ ID NO: 1818050 - RNA, 19 nt, Artificial Sequence
  Description of Artificial Sequence: Synthetic oligonucleotide
  Antisense strand to SEQ ID NO: 1818049
uacaccagggaaugucaga

SEQ ID NO: 1818051 - RNA, 19 nt, Artificial Sequence
  Description of Artificial Sequence: Synthetic oligonucleotide
  Sense strand starting at position 1440 of SEQ ID NO: 1563541
cugacauucccugguguaa

SEQ ID NO: 1818052 - RNA, 19 nt, Artificial Sequence
  Description of Artificial Sequence: Synthetic oligonucleotide
  Antisense strand to SEQ ID NO: 1818051
uuacaccagggaaugucag

SEQ ID NO: 1818053 - RNA, 19 nt, Artificial Sequence
  Description of Artificial Sequence: Synthetic oligonucleotide
  Sense strand starting at position 1444 of SEQ ID NO: 1563541
cauucccugguguaaguua

SEQ ID NO: 1818054 - RNA, 19 nt, Artificial Sequence
  Description of Artificial Sequence: Synthetic oligonucleotide
  Antisense strand to SEQ ID NO: 1818053
uaacuuacaccagggaaug

SEQ ID NO: 1818055 - RNA, 19 nt, Artificial Sequence
  Description of Artificial Sequence: Synthetic oligonucleotide
  Sense strand starting at position 1653 of SEQ ID NO: 1563541
cccaaaugagcucaaacgu

SEQ ID NO: 1818056 - RNA, 19 nt, Artificial Sequence
  Description of Artificial Sequence: Synthetic oligonucleotide
  Antisense strand to SEQ ID NO: 1818055
acguuugagcucauuuggg

SEQ ID NO: 1818057 - RNA, 19 nt, Artificial Sequence
  Description of Artificial Sequence: Synthetic oligonucleotide
  Sense strand starting at position 1666 of SEQ ID NO: 1563541
aaacgugcacuuuaaggaa

SEQ ID NO: 1818058 - RNA, 19 nt, Artificial Sequence
  Description of Artificial Sequence: Synthetic oligonucleotide
  Antisense strand to SEQ ID NO: 1818057
uuccuuaaagugcacguuu

SEQ ID NO: 1818059 - RNA, 19 nt, Artificial Sequence
  Description of Artificial Sequence: Synthetic oligonucleotide
  Sense strand starting at position 1682 of SEQ ID NO: 1563541
gaaggaagauugcuugcau

SEQ ID NO: 1818060 - RNA, 19 nt, Artificial Sequence
  Description of Artificial Sequence: Synthetic oligonucleotide
  Antisense strand to SEQ ID NO: 1818059
augcaagcaaucuuccuuc

SEQ ID NO: 1818061 - RNA, 19 nt, Artificial Sequence
  Description of Artificial Sequence: Synthetic oligonucleotide
  Sense strand starting at position 1683 of SEQ ID NO: 1563541
aaggaagauugcuugcaug

SEQ ID NO: 1818062 - RNA, 19 nt, Artificial Sequence
  Description of Artificial Sequence: Synthetic oligonucleotide
  Antisense strand to SEQ ID NO: 1818061
caugcaagcaaucuuccuu

SEQ ID NO: 1818063 - RNA, 19 nt, Artificial Sequence
  Description of Artificial Sequence: Synthetic oligonucleotide
  Sense strand starting at position 1779 of SEQ ID NO: 1563541
gcuggaucuccucaggguu

SEQ ID NO: 1818064 - RNA, 19 nt, Artificial Sequence
  Description of Artificial Sequence: Synthetic oligonucleotide
  Antisense strand to SEQ ID NO: 1818063
aacccugaggagauccagc

SEQ ID NO: 1818065 - RNA, 19 nt, Artificial Sequence
  Description of Artificial Sequence: Synthetic oligonucleotide
  Sense strand starting at position 1838 of SEQ ID NO: 1563541
ucuccugagccaugucaga

SEQ ID NO: 1818066 - RNA, 19 nt, Artificial Sequence
  Description of Artificial Sequence: Synthetic oligonucleotide
  Antisense strand to SEQ ID NO: 1818065
ucugacauggcucaggaga

SEQ ID NO: 1818067 - RNA, 19 nt, Artificial Sequence
  Description of Artificial Sequence: Synthetic oligonucleotide
  Sense strand starting at position 3038 of SEQ ID NO: 1563541
aucagcuuucaggaggagu

SEQ ID NO: 1818068 - RNA, 19 nt, Artificial Sequence
  Description of Artificial Sequence: Synthetic oligonucleotide
  Antisense strand to SEQ ID NO: 1818067
acuccuccugaaagcugau

SEQ ID NO: 1818069 - RNA, 19 nt, Artificial Sequence
  Description of Artificial Sequence: Synthetic oligonucleotide
  Sense strand starting at position 3049 of SEQ ID NO: 1563541
ggaggaguuugggccaaua

SEQ ID NO: 1818070 - RNA, 19 nt, Artificial Sequence
  Description of Artificial Sequence: Synthetic oligonucleotide
  Antisense strand to SEQ ID NO: 1818069
uauuggcccaaacuccucc

SEQ ID NO: 1818071 - RNA, 19 nt, Artificial Sequence
  Description of Artificial Sequence: Synthetic oligonucleotide
  Sense strand starting at position 3051 of SEQ ID NO: 1563541
aggaguuugggccaauauu

SEQ ID NO: 1818072 - RNA, 19 nt, Artificial Sequence
  Description of Artificial Sequence: Synthetic oligonucleotide
  Antisense strand to SEQ ID NO: 1818071
aauauuggcccaaacuccu

SEQ ID NO: 1818073 - RNA, 19 nt, Artificial Sequence
  Description of Artificial Sequence: Synthetic oligonucleotide
  Sense strand starting at position 3212 of SEQ ID NO: 1563541
cauccauucggaugcacua

SEQ ID NO: 1818074 - RNA, 19 nt, Artificial Sequence
  Description of Artificial Sequence: Synthetic oligonucleotide
  Antisense strand to SEQ ID NO: 1818073
uagugcauccgaauggaug

SEQ ID NO: 1818075 - RNA, 19 nt, Artificial Sequence
  Description of Artificial Sequence: Synthetic oligonucleotide
  Sense strand starting at position 3274 of SEQ ID NO: 1563541
agcgaauaucaugacaguu

SEQ ID NO: 1818076 - RNA, 19 nt, Artificial Sequence
  Description of Artificial Sequence: Synthetic oligonucleotide
  Antisense strand to SEQ ID NO: 1818075
aacugucaugauauucgcu

SEQ ID NO: 1818077 - RNA, 19 nt, Artificial Sequence
  Description of Artificial Sequence: Synthetic oligonucleotide
  Sense strand starting at position 3293 of SEQ ID NO: 1563541
cguauagcuaaugagaaac

SEQ ID NO: 1818078 - RNA, 19 nt, Artificial Sequence
  Description of Artificial Sequence: Synthetic oligonucleotide
  Antisense strand to SEQ ID NO: 1818077
guuucucauuagcuauacg

SEQ ID NO: 1818079 - RNA, 19 nt, Artificial Sequence
  Description of Artificial Sequence: Synthetic oligonucleotide
  Sense strand starting at position 3888 of SEQ ID NO: 1563541
aaagaaauuuacggagaca

SEQ ID NO: 1818080 - RNA, 19 nt, Artificial Sequence
  Description of Artificial Sequence: Synthetic oligonucleotide
  Antisense strand to SEQ ID NO: 1818079
ugucuccguaaauuucuuu

SEQ ID NO: 1818081 - RNA, 19 nt, Artificial Sequence
  Description of Artificial Sequence: Synthetic oligonucleotide
  Sense strand starting at position 3924 of SEQ ID NO: 1563541
gcagauuuauuagagaaua

SEQ ID NO: 1818082 - RNA, 19 nt, Artificial Sequence
  Description of Artificial Sequence: Synthetic oligonucleotide
  Antisense strand to SEQ ID NO: 1818081
uauucucuaauaaaucugc

SEQ ID NO: 1818083 - RNA, 19 nt, Artificial Sequence
  Description of Artificial Sequence: Synthetic oligonucleotide
  Sense strand starting at position 3982 of SEQ ID NO: 1563541
agaggagcugucugcaaag

SEQ ID NO: 1818084 - RNA, 19 nt, Artificial Sequence
  Description of Artificial Sequence: Synthetic oligonucleotide
  Antisense strand to SEQ ID NO: 1818083
cuuugcagacagcuccucu

SEQ ID NO: 1818085 - RNA, 19 nt, Artificial Sequence
  Description of Artificial Sequence: Synthetic oligonucleotide
  Sense strand starting at position 80 of SEQ ID NO: 1563542
aguguaguguuucuaaauc

SEQ ID NO: 1818086 - RNA, 19 nt, Artificial Sequence
  Description of Artificial Sequence: Synthetic oligonucleotide
  Antisense strand to SEQ ID NO: 1818085
gauuuagaaacacuacacu

SEQ ID NO: 1818087 - RNA, 19 nt, Artificial Sequence
  Description of Artificial Sequence: Synthetic oligonucleotide
  Sense strand starting at position 187 of SEQ ID NO: 1563542
uaguauauaucuguguaca

SEQ ID NO: 1818088 - RNA, 19 nt, Artificial Sequence
  Description of Artificial Sequence: Synthetic oligonucleotide
  Antisense strand to SEQ ID NO: 1818087
uguacacagauauauacua

SEQ ID NO: 1818089 - RNA, 19 nt, Artificial Sequence
  Description of Artificial Sequence: Synthetic oligonucleotide
  Sense strand starting at position 188 of SEQ ID NO: 1563542
aguauauaucuguguacau

SEQ ID NO: 1818090 - RNA, 19 nt, Artificial Sequence
  Description of Artificial Sequence: Synthetic oligonucleotide
  Antisense strand to SEQ ID NO: 1818089
auguacacagauauauacu

SEQ ID NO: 1818091 - RNA, 19 nt, Artificial Sequence
  Description of Artificial Sequence: Synthetic oligonucleotide
  Sense strand starting at position 189 of SEQ ID NO: 1563542
guauauaucuguguacaua

SEQ ID NO: 1818092 - RNA, 19 nt, Artificial Sequence
  Description of Artificial Sequence: Synthetic oligonucleotide
  Antisense strand to SEQ ID NO: 1818091
uauguacacagauauauac

SEQ ID NO: 1818093 - RNA, 19 nt, Artificial Sequence
  Description of Artificial Sequence: Synthetic oligonucleotide
  Sense strand starting at position 199 of SEQ ID NO: 1563542
guguacauacuguauguau

SEQ ID NO: 1818094 - RNA, 19 nt, Artificial Sequence
  Description of Artificial Sequence: Synthetic oligonucleotide
  Antisense strand to SEQ ID NO: 1818093
auacauacaguauguacac

SEQ ID NO: 1818095 - RNA, 19 nt, Artificial Sequence
  Description of Artificial Sequence: Synthetic oligonucleotide
  Sense strand starting at position 210 of SEQ ID NO: 1563542
guauguauaucugcgcuuu

SEQ ID NO: 1818096 - RNA, 19 nt, Artificial Sequence
  Description of Artificial Sequence: Synthetic oligonucleotide
  Antisense strand to SEQ ID NO: 1818095
aaagcgcagauauacauac

SEQ ID NO: 1818097 - RNA, 19 nt, Artificial Sequence
  Description of Artificial Sequence: Synthetic oligonucleotide
  Sense strand starting at position 212 of SEQ ID NO: 1563542
auguauaucugcgcuuuau

SEQ ID NO: 1818098 - RNA, 19 nt, Artificial Sequence
  Description of Artificial Sequence: Synthetic oligonucleotide
  Antisense strand to SEQ ID NO: 1818097
auaaagcgcagauauacau

SEQ ID NO: 1818099 - RNA, 19 nt, Artificial Sequence
  Description of Artificial Sequence: Synthetic oligonucleotide
  Sense strand starting at position 216 of SEQ ID NO: 1563542
auaucugcgcuuuauacau

SEQ ID NO: 1818100 - RNA, 19 nt, Artificial Sequence
  Description of Artificial Sequence: Synthetic oligonucleotide
  Antisense strand to SEQ ID NO: 1818099
auguauaaagcgcagauau

SEQ ID NO: 1818101 - RNA, 19 nt, Artificial Sequence
  Description of Artificial Sequence: Synthetic oligonucleotide
  Sense strand starting at position 294 of SEQ ID NO: 1563542
aguaucacccagugagaau

SEQ ID NO: 1818102 - RNA, 19 nt, Artificial Sequence
  Description of Artificial Sequence: Synthetic oligonucleotide
  Antisense strand to SEQ ID NO: 1818101
auucucacugggugauacu

SEQ ID NO: 1818103 - RNA, 19 nt, Artificial Sequence
  Description of Artificial Sequence: Synthetic oligonucleotide
  Sense strand starting at position 311 of SEQ ID NO: 1563542
auguguaauuuaggagauc

SEQ ID NO: 1818104 - RNA, 19 nt, Artificial Sequence
  Description of Artificial Sequence: Synthetic oligonucleotide
  Antisense strand to SEQ ID NO: 1818103
gaucuccuaaauuacacau

SEQ ID NO: 1818105 - RNA, 19 nt, Artificial Sequence
  Description of Artificial Sequence: Synthetic oligonucleotide
  Sense strand starting at position 312 of SEQ ID NO: 1563542
uguguaauuuaggagauca

SEQ ID NO: 1818106 - RNA, 19 nt, Artificial Sequence
  Description of Artificial Sequence: Synthetic oligonucleotide
  Antisense strand to SEQ ID NO: 1818105
ugaucuccuaaauuacaca

SEQ ID NO: 1818107 - RNA, 19 nt, Artificial Sequence
  Description of Artificial Sequence: Synthetic oligonucleotide
  Sense strand starting at position 1023 of SEQ ID NO: 1563542
agcuuauuugcuugacaac

SEQ ID NO: 1818108 - RNA, 19 nt, Artificial Sequence
  Description of Artificial Sequence: Synthetic oligonucleotide
  Antisense strand to SEQ ID NO: 1818107
guugucaagcaaauaagcu

SEQ ID NO: 1818109 - RNA, 19 nt, Artificial Sequence
  Description of Artificial Sequence: Synthetic oligonucleotide
  Sense strand starting at position 1103 of SEQ ID NO: 1563542
uauuacagucauggcagaa

SEQ ID NO: 1818110 - RNA, 19 nt, Artificial Sequence
  Description of Artificial Sequence: Synthetic oligonucleotide
  Antisense strand to SEQ ID NO: 1818109
uucugccaugacuguaaua

SEQ ID NO: 1818111 - RNA, 19 nt, Artificial Sequence
  Description of Artificial Sequence: Synthetic oligonucleotide
  Sense strand starting at position 1118 of SEQ ID NO: 1563542
agaagaucuggaggugagu

SEQ ID NO: 1818112 - RNA, 19 nt, Artificial Sequence
  Description of Artificial Sequence: Synthetic oligonucleotide
  Antisense strand to SEQ ID NO: 1818111
acucaccuccagaucuucu

SEQ ID NO: 1818113 - RNA, 19 nt, Artificial Sequence
  Description of Artificial Sequence: Synthetic oligonucleotide
  Sense strand starting at position 1140 of SEQ ID NO: 1563542
ggaggauacuaaguuucuu

SEQ ID NO: 1818114 - RNA, 19 nt, Artificial Sequence
  Description of Artificial Sequence: Synthetic oligonucleotide
  Antisense strand to SEQ ID NO: 1818113
aagaaacuuaguauccucc

SEQ ID NO: 1818115 - RNA, 19 nt, Artificial Sequence
  Description of Artificial Sequence: Synthetic oligonucleotide
  Sense strand starting at position 1171 of SEQ ID NO: 1563542
uaagaaauggguugaaguu

SEQ ID NO: 1818116 - RNA, 19 nt, Artificial Sequence
  Description of Artificial Sequence: Synthetic oligonucleotide
  Antisense strand to SEQ ID NO: 1818115
aacuucaacccauuucuua

SEQ ID NO: 1818117 - RNA, 19 nt, Artificial Sequence
  Description of Artificial Sequence: Synthetic oligonucleotide
  Sense strand starting at position 1221 of SEQ ID NO: 1563542
gcuacuuucggguccgagu

SEQ ID NO: 1818118 - RNA, 19 nt, Artificial Sequence
  Description of Artificial Sequence: Synthetic oligonucleotide
  Antisense strand to SEQ ID NO: 1818117
acucggacccgaaaguagc

SEQ ID NO: 1818119 - RNA, 19 nt, Artificial Sequence
  Description of Artificial Sequence: Synthetic oligonucleotide
  Sense strand starting at position 1346 of SEQ ID NO: 1563542
gugggaucuccggacacca

SEQ ID NO: 1818120 - RNA, 19 nt, Artificial Sequence
  Description of Artificial Sequence: Synthetic oligonucleotide
  Antisense strand to SEQ ID NO: 1818119
ugguguccggagaucccac

SEQ ID NO: 1818121 - RNA, 19 nt, Artificial Sequence
  Description of Artificial Sequence: Synthetic oligonucleotide
  Sense strand starting at position 1409 of SEQ ID NO: 1563542
ggaauucuauaggaaauca

SEQ ID NO: 1818122 - RNA, 19 nt, Artificial Sequence
  Description of Artificial Sequence: Synthetic oligonucleotide
  Antisense strand to SEQ ID NO: 1818121
ugauuuccuauagaauucc

SEQ ID NO: 1818123 - RNA, 19 nt, Artificial Sequence
  Description of Artificial Sequence: Synthetic oligonucleotide
  Sense strand starting at position 1420 of SEQ ID NO: 1563542
ggaaaucacuuucccgaac

SEQ ID NO: 1818124 - RNA, 19 nt, Artificial Sequence
  Description of Artificial Sequence: Synthetic oligonucleotide
  Antisense strand to SEQ ID NO: 1818123
guucgggaaagugauuucc

SEQ ID NO: 1818125 - RNA, 19 nt, Artificial Sequence
  Description of Artificial Sequence: Synthetic oligonucleotide
  Sense strand starting at position 2204 of SEQ ID NO: 1563542
ugguuuccuuaagcauuau

SEQ ID NO: 1818126 - RNA, 19 nt, Artificial Sequence
  Description of Artificial Sequence: Synthetic oligonucleotide
  Antisense strand to SEQ ID NO: 1818125
auaaugcuuaaggaaacca

SEQ ID NO: 1818127 - RNA, 19 nt, Artificial Sequence
  Description of Artificial Sequence: Synthetic oligonucleotide
  Sense strand starting at position 2484 of SEQ ID NO: 1563542
gagcucauuuggcaaacga

SEQ ID NO: 1818128 - RNA, 19 nt, Artificial Sequence
  Description of Artificial Sequence: Synthetic oligonucleotide
  Antisense strand to SEQ ID NO: 1818127
ucguuugccaaaugagcuc

SEQ ID NO: 1818129 - RNA, 19 nt, Artificial Sequence
  Description of Artificial Sequence: Synthetic oligonucleotide
  Sense strand starting at position 2948 of SEQ ID NO: 1563542
gaguuaaagcagugaggcu

SEQ ID NO: 1818130 - RNA, 19 nt, Artificial Sequence
  Description of Artificial Sequence: Synthetic oligonucleotide
  Antisense strand to SEQ ID NO: 1818129
agccucacugcuuuaacuc

SEQ ID NO: 1818131 - RNA, 19 nt, Artificial Sequence
  Description of Artificial Sequence: Synthetic oligonucleotide
  Sense strand starting at position 2987 of SEQ ID NO: 1563542
agaauuuaguaucaaugca

SEQ ID NO: 1818132 - RNA, 19 nt, Artificial Sequence
  Description of Artificial Sequence: Synthetic oligonucleotide
  Antisense strand to SEQ ID NO: 1818131
ugcauugauacuaaauucu

SEQ ID NO: 1818133 - RNA, 19 nt, Artificial Sequence
  Description of Artificial Sequence: Synthetic oligonucleotide
  Sense strand starting at position 3023 of SEQ ID NO: 1563542
cagguaguauuagaagcua

SEQ ID NO: 1818134 - RNA, 19 nt, Artificial Sequence
  Description of Artificial Sequence: Synthetic oligonucleotide
  Antisense strand to SEQ ID NO: 1818133
uagcuucuaauacuaccug

SEQ ID NO: 1818135 - RNA, 19 nt, Artificial Sequence
  Description of Artificial Sequence: Synthetic oligonucleotide
  Sense strand starting at position 3219 of SEQ ID NO: 1563542
ccuagugaaaugggaguua

SEQ ID NO: 1818136 - RNA, 19 nt, Artificial Sequence
  Description of Artificial Sequence: Synthetic oligonucleotide
  Antisense strand to SEQ ID NO: 1818135
uaacucccauuucacuagg

SEQ ID NO: 1818137 - RNA, 19 nt, Artificial Sequence
  Description of Artificial Sequence: Synthetic oligonucleotide
  Sense strand starting at position 3261 of SEQ ID NO: 1563542
gguauagcacuuuacggau

SEQ ID NO: 1818138 - RNA, 19 nt, Artificial Sequence
  Description of Artificial Sequence: Synthetic oligonucleotide
  Antisense strand to SEQ ID NO: 1818137
auccguaaagugcuauacc

SEQ ID NO: 1818139 - RNA, 19 nt, Artificial Sequence
  Description of Artificial Sequence: Synthetic oligonucleotide
  Sense strand starting at position 3267 of SEQ ID NO: 1563542
gcacuuuacggauaacauu

SEQ ID NO: 1818140 - RNA, 19 nt, Artificial Sequence
  Description of Artificial Sequence: Synthetic oligonucleotide
  Antisense strand to SEQ ID NO: 1818139
aauguuauccguaaagugc

SEQ ID NO: 1818141 - RNA, 19 nt, Artificial Sequence
  Description of Artificial Sequence: Synthetic oligonucleotide
  Sense strand starting at position 3594 of SEQ ID NO: 1563542
cauacuuaucuggauuggu

SEQ ID NO: 1818142 - RNA, 19 nt, Artificial Sequence
  Description of Artificial Sequence: Synthetic oligonucleotide
  Antisense strand to SEQ ID NO: 1818141
accaauccagauaaguaug

SEQ ID NO: 1818143 - RNA, 19 nt, Artificial Sequence
  Description of Artificial Sequence: Synthetic oligonucleotide
  Sense strand starting at position 3630 of SEQ ID NO: 1563542
ucagcuacccaguggugaa

SEQ ID NO: 1818144 - RNA, 19 nt, Artificial Sequence
  Description of Artificial Sequence: Synthetic oligonucleotide
  Antisense strand to SEQ ID NO: 1818143
uucaccacuggguagcuga

SEQ ID NO: 1818145 - RNA, 19 nt, Artificial Sequence
  Description of Artificial Sequence: Synthetic oligonucleotide
  Sense strand starting at position 3658 of SEQ ID NO: 1563542
augggacagucuugagaua

SEQ ID NO: 1818146 - RNA, 19 nt, Artificial Sequence
  Description of Artificial Sequence: Synthetic oligonucleotide
  Antisense strand to SEQ ID NO: 1818145
uaucucaagacugucccau

SEQ ID NO: 1818147 - RNA, 19 nt, Artificial Sequence
  Description of Artificial Sequence: Synthetic oligonucleotide
  Sense strand starting at position 3669 of SEQ ID NO: 1563542
uugagauaguucgugacaa

SEQ ID NO: 1818148 - RNA, 19 nt, Artificial Sequence
  Description of Artificial Sequence: Synthetic oligonucleotide
  Antisense strand to SEQ ID NO: 1818147
uugucacgaacuaucucaa

SEQ ID NO: 1818149 - RNA, 19 nt, Artificial Sequence
  Description of Artificial Sequence: Synthetic oligonucleotide
  Sense strand starting at position 3671 of SEQ ID NO: 1563542
gagauaguucgugacaagu

SEQ ID NO: 1818150 - RNA, 19 nt, Artificial Sequence
  Description of Artificial Sequence: Synthetic oligonucleotide
  Antisense strand to SEQ ID NO: 1818149
acuugucacgaacuaucuc

SEQ ID NO: 1818151 - RNA, 19 nt, Artificial Sequence
  Description of Artificial Sequence: Synthetic oligonucleotide
  Sense strand starting at position 3681 of SEQ ID NO: 1563542
gugacaaguuaugacaugu

SEQ ID NO: 1818152 - RNA, 19 nt, Artificial Sequence
  Description of Artificial Sequence: Synthetic oligonucleotide
  Antisense strand to SEQ ID NO: 1818151
acaugucauaacuugucac

SEQ ID NO: 1818153 - RNA, 19 nt, Artificial Sequence
  Description of Artificial Sequence: Synthetic oligonucleotide
  Sense strand starting at position 3687 of SEQ ID NO: 1563542
aguuaugacauguaaggua

SEQ ID NO: 1818154 - RNA, 19 nt, Artificial Sequence
  Description of Artificial Sequence: Synthetic oligonucleotide
  Antisense strand to SEQ ID NO: 1818153
uaccuuacaugucauaacu

SEQ ID NO: 1818155 - RNA, 19 nt, Artificial Sequence
  Description of Artificial Sequence: Synthetic oligonucleotide
  Sense strand starting at position 3690 of SEQ ID NO: 1563542
uaugacauguaagguaaua

SEQ ID NO: 1818156 - RNA, 19 nt, Artificial Sequence
  Description of Artificial Sequence: Synthetic oligonucleotide
  Antisense strand to SEQ ID NO: 1818155
uauuaccuuacaugucaua

SEQ ID NO: 1818157 - RNA, 19 nt, Artificial Sequence
  Description of Artificial Sequence: Synthetic oligonucleotide
  Sense strand starting at position 3752 of SEQ ID NO: 1563542
uugaguauauuaggcagaa

SEQ ID NO: 1818158 - RNA, 19 nt, Artificial Sequence
  Description of Artificial Sequence: Synthetic oligonucleotide
  Antisense strand to SEQ ID NO: 1818157
uucugccuaauauacucaa

SEQ ID NO: 1818159 - RNA, 19 nt, Artificial Sequence
  Description of Artificial Sequence: Synthetic oligonucleotide
  Sense strand starting at position 3753 of SEQ ID NO: 1563542
ugaguauauuaggcagaau

SEQ ID NO: 1818160 - RNA, 19 nt, Artificial Sequence
  Description of Artificial Sequence: Synthetic oligonucleotide
  Antisense strand to SEQ ID NO: 1818159
auucugccuaauauacuca

SEQ ID NO: 1818161 - RNA, 19 nt, Artificial Sequence
  Description of Artificial Sequence: Synthetic oligonucleotide
  Sense strand starting at position 3837 of SEQ ID NO: 1563542
guaauagcuaccguuuguu

SEQ ID NO: 1818162 - RNA, 19 nt, Artificial Sequence
  Description of Artificial Sequence: Synthetic oligonucleotide
  Antisense strand to SEQ ID NO: 1818161
aacaaacgguagcuauuac

SEQ ID NO: 1818163 - RNA, 19 nt, Artificial Sequence
  Description of Artificial Sequence: Synthetic oligonucleotide
  Sense strand starting at position 3893 of SEQ ID NO: 1563542
uuaaauaggugauugcauu

SEQ ID NO: 1818164 - RNA, 19 nt, Artificial Sequence
  Description of Artificial Sequence: Synthetic oligonucleotide
  Antisense strand to SEQ ID NO: 1818163
aaugcaaucaccuauuuaa

SEQ ID NO: 1818165 - RNA, 19 nt, Artificial Sequence
  Description of Artificial Sequence: Synthetic oligonucleotide
  Sense strand starting at position 157 of SEQ ID NO: 1563543
uccguaaauuucuuuagca

SEQ ID NO: 1818166 - RNA, 19 nt, Artificial Sequence
  Description of Artificial Sequence: Synthetic oligonucleotide
  Antisense strand to SEQ ID NO: 1818165
ugcuaaagaaauuuacgga

SEQ ID NO: 1818167 - RNA, 19 nt, Artificial Sequence
  Description of Artificial Sequence: Synthetic oligonucleotide
  Sense strand starting at position 158 of SEQ ID NO: 1563543
ccguaaauuucuuuagcac

SEQ ID NO: 1818168 - RNA, 19 nt, Artificial Sequence
  Description of Artificial Sequence: Synthetic oligonucleotide
  Antisense strand to SEQ ID NO: 1818167
gugcuaaagaaauuuacgg

SEQ ID NO: 1818169 - RNA, 19 nt, Artificial Sequence
  Description of Artificial Sequence: Synthetic oligonucleotide
  Sense strand starting at position 623 of SEQ ID NO: 1563543
gaggcaugauuguuaggga

SEQ ID NO: 1818170 - RNA, 19 nt, Artificial Sequence
  Description of Artificial Sequence: Synthetic oligonucleotide
  Antisense strand to SEQ ID NO: 1818169
ucccuaacaaucaugccuc

SEQ ID NO: 1818171 - RNA, 19 nt, Artificial Sequence
  Description of Artificial Sequence: Synthetic oligonucleotide
  Sense strand starting at position 719 of SEQ ID NO: 1563543
aucuaaaggugcuugcaaa

SEQ ID NO: 1818172 - RNA, 19 nt, Artificial Sequence
  Description of Artificial Sequence: Synthetic oligonucleotide
  Antisense strand to SEQ ID NO: 1818171
uuugcaagcaccuuuagau

SEQ ID NO: 1818173 - RNA, 19 nt, Artificial Sequence
  Description of Artificial Sequence: Synthetic oligonucleotide
  Sense strand starting at position 745 of SEQ ID NO: 1563543
ugaguuucucauuagcuau

SEQ ID NO: 1818174 - RNA, 19 nt, Artificial Sequence
  Description of Artificial Sequence: Synthetic oligonucleotide
  Antisense strand to SEQ ID NO: 1818173
auagcuaaugagaaacuca

SEQ ID NO: 1818175 - RNA, 19 nt, Artificial Sequence
  Description of Artificial Sequence: Synthetic oligonucleotide
  Sense strand starting at position 751 of SEQ ID NO: 1563543
ucucauuagcuauacgaac

SEQ ID NO: 1818176 - RNA, 19 nt, Artificial Sequence
  Description of Artificial Sequence: Synthetic oligonucleotide
  Antisense strand to SEQ ID NO: 1818175
guucguauagcuaaugaga

SEQ ID NO: 1818177 - RNA, 19 nt, Artificial Sequence
  Description of Artificial Sequence: Synthetic oligonucleotide
  Sense strand starting at position 764 of SEQ ID NO: 1563543
acgaacugucaugauauuc

SEQ ID NO: 1818178 - RNA, 19 nt, Artificial Sequence
  Description of Artificial Sequence: Synthetic oligonucleotide
  Antisense strand to SEQ ID NO: 1818177
gaauaucaugacaguucgu

SEQ ID NO: 1818179 - RNA, 19 nt, Artificial Sequence
  Description of Artificial Sequence: Synthetic oligonucleotide
  Sense strand starting at position 830 of SEQ ID NO: 1563543
agugcauccgaauggauga

SEQ ID NO: 1818180 - RNA, 19 nt, Artificial Sequence
  Description of Artificial Sequence: Synthetic oligonucleotide
  Antisense strand to SEQ ID NO: 1818179
ucauccauucggaugcacu

SEQ ID NO: 1818181 - RNA, 19 nt, Artificial Sequence
  Description of Artificial Sequence: Synthetic oligonucleotide
  Sense strand starting at position 923 of SEQ ID NO: 1563543
gaggucggagcguacaaau

SEQ ID NO: 1818182 - RNA, 19 nt, Artificial Sequence
  Description of Artificial Sequence: Synthetic oligonucleotide
  Antisense strand to SEQ ID NO: 1818181
auuuguacgcuccgaccuc

SEQ ID NO: 1818183 - RNA, 19 nt, Artificial Sequence
  Description of Artificial Sequence: Synthetic oligonucleotide
  Sense strand starting at position 985 of SEQ ID NO: 1563543
ccaugaauauuggcccaaa

SEQ ID NO: 1818184 - RNA, 19 nt, Artificial Sequence
  Description of Artificial Sequence: Synthetic oligonucleotide
  Antisense strand to SEQ ID NO: 1818183
uuugggccaauauucaugg

SEQ ID NO: 1818185 - RNA, 19 nt, Artificial Sequence
  Description of Artificial Sequence: Synthetic oligonucleotide
  Sense strand starting at position 996 of SEQ ID NO: 1563543
ggcccaaacuccuccugaa

SEQ ID NO: 1818186 - RNA, 19 nt, Artificial Sequence
  Description of Artificial Sequence: Synthetic oligonucleotide
  Antisense strand to SEQ ID NO: 1818185
uucaggaggaguuugggcc

SEQ ID NO: 1818187 - RNA, 19 nt, Artificial Sequence
  Description of Artificial Sequence: Synthetic oligonucleotide
  Sense strand starting at position 1077 of SEQ ID NO: 1563543
ggccaaugccaucgaggaa

SEQ ID NO: 1818188 - RNA, 19 nt, Artificial Sequence
  Description of Artificial Sequence: Synthetic oligonucleotide
  Antisense strand to SEQ ID NO: 1818187
uuccucgauggcauuggcc

SEQ ID NO: 1818189 - RNA, 19 nt, Artificial Sequence
  Description of Artificial Sequence: Synthetic oligonucleotide
  Sense strand starting at position 1619 of SEQ ID NO: 1563543
gguccucagccggaaagau

SEQ ID NO: 1818190 - RNA, 19 nt, Artificial Sequence
  Description of Artificial Sequence: Synthetic oligonucleotide
  Antisense strand to SEQ ID NO: 1818189
aucuuuccggcugaggacc

SEQ ID NO: 1818191 - RNA, 19 nt, Artificial Sequence
  Description of Artificial Sequence: Synthetic oligonucleotide
  Sense strand starting at position 1631 of SEQ ID NO: 1563543
gaaagauagcagcaugagu

SEQ ID NO: 1818192 - RNA, 19 nt, Artificial Sequence
  Description of Artificial Sequence: Synthetic oligonucleotide
  Antisense strand to SEQ ID NO: 1818191
acucaugcugcuaucuuuc

SEQ ID NO: 1818193 - RNA, 19 nt, Artificial Sequence
  Description of Artificial Sequence: Synthetic oligonucleotide
  Sense strand starting at position 2232 of SEQ ID NO: 1563543
ggaccuugagccugacaca

SEQ ID NO: 1818194 - RNA, 19 nt, Artificial Sequence
  Description of Artificial Sequence: Synthetic oligonucleotide
  Antisense strand to SEQ ID NO: 1818193
ugugucaggcucaaggucc

SEQ ID NO: 1818195 - RNA, 19 nt, Artificial Sequence
  Description of Artificial Sequence: Synthetic oligonucleotide
  Sense strand starting at position 2233 of SEQ ID NO: 1563543
gaccuugagccugacacau

SEQ ID NO: 1818196 - RNA, 19 nt, Artificial Sequence
  Description of Artificial Sequence: Synthetic oligonucleotide
  Antisense strand to SEQ ID NO: 1818195
augugucaggcucaagguc

SEQ ID NO: 1818197 - RNA, 19 nt, Artificial Sequence
  Description of Artificial Sequence: Synthetic oligonucleotide
  Sense strand starting at position 2468 of SEQ ID NO: 1563543
gugaaaguuuaaucuccaa

SEQ ID NO: 1818198 - RNA, 19 nt, Artificial Sequence
  Description of Artificial Sequence: Synthetic oligonucleotide
  Antisense strand to SEQ ID NO: 1818197
uuggagauuaaacuuucac

SEQ ID NO: 1818199 - RNA, 19 nt, Artificial Sequence
  Description of Artificial Sequence: Synthetic oligonucleotide
  Sense strand starting at position 2629 of SEQ ID NO: 1563543
ccuggaacuagaugugcaa

SEQ ID NO: 1818200 - RNA, 19 nt, Artificial Sequence
  Description of Artificial Sequence: Synthetic oligonucleotide
  Antisense strand to SEQ ID NO: 1818199
uugcacaucuaguuccagg

SEQ ID NO: 1818201 - RNA, 19 nt, Artificial Sequence
  Description of Artificial Sequence: Synthetic oligonucleotide
  Sense strand starting at position 2632 of SEQ ID NO: 1563543
ggaacuagaugugcaacuu

SEQ ID NO: 1818202 - RNA, 19 nt, Artificial Sequence
  Description of Artificial Sequence: Synthetic oligonucleotide
  Antisense strand to SEQ ID NO: 1818201
aaguugcacaucuaguucc

SEQ ID NO: 1818203 - RNA, 19 nt, Artificial Sequence
  Description of Artificial Sequence: Synthetic oligonucleotide
  Sense strand starting at position 2678 of SEQ ID NO: 1563543
cuaagcuuaguuuaggaau

SEQ ID NO: 1818204 - RNA, 19 nt, Artificial Sequence
  Description of Artificial Sequence: Synthetic oligonucleotide
  Antisense strand to SEQ ID NO: 1818203
auuccuaaacuaagcuuag

SEQ ID NO: 1818205 - RNA, 19 nt, Artificial Sequence
  Description of Artificial Sequence: Synthetic oligonucleotide
  Sense strand starting at position 2745 of SEQ ID NO: 1563543
acuuguaauuaagugguau

SEQ ID NO: 1818206 - RNA, 19 nt, Artificial Sequence
  Description of Artificial Sequence: Synthetic oligonucleotide
  Antisense strand to SEQ ID NO: 1818205
auaccacuuaauuacaagu

SEQ ID NO: 1818207 - RNA, 19 nt, Artificial Sequence
  Description of Artificial Sequence: Synthetic oligonucleotide
  Sense strand starting at position 2746 of SEQ ID NO: 1563543
cuuguaauuaagugguaug

SEQ ID NO: 1818208 - RNA, 19 nt, Artificial Sequence
  Description of Artificial Sequence: Synthetic oligonucleotide
  Antisense strand to SEQ ID NO: 1818207
cauaccacuuaauuacaag

SEQ ID NO: 1818209 - RNA, 19 nt, Artificial Sequence
  Description of Artificial Sequence: Synthetic oligonucleotide
  Sense strand starting at position 2772 of SEQ ID NO: 1563543
cguaguacgugauuuggau

SEQ ID NO: 1818210 - RNA, 19 nt, Artificial Sequence
  Description of Artificial Sequence: Synthetic oligonucleotide
  Antisense strand to SEQ ID NO: 1818209
auccaaaucacguacuacg

SEQ ID NO: 1818211 - RNA, 19 nt, Artificial Sequence
  Description of Artificial Sequence: Synthetic oligonucleotide
  Sense strand starting at position 2850 of SEQ ID NO: 1563543
aaggguggucuguagcuua

SEQ ID NO: 1818212 - RNA, 19 nt, Artificial Sequence
  Description of Artificial Sequence: Synthetic oligonucleotide
  Antisense strand to SEQ ID NO: 1818211
uaagcuacagaccacccuu

SEQ ID NO: 1818213 - RNA, 19 nt, Artificial Sequence
  Description of Artificial Sequence: Synthetic oligonucleotide
  Sense strand starting at position 2861 of SEQ ID NO: 1563543
guagcuuagggucagugaa

SEQ ID NO: 1818214 - RNA, 19 nt, Artificial Sequence
  Description of Artificial Sequence: Synthetic oligonucleotide
  Antisense strand to SEQ ID NO: 1818213
uucacugacccuaagcuac

SEQ ID NO: 1818215 - RNA, 19 nt, Artificial Sequence
  Description of Artificial Sequence: Synthetic oligonucleotide
  Sense strand starting at position 2951 of SEQ ID NO: 1563543
ucaauaagucaucgagggu

SEQ ID NO: 1818216 - RNA, 19 nt, Artificial Sequence
  Description of Artificial Sequence: Synthetic oligonucleotide
  Antisense strand to SEQ ID NO: 1818215
acccucgaugacuuauuga

SEQ ID NO: 1818217 - RNA, 19 nt, Artificial Sequence
  Description of Artificial Sequence: Synthetic oligonucleotide
  Sense strand starting at position 2986 of SEQ ID NO: 1563543
ucuuguaauagugaagguu

SEQ ID NO: 1818218 - RNA, 19 nt, Artificial Sequence
  Description of Artificial Sequence: Synthetic oligonucleotide
  Antisense strand to SEQ ID NO: 1818217
aaccuucacuauuacaaga

SEQ ID NO: 1818219 - RNA, 19 nt, Artificial Sequence
  Description of Artificial Sequence: Synthetic oligonucleotide
  Sense strand starting at position 3092 of SEQ ID NO: 1563543
uagaaauggcauuagucca

SEQ ID NO: 1818220 - RNA, 19 nt, Artificial Sequence
  Description of Artificial Sequence: Synthetic oligonucleotide
  Antisense strand to SEQ ID NO: 1818219
uggacuaaugccauuucua

SEQ ID NO: 1818221 - RNA, 19 nt, Artificial Sequence
  Description of Artificial Sequence: Synthetic oligonucleotide
  Sense strand starting at position 3173 of SEQ ID NO: 1563543
aagagauaauccuugcugu

SEQ ID NO: 1818222 - RNA, 19 nt, Artificial Sequence
  Description of Artificial Sequence: Synthetic oligonucleotide
  Antisense strand to SEQ ID NO: 1818221
acagcaaggauuaucucuu

SEQ ID NO: 1818223 - RNA, 19 nt, Artificial Sequence
  Description of Artificial Sequence: Synthetic oligonucleotide
  Sense strand starting at position 3174 of SEQ ID NO: 1563543
agagauaauccuugcuguu

SEQ ID NO: 1818224 - RNA, 19 nt, Artificial Sequence
  Description of Artificial Sequence: Synthetic oligonucleotide
  Antisense strand to SEQ ID NO: 1818223
aacagcaaggauuaucucu

SEQ ID NO: 1818225 - RNA, 19 nt, Artificial Sequence
  Description of Artificial Sequence: Synthetic oligonucleotide
  Sense strand starting at position 3176 of SEQ ID NO: 1563543
agauaauccuugcuguuga

SEQ ID NO: 1818226 - RNA, 19 nt, Artificial Sequence
  Description of Artificial Sequence: Synthetic oligonucleotide
  Antisense strand to SEQ ID NO: 1818225
ucaacagcaaggauuaucu

SEQ ID NO: 1818227 - RNA, 19 nt, Artificial Sequence
  Description of Artificial Sequence: Synthetic oligonucleotide
  Sense strand starting at position 3385 of SEQ ID NO: 1563543
aagcaauugcuagggacuu

SEQ ID NO: 1818228 - RNA, 19 nt, Artificial Sequence
  Description of Artificial Sequence: Synthetic oligonucleotide
  Antisense strand to SEQ ID NO: 1818227
aagucccuagcaauugcuu

SEQ ID NO: 1818229 - RNA, 19 nt, Artificial Sequence
  Description of Artificial Sequence: Synthetic oligonucleotide
  Sense strand starting at position 3547 of SEQ ID NO: 1563543
acuagcuaugaucacgaau

SEQ ID NO: 1818230 - RNA, 19 nt, Artificial Sequence
  Description of Artificial Sequence: Synthetic oligonucleotide
  Antisense strand to SEQ ID NO: 1818229
auucgugaucauagcuagu

SEQ ID NO: 1818231 - RNA, 19 nt, Artificial Sequence
  Description of Artificial Sequence: Synthetic oligonucleotide
  Sense strand starting at position 3553 of SEQ ID NO: 1563543
uaugaucacgaaugaguca

SEQ ID NO: 1818232 - RNA, 19 nt, Artificial Sequence
  Description of Artificial Sequence: Synthetic oligonucleotide
  Antisense strand to SEQ ID NO: 1818231
ugacucauucgugaucaua

SEQ ID NO: 1818233 - RNA, 19 nt, Artificial Sequence
  Description of Artificial Sequence: Synthetic oligonucleotide
  Sense strand starting at position 3614 of SEQ ID NO: 1563543
gcugaauuaggugaucuca

SEQ ID NO: 1818234 - RNA, 19 nt, Artificial Sequence
  Description of Artificial Sequence: Synthetic oligonucleotide
  Antisense strand to SEQ ID NO: 1818233
ugagaucaccuaauucagc

SEQ ID NO: 1818235 - RNA, 19 nt, Artificial Sequence
  Description of Artificial Sequence: Synthetic oligonucleotide
  Sense strand starting at position 3616 of SEQ ID NO: 1563543
ugaauuaggugaucucagu

SEQ ID NO: 1818236 - RNA, 19 nt, Artificial Sequence
  Description of Artificial Sequence: Synthetic oligonucleotide
  Antisense strand to SEQ ID NO: 1818235
acugagaucaccuaauuca

SEQ ID NO: 1818237 - RNA, 19 nt, Artificial Sequence
  Description of Artificial Sequence: Synthetic oligonucleotide
  Sense strand starting at position 3715 of SEQ ID NO: 1563543
aggcacugcagggauauua

SEQ ID NO: 1818238 - RNA, 19 nt, Artificial Sequence
  Description of Artificial Sequence: Synthetic oligonucleotide
  Antisense strand to SEQ ID NO: 1818237
uaauaucccugcagugccu

SEQ ID NO: 1818239 - RNA, 19 nt, Artificial Sequence
  Description of Artificial Sequence: Synthetic oligonucleotide
  Sense strand starting at position 3805 of SEQ ID NO: 1563543
caaaguaggugucucaaga

SEQ ID NO: 1818240 - RNA, 19 nt, Artificial Sequence
  Description of Artificial Sequence: Synthetic oligonucleotide
  Antisense strand to SEQ ID NO: 1818239
ucuugagacaccuacuuug

SEQ ID NO: 1818241 - RNA, 19 nt, Artificial Sequence
  Description of Artificial Sequence: Synthetic oligonucleotide
  Sense strand starting at position 3859 of SEQ ID NO: 1563543
aggagagagugauugcauu

SEQ ID NO: 1818242 - RNA, 19 nt, Artificial Sequence
  Description of Artificial Sequence: Synthetic oligonucleotide
  Antisense strand to SEQ ID NO: 1818241
aaugcaaucacucucuccu

SEQ ID NO: 1818243 - RNA, 19 nt, Artificial Sequence
  Description of Artificial Sequence: Synthetic oligonucleotide
  Sense strand starting at position 3878 of SEQ ID NO: 1563543
ccguuuguggauugaagag

SEQ ID NO: 1818244 - RNA, 19 nt, Artificial Sequence
  Description of Artificial Sequence: Synthetic oligonucleotide
  Antisense strand to SEQ ID NO: 1818243
cucuucaauccacaaacgg

SEQ ID NO: 1818245 - RNA, 19 nt, Artificial Sequence
  Description of Artificial Sequence: Synthetic oligonucleotide
  Sense strand starting at position 62 of SEQ ID NO: 1563544
aguguaguguuucuaaauc

SEQ ID NO: 1818246 - RNA, 19 nt, Artificial Sequence
  Description of Artificial Sequence: Synthetic oligonucleotide
  Antisense strand to SEQ ID NO: 1818245
gauuuagaaacacuacacu

SEQ ID NO: 1818247 - RNA, 19 nt, Artificial Sequence
  Description of Artificial Sequence: Synthetic oligonucleotide
  Sense strand starting at position 169 of SEQ ID NO: 1563544
uaguauauaucuguguaca

SEQ ID NO: 1818248 - RNA, 19 nt, Artificial Sequence
  Description of Artificial Sequence: Synthetic oligonucleotide
  Antisense strand to SEQ ID NO: 1818247
uguacacagauauauacua

SEQ ID NO: 1818249 - RNA, 19 nt, Artificial Sequence
  Description of Artificial Sequence: Synthetic oligonucleotide
  Sense strand starting at position 170 of SEQ ID NO: 1563544
aguauauaucuguguacau

SEQ ID NO: 1818250 - RNA, 19 nt, Artificial Sequence
  Description of Artificial Sequence: Synthetic oligonucleotide
  Antisense strand to SEQ ID NO: 1818249
auguacacagauauauacu

SEQ ID NO: 1818251 - RNA, 19 nt, Artificial Sequence
  Description of Artificial Sequence: Synthetic oligonucleotide
  Sense strand starting at position 171 of SEQ ID NO: 1563544
guauauaucuguguacaua

SEQ ID NO: 1818252 - RNA, 19 nt, Artificial Sequence
  Description of Artificial Sequence: Synthetic oligonucleotide
  Antisense strand to SEQ ID NO: 1818251
uauguacacagauauauac

SEQ ID NO: 1818253 - RNA, 19 nt, Artificial Sequence
  Description of Artificial Sequence: Synthetic oligonucleotide
  Sense strand starting at position 181 of SEQ ID NO: 1563544
guguacauacuguauguau

SEQ ID NO: 1818254 - RNA, 19 nt, Artificial Sequence
  Description of Artificial Sequence: Synthetic oligonucleotide
  Antisense strand to SEQ ID NO: 1818253
auacauacaguauguacac

SEQ ID NO: 1818255 - RNA, 19 nt, Artificial Sequence
  Description of Artificial Sequence: Synthetic oligonucleotide
  Sense strand starting at position 192 of SEQ ID NO: 1563544
guauguauaucugcgcuuu

SEQ ID NO: 1818256 - RNA, 19 nt, Artificial Sequence
  Description of Artificial Sequence: Synthetic oligonucleotide
  Antisense strand to SEQ ID NO: 1818255
aaagcgcagauauacauac

SEQ ID NO: 1818257 - RNA, 19 nt, Artificial Sequence
  Description of Artificial Sequence: Synthetic oligonucleotide
  Sense strand starting at position 194 of SEQ ID NO: 1563544
auguauaucugcgcuuuau

SEQ ID NO: 1818258 - RNA, 19 nt, Artificial Sequence
  Description of Artificial Sequence: Synthetic oligonucleotide
  Antisense strand to SEQ ID NO: 1818257
auaaagcgcagauauacau

SEQ ID NO: 1818259 - RNA, 19 nt, Artificial Sequence
  Description of Artificial Sequence: Synthetic oligonucleotide
  Sense strand starting at position 198 of SEQ ID NO: 1563544
auaucugcgcuuuauacau

SEQ ID NO: 1818260 - RNA, 19 nt, Artificial Sequence
  Description of Artificial Sequence: Synthetic oligonucleotide
  Antisense strand to SEQ ID NO: 1818259
auguauaaagcgcagauau

SEQ ID NO: 1818261 - RNA, 19 nt, Artificial Sequence
  Description of Artificial Sequence: Synthetic oligonucleotide
  Sense strand starting at position 276 of SEQ ID NO: 1563544
aguaucacccagugagaau

SEQ ID NO: 1818262 - RNA, 19 nt, Artificial Sequence
  Description of Artificial Sequence: Synthetic oligonucleotide
  Antisense strand to SEQ ID NO: 1818261
auucucacugggugauacu

SEQ ID NO: 1818263 - RNA, 19 nt, Artificial Sequence
  Description of Artificial Sequence: Synthetic oligonucleotide
  Sense strand starting at position 293 of SEQ ID NO: 1563544
auguguaauuuaggagauc

SEQ ID NO: 1818264 - RNA, 19 nt, Artificial Sequence
  Description of Artificial Sequence: Synthetic oligonucleotide
  Antisense strand to SEQ ID NO: 1818263
gaucuccuaaauuacacau

SEQ ID NO: 1818265 - RNA, 19 nt, Artificial Sequence
  Description of Artificial Sequence: Synthetic oligonucleotide
  Sense strand starting at position 294 of SEQ ID NO: 1563544
uguguaauuuaggagauca

SEQ ID NO: 1818266 - RNA, 19 nt, Artificial Sequence
  Description of Artificial Sequence: Synthetic oligonucleotide
  Antisense strand to SEQ ID NO: 1818265
ugaucuccuaaauuacaca

SEQ ID NO: 1818267 - RNA, 19 nt, Artificial Sequence
  Description of Artificial Sequence: Synthetic oligonucleotide
  Sense strand starting at position 1005 of SEQ ID NO: 1563544
agcuuauuugcuugacaac

SEQ ID NO: 1818268 - RNA, 19 nt, Artificial Sequence
  Description of Artificial Sequence: Synthetic oligonucleotide
  Antisense strand to SEQ ID NO: 1818267
guugucaagcaaauaagcu

SEQ ID NO: 1818269 - RNA, 19 nt, Artificial Sequence
  Description of Artificial Sequence: Synthetic oligonucleotide
  Sense strand starting at position 1085 of SEQ ID NO: 1563544
uauuacagucauggcagaa

SEQ ID NO: 1818270 - RNA, 19 nt, Artificial Sequence
  Description of Artificial Sequence: Synthetic oligonucleotide
  Antisense strand to SEQ ID NO: 1818269
uucugccaugacuguaaua

SEQ ID NO: 1818271 - RNA, 19 nt, Artificial Sequence
  Description of Artificial Sequence: Synthetic oligonucleotide
  Sense strand starting at position 1100 of SEQ ID NO: 1563544
agaagaucuggaggugagu

SEQ ID NO: 1818272 - RNA, 19 nt, Artificial Sequence
  Description of Artificial Sequence: Synthetic oligonucleotide
  Antisense strand to SEQ ID NO: 1818271
acucaccuccagaucuucu

SEQ ID NO: 1818273 - RNA, 19 nt, Artificial Sequence
  Description of Artificial Sequence: Synthetic oligonucleotide
  Sense strand starting at position 1122 of SEQ ID NO: 1563544
ggaggauacuaaguuucuu

SEQ ID NO: 1818274 - RNA, 19 nt, Artificial Sequence
  Description of Artificial Sequence: Synthetic oligonucleotide
  Antisense strand to SEQ ID NO: 1818273
aagaaacuuaguauccucc

SEQ ID NO: 1818275 - RNA, 19 nt, Artificial Sequence
  Description of Artificial Sequence: Synthetic oligonucleotide
  Sense strand starting at position 1153 of SEQ ID NO: 1563544
uaagaaauggguugaaguu

SEQ ID NO: 1818276 - RNA, 19 nt, Artificial Sequence
  Description of Artificial Sequence: Synthetic oligonucleotide
  Antisense strand to SEQ ID NO: 1818275
aacuucaacccauuucuua

SEQ ID NO: 1818277 - RNA, 19 nt, Artificial Sequence
  Description of Artificial Sequence: Synthetic oligonucleotide
  Sense strand starting at position 1203 of SEQ ID NO: 1563544
gcuacuuucggguccgagu

SEQ ID NO: 1818278 - RNA, 19 nt, Artificial Sequence
  Description of Artificial Sequence: Synthetic oligonucleotide
  Antisense strand to SEQ ID NO: 1818277
acucggacccgaaaguagc

SEQ ID NO: 1818279 - RNA, 19 nt, Artificial Sequence
  Description of Artificial Sequence: Synthetic oligonucleotide
  Sense strand starting at position 1328 of SEQ ID NO: 1563544
gugggaucuccggacacca

SEQ ID NO: 1818280 - RNA, 19 nt, Artificial Sequence
  Description of Artificial Sequence: Synthetic oligonucleotide
  Antisense strand to SEQ ID NO: 1818279
ugguguccggagaucccac

SEQ ID NO: 1818281 - RNA, 19 nt, Artificial Sequence
  Description of Artificial Sequence: Synthetic oligonucleotide
  Sense strand starting at position 1391 of SEQ ID NO: 1563544
ggaauucuauaggaaauca

SEQ ID NO: 1818282 - RNA, 19 nt, Artificial Sequence
  Description of Artificial Sequence: Synthetic oligonucleotide
  Antisense strand to SEQ ID NO: 1818281
ugauuuccuauagaauucc

SEQ ID NO: 1818283 - RNA, 19 nt, Artificial Sequence
  Description of Artificial Sequence: Synthetic oligonucleotide
  Sense strand starting at position 1402 of SEQ ID NO: 1563544
ggaaaucacuuucccgaac

SEQ ID NO: 1818284 - RNA, 19 nt, Artificial Sequence
  Description of Artificial Sequence: Synthetic oligonucleotide
  Antisense strand to SEQ ID NO: 1818283
guucgggaaagugauuucc

SEQ ID NO: 1818285 - RNA, 19 nt, Artificial Sequence
  Description of Artificial Sequence: Synthetic oligonucleotide
  Sense strand starting at position 2186 of SEQ ID NO: 1563544
ugguuuccuuaagcauuau

SEQ ID NO: 1818286 - RNA, 19 nt, Artificial Sequence
  Description of Artificial Sequence: Synthetic oligonucleotide
  Antisense strand to SEQ ID NO: 1818285
auaaugcuuaaggaaacca

SEQ ID NO: 1818287 - RNA, 19 nt, Artificial Sequence
  Description of Artificial Sequence: Synthetic oligonucleotide
  Sense strand starting at position 2466 of SEQ ID NO: 1563544
gagcucauuuggcaaacga

SEQ ID NO: 1818288 - RNA, 19 nt, Artificial Sequence
  Description of Artificial Sequence: Synthetic oligonucleotide
  Antisense strand to SEQ ID NO: 1818287
ucguuugccaaaugagcuc

SEQ ID NO: 1818289 - RNA, 19 nt, Artificial Sequence
  Description of Artificial Sequence: Synthetic oligonucleotide
  Sense strand starting at position 2930 of SEQ ID NO: 1563544
gaguuaaagcagugaggcu

SEQ ID NO: 1818290 - RNA, 19 nt, Artificial Sequence
  Description of Artificial Sequence: Synthetic oligonucleotide
  Antisense strand to SEQ ID NO: 1818289
agccucacugcuuuaacuc

SEQ ID NO: 1818291 - RNA, 19 nt, Artificial Sequence
  Description of Artificial Sequence: Synthetic oligonucleotide
  Sense strand starting at position 2969 of SEQ ID NO: 1563544
agaauuuaguaucaaugca

SEQ ID NO: 1818292 - RNA, 19 nt, Artificial Sequence
  Description of Artificial Sequence: Synthetic oligonucleotide
  Antisense strand to SEQ ID NO: 1818291
ugcauugauacuaaauucu

SEQ ID NO: 1818293 - RNA, 19 nt, Artificial Sequence
  Description of Artificial Sequence: Synthetic oligonucleotide
  Sense strand starting at position 3005 of SEQ ID NO: 1563544
cagguaguauuagaagcua

SEQ ID NO: 1818294 - RNA, 19 nt, Artificial Sequence
  Description of Artificial Sequence: Synthetic oligonucleotide
  Antisense strand to SEQ ID NO: 1818293
uagcuucuaauacuaccug

SEQ ID NO: 1818295 - RNA, 19 nt, Artificial Sequence
  Description of Artificial Sequence: Synthetic oligonucleotide
  Sense strand starting at position 3201 of SEQ ID NO: 1563544
ccuagugaaaugggaguua

SEQ ID NO: 1818296 - RNA, 19 nt, Artificial Sequence
  Description of Artificial Sequence: Synthetic oligonucleotide
  Antisense strand to SEQ ID NO: 1818295
uaacucccauuucacuagg

SEQ ID NO: 1818297 - RNA, 19 nt, Artificial Sequence
  Description of Artificial Sequence: Synthetic oligonucleotide
  Sense strand starting at position 3243 of SEQ ID NO: 1563544
gguauagcacuuuacggau

SEQ ID NO: 1818298 - RNA, 19 nt, Artificial Sequence
  Description of Artificial Sequence: Synthetic oligonucleotide
  Antisense strand to SEQ ID NO: 1818297
auccguaaagugcuauacc

SEQ ID NO: 1818299 - RNA, 19 nt, Artificial Sequence
  Description of Artificial Sequence: Synthetic oligonucleotide
  Sense strand starting at position 3249 of SEQ ID NO: 1563544
gcacuuuacggauaacauu

SEQ ID NO: 1818300 - RNA, 19 nt, Artificial Sequence
  Description of Artificial Sequence: Synthetic oligonucleotide
  Antisense strand to SEQ ID NO: 1818299
aauguuauccguaaagugc

SEQ ID NO: 1818301 - RNA, 19 nt, Artificial Sequence
  Description of Artificial Sequence: Synthetic oligonucleotide
  Sense strand starting at position 3576 of SEQ ID NO: 1563544
cauacuuaucuggauuggu

SEQ ID NO: 1818302 - RNA, 19 nt, Artificial Sequence
  Description of Artificial Sequence: Synthetic oligonucleotide
  Antisense strand to SEQ ID NO: 1818301
accaauccagauaaguaug

SEQ ID NO: 1818303 - RNA, 19 nt, Artificial Sequence
  Description of Artificial Sequence: Synthetic oligonucleotide
  Sense strand starting at position 3612 of SEQ ID NO: 1563544
ucagcuacccaguggugaa

SEQ ID NO: 1818304 - RNA, 19 nt, Artificial Sequence
  Description of Artificial Sequence: Synthetic oligonucleotide
  Antisense strand to SEQ ID NO: 1818303
uucaccacuggguagcuga

SEQ ID NO: 1818305 - RNA, 19 nt, Artificial Sequence
  Description of Artificial Sequence: Synthetic oligonucleotide
  Sense strand starting at position 3640 of SEQ ID NO: 1563544
augggacagucuugagaua

SEQ ID NO: 1818306 - RNA, 19 nt, Artificial Sequence
  Description of Artificial Sequence: Synthetic oligonucleotide
  Antisense strand to SEQ ID NO: 1818305
uaucucaagacugucccau

SEQ ID NO: 1818307 - RNA, 19 nt, Artificial Sequence
  Description of Artificial Sequence: Synthetic oligonucleotide
  Sense strand starting at position 3651 of SEQ ID NO: 1563544
uugagauaguucgugacaa

SEQ ID NO: 1818308 - RNA, 19 nt, Artificial Sequence
  Description of Artificial Sequence: Synthetic oligonucleotide
  Antisense strand to SEQ ID NO: 1818307
uugucacgaacuaucucaa

SEQ ID NO: 1818309 - RNA, 19 nt, Artificial Sequence
  Description of Artificial Sequence: Synthetic oligonucleotide
  Sense strand starting at position 3653 of SEQ ID NO: 1563544
gagauaguucgugacaagu

SEQ ID NO: 1818310 - RNA, 19 nt, Artificial Sequence
  Description of Artificial Sequence: Synthetic oligonucleotide
  Antisense strand to SEQ ID NO: 1818309
acuugucacgaacuaucuc

SEQ ID NO: 1818311 - RNA, 19 nt, Artificial Sequence
  Description of Artificial Sequence: Synthetic oligonucleotide
  Sense strand starting at position 3663 of SEQ ID NO: 1563544
gugacaaguuaugacaugu

SEQ ID NO: 1818312 - RNA, 19 nt, Artificial Sequence
  Description of Artificial Sequence: Synthetic oligonucleotide
  Antisense strand to SEQ ID NO: 1818311
acaugucauaacuugucac

SEQ ID NO: 1818313 - RNA, 19 nt, Artificial Sequence
  Description of Artificial Sequence: Synthetic oligonucleotide
  Sense strand starting at position 3669 of SEQ ID NO: 1563544
aguuaugacauguaaggua

SEQ ID NO: 1818314 - RNA, 19 nt, Artificial Sequence
  Description of Artificial Sequence: Synthetic oligonucleotide
  Antisense strand to SEQ ID NO: 1818313
uaccuuacaugucauaacu

SEQ ID NO: 1818315 - RNA, 19 nt, Artificial Sequence
  Description of Artificial Sequence: Synthetic oligonucleotide
  Sense strand starting at position 3672 of SEQ ID NO: 1563544
uaugacauguaagguaaua

SEQ ID NO: 1818316 - RNA, 19 nt, Artificial Sequence
  Description of Artificial Sequence: Synthetic oligonucleotide
  Antisense strand to SEQ ID NO: 1818315
uauuaccuuacaugucaua

SEQ ID NO: 1818317 - RNA, 19 nt, Artificial Sequence
  Description of Artificial Sequence: Synthetic oligonucleotide
  Sense strand starting at position 3734 of SEQ ID NO: 1563544
uugaguauauuaggcagaa

SEQ ID NO: 1818318 - RNA, 19 nt, Artificial Sequence
  Description of Artificial Sequence: Synthetic oligonucleotide
  Antisense strand to SEQ ID NO: 1818317
uucugccuaauauacucaa

SEQ ID NO: 1818319 - RNA, 19 nt, Artificial Sequence
  Description of Artificial Sequence: Synthetic oligonucleotide
  Sense strand starting at position 3735 of SEQ ID NO: 1563544
ugaguauauuaggcagaau

SEQ ID NO: 1818320 - RNA, 19 nt, Artificial Sequence
  Description of Artificial Sequence: Synthetic oligonucleotide
  Antisense strand to SEQ ID NO: 1818319
auucugccuaauauacuca

SEQ ID NO: 1818321 - RNA, 19 nt, Artificial Sequence
  Description of Artificial Sequence: Synthetic oligonucleotide
  Sense strand starting at position 3819 of SEQ ID NO: 1563544
guaauagcuaccguuuguu

SEQ ID NO: 1818322 - RNA, 19 nt, Artificial Sequence
  Description of Artificial Sequence: Synthetic oligonucleotide
  Antisense strand to SEQ ID NO: 1818321
aacaaacgguagcuauuac

SEQ ID NO: 1818323 - RNA, 19 nt, Artificial Sequence
  Description of Artificial Sequence: Synthetic oligonucleotide
  Sense strand starting at position 3875 of SEQ ID NO: 1563544
uuaaauaggugauugcauu

SEQ ID NO: 1818324 - RNA, 19 nt, Artificial Sequence
  Description of Artificial Sequence: Synthetic oligonucleotide
  Antisense strand to SEQ ID NO: 1818323
aaugcaaucaccuauuuaa

SEQ ID NO: 1818325 - RNA, 19 nt, Artificial Sequence
  Description of Artificial Sequence: Synthetic oligonucleotide
  Sense strand starting at position 60 of SEQ ID NO: 1563545
gagaguuguugacugagug

SEQ ID NO: 1818326 - RNA, 19 nt, Artificial Sequence
  Description of Artificial Sequence: Synthetic oligonucleotide
  Antisense strand to SEQ ID NO: 1818325
cacucagucaacaacucuc

SEQ ID NO: 1818327 - RNA, 19 nt, Artificial Sequence
  Description of Artificial Sequence: Synthetic oligonucleotide
  Sense strand starting at position 100 of SEQ ID NO: 1563545
ggauaaucuaucgggauau

SEQ ID NO: 1818328 - RNA, 19 nt, Artificial Sequence
  Description of Artificial Sequence: Synthetic oligonucleotide
  Antisense strand to SEQ ID NO: 1818327
auaucccgauagauuaucc

SEQ ID NO: 1818329 - RNA, 19 nt, Artificial Sequence
  Description of Artificial Sequence: Synthetic oligonucleotide
  Sense strand starting at position 174 of SEQ ID NO: 1563545
caaagauuagcaugcagag

SEQ ID NO: 1818330 - RNA, 19 nt, Artificial Sequence
  Description of Artificial Sequence: Synthetic oligonucleotide
  Antisense strand to SEQ ID NO: 1818329
cucugcaugcuaaucuuug

SEQ ID NO: 1818331 - RNA, 19 nt, Artificial Sequence
  Description of Artificial Sequence: Synthetic oligonucleotide
  Sense strand starting at position 180 of SEQ ID NO: 1563545
uuagcaugcagagauaugu

SEQ ID NO: 1818332 - RNA, 19 nt, Artificial Sequence
  Description of Artificial Sequence: Synthetic oligonucleotide
  Antisense strand to SEQ ID NO: 1818331
acauaucucugcaugcuaa

SEQ ID NO: 1818333 - RNA, 19 nt, Artificial Sequence
  Description of Artificial Sequence: Synthetic oligonucleotide
  Sense strand starting at position 232 of SEQ ID NO: 1563545
ggugguaauuguauugugu

SEQ ID NO: 1818334 - RNA, 19 nt, Artificial Sequence
  Description of Artificial Sequence: Synthetic oligonucleotide
  Antisense strand to SEQ ID NO: 1818333
acacaauacaauuaccacc

SEQ ID NO: 1818335 - RNA, 19 nt, Artificial Sequence
  Description of Artificial Sequence: Synthetic oligonucleotide
  Sense strand starting at position 268 of SEQ ID NO: 1563545
acaaguuuguaccuaaauu

SEQ ID NO: 1818336 - RNA, 19 nt, Artificial Sequence
  Description of Artificial Sequence: Synthetic oligonucleotide
  Antisense strand to SEQ ID NO: 1818335
aauuuagguacaaacuugu

SEQ ID NO: 1818337 - RNA, 19 nt, Artificial Sequence
  Description of Artificial Sequence: Synthetic oligonucleotide
  Sense strand starting at position 356 of SEQ ID NO: 1563545
ugaaguaucuaagccacuu

SEQ ID NO: 1818338 - RNA, 19 nt, Artificial Sequence
  Description of Artificial Sequence: Synthetic oligonucleotide
  Antisense strand to SEQ ID NO: 1818337
aaguggcuuagauacuuca

SEQ ID NO: 1818339 - RNA, 19 nt, Artificial Sequence
  Description of Artificial Sequence: Synthetic oligonucleotide
  Sense strand starting at position 372 of SEQ ID NO: 1563545
cuuagcugguucccugaua

SEQ ID NO: 1818340 - RNA, 19 nt, Artificial Sequence
  Description of Artificial Sequence: Synthetic oligonucleotide
  Antisense strand to SEQ ID NO: 1818339
uaucagggaaccagcuaag

SEQ ID NO: 1818341 - RNA, 19 nt, Artificial Sequence
  Description of Artificial Sequence: Synthetic oligonucleotide
  Sense strand starting at position 373 of SEQ ID NO: 1563545
uuagcugguucccugauaa

SEQ ID NO: 1818342 - RNA, 19 nt, Artificial Sequence
  Description of Artificial Sequence: Synthetic oligonucleotide
  Antisense strand to SEQ ID NO: 1818341
uuaucagggaaccagcuaa

SEQ ID NO: 1818343 - RNA, 19 nt, Artificial Sequence
  Description of Artificial Sequence: Synthetic oligonucleotide
  Sense strand starting at position 383 of SEQ ID NO: 1563545
cccugauaaugcguuaaau

SEQ ID NO: 1818344 - RNA, 19 nt, Artificial Sequence
  Description of Artificial Sequence: Synthetic oligonucleotide
  Antisense strand to SEQ ID NO: 1818343
auuuaacgcauuaucaggg

SEQ ID NO: 1818345 - RNA, 19 nt, Artificial Sequence
  Description of Artificial Sequence: Synthetic oligonucleotide
  Sense strand starting at position 385 of SEQ ID NO: 1563545
cugauaaugcguuaaauaa

SEQ ID NO: 1818346 - RNA, 19 nt, Artificial Sequence
  Description of Artificial Sequence: Synthetic oligonucleotide
  Antisense strand to SEQ ID NO: 1818345
uuauuuaacgcauuaucag

SEQ ID NO: 1818347 - RNA, 19 nt, Artificial Sequence
  Description of Artificial Sequence: Synthetic oligonucleotide
  Sense strand starting at position 408 of SEQ ID NO: 1563545
gugagagguguucaccaac

SEQ ID NO: 1818348 - RNA, 19 nt, Artificial Sequence
  Description of Artificial Sequence: Synthetic oligonucleotide
  Antisense strand to SEQ ID NO: 1818347
guuggugaacaccucucac

SEQ ID NO: 1818349 - RNA, 19 nt, Artificial Sequence
  Description of Artificial Sequence: Synthetic oligonucleotide
  Sense strand starting at position 422 of SEQ ID NO: 1563545
ccaacaaaugugugagaug

SEQ ID NO: 1818350 - RNA, 19 nt, Artificial Sequence
  Description of Artificial Sequence: Synthetic oligonucleotide
  Antisense strand to SEQ ID NO: 1818349
caucucacacauuuguugg

SEQ ID NO: 1818351 - RNA, 19 nt, Artificial Sequence
  Description of Artificial Sequence: Synthetic oligonucleotide
  Sense strand starting at position 434 of SEQ ID NO: 1563545
ugagauguauggcuuguaa

SEQ ID NO: 1818352 - RNA, 19 nt, Artificial Sequence
  Description of Artificial Sequence: Synthetic oligonucleotide
  Antisense strand to SEQ ID NO: 1818351
uuacaagccauacaucuca

SEQ ID NO: 1818353 - RNA, 19 nt, Artificial Sequence
  Description of Artificial Sequence: Synthetic oligonucleotide
  Sense strand starting at position 590 of SEQ ID NO: 1563545
caacauuaaucgucuggga

SEQ ID NO: 1818354 - RNA, 19 nt, Artificial Sequence
  Description of Artificial Sequence: Synthetic oligonucleotide
  Antisense strand to SEQ ID NO: 1818353
ucccagacgauuaauguug

SEQ ID NO: 1818355 - RNA, 19 nt, Artificial Sequence
  Description of Artificial Sequence: Synthetic oligonucleotide
  Sense strand starting at position 592 of SEQ ID NO: 1563545
acauuaaucgucugggauu

SEQ ID NO: 1818356 - RNA, 19 nt, Artificial Sequence
  Description of Artificial Sequence: Synthetic oligonucleotide
  Antisense strand to SEQ ID NO: 1818355
aaucccagacgauuaaugu

SEQ ID NO: 1818357 - RNA, 19 nt, Artificial Sequence
  Description of Artificial Sequence: Synthetic oligonucleotide
  Sense strand starting at position 604 of SEQ ID NO: 1563545
ugggauuggucacugguaa

SEQ ID NO: 1818358 - RNA, 19 nt, Artificial Sequence
  Description of Artificial Sequence: Synthetic oligonucleotide
  Antisense strand to SEQ ID NO: 1818357
uuaccagugaccaauccca

SEQ ID NO: 1818359 - RNA, 19 nt, Artificial Sequence
  Description of Artificial Sequence: Synthetic oligonucleotide
  Sense strand starting at position 605 of SEQ ID NO: 1563545
gggauuggucacugguaag

SEQ ID NO: 1818360 - RNA, 19 nt, Artificial Sequence
  Description of Artificial Sequence: Synthetic oligonucleotide
  Antisense strand to SEQ ID NO: 1818359
cuuaccagugaccaauccc

SEQ ID NO: 1818361 - RNA, 19 nt, Artificial Sequence
  Description of Artificial Sequence: Synthetic oligonucleotide
  Sense strand starting at position 644 of SEQ ID NO: 1563545
acaggacucugugucaaca

SEQ ID NO: 1818362 - RNA, 19 nt, Artificial Sequence
  Description of Artificial Sequence: Synthetic oligonucleotide
  Antisense strand to SEQ ID NO: 1818361
uguugacacagaguccugu

SEQ ID NO: 1818363 - RNA, 19 nt, Artificial Sequence
  Description of Artificial Sequence: Synthetic oligonucleotide
  Sense strand starting at position 1993 of SEQ ID NO: 1563545
ggaaaugcguguccacgaa

SEQ ID NO: 1818364 - RNA, 19 nt, Artificial Sequence
  Description of Artificial Sequence: Synthetic oligonucleotide
  Antisense strand to SEQ ID NO: 1818363
uucguggacacgcauuucc

SEQ ID NO: 1818365 - RNA, 19 nt, Artificial Sequence
  Description of Artificial Sequence: Synthetic oligonucleotide
  Sense strand starting at position 2179 of SEQ ID NO: 1563545
ggcuaaaguuuccugaggu

SEQ ID NO: 1818366 - RNA, 19 nt, Artificial Sequence
  Description of Artificial Sequence: Synthetic oligonucleotide
  Antisense strand to SEQ ID NO: 1818365
accucaggaaacuuuagcc

SEQ ID NO: 1818367 - RNA, 19 nt, Artificial Sequence
  Description of Artificial Sequence: Synthetic oligonucleotide
  Sense strand starting at position 2281 of SEQ ID NO: 1563545
gcccuacguaguucuggua

SEQ ID NO: 1818368 - RNA, 19 nt, Artificial Sequence
  Description of Artificial Sequence: Synthetic oligonucleotide
  Antisense strand to SEQ ID NO: 1818367
uaccagaacuacguagggc

SEQ ID NO: 1818369 - RNA, 19 nt, Artificial Sequence
  Description of Artificial Sequence: Synthetic oligonucleotide
  Sense strand starting at position 2387 of SEQ ID NO: 1563545
guaugagguucugugaaca

SEQ ID NO: 1818370 - RNA, 19 nt, Artificial Sequence
  Description of Artificial Sequence: Synthetic oligonucleotide
  Antisense strand to SEQ ID NO: 1818369
uguucacagaaccucauac

SEQ ID NO: 1818371 - RNA, 19 nt, Artificial Sequence
  Description of Artificial Sequence: Synthetic oligonucleotide
  Sense strand starting at position 2436 of SEQ ID NO: 1563545
ccagauuauuggcucccua

SEQ ID NO: 1818372 - RNA, 19 nt, Artificial Sequence
  Description of Artificial Sequence: Synthetic oligonucleotide
  Antisense strand to SEQ ID NO: 1818371
uagggagccaauaaucugg

SEQ ID NO: 1818373 - RNA, 19 nt, Artificial Sequence
  Description of Artificial Sequence: Synthetic oligonucleotide
  Sense strand starting at position 2518 of SEQ ID NO: 1563545
agaguaaugcaccacgcuu

SEQ ID NO: 1818374 - RNA, 19 nt, Artificial Sequence
  Description of Artificial Sequence: Synthetic oligonucleotide
  Antisense strand to SEQ ID NO: 1818373
aagcguggugcauuacucu

SEQ ID NO: 1818375 - RNA, 19 nt, Artificial Sequence
  Description of Artificial Sequence: Synthetic oligonucleotide
  Sense strand starting at position 2708 of SEQ ID NO: 1563545
accauuaugugaucauuau

SEQ ID NO: 1818376 - RNA, 19 nt, Artificial Sequence
  Description of Artificial Sequence: Synthetic oligonucleotide
  Antisense strand to SEQ ID NO: 1818375
auaaugaucacauaauggu

SEQ ID NO: 1818377 - RNA, 19 nt, Artificial Sequence
  Description of Artificial Sequence: Synthetic oligonucleotide
  Sense strand starting at position 2709 of SEQ ID NO: 1563545
ccauuaugugaucauuaug

SEQ ID NO: 1818378 - RNA, 19 nt, Artificial Sequence
  Description of Artificial Sequence: Synthetic oligonucleotide
  Antisense strand to SEQ ID NO: 1818377
cauaaugaucacauaaugg

SEQ ID NO: 1818379 - RNA, 19 nt, Artificial Sequence
  Description of Artificial Sequence: Synthetic oligonucleotide
  Sense strand starting at position 2712 of SEQ ID NO: 1563545
uuaugugaucauuaugcau

SEQ ID NO: 1818380 - RNA, 19 nt, Artificial Sequence
  Description of Artificial Sequence: Synthetic oligonucleotide
  Antisense strand to SEQ ID NO: 1818379
augcauaaugaucacauaa

SEQ ID NO: 1818381 - RNA, 19 nt, Artificial Sequence
  Description of Artificial Sequence: Synthetic oligonucleotide
  Sense strand starting at position 2821 of SEQ ID NO: 1563545
auaauauaccacgagcagu

SEQ ID NO: 1818382 - RNA, 19 nt, Artificial Sequence
  Description of Artificial Sequence: Synthetic oligonucleotide
  Antisense strand to SEQ ID NO: 1818381
acugcucgugguauauuau

SEQ ID NO: 1818383 - RNA, 19 nt, Artificial Sequence
  Description of Artificial Sequence: Synthetic oligonucleotide
  Sense strand starting at position 2969 of SEQ ID NO: 1563545
gagaaugugucuccuugaa

SEQ ID NO: 1818384 - RNA, 19 nt, Artificial Sequence
  Description of Artificial Sequence: Synthetic oligonucleotide
  Antisense strand to SEQ ID NO: 1818383
uucaaggagacacauucuc

SEQ ID NO: 1818385 - RNA, 19 nt, Artificial Sequence
  Description of Artificial Sequence: Synthetic oligonucleotide
  Sense strand starting at position 2971 of SEQ ID NO: 1563545
gaaugugucuccuugaaag

SEQ ID NO: 1818386 - RNA, 19 nt, Artificial Sequence
  Description of Artificial Sequence: Synthetic oligonucleotide
  Antisense strand to SEQ ID NO: 1818385
cuuucaaggagacacauuc

SEQ ID NO: 1818387 - RNA, 19 nt, Artificial Sequence
  Description of Artificial Sequence: Synthetic oligonucleotide
  Sense strand starting at position 2973 of SEQ ID NO: 1563545
augugucuccuugaaagau

SEQ ID NO: 1818388 - RNA, 19 nt, Artificial Sequence
  Description of Artificial Sequence: Synthetic oligonucleotide
  Antisense strand to SEQ ID NO: 1818387
aucuuucaaggagacacau

SEQ ID NO: 1818389 - RNA, 19 nt, Artificial Sequence
  Description of Artificial Sequence: Synthetic oligonucleotide
  Sense strand starting at position 3027 of SEQ ID NO: 1563545
gugggaggguuucuuguca

SEQ ID NO: 1818390 - RNA, 19 nt, Artificial Sequence
  Description of Artificial Sequence: Synthetic oligonucleotide
  Antisense strand to SEQ ID NO: 1818389
ugacaagaaacccucccac

SEQ ID NO: 1818391 - RNA, 19 nt, Artificial Sequence
  Description of Artificial Sequence: Synthetic oligonucleotide
  Sense strand starting at position 3031 of SEQ ID NO: 1563545
gaggguuucuugucaggug

SEQ ID NO: 1818392 - RNA, 19 nt, Artificial Sequence
  Description of Artificial Sequence: Synthetic oligonucleotide
  Antisense strand to SEQ ID NO: 1818391
caccugacaagaaacccuc

SEQ ID NO: 1818393 - RNA, 19 nt, Artificial Sequence
  Description of Artificial Sequence: Synthetic oligonucleotide
  Sense strand starting at position 3265 of SEQ ID NO: 1563545
gucucugugccauaauuaa

SEQ ID NO: 1818394 - RNA, 19 nt, Artificial Sequence
  Description of Artificial Sequence: Synthetic oligonucleotide
  Antisense strand to SEQ ID NO: 1818393
uuaauuauggcacagagac

SEQ ID NO: 1818395 - RNA, 19 nt, Artificial Sequence
  Description of Artificial Sequence: Synthetic oligonucleotide
  Sense strand starting at position 3320 of SEQ ID NO: 1563545
ugcaaacaucuuggugcau

SEQ ID NO: 1818396 - RNA, 19 nt, Artificial Sequence
  Description of Artificial Sequence: Synthetic oligonucleotide
  Antisense strand to SEQ ID NO: 1818395
augcaccaagauguuugca

SEQ ID NO: 1818397 - RNA, 19 nt, Artificial Sequence
  Description of Artificial Sequence: Synthetic oligonucleotide
  Sense strand starting at position 3321 of SEQ ID NO: 1563545
gcaaacaucuuggugcauu

SEQ ID NO: 1818398 - RNA, 19 nt, Artificial Sequence
  Description of Artificial Sequence: Synthetic oligonucleotide
  Antisense strand to SEQ ID NO: 1818397
aaugcaccaagauguuugc

SEQ ID NO: 1818399 - RNA, 19 nt, Artificial Sequence
  Description of Artificial Sequence: Synthetic oligonucleotide
  Sense strand starting at position 3409 of SEQ ID NO: 1563545
ggaacauaugaucggguuu

SEQ ID NO: 1818400 - RNA, 19 nt, Artificial Sequence
  Description of Artificial Sequence: Synthetic oligonucleotide
  Antisense strand to SEQ ID NO: 1818399
aaacccgaucauauguucc

SEQ ID NO: 1818401 - RNA, 19 nt, Artificial Sequence
  Description of Artificial Sequence: Synthetic oligonucleotide
  Sense strand starting at position 3669 of SEQ ID NO: 1563545
ccuauugugucccugggua

SEQ ID NO: 1818402 - RNA, 19 nt, Artificial Sequence
  Description of Artificial Sequence: Synthetic oligonucleotide
  Antisense strand to SEQ ID NO: 1818401
uacccagggacacaauagg

SEQ ID NO: 1818403 - RNA, 19 nt, Artificial Sequence
  Description of Artificial Sequence: Synthetic oligonucleotide
  Sense strand starting at position 3974 of SEQ ID NO: 1563545
uaacguaaucaugggaguu

SEQ ID NO: 1818404 - RNA, 19 nt, Artificial Sequence
  Description of Artificial Sequence: Synthetic oligonucleotide
  Antisense strand to SEQ ID NO: 1818403
aacucccaugauuacguua

SEQ ID NO: 1818405 - RNA, 19 nt, Artificial Sequence
  Description of Artificial Sequence: Synthetic oligonucleotide
  Sense strand starting at position 16 of SEQ ID NO: 1563546
uguuuauagcacuauagau

SEQ ID NO: 1818406 - RNA, 19 nt, Artificial Sequence
  Description of Artificial Sequence: Synthetic oligonucleotide
  Antisense strand to SEQ ID NO: 1818405
aucuauagugcuauaaaca

SEQ ID NO: 1818407 - RNA, 19 nt, Artificial Sequence
  Description of Artificial Sequence: Synthetic oligonucleotide
  Sense strand starting at position 78 of SEQ ID NO: 1563546
uuauucugcucauuagaga

SEQ ID NO: 1818408 - RNA, 19 nt, Artificial Sequence
  Description of Artificial Sequence: Synthetic oligonucleotide
  Antisense strand to SEQ ID NO: 1818407
ucucuaaugagcagaauaa

SEQ ID NO: 1818409 - RNA, 19 nt, Artificial Sequence
  Description of Artificial Sequence: Synthetic oligonucleotide
  Sense strand starting at position 329 of SEQ ID NO: 1563546
auuaaugaaucucugguua

SEQ ID NO: 1818410 - RNA, 19 nt, Artificial Sequence
  Description of Artificial Sequence: Synthetic oligonucleotide
  Antisense strand to SEQ ID NO: 1818409
uaaccagagauucauuaau

SEQ ID NO: 1818411 - RNA, 19 nt, Artificial Sequence
  Description of Artificial Sequence: Synthetic oligonucleotide
  Sense strand starting at position 333 of SEQ ID NO: 1563546
augaaucucugguuaaaua

SEQ ID NO: 1818412 - RNA, 19 nt, Artificial Sequence
  Description of Artificial Sequence: Synthetic oligonucleotide
  Antisense strand to SEQ ID NO: 1818411
uauuuaaccagagauucau

SEQ ID NO: 1818413 - RNA, 19 nt, Artificial Sequence
  Description of Artificial Sequence: Synthetic oligonucleotide
  Sense strand starting at position 372 of SEQ ID NO: 1563546
aaacaaauguaugggauuu

SEQ ID NO: 1818414 - RNA, 19 nt, Artificial Sequence
  Description of Artificial Sequence: Synthetic oligonucleotide
  Antisense strand to SEQ ID NO: 1818413
aaaucccauacauuuguuu

SEQ ID NO: 1818415 - RNA, 19 nt, Artificial Sequence
  Description of Artificial Sequence: Synthetic oligonucleotide
  Sense strand starting at position 385 of SEQ ID NO: 1563546
ggauuucugguauguagca

SEQ ID NO: 1818416 - RNA, 19 nt, Artificial Sequence
  Description of Artificial Sequence: Synthetic oligonucleotide
  Antisense strand to SEQ ID NO: 1818415
ugcuacauaccagaaaucc

SEQ ID NO: 1818417 - RNA, 19 nt, Artificial Sequence
  Description of Artificial Sequence: Synthetic oligonucleotide
  Sense strand starting at position 398 of SEQ ID NO: 1563546
guagcaauuugagauuugu

SEQ ID NO: 1818418 - RNA, 19 nt, Artificial Sequence
  Description of Artificial Sequence: Synthetic oligonucleotide
  Antisense strand to SEQ ID NO: 1818417
acaaaucucaaauugcuac

SEQ ID NO: 1818419 - RNA, 19 nt, Artificial Sequence
  Description of Artificial Sequence: Synthetic oligonucleotide
  Sense strand starting at position 499 of SEQ ID NO: 1563546
agaucaaugucugccucaa

SEQ ID NO: 1818420 - RNA, 19 nt, Artificial Sequence
  Description of Artificial Sequence: Synthetic oligonucleotide
  Antisense strand to SEQ ID NO: 1818419
uugaggcagacauugaucu

SEQ ID NO: 1818421 - RNA, 19 nt, Artificial Sequence
  Description of Artificial Sequence: Synthetic oligonucleotide
  Sense strand starting at position 535 of SEQ ID NO: 1563546
gugguuuagaagggucauc

SEQ ID NO: 1818422 - RNA, 19 nt, Artificial Sequence
  Description of Artificial Sequence: Synthetic oligonucleotide
  Antisense strand to SEQ ID NO: 1818421
gaugacccuucuaaaccac

SEQ ID NO: 1818423 - RNA, 19 nt, Artificial Sequence
  Description of Artificial Sequence: Synthetic oligonucleotide
  Sense strand starting at position 561 of SEQ ID NO: 1563546
auuagaugguugccgauaa

SEQ ID NO: 1818424 - RNA, 19 nt, Artificial Sequence
  Description of Artificial Sequence: Synthetic oligonucleotide
  Antisense strand to SEQ ID NO: 1818423
uuaucggcaaccaucuaau

SEQ ID NO: 1818425 - RNA, 19 nt, Artificial Sequence
  Description of Artificial Sequence: Synthetic oligonucleotide
  Sense strand starting at position 565 of SEQ ID NO: 1563546
gaugguugccgauaagauc

SEQ ID NO: 1818426 - RNA, 19 nt, Artificial Sequence
  Description of Artificial Sequence: Synthetic oligonucleotide
  Antisense strand to SEQ ID NO: 1818425
gaucuuaucggcaaccauc

SEQ ID NO: 1818427 - RNA, 19 nt, Artificial Sequence
  Description of Artificial Sequence: Synthetic oligonucleotide
  Sense strand starting at position 574 of SEQ ID NO: 1563546
cgauaagaucuccaucccu

SEQ ID NO: 1818428 - RNA, 19 nt, Artificial Sequence
  Description of Artificial Sequence: Synthetic oligonucleotide
  Antisense strand to SEQ ID NO: 1818427
agggauggagaucuuaucg

SEQ ID NO: 1818429 - RNA, 19 nt, Artificial Sequence
  Description of Artificial Sequence: Synthetic oligonucleotide
  Sense strand starting at position 623 of SEQ ID NO: 1563546
uuuauaaugcaagagucaa

SEQ ID NO: 1818430 - RNA, 19 nt, Artificial Sequence
  Description of Artificial Sequence: Synthetic oligonucleotide
  Antisense strand to SEQ ID NO: 1818429
uugacucuugcauuauaaa

SEQ ID NO: 1818431 - RNA, 19 nt, Artificial Sequence
  Description of Artificial Sequence: Synthetic oligonucleotide
  Sense strand starting at position 650 of SEQ ID NO: 1563546
guaguaugacagggcacau

SEQ ID NO: 1818432 - RNA, 19 nt, Artificial Sequence
  Description of Artificial Sequence: Synthetic oligonucleotide
  Antisense strand to SEQ ID NO: 1818431
augugcccugucauacuac

SEQ ID NO: 1818433 - RNA, 19 nt, Artificial Sequence
  Description of Artificial Sequence: Synthetic oligonucleotide
  Sense strand starting at position 747 of SEQ ID NO: 1563546
uuuaauagugucugacauu

SEQ ID NO: 1818434 - RNA, 19 nt, Artificial Sequence
  Description of Artificial Sequence: Synthetic oligonucleotide
  Antisense strand to SEQ ID NO: 1818433
aaugucagacacuauuaaa

SEQ ID NO: 1818435 - RNA, 19 nt, Artificial Sequence
  Description of Artificial Sequence: Synthetic oligonucleotide
  Sense strand starting at position 799 of SEQ ID NO: 1563546
aguguauuagagcagggaa

SEQ ID NO: 1818436 - RNA, 19 nt, Artificial Sequence
  Description of Artificial Sequence: Synthetic oligonucleotide
  Antisense strand to SEQ ID NO: 1818435
uucccugcucuaauacacu

SEQ ID NO: 1818437 - RNA, 19 nt, Artificial Sequence
  Description of Artificial Sequence: Synthetic oligonucleotide
  Sense strand starting at position 827 of SEQ ID NO: 1563546
gcuuacuguguugaacaaa

SEQ ID NO: 1818438 - RNA, 19 nt, Artificial Sequence
  Description of Artificial Sequence: Synthetic oligonucleotide
  Antisense strand to SEQ ID NO: 1818437
uuuguucaacacaguaagc

SEQ ID NO: 1818439 - RNA, 19 nt, Artificial Sequence
  Description of Artificial Sequence: Synthetic oligonucleotide
  Sense strand starting at position 1076 of SEQ ID NO: 1563546
ggcuguguccagcucggau

SEQ ID NO: 1818440 - RNA, 19 nt, Artificial Sequence
  Description of Artificial Sequence: Synthetic oligonucleotide
  Antisense strand to SEQ ID NO: 1818439
auccgagcuggacacagcc

SEQ ID NO: 1818441 - RNA, 19 nt, Artificial Sequence
  Description of Artificial Sequence: Synthetic oligonucleotide
  Sense strand starting at position 2075 of SEQ ID NO: 1563546
aagacuuguggucacuagu

SEQ ID NO: 1818442 - RNA, 19 nt, Artificial Sequence
  Description of Artificial Sequence: Synthetic oligonucleotide
  Antisense strand to SEQ ID NO: 1818441
acuagugaccacaagucuu

SEQ ID NO: 1818443 - RNA, 19 nt, Artificial Sequence
  Description of Artificial Sequence: Synthetic oligonucleotide
  Sense strand starting at position 2120 of SEQ ID NO: 1563546
gggcaaugccaggaguucu

SEQ ID NO: 1818444 - RNA, 19 nt, Artificial Sequence
  Description of Artificial Sequence: Synthetic oligonucleotide
  Antisense strand to SEQ ID NO: 1818443
agaacuccuggcauugccc

SEQ ID NO: 1818445 - RNA, 19 nt, Artificial Sequence
  Description of Artificial Sequence: Synthetic oligonucleotide
  Sense strand starting at position 2145 of SEQ ID NO: 1563546
ggucucauacuguggagga

SEQ ID NO: 1818446 - RNA, 19 nt, Artificial Sequence
  Description of Artificial Sequence: Synthetic oligonucleotide
  Antisense strand to SEQ ID NO: 1818445
uccuccacaguaugagacc

SEQ ID NO: 1818447 - RNA, 19 nt, Artificial Sequence
  Description of Artificial Sequence: Synthetic oligonucleotide
  Sense strand starting at position 2272 of SEQ ID NO: 1563546
gcagaagauccauguucug

SEQ ID NO: 1818448 - RNA, 19 nt, Artificial Sequence
  Description of Artificial Sequence: Synthetic oligonucleotide
  Antisense strand to SEQ ID NO: 1818447
cagaacauggaucuucugc

SEQ ID NO: 1818449 - RNA, 19 nt, Artificial Sequence
  Description of Artificial Sequence: Synthetic oligonucleotide
  Sense strand starting at position 2281 of SEQ ID NO: 1563546
ccauguucuggagaucgau

SEQ ID NO: 1818450 - RNA, 19 nt, Artificial Sequence
  Description of Artificial Sequence: Synthetic oligonucleotide
  Antisense strand to SEQ ID NO: 1818449
aucgaucuccagaacaugg

SEQ ID NO: 1818451 - RNA, 19 nt, Artificial Sequence
  Description of Artificial Sequence: Synthetic oligonucleotide
  Sense strand starting at position 2329 of SEQ ID NO: 1563546
acucuuuaguccuuggaca

SEQ ID NO: 1818452 - RNA, 19 nt, Artificial Sequence
  Description of Artificial Sequence: Synthetic oligonucleotide
  Antisense strand to SEQ ID NO: 1818451
uguccaaggacuaaagagu

SEQ ID NO: 1818453 - RNA, 19 nt, Artificial Sequence
  Description of Artificial Sequence: Synthetic oligonucleotide
  Sense strand starting at position 2330 of SEQ ID NO: 1563546
cucuuuaguccuuggacau

SEQ ID NO: 1818454 - RNA, 19 nt, Artificial Sequence
  Description of Artificial Sequence: Synthetic oligonucleotide
  Antisense strand to SEQ ID NO: 1818453
auguccaaggacuaaagag

SEQ ID NO: 1818455 - RNA, 19 nt, Artificial Sequence
  Description of Artificial Sequence: Synthetic oligonucleotide
  Sense strand starting at position 2331 of SEQ ID NO: 1563546
ucuuuaguccuuggacauu

SEQ ID NO: 1818456 - RNA, 19 nt, Artificial Sequence
  Description of Artificial Sequence: Synthetic oligonucleotide
  Antisense strand to SEQ ID NO: 1818455
aauguccaaggacuaaaga

SEQ ID NO: 1818457 - RNA, 19 nt, Artificial Sequence
  Description of Artificial Sequence: Synthetic oligonucleotide
  Sense strand starting at position 2383 of SEQ ID NO: 1563546
aguagaguucugugaacac

SEQ ID NO: 1818458 - RNA, 19 nt, Artificial Sequence
  Description of Artificial Sequence: Synthetic oligonucleotide
  Antisense strand to SEQ ID NO: 1818457
guguucacagaacucuacu

SEQ ID NO: 1818459 - RNA, 19 nt, Artificial Sequence
  Description of Artificial Sequence: Synthetic oligonucleotide
  Sense strand starting at position 2535 of SEQ ID NO: 1563546
guuaaugaaagguggguua

SEQ ID NO: 1818460 - RNA, 19 nt, Artificial Sequence
  Description of Artificial Sequence: Synthetic oligonucleotide
  Antisense strand to SEQ ID NO: 1818459
uaacccaccuuucauuaac

SEQ ID NO: 1818461 - RNA, 19 nt, Artificial Sequence
  Description of Artificial Sequence: Synthetic oligonucleotide
  Sense strand starting at position 2669 of SEQ ID NO: 1563546
augacauuauacguguuaa

SEQ ID NO: 1818462 - RNA, 19 nt, Artificial Sequence
  Description of Artificial Sequence: Synthetic oligonucleotide
  Antisense strand to SEQ ID NO: 1818461
uuaacacguauaaugucau

SEQ ID NO: 1818463 - RNA, 19 nt, Artificial Sequence
  Description of Artificial Sequence: Synthetic oligonucleotide
  Sense strand starting at position 2771 of SEQ ID NO: 1563546
aauuuaguuguguggcuga

SEQ ID NO: 1818464 - RNA, 19 nt, Artificial Sequence
  Description of Artificial Sequence: Synthetic oligonucleotide
  Antisense strand to SEQ ID NO: 1818463
ucagccacacaacuaaauu

SEQ ID NO: 1818465 - RNA, 19 nt, Artificial Sequence
  Description of Artificial Sequence: Synthetic oligonucleotide
  Sense strand starting at position 2773 of SEQ ID NO: 1563546
uuuaguuguguggcugagu

SEQ ID NO: 1818466 - RNA, 19 nt, Artificial Sequence
  Description of Artificial Sequence: Synthetic oligonucleotide
  Antisense strand to SEQ ID NO: 1818465
acucagccacacaacuaaa

SEQ ID NO: 1818467 - RNA, 19 nt, Artificial Sequence
  Description of Artificial Sequence: Synthetic oligonucleotide
  Sense strand starting at position 3376 of SEQ ID NO: 1563546
guagauuuauaccaugaac

SEQ ID NO: 1818468 - RNA, 19 nt, Artificial Sequence
  Description of Artificial Sequence: Synthetic oligonucleotide
  Antisense strand to SEQ ID NO: 1818467
guucaugguauaaaucuac

SEQ ID NO: 1818469 - RNA, 19 nt, Artificial Sequence
  Description of Artificial Sequence: Synthetic oligonucleotide
  Sense strand starting at position 3578 of SEQ ID NO: 1563546
ugauuaaggcaguaguauu

SEQ ID NO: 1818470 - RNA, 19 nt, Artificial Sequence
  Description of Artificial Sequence: Synthetic oligonucleotide
  Antisense strand to SEQ ID NO: 1818469
aauacuacugccuuaauca

SEQ ID NO: 1818471 - RNA, 19 nt, Artificial Sequence
  Description of Artificial Sequence: Synthetic oligonucleotide
  Sense strand starting at position 3598 of SEQ ID NO: 1563546
agagaaagcuguucugaaa

SEQ ID NO: 1818472 - RNA, 19 nt, Artificial Sequence
  Description of Artificial Sequence: Synthetic oligonucleotide
  Antisense strand to SEQ ID NO: 1818471
uuucagaacagcuuucucu

SEQ ID NO: 1818473 - RNA, 19 nt, Artificial Sequence
  Description of Artificial Sequence: Synthetic oligonucleotide
  Sense strand starting at position 3625 of SEQ ID NO: 1563546
uccauuaaugcuuaguuga

SEQ ID NO: 1818474 - RNA, 19 nt, Artificial Sequence
  Description of Artificial Sequence: Synthetic oligonucleotide
  Antisense strand to SEQ ID NO: 1818473
ucaacuaagcauuaaugga

SEQ ID NO: 1818475 - RNA, 19 nt, Artificial Sequence
  Description of Artificial Sequence: Synthetic oligonucleotide
  Sense strand starting at position 3656 of SEQ ID NO: 1563546
acauuacaacuguggugau

SEQ ID NO: 1818476 - RNA, 19 nt, Artificial Sequence
  Description of Artificial Sequence: Synthetic oligonucleotide
  Antisense strand to SEQ ID NO: 1818475
aucaccacaguuguaaugu

SEQ ID NO: 1818477 - RNA, 19 nt, Artificial Sequence
  Description of Artificial Sequence: Synthetic oligonucleotide
  Sense strand starting at position 3919 of SEQ ID NO: 1563546
ugcauccauccagauaugu

SEQ ID NO: 1818478 - RNA, 19 nt, Artificial Sequence
  Description of Artificial Sequence: Synthetic oligonucleotide
  Antisense strand to SEQ ID NO: 1818477
acauaucuggauggaugca

SEQ ID NO: 1818479 - RNA, 19 nt, Artificial Sequence
  Description of Artificial Sequence: Synthetic oligonucleotide
  Sense strand starting at position 3944 of SEQ ID NO: 1563546
ggguauucuggguggauuc

SEQ ID NO: 1818480 - RNA, 19 nt, Artificial Sequence
  Description of Artificial Sequence: Synthetic oligonucleotide
  Antisense strand to SEQ ID NO: 1818479
gaauccacccagaauaccc

SEQ ID NO: 1818481 - RNA, 19 nt, Artificial Sequence
  Description of Artificial Sequence: Synthetic oligonucleotide
  Sense strand starting at position 3945 of SEQ ID NO: 1563546
gguauucuggguggauuca

SEQ ID NO: 1818482 - RNA, 19 nt, Artificial Sequence
  Description of Artificial Sequence: Synthetic oligonucleotide
  Antisense strand to SEQ ID NO: 1818481
ugaauccacccagaauacc

SEQ ID NO: 1818483 - RNA, 19 nt, Artificial Sequence
  Description of Artificial Sequence: Synthetic oligonucleotide
  Sense strand starting at position 3977 of SEQ ID NO: 1563546
gcaguccugccucugcuaa

SEQ ID NO: 1818484 - RNA, 19 nt, Artificial Sequence
  Description of Artificial Sequence: Synthetic oligonucleotide
  Antisense strand to SEQ ID NO: 1818483
uuagcagaggcaggacugc

SEQ ID NO: 1818485 - RNA, 19 nt, Artificial Sequence
  Description of Artificial Sequence: Synthetic oligonucleotide
  Sense strand starting at position 89 of SEQ ID NO: 1563547
ucccuuauugugcauggaa

SEQ ID NO: 1818486 - RNA, 19 nt, Artificial Sequence
  Description of Artificial Sequence: Synthetic oligonucleotide
  Antisense strand to SEQ ID NO: 1818485
uuccaugcacaauaaggga

SEQ ID NO: 1818487 - RNA, 19 nt, Artificial Sequence
  Description of Artificial Sequence: Synthetic oligonucleotide
  Sense strand starting at position 223 of SEQ ID NO: 1563547
ccagguuuguaucuaaauu

SEQ ID NO: 1818488 - RNA, 19 nt, Artificial Sequence
  Description of Artificial Sequence: Synthetic oligonucleotide
  Antisense strand to SEQ ID NO: 1818487
aauuuagauacaaaccugg

SEQ ID NO: 1818489 - RNA, 19 nt, Artificial Sequence
  Description of Artificial Sequence: Synthetic oligonucleotide
  Sense strand starting at position 332 of SEQ ID NO: 1563547
cccugaaucauggguugag

SEQ ID NO: 1818490 - RNA, 19 nt, Artificial Sequence
  Description of Artificial Sequence: Synthetic oligonucleotide
  Antisense strand to SEQ ID NO: 1818489
cucaacccaugauucaggg

SEQ ID NO: 1818491 - RNA, 19 nt, Artificial Sequence
  Description of Artificial Sequence: Synthetic oligonucleotide
  Sense strand starting at position 333 of SEQ ID NO: 1563547
ccugaaucauggguugagu

SEQ ID NO: 1818492 - RNA, 19 nt, Artificial Sequence
  Description of Artificial Sequence: Synthetic oligonucleotide
  Antisense strand to SEQ ID NO: 1818491
acucaacccaugauucagg

SEQ ID NO: 1818493 - RNA, 19 nt, Artificial Sequence
  Description of Artificial Sequence: Synthetic oligonucleotide
  Sense strand starting at position 335 of SEQ ID NO: 1563547
ugaaucauggguugaguaa

SEQ ID NO: 1818494 - RNA, 19 nt, Artificial Sequence
  Description of Artificial Sequence: Synthetic oligonucleotide
  Antisense strand to SEQ ID NO: 1818493
uuacucaacccaugauuca

SEQ ID NO: 1818495 - RNA, 19 nt, Artificial Sequence
  Description of Artificial Sequence: Synthetic oligonucleotide
  Sense strand starting at position 370 of SEQ ID NO: 1563547
accaauaaucuguguggga

SEQ ID NO: 1818496 - RNA, 19 nt, Artificial Sequence
  Description of Artificial Sequence: Synthetic oligonucleotide
  Antisense strand to SEQ ID NO: 1818495
ucccacacagauuauuggu

SEQ ID NO: 1818497 - RNA, 19 nt, Artificial Sequence
  Description of Artificial Sequence: Synthetic oligonucleotide
  Sense strand starting at position 371 of SEQ ID NO: 1563547
ccaauaaucugugugggau

SEQ ID NO: 1818498 - RNA, 19 nt, Artificial Sequence
  Description of Artificial Sequence: Synthetic oligonucleotide
  Antisense strand to SEQ ID NO: 1818497
aucccacacagauuauugg

SEQ ID NO: 1818499 - RNA, 19 nt, Artificial Sequence
  Description of Artificial Sequence: Synthetic oligonucleotide
  Sense strand starting at position 372 of SEQ ID NO: 1563547
caauaaucugugugggauu

SEQ ID NO: 1818500 - RNA, 19 nt, Artificial Sequence
  Description of Artificial Sequence: Synthetic oligonucleotide
  Antisense strand to SEQ ID NO: 1818499
aaucccacacagauuauug

SEQ ID NO: 1818501 - RNA, 19 nt, Artificial Sequence
  Description of Artificial Sequence: Synthetic oligonucleotide
  Sense strand starting at position 399 of SEQ ID NO: 1563547
guaacaauuugggaauugu

SEQ ID NO: 1818502 - RNA, 19 nt, Artificial Sequence
  Description of Artificial Sequence: Synthetic oligonucleotide
  Antisense strand to SEQ ID NO: 1818501
acaauucccaaauuguuac

SEQ ID NO: 1818503 - RNA, 19 nt, Artificial Sequence
  Description of Artificial Sequence: Synthetic oligonucleotide
  Sense strand starting at position 466 of SEQ ID NO: 1563547
cuggcugacuucucacaua

SEQ ID NO: 1818504 - RNA, 19 nt, Artificial Sequence
  Description of Artificial Sequence: Synthetic oligonucleotide
  Antisense strand to SEQ ID NO: 1818503
uaugugagaagucagccag

SEQ ID NO: 1818505 - RNA, 19 nt, Artificial Sequence
  Description of Artificial Sequence: Synthetic oligonucleotide
  Sense strand starting at position 478 of SEQ ID NO: 1563547
ucacauaguguugaccaaa

SEQ ID NO: 1818506 - RNA, 19 nt, Artificial Sequence
  Description of Artificial Sequence: Synthetic oligonucleotide
  Antisense strand to SEQ ID NO: 1818505
uuuggucaacacuauguga

SEQ ID NO: 1818507 - RNA, 19 nt, Artificial Sequence
  Description of Artificial Sequence: Synthetic oligonucleotide
  Sense strand starting at position 515 of SEQ ID NO: 1563547
uacuaagaggcuugggaua

SEQ ID NO: 1818508 - RNA, 19 nt, Artificial Sequence
  Description of Artificial Sequence: Synthetic oligonucleotide
  Antisense strand to SEQ ID NO: 1818507
uaucccaagccucuuagua

SEQ ID NO: 1818509 - RNA, 19 nt, Artificial Sequence
  Description of Artificial Sequence: Synthetic oligonucleotide
  Sense strand starting at position 529 of SEQ ID NO: 1563547
ggauaauccuaacugguuu

SEQ ID NO: 1818510 - RNA, 19 nt, Artificial Sequence
  Description of Artificial Sequence: Synthetic oligonucleotide
  Antisense strand to SEQ ID NO: 1818509
aaaccaguuaggauuaucc

SEQ ID NO: 1818511 - RNA, 19 nt, Artificial Sequence
  Description of Artificial Sequence: Synthetic oligonucleotide
  Sense strand starting at position 629 of SEQ ID NO: 1563547
uuuauaaugcaggagucaa

SEQ ID NO: 1818512 - RNA, 19 nt, Artificial Sequence
  Description of Artificial Sequence: Synthetic oligonucleotide
  Antisense strand to SEQ ID NO: 1818511
uugacuccugcauuauaaa

SEQ ID NO: 1818513 - RNA, 19 nt, Artificial Sequence
  Description of Artificial Sequence: Synthetic oligonucleotide
  Sense strand starting at position 673 of SEQ ID NO: 1563547
aucgcuucugaacaagaua

SEQ ID NO: 1818514 - RNA, 19 nt, Artificial Sequence
  Description of Artificial Sequence: Synthetic oligonucleotide
  Antisense strand to SEQ ID NO: 1818513
uaucuuguucagaagcgau

SEQ ID NO: 1818515 - RNA, 19 nt, Artificial Sequence
  Description of Artificial Sequence: Synthetic oligonucleotide
  Sense strand starting at position 753 of SEQ ID NO: 1563547
ucucaauagugucugacau

SEQ ID NO: 1818516 - RNA, 19 nt, Artificial Sequence
  Description of Artificial Sequence: Synthetic oligonucleotide
  Antisense strand to SEQ ID NO: 1818515
augucagacacuauugaga

SEQ ID NO: 1818517 - RNA, 19 nt, Artificial Sequence
  Description of Artificial Sequence: Synthetic oligonucleotide
  Sense strand starting at position 754 of SEQ ID NO: 1563547
cucaauagugucugacauu

SEQ ID NO: 1818518 - RNA, 19 nt, Artificial Sequence
  Description of Artificial Sequence: Synthetic oligonucleotide
  Antisense strand to SEQ ID NO: 1818517
aaugucagacacuauugag

SEQ ID NO: 1818519 - RNA, 19 nt, Artificial Sequence
  Description of Artificial Sequence: Synthetic oligonucleotide
  Sense strand starting at position 1100 of SEQ ID NO: 1563547
cuccgaggugaguacagau

SEQ ID NO: 1818520 - RNA, 19 nt, Artificial Sequence
  Description of Artificial Sequence: Synthetic oligonucleotide
  Antisense strand to SEQ ID NO: 1818519
aucuguacucaccucggag

SEQ ID NO: 1818521 - RNA, 19 nt, Artificial Sequence
  Description of Artificial Sequence: Synthetic oligonucleotide
  Sense strand starting at position 1247 of SEQ ID NO: 1563547
gucaguggucugucagugu

SEQ ID NO: 1818522 - RNA, 19 nt, Artificial Sequence
  Description of Artificial Sequence: Synthetic oligonucleotide
  Antisense strand to SEQ ID NO: 1818521
acacugacagaccacugac

SEQ ID NO: 1818523 - RNA, 19 nt, Artificial Sequence
  Description of Artificial Sequence: Synthetic oligonucleotide
  Sense strand starting at position 2154 of SEQ ID NO: 1563547
uggcuuaacuggucaagga

SEQ ID NO: 1818524 - RNA, 19 nt, Artificial Sequence
  Description of Artificial Sequence: Synthetic oligonucleotide
  Antisense strand to SEQ ID NO: 1818523
uccuugaccaguuaagcca

SEQ ID NO: 1818525 - RNA, 19 nt, Artificial Sequence
  Description of Artificial Sequence: Synthetic oligonucleotide
  Sense strand starting at position 2274 of SEQ ID NO: 1563547
cuguaaguucuuuaaagcu

SEQ ID NO: 1818526 - RNA, 19 nt, Artificial Sequence
  Description of Artificial Sequence: Synthetic oligonucleotide
  Antisense strand to SEQ ID NO: 1818525
agcuuuaaagaacuuacag

SEQ ID NO: 1818527 - RNA, 19 nt, Artificial Sequence
  Description of Artificial Sequence: Synthetic oligonucleotide
  Sense strand starting at position 2281 of SEQ ID NO: 1563547
uucuuuaaagcugauuagu

SEQ ID NO: 1818528 - RNA, 19 nt, Artificial Sequence
  Description of Artificial Sequence: Synthetic oligonucleotide
  Antisense strand to SEQ ID NO: 1818527
acuaaucagcuuuaaagaa

SEQ ID NO: 1818529 - RNA, 19 nt, Artificial Sequence
  Description of Artificial Sequence: Synthetic oligonucleotide
  Sense strand starting at position 2283 of SEQ ID NO: 1563547
cuuuaaagcugauuaguca

SEQ ID NO: 1818530 - RNA, 19 nt, Artificial Sequence
  Description of Artificial Sequence: Synthetic oligonucleotide
  Antisense strand to SEQ ID NO: 1818529
ugacuaaucagcuuuaaag

SEQ ID NO: 1818531 - RNA, 19 nt, Artificial Sequence
  Description of Artificial Sequence: Synthetic oligonucleotide
  Sense strand starting at position 2466 of SEQ ID NO: 1563547
ccagguauacuacagcaaa

SEQ ID NO: 1818532 - RNA, 19 nt, Artificial Sequence
  Description of Artificial Sequence: Synthetic oligonucleotide
  Antisense strand to SEQ ID NO: 1818531
uuugcuguaguauaccugg

SEQ ID NO: 1818533 - RNA, 19 nt, Artificial Sequence
  Description of Artificial Sequence: Synthetic oligonucleotide
  Sense strand starting at position 2543 of SEQ ID NO: 1563547
gaugauguguaccuugauc

SEQ ID NO: 1818534 - RNA, 19 nt, Artificial Sequence
  Description of Artificial Sequence: Synthetic oligonucleotide
  Antisense strand to SEQ ID NO: 1818533
gaucaagguacacaucauc

SEQ ID NO: 1818535 - RNA, 19 nt, Artificial Sequence
  Description of Artificial Sequence: Synthetic oligonucleotide
  Sense strand starting at position 2562 of SEQ ID NO: 1563547
acuuguuugccauagauac

SEQ ID NO: 1818536 - RNA, 19 nt, Artificial Sequence
  Description of Artificial Sequence: Synthetic oligonucleotide
  Antisense strand to SEQ ID NO: 1818535
guaucuauggcaaacaagu

SEQ ID NO: 1818537 - RNA, 19 nt, Artificial Sequence
  Description of Artificial Sequence: Synthetic oligonucleotide
  Sense strand starting at position 2595 of SEQ ID NO: 1563547
gguugacuagguuauguaa

SEQ ID NO: 1818538 - RNA, 19 nt, Artificial Sequence
  Description of Artificial Sequence: Synthetic oligonucleotide
  Antisense strand to SEQ ID NO: 1818537
uuacauaaccuagucaacc

SEQ ID NO: 1818539 - RNA, 19 nt, Artificial Sequence
  Description of Artificial Sequence: Synthetic oligonucleotide
  Sense strand starting at position 2610 of SEQ ID NO: 1563547
guaaguccugaugagcaga

SEQ ID NO: 1818540 - RNA, 19 nt, Artificial Sequence
  Description of Artificial Sequence: Synthetic oligonucleotide
  Antisense strand to SEQ ID NO: 1818539
ucugcucaucaggacuuac

SEQ ID NO: 1818541 - RNA, 19 nt, Artificial Sequence
  Description of Artificial Sequence: Synthetic oligonucleotide
  Sense strand starting at position 2613 of SEQ ID NO: 1563547
aguccugaugagcagagua

SEQ ID NO: 1818542 - RNA, 19 nt, Artificial Sequence
  Description of Artificial Sequence: Synthetic oligonucleotide
  Antisense strand to SEQ ID NO: 1818541
uacucugcucaucaggacu

SEQ ID NO: 1818543 - RNA, 19 nt, Artificial Sequence
  Description of Artificial Sequence: Synthetic oligonucleotide
  Sense strand starting at position 2675 of SEQ ID NO: 1563547
guguccuaccaguacaacu

SEQ ID NO: 1818544 - RNA, 19 nt, Artificial Sequence
  Description of Artificial Sequence: Synthetic oligonucleotide
  Antisense strand to SEQ ID NO: 1818543
aguuguacugguaggacac

SEQ ID NO: 1818545 - RNA, 19 nt, Artificial Sequence
  Description of Artificial Sequence: Synthetic oligonucleotide
  Sense strand starting at position 2793 of SEQ ID NO: 1563547
uauugaauaugguccuaug

SEQ ID NO: 1818546 - RNA, 19 nt, Artificial Sequence
  Description of Artificial Sequence: Synthetic oligonucleotide
  Antisense strand to SEQ ID NO: 1818545
cauaggaccauauucaaua

SEQ ID NO: 1818547 - RNA, 19 nt, Artificial Sequence
  Description of Artificial Sequence: Synthetic oligonucleotide
  Sense strand starting at position 2912 of SEQ ID NO: 1563547
ucagaaguuccauaugggu

SEQ ID NO: 1818548 - RNA, 19 nt, Artificial Sequence
  Description of Artificial Sequence: Synthetic oligonucleotide
  Antisense strand to SEQ ID NO: 1818547
acccauauggaacuucuga

SEQ ID NO: 1818549 - RNA, 19 nt, Artificial Sequence
  Description of Artificial Sequence: Synthetic oligonucleotide
  Sense strand starting at position 2914 of SEQ ID NO: 1563547
agaaguuccauauggguca

SEQ ID NO: 1818550 - RNA, 19 nt, Artificial Sequence
  Description of Artificial Sequence: Synthetic oligonucleotide
  Antisense strand to SEQ ID NO: 1818549
ugacccauauggaacuucu

SEQ ID NO: 1818551 - RNA, 19 nt, Artificial Sequence
  Description of Artificial Sequence: Synthetic oligonucleotide
  Sense strand starting at position 2919 of SEQ ID NO: 1563547
uuccauaugggucauacua

SEQ ID NO: 1818552 - RNA, 19 nt, Artificial Sequence
  Description of Artificial Sequence: Synthetic oligonucleotide
  Antisense strand to SEQ ID NO: 1818551
uaguaugacccauauggaa

SEQ ID NO: 1818553 - RNA, 19 nt, Artificial Sequence
  Description of Artificial Sequence: Synthetic oligonucleotide
  Sense strand starting at position 2962 of SEQ ID NO: 1563547
cuauguuccuuucuggaga

SEQ ID NO: 1818554 - RNA, 19 nt, Artificial Sequence
  Description of Artificial Sequence: Synthetic oligonucleotide
  Antisense strand to SEQ ID NO: 1818553
ucuccagaaaggaacauag

SEQ ID NO: 1818555 - RNA, 19 nt, Artificial Sequence
  Description of Artificial Sequence: Synthetic oligonucleotide
  Sense strand starting at position 2967 of SEQ ID NO: 1563547
uuccuuucuggagauucua

SEQ ID NO: 1818556 - RNA, 19 nt, Artificial Sequence
  Description of Artificial Sequence: Synthetic oligonucleotide
  Antisense strand to SEQ ID NO: 1818555
uagaaucuccagaaaggaa

SEQ ID NO: 1818557 - RNA, 19 nt, Artificial Sequence
  Description of Artificial Sequence: Synthetic oligonucleotide
  Sense strand starting at position 3009 of SEQ ID NO: 1563547
guuagacuauuggcagaau

SEQ ID NO: 1818558 - RNA, 19 nt, Artificial Sequence
  Description of Artificial Sequence: Synthetic oligonucleotide
  Antisense strand to SEQ ID NO: 1818557
auucugccaauagucuaac

SEQ ID NO: 1818559 - RNA, 19 nt, Artificial Sequence
  Description of Artificial Sequence: Synthetic oligonucleotide
  Sense strand starting at position 3044 of SEQ ID NO: 1563547
guaggauugagguaguguu

SEQ ID NO: 1818560 - RNA, 19 nt, Artificial Sequence
  Description of Artificial Sequence: Synthetic oligonucleotide
  Antisense strand to SEQ ID NO: 1818559
aacacuaccucaauccuac

SEQ ID NO: 1818561 - RNA, 19 nt, Artificial Sequence
  Description of Artificial Sequence: Synthetic oligonucleotide
  Sense strand starting at position 3054 of SEQ ID NO: 1563547
gguaguguucuugcucugu

SEQ ID NO: 1818562 - RNA, 19 nt, Artificial Sequence
  Description of Artificial Sequence: Synthetic oligonucleotide
  Antisense strand to SEQ ID NO: 1818561
acagagcaagaacacuacc

SEQ ID NO: 1818563 - RNA, 19 nt, Artificial Sequence
  Description of Artificial Sequence: Synthetic oligonucleotide
  Sense strand starting at position 3069 of SEQ ID NO: 1563547
cuguaauaugagggccauu

SEQ ID NO: 1818564 - RNA, 19 nt, Artificial Sequence
  Description of Artificial Sequence: Synthetic oligonucleotide
  Antisense strand to SEQ ID NO: 1818563
aauggcccucauauuacag

SEQ ID NO: 1818565 - RNA, 19 nt, Artificial Sequence
  Description of Artificial Sequence: Synthetic oligonucleotide
  Sense strand starting at position 122 of SEQ ID NO: 1563548
guauaacaucaaugacgua

SEQ ID NO: 1818566 - RNA, 19 nt, Artificial Sequence
  Description of Artificial Sequence: Synthetic oligonucleotide
  Antisense strand to SEQ ID NO: 1818565
uacgucauugauguuauac

SEQ ID NO: 1818567 - RNA, 19 nt, Artificial Sequence
  Description of Artificial Sequence: Synthetic oligonucleotide
  Sense strand starting at position 236 of SEQ ID NO: 1563548
accacauuugcccggcaua

SEQ ID NO: 1818568 - RNA, 19 nt, Artificial Sequence
  Description of Artificial Sequence: Synthetic oligonucleotide
  Antisense strand to SEQ ID NO: 1818567
uaugccgggcaaauguggu

SEQ ID NO: 1818569 - RNA, 19 nt, Artificial Sequence
  Description of Artificial Sequence: Synthetic oligonucleotide
  Sense strand starting at position 237 of SEQ ID NO: 1563548
ccacauuugcccggcauau

SEQ ID NO: 1818570 - RNA, 19 nt, Artificial Sequence
  Description of Artificial Sequence: Synthetic oligonucleotide
  Antisense strand to SEQ ID NO: 1818569
auaugccgggcaaaugugg

SEQ ID NO: 1818571 - RNA, 19 nt, Artificial Sequence
  Description of Artificial Sequence: Synthetic oligonucleotide
  Sense strand starting at position 312 of SEQ ID NO: 1563548
ggaacuguaaauugugaua

SEQ ID NO: 1818572 - RNA, 19 nt, Artificial Sequence
  Description of Artificial Sequence: Synthetic oligonucleotide
  Antisense strand to SEQ ID NO: 1818571
uaucacaauuuacaguucc

SEQ ID NO: 1818573 - RNA, 19 nt, Artificial Sequence
  Description of Artificial Sequence: Synthetic oligonucleotide
  Sense strand starting at position 323 of SEQ ID NO: 1563548
uugugauaauaauucugca

SEQ ID NO: 1818574 - RNA, 19 nt, Artificial Sequence
  Description of Artificial Sequence: Synthetic oligonucleotide
  Antisense strand to SEQ ID NO: 1818573
ugcagaauuauuaucacaa

SEQ ID NO: 1818575 - RNA, 19 nt, Artificial Sequence
  Description of Artificial Sequence: Synthetic oligonucleotide
  Sense strand starting at position 330 of SEQ ID NO: 1563548
aauaauucugcagagaguu

SEQ ID NO: 1818576 - RNA, 19 nt, Artificial Sequence
  Description of Artificial Sequence: Synthetic oligonucleotide
  Antisense strand to SEQ ID NO: 1818575
aacucucugcagaauuauu

SEQ ID NO: 1818577 - RNA, 19 nt, Artificial Sequence
  Description of Artificial Sequence: Synthetic oligonucleotide
  Sense strand starting at position 343 of SEQ ID NO: 1563548
agaguuuggcaauauguau

SEQ ID NO: 1818578 - RNA, 19 nt, Artificial Sequence
  Description of Artificial Sequence: Synthetic oligonucleotide
  Antisense strand to SEQ ID NO: 1818577
auacauauugccaaacucu

SEQ ID NO: 1818579 - RNA, 19 nt, Artificial Sequence
  Description of Artificial Sequence: Synthetic oligonucleotide
  Sense strand starting at position 349 of SEQ ID NO: 1563548
uggcaauauguauacaaua

SEQ ID NO: 1818580 - RNA, 19 nt, Artificial Sequence
  Description of Artificial Sequence: Synthetic oligonucleotide
  Antisense strand to SEQ ID NO: 1818579
uauuguauacauauugcca

SEQ ID NO: 1818581 - RNA, 19 nt, Artificial Sequence
  Description of Artificial Sequence: Synthetic oligonucleotide
  Sense strand starting at position 449 of SEQ ID NO: 1563548
agaaauacaugcuuuaggu

SEQ ID NO: 1818582 - RNA, 19 nt, Artificial Sequence
  Description of Artificial Sequence: Synthetic oligonucleotide
  Antisense strand to SEQ ID NO: 1818581
accuaaagcauguauuucu

SEQ ID NO: 1818583 - RNA, 19 nt, Artificial Sequence
  Description of Artificial Sequence: Synthetic oligonucleotide
  Sense strand starting at position 458 of SEQ ID NO: 1563548
ugcuuuagguauccaggga

SEQ ID NO: 1818584 - RNA, 19 nt, Artificial Sequence
  Description of Artificial Sequence: Synthetic oligonucleotide
  Antisense strand to SEQ ID NO: 1818583
ucccuggauaccuaaagca

SEQ ID NO: 1818585 - RNA, 19 nt, Artificial Sequence
  Description of Artificial Sequence: Synthetic oligonucleotide
  Sense strand starting at position 571 of SEQ ID NO: 1563548
ggcaauuauuuccauggaa

SEQ ID NO: 1818586 - RNA, 19 nt, Artificial Sequence
  Description of Artificial Sequence: Synthetic oligonucleotide
  Antisense strand to SEQ ID NO: 1818585
uuccauggaaauaauugcc

SEQ ID NO: 1818587 - RNA, 19 nt, Artificial Sequence
  Description of Artificial Sequence: Synthetic oligonucleotide
  Sense strand starting at position 613 of SEQ ID NO: 1563548
ugucgaucauuugccauga

SEQ ID NO: 1818588 - RNA, 19 nt, Artificial Sequence
  Description of Artificial Sequence: Synthetic oligonucleotide
  Antisense strand to SEQ ID NO: 1818587
ucauggcaaaugaucgaca

SEQ ID NO: 1818589 - RNA, 19 nt, Artificial Sequence
  Description of Artificial Sequence: Synthetic oligonucleotide
  Sense strand starting at position 614 of SEQ ID NO: 1563548
gucgaucauuugccaugaa

SEQ ID NO: 1818590 - RNA, 19 nt, Artificial Sequence
  Description of Artificial Sequence: Synthetic oligonucleotide
  Antisense strand to SEQ ID NO: 1818589
uucauggcaaaugaucgac

SEQ ID NO: 1818591 - RNA, 19 nt, Artificial Sequence
  Description of Artificial Sequence: Synthetic oligonucleotide
  Sense strand starting at position 638 of SEQ ID NO: 1563548
agccauuaguaauugauaa

SEQ ID NO: 1818592 - RNA, 19 nt, Artificial Sequence
  Description of Artificial Sequence: Synthetic oligonucleotide
  Antisense strand to SEQ ID NO: 1818591
uuaucaauuacuaauggcu

SEQ ID NO: 1818593 - RNA, 19 nt, Artificial Sequence
  Description of Artificial Sequence: Synthetic oligonucleotide
  Sense strand starting at position 729 of SEQ ID NO: 1563548
guauaugcacaaggaaauu

SEQ ID NO: 1818594 - RNA, 19 nt, Artificial Sequence
  Description of Artificial Sequence: Synthetic oligonucleotide
  Antisense strand to SEQ ID NO: 1818593
aauuuccuugugcauauac

SEQ ID NO: 1818595 - RNA, 19 nt, Artificial Sequence
  Description of Artificial Sequence: Synthetic oligonucleotide
  Sense strand starting at position 739 of SEQ ID NO: 1563548
aaggaaauuucuggaagga

SEQ ID NO: 1818596 - RNA, 19 nt, Artificial Sequence
  Description of Artificial Sequence: Synthetic oligonucleotide
  Antisense strand to SEQ ID NO: 1818595
uccuuccagaaauuuccuu

SEQ ID NO: 1818597 - RNA, 19 nt, Artificial Sequence
  Description of Artificial Sequence: Synthetic oligonucleotide
  Sense strand starting at position 1046 of SEQ ID NO: 1563548
guauucuaugaccagguuu

SEQ ID NO: 1818598 - RNA, 19 nt, Artificial Sequence
  Description of Artificial Sequence: Synthetic oligonucleotide
  Antisense strand to SEQ ID NO: 1818597
aaaccuggucauagaauac

SEQ ID NO: 1818599 - RNA, 19 nt, Artificial Sequence
  Description of Artificial Sequence: Synthetic oligonucleotide
  Sense strand starting at position 1087 of SEQ ID NO: 1563548
uguaauugucuacauuagu

SEQ ID NO: 1818600 - RNA, 19 nt, Artificial Sequence
  Description of Artificial Sequence: Synthetic oligonucleotide
  Antisense strand to SEQ ID NO: 1818599
acuaauguagacaauuaca

SEQ ID NO: 1818601 - RNA, 19 nt, Artificial Sequence
  Description of Artificial Sequence: Synthetic oligonucleotide
  Sense strand starting at position 1109 of SEQ ID NO: 1563548
ccaaauuaccucuguggau

SEQ ID NO: 1818602 - RNA, 19 nt, Artificial Sequence
  Description of Artificial Sequence: Synthetic oligonucleotide
  Antisense strand to SEQ ID NO: 1818601
auccacagagguaauuugg

SEQ ID NO: 1818603 - RNA, 19 nt, Artificial Sequence
  Description of Artificial Sequence: Synthetic oligonucleotide
  Sense strand starting at position 1416 of SEQ ID NO: 1563548
acuauaguauggcuagaau

SEQ ID NO: 1818604 - RNA, 19 nt, Artificial Sequence
  Description of Artificial Sequence: Synthetic oligonucleotide
  Antisense strand to SEQ ID NO: 1818603
auucuagccauacuauagu

SEQ ID NO: 1818605 - RNA, 19 nt, Artificial Sequence
  Description of Artificial Sequence: Synthetic oligonucleotide
  Sense strand starting at position 1448 of SEQ ID NO: 1563548
aaggaaauugguggcagau

SEQ ID NO: 1818606 - RNA, 19 nt, Artificial Sequence
  Description of Artificial Sequence: Synthetic oligonucleotide
  Antisense strand to SEQ ID NO: 1818605
aucugccaccaauuuccuu

SEQ ID NO: 1818607 - RNA, 19 nt, Artificial Sequence
  Description of Artificial Sequence: Synthetic oligonucleotide
  Sense strand starting at position 1522 of SEQ ID NO: 1563548
aucccacuguucuuggaau

SEQ ID NO: 1818608 - RNA, 19 nt, Artificial Sequence
  Description of Artificial Sequence: Synthetic oligonucleotide
  Antisense strand to SEQ ID NO: 1818607
auuccaagaacagugggau

SEQ ID NO: 1818609 - RNA, 19 nt, Artificial Sequence
  Description of Artificial Sequence: Synthetic oligonucleotide
  Sense strand starting at position 1629 of SEQ ID NO: 1563548
gguuguuacaagcauugag

SEQ ID NO: 1818610 - RNA, 19 nt, Artificial Sequence
  Description of Artificial Sequence: Synthetic oligonucleotide
  Antisense strand to SEQ ID NO: 1818609
cucaaugcuuguaacaacc

SEQ ID NO: 1818611 - RNA, 19 nt, Artificial Sequence
  Description of Artificial Sequence: Synthetic oligonucleotide
  Sense strand starting at position 1632 of SEQ ID NO: 1563548
uguuacaagcauugagaag

SEQ ID NO: 1818612 - RNA, 19 nt, Artificial Sequence
  Description of Artificial Sequence: Synthetic oligonucleotide
  Antisense strand to SEQ ID NO: 1818611
cuucucaaugcuuguaaca

SEQ ID NO: 1818613 - RNA, 19 nt, Artificial Sequence
  Description of Artificial Sequence: Synthetic oligonucleotide
  Sense strand starting at position 2037 of SEQ ID NO: 1563548
ucaagagacccgugacaaa

SEQ ID NO: 1818614 - RNA, 19 nt, Artificial Sequence
  Description of Artificial Sequence: Synthetic oligonucleotide
  Antisense strand to SEQ ID NO: 1818613
uuugucacgggucucuuga

SEQ ID NO: 1818615 - RNA, 19 nt, Artificial Sequence
  Description of Artificial Sequence: Synthetic oligonucleotide
  Sense strand starting at position 2117 of SEQ ID NO: 1563548
aggaacuauggcugguauu

SEQ ID NO: 1818616 - RNA, 19 nt, Artificial Sequence
  Description of Artificial Sequence: Synthetic oligonucleotide
  Antisense strand to SEQ ID NO: 1818615
aauaccagccauaguuccu

SEQ ID NO: 1818617 - RNA, 19 nt, Artificial Sequence
  Description of Artificial Sequence: Synthetic oligonucleotide
  Sense strand starting at position 2638 of SEQ ID NO: 1563548
aagcauccgugagucauuu

SEQ ID NO: 1818618 - RNA, 19 nt, Artificial Sequence
  Description of Artificial Sequence: Synthetic oligonucleotide
  Antisense strand to SEQ ID NO: 1818617
aaaugacucacggaugcuu

SEQ ID NO: 1818619 - RNA, 19 nt, Artificial Sequence
  Description of Artificial Sequence: Synthetic oligonucleotide
  Sense strand starting at position 2676 of SEQ ID NO: 1563548
gcggucucccugguagagu

SEQ ID NO: 1818620 - RNA, 19 nt, Artificial Sequence
  Description of Artificial Sequence: Synthetic oligonucleotide
  Antisense strand to SEQ ID NO: 1818619
acucuaccagggagaccgc

SEQ ID NO: 1818621 - RNA, 19 nt, Artificial Sequence
  Description of Artificial Sequence: Synthetic oligonucleotide
  Sense strand starting at position 2924 of SEQ ID NO: 1563548
gccgcuuguauagaaagaa

SEQ ID NO: 1818622 - RNA, 19 nt, Artificial Sequence
  Description of Artificial Sequence: Synthetic oligonucleotide
  Antisense strand to SEQ ID NO: 1818621
uucuuucuauacaagcggc

SEQ ID NO: 1818623 - RNA, 19 nt, Artificial Sequence
  Description of Artificial Sequence: Synthetic oligonucleotide
  Sense strand starting at position 3029 of SEQ ID NO: 1563548
gugugcaagcgcuuagaaa

SEQ ID NO: 1818624 - RNA, 19 nt, Artificial Sequence
  Description of Artificial Sequence: Synthetic oligonucleotide
  Antisense strand to SEQ ID NO: 1818623
uuucuaagcgcuugcacac

SEQ ID NO: 1818625 - RNA, 19 nt, Artificial Sequence
  Description of Artificial Sequence: Synthetic oligonucleotide
  Sense strand starting at position 3125 of SEQ ID NO: 1563548
ucaacaagccucuguauga

SEQ ID NO: 1818626 - RNA, 19 nt, Artificial Sequence
  Description of Artificial Sequence: Synthetic oligonucleotide
  Antisense strand to SEQ ID NO: 1818625
ucauacagaggcuuguuga

SEQ ID NO: 1818627 - RNA, 19 nt, Artificial Sequence
  Description of Artificial Sequence: Synthetic oligonucleotide
  Sense strand starting at position 3210 of SEQ ID NO: 1563548
ggaugaggaguucagcagu

SEQ ID NO: 1818628 - RNA, 19 nt, Artificial Sequence
  Description of Artificial Sequence: Synthetic oligonucleotide
  Antisense strand to SEQ ID NO: 1818627
acugcugaacuccucaucc

SEQ ID NO: 1818629 - RNA, 19 nt, Artificial Sequence
  Description of Artificial Sequence: Synthetic oligonucleotide
  Sense strand starting at position 3213 of SEQ ID NO: 1563548
ugaggaguucagcagugau

SEQ ID NO: 1818630 - RNA, 19 nt, Artificial Sequence
  Description of Artificial Sequence: Synthetic oligonucleotide
  Antisense strand to SEQ ID NO: 1818629
aucacugcugaacuccuca

SEQ ID NO: 1818631 - RNA, 19 nt, Artificial Sequence
  Description of Artificial Sequence: Synthetic oligonucleotide
  Sense strand starting at position 3216 of SEQ ID NO: 1563548
ggaguucagcagugaugag

SEQ ID NO: 1818632 - RNA, 19 nt, Artificial Sequence
  Description of Artificial Sequence: Synthetic oligonucleotide
  Antisense strand to SEQ ID NO: 1818631
cucaucacugcugaacucc

SEQ ID NO: 1818633 - RNA, 19 nt, Artificial Sequence
  Description of Artificial Sequence: Synthetic oligonucleotide
  Sense strand starting at position 3258 of SEQ ID NO: 1563548
ugaaaugccucccuuagag

SEQ ID NO: 1818634 - RNA, 19 nt, Artificial Sequence
  Description of Artificial Sequence: Synthetic oligonucleotide
  Antisense strand to SEQ ID NO: 1818633
cucuaagggaggcauuuca

SEQ ID NO: 1818635 - RNA, 19 nt, Artificial Sequence
  Description of Artificial Sequence: Synthetic oligonucleotide
  Sense strand starting at position 3645 of SEQ ID NO: 1563548
ugacuauuggcugauuguu

SEQ ID NO: 1818636 - RNA, 19 nt, Artificial Sequence
  Description of Artificial Sequence: Synthetic oligonucleotide
  Antisense strand to SEQ ID NO: 1818635
aacaaucagccaauaguca

SEQ ID NO: 1818637 - RNA, 19 nt, Artificial Sequence
  Description of Artificial Sequence: Synthetic oligonucleotide
  Sense strand starting at position 3699 of SEQ ID NO: 1563548
gaaguaugaugagcccauu

SEQ ID NO: 1818638 - RNA, 19 nt, Artificial Sequence
  Description of Artificial Sequence: Synthetic oligonucleotide
  Antisense strand to SEQ ID NO: 1818637
aaugggcucaucauacuuc

SEQ ID NO: 1818639 - RNA, 19 nt, Artificial Sequence
  Description of Artificial Sequence: Synthetic oligonucleotide
  Sense strand starting at position 3732 of SEQ ID NO: 1563548
ggauguuagccugaaguuc

SEQ ID NO: 1818640 - RNA, 19 nt, Artificial Sequence
  Description of Artificial Sequence: Synthetic oligonucleotide
  Antisense strand to SEQ ID NO: 1818639
gaacuucaggcuaacaucc

SEQ ID NO: 1818641 - RNA, 19 nt, Artificial Sequence
  Description of Artificial Sequence: Synthetic oligonucleotide
  Sense strand starting at position 3822 of SEQ ID NO: 1563548
ggugcuggugaagacauau

SEQ ID NO: 1818642 - RNA, 19 nt, Artificial Sequence
  Description of Artificial Sequence: Synthetic oligonucleotide
  Antisense strand to SEQ ID NO: 1818641
auaugucuucaccagcacc

SEQ ID NO: 1818643 - RNA, 19 nt, Artificial Sequence
  Description of Artificial Sequence: Synthetic oligonucleotide
  Sense strand starting at position 3903 of SEQ ID NO: 1563548
uugcaaaggcugcaagaua

SEQ ID NO: 1818644 - RNA, 19 nt, Artificial Sequence
  Description of Artificial Sequence: Synthetic oligonucleotide
  Antisense strand to SEQ ID NO: 1818643
uaucuugcagccuuugcaa

SEQ ID NO: 1818645 - RNA, 19 nt, Artificial Sequence
  Description of Artificial Sequence: Synthetic oligonucleotide
  Sense strand starting at position 245 of SEQ ID NO: 1563549
cgccgagggucaagaaguu

SEQ ID NO: 1818646 - RNA, 19 nt, Artificial Sequence
  Description of Artificial Sequence: Synthetic oligonucleotide
  Antisense strand to SEQ ID NO: 1818645
aacuucuugacccucggcg

SEQ ID NO: 1818647 - RNA, 19 nt, Artificial Sequence
  Description of Artificial Sequence: Synthetic oligonucleotide
  Sense strand starting at position 399 of SEQ ID NO: 1563549
uuuguaugagaaugcacua

SEQ ID NO: 1818648 - RNA, 19 nt, Artificial Sequence
  Description of Artificial Sequence: Synthetic oligonucleotide
  Antisense strand to SEQ ID NO: 1818647
uagugcauucucauacaaa

SEQ ID NO: 1818649 - RNA, 19 nt, Artificial Sequence
  Description of Artificial Sequence: Synthetic oligonucleotide
  Sense strand starting at position 490 of SEQ ID NO: 1563549
gcaggugacuuccuuggga

SEQ ID NO: 1818650 - RNA, 19 nt, Artificial Sequence
  Description of Artificial Sequence: Synthetic oligonucleotide
  Antisense strand to SEQ ID NO: 1818649
ucccaaggaagucaccugc

SEQ ID NO: 1818651 - RNA, 19 nt, Artificial Sequence
  Description of Artificial Sequence: Synthetic oligonucleotide
  Sense strand starting at position 492 of SEQ ID NO: 1563549
aggugacuuccuugggaga

SEQ ID NO: 1818652 - RNA, 19 nt, Artificial Sequence
  Description of Artificial Sequence: Synthetic oligonucleotide
  Antisense strand to SEQ ID NO: 1818651
ucucccaaggaagucaccu

SEQ ID NO: 1818653 - RNA, 19 nt, Artificial Sequence
  Description of Artificial Sequence: Synthetic oligonucleotide
  Sense strand starting at position 493 of SEQ ID NO: 1563549
ggugacuuccuugggagaa

SEQ ID NO: 1818654 - RNA, 19 nt, Artificial Sequence
  Description of Artificial Sequence: Synthetic oligonucleotide
  Antisense strand to SEQ ID NO: 1818653
uucucccaaggaagucacc

SEQ ID NO: 1818655 - RNA, 19 nt, Artificial Sequence
  Description of Artificial Sequence: Synthetic oligonucleotide
  Sense strand starting at position 494 of SEQ ID NO: 1563549
gugacuuccuugggagaag

SEQ ID NO: 1818656 - RNA, 19 nt, Artificial Sequence
  Description of Artificial Sequence: Synthetic oligonucleotide
  Antisense strand to SEQ ID NO: 1818655
cuucucccaaggaagucac

SEQ ID NO: 1818657 - RNA, 19 nt, Artificial Sequence
  Description of Artificial Sequence: Synthetic oligonucleotide
  Sense strand starting at position 495 of SEQ ID NO: 1563549
ugacuuccuugggagaaga

SEQ ID NO: 1818658 - RNA, 19 nt, Artificial Sequence
  Description of Artificial Sequence: Synthetic oligonucleotide
  Antisense strand to SEQ ID NO: 1818657
ucuucucccaaggaaguca

SEQ ID NO: 1818659 - RNA, 19 nt, Artificial Sequence
  Description of Artificial Sequence: Synthetic oligonucleotide
  Sense strand starting at position 643 of SEQ ID NO: 1563549
aggguuugguugccaaaua

SEQ ID NO: 1818660 - RNA, 19 nt, Artificial Sequence
  Description of Artificial Sequence: Synthetic oligonucleotide
  Antisense strand to SEQ ID NO: 1818659
uauuuggcaaccaaacccu

SEQ ID NO: 1818661 - RNA, 19 nt, Artificial Sequence
  Description of Artificial Sequence: Synthetic oligonucleotide
  Sense strand starting at position 644 of SEQ ID NO: 1563549
ggguuugguugccaaauau

SEQ ID NO: 1818662 - RNA, 19 nt, Artificial Sequence
  Description of Artificial Sequence: Synthetic oligonucleotide
  Antisense strand to SEQ ID NO: 1818661
auauuuggcaaccaaaccc

SEQ ID NO: 1818663 - RNA, 19 nt, Artificial Sequence
  Description of Artificial Sequence: Synthetic oligonucleotide
  Sense strand starting at position 868 of SEQ ID NO: 1563549
ugcccaaacccggaauuaa

SEQ ID NO: 1818664 - RNA, 19 nt, Artificial Sequence
  Description of Artificial Sequence: Synthetic oligonucleotide
  Antisense strand to SEQ ID NO: 1818663
uuaauuccggguuugggca

SEQ ID NO: 1818665 - RNA, 19 nt, Artificial Sequence
  Description of Artificial Sequence: Synthetic oligonucleotide
  Sense strand starting at position 888 of SEQ ID NO: 1563549
agaaguuagccaggugguu

SEQ ID NO: 1818666 - RNA, 19 nt, Artificial Sequence
  Description of Artificial Sequence: Synthetic oligonucleotide
  Antisense strand to SEQ ID NO: 1818665
aaccaccuggcuaacuucu

SEQ ID NO: 1818667 - RNA, 19 nt, Artificial Sequence
  Description of Artificial Sequence: Synthetic oligonucleotide
  Sense strand starting at position 901 of SEQ ID NO: 1563549
gugguuaccugaccugaau

SEQ ID NO: 1818668 - RNA, 19 nt, Artificial Sequence
  Description of Artificial Sequence: Synthetic oligonucleotide
  Antisense strand to SEQ ID NO: 1818667
auucaggucagguaaccac

SEQ ID NO: 1818669 - RNA, 19 nt, Artificial Sequence
  Description of Artificial Sequence: Synthetic oligonucleotide
  Sense strand starting at position 3166 of SEQ ID NO: 1563549
gggacuucugagggugauu

SEQ ID NO: 1818670 - RNA, 19 nt, Artificial Sequence
  Description of Artificial Sequence: Synthetic oligonucleotide
  Antisense strand to SEQ ID NO: 1818669
aaucacccucagaaguccc

SEQ ID NO: 1818671 - RNA, 19 nt, Artificial Sequence
  Description of Artificial Sequence: Synthetic oligonucleotide
  Sense strand starting at position 3168 of SEQ ID NO: 1563549
gacuucugagggugauucu

SEQ ID NO: 1818672 - RNA, 19 nt, Artificial Sequence
  Description of Artificial Sequence: Synthetic oligonucleotide
  Antisense strand to SEQ ID NO: 1818671
agaaucacccucagaaguc

SEQ ID NO: 1818673 - RNA, 19 nt, Artificial Sequence
  Description of Artificial Sequence: Synthetic oligonucleotide
  Sense strand starting at position 3177 of SEQ ID NO: 1563549
gggugauucuuggaggcaa

SEQ ID NO: 1818674 - RNA, 19 nt, Artificial Sequence
  Description of Artificial Sequence: Synthetic oligonucleotide
  Antisense strand to SEQ ID NO: 1818673
uugccuccaagaaucaccc

SEQ ID NO: 1818675 - RNA, 19 nt, Artificial Sequence
  Description of Artificial Sequence: Synthetic oligonucleotide
  Sense strand starting at position 3178 of SEQ ID NO: 1563549
ggugauucuuggaggcaag

SEQ ID NO: 1818676 - RNA, 19 nt, Artificial Sequence
  Description of Artificial Sequence: Synthetic oligonucleotide
  Antisense strand to SEQ ID NO: 1818675
cuugccuccaagaaucacc

SEQ ID NO: 1818677 - RNA, 19 nt, Artificial Sequence
  Description of Artificial Sequence: Synthetic oligonucleotide
  Sense strand starting at position 3373 of SEQ ID NO: 1563549
cagcuuagcugcugaggaa

SEQ ID NO: 1818678 - RNA, 19 nt, Artificial Sequence
  Description of Artificial Sequence: Synthetic oligonucleotide
  Antisense strand to SEQ ID NO: 1818677
uuccucagcagcuaagcug

SEQ ID NO: 1818679 - RNA, 19 nt, Artificial Sequence
  Description of Artificial Sequence: Synthetic oligonucleotide
  Sense strand starting at position 3458 of SEQ ID NO: 1563549
gguguuugcccuuaggaau

SEQ ID NO: 1818680 - RNA, 19 nt, Artificial Sequence
  Description of Artificial Sequence: Synthetic oligonucleotide
  Antisense strand to SEQ ID NO: 1818679
auuccuaagggcaaacacc

SEQ ID NO: 1818681 - RNA, 19 nt, Artificial Sequence
  Description of Artificial Sequence: Synthetic oligonucleotide
  Sense strand starting at position 3461 of SEQ ID NO: 1563549
guuugcccuuaggaauauu

SEQ ID NO: 1818682 - RNA, 19 nt, Artificial Sequence
  Description of Artificial Sequence: Synthetic oligonucleotide
  Antisense strand to SEQ ID NO: 1818681
aauauuccuaagggcaaac

SEQ ID NO: 1818683 - RNA, 19 nt, Artificial Sequence
  Description of Artificial Sequence: Synthetic oligonucleotide
  Sense strand starting at position 3553 of SEQ ID NO: 1563549
ccuacaggcugcugagaau

SEQ ID NO: 1818684 - RNA, 19 nt, Artificial Sequence
  Description of Artificial Sequence: Synthetic oligonucleotide
  Antisense strand to SEQ ID NO: 1818683
auucucagcagccuguagg

SEQ ID NO: 1818685 - RNA, 19 nt, Artificial Sequence
  Description of Artificial Sequence: Synthetic oligonucleotide
  Sense strand starting at position 3567 of SEQ ID NO: 1563549
agaauagcugacugagagu

SEQ ID NO: 1818686 - RNA, 19 nt, Artificial Sequence
  Description of Artificial Sequence: Synthetic oligonucleotide
  Antisense strand to SEQ ID NO: 1818685
acucucagucagcuauucu

SEQ ID NO: 1818687 - RNA, 19 nt, Artificial Sequence
  Description of Artificial Sequence: Synthetic oligonucleotide
  Sense strand starting at position 3636 of SEQ ID NO: 1563549
gucacauggcacuaggaau

SEQ ID NO: 1818688 - RNA, 19 nt, Artificial Sequence
  Description of Artificial Sequence: Synthetic oligonucleotide
  Antisense strand to SEQ ID NO: 1818687
auuccuagugccaugugac

SEQ ID NO: 1818689 - RNA, 19 nt, Artificial Sequence
  Description of Artificial Sequence: Synthetic oligonucleotide
  Sense strand starting at position 3648 of SEQ ID NO: 1563549
uaggaauucggacguacaa

SEQ ID NO: 1818690 - RNA, 19 nt, Artificial Sequence
  Description of Artificial Sequence: Synthetic oligonucleotide
  Antisense strand to SEQ ID NO: 1818689
uuguacguccgaauuccua

SEQ ID NO: 1818691 - RNA, 19 nt, Artificial Sequence
  Description of Artificial Sequence: Synthetic oligonucleotide
  Sense strand starting at position 3734 of SEQ ID NO: 1563549
cccaguaacucacauugua

SEQ ID NO: 1818692 - RNA, 19 nt, Artificial Sequence
  Description of Artificial Sequence: Synthetic oligonucleotide
  Antisense strand to SEQ ID NO: 1818691
uacaaugugaguuacuggg

SEQ ID NO: 1818693 - RNA, 19 nt, Artificial Sequence
  Description of Artificial Sequence: Synthetic oligonucleotide
  Sense strand starting at position 3737 of SEQ ID NO: 1563549
aguaacucacauuguaauu

SEQ ID NO: 1818694 - RNA, 19 nt, Artificial Sequence
  Description of Artificial Sequence: Synthetic oligonucleotide
  Antisense strand to SEQ ID NO: 1818693
aauuacaaugugaguuacu

SEQ ID NO: 1818695 - RNA, 19 nt, Artificial Sequence
  Description of Artificial Sequence: Synthetic oligonucleotide
  Sense strand starting at position 3771 of SEQ ID NO: 1563549
ccggcaagcauuuguuaau

SEQ ID NO: 1818696 - RNA, 19 nt, Artificial Sequence
  Description of Artificial Sequence: Synthetic oligonucleotide
  Antisense strand to SEQ ID NO: 1818695
auuaacaaaugcuugccgg

SEQ ID NO: 1818697 - RNA, 19 nt, Artificial Sequence
  Description of Artificial Sequence: Synthetic oligonucleotide
  Sense strand starting at position 3777 of SEQ ID NO: 1563549
agcauuuguuaauguuaag

SEQ ID NO: 1818698 - RNA, 19 nt, Artificial Sequence
  Description of Artificial Sequence: Synthetic oligonucleotide
  Antisense strand to SEQ ID NO: 1818697
cuuaacauuaacaaaugcu

SEQ ID NO: 1818699 - RNA, 19 nt, Artificial Sequence
  Description of Artificial Sequence: Synthetic oligonucleotide
  Sense strand starting at position 3814 of SEQ ID NO: 1563549
agccuuaauugagcgcgua

SEQ ID NO: 1818700 - RNA, 19 nt, Artificial Sequence
  Description of Artificial Sequence: Synthetic oligonucleotide
  Antisense strand to SEQ ID NO: 1818699
uacgcgcucaauuaaggcu

SEQ ID NO: 1818701 - RNA, 19 nt, Artificial Sequence
  Description of Artificial Sequence: Synthetic oligonucleotide
  Sense strand starting at position 3816 of SEQ ID NO: 1563549
ccuuaauugagcgcguacu

SEQ ID NO: 1818702 - RNA, 19 nt, Artificial Sequence
  Description of Artificial Sequence: Synthetic oligonucleotide
  Antisense strand to SEQ ID NO: 1818701
aguacgcgcucaauuaagg

SEQ ID NO: 1818703 - RNA, 19 nt, Artificial Sequence
  Description of Artificial Sequence: Synthetic oligonucleotide
  Sense strand starting at position 3817 of SEQ ID NO: 1563549
cuuaauugagcgcguacua

SEQ ID NO: 1818704 - RNA, 19 nt, Artificial Sequence
  Description of Artificial Sequence: Synthetic oligonucleotide
  Antisense strand to SEQ ID NO: 1818703
uaguacgcgcucaauuaag

SEQ ID NO: 1818705 - RNA, 19 nt, Artificial Sequence
  Description of Artificial Sequence: Synthetic oligonucleotide
  Sense strand starting at position 3818 of SEQ ID NO: 1563549
uuaauugagcgcguacuau

SEQ ID NO: 1818706 - RNA, 19 nt, Artificial Sequence
  Description of Artificial Sequence: Synthetic oligonucleotide
  Antisense strand to SEQ ID NO: 1818705
auaguacgcgcucaauuaa

SEQ ID NO: 1818707 - RNA, 19 nt, Artificial Sequence
  Description of Artificial Sequence: Synthetic oligonucleotide
  Sense strand starting at position 3863 of SEQ ID NO: 1563549
gcaugcauucgucauccaa

SEQ ID NO: 1818708 - RNA, 19 nt, Artificial Sequence
  Description of Artificial Sequence: Synthetic oligonucleotide
  Antisense strand to SEQ ID NO: 1818707
uuggaugacgaaugcaugc

SEQ ID NO: 1818709 - RNA, 19 nt, Artificial Sequence
  Description of Artificial Sequence: Synthetic oligonucleotide
  Sense strand starting at position 3865 of SEQ ID NO: 1563549
augcauucgucauccaauc

SEQ ID NO: 1818710 - RNA, 19 nt, Artificial Sequence
  Description of Artificial Sequence: Synthetic oligonucleotide
  Antisense strand to SEQ ID NO: 1818709
gauuggaugacgaaugcau

SEQ ID NO: 1818711 - RNA, 19 nt, Artificial Sequence
  Description of Artificial Sequence: Synthetic oligonucleotide
  Sense strand starting at position 3885 of SEQ ID NO: 1563549
ucacaacaguguuaugaga

SEQ ID NO: 1818712 - RNA, 19 nt, Artificial Sequence
  Description of Artificial Sequence: Synthetic oligonucleotide
  Antisense strand to SEQ ID NO: 1818711
ucucauaacacuguuguga

SEQ ID NO: 1818713 - RNA, 19 nt, Artificial Sequence
  Description of Artificial Sequence: Synthetic oligonucleotide
  Sense strand starting at position 3887 of SEQ ID NO: 1563549
acaacaguguuaugagaua

SEQ ID NO: 1818714 - RNA, 19 nt, Artificial Sequence
  Description of Artificial Sequence: Synthetic oligonucleotide
  Antisense strand to SEQ ID NO: 1818713
uaucucauaacacuguugu

SEQ ID NO: 1818715 - RNA, 19 nt, Artificial Sequence
  Description of Artificial Sequence: Synthetic oligonucleotide
  Sense strand starting at position 3892 of SEQ ID NO: 1563549
aguguuaugagauagguac

SEQ ID NO: 1818716 - RNA, 19 nt, Artificial Sequence
  Description of Artificial Sequence: Synthetic oligonucleotide
  Antisense strand to SEQ ID NO: 1818715
guaccuaucucauaacacu

SEQ ID NO: 1818717 - RNA, 19 nt, Artificial Sequence
  Description of Artificial Sequence: Synthetic oligonucleotide
  Sense strand starting at position 3894 of SEQ ID NO: 1563549
uguuaugagauagguacua

SEQ ID NO: 1818718 - RNA, 19 nt, Artificial Sequence
  Description of Artificial Sequence: Synthetic oligonucleotide
  Antisense strand to SEQ ID NO: 1818717
uaguaccuaucucauaaca

SEQ ID NO: 1818719 - RNA, 19 nt, Artificial Sequence
  Description of Artificial Sequence: Synthetic oligonucleotide
  Sense strand starting at position 3942 of SEQ ID NO: 1563549
ugagguuuagugugguugu

SEQ ID NO: 1818720 - RNA, 19 nt, Artificial Sequence
  Description of Artificial Sequence: Synthetic oligonucleotide
  Antisense strand to SEQ ID NO: 1818719
acaaccacacuaaaccuca

SEQ ID NO: 1818721 - RNA, 19 nt, Artificial Sequence
  Description of Artificial Sequence: Synthetic oligonucleotide
  Sense strand starting at position 3952 of SEQ ID NO: 1563549
ugugguuguugccuaaagu

SEQ ID NO: 1818722 - RNA, 19 nt, Artificial Sequence
  Description of Artificial Sequence: Synthetic oligonucleotide
  Antisense strand to SEQ ID NO: 1818721
acuuuaggcaacaaccaca

SEQ ID NO: 1818723 - RNA, 19 nt, Artificial Sequence
  Description of Artificial Sequence: Synthetic oligonucleotide
  Sense strand starting at position 3953 of SEQ ID NO: 1563549
gugguuguugccuaaagua

SEQ ID NO: 1818724 - RNA, 19 nt, Artificial Sequence
  Description of Artificial Sequence: Synthetic oligonucleotide
  Antisense strand to SEQ ID NO: 1818723
uacuuuaggcaacaaccac

SEQ ID NO: 1818725 - RNA, 19 nt, Artificial Sequence
  Description of Artificial Sequence: Synthetic oligonucleotide
  Sense strand starting at position 233 of SEQ ID NO: 1563550
gcgucagccacugucuuaa

SEQ ID NO: 1818726 - RNA, 19 nt, Artificial Sequence
  Description of Artificial Sequence: Synthetic oligonucleotide
  Antisense strand to SEQ ID NO: 1818725
uuaagacaguggcugacgc

SEQ ID NO: 1818727 - RNA, 19 nt, Artificial Sequence
  Description of Artificial Sequence: Synthetic oligonucleotide
  Sense strand starting at position 306 of SEQ ID NO: 1563550
cuaugcuaucagggauguu

SEQ ID NO: 1818728 - RNA, 19 nt, Artificial Sequence
  Description of Artificial Sequence: Synthetic oligonucleotide
  Antisense strand to SEQ ID NO: 1818727
aacaucccugauagcauag

SEQ ID NO: 1818729 - RNA, 19 nt, Artificial Sequence
  Description of Artificial Sequence: Synthetic oligonucleotide
  Sense strand starting at position 309 of SEQ ID NO: 1563550
ugcuaucagggauguuguu

SEQ ID NO: 1818730 - RNA, 19 nt, Artificial Sequence
  Description of Artificial Sequence: Synthetic oligonucleotide
  Antisense strand to SEQ ID NO: 1818729
aacaacaucccugauagca

SEQ ID NO: 1818731 - RNA, 19 nt, Artificial Sequence
  Description of Artificial Sequence: Synthetic oligonucleotide
  Sense strand starting at position 338 of SEQ ID NO: 1563550
ucuguuguaucugcagaac

SEQ ID NO: 1818732 - RNA, 19 nt, Artificial Sequence
  Description of Artificial Sequence: Synthetic oligonucleotide
  Antisense strand to SEQ ID NO: 1818731
guucugcagauacaacaga

SEQ ID NO: 1818733 - RNA, 19 nt, Artificial Sequence
  Description of Artificial Sequence: Synthetic oligonucleotide
  Sense strand starting at position 341 of SEQ ID NO: 1563550
guuguaucugcagaaccua

SEQ ID NO: 1818734 - RNA, 19 nt, Artificial Sequence
  Description of Artificial Sequence: Synthetic oligonucleotide
  Antisense strand to SEQ ID NO: 1818733
uagguucugcagauacaac

SEQ ID NO: 1818735 - RNA, 19 nt, Artificial Sequence
  Description of Artificial Sequence: Synthetic oligonucleotide
  Sense strand starting at position 556 of SEQ ID NO: 1563550
ggcuccaggcuuugaaauc

SEQ ID NO: 1818736 - RNA, 19 nt, Artificial Sequence
  Description of Artificial Sequence: Synthetic oligonucleotide
  Antisense strand to SEQ ID NO: 1818735
gauuucaaagccuggagcc

SEQ ID NO: 1818737 - RNA, 19 nt, Artificial Sequence
  Description of Artificial Sequence: Synthetic oligonucleotide
  Sense strand starting at position 786 of SEQ ID NO: 1563550
ccacacaugcugugacaaa

SEQ ID NO: 1818738 - RNA, 19 nt, Artificial Sequence
  Description of Artificial Sequence: Synthetic oligonucleotide
  Antisense strand to SEQ ID NO: 1818737
uuugucacagcaugugugg

SEQ ID NO: 1818739 - RNA, 19 nt, Artificial Sequence
  Description of Artificial Sequence: Synthetic oligonucleotide
  Sense strand starting at position 829 of SEQ ID NO: 1563550
guucucacuccugggaaac

SEQ ID NO: 1818740 - RNA, 19 nt, Artificial Sequence
  Description of Artificial Sequence: Synthetic oligonucleotide
  Antisense strand to SEQ ID NO: 1818739
guuucccaggagugagaac

SEQ ID NO: 1818741 - RNA, 19 nt, Artificial Sequence
  Description of Artificial Sequence: Synthetic oligonucleotide
  Sense strand starting at position 830 of SEQ ID NO: 1563550
uucucacuccugggaaaca

SEQ ID NO: 1818742 - RNA, 19 nt, Artificial Sequence
  Description of Artificial Sequence: Synthetic oligonucleotide
  Antisense strand to SEQ ID NO: 1818741
uguuucccaggagugagaa

SEQ ID NO: 1818743 - RNA, 19 nt, Artificial Sequence
  Description of Artificial Sequence: Synthetic oligonucleotide
  Sense strand starting at position 1002 of SEQ ID NO: 1563550
ccuacauucugggcagaga

SEQ ID NO: 1818744 - RNA, 19 nt, Artificial Sequence
  Description of Artificial Sequence: Synthetic oligonucleotide
  Antisense strand to SEQ ID NO: 1818743
ucucugcccagaauguagg

SEQ ID NO: 1818745 - RNA, 19 nt, Artificial Sequence
  Description of Artificial Sequence: Synthetic oligonucleotide
  Sense strand starting at position 1605 of SEQ ID NO: 1563550
ggcccagagugaucaaaua

SEQ ID NO: 1818746 - RNA, 19 nt, Artificial Sequence
  Description of Artificial Sequence: Synthetic oligonucleotide
  Antisense strand to SEQ ID NO: 1818745
uauuugaucacucugggcc

SEQ ID NO: 1818747 - RNA, 19 nt, Artificial Sequence
  Description of Artificial Sequence: Synthetic oligonucleotide
  Sense strand starting at position 1641 of SEQ ID NO: 1563550
agaugucaugccuaaagau

SEQ ID NO: 1818748 - RNA, 19 nt, Artificial Sequence
  Description of Artificial Sequence: Synthetic oligonucleotide
  Antisense strand to SEQ ID NO: 1818747
aucuuuaggcaugacaucu

SEQ ID NO: 1818749 - RNA, 19 nt, Artificial Sequence
  Description of Artificial Sequence: Synthetic oligonucleotide
  Sense strand starting at position 1721 of SEQ ID NO: 1563550
gaccgcucccuggacauua

SEQ ID NO: 1818750 - RNA, 19 nt, Artificial Sequence
  Description of Artificial Sequence: Synthetic oligonucleotide
  Antisense strand to SEQ ID NO: 1818749
uaauguccagggagcgguc

SEQ ID NO: 1818751 - RNA, 19 nt, Artificial Sequence
  Description of Artificial Sequence: Synthetic oligonucleotide
  Sense strand starting at position 1789 of SEQ ID NO: 1563550
aggcuugucaccgaguuaa

SEQ ID NO: 1818752 - RNA, 19 nt, Artificial Sequence
  Description of Artificial Sequence: Synthetic oligonucleotide
  Antisense strand to SEQ ID NO: 1818751
uuaacucggugacaagccu

SEQ ID NO: 1818753 - RNA, 19 nt, Artificial Sequence
  Description of Artificial Sequence: Synthetic oligonucleotide
  Sense strand starting at position 1793 of SEQ ID NO: 1563550
uugucaccgaguuaaggau

SEQ ID NO: 1818754 - RNA, 19 nt, Artificial Sequence
  Description of Artificial Sequence: Synthetic oligonucleotide
  Antisense strand to SEQ ID NO: 1818753
auccuuaacucggugacaa

SEQ ID NO: 1818755 - RNA, 19 nt, Artificial Sequence
  Description of Artificial Sequence: Synthetic oligonucleotide
  Sense strand starting at position 1889 of SEQ ID NO: 1563550
gacugucaguuggugagua

SEQ ID NO: 1818756 - RNA, 19 nt, Artificial Sequence
  Description of Artificial Sequence: Synthetic oligonucleotide
  Antisense strand to SEQ ID NO: 1818755
uacucaccaacugacaguc

SEQ ID NO: 1818757 - RNA, 19 nt, Artificial Sequence
  Description of Artificial Sequence: Synthetic oligonucleotide
  Sense strand starting at position 1899 of SEQ ID NO: 1563550
uggugaguaggccaaagaa

SEQ ID NO: 1818758 - RNA, 19 nt, Artificial Sequence
  Description of Artificial Sequence: Synthetic oligonucleotide
  Antisense strand to SEQ ID NO: 1818757
uucuuuggccuacucacca

SEQ ID NO: 1818759 - RNA, 19 nt, Artificial Sequence
  Description of Artificial Sequence: Synthetic oligonucleotide
  Sense strand starting at position 1909 of SEQ ID NO: 1563550
gccaaagaacucuacugua

SEQ ID NO: 1818760 - RNA, 19 nt, Artificial Sequence
  Description of Artificial Sequence: Synthetic oligonucleotide
  Antisense strand to SEQ ID NO: 1818759
uacaguagaguucuuuggc

SEQ ID NO: 1818761 - RNA, 19 nt, Artificial Sequence
  Description of Artificial Sequence: Synthetic oligonucleotide
  Sense strand starting at position 2093 of SEQ ID NO: 1563550
gcacucucgcaguaaccaa

SEQ ID NO: 1818762 - RNA, 19 nt, Artificial Sequence
  Description of Artificial Sequence: Synthetic oligonucleotide
  Antisense strand to SEQ ID NO: 1818761
uugguuacugcgagagugc

SEQ ID NO: 1818763 - RNA, 19 nt, Artificial Sequence
  Description of Artificial Sequence: Synthetic oligonucleotide
  Sense strand starting at position 2330 of SEQ ID NO: 1563550
cccuuagugcugucgcaca

SEQ ID NO: 1818764 - RNA, 19 nt, Artificial Sequence
  Description of Artificial Sequence: Synthetic oligonucleotide
  Antisense strand to SEQ ID NO: 1818763
ugugcgacagcacuaaggg

SEQ ID NO: 1818765 - RNA, 19 nt, Artificial Sequence
  Description of Artificial Sequence: Synthetic oligonucleotide
  Sense strand starting at position 2408 of SEQ ID NO: 1563550
ugguacaucccaggauaga

SEQ ID NO: 1818766 - RNA, 19 nt, Artificial Sequence
  Description of Artificial Sequence: Synthetic oligonucleotide
  Antisense strand to SEQ ID NO: 1818765
ucuauccugggauguacca

SEQ ID NO: 1818767 - RNA, 19 nt, Artificial Sequence
  Description of Artificial Sequence: Synthetic oligonucleotide
  Sense strand starting at position 2810 of SEQ ID NO: 1563550
cugucaguaaugggugaga

SEQ ID NO: 1818768 - RNA, 19 nt, Artificial Sequence
  Description of Artificial Sequence: Synthetic oligonucleotide
  Antisense strand to SEQ ID NO: 1818767
ucucacccauuacugacag

SEQ ID NO: 1818769 - RNA, 19 nt, Artificial Sequence
  Description of Artificial Sequence: Synthetic oligonucleotide
  Sense strand starting at position 2888 of SEQ ID NO: 1563550
gagaaugaguaggccaaau

SEQ ID NO: 1818770 - RNA, 19 nt, Artificial Sequence
  Description of Artificial Sequence: Synthetic oligonucleotide
  Antisense strand to SEQ ID NO: 1818769
auuuggccuacucauucuc

SEQ ID NO: 1818771 - RNA, 19 nt, Artificial Sequence
  Description of Artificial Sequence: Synthetic oligonucleotide
  Sense strand starting at position 2921 of SEQ ID NO: 1563550
cugaauaugugcccuagca

SEQ ID NO: 1818772 - RNA, 19 nt, Artificial Sequence
  Description of Artificial Sequence: Synthetic oligonucleotide
  Antisense strand to SEQ ID NO: 1818771
ugcuagggcacauauucag

SEQ ID NO: 1818773 - RNA, 19 nt, Artificial Sequence
  Description of Artificial Sequence: Synthetic oligonucleotide
  Sense strand starting at position 2923 of SEQ ID NO: 1563550
gaauaugugcccuagcaga

SEQ ID NO: 1818774 - RNA, 19 nt, Artificial Sequence
  Description of Artificial Sequence: Synthetic oligonucleotide
  Antisense strand to SEQ ID NO: 1818773
ucugcuagggcacauauuc

SEQ ID NO: 1818775 - RNA, 19 nt, Artificial Sequence
  Description of Artificial Sequence: Synthetic oligonucleotide
  Sense strand starting at position 3052 of SEQ ID NO: 1563550
ggaauacagcuguguggaa

SEQ ID NO: 1818776 - RNA, 19 nt, Artificial Sequence
  Description of Artificial Sequence: Synthetic oligonucleotide
  Antisense strand to SEQ ID NO: 1818775
uuccacacagcuguauucc

SEQ ID NO: 1818777 - RNA, 19 nt, Artificial Sequence
  Description of Artificial Sequence: Synthetic oligonucleotide
  Sense strand starting at position 3053 of SEQ ID NO: 1563550
gaauacagcuguguggaaa

SEQ ID NO: 1818778 - RNA, 19 nt, Artificial Sequence
  Description of Artificial Sequence: Synthetic oligonucleotide
  Antisense strand to SEQ ID NO: 1818777
uuuccacacagcuguauuc

SEQ ID NO: 1818779 - RNA, 19 nt, Artificial Sequence
  Description of Artificial Sequence: Synthetic oligonucleotide
  Sense strand starting at position 3133 of SEQ ID NO: 1563550
guaagcauguaauuuguca

SEQ ID NO: 1818780 - RNA, 19 nt, Artificial Sequence
  Description of Artificial Sequence: Synthetic oligonucleotide
  Antisense strand to SEQ ID NO: 1818779
ugacaaauuacaugcuuac

SEQ ID NO: 1818781 - RNA, 19 nt, Artificial Sequence
  Description of Artificial Sequence: Synthetic oligonucleotide
  Sense strand starting at position 3137 of SEQ ID NO: 1563550
gcauguaauuugucaggug

SEQ ID NO: 1818782 - RNA, 19 nt, Artificial Sequence
  Description of Artificial Sequence: Synthetic oligonucleotide
  Antisense strand to SEQ ID NO: 1818781
caccugacaaauuacaugc

SEQ ID NO: 1818783 - RNA, 19 nt, Artificial Sequence
  Description of Artificial Sequence: Synthetic oligonucleotide
  Sense strand starting at position 3157 of SEQ ID NO: 1563550
ugguaauugcuguaaugaa

SEQ ID NO: 1818784 - RNA, 19 nt, Artificial Sequence
  Description of Artificial Sequence: Synthetic oligonucleotide
  Antisense strand to SEQ ID NO: 1818783
uucauuacagcaauuacca

SEQ ID NO: 1818785 - RNA, 19 nt, Artificial Sequence
  Description of Artificial Sequence: Synthetic oligonucleotide
  Sense strand starting at position 3237 of SEQ ID NO: 1563550
ucuuucugagaacgugaaa

SEQ ID NO: 1818786 - RNA, 19 nt, Artificial Sequence
  Description of Artificial Sequence: Synthetic oligonucleotide
  Antisense strand to SEQ ID NO: 1818785
uuucacguucucagaaaga

SEQ ID NO: 1818787 - RNA, 19 nt, Artificial Sequence
  Description of Artificial Sequence: Synthetic oligonucleotide
  Sense strand starting at position 3272 of SEQ ID NO: 1563550
agaugaauaucugagagaa

SEQ ID NO: 1818788 - RNA, 19 nt, Artificial Sequence
  Description of Artificial Sequence: Synthetic oligonucleotide
  Antisense strand to SEQ ID NO: 1818787
uucucucagauauucaucu

SEQ ID NO: 1818789 - RNA, 19 nt, Artificial Sequence
  Description of Artificial Sequence: Synthetic oligonucleotide
  Sense strand starting at position 3288 of SEQ ID NO: 1563550
gaagcauucugggcagaga

SEQ ID NO: 1818790 - RNA, 19 nt, Artificial Sequence
  Description of Artificial Sequence: Synthetic oligonucleotide
  Antisense strand to SEQ ID NO: 1818789
ucucugcccagaaugcuuc

SEQ ID NO: 1818791 - RNA, 19 nt, Artificial Sequence
  Description of Artificial Sequence: Synthetic oligonucleotide
  Sense strand starting at position 3289 of SEQ ID NO: 1563550
aagcauucugggcagagau

SEQ ID NO: 1818792 - RNA, 19 nt, Artificial Sequence
  Description of Artificial Sequence: Synthetic oligonucleotide
  Antisense strand to SEQ ID NO: 1818791
aucucugcccagaaugcuu

SEQ ID NO: 1818793 - RNA, 19 nt, Artificial Sequence
  Description of Artificial Sequence: Synthetic oligonucleotide
  Sense strand starting at position 3291 of SEQ ID NO: 1563550
gcauucugggcagagauaa

SEQ ID NO: 1818794 - RNA, 19 nt, Artificial Sequence
  Description of Artificial Sequence: Synthetic oligonucleotide
  Antisense strand to SEQ ID NO: 1818793
uuaucucugcccagaaugc

SEQ ID NO: 1818795 - RNA, 19 nt, Artificial Sequence
  Description of Artificial Sequence: Synthetic oligonucleotide
  Sense strand starting at position 3332 of SEQ ID NO: 1563550
guggaacucugccuagcau

SEQ ID NO: 1818796 - RNA, 19 nt, Artificial Sequence
  Description of Artificial Sequence: Synthetic oligonucleotide
  Antisense strand to SEQ ID NO: 1818795
augcuaggcagaguuccac

SEQ ID NO: 1818797 - RNA, 19 nt, Artificial Sequence
  Description of Artificial Sequence: Synthetic oligonucleotide
  Sense strand starting at position 3448 of SEQ ID NO: 1563550
uggcaaggacuuugacuua

SEQ ID NO: 1818798 - RNA, 19 nt, Artificial Sequence
  Description of Artificial Sequence: Synthetic oligonucleotide
  Antisense strand to SEQ ID NO: 1818797
uaagucaaaguccuugcca

SEQ ID NO: 1818799 - RNA, 19 nt, Artificial Sequence
  Description of Artificial Sequence: Synthetic oligonucleotide
  Sense strand starting at position 3458 of SEQ ID NO: 1563550
uuugacuuacucugagcga

SEQ ID NO: 1818800 - RNA, 19 nt, Artificial Sequence
  Description of Artificial Sequence: Synthetic oligonucleotide
  Antisense strand to SEQ ID NO: 1818799
ucgcucagaguaagucaaa

SEQ ID NO: 1818801 - RNA, 19 nt, Artificial Sequence
  Description of Artificial Sequence: Synthetic oligonucleotide
  Sense strand starting at position 3606 of SEQ ID NO: 1563550
augccuuuccuggacaauc

SEQ ID NO: 1818802 - RNA, 19 nt, Artificial Sequence
  Description of Artificial Sequence: Synthetic oligonucleotide
  Antisense strand to SEQ ID NO: 1818801
gauuguccaggaaaggcau

SEQ ID NO: 1818803 - RNA, 19 nt, Artificial Sequence
  Description of Artificial Sequence: Synthetic oligonucleotide
  Sense strand starting at position 3667 of SEQ ID NO: 1563550
auccaugucagaggaugau

SEQ ID NO: 1818804 - RNA, 19 nt, Artificial Sequence
  Description of Artificial Sequence: Synthetic oligonucleotide
  Antisense strand to SEQ ID NO: 1818803
aucauccucugacauggau

SEQ ID NO: 1818805 - RNA, 19 nt, Artificial Sequence
  Description of Artificial Sequence: Synthetic oligonucleotide
  Sense strand starting at position 353 of SEQ ID NO: 1563551
cagggcaugcuaugauaua

SEQ ID NO: 1818806 - RNA, 19 nt, Artificial Sequence
  Description of Artificial Sequence: Synthetic oligonucleotide
  Antisense strand to SEQ ID NO: 1818805
uauaucauagcaugcccug

SEQ ID NO: 1818807 - RNA, 19 nt, Artificial Sequence
  Description of Artificial Sequence: Synthetic oligonucleotide
  Sense strand starting at position 382 of SEQ ID NO: 1563551
cccaguugcagaugaggua

SEQ ID NO: 1818808 - RNA, 19 nt, Artificial Sequence
  Description of Artificial Sequence: Synthetic oligonucleotide
  Antisense strand to SEQ ID NO: 1818807
uaccucaucugcaacuggg

SEQ ID NO: 1818809 - RNA, 19 nt, Artificial Sequence
  Description of Artificial Sequence: Synthetic oligonucleotide
  Sense strand starting at position 446 of SEQ ID NO: 1563551
gggagugguggugaccauu

SEQ ID NO: 1818810 - RNA, 19 nt, Artificial Sequence
  Description of Artificial Sequence: Synthetic oligonucleotide
  Antisense strand to SEQ ID NO: 1818809
aauggucaccaccacuccc

SEQ ID NO: 1818811 - RNA, 19 nt, Artificial Sequence
  Description of Artificial Sequence: Synthetic oligonucleotide
  Sense strand starting at position 466 of SEQ ID NO: 1563551
cucacugaggucugcugaa

SEQ ID NO: 1818812 - RNA, 19 nt, Artificial Sequence
  Description of Artificial Sequence: Synthetic oligonucleotide
  Antisense strand to SEQ ID NO: 1818811
uucagcagaccucagugag

SEQ ID NO: 1818813 - RNA, 19 nt, Artificial Sequence
  Description of Artificial Sequence: Synthetic oligonucleotide
  Sense strand starting at position 751 of SEQ ID NO: 1563551
ggauuacugccacguagag

SEQ ID NO: 1818814 - RNA, 19 nt, Artificial Sequence
  Description of Artificial Sequence: Synthetic oligonucleotide
  Antisense strand to SEQ ID NO: 1818813
cucuacguggcaguaaucc

SEQ ID NO: 1818815 - RNA, 19 nt, Artificial Sequence
  Description of Artificial Sequence: Synthetic oligonucleotide
  Sense strand starting at position 767 of SEQ ID NO: 1563551
gagauuuaauuuggguauu

SEQ ID NO: 1818816 - RNA, 19 nt, Artificial Sequence
  Description of Artificial Sequence: Synthetic oligonucleotide
  Antisense strand to SEQ ID NO: 1818815
aauacccaaauuaaaucuc

SEQ ID NO: 1818817 - RNA, 19 nt, Artificial Sequence
  Description of Artificial Sequence: Synthetic oligonucleotide
  Sense strand starting at position 797 of SEQ ID NO: 1563551
gaacuacgauuugaaaugu

SEQ ID NO: 1818818 - RNA, 19 nt, Artificial Sequence
  Description of Artificial Sequence: Synthetic oligonucleotide
  Antisense strand to SEQ ID NO: 1818817
acauuucaaaucguaguuc

SEQ ID NO: 1818819 - RNA, 19 nt, Artificial Sequence
  Description of Artificial Sequence: Synthetic oligonucleotide
  Sense strand starting at position 893 of SEQ ID NO: 1563551
caaagcauuccagguaaga

SEQ ID NO: 1818820 - RNA, 19 nt, Artificial Sequence
  Description of Artificial Sequence: Synthetic oligonucleotide
  Antisense strand to SEQ ID NO: 1818819
ucuuaccuggaaugcuuug

SEQ ID NO: 1818821 - RNA, 19 nt, Artificial Sequence
  Description of Artificial Sequence: Synthetic oligonucleotide
  Sense strand starting at position 936 of SEQ ID NO: 1563551
uguugagauucugcuccua

SEQ ID NO: 1818822 - RNA, 19 nt, Artificial Sequence
  Description of Artificial Sequence: Synthetic oligonucleotide
  Antisense strand to SEQ ID NO: 1818821
uaggagcagaaucucaaca

SEQ ID NO: 1818823 - RNA, 19 nt, Artificial Sequence
  Description of Artificial Sequence: Synthetic oligonucleotide
  Sense strand starting at position 938 of SEQ ID NO: 1563551
uugagauucugcuccuaag

SEQ ID NO: 1818824 - RNA, 19 nt, Artificial Sequence
  Description of Artificial Sequence: Synthetic oligonucleotide
  Antisense strand to SEQ ID NO: 1818823
cuuaggagcagaaucucaa

SEQ ID NO: 1818825 - RNA, 19 nt, Artificial Sequence
  Description of Artificial Sequence: Synthetic oligonucleotide
  Sense strand starting at position 991 of SEQ ID NO: 1563551
cccugauaagcucagccaa

SEQ ID NO: 1818826 - RNA, 19 nt, Artificial Sequence
  Description of Artificial Sequence: Synthetic oligonucleotide
  Antisense strand to SEQ ID NO: 1818825
uuggcugagcuuaucaggg

SEQ ID NO: 1818827 - RNA, 19 nt, Artificial Sequence
  Description of Artificial Sequence: Synthetic oligonucleotide
  Sense strand starting at position 1099 of SEQ ID NO: 1563551
aguagagggaaaugguauu

SEQ ID NO: 1818828 - RNA, 19 nt, Artificial Sequence
  Description of Artificial Sequence: Synthetic oligonucleotide
  Antisense strand to SEQ ID NO: 1818827
aauaccauuucccucuacu

SEQ ID NO: 1818829 - RNA, 19 nt, Artificial Sequence
  Description of Artificial Sequence: Synthetic oligonucleotide
  Sense strand starting at position 1130 of SEQ ID NO: 1563551
gggaaucuguggcuacuca

SEQ ID NO: 1818830 - RNA, 19 nt, Artificial Sequence
  Description of Artificial Sequence: Synthetic oligonucleotide
  Antisense strand to SEQ ID NO: 1818829
ugaguagccacagauuccc

SEQ ID NO: 1818831 - RNA, 19 nt, Artificial Sequence
  Description of Artificial Sequence: Synthetic oligonucleotide
  Sense strand starting at position 1323 of SEQ ID NO: 1563551
ccauuaaacgcaugucuag

SEQ ID NO: 1818832 - RNA, 19 nt, Artificial Sequence
  Description of Artificial Sequence: Synthetic oligonucleotide
  Antisense strand to SEQ ID NO: 1818831
cuagacaugcguuuaaugg

SEQ ID NO: 1818833 - RNA, 19 nt, Artificial Sequence
  Description of Artificial Sequence: Synthetic oligonucleotide
  Sense strand starting at position 1329 of SEQ ID NO: 1563551
aacgcaugucuagucguau

SEQ ID NO: 1818834 - RNA, 19 nt, Artificial Sequence
  Description of Artificial Sequence: Synthetic oligonucleotide
  Antisense strand to SEQ ID NO: 1818833
auacgacuagacaugcguu

SEQ ID NO: 1818835 - RNA, 19 nt, Artificial Sequence
  Description of Artificial Sequence: Synthetic oligonucleotide
  Sense strand starting at position 1368 of SEQ ID NO: 1563551
cugucacacgucggagaaa

SEQ ID NO: 1818836 - RNA, 19 nt, Artificial Sequence
  Description of Artificial Sequence: Synthetic oligonucleotide
  Antisense strand to SEQ ID NO: 1818835
uuucuccgacgugugacag

SEQ ID NO: 1818837 - RNA, 19 nt, Artificial Sequence
  Description of Artificial Sequence: Synthetic oligonucleotide
  Sense strand starting at position 1380 of SEQ ID NO: 1563551
ggagaaaggguuugucgga

SEQ ID NO: 1818838 - RNA, 19 nt, Artificial Sequence
  Description of Artificial Sequence: Synthetic oligonucleotide
  Antisense strand to SEQ ID NO: 1818837
uccgacaaacccuuucucc

SEQ ID NO: 1818839 - RNA, 19 nt, Artificial Sequence
  Description of Artificial Sequence: Synthetic oligonucleotide
  Sense strand starting at position 2058 of SEQ ID NO: 1563551
cgaggaugugcucacguca

SEQ ID NO: 1818840 - RNA, 19 nt, Artificial Sequence
  Description of Artificial Sequence: Synthetic oligonucleotide
  Antisense strand to SEQ ID NO: 1818839
ugacgugagcacauccucg

SEQ ID NO: 1818841 - RNA, 19 nt, Artificial Sequence
  Description of Artificial Sequence: Synthetic oligonucleotide
  Sense strand starting at position 2378 of SEQ ID NO: 1563551
cgacuucuccugugauugg

SEQ ID NO: 1818842 - RNA, 19 nt, Artificial Sequence
  Description of Artificial Sequence: Synthetic oligonucleotide
  Antisense strand to SEQ ID NO: 1818841
ccaaucacaggagaagucg

SEQ ID NO: 1818843 - RNA, 19 nt, Artificial Sequence
  Description of Artificial Sequence: Synthetic oligonucleotide
  Sense strand starting at position 2431 of SEQ ID NO: 1563551
cgacacgugcuguuucauu

SEQ ID NO: 1818844 - RNA, 19 nt, Artificial Sequence
  Description of Artificial Sequence: Synthetic oligonucleotide
  Antisense strand to SEQ ID NO: 1818843
aaugaaacagcacgugucg

SEQ ID NO: 1818845 - RNA, 19 nt, Artificial Sequence
  Description of Artificial Sequence: Synthetic oligonucleotide
  Sense strand starting at position 2495 of SEQ ID NO: 1563551
auaaaugcaccuugguaaa

SEQ ID NO: 1818846 - RNA, 19 nt, Artificial Sequence
  Description of Artificial Sequence: Synthetic oligonucleotide
  Antisense strand to SEQ ID NO: 1818845
uuuaccaaggugcauuuau

SEQ ID NO: 1818847 - RNA, 19 nt, Artificial Sequence
  Description of Artificial Sequence: Synthetic oligonucleotide
  Sense strand starting at position 2497 of SEQ ID NO: 1563551
aaaugcaccuugguaaaga

SEQ ID NO: 1818848 - RNA, 19 nt, Artificial Sequence
  Description of Artificial Sequence: Synthetic oligonucleotide
  Antisense strand to SEQ ID NO: 1818847
ucuuuaccaaggugcauuu

SEQ ID NO: 1818849 - RNA, 19 nt, Artificial Sequence
  Description of Artificial Sequence: Synthetic oligonucleotide
  Sense strand starting at position 2708 of SEQ ID NO: 1563551
ggaagucucagccagcuga

SEQ ID NO: 1818850 - RNA, 19 nt, Artificial Sequence
  Description of Artificial Sequence: Synthetic oligonucleotide
  Antisense strand to SEQ ID NO: 1818849
ucagcuggcugagacuucc

SEQ ID NO: 1818851 - RNA, 19 nt, Artificial Sequence
  Description of Artificial Sequence: Synthetic oligonucleotide
  Sense strand starting at position 2729 of SEQ ID NO: 1563551
agggaauguuucucucugu

SEQ ID NO: 1818852 - RNA, 19 nt, Artificial Sequence
  Description of Artificial Sequence: Synthetic oligonucleotide
  Antisense strand to SEQ ID NO: 1818851
acagagagaaacauucccu

SEQ ID NO: 1818853 - RNA, 19 nt, Artificial Sequence
  Description of Artificial Sequence: Synthetic oligonucleotide
  Sense strand starting at position 2770 of SEQ ID NO: 1563551
agacuucccgucuaaguga

SEQ ID NO: 1818854 - RNA, 19 nt, Artificial Sequence
  Description of Artificial Sequence: Synthetic oligonucleotide
  Antisense strand to SEQ ID NO: 1818853
ucacuuagacgggaagucu

SEQ ID NO: 1818855 - RNA, 19 nt, Artificial Sequence
  Description of Artificial Sequence: Synthetic oligonucleotide
  Sense strand starting at position 2821 of SEQ ID NO: 1563551
gagugacucuuuccuagca

SEQ ID NO: 1818856 - RNA, 19 nt, Artificial Sequence
  Description of Artificial Sequence: Synthetic oligonucleotide
  Antisense strand to SEQ ID NO: 1818855
ugcuaggaaagagucacuc

SEQ ID NO: 1818857 - RNA, 19 nt, Artificial Sequence
  Description of Artificial Sequence: Synthetic oligonucleotide
  Sense strand starting at position 2973 of SEQ ID NO: 1563551
guaccaacagcucgggaau

SEQ ID NO: 1818858 - RNA, 19 nt, Artificial Sequence
  Description of Artificial Sequence: Synthetic oligonucleotide
  Antisense strand to SEQ ID NO: 1818857
auucccgagcuguugguac

SEQ ID NO: 1818859 - RNA, 19 nt, Artificial Sequence
  Description of Artificial Sequence: Synthetic oligonucleotide
  Sense strand starting at position 3411 of SEQ ID NO: 1563551
ggagaauaauugguccugu

SEQ ID NO: 1818860 - RNA, 19 nt, Artificial Sequence
  Description of Artificial Sequence: Synthetic oligonucleotide
  Antisense strand to SEQ ID NO: 1818859
acaggaccaauuauucucc

SEQ ID NO: 1818861 - RNA, 19 nt, Artificial Sequence
  Description of Artificial Sequence: Synthetic oligonucleotide
  Sense strand starting at position 3412 of SEQ ID NO: 1563551
gagaauaauugguccugug

SEQ ID NO: 1818862 - RNA, 19 nt, Artificial Sequence
  Description of Artificial Sequence: Synthetic oligonucleotide
  Antisense strand to SEQ ID NO: 1818861
cacaggaccaauuauucuc

SEQ ID NO: 1818863 - RNA, 19 nt, Artificial Sequence
  Description of Artificial Sequence: Synthetic oligonucleotide
  Sense strand starting at position 3433 of SEQ ID NO: 1563551
gucagugacuucccagaac

SEQ ID NO: 1818864 - RNA, 19 nt, Artificial Sequence
  Description of Artificial Sequence: Synthetic oligonucleotide
  Antisense strand to SEQ ID NO: 1818863
guucugggaagucacugac

SEQ ID NO: 1818865 - RNA, 19 nt, Artificial Sequence
  Description of Artificial Sequence: Synthetic oligonucleotide
  Sense strand starting at position 3468 of SEQ ID NO: 1563551
auuucuuuaccguggcgua

SEQ ID NO: 1818866 - RNA, 19 nt, Artificial Sequence
  Description of Artificial Sequence: Synthetic oligonucleotide
  Antisense strand to SEQ ID NO: 1818865
uacgccacgguaaagaaau

SEQ ID NO: 1818867 - RNA, 19 nt, Artificial Sequence
  Description of Artificial Sequence: Synthetic oligonucleotide
  Sense strand starting at position 3571 of SEQ ID NO: 1563551
ccucgugaacagcaguuua

SEQ ID NO: 1818868 - RNA, 19 nt, Artificial Sequence
  Description of Artificial Sequence: Synthetic oligonucleotide
  Antisense strand to SEQ ID NO: 1818867
uaaacugcuguucacgagg

SEQ ID NO: 1818869 - RNA, 19 nt, Artificial Sequence
  Description of Artificial Sequence: Synthetic oligonucleotide
  Sense strand starting at position 3582 of SEQ ID NO: 1563551
gcaguuuaugaaggaagga

SEQ ID NO: 1818870 - RNA, 19 nt, Artificial Sequence
  Description of Artificial Sequence: Synthetic oligonucleotide
  Antisense strand to SEQ ID NO: 1818869
uccuuccuucauaaacugc

SEQ ID NO: 1818871 - RNA, 19 nt, Artificial Sequence
  Description of Artificial Sequence: Synthetic oligonucleotide
  Sense strand starting at position 3681 of SEQ ID NO: 1563551
cccaaagucguacaagaaa

SEQ ID NO: 1818872 - RNA, 19 nt, Artificial Sequence
  Description of Artificial Sequence: Synthetic oligonucleotide
  Antisense strand to SEQ ID NO: 1818871
uuucuuguacgacuuuggg

SEQ ID NO: 1818873 - RNA, 19 nt, Artificial Sequence
  Description of Artificial Sequence: Synthetic oligonucleotide
  Sense strand starting at position 3696 of SEQ ID NO: 1563551
gaaauaaaugguggagucu

SEQ ID NO: 1818874 - RNA, 19 nt, Artificial Sequence
  Description of Artificial Sequence: Synthetic oligonucleotide
  Antisense strand to SEQ ID NO: 1818873
agacuccaccauuuauuuc

SEQ ID NO: 1818875 - RNA, 19 nt, Artificial Sequence
  Description of Artificial Sequence: Synthetic oligonucleotide
  Sense strand starting at position 3718 of SEQ ID NO: 1563551
uuuaaauccaggugucugu

SEQ ID NO: 1818876 - RNA, 19 nt, Artificial Sequence
  Description of Artificial Sequence: Synthetic oligonucleotide
  Antisense strand to SEQ ID NO: 1818875
acagacaccuggauuuaaa

SEQ ID NO: 1818877 - RNA, 19 nt, Artificial Sequence
  Description of Artificial Sequence: Synthetic oligonucleotide
  Sense strand starting at position 3891 of SEQ ID NO: 1563551
ggagauggcuucccagaga

SEQ ID NO: 1818878 - RNA, 19 nt, Artificial Sequence
  Description of Artificial Sequence: Synthetic oligonucleotide
  Antisense strand to SEQ ID NO: 1818877
ucucugggaagccaucucc

SEQ ID NO: 1818879 - RNA, 19 nt, Artificial Sequence
  Description of Artificial Sequence: Synthetic oligonucleotide
  Sense strand starting at position 3919 of SEQ ID NO: 1563551
uagagauccugggucccaa

SEQ ID NO: 1818880 - RNA, 19 nt, Artificial Sequence
  Description of Artificial Sequence: Synthetic oligonucleotide
  Antisense strand to SEQ ID NO: 1818879
uugggacccaggaucucua

SEQ ID NO: 1818881 - RNA, 19 nt, Artificial Sequence
  Description of Artificial Sequence: Synthetic oligonucleotide
  Sense strand starting at position 3968 of SEQ ID NO: 1563551
gggcuucaagaggaaguuu

SEQ ID NO: 1818882 - RNA, 19 nt, Artificial Sequence
  Description of Artificial Sequence: Synthetic oligonucleotide
  Antisense strand to SEQ ID NO: 1818881
aaacuuccucuugaagccc

SEQ ID NO: 1818883 - RNA, 19 nt, Artificial Sequence
  Description of Artificial Sequence: Synthetic oligonucleotide
  Sense strand starting at position 3976 of SEQ ID NO: 1563551
agaggaaguuuagaagauu

SEQ ID NO: 1818884 - RNA, 19 nt, Artificial Sequence
  Description of Artificial Sequence: Synthetic oligonucleotide
  Antisense strand to SEQ ID NO: 1818883
aaucuucuaaacuuccucu

SEQ ID NO: 1818885 - RNA, 19 nt, Artificial Sequence
  Description of Artificial Sequence: Synthetic oligonucleotide
  Sense strand starting at position 352 of SEQ ID NO: 1563552
cagggcaugcuaugauaua

SEQ ID NO: 1818886 - RNA, 19 nt, Artificial Sequence
  Description of Artificial Sequence: Synthetic oligonucleotide
  Antisense strand to SEQ ID NO: 1818885
uauaucauagcaugcccug

SEQ ID NO: 1818887 - RNA, 19 nt, Artificial Sequence
  Description of Artificial Sequence: Synthetic oligonucleotide
  Sense strand starting at position 381 of SEQ ID NO: 1563552
cccaguugcagaugaggua

SEQ ID NO: 1818888 - RNA, 19 nt, Artificial Sequence
  Description of Artificial Sequence: Synthetic oligonucleotide
  Antisense strand to SEQ ID NO: 1818887
uaccucaucugcaacuggg

SEQ ID NO: 1818889 - RNA, 19 nt, Artificial Sequence
  Description of Artificial Sequence: Synthetic oligonucleotide
  Sense strand starting at position 445 of SEQ ID NO: 1563552
gggagugguggugaccauu

SEQ ID NO: 1818890 - RNA, 19 nt, Artificial Sequence
  Description of Artificial Sequence: Synthetic oligonucleotide
  Antisense strand to SEQ ID NO: 1818889
aauggucaccaccacuccc

SEQ ID NO: 1818891 - RNA, 19 nt, Artificial Sequence
  Description of Artificial Sequence: Synthetic oligonucleotide
  Sense strand starting at position 465 of SEQ ID NO: 1563552
cucacugaggucugcugaa

SEQ ID NO: 1818892 - RNA, 19 nt, Artificial Sequence
  Description of Artificial Sequence: Synthetic oligonucleotide
  Antisense strand to SEQ ID NO: 1818891
uucagcagaccucagugag

SEQ ID NO: 1818893 - RNA, 19 nt, Artificial Sequence
  Description of Artificial Sequence: Synthetic oligonucleotide
  Sense strand starting at position 604 of SEQ ID NO: 1563552
ggcuacacacgguauagau

SEQ ID NO: 1818894 - RNA, 19 nt, Artificial Sequence
  Description of Artificial Sequence: Synthetic oligonucleotide
  Antisense strand to SEQ ID NO: 1818893
aucuauaccguguguagcc

SEQ ID NO: 1818895 - RNA, 19 nt, Artificial Sequence
  Description of Artificial Sequence: Synthetic oligonucleotide
  Sense strand starting at position 639 of SEQ ID NO: 1563552
aggccuuucccuuaaagaa

SEQ ID NO: 1818896 - RNA, 19 nt, Artificial Sequence
  Description of Artificial Sequence: Synthetic oligonucleotide
  Antisense strand to SEQ ID NO: 1818895
uucuuuaagggaaaggccu

SEQ ID NO: 1818897 - RNA, 19 nt, Artificial Sequence
  Description of Artificial Sequence: Synthetic oligonucleotide
  Sense strand starting at position 750 of SEQ ID NO: 1563552
ggauuacugccacguagag

SEQ ID NO: 1818898 - RNA, 19 nt, Artificial Sequence
  Description of Artificial Sequence: Synthetic oligonucleotide
  Antisense strand to SEQ ID NO: 1818897
cucuacguggcaguaaucc

SEQ ID NO: 1818899 - RNA, 19 nt, Artificial Sequence
  Description of Artificial Sequence: Synthetic oligonucleotide
  Sense strand starting at position 752 of SEQ ID NO: 1563552
auuacugccacguagagau

SEQ ID NO: 1818900 - RNA, 19 nt, Artificial Sequence
  Description of Artificial Sequence: Synthetic oligonucleotide
  Antisense strand to SEQ ID NO: 1818899
aucucuacguggcaguaau

SEQ ID NO: 1818901 - RNA, 19 nt, Artificial Sequence
  Description of Artificial Sequence: Synthetic oligonucleotide
  Sense strand starting at position 766 of SEQ ID NO: 1563552
gagauuuaauuuggguauu

SEQ ID NO: 1818902 - RNA, 19 nt, Artificial Sequence
  Description of Artificial Sequence: Synthetic oligonucleotide
  Antisense strand to SEQ ID NO: 1818901
aauacccaaauuaaaucuc

SEQ ID NO: 1818903 - RNA, 19 nt, Artificial Sequence
  Description of Artificial Sequence: Synthetic oligonucleotide
  Sense strand starting at position 796 of SEQ ID NO: 1563552
gaacuacgauuugaaaugu

SEQ ID NO: 1818904 - RNA, 19 nt, Artificial Sequence
  Description of Artificial Sequence: Synthetic oligonucleotide
  Antisense strand to SEQ ID NO: 1818903
acauuucaaaucguaguuc

SEQ ID NO: 1818905 - RNA, 19 nt, Artificial Sequence
  Description of Artificial Sequence: Synthetic oligonucleotide
  Sense strand starting at position 892 of SEQ ID NO: 1563552
caaagcauuccagguaaga

SEQ ID NO: 1818906 - RNA, 19 nt, Artificial Sequence
  Description of Artificial Sequence: Synthetic oligonucleotide
  Antisense strand to SEQ ID NO: 1818905
ucuuaccuggaaugcuuug

SEQ ID NO: 1818907 - RNA, 19 nt, Artificial Sequence
  Description of Artificial Sequence: Synthetic oligonucleotide
  Sense strand starting at position 990 of SEQ ID NO: 1563552
cccugauaagcucagccaa

SEQ ID NO: 1818908 - RNA, 19 nt, Artificial Sequence
  Description of Artificial Sequence: Synthetic oligonucleotide
  Antisense strand to SEQ ID NO: 1818907
uuggcugagcuuaucaggg

SEQ ID NO: 1818909 - RNA, 19 nt, Artificial Sequence
  Description of Artificial Sequence: Synthetic oligonucleotide
  Sense strand starting at position 1098 of SEQ ID NO: 1563552
aguagagggaaaugguauu

SEQ ID NO: 1818910 - RNA, 19 nt, Artificial Sequence
  Description of Artificial Sequence: Synthetic oligonucleotide
  Antisense strand to SEQ ID NO: 1818909
aauaccauuucccucuacu

SEQ ID NO: 1818911 - RNA, 19 nt, Artificial Sequence
  Description of Artificial Sequence: Synthetic oligonucleotide
  Sense strand starting at position 1110 of SEQ ID NO: 1563552
ugguauuggagaugcagau

SEQ ID NO: 1818912 - RNA, 19 nt, Artificial Sequence
  Description of Artificial Sequence: Synthetic oligonucleotide
  Antisense strand to SEQ ID NO: 1818911
aucugcaucuccaauacca

SEQ ID NO: 1818913 - RNA, 19 nt, Artificial Sequence
  Description of Artificial Sequence: Synthetic oligonucleotide
  Sense strand starting at position 1129 of SEQ ID NO: 1563552
gggaaucuguggcuacuca

SEQ ID NO: 1818914 - RNA, 19 nt, Artificial Sequence
  Description of Artificial Sequence: Synthetic oligonucleotide
  Antisense strand to SEQ ID NO: 1818913
ugaguagccacagauuccc

SEQ ID NO: 1818915 - RNA, 19 nt, Artificial Sequence
  Description of Artificial Sequence: Synthetic oligonucleotide
  Sense strand starting at position 1328 of SEQ ID NO: 1563552
aacgcaugucuagucguau

SEQ ID NO: 1818916 - RNA, 19 nt, Artificial Sequence
  Description of Artificial Sequence: Synthetic oligonucleotide
  Antisense strand to SEQ ID NO: 1818915
auacgacuagacaugcguu

SEQ ID NO: 1818917 - RNA, 19 nt, Artificial Sequence
  Description of Artificial Sequence: Synthetic oligonucleotide
  Sense strand starting at position 1367 of SEQ ID NO: 1563552
cugucacacgucggagaaa

SEQ ID NO: 1818918 - RNA, 19 nt, Artificial Sequence
  Description of Artificial Sequence: Synthetic oligonucleotide
  Antisense strand to SEQ ID NO: 1818917
uuucuccgacgugugacag

SEQ ID NO: 1818919 - RNA, 19 nt, Artificial Sequence
  Description of Artificial Sequence: Synthetic oligonucleotide
  Sense strand starting at position 1379 of SEQ ID NO: 1563552
ggagaaaggguuugucgga

SEQ ID NO: 1818920 - RNA, 19 nt, Artificial Sequence
  Description of Artificial Sequence: Synthetic oligonucleotide
  Antisense strand to SEQ ID NO: 1818919
uccgacaaacccuuucucc

SEQ ID NO: 1818921 - RNA, 19 nt, Artificial Sequence
  Description of Artificial Sequence: Synthetic oligonucleotide
  Sense strand starting at position 1975 of SEQ ID NO: 1563552
cucguaauugaaggguuaa

SEQ ID NO: 1818922 - RNA, 19 nt, Artificial Sequence
  Description of Artificial Sequence: Synthetic oligonucleotide
  Antisense strand to SEQ ID NO: 1818921
uuaacccuucaauuacgag

SEQ ID NO: 1818923 - RNA, 19 nt, Artificial Sequence
  Description of Artificial Sequence: Synthetic oligonucleotide
  Sense strand starting at position 1976 of SEQ ID NO: 1563552
ucguaauugaaggguuaag

SEQ ID NO: 1818924 - RNA, 19 nt, Artificial Sequence
  Description of Artificial Sequence: Synthetic oligonucleotide
  Antisense strand to SEQ ID NO: 1818923
cuuaacccuucaauuacga

SEQ ID NO: 1818925 - RNA, 19 nt, Artificial Sequence
  Description of Artificial Sequence: Synthetic oligonucleotide
  Sense strand starting at position 2430 of SEQ ID NO: 1563552
cgacacgugcuguuucauu

SEQ ID NO: 1818926 - RNA, 19 nt, Artificial Sequence
  Description of Artificial Sequence: Synthetic oligonucleotide
  Antisense strand to SEQ ID NO: 1818925
aaugaaacagcacgugucg

SEQ ID NO: 1818927 - RNA, 19 nt, Artificial Sequence
  Description of Artificial Sequence: Synthetic oligonucleotide
  Sense strand starting at position 2494 of SEQ ID NO: 1563552
auaaaugcaccuugguaaa

SEQ ID NO: 1818928 - RNA, 19 nt, Artificial Sequence
  Description of Artificial Sequence: Synthetic oligonucleotide
  Antisense strand to SEQ ID NO: 1818927
uuuaccaaggugcauuuau

SEQ ID NO: 1818929 - RNA, 19 nt, Artificial Sequence
  Description of Artificial Sequence: Synthetic oligonucleotide
  Sense strand starting at position 2496 of SEQ ID NO: 1563552
aaaugcaccuugguaaaga

SEQ ID NO: 1818930 - RNA, 19 nt, Artificial Sequence
  Description of Artificial Sequence: Synthetic oligonucleotide
  Antisense strand to SEQ ID NO: 1818929
ucuuuaccaaggugcauuu

SEQ ID NO: 1818931 - RNA, 19 nt, Artificial Sequence
  Description of Artificial Sequence: Synthetic oligonucleotide
  Sense strand starting at position 2707 of SEQ ID NO: 1563552
ggaagucucagccagcuga

SEQ ID NO: 1818932 - RNA, 19 nt, Artificial Sequence
  Description of Artificial Sequence: Synthetic oligonucleotide
  Antisense strand to SEQ ID NO: 1818931
ucagcuggcugagacuucc

SEQ ID NO: 1818933 - RNA, 19 nt, Artificial Sequence
  Description of Artificial Sequence: Synthetic oligonucleotide
  Sense strand starting at position 2728 of SEQ ID NO: 1563552
agggaauguuucucucugu

SEQ ID NO: 1818934 - RNA, 19 nt, Artificial Sequence
  Description of Artificial Sequence: Synthetic oligonucleotide
  Antisense strand to SEQ ID NO: 1818933
acagagagaaacauucccu

SEQ ID NO: 1818935 - RNA, 19 nt, Artificial Sequence
  Description of Artificial Sequence: Synthetic oligonucleotide
  Sense strand starting at position 2769 of SEQ ID NO: 1563552
agacuucccgucuaaguga

SEQ ID NO: 1818936 - RNA, 19 nt, Artificial Sequence
  Description of Artificial Sequence: Synthetic oligonucleotide
  Antisense strand to SEQ ID NO: 1818935
ucacuuagacgggaagucu

SEQ ID NO: 1818937 - RNA, 19 nt, Artificial Sequence
  Description of Artificial Sequence: Synthetic oligonucleotide
  Sense strand starting at position 2820 of SEQ ID NO: 1563552
gagugacucuuuccuagca

SEQ ID NO: 1818938 - RNA, 19 nt, Artificial Sequence
  Description of Artificial Sequence: Synthetic oligonucleotide
  Antisense strand to SEQ ID NO: 1818937
ugcuaggaaagagucacuc

SEQ ID NO: 1818939 - RNA, 19 nt, Artificial Sequence
  Description of Artificial Sequence: Synthetic oligonucleotide
  Sense strand starting at position 2972 of SEQ ID NO: 1563552
guaccaacagcucgggaau

SEQ ID NO: 1818940 - RNA, 19 nt, Artificial Sequence
  Description of Artificial Sequence: Synthetic oligonucleotide
  Antisense strand to SEQ ID NO: 1818939
auucccgagcuguugguac

SEQ ID NO: 1818941 - RNA, 19 nt, Artificial Sequence
  Description of Artificial Sequence: Synthetic oligonucleotide
  Sense strand starting at position 2986 of SEQ ID NO: 1563552
ggaaugugcucgguggaag

SEQ ID NO: 1818942 - RNA, 19 nt, Artificial Sequence
  Description of Artificial Sequence: Synthetic oligonucleotide
  Antisense strand to SEQ ID NO: 1818941
cuuccaccgagcacauucc

SEQ ID NO: 1818943 - RNA, 19 nt, Artificial Sequence
  Description of Artificial Sequence: Synthetic oligonucleotide
  Sense strand starting at position 3410 of SEQ ID NO: 1563552
ggagaauaauugguccugu

SEQ ID NO: 1818944 - RNA, 19 nt, Artificial Sequence
  Description of Artificial Sequence: Synthetic oligonucleotide
  Antisense strand to SEQ ID NO: 1818943
acaggaccaauuauucucc

SEQ ID NO: 1818945 - RNA, 19 nt, Artificial Sequence
  Description of Artificial Sequence: Synthetic oligonucleotide
  Sense strand starting at position 3411 of SEQ ID NO: 1563552
gagaauaauugguccugug

SEQ ID NO: 1818946 - RNA, 19 nt, Artificial Sequence
  Description of Artificial Sequence: Synthetic oligonucleotide
  Antisense strand to SEQ ID NO: 1818945
cacaggaccaauuauucuc

SEQ ID NO: 1818947 - RNA, 19 nt, Artificial Sequence
  Description of Artificial Sequence: Synthetic oligonucleotide
  Sense strand starting at position 3432 of SEQ ID NO: 1563552
gucagugacuucccagaac

SEQ ID NO: 1818948 - RNA, 19 nt, Artificial Sequence
  Description of Artificial Sequence: Synthetic oligonucleotide
  Antisense strand to SEQ ID NO: 1818947
guucugggaagucacugac

SEQ ID NO: 1818949 - RNA, 19 nt, Artificial Sequence
  Description of Artificial Sequence: Synthetic oligonucleotide
  Sense strand starting at position 3467 of SEQ ID NO: 1563552
auuucuuuaccguggcgua

SEQ ID NO: 1818950 - RNA, 19 nt, Artificial Sequence
  Description of Artificial Sequence: Synthetic oligonucleotide
  Antisense strand to SEQ ID NO: 1818949
uacgccacgguaaagaaau

SEQ ID NO: 1818951 - RNA, 19 nt, Artificial Sequence
  Description of Artificial Sequence: Synthetic oligonucleotide
  Sense strand starting at position 3570 of SEQ ID NO: 1563552
ccucgugaacagcaguuua

SEQ ID NO: 1818952 - RNA, 19 nt, Artificial Sequence
  Description of Artificial Sequence: Synthetic oligonucleotide
  Antisense strand to SEQ ID NO: 1818951
uaaacugcuguucacgagg

SEQ ID NO: 1818953 - RNA, 19 nt, Artificial Sequence
  Description of Artificial Sequence: Synthetic oligonucleotide
  Sense strand starting at position 3581 of SEQ ID NO: 1563552
gcaguuuaugaaggaagga

SEQ ID NO: 1818954 - RNA, 19 nt, Artificial Sequence
  Description of Artificial Sequence: Synthetic oligonucleotide
  Antisense strand to SEQ ID NO: 1818953
uccuuccuucauaaacugc

SEQ ID NO: 1818955 - RNA, 19 nt, Artificial Sequence
  Description of Artificial Sequence: Synthetic oligonucleotide
  Sense strand starting at position 3680 of SEQ ID NO: 1563552
cccaaagucguacaagaaa

SEQ ID NO: 1818956 - RNA, 19 nt, Artificial Sequence
  Description of Artificial Sequence: Synthetic oligonucleotide
  Antisense strand to SEQ ID NO: 1818955
uuucuuguacgacuuuggg

SEQ ID NO: 1818957 - RNA, 19 nt, Artificial Sequence
  Description of Artificial Sequence: Synthetic oligonucleotide
  Sense strand starting at position 3695 of SEQ ID NO: 1563552
gaaauaaaugguggagucu

SEQ ID NO: 1818958 - RNA, 19 nt, Artificial Sequence
  Description of Artificial Sequence: Synthetic oligonucleotide
  Antisense strand to SEQ ID NO: 1818957
agacuccaccauuuauuuc

SEQ ID NO: 1818959 - RNA, 19 nt, Artificial Sequence
  Description of Artificial Sequence: Synthetic oligonucleotide
  Sense strand starting at position 3890 of SEQ ID NO: 1563552
ggagauggcuucccagaga

SEQ ID NO: 1818960 - RNA, 19 nt, Artificial Sequence
  Description of Artificial Sequence: Synthetic oligonucleotide
  Antisense strand to SEQ ID NO: 1818959
ucucugggaagccaucucc

SEQ ID NO: 1818961 - RNA, 19 nt, Artificial Sequence
  Description of Artificial Sequence: Synthetic oligonucleotide
  Sense strand starting at position 3918 of SEQ ID NO: 1563552
uagagauccugggucccaa

SEQ ID NO: 1818962 - RNA, 19 nt, Artificial Sequence
  Description of Artificial Sequence: Synthetic oligonucleotide
  Antisense strand to SEQ ID NO: 1818961
uugggacccaggaucucua

SEQ ID NO: 1818963 - RNA, 19 nt, Artificial Sequence
  Description of Artificial Sequence: Synthetic oligonucleotide
  Sense strand starting at position 3967 of SEQ ID NO: 1563552
gggcuucaagaggaaguuu

SEQ ID NO: 1818964 - RNA, 19 nt, Artificial Sequence
  Description of Artificial Sequence: Synthetic oligonucleotide
  Antisense strand to SEQ ID NO: 1818963
aaacuuccucuugaagccc

SEQ ID NO: 1818965 - RNA, 19 nt, Artificial Sequence
  Description of Artificial Sequence: Synthetic oligonucleotide
  Sense strand starting at position 154 of SEQ ID NO: 1563553
cugcaugacucagcugaga

SEQ ID NO: 1818966 - RNA, 19 nt, Artificial Sequence
  Description of Artificial Sequence: Synthetic oligonucleotide
  Antisense strand to SEQ ID NO: 1818965
ucucagcugagucaugcag

SEQ ID NO: 1818967 - RNA, 19 nt, Artificial Sequence
  Description of Artificial Sequence: Synthetic oligonucleotide
  Sense strand starting at position 156 of SEQ ID NO: 1563553
gcaugacucagcugagaua

SEQ ID NO: 1818968 - RNA, 19 nt, Artificial Sequence
  Description of Artificial Sequence: Synthetic oligonucleotide
  Antisense strand to SEQ ID NO: 1818967
uaucucagcugagucaugc

SEQ ID NO: 1818969 - RNA, 19 nt, Artificial Sequence
  Description of Artificial Sequence: Synthetic oligonucleotide
  Sense strand starting at position 251 of SEQ ID NO: 1563553
gcugucaacagaugguuau

SEQ ID NO: 1818970 - RNA, 19 nt, Artificial Sequence
  Description of Artificial Sequence: Synthetic oligonucleotide
  Antisense strand to SEQ ID NO: 1818969
auaaccaucuguugacagc

SEQ ID NO: 1818971 - RNA, 19 nt, Artificial Sequence
  Description of Artificial Sequence: Synthetic oligonucleotide
  Sense strand starting at position 252 of SEQ ID NO: 1563553
cugucaacagaugguuauu

SEQ ID NO: 1818972 - RNA, 19 nt, Artificial Sequence
  Description of Artificial Sequence: Synthetic oligonucleotide
  Antisense strand to SEQ ID NO: 1818971
aauaaccaucuguugacag

SEQ ID NO: 1818973 - RNA, 19 nt, Artificial Sequence
  Description of Artificial Sequence: Synthetic oligonucleotide
  Sense strand starting at position 263 of SEQ ID NO: 1563553
ugguuauuucucugucaac

SEQ ID NO: 1818974 - RNA, 19 nt, Artificial Sequence
  Description of Artificial Sequence: Synthetic oligonucleotide
  Antisense strand to SEQ ID NO: 1818973
guugacagagaaauaacca

SEQ ID NO: 1818975 - RNA, 19 nt, Artificial Sequence
  Description of Artificial Sequence: Synthetic oligonucleotide
  Sense strand starting at position 264 of SEQ ID NO: 1563553
gguuauuucucugucaacc

SEQ ID NO: 1818976 - RNA, 19 nt, Artificial Sequence
  Description of Artificial Sequence: Synthetic oligonucleotide
  Antisense strand to SEQ ID NO: 1818975
gguugacagagaaauaacc

SEQ ID NO: 1818977 - RNA, 19 nt, Artificial Sequence
  Description of Artificial Sequence: Synthetic oligonucleotide
  Sense strand starting at position 425 of SEQ ID NO: 1563553
ucaagucaacccugcagaa

SEQ ID NO: 1818978 - RNA, 19 nt, Artificial Sequence
  Description of Artificial Sequence: Synthetic oligonucleotide
  Antisense strand to SEQ ID NO: 1818977
uucugcaggguugacuuga

SEQ ID NO: 1818979 - RNA, 19 nt, Artificial Sequence
  Description of Artificial Sequence: Synthetic oligonucleotide
  Sense strand starting at position 471 of SEQ ID NO: 1563553
gaaauuccugcauggagag

SEQ ID NO: 1818980 - RNA, 19 nt, Artificial Sequence
  Description of Artificial Sequence: Synthetic oligonucleotide
  Antisense strand to SEQ ID NO: 1818979
cucuccaugcaggaauuuc

SEQ ID NO: 1818981 - RNA, 19 nt, Artificial Sequence
  Description of Artificial Sequence: Synthetic oligonucleotide
  Sense strand starting at position 607 of SEQ ID NO: 1563553
ccugauaccuaagcgagaa

SEQ ID NO: 1818982 - RNA, 19 nt, Artificial Sequence
  Description of Artificial Sequence: Synthetic oligonucleotide
  Antisense strand to SEQ ID NO: 1818981
uucucgcuuagguaucagg

SEQ ID NO: 1818983 - RNA, 19 nt, Artificial Sequence
  Description of Artificial Sequence: Synthetic oligonucleotide
  Sense strand starting at position 611 of SEQ ID NO: 1563553
auaccuaagcgagaaagua

SEQ ID NO: 1818984 - RNA, 19 nt, Artificial Sequence
  Description of Artificial Sequence: Synthetic oligonucleotide
  Antisense strand to SEQ ID NO: 1818983
uacuuucucgcuuagguau

SEQ ID NO: 1818985 - RNA, 19 nt, Artificial Sequence
  Description of Artificial Sequence: Synthetic oligonucleotide
  Sense strand starting at position 808 of SEQ ID NO: 1563553
ucaauucuccugugcggaa

SEQ ID NO: 1818986 - RNA, 19 nt, Artificial Sequence
  Description of Artificial Sequence: Synthetic oligonucleotide
  Antisense strand to SEQ ID NO: 1818985
uuccgcacaggagaauuga

SEQ ID NO: 1818987 - RNA, 19 nt, Artificial Sequence
  Description of Artificial Sequence: Synthetic oligonucleotide
  Sense strand starting at position 913 of SEQ ID NO: 1563553
aagccagucccaugugaug

SEQ ID NO: 1818988 - RNA, 19 nt, Artificial Sequence
  Description of Artificial Sequence: Synthetic oligonucleotide
  Antisense strand to SEQ ID NO: 1818987
caucacaugggacuggcuu

SEQ ID NO: 1818989 - RNA, 19 nt, Artificial Sequence
  Description of Artificial Sequence: Synthetic oligonucleotide
  Sense strand starting at position 1108 of SEQ ID NO: 1563553
uccgucuccugguuuaaag

SEQ ID NO: 1818990 - RNA, 19 nt, Artificial Sequence
  Description of Artificial Sequence: Synthetic oligonucleotide
  Antisense strand to SEQ ID NO: 1818989
cuuuaaaccaggagacgga

SEQ ID NO: 1818991 - RNA, 19 nt, Artificial Sequence
  Description of Artificial Sequence: Synthetic oligonucleotide
  Sense strand starting at position 1364 of SEQ ID NO: 1563553
augucuaaggucugugcaa

SEQ ID NO: 1818992 - RNA, 19 nt, Artificial Sequence
  Description of Artificial Sequence: Synthetic oligonucleotide
  Antisense strand to SEQ ID NO: 1818991
uugcacagaccuuagacau

SEQ ID NO: 1818993 - RNA, 19 nt, Artificial Sequence
  Description of Artificial Sequence: Synthetic oligonucleotide
  Sense strand starting at position 1380 of SEQ ID NO: 1563553
caaguucucugggugcuga

SEQ ID NO: 1818994 - RNA, 19 nt, Artificial Sequence
  Description of Artificial Sequence: Synthetic oligonucleotide
  Antisense strand to SEQ ID NO: 1818993
ucagcacccagagaacuug

SEQ ID NO: 1818995 - RNA, 19 nt, Artificial Sequence
  Description of Artificial Sequence: Synthetic oligonucleotide
  Sense strand starting at position 1381 of SEQ ID NO: 1563553
aaguucucugggugcugaa

SEQ ID NO: 1818996 - RNA, 19 nt, Artificial Sequence
  Description of Artificial Sequence: Synthetic oligonucleotide
  Antisense strand to SEQ ID NO: 1818995
uucagcacccagagaacuu

SEQ ID NO: 1818997 - RNA, 19 nt, Artificial Sequence
  Description of Artificial Sequence: Synthetic oligonucleotide
  Sense strand starting at position 1463 of SEQ ID NO: 1563553
cacacagauugaggaaaga

SEQ ID NO: 1818998 - RNA, 19 nt, Artificial Sequence
  Description of Artificial Sequence: Synthetic oligonucleotide
  Antisense strand to SEQ ID NO: 1818997
ucuuuccucaaucugugug

SEQ ID NO: 1818999 - RNA, 19 nt, Artificial Sequence
  Description of Artificial Sequence: Synthetic oligonucleotide
  Sense strand starting at position 1473 of SEQ ID NO: 1563553
gaggaaagagucuguccua

SEQ ID NO: 1819000 - RNA, 19 nt, Artificial Sequence
  Description of Artificial Sequence: Synthetic oligonucleotide
  Antisense strand to SEQ ID NO: 1818999
uaggacagacucuuuccuc

SEQ ID NO: 1819001 - RNA, 19 nt, Artificial Sequence
  Description of Artificial Sequence: Synthetic oligonucleotide
  Sense strand starting at position 1476 of SEQ ID NO: 1563553
gaaagagucuguccuacac

SEQ ID NO: 1819002 - RNA, 19 nt, Artificial Sequence
  Description of Artificial Sequence: Synthetic oligonucleotide
  Antisense strand to SEQ ID NO: 1819001
guguaggacagacucuuuc

SEQ ID NO: 1819003 - RNA, 19 nt, Artificial Sequence
  Description of Artificial Sequence: Synthetic oligonucleotide
  Sense strand starting at position 1480 of SEQ ID NO: 1563553
gagucuguccuacacauga

SEQ ID NO: 1819004 - RNA, 19 nt, Artificial Sequence
  Description of Artificial Sequence: Synthetic oligonucleotide
  Antisense strand to SEQ ID NO: 1819003
ucauguguaggacagacuc

SEQ ID NO: 1819005 - RNA, 19 nt, Artificial Sequence
  Description of Artificial Sequence: Synthetic oligonucleotide
  Sense strand starting at position 1577 of SEQ ID NO: 1563553
uuuagcagcuuuguaacaa

SEQ ID NO: 1819006 - RNA, 19 nt, Artificial Sequence
  Description of Artificial Sequence: Synthetic oligonucleotide
  Antisense strand to SEQ ID NO: 1819005
uuguuacaaagcugcuaaa

SEQ ID NO: 1819007 - RNA, 19 nt, Artificial Sequence
  Description of Artificial Sequence: Synthetic oligonucleotide
  Sense strand starting at position 2440 of SEQ ID NO: 1563553
cagggcaugcuaugauaua

SEQ ID NO: 1819008 - RNA, 19 nt, Artificial Sequence
  Description of Artificial Sequence: Synthetic oligonucleotide
  Antisense strand to SEQ ID NO: 1819007
uauaucauagcaugcccug

SEQ ID NO: 1819009 - RNA, 19 nt, Artificial Sequence
  Description of Artificial Sequence: Synthetic oligonucleotide
  Sense strand starting at position 2469 of SEQ ID NO: 1563553
cccaguugcagaugaggua

SEQ ID NO: 1819010 - RNA, 19 nt, Artificial Sequence
  Description of Artificial Sequence: Synthetic oligonucleotide
  Antisense strand to SEQ ID NO: 1819009
uaccucaucugcaacuggg

SEQ ID NO: 1819011 - RNA, 19 nt, Artificial Sequence
  Description of Artificial Sequence: Synthetic oligonucleotide
  Sense strand starting at position 2533 of SEQ ID NO: 1563553
gggagugguggugaccauu

SEQ ID NO: 1819012 - RNA, 19 nt, Artificial Sequence
  Description of Artificial Sequence: Synthetic oligonucleotide
  Antisense strand to SEQ ID NO: 1819011
aauggucaccaccacuccc

SEQ ID NO: 1819013 - RNA, 19 nt, Artificial Sequence
  Description of Artificial Sequence: Synthetic oligonucleotide
  Sense strand starting at position 2553 of SEQ ID NO: 1563553
cucacugaggucugcugaa

SEQ ID NO: 1819014 - RNA, 19 nt, Artificial Sequence
  Description of Artificial Sequence: Synthetic oligonucleotide
  Antisense strand to SEQ ID NO: 1819013
uucagcagaccucagugag

SEQ ID NO: 1819015 - RNA, 19 nt, Artificial Sequence
  Description of Artificial Sequence: Synthetic oligonucleotide
  Sense strand starting at position 2838 of SEQ ID NO: 1563553
ggauuacugccacguagag

SEQ ID NO: 1819016 - RNA, 19 nt, Artificial Sequence
  Description of Artificial Sequence: Synthetic oligonucleotide
  Antisense strand to SEQ ID NO: 1819015
cucuacguggcaguaaucc

SEQ ID NO: 1819017 - RNA, 19 nt, Artificial Sequence
  Description of Artificial Sequence: Synthetic oligonucleotide
  Sense strand starting at position 2854 of SEQ ID NO: 1563553
gagauuuaauuuggguauu

SEQ ID NO: 1819018 - RNA, 19 nt, Artificial Sequence
  Description of Artificial Sequence: Synthetic oligonucleotide
  Antisense strand to SEQ ID NO: 1819017
aauacccaaauuaaaucuc

SEQ ID NO: 1819019 - RNA, 19 nt, Artificial Sequence
  Description of Artificial Sequence: Synthetic oligonucleotide
  Sense strand starting at position 2884 of SEQ ID NO: 1563553
gaacuacgauuugaaaugu

SEQ ID NO: 1819020 - RNA, 19 nt, Artificial Sequence
  Description of Artificial Sequence: Synthetic oligonucleotide
  Antisense strand to SEQ ID NO: 1819019
acauuucaaaucguaguuc

SEQ ID NO: 1819021 - RNA, 19 nt, Artificial Sequence
  Description of Artificial Sequence: Synthetic oligonucleotide
  Sense strand starting at position 2980 of SEQ ID NO: 1563553
caaagcauuccagguaaga

SEQ ID NO: 1819022 - RNA, 19 nt, Artificial Sequence
  Description of Artificial Sequence: Synthetic oligonucleotide
  Antisense strand to SEQ ID NO: 1819021
ucuuaccuggaaugcuuug

SEQ ID NO: 1819023 - RNA, 19 nt, Artificial Sequence
  Description of Artificial Sequence: Synthetic oligonucleotide
  Sense strand starting at position 3023 of SEQ ID NO: 1563553
uguugagauucugcuccua

SEQ ID NO: 1819024 - RNA, 19 nt, Artificial Sequence
  Description of Artificial Sequence: Synthetic oligonucleotide
  Antisense strand to SEQ ID NO: 1819023
uaggagcagaaucucaaca

SEQ ID NO: 1819025 - RNA, 19 nt, Artificial Sequence
  Description of Artificial Sequence: Synthetic oligonucleotide
  Sense strand starting at position 3025 of SEQ ID NO: 1563553
uugagauucugcuccuaag

SEQ ID NO: 1819026 - RNA, 19 nt, Artificial Sequence
  Description of Artificial Sequence: Synthetic oligonucleotide
  Antisense strand to SEQ ID NO: 1819025
cuuaggagcagaaucucaa

SEQ ID NO: 1819027 - RNA, 19 nt, Artificial Sequence
  Description of Artificial Sequence: Synthetic oligonucleotide
  Sense strand starting at position 3069 of SEQ ID NO: 1563553
cugcuagugcccugauaag

SEQ ID NO: 1819028 - RNA, 19 nt, Artificial Sequence
  Description of Artificial Sequence: Synthetic oligonucleotide
  Antisense strand to SEQ ID NO: 1819027
cuuaucagggcacuagcag

SEQ ID NO: 1819029 - RNA, 19 nt, Artificial Sequence
  Description of Artificial Sequence: Synthetic oligonucleotide
  Sense strand starting at position 3078 of SEQ ID NO: 1563553
cccugauaagcucagccaa

SEQ ID NO: 1819030 - RNA, 19 nt, Artificial Sequence
  Description of Artificial Sequence: Synthetic oligonucleotide
  Antisense strand to SEQ ID NO: 1819029
uuggcugagcuuaucaggg

SEQ ID NO: 1819031 - RNA, 19 nt, Artificial Sequence
  Description of Artificial Sequence: Synthetic oligonucleotide
  Sense strand starting at position 3186 of SEQ ID NO: 1563553
aguagagggaaaugguauu

SEQ ID NO: 1819032 - RNA, 19 nt, Artificial Sequence
  Description of Artificial Sequence: Synthetic oligonucleotide
  Antisense strand to SEQ ID NO: 1819031
aauaccauuucccucuacu

SEQ ID NO: 1819033 - RNA, 19 nt, Artificial Sequence
  Description of Artificial Sequence: Synthetic oligonucleotide
  Sense strand starting at position 3217 of SEQ ID NO: 1563553
gggaaucuguggcuacuca

SEQ ID NO: 1819034 - RNA, 19 nt, Artificial Sequence
  Description of Artificial Sequence: Synthetic oligonucleotide
  Antisense strand to SEQ ID NO: 1819033
ugaguagccacagauuccc

SEQ ID NO: 1819035 - RNA, 19 nt, Artificial Sequence
  Description of Artificial Sequence: Synthetic oligonucleotide
  Sense strand starting at position 3410 of SEQ ID NO: 1563553
ccauuaaacgcaugucuag

SEQ ID NO: 1819036 - RNA, 19 nt, Artificial Sequence
  Description of Artificial Sequence: Synthetic oligonucleotide
  Antisense strand to SEQ ID NO: 1819035
cuagacaugcguuuaaugg

SEQ ID NO: 1819037 - RNA, 19 nt, Artificial Sequence
  Description of Artificial Sequence: Synthetic oligonucleotide
  Sense strand starting at position 3416 of SEQ ID NO: 1563553
aacgcaugucuagucguau

SEQ ID NO: 1819038 - RNA, 19 nt, Artificial Sequence
  Description of Artificial Sequence: Synthetic oligonucleotide
  Antisense strand to SEQ ID NO: 1819037
auacgacuagacaugcguu

SEQ ID NO: 1819039 - RNA, 19 nt, Artificial Sequence
  Description of Artificial Sequence: Synthetic oligonucleotide
  Sense strand starting at position 3455 of SEQ ID NO: 1563553
cugucacacgucggagaaa

SEQ ID NO: 1819040 - RNA, 19 nt, Artificial Sequence
  Description of Artificial Sequence: Synthetic oligonucleotide
  Antisense strand to SEQ ID NO: 1819039
uuucuccgacgugugacag

SEQ ID NO: 1819041 - RNA, 19 nt, Artificial Sequence
  Description of Artificial Sequence: Synthetic oligonucleotide
  Sense strand starting at position 3467 of SEQ ID NO: 1563553
ggagaaaggguuugucgga

SEQ ID NO: 1819042 - RNA, 19 nt, Artificial Sequence
  Description of Artificial Sequence: Synthetic oligonucleotide
  Antisense strand to SEQ ID NO: 1819041
uccgacaaacccuuucucc

SEQ ID NO: 1819043 - RNA, 19 nt, Artificial Sequence
  Description of Artificial Sequence: Synthetic oligonucleotide
  Sense strand starting at position 3666 of SEQ ID NO: 1563553
uccucuuucuccgcugaaa

SEQ ID NO: 1819044 - RNA, 19 nt, Artificial Sequence
  Description of Artificial Sequence: Synthetic oligonucleotide
  Antisense strand to SEQ ID NO: 1819043
uuucagcggagaaagagga

SEQ ID NO: 1819045 - RNA, 19 nt, Artificial Sequence
  Description of Artificial Sequence: Synthetic oligonucleotide
  Sense strand starting at position 153 of SEQ ID NO: 1563554
cugcaugacucagcugaga

SEQ ID NO: 1819046 - RNA, 19 nt, Artificial Sequence
  Description of Artificial Sequence: Synthetic oligonucleotide
  Antisense strand to SEQ ID NO: 1819045
ucucagcugagucaugcag

SEQ ID NO: 1819047 - RNA, 19 nt, Artificial Sequence
  Description of Artificial Sequence: Synthetic oligonucleotide
  Sense strand starting at position 155 of SEQ ID NO: 1563554
gcaugacucagcugagaua

SEQ ID NO: 1819048 - RNA, 19 nt, Artificial Sequence
  Description of Artificial Sequence: Synthetic oligonucleotide
  Antisense strand to SEQ ID NO: 1819047
uaucucagcugagucaugc

SEQ ID NO: 1819049 - RNA, 19 nt, Artificial Sequence
  Description of Artificial Sequence: Synthetic oligonucleotide
  Sense strand starting at position 250 of SEQ ID NO: 1563554
gcugucaacagaugguuau

SEQ ID NO: 1819050 - RNA, 19 nt, Artificial Sequence
  Description of Artificial Sequence: Synthetic oligonucleotide
  Antisense strand to SEQ ID NO: 1819049
auaaccaucuguugacagc

SEQ ID NO: 1819051 - RNA, 19 nt, Artificial Sequence
  Description of Artificial Sequence: Synthetic oligonucleotide
  Sense strand starting at position 251 of SEQ ID NO: 1563554
cugucaacagaugguuauu

SEQ ID NO: 1819052 - RNA, 19 nt, Artificial Sequence
  Description of Artificial Sequence: Synthetic oligonucleotide
  Antisense strand to SEQ ID NO: 1819051
aauaaccaucuguugacag

SEQ ID NO: 1819053 - RNA, 19 nt, Artificial Sequence
  Description of Artificial Sequence: Synthetic oligonucleotide
  Sense strand starting at position 262 of SEQ ID NO: 1563554
ugguuauuucucugucaac

SEQ ID NO: 1819054 - RNA, 19 nt, Artificial Sequence
  Description of Artificial Sequence: Synthetic oligonucleotide
  Antisense strand to SEQ ID NO: 1819053
guugacagagaaauaacca

SEQ ID NO: 1819055 - RNA, 19 nt, Artificial Sequence
  Description of Artificial Sequence: Synthetic oligonucleotide
  Sense strand starting at position 263 of SEQ ID NO: 1563554
gguuauuucucugucaacc

SEQ ID NO: 1819056 - RNA, 19 nt, Artificial Sequence
  Description of Artificial Sequence: Synthetic oligonucleotide
  Antisense strand to SEQ ID NO: 1819055
gguugacagagaaauaacc

SEQ ID NO: 1819057 - RNA, 19 nt, Artificial Sequence
  Description of Artificial Sequence: Synthetic oligonucleotide
  Sense strand starting at position 424 of SEQ ID NO: 1563554
ucaagucaacccugcagaa

SEQ ID NO: 1819058 - RNA, 19 nt, Artificial Sequence
  Description of Artificial Sequence: Synthetic oligonucleotide
  Antisense strand to SEQ ID NO: 1819057
uucugcaggguugacuuga

SEQ ID NO: 1819059 - RNA, 19 nt, Artificial Sequence
  Description of Artificial Sequence: Synthetic oligonucleotide
  Sense strand starting at position 470 of SEQ ID NO: 1563554
gaaauuccugcauggagag

SEQ ID NO: 1819060 - RNA, 19 nt, Artificial Sequence
  Description of Artificial Sequence: Synthetic oligonucleotide
  Antisense strand to SEQ ID NO: 1819059
cucuccaugcaggaauuuc

SEQ ID NO: 1819061 - RNA, 19 nt, Artificial Sequence
  Description of Artificial Sequence: Synthetic oligonucleotide
  Sense strand starting at position 606 of SEQ ID NO: 1563554
ccugauaccuaagcgagaa

SEQ ID NO: 1819062 - RNA, 19 nt, Artificial Sequence
  Description of Artificial Sequence: Synthetic oligonucleotide
  Antisense strand to SEQ ID NO: 1819061
uucucgcuuagguaucagg

SEQ ID NO: 1819063 - RNA, 19 nt, Artificial Sequence
  Description of Artificial Sequence: Synthetic oligonucleotide
  Sense strand starting at position 610 of SEQ ID NO: 1563554
auaccuaagcgagaaagua

SEQ ID NO: 1819064 - RNA, 19 nt, Artificial Sequence
  Description of Artificial Sequence: Synthetic oligonucleotide
  Antisense strand to SEQ ID NO: 1819063
uacuuucucgcuuagguau

SEQ ID NO: 1819065 - RNA, 19 nt, Artificial Sequence
  Description of Artificial Sequence: Synthetic oligonucleotide
  Sense strand starting at position 912 of SEQ ID NO: 1563554
aagccagucccaugugaug

SEQ ID NO: 1819066 - RNA, 19 nt, Artificial Sequence
  Description of Artificial Sequence: Synthetic oligonucleotide
  Antisense strand to SEQ ID NO: 1819065
caucacaugggacuggcuu

SEQ ID NO: 1819067 - RNA, 19 nt, Artificial Sequence
  Description of Artificial Sequence: Synthetic oligonucleotide
  Sense strand starting at position 1380 of SEQ ID NO: 1563554
aaguucucugggugcugaa

SEQ ID NO: 1819068 - RNA, 19 nt, Artificial Sequence
  Description of Artificial Sequence: Synthetic oligonucleotide
  Antisense strand to SEQ ID NO: 1819067
uucagcacccagagaacuu

SEQ ID NO: 1819069 - RNA, 19 nt, Artificial Sequence
  Description of Artificial Sequence: Synthetic oligonucleotide
  Sense strand starting at position 1472 of SEQ ID NO: 1563554
gaggaaagagucuguccua

SEQ ID NO: 1819070 - RNA, 19 nt, Artificial Sequence
  Description of Artificial Sequence: Synthetic oligonucleotide
  Antisense strand to SEQ ID NO: 1819069
uaggacagacucuuuccuc

SEQ ID NO: 1819071 - RNA, 19 nt, Artificial Sequence
  Description of Artificial Sequence: Synthetic oligonucleotide
  Sense strand starting at position 1475 of SEQ ID NO: 1563554
gaaagagucuguccuacac

SEQ ID NO: 1819072 - RNA, 19 nt, Artificial Sequence
  Description of Artificial Sequence: Synthetic oligonucleotide
  Antisense strand to SEQ ID NO: 1819071
guguaggacagacucuuuc

SEQ ID NO: 1819073 - RNA, 19 nt, Artificial Sequence
  Description of Artificial Sequence: Synthetic oligonucleotide
  Sense strand starting at position 1479 of SEQ ID NO: 1563554
gagucuguccuacacauga

SEQ ID NO: 1819074 - RNA, 19 nt, Artificial Sequence
  Description of Artificial Sequence: Synthetic oligonucleotide
  Antisense strand to SEQ ID NO: 1819073
ucauguguaggacagacuc

SEQ ID NO: 1819075 - RNA, 19 nt, Artificial Sequence
  Description of Artificial Sequence: Synthetic oligonucleotide
  Sense strand starting at position 1883 of SEQ ID NO: 1563554
ggguguaggccgagugacu

SEQ ID NO: 1819076 - RNA, 19 nt, Artificial Sequence
  Description of Artificial Sequence: Synthetic oligonucleotide
  Antisense strand to SEQ ID NO: 1819075
agucacucggccuacaccc

SEQ ID NO: 1819077 - RNA, 19 nt, Artificial Sequence
  Description of Artificial Sequence: Synthetic oligonucleotide
  Sense strand starting at position 1894 of SEQ ID NO: 1563554
gagugacugcuacaccuuu

SEQ ID NO: 1819078 - RNA, 19 nt, Artificial Sequence
  Description of Artificial Sequence: Synthetic oligonucleotide
  Antisense strand to SEQ ID NO: 1819077
aaagguguagcagucacuc

SEQ ID NO: 1819079 - RNA, 19 nt, Artificial Sequence
  Description of Artificial Sequence: Synthetic oligonucleotide
  Sense strand starting at position 1945 of SEQ ID NO: 1563554
gucacauuccuccagguau

SEQ ID NO: 1819080 - RNA, 19 nt, Artificial Sequence
  Description of Artificial Sequence: Synthetic oligonucleotide
  Antisense strand to SEQ ID NO: 1819079
auaccuggaggaaugugac

SEQ ID NO: 1819081 - RNA, 19 nt, Artificial Sequence
  Description of Artificial Sequence: Synthetic oligonucleotide
  Sense strand starting at position 1995 of SEQ ID NO: 1563554
uucggugaauuauccaaug

SEQ ID NO: 1819082 - RNA, 19 nt, Artificial Sequence
  Description of Artificial Sequence: Synthetic oligonucleotide
  Antisense strand to SEQ ID NO: 1819081
cauuggauaauucaccgaa

SEQ ID NO: 1819083 - RNA, 19 nt, Artificial Sequence
  Description of Artificial Sequence: Synthetic oligonucleotide
  Sense strand starting at position 1997 of SEQ ID NO: 1563554
cggugaauuauccaaugca

SEQ ID NO: 1819084 - RNA, 19 nt, Artificial Sequence
  Description of Artificial Sequence: Synthetic oligonucleotide
  Antisense strand to SEQ ID NO: 1819083
ugcauuggauaauucaccg

SEQ ID NO: 1819085 - RNA, 19 nt, Artificial Sequence
  Description of Artificial Sequence: Synthetic oligonucleotide
  Sense strand starting at position 2021 of SEQ ID NO: 1563554
aucccaaggacgugucuua

SEQ ID NO: 1819086 - RNA, 19 nt, Artificial Sequence
  Description of Artificial Sequence: Synthetic oligonucleotide
  Antisense strand to SEQ ID NO: 1819085
uaagacacguccuugggau

SEQ ID NO: 1819087 - RNA, 19 nt, Artificial Sequence
  Description of Artificial Sequence: Synthetic oligonucleotide
  Sense strand starting at position 2031 of SEQ ID NO: 1563554
cgugucuuaaucugaggaa

SEQ ID NO: 1819088 - RNA, 19 nt, Artificial Sequence
  Description of Artificial Sequence: Synthetic oligonucleotide
  Antisense strand to SEQ ID NO: 1819087
uuccucagauuaagacacg

SEQ ID NO: 1819089 - RNA, 19 nt, Artificial Sequence
  Description of Artificial Sequence: Synthetic oligonucleotide
  Sense strand starting at position 2439 of SEQ ID NO: 1563554
cagggcaugcuaugauaua

SEQ ID NO: 1819090 - RNA, 19 nt, Artificial Sequence
  Description of Artificial Sequence: Synthetic oligonucleotide
  Antisense strand to SEQ ID NO: 1819089
uauaucauagcaugcccug

SEQ ID NO: 1819091 - RNA, 19 nt, Artificial Sequence
  Description of Artificial Sequence: Synthetic oligonucleotide
  Sense strand starting at position 2468 of SEQ ID NO: 1563554
cccaguugcagaugaggua

SEQ ID NO: 1819092 - RNA, 19 nt, Artificial Sequence
  Description of Artificial Sequence: Synthetic oligonucleotide
  Antisense strand to SEQ ID NO: 1819091
uaccucaucugcaacuggg

SEQ ID NO: 1819093 - RNA, 19 nt, Artificial Sequence
  Description of Artificial Sequence: Synthetic oligonucleotide
  Sense strand starting at position 2532 of SEQ ID NO: 1563554
gggagugguggugaccauu

SEQ ID NO: 1819094 - RNA, 19 nt, Artificial Sequence
  Description of Artificial Sequence: Synthetic oligonucleotide
  Antisense strand to SEQ ID NO: 1819093
aauggucaccaccacuccc

SEQ ID NO: 1819095 - RNA, 19 nt, Artificial Sequence
  Description of Artificial Sequence: Synthetic oligonucleotide
  Sense strand starting at position 2552 of SEQ ID NO: 1563554
cucacugaggucugcugaa

SEQ ID NO: 1819096 - RNA, 19 nt, Artificial Sequence
  Description of Artificial Sequence: Synthetic oligonucleotide
  Antisense strand to SEQ ID NO: 1819095
uucagcagaccucagugag

SEQ ID NO: 1819097 - RNA, 19 nt, Artificial Sequence
  Description of Artificial Sequence: Synthetic oligonucleotide
  Sense strand starting at position 2691 of SEQ ID NO: 1563554
ggcuacacacgguauagau

SEQ ID NO: 1819098 - RNA, 19 nt, Artificial Sequence
  Description of Artificial Sequence: Synthetic oligonucleotide
  Antisense strand to SEQ ID NO: 1819097
aucuauaccguguguagcc

SEQ ID NO: 1819099 - RNA, 19 nt, Artificial Sequence
  Description of Artificial Sequence: Synthetic oligonucleotide
  Sense strand starting at position 2726 of SEQ ID NO: 1563554
aggccuuucccuuaaagaa

SEQ ID NO: 1819100 - RNA, 19 nt, Artificial Sequence
  Description of Artificial Sequence: Synthetic oligonucleotide
  Antisense strand to SEQ ID NO: 1819099
uucuuuaagggaaaggccu

SEQ ID NO: 1819101 - RNA, 19 nt, Artificial Sequence
  Description of Artificial Sequence: Synthetic oligonucleotide
  Sense strand starting at position 2837 of SEQ ID NO: 1563554
ggauuacugccacguagag

SEQ ID NO: 1819102 - RNA, 19 nt, Artificial Sequence
  Description of Artificial Sequence: Synthetic oligonucleotide
  Antisense strand to SEQ ID NO: 1819101
cucuacguggcaguaaucc

SEQ ID NO: 1819103 - RNA, 19 nt, Artificial Sequence
  Description of Artificial Sequence: Synthetic oligonucleotide
  Sense strand starting at position 2839 of SEQ ID NO: 1563554
auuacugccacguagagau

SEQ ID NO: 1819104 - RNA, 19 nt, Artificial Sequence
  Description of Artificial Sequence: Synthetic oligonucleotide
  Antisense strand to SEQ ID NO: 1819103
aucucuacguggcaguaau

SEQ ID NO: 1819105 - RNA, 19 nt, Artificial Sequence
  Description of Artificial Sequence: Synthetic oligonucleotide
  Sense strand starting at position 2853 of SEQ ID NO: 1563554
gagauuuaauuuggguauu

SEQ ID NO: 1819106 - RNA, 19 nt, Artificial Sequence
  Description of Artificial Sequence: Synthetic oligonucleotide
  Antisense strand to SEQ ID NO: 1819105
aauacccaaauuaaaucuc

SEQ ID NO: 1819107 - RNA, 19 nt, Artificial Sequence
  Description of Artificial Sequence: Synthetic oligonucleotide
  Sense strand starting at position 2883 of SEQ ID NO: 1563554
gaacuacgauuugaaaugu

SEQ ID NO: 1819108 - RNA, 19 nt, Artificial Sequence
  Description of Artificial Sequence: Synthetic oligonucleotide
  Antisense strand to SEQ ID NO: 1819107
acauuucaaaucguaguuc

SEQ ID NO: 1819109 - RNA, 19 nt, Artificial Sequence
  Description of Artificial Sequence: Synthetic oligonucleotide
  Sense strand starting at position 2979 of SEQ ID NO: 1563554
caaagcauuccagguaaga

SEQ ID NO: 1819110 - RNA, 19 nt, Artificial Sequence
  Description of Artificial Sequence: Synthetic oligonucleotide
  Antisense strand to SEQ ID NO: 1819109
ucuuaccuggaaugcuuug

SEQ ID NO: 1819111 - RNA, 19 nt, Artificial Sequence
  Description of Artificial Sequence: Synthetic oligonucleotide
  Sense strand starting at position 3077 of SEQ ID NO: 1563554
cccugauaagcucagccaa

SEQ ID NO: 1819112 - RNA, 19 nt, Artificial Sequence
  Description of Artificial Sequence: Synthetic oligonucleotide
  Antisense strand to SEQ ID NO: 1819111
uuggcugagcuuaucaggg

SEQ ID NO: 1819113 - RNA, 19 nt, Artificial Sequence
  Description of Artificial Sequence: Synthetic oligonucleotide
  Sense strand starting at position 3185 of SEQ ID NO: 1563554
aguagagggaaaugguauu

SEQ ID NO: 1819114 - RNA, 19 nt, Artificial Sequence
  Description of Artificial Sequence: Synthetic oligonucleotide
  Antisense strand to SEQ ID NO: 1819113
aauaccauuucccucuacu

SEQ ID NO: 1819115 - RNA, 19 nt, Artificial Sequence
  Description of Artificial Sequence: Synthetic oligonucleotide
  Sense strand starting at position 3197 of SEQ ID NO: 1563554
ugguauuggagaugcagau

SEQ ID NO: 1819116 - RNA, 19 nt, Artificial Sequence
  Description of Artificial Sequence: Synthetic oligonucleotide
  Antisense strand to SEQ ID NO: 1819115
aucugcaucuccaauacca

SEQ ID NO: 1819117 - RNA, 19 nt, Artificial Sequence
  Description of Artificial Sequence: Synthetic oligonucleotide
  Sense strand starting at position 3216 of SEQ ID NO: 1563554
gggaaucuguggcuacuca

SEQ ID NO: 1819118 - RNA, 19 nt, Artificial Sequence
  Description of Artificial Sequence: Synthetic oligonucleotide
  Antisense strand to SEQ ID NO: 1819117
ugaguagccacagauuccc

SEQ ID NO: 1819119 - RNA, 19 nt, Artificial Sequence
  Description of Artificial Sequence: Synthetic oligonucleotide
  Sense strand starting at position 3415 of SEQ ID NO: 1563554
aacgcaugucuagucguau

SEQ ID NO: 1819120 - RNA, 19 nt, Artificial Sequence
  Description of Artificial Sequence: Synthetic oligonucleotide
  Antisense strand to SEQ ID NO: 1819119
auacgacuagacaugcguu

SEQ ID NO: 1819121 - RNA, 19 nt, Artificial Sequence
  Description of Artificial Sequence: Synthetic oligonucleotide
  Sense strand starting at position 3454 of SEQ ID NO: 1563554
cugucacacgucggagaaa

SEQ ID NO: 1819122 - RNA, 19 nt, Artificial Sequence
  Description of Artificial Sequence: Synthetic oligonucleotide
  Antisense strand to SEQ ID NO: 1819121
uuucuccgacgugugacag

SEQ ID NO: 1819123 - RNA, 19 nt, Artificial Sequence
  Description of Artificial Sequence: Synthetic oligonucleotide
  Sense strand starting at position 3466 of SEQ ID NO: 1563554
ggagaaaggguuugucgga

SEQ ID NO: 1819124 - RNA, 19 nt, Artificial Sequence
  Description of Artificial Sequence: Synthetic oligonucleotide
  Antisense strand to SEQ ID NO: 1819123
uccgacaaacccuuucucc

SEQ ID NO: 1819125 - RNA, 19 nt, Artificial Sequence
  Description of Artificial Sequence: Synthetic oligonucleotide
  Sense strand starting at position 111 of SEQ ID NO: 1563555
uuaguucugcuccaaguuu

SEQ ID NO: 1819126 - RNA, 19 nt, Artificial Sequence
  Description of Artificial Sequence: Synthetic oligonucleotide
  Antisense strand to SEQ ID NO: 1819125
aaacuuggagcagaacuaa

SEQ ID NO: 1819127 - RNA, 19 nt, Artificial Sequence
  Description of Artificial Sequence: Synthetic oligonucleotide
  Sense strand starting at position 144 of SEQ ID NO: 1563555
aaggaauagucuuggauuu

SEQ ID NO: 1819128 - RNA, 19 nt, Artificial Sequence
  Description of Artificial Sequence: Synthetic oligonucleotide
  Antisense strand to SEQ ID NO: 1819127
aaauccaagacuauuccuu

SEQ ID NO: 1819129 - RNA, 19 nt, Artificial Sequence
  Description of Artificial Sequence: Synthetic oligonucleotide
  Sense strand starting at position 427 of SEQ ID NO: 1563555
ggagaaauaugcuaaagac

SEQ ID NO: 1819130 - RNA, 19 nt, Artificial Sequence
  Description of Artificial Sequence: Synthetic oligonucleotide
  Antisense strand to SEQ ID NO: 1819129
gucuuuagcauauuucucc

SEQ ID NO: 1819131 - RNA, 19 nt, Artificial Sequence
  Description of Artificial Sequence: Synthetic oligonucleotide
  Sense strand starting at position 478 of SEQ ID NO: 1563555
aucauaaacuuggaucaga

SEQ ID NO: 1819132 - RNA, 19 nt, Artificial Sequence
  Description of Artificial Sequence: Synthetic oligonucleotide
  Antisense strand to SEQ ID NO: 1819131
ucugauccaaguuuaugau

SEQ ID NO: 1819133 - RNA, 19 nt, Artificial Sequence
  Description of Artificial Sequence: Synthetic oligonucleotide
  Sense strand starting at position 722 of SEQ ID NO: 1563555
gaaaucaguuaggaggaga

SEQ ID NO: 1819134 - RNA, 19 nt, Artificial Sequence
  Description of Artificial Sequence: Synthetic oligonucleotide
  Antisense strand to SEQ ID NO: 1819133
ucuccuccuaacugauuuc

SEQ ID NO: 1819135 - RNA, 19 nt, Artificial Sequence
  Description of Artificial Sequence: Synthetic oligonucleotide
  Sense strand starting at position 817 of SEQ ID NO: 1563555
agggauaugucauaugaag

SEQ ID NO: 1819136 - RNA, 19 nt, Artificial Sequence
  Description of Artificial Sequence: Synthetic oligonucleotide
  Antisense strand to SEQ ID NO: 1819135
cuucauaugacauaucccu

SEQ ID NO: 1819137 - RNA, 19 nt, Artificial Sequence
  Description of Artificial Sequence: Synthetic oligonucleotide
  Sense strand starting at position 921 of SEQ ID NO: 1563555
agaaucgacuaguuuccua

SEQ ID NO: 1819138 - RNA, 19 nt, Artificial Sequence
  Description of Artificial Sequence: Synthetic oligonucleotide
  Antisense strand to SEQ ID NO: 1819137
uaggaaacuagucgauucu

SEQ ID NO: 1819139 - RNA, 19 nt, Artificial Sequence
  Description of Artificial Sequence: Synthetic oligonucleotide
  Sense strand starting at position 933 of SEQ ID NO: 1563555
uuuccuagcgcucaacuaa

SEQ ID NO: 1819140 - RNA, 19 nt, Artificial Sequence
  Description of Artificial Sequence: Synthetic oligonucleotide
  Antisense strand to SEQ ID NO: 1819139
uuaguugagcgcuaggaaa

SEQ ID NO: 1819141 - RNA, 19 nt, Artificial Sequence
  Description of Artificial Sequence: Synthetic oligonucleotide
  Sense strand starting at position 989 of SEQ ID NO: 1563555
acaggacugugagacagau

SEQ ID NO: 1819142 - RNA, 19 nt, Artificial Sequence
  Description of Artificial Sequence: Synthetic oligonucleotide
  Antisense strand to SEQ ID NO: 1819141
aucugucucacaguccugu

SEQ ID NO: 1819143 - RNA, 19 nt, Artificial Sequence
  Description of Artificial Sequence: Synthetic oligonucleotide
  Sense strand starting at position 1026 of SEQ ID NO: 1563555
agcuucuagcuuuaaaugu

SEQ ID NO: 1819144 - RNA, 19 nt, Artificial Sequence
  Description of Artificial Sequence: Synthetic oligonucleotide
  Antisense strand to SEQ ID NO: 1819143
acauuuaaagcuagaagcu

SEQ ID NO: 1819145 - RNA, 19 nt, Artificial Sequence
  Description of Artificial Sequence: Synthetic oligonucleotide
  Sense strand starting at position 1071 of SEQ ID NO: 1563555
agaucuauggauugaucuu

SEQ ID NO: 1819146 - RNA, 19 nt, Artificial Sequence
  Description of Artificial Sequence: Synthetic oligonucleotide
  Antisense strand to SEQ ID NO: 1819145
aagaucaauccauagaucu

SEQ ID NO: 1819147 - RNA, 19 nt, Artificial Sequence
  Description of Artificial Sequence: Synthetic oligonucleotide
  Sense strand starting at position 1078 of SEQ ID NO: 1563555
uggauugaucuugagccau

SEQ ID NO: 1819148 - RNA, 19 nt, Artificial Sequence
  Description of Artificial Sequence: Synthetic oligonucleotide
  Antisense strand to SEQ ID NO: 1819147
auggcucaagaucaaucca

SEQ ID NO: 1819149 - RNA, 19 nt, Artificial Sequence
  Description of Artificial Sequence: Synthetic oligonucleotide
  Sense strand starting at position 1190 of SEQ ID NO: 1563555
uugggauucguaggguaca

SEQ ID NO: 1819150 - RNA, 19 nt, Artificial Sequence
  Description of Artificial Sequence: Synthetic oligonucleotide
  Antisense strand to SEQ ID NO: 1819149
uguacccuacgaaucccaa

SEQ ID NO: 1819151 - RNA, 19 nt, Artificial Sequence
  Description of Artificial Sequence: Synthetic oligonucleotide
  Sense strand starting at position 1193 of SEQ ID NO: 1563555
ggauucguaggguacagau

SEQ ID NO: 1819152 - RNA, 19 nt, Artificial Sequence
  Description of Artificial Sequence: Synthetic oligonucleotide
  Antisense strand to SEQ ID NO: 1819151
aucuguacccuacgaaucc

SEQ ID NO: 1819153 - RNA, 19 nt, Artificial Sequence
  Description of Artificial Sequence: Synthetic oligonucleotide
  Sense strand starting at position 1259 of SEQ ID NO: 1563555
agucgcuauagccagaaua

SEQ ID NO: 1819154 - RNA, 19 nt, Artificial Sequence
  Description of Artificial Sequence: Synthetic oligonucleotide
  Antisense strand to SEQ ID NO: 1819153
uauucuggcuauagcgacu

SEQ ID NO: 1819155 - RNA, 19 nt, Artificial Sequence
  Description of Artificial Sequence: Synthetic oligonucleotide
  Sense strand starting at position 1261 of SEQ ID NO: 1563555
ucgcuauagccagaauaug

SEQ ID NO: 1819156 - RNA, 19 nt, Artificial Sequence
  Description of Artificial Sequence: Synthetic oligonucleotide
  Antisense strand to SEQ ID NO: 1819155
cauauucuggcuauagcga

SEQ ID NO: 1819157 - RNA, 19 nt, Artificial Sequence
  Description of Artificial Sequence: Synthetic oligonucleotide
  Sense strand starting at position 2215 of SEQ ID NO: 1563555
ccgcuuucucacucguacu

SEQ ID NO: 1819158 - RNA, 19 nt, Artificial Sequence
  Description of Artificial Sequence: Synthetic oligonucleotide
  Antisense strand to SEQ ID NO: 1819157
aguacgagugagaaagcgg

SEQ ID NO: 1819159 - RNA, 19 nt, Artificial Sequence
  Description of Artificial Sequence: Synthetic oligonucleotide
  Sense strand starting at position 2226 of SEQ ID NO: 1563555
cucguacucgacuacuaag

SEQ ID NO: 1819160 - RNA, 19 nt, Artificial Sequence
  Description of Artificial Sequence: Synthetic oligonucleotide
  Antisense strand to SEQ ID NO: 1819159
cuuaguagucgaguacgag

SEQ ID NO: 1819161 - RNA, 19 nt, Artificial Sequence
  Description of Artificial Sequence: Synthetic oligonucleotide
  Sense strand starting at position 2397 of SEQ ID NO: 1563555
ugcaaugagguguaggaga

SEQ ID NO: 1819162 - RNA, 19 nt, Artificial Sequence
  Description of Artificial Sequence: Synthetic oligonucleotide
  Antisense strand to SEQ ID NO: 1819161
ucuccuacaccucauugca

SEQ ID NO: 1819163 - RNA, 19 nt, Artificial Sequence
  Description of Artificial Sequence: Synthetic oligonucleotide
  Sense strand starting at position 2411 of SEQ ID NO: 1563555
ggagaaaucguccaagcag

SEQ ID NO: 1819164 - RNA, 19 nt, Artificial Sequence
  Description of Artificial Sequence: Synthetic oligonucleotide
  Antisense strand to SEQ ID NO: 1819163
cugcuuggacgauuucucc

SEQ ID NO: 1819165 - RNA, 19 nt, Artificial Sequence
  Description of Artificial Sequence: Synthetic oligonucleotide
  Sense strand starting at position 2561 of SEQ ID NO: 1563555
cuuggaaugcccugccauu

SEQ ID NO: 1819166 - RNA, 19 nt, Artificial Sequence
  Description of Artificial Sequence: Synthetic oligonucleotide
  Antisense strand to SEQ ID NO: 1819165
aauggcagggcauuccaag

SEQ ID NO: 1819167 - RNA, 19 nt, Artificial Sequence
  Description of Artificial Sequence: Synthetic oligonucleotide
  Sense strand starting at position 2612 of SEQ ID NO: 1563555
aacguuaucuccucaguga

SEQ ID NO: 1819168 - RNA, 19 nt, Artificial Sequence
  Description of Artificial Sequence: Synthetic oligonucleotide
  Antisense strand to SEQ ID NO: 1819167
ucacugaggagauaacguu

SEQ ID NO: 1819169 - RNA, 19 nt, Artificial Sequence
  Description of Artificial Sequence: Synthetic oligonucleotide
  Sense strand starting at position 2613 of SEQ ID NO: 1563555
acguuaucuccucagugaa

SEQ ID NO: 1819170 - RNA, 19 nt, Artificial Sequence
  Description of Artificial Sequence: Synthetic oligonucleotide
  Antisense strand to SEQ ID NO: 1819169
uucacugaggagauaacgu

SEQ ID NO: 1819171 - RNA, 19 nt, Artificial Sequence
  Description of Artificial Sequence: Synthetic oligonucleotide
  Sense strand starting at position 2731 of SEQ ID NO: 1563555
ucaacuuguuagguguuau

SEQ ID NO: 1819172 - RNA, 19 nt, Artificial Sequence
  Description of Artificial Sequence: Synthetic oligonucleotide
  Antisense strand to SEQ ID NO: 1819171
auaacaccuaacaaguuga

SEQ ID NO: 1819173 - RNA, 19 nt, Artificial Sequence
  Description of Artificial Sequence: Synthetic oligonucleotide
  Sense strand starting at position 2739 of SEQ ID NO: 1563555
uuagguguuauauagugua

SEQ ID NO: 1819174 - RNA, 19 nt, Artificial Sequence
  Description of Artificial Sequence: Synthetic oligonucleotide
  Antisense strand to SEQ ID NO: 1819173
uacacuauauaacaccuaa

SEQ ID NO: 1819175 - RNA, 19 nt, Artificial Sequence
  Description of Artificial Sequence: Synthetic oligonucleotide
  Sense strand starting at position 2783 of SEQ ID NO: 1563555
cucuauauucugggcaagu

SEQ ID NO: 1819176 - RNA, 19 nt, Artificial Sequence
  Description of Artificial Sequence: Synthetic oligonucleotide
  Antisense strand to SEQ ID NO: 1819175
acuugcccagaauauagag

SEQ ID NO: 1819177 - RNA, 19 nt, Artificial Sequence
  Description of Artificial Sequence: Synthetic oligonucleotide
  Sense strand starting at position 2784 of SEQ ID NO: 1563555
ucuauauucugggcaagug

SEQ ID NO: 1819178 - RNA, 19 nt, Artificial Sequence
  Description of Artificial Sequence: Synthetic oligonucleotide
  Antisense strand to SEQ ID NO: 1819177
cacuugcccagaauauaga

SEQ ID NO: 1819179 - RNA, 19 nt, Artificial Sequence
  Description of Artificial Sequence: Synthetic oligonucleotide
  Sense strand starting at position 2785 of SEQ ID NO: 1563555
cuauauucugggcaaguga

SEQ ID NO: 1819180 - RNA, 19 nt, Artificial Sequence
  Description of Artificial Sequence: Synthetic oligonucleotide
  Antisense strand to SEQ ID NO: 1819179
ucacuugcccagaauauag

SEQ ID NO: 1819181 - RNA, 19 nt, Artificial Sequence
  Description of Artificial Sequence: Synthetic oligonucleotide
  Sense strand starting at position 2799 of SEQ ID NO: 1563555
agugauuccuguucuugga

SEQ ID NO: 1819182 - RNA, 19 nt, Artificial Sequence
  Description of Artificial Sequence: Synthetic oligonucleotide
  Antisense strand to SEQ ID NO: 1819181
uccaagaacaggaaucacu

SEQ ID NO: 1819183 - RNA, 19 nt, Artificial Sequence
  Description of Artificial Sequence: Synthetic oligonucleotide
  Sense strand starting at position 3021 of SEQ ID NO: 1563555
gaacuuaaauaggcggaaa

SEQ ID NO: 1819184 - RNA, 19 nt, Artificial Sequence
  Description of Artificial Sequence: Synthetic oligonucleotide
  Antisense strand to SEQ ID NO: 1819183
uuuccgccuauuuaaguuc

SEQ ID NO: 1819185 - RNA, 19 nt, Artificial Sequence
  Description of Artificial Sequence: Synthetic oligonucleotide
  Sense strand starting at position 3178 of SEQ ID NO: 1563555
ucuccaacgugccuuuaaa

SEQ ID NO: 1819186 - RNA, 19 nt, Artificial Sequence
  Description of Artificial Sequence: Synthetic oligonucleotide
  Antisense strand to SEQ ID NO: 1819185
uuuaaaggcacguuggaga

SEQ ID NO: 1819187 - RNA, 19 nt, Artificial Sequence
  Description of Artificial Sequence: Synthetic oligonucleotide
  Sense strand starting at position 3217 of SEQ ID NO: 1563555
caguuacuugguuguuuga

SEQ ID NO: 1819188 - RNA, 19 nt, Artificial Sequence
  Description of Artificial Sequence: Synthetic oligonucleotide
  Antisense strand to SEQ ID NO: 1819187
ucaaacaaccaaguaacug

SEQ ID NO: 1819189 - RNA, 19 nt, Artificial Sequence
  Description of Artificial Sequence: Synthetic oligonucleotide
  Sense strand starting at position 3276 of SEQ ID NO: 1563555
agguguguugcauugugua

SEQ ID NO: 1819190 - RNA, 19 nt, Artificial Sequence
  Description of Artificial Sequence: Synthetic oligonucleotide
  Antisense strand to SEQ ID NO: 1819189
uacacaaugcaacacaccu

SEQ ID NO: 1819191 - RNA, 19 nt, Artificial Sequence
  Description of Artificial Sequence: Synthetic oligonucleotide
  Sense strand starting at position 3368 of SEQ ID NO: 1563555
gaugaugguuuguucuaug

SEQ ID NO: 1819192 - RNA, 19 nt, Artificial Sequence
  Description of Artificial Sequence: Synthetic oligonucleotide
  Antisense strand to SEQ ID NO: 1819191
cauagaacaaaccaucauc

SEQ ID NO: 1819193 - RNA, 19 nt, Artificial Sequence
  Description of Artificial Sequence: Synthetic oligonucleotide
  Sense strand starting at position 3376 of SEQ ID NO: 1563555
uuuguucuauggucccuaa

SEQ ID NO: 1819194 - RNA, 19 nt, Artificial Sequence
  Description of Artificial Sequence: Synthetic oligonucleotide
  Antisense strand to SEQ ID NO: 1819193
uuagggaccauagaacaaa

SEQ ID NO: 1819195 - RNA, 19 nt, Artificial Sequence
  Description of Artificial Sequence: Synthetic oligonucleotide
  Sense strand starting at position 3380 of SEQ ID NO: 1563555
uucuauggucccuaaugca

SEQ ID NO: 1819196 - RNA, 19 nt, Artificial Sequence
  Description of Artificial Sequence: Synthetic oligonucleotide
  Antisense strand to SEQ ID NO: 1819195
ugcauuagggaccauagaa

SEQ ID NO: 1819197 - RNA, 19 nt, Artificial Sequence
  Description of Artificial Sequence: Synthetic oligonucleotide
  Sense strand starting at position 3429 of SEQ ID NO: 1563555
cugaaugggccauggcuua

SEQ ID NO: 1819198 - RNA, 19 nt, Artificial Sequence
  Description of Artificial Sequence: Synthetic oligonucleotide
  Antisense strand to SEQ ID NO: 1819197
uaagccauggcccauucag

SEQ ID NO: 1819199 - RNA, 19 nt, Artificial Sequence
  Description of Artificial Sequence: Synthetic oligonucleotide
  Sense strand starting at position 3491 of SEQ ID NO: 1563555
ucaagugcugcaugauaau

SEQ ID NO: 1819200 - RNA, 19 nt, Artificial Sequence
  Description of Artificial Sequence: Synthetic oligonucleotide
  Antisense strand to SEQ ID NO: 1819199
auuaucaugcagcacuuga

SEQ ID NO: 1819201 - RNA, 19 nt, Artificial Sequence
  Description of Artificial Sequence: Synthetic oligonucleotide
  Sense strand starting at position 3810 of SEQ ID NO: 1563555
ucaagugauugacccaacu

SEQ ID NO: 1819202 - RNA, 19 nt, Artificial Sequence
  Description of Artificial Sequence: Synthetic oligonucleotide
  Antisense strand to SEQ ID NO: 1819201
aguugggucaaucacuuga

SEQ ID NO: 1819203 - RNA, 19 nt, Artificial Sequence
  Description of Artificial Sequence: Synthetic oligonucleotide
  Sense strand starting at position 3962 of SEQ ID NO: 1563555
gguuucuacaaguaugugu

SEQ ID NO: 1819204 - RNA, 19 nt, Artificial Sequence
  Description of Artificial Sequence: Synthetic oligonucleotide
  Antisense strand to SEQ ID NO: 1819203
acacauacuuguagaaacc

SEQ ID NO: 1819205 - RNA, 19 nt, Artificial Sequence
  Description of Artificial Sequence: Synthetic oligonucleotide
  Sense strand starting at position 931 of SEQ ID NO: 1563556
augugucaaugacuuucua

SEQ ID NO: 1819206 - RNA, 19 nt, Artificial Sequence
  Description of Artificial Sequence: Synthetic oligonucleotide
  Antisense strand to SEQ ID NO: 1819205
uagaaagucauugacacau

SEQ ID NO: 1819207 - RNA, 19 nt, Artificial Sequence
  Description of Artificial Sequence: Synthetic oligonucleotide
  Sense strand starting at position 1022 of SEQ ID NO: 1563556
uggauauguccacaaaguu

SEQ ID NO: 1819208 - RNA, 19 nt, Artificial Sequence
  Description of Artificial Sequence: Synthetic oligonucleotide
  Antisense strand to SEQ ID NO: 1819207
aacuuuguggacauaucca

SEQ ID NO: 1819209 - RNA, 19 nt, Artificial Sequence
  Description of Artificial Sequence: Synthetic oligonucleotide
  Sense strand starting at position 1060 of SEQ ID NO: 1563556
aguccaauucccgaguugu

SEQ ID NO: 1819210 - RNA, 19 nt, Artificial Sequence
  Description of Artificial Sequence: Synthetic oligonucleotide
  Antisense strand to SEQ ID NO: 1819209
acaacucgggaauuggacu

SEQ ID NO: 1819211 - RNA, 19 nt, Artificial Sequence
  Description of Artificial Sequence: Synthetic oligonucleotide
  Sense strand starting at position 1125 of SEQ ID NO: 1563556
aucuuacuuguccagguga

SEQ ID NO: 1819212 - RNA, 19 nt, Artificial Sequence
  Description of Artificial Sequence: Synthetic oligonucleotide
  Antisense strand to SEQ ID NO: 1819211
ucaccuggacaaguaagau

SEQ ID NO: 1819213 - RNA, 19 nt, Artificial Sequence
  Description of Artificial Sequence: Synthetic oligonucleotide
  Sense strand starting at position 1127 of SEQ ID NO: 1563556
cuuacuuguccaggugaca

SEQ ID NO: 1819214 - RNA, 19 nt, Artificial Sequence
  Description of Artificial Sequence: Synthetic oligonucleotide
  Antisense strand to SEQ ID NO: 1819213
ugucaccuggacaaguaag

SEQ ID NO: 1819215 - RNA, 19 nt, Artificial Sequence
  Description of Artificial Sequence: Synthetic oligonucleotide
  Sense strand starting at position 1151 of SEQ ID NO: 1563556
gcugucaucggguucaugu

SEQ ID NO: 1819216 - RNA, 19 nt, Artificial Sequence
  Description of Artificial Sequence: Synthetic oligonucleotide
  Antisense strand to SEQ ID NO: 1819215
acaugaacccgaugacagc

SEQ ID NO: 1819217 - RNA, 19 nt, Artificial Sequence
  Description of Artificial Sequence: Synthetic oligonucleotide
  Sense strand starting at position 1335 of SEQ ID NO: 1563556
gacguccucagaggugaaa

SEQ ID NO: 1819218 - RNA, 19 nt, Artificial Sequence
  Description of Artificial Sequence: Synthetic oligonucleotide
  Antisense strand to SEQ ID NO: 1819217
uuucaccucugaggacguc

SEQ ID NO: 1819219 - RNA, 19 nt, Artificial Sequence
  Description of Artificial Sequence: Synthetic oligonucleotide
  Sense strand starting at position 1348 of SEQ ID NO: 1563556
gugaaaggauuugguuaag

SEQ ID NO: 1819220 - RNA, 19 nt, Artificial Sequence
  Description of Artificial Sequence: Synthetic oligonucleotide
  Antisense strand to SEQ ID NO: 1819219
cuuaaccaaauccuuucac

SEQ ID NO: 1819221 - RNA, 19 nt, Artificial Sequence
  Description of Artificial Sequence: Synthetic oligonucleotide
  Sense strand starting at position 1373 of SEQ ID NO: 1563556
gaacgaguguuugugcaga

SEQ ID NO: 1819222 - RNA, 19 nt, Artificial Sequence
  Description of Artificial Sequence: Synthetic oligonucleotide
  Antisense strand to SEQ ID NO: 1819221
ucugcacaaacacucguuc

SEQ ID NO: 1819223 - RNA, 19 nt, Artificial Sequence
  Description of Artificial Sequence: Synthetic oligonucleotide
  Sense strand starting at position 1375 of SEQ ID NO: 1563556
acgaguguuugugcagagu

SEQ ID NO: 1819224 - RNA, 19 nt, Artificial Sequence
  Description of Artificial Sequence: Synthetic oligonucleotide
  Antisense strand to SEQ ID NO: 1819223
acucugcacaaacacucgu

SEQ ID NO: 1819225 - RNA, 19 nt, Artificial Sequence
  Description of Artificial Sequence: Synthetic oligonucleotide
  Sense strand starting at position 1384 of SEQ ID NO: 1563556
ugugcagaguccuccauuu

SEQ ID NO: 1819226 - RNA, 19 nt, Artificial Sequence
  Description of Artificial Sequence: Synthetic oligonucleotide
  Antisense strand to SEQ ID NO: 1819225
aaauggaggacucugcaca

SEQ ID NO: 1819227 - RNA, 19 nt, Artificial Sequence
  Description of Artificial Sequence: Synthetic oligonucleotide
  Sense strand starting at position 1862 of SEQ ID NO: 1563556
cggagauuucucuggccgu

SEQ ID NO: 1819228 - RNA, 19 nt, Artificial Sequence
  Description of Artificial Sequence: Synthetic oligonucleotide
  Antisense strand to SEQ ID NO: 1819227
acggccagagaaaucuccg

SEQ ID NO: 1819229 - RNA, 19 nt, Artificial Sequence
  Description of Artificial Sequence: Synthetic oligonucleotide
  Sense strand starting at position 1863 of SEQ ID NO: 1563556
ggagauuucucuggccgug

SEQ ID NO: 1819230 - RNA, 19 nt, Artificial Sequence
  Description of Artificial Sequence: Synthetic oligonucleotide
  Antisense strand to SEQ ID NO: 1819229
cacggccagagaaaucucc

SEQ ID NO: 1819231 - RNA, 19 nt, Artificial Sequence
  Description of Artificial Sequence: Synthetic oligonucleotide
  Sense strand starting at position 2256 of SEQ ID NO: 1563556
cccuuucucgggugggaga

SEQ ID NO: 1819232 - RNA, 19 nt, Artificial Sequence
  Description of Artificial Sequence: Synthetic oligonucleotide
  Antisense strand to SEQ ID NO: 1819231
ucucccacccgagaaaggg

SEQ ID NO: 1819233 - RNA, 19 nt, Artificial Sequence
  Description of Artificial Sequence: Synthetic oligonucleotide
  Sense strand starting at position 2329 of SEQ ID NO: 1563556
auuugugagucgugggaag

SEQ ID NO: 1819234 - RNA, 19 nt, Artificial Sequence
  Description of Artificial Sequence: Synthetic oligonucleotide
  Antisense strand to SEQ ID NO: 1819233
cuucccacgacucacaaau

SEQ ID NO: 1819235 - RNA, 19 nt, Artificial Sequence
  Description of Artificial Sequence: Synthetic oligonucleotide
  Sense strand starting at position 2330 of SEQ ID NO: 1563556
uuugugagucgugggaaga

SEQ ID NO: 1819236 - RNA, 19 nt, Artificial Sequence
  Description of Artificial Sequence: Synthetic oligonucleotide
  Antisense strand to SEQ ID NO: 1819235
ucuucccacgacucacaaa

SEQ ID NO: 1819237 - RNA, 19 nt, Artificial Sequence
  Description of Artificial Sequence: Synthetic oligonucleotide
  Sense strand starting at position 2331 of SEQ ID NO: 1563556
uugugagucgugggaagac

SEQ ID NO: 1819238 - RNA, 19 nt, Artificial Sequence
  Description of Artificial Sequence: Synthetic oligonucleotide
  Antisense strand to SEQ ID NO: 1819237
gucuucccacgacucacaa

SEQ ID NO: 1819239 - RNA, 19 nt, Artificial Sequence
  Description of Artificial Sequence: Synthetic oligonucleotide
  Sense strand starting at position 2370 of SEQ ID NO: 1563556
auuagaaccuguuccaaag

SEQ ID NO: 1819240 - RNA, 19 nt, Artificial Sequence
  Description of Artificial Sequence: Synthetic oligonucleotide
  Antisense strand to SEQ ID NO: 1819239
cuuuggaacagguucuaau

SEQ ID NO: 1819241 - RNA, 19 nt, Artificial Sequence
  Description of Artificial Sequence: Synthetic oligonucleotide
  Sense strand starting at position 2385 of SEQ ID NO: 1563556
aaaguugauccaugcgcuu

SEQ ID NO: 1819242 - RNA, 19 nt, Artificial Sequence
  Description of Artificial Sequence: Synthetic oligonucleotide
  Antisense strand to SEQ ID NO: 1819241
aagcgcauggaucaacuuu

SEQ ID NO: 1819243 - RNA, 19 nt, Artificial Sequence
  Description of Artificial Sequence: Synthetic oligonucleotide
  Sense strand starting at position 2392 of SEQ ID NO: 1563556
auccaugcgcuuuguaaag

SEQ ID NO: 1819244 - RNA, 19 nt, Artificial Sequence
  Description of Artificial Sequence: Synthetic oligonucleotide
  Antisense strand to SEQ ID NO: 1819243
cuuuacaaagcgcauggau

SEQ ID NO: 1819245 - RNA, 19 nt, Artificial Sequence
  Description of Artificial Sequence: Synthetic oligonucleotide
  Sense strand starting at position 2513 of SEQ ID NO: 1563556
ugcugucucucguuaucac

SEQ ID NO: 1819246 - RNA, 19 nt, Artificial Sequence
  Description of Artificial Sequence: Synthetic oligonucleotide
  Antisense strand to SEQ ID NO: 1819245
gugauaacgagagacagca

SEQ ID NO: 1819247 - RNA, 19 nt, Artificial Sequence
  Description of Artificial Sequence: Synthetic oligonucleotide
  Sense strand starting at position 2514 of SEQ ID NO: 1563556
gcugucucucguuaucacu

SEQ ID NO: 1819248 - RNA, 19 nt, Artificial Sequence
  Description of Artificial Sequence: Synthetic oligonucleotide
  Antisense strand to SEQ ID NO: 1819247
agugauaacgagagacagc

SEQ ID NO: 1819249 - RNA, 19 nt, Artificial Sequence
  Description of Artificial Sequence: Synthetic oligonucleotide
  Sense strand starting at position 2630 of SEQ ID NO: 1563556
gcucaagcuguguuguuua

SEQ ID NO: 1819250 - RNA, 19 nt, Artificial Sequence
  Description of Artificial Sequence: Synthetic oligonucleotide
  Antisense strand to SEQ ID NO: 1819249
uaaacaacacagcuugagc

SEQ ID NO: 1819251 - RNA, 19 nt, Artificial Sequence
  Description of Artificial Sequence: Synthetic oligonucleotide
  Sense strand starting at position 2706 of SEQ ID NO: 1563556
ggaguuuagcgcuauaacc

SEQ ID NO: 1819252 - RNA, 19 nt, Artificial Sequence
  Description of Artificial Sequence: Synthetic oligonucleotide
  Antisense strand to SEQ ID NO: 1819251
gguuauagcgcuaaacucc

SEQ ID NO: 1819253 - RNA, 19 nt, Artificial Sequence
  Description of Artificial Sequence: Synthetic oligonucleotide
  Sense strand starting at position 2714 of SEQ ID NO: 1563556
gcgcuauaacccgaggcuu

SEQ ID NO: 1819254 - RNA, 19 nt, Artificial Sequence
  Description of Artificial Sequence: Synthetic oligonucleotide
  Antisense strand to SEQ ID NO: 1819253
aagccucggguuauagcgc

SEQ ID NO: 1819255 - RNA, 19 nt, Artificial Sequence
  Description of Artificial Sequence: Synthetic oligonucleotide
  Sense strand starting at position 2787 of SEQ ID NO: 1563556
gugacuuucgcguccuaca

SEQ ID NO: 1819256 - RNA, 19 nt, Artificial Sequence
  Description of Artificial Sequence: Synthetic oligonucleotide
  Antisense strand to SEQ ID NO: 1819255
uguaggacgcgaaagucac

SEQ ID NO: 1819257 - RNA, 19 nt, Artificial Sequence
  Description of Artificial Sequence: Synthetic oligonucleotide
  Sense strand starting at position 2838 of SEQ ID NO: 1563556
cgucgugaauucccuaaca

SEQ ID NO: 1819258 - RNA, 19 nt, Artificial Sequence
  Description of Artificial Sequence: Synthetic oligonucleotide
  Antisense strand to SEQ ID NO: 1819257
uguuagggaauucacgacg

SEQ ID NO: 1819259 - RNA, 19 nt, Artificial Sequence
  Description of Artificial Sequence: Synthetic oligonucleotide
  Sense strand starting at position 3187 of SEQ ID NO: 1563556
gauccaucaucugucugga

SEQ ID NO: 1819260 - RNA, 19 nt, Artificial Sequence
  Description of Artificial Sequence: Synthetic oligonucleotide
  Antisense strand to SEQ ID NO: 1819259
uccagacagaugauggauc

SEQ ID NO: 1819261 - RNA, 19 nt, Artificial Sequence
  Description of Artificial Sequence: Synthetic oligonucleotide
  Sense strand starting at position 3264 of SEQ ID NO: 1563556
acgggaaucuccuacccuu

SEQ ID NO: 1819262 - RNA, 19 nt, Artificial Sequence
  Description of Artificial Sequence: Synthetic oligonucleotide
  Antisense strand to SEQ ID NO: 1819261
aaggguaggagauucccgu

SEQ ID NO: 1819263 - RNA, 19 nt, Artificial Sequence
  Description of Artificial Sequence: Synthetic oligonucleotide
  Sense strand starting at position 3354 of SEQ ID NO: 1563556
gcuucuauacuggaguacu

SEQ ID NO: 1819264 - RNA, 19 nt, Artificial Sequence
  Description of Artificial Sequence: Synthetic oligonucleotide
  Antisense strand to SEQ ID NO: 1819263
aguacuccaguauagaagc

SEQ ID NO: 1819265 - RNA, 19 nt, Artificial Sequence
  Description of Artificial Sequence: Synthetic oligonucleotide
  Sense strand starting at position 3459 of SEQ ID NO: 1563556
aaguaauuaugguaacgaa

SEQ ID NO: 1819266 - RNA, 19 nt, Artificial Sequence
  Description of Artificial Sequence: Synthetic oligonucleotide
  Antisense strand to SEQ ID NO: 1819265
uucguuaccauaauuacuu

SEQ ID NO: 1819267 - RNA, 19 nt, Artificial Sequence
  Description of Artificial Sequence: Synthetic oligonucleotide
  Sense strand starting at position 3514 of SEQ ID NO: 1563556
gaagaagcuccagguuacu

SEQ ID NO: 1819268 - RNA, 19 nt, Artificial Sequence
  Description of Artificial Sequence: Synthetic oligonucleotide
  Antisense strand to SEQ ID NO: 1819267
aguaaccuggagcuucuuc

SEQ ID NO: 1819269 - RNA, 19 nt, Artificial Sequence
  Description of Artificial Sequence: Synthetic oligonucleotide
  Sense strand starting at position 3601 of SEQ ID NO: 1563556
augaaaguguugcuuuaau

SEQ ID NO: 1819270 - RNA, 19 nt, Artificial Sequence
  Description of Artificial Sequence: Synthetic oligonucleotide
  Antisense strand to SEQ ID NO: 1819269
auuaaagcaacacuuucau

SEQ ID NO: 1819271 - RNA, 19 nt, Artificial Sequence
  Description of Artificial Sequence: Synthetic oligonucleotide
  Sense strand starting at position 3629 of SEQ ID NO: 1563556
ugagcauuccgagacaacu

SEQ ID NO: 1819272 - RNA, 19 nt, Artificial Sequence
  Description of Artificial Sequence: Synthetic oligonucleotide
  Antisense strand to SEQ ID NO: 1819271
aguugucucggaaugcuca

SEQ ID NO: 1819273 - RNA, 19 nt, Artificial Sequence
  Description of Artificial Sequence: Synthetic oligonucleotide
  Sense strand starting at position 3679 of SEQ ID NO: 1563556
gggccagaggccugggauu

SEQ ID NO: 1819274 - RNA, 19 nt, Artificial Sequence
  Description of Artificial Sequence: Synthetic oligonucleotide
  Antisense strand to SEQ ID NO: 1819273
aaucccaggccucuggccc

SEQ ID NO: 1819275 - RNA, 19 nt, Artificial Sequence
  Description of Artificial Sequence: Synthetic oligonucleotide
  Sense strand starting at position 3848 of SEQ ID NO: 1563556
acagucaucuguucuucca

SEQ ID NO: 1819276 - RNA, 19 nt, Artificial Sequence
  Description of Artificial Sequence: Synthetic oligonucleotide
  Antisense strand to SEQ ID NO: 1819275
uggaagaacagaugacugu

SEQ ID NO: 1819277 - RNA, 19 nt, Artificial Sequence
  Description of Artificial Sequence: Synthetic oligonucleotide
  Sense strand starting at position 3865 of SEQ ID NO: 1563556
caggucagcccucauagau

SEQ ID NO: 1819278 - RNA, 19 nt, Artificial Sequence
  Description of Artificial Sequence: Synthetic oligonucleotide
  Antisense strand to SEQ ID NO: 1819277
aucuaugagggcugaccug

SEQ ID NO: 1819279 - RNA, 19 nt, Artificial Sequence
  Description of Artificial Sequence: Synthetic oligonucleotide
  Sense strand starting at position 3902 of SEQ ID NO: 1563556
ucucaaauagcagauguua

SEQ ID NO: 1819280 - RNA, 19 nt, Artificial Sequence
  Description of Artificial Sequence: Synthetic oligonucleotide
  Antisense strand to SEQ ID NO: 1819279
uaacaucugcuauuugaga

SEQ ID NO: 1819281 - RNA, 19 nt, Artificial Sequence
  Description of Artificial Sequence: Synthetic oligonucleotide
  Sense strand starting at position 3945 of SEQ ID NO: 1563556
agcagacgucucugcacuu

SEQ ID NO: 1819282 - RNA, 19 nt, Artificial Sequence
  Description of Artificial Sequence: Synthetic oligonucleotide
  Antisense strand to SEQ ID NO: 1819281
aagugcagagacgucugcu

SEQ ID NO: 1819283 - RNA, 19 nt, Artificial Sequence
  Description of Artificial Sequence: Synthetic oligonucleotide
  Sense strand starting at position 3955 of SEQ ID NO: 1563556
ucugcacuuucuguuagaa

SEQ ID NO: 1819284 - RNA, 19 nt, Artificial Sequence
  Description of Artificial Sequence: Synthetic oligonucleotide
  Antisense strand to SEQ ID NO: 1819283
uucuaacagaaagugcaga

SEQ ID NO: 1819285 - RNA, 19 nt, Artificial Sequence
  Description of Artificial Sequence: Synthetic oligonucleotide
  Sense strand starting at position 38 of SEQ ID NO: 1563557
aaaggauaugcugguuaaa

SEQ ID NO: 1819286 - RNA, 19 nt, Artificial Sequence
  Description of Artificial Sequence: Synthetic oligonucleotide
  Antisense strand to SEQ ID NO: 1819285
uuuaaccagcauauccuuu

SEQ ID NO: 1819287 - RNA, 19 nt, Artificial Sequence
  Description of Artificial Sequence: Synthetic oligonucleotide
  Sense strand starting at position 40 of SEQ ID NO: 1563557
aggauaugcugguuaaaga

SEQ ID NO: 1819288 - RNA, 19 nt, Artificial Sequence
  Description of Artificial Sequence: Synthetic oligonucleotide
  Antisense strand to SEQ ID NO: 1819287
ucuuuaaccagcauauccu

SEQ ID NO: 1819289 - RNA, 19 nt, Artificial Sequence
  Description of Artificial Sequence: Synthetic oligonucleotide
  Sense strand starting at position 144 of SEQ ID NO: 1563557
ugugauuagaaaggaguau

SEQ ID NO: 1819290 - RNA, 19 nt, Artificial Sequence
  Description of Artificial Sequence: Synthetic oligonucleotide
  Antisense strand to SEQ ID NO: 1819289
auacuccuuucuaaucaca

SEQ ID NO: 1819291 - RNA, 19 nt, Artificial Sequence
  Description of Artificial Sequence: Synthetic oligonucleotide
  Sense strand starting at position 358 of SEQ ID NO: 1563557
aacagauuuguucguugcu

SEQ ID NO: 1819292 - RNA, 19 nt, Artificial Sequence
  Description of Artificial Sequence: Synthetic oligonucleotide
  Antisense strand to SEQ ID NO: 1819291
agcaacgaacaaaucuguu

SEQ ID NO: 1819293 - RNA, 19 nt, Artificial Sequence
  Description of Artificial Sequence: Synthetic oligonucleotide
  Sense strand starting at position 359 of SEQ ID NO: 1563557
acagauuuguucguugcuu

SEQ ID NO: 1819294 - RNA, 19 nt, Artificial Sequence
  Description of Artificial Sequence: Synthetic oligonucleotide
  Antisense strand to SEQ ID NO: 1819293
aagcaacgaacaaaucugu

SEQ ID NO: 1819295 - RNA, 19 nt, Artificial Sequence
  Description of Artificial Sequence: Synthetic oligonucleotide
  Sense strand starting at position 429 of SEQ ID NO: 1563557
augcuauuucugugccuaa

SEQ ID NO: 1819296 - RNA, 19 nt, Artificial Sequence
  Description of Artificial Sequence: Synthetic oligonucleotide
  Antisense strand to SEQ ID NO: 1819295
uuaggcacagaaauagcau

SEQ ID NO: 1819297 - RNA, 19 nt, Artificial Sequence
  Description of Artificial Sequence: Synthetic oligonucleotide
  Sense strand starting at position 430 of SEQ ID NO: 1563557
ugcuauuucugugccuaag

SEQ ID NO: 1819298 - RNA, 19 nt, Artificial Sequence
  Description of Artificial Sequence: Synthetic oligonucleotide
  Antisense strand to SEQ ID NO: 1819297
cuuaggcacagaaauagca

SEQ ID NO: 1819299 - RNA, 19 nt, Artificial Sequence
  Description of Artificial Sequence: Synthetic oligonucleotide
  Sense strand starting at position 433 of SEQ ID NO: 1563557
uauuucugugccuaagugu

SEQ ID NO: 1819300 - RNA, 19 nt, Artificial Sequence
  Description of Artificial Sequence: Synthetic oligonucleotide
  Antisense strand to SEQ ID NO: 1819299
acacuuaggcacagaaaua

SEQ ID NO: 1819301 - RNA, 19 nt, Artificial Sequence
  Description of Artificial Sequence: Synthetic oligonucleotide
  Sense strand starting at position 460 of SEQ ID NO: 1563557
auauaaaccucgcuuuaag

SEQ ID NO: 1819302 - RNA, 19 nt, Artificial Sequence
  Description of Artificial Sequence: Synthetic oligonucleotide
  Antisense strand to SEQ ID NO: 1819301
cuuaaagcgagguuuauau

SEQ ID NO: 1819303 - RNA, 19 nt, Artificial Sequence
  Description of Artificial Sequence: Synthetic oligonucleotide
  Sense strand starting at position 566 of SEQ ID NO: 1563557
uuucuaaauggucagcaca

SEQ ID NO: 1819304 - RNA, 19 nt, Artificial Sequence
  Description of Artificial Sequence: Synthetic oligonucleotide
  Antisense strand to SEQ ID NO: 1819303
ugugcugaccauuuagaaa

SEQ ID NO: 1819305 - RNA, 19 nt, Artificial Sequence
  Description of Artificial Sequence: Synthetic oligonucleotide
  Sense strand starting at position 817 of SEQ ID NO: 1563557
auuguucuggucuauauau

SEQ ID NO: 1819306 - RNA, 19 nt, Artificial Sequence
  Description of Artificial Sequence: Synthetic oligonucleotide
  Antisense strand to SEQ ID NO: 1819305
auauauagaccagaacaau

SEQ ID NO: 1819307 - RNA, 19 nt, Artificial Sequence
  Description of Artificial Sequence: Synthetic oligonucleotide
  Sense strand starting at position 923 of SEQ ID NO: 1563557
gaaguucuccaacagcgaa

SEQ ID NO: 1819308 - RNA, 19 nt, Artificial Sequence
  Description of Artificial Sequence: Synthetic oligonucleotide
  Antisense strand to SEQ ID NO: 1819307
uucgcuguuggagaacuuc

SEQ ID NO: 1819309 - RNA, 19 nt, Artificial Sequence
  Description of Artificial Sequence: Synthetic oligonucleotide
  Sense strand starting at position 950 of SEQ ID NO: 1563557
guuuaucuaguauagaaac

SEQ ID NO: 1819310 - RNA, 19 nt, Artificial Sequence
  Description of Artificial Sequence: Synthetic oligonucleotide
  Antisense strand to SEQ ID NO: 1819309
guuucuauacuagauaaac

SEQ ID NO: 1819311 - RNA, 19 nt, Artificial Sequence
  Description of Artificial Sequence: Synthetic oligonucleotide
  Sense strand starting at position 1146 of SEQ ID NO: 1563557
aagguuuguaguuagggua

SEQ ID NO: 1819312 - RNA, 19 nt, Artificial Sequence
  Description of Artificial Sequence: Synthetic oligonucleotide
  Antisense strand to SEQ ID NO: 1819311
uacccuaacuacaaaccuu

SEQ ID NO: 1819313 - RNA, 19 nt, Artificial Sequence
  Description of Artificial Sequence: Synthetic oligonucleotide
  Sense strand starting at position 1334 of SEQ ID NO: 1563557
uguuaaauuccuuaguaag

SEQ ID NO: 1819314 - RNA, 19 nt, Artificial Sequence
  Description of Artificial Sequence: Synthetic oligonucleotide
  Antisense strand to SEQ ID NO: 1819313
cuuacuaaggaauuuaaca

SEQ ID NO: 1819315 - RNA, 19 nt, Artificial Sequence
  Description of Artificial Sequence: Synthetic oligonucleotide
  Sense strand starting at position 1336 of SEQ ID NO: 1563557
uuaaauuccuuaguaagag

SEQ ID NO: 1819316 - RNA, 19 nt, Artificial Sequence
  Description of Artificial Sequence: Synthetic oligonucleotide
  Antisense strand to SEQ ID NO: 1819315
cucuuacuaaggaauuuaa

SEQ ID NO: 1819317 - RNA, 19 nt, Artificial Sequence
  Description of Artificial Sequence: Synthetic oligonucleotide
  Sense strand starting at position 1465 of SEQ ID NO: 1563557
auccauagugucuaauaac

SEQ ID NO: 1819318 - RNA, 19 nt, Artificial Sequence
  Description of Artificial Sequence: Synthetic oligonucleotide
  Antisense strand to SEQ ID NO: 1819317
guuauuagacacuauggau

SEQ ID NO: 1819319 - RNA, 19 nt, Artificial Sequence
  Description of Artificial Sequence: Synthetic oligonucleotide
  Sense strand starting at position 1474 of SEQ ID NO: 1563557
gucuaauaacuuuggaaca

SEQ ID NO: 1819320 - RNA, 19 nt, Artificial Sequence
  Description of Artificial Sequence: Synthetic oligonucleotide
  Antisense strand to SEQ ID NO: 1819319
uguuccaaaguuauuagac

SEQ ID NO: 1819321 - RNA, 19 nt, Artificial Sequence
  Description of Artificial Sequence: Synthetic oligonucleotide
  Sense strand starting at position 2318 of SEQ ID NO: 1563557
gcucuuagggcauagggaa

SEQ ID NO: 1819322 - RNA, 19 nt, Artificial Sequence
  Description of Artificial Sequence: Synthetic oligonucleotide
  Antisense strand to SEQ ID NO: 1819321
uucccuaugcccuaagagc

SEQ ID NO: 1819323 - RNA, 19 nt, Artificial Sequence
  Description of Artificial Sequence: Synthetic oligonucleotide
  Sense strand starting at position 2547 of SEQ ID NO: 1563557
cgccgcacugguuugagau

SEQ ID NO: 1819324 - RNA, 19 nt, Artificial Sequence
  Description of Artificial Sequence: Synthetic oligonucleotide
  Antisense strand to SEQ ID NO: 1819323
aucucaaaccagugcggcg

SEQ ID NO: 1819325 - RNA, 19 nt, Artificial Sequence
  Description of Artificial Sequence: Synthetic oligonucleotide
  Sense strand starting at position 2601 of SEQ ID NO: 1563557
ucaccuguccuuuagugaa

SEQ ID NO: 1819326 - RNA, 19 nt, Artificial Sequence
  Description of Artificial Sequence: Synthetic oligonucleotide
  Antisense strand to SEQ ID NO: 1819325
uucacuaaaggacagguga

SEQ ID NO: 1819327 - RNA, 19 nt, Artificial Sequence
  Description of Artificial Sequence: Synthetic oligonucleotide
  Sense strand starting at position 2629 of SEQ ID NO: 1563557
uuugaaauuguugggaaac

SEQ ID NO: 1819328 - RNA, 19 nt, Artificial Sequence
  Description of Artificial Sequence: Synthetic oligonucleotide
  Antisense strand to SEQ ID NO: 1819327
guuucccaacaauuucaaa

SEQ ID NO: 1819329 - RNA, 19 nt, Artificial Sequence
  Description of Artificial Sequence: Synthetic oligonucleotide
  Sense strand starting at position 2639 of SEQ ID NO: 1563557
uugggaaacugugcgagaa

SEQ ID NO: 1819330 - RNA, 19 nt, Artificial Sequence
  Description of Artificial Sequence: Synthetic oligonucleotide
  Antisense strand to SEQ ID NO: 1819329
uucucgcacaguuucccaa

SEQ ID NO: 1819331 - RNA, 19 nt, Artificial Sequence
  Description of Artificial Sequence: Synthetic oligonucleotide
  Sense strand starting at position 2673 of SEQ ID NO: 1563557
aggaguuugccagagguuu

SEQ ID NO: 1819332 - RNA, 19 nt, Artificial Sequence
  Description of Artificial Sequence: Synthetic oligonucleotide
  Antisense strand to SEQ ID NO: 1819331
aaaccucuggcaaacuccu

SEQ ID NO: 1819333 - RNA, 19 nt, Artificial Sequence
  Description of Artificial Sequence: Synthetic oligonucleotide
  Sense strand starting at position 2782 of SEQ ID NO: 1563557
gagguaaagugcuuaacac

SEQ ID NO: 1819334 - RNA, 19 nt, Artificial Sequence
  Description of Artificial Sequence: Synthetic oligonucleotide
  Antisense strand to SEQ ID NO: 1819333
guguuaagcacuuuaccuc

SEQ ID NO: 1819335 - RNA, 19 nt, Artificial Sequence
  Description of Artificial Sequence: Synthetic oligonucleotide
  Sense strand starting at position 2945 of SEQ ID NO: 1563557
gucuaaagcccugaauuaa

SEQ ID NO: 1819336 - RNA, 19 nt, Artificial Sequence
  Description of Artificial Sequence: Synthetic oligonucleotide
  Antisense strand to SEQ ID NO: 1819335
uuaauucagggcuuuagac

SEQ ID NO: 1819337 - RNA, 19 nt, Artificial Sequence
  Description of Artificial Sequence: Synthetic oligonucleotide
  Sense strand starting at position 3032 of SEQ ID NO: 1563557
aauagaauagcuugguaua

SEQ ID NO: 1819338 - RNA, 19 nt, Artificial Sequence
  Description of Artificial Sequence: Synthetic oligonucleotide
  Antisense strand to SEQ ID NO: 1819337
uauaccaagcuauucuauu

SEQ ID NO: 1819339 - RNA, 19 nt, Artificial Sequence
  Description of Artificial Sequence: Synthetic oligonucleotide
  Sense strand starting at position 3033 of SEQ ID NO: 1563557
auagaauagcuugguauac

SEQ ID NO: 1819340 - RNA, 19 nt, Artificial Sequence
  Description of Artificial Sequence: Synthetic oligonucleotide
  Antisense strand to SEQ ID NO: 1819339
guauaccaagcuauucuau

SEQ ID NO: 1819341 - RNA, 19 nt, Artificial Sequence
  Description of Artificial Sequence: Synthetic oligonucleotide
  Sense strand starting at position 3034 of SEQ ID NO: 1563557
uagaauagcuugguauacu

SEQ ID NO: 1819342 - RNA, 19 nt, Artificial Sequence
  Description of Artificial Sequence: Synthetic oligonucleotide
  Antisense strand to SEQ ID NO: 1819341
aguauaccaagcuauucua

SEQ ID NO: 1819343 - RNA, 19 nt, Artificial Sequence
  Description of Artificial Sequence: Synthetic oligonucleotide
  Sense strand starting at position 3046 of SEQ ID NO: 1563557
guauacugccacugaauga

SEQ ID NO: 1819344 - RNA, 19 nt, Artificial Sequence
  Description of Artificial Sequence: Synthetic oligonucleotide
  Antisense strand to SEQ ID NO: 1819343
ucauucaguggcaguauac

SEQ ID NO: 1819345 - RNA, 19 nt, Artificial Sequence
  Description of Artificial Sequence: Synthetic oligonucleotide
  Sense strand starting at position 3161 of SEQ ID NO: 1563557
aaagacauuuggugaaaga

SEQ ID NO: 1819346 - RNA, 19 nt, Artificial Sequence
  Description of Artificial Sequence: Synthetic oligonucleotide
  Antisense strand to SEQ ID NO: 1819345
ucuuucaccaaaugucuuu

SEQ ID NO: 1819347 - RNA, 19 nt, Artificial Sequence
  Description of Artificial Sequence: Synthetic oligonucleotide
  Sense strand starting at position 3177 of SEQ ID NO: 1563557
agaauuauguaagccauac

SEQ ID NO: 1819348 - RNA, 19 nt, Artificial Sequence
  Description of Artificial Sequence: Synthetic oligonucleotide
  Antisense strand to SEQ ID NO: 1819347
guauggcuuacauaauucu

SEQ ID NO: 1819349 - RNA, 19 nt, Artificial Sequence
  Description of Artificial Sequence: Synthetic oligonucleotide
  Sense strand starting at position 3195 of SEQ ID NO: 1563557
cugagaauauuguuaacau

SEQ ID NO: 1819350 - RNA, 19 nt, Artificial Sequence
  Description of Artificial Sequence: Synthetic oligonucleotide
  Antisense strand to SEQ ID NO: 1819349
auguuaacaauauucucag

SEQ ID NO: 1819351 - RNA, 19 nt, Artificial Sequence
  Description of Artificial Sequence: Synthetic oligonucleotide
  Sense strand starting at position 3226 of SEQ ID NO: 1563557
cggacuggccgagaauaaa

SEQ ID NO: 1819352 - RNA, 19 nt, Artificial Sequence
  Description of Artificial Sequence: Synthetic oligonucleotide
  Antisense strand to SEQ ID NO: 1819351
uuuauucucggccaguccg

SEQ ID NO: 1819353 - RNA, 19 nt, Artificial Sequence
  Description of Artificial Sequence: Synthetic oligonucleotide
  Sense strand starting at position 3418 of SEQ ID NO: 1563557
aagccugugaguuaggaca

SEQ ID NO: 1819354 - RNA, 19 nt, Artificial Sequence
  Description of Artificial Sequence: Synthetic oligonucleotide
  Antisense strand to SEQ ID NO: 1819353
uguccuaacucacaggcuu

SEQ ID NO: 1819355 - RNA, 19 nt, Artificial Sequence
  Description of Artificial Sequence: Synthetic oligonucleotide
  Sense strand starting at position 3425 of SEQ ID NO: 1563557
ugaguuaggacaggucaua

SEQ ID NO: 1819356 - RNA, 19 nt, Artificial Sequence
  Description of Artificial Sequence: Synthetic oligonucleotide
  Antisense strand to SEQ ID NO: 1819355
uaugaccuguccuaacuca

SEQ ID NO: 1819357 - RNA, 19 nt, Artificial Sequence
  Description of Artificial Sequence: Synthetic oligonucleotide
  Sense strand starting at position 3466 of SEQ ID NO: 1563557
aucuguaaugcauaacuga

SEQ ID NO: 1819358 - RNA, 19 nt, Artificial Sequence
  Description of Artificial Sequence: Synthetic oligonucleotide
  Antisense strand to SEQ ID NO: 1819357
ucaguuaugcauuacagau

SEQ ID NO: 1819359 - RNA, 19 nt, Artificial Sequence
  Description of Artificial Sequence: Synthetic oligonucleotide
  Sense strand starting at position 3514 of SEQ ID NO: 1563557
augaaauggaagugcuuau

SEQ ID NO: 1819360 - RNA, 19 nt, Artificial Sequence
  Description of Artificial Sequence: Synthetic oligonucleotide
  Antisense strand to SEQ ID NO: 1819359
auaagcacuuccauuucau

SEQ ID NO: 1819361 - RNA, 19 nt, Artificial Sequence
  Description of Artificial Sequence: Synthetic oligonucleotide
  Sense strand starting at position 3608 of SEQ ID NO: 1563557
uuagaaguauuugagguaa

SEQ ID NO: 1819362 - RNA, 19 nt, Artificial Sequence
  Description of Artificial Sequence: Synthetic oligonucleotide
  Antisense strand to SEQ ID NO: 1819361
uuaccucaaauacuucuaa

SEQ ID NO: 1819363 - RNA, 19 nt, Artificial Sequence
  Description of Artificial Sequence: Synthetic oligonucleotide
  Sense strand starting at position 3771 of SEQ ID NO: 1563557
augguacuguuaucaauag

SEQ ID NO: 1819364 - RNA, 19 nt, Artificial Sequence
  Description of Artificial Sequence: Synthetic oligonucleotide
  Antisense strand to SEQ ID NO: 1819363
cuauugauaacaguaccau

SEQ ID NO: 1819365 - RNA, 19 nt, Artificial Sequence
  Description of Artificial Sequence: Synthetic oligonucleotide
  Sense strand starting at position 329 of SEQ ID NO: 1563558
ggugaucucuuauuacuuu

SEQ ID NO: 1819366 - RNA, 19 nt, Artificial Sequence
  Description of Artificial Sequence: Synthetic oligonucleotide
  Antisense strand to SEQ ID NO: 1819365
aaaguaauaagagaucacc

SEQ ID NO: 1819367 - RNA, 19 nt, Artificial Sequence
  Description of Artificial Sequence: Synthetic oligonucleotide
  Sense strand starting at position 597 of SEQ ID NO: 1563558
gcugaaagacguggcauuu

SEQ ID NO: 1819368 - RNA, 19 nt, Artificial Sequence
  Description of Artificial Sequence: Synthetic oligonucleotide
  Antisense strand to SEQ ID NO: 1819367
aaaugccacgucuuucagc

SEQ ID NO: 1819369 - RNA, 19 nt, Artificial Sequence
  Description of Artificial Sequence: Synthetic oligonucleotide
  Sense strand starting at position 687 of SEQ ID NO: 1563558
cucuuaguuuggcuacaga

SEQ ID NO: 1819370 - RNA, 19 nt, Artificial Sequence
  Description of Artificial Sequence: Synthetic oligonucleotide
  Antisense strand to SEQ ID NO: 1819369
ucuguagccaaacuaagag

SEQ ID NO: 1819371 - RNA, 19 nt, Artificial Sequence
  Description of Artificial Sequence: Synthetic oligonucleotide
  Sense strand starting at position 690 of SEQ ID NO: 1563558
uuaguuuggcuacagauau

SEQ ID NO: 1819372 - RNA, 19 nt, Artificial Sequence
  Description of Artificial Sequence: Synthetic oligonucleotide
  Antisense strand to SEQ ID NO: 1819371
auaucuguagccaaacuaa

SEQ ID NO: 1819373 - RNA, 19 nt, Artificial Sequence
  Description of Artificial Sequence: Synthetic oligonucleotide
  Sense strand starting at position 1267 of SEQ ID NO: 1563558
cuauacaaaugagauaaga

SEQ ID NO: 1819374 - RNA, 19 nt, Artificial Sequence
  Description of Artificial Sequence: Synthetic oligonucleotide
  Antisense strand to SEQ ID NO: 1819373
ucuuaucucauuuguauag

SEQ ID NO: 1819375 - RNA, 19 nt, Artificial Sequence
  Description of Artificial Sequence: Synthetic oligonucleotide
  Sense strand starting at position 1280 of SEQ ID NO: 1563558
auaagacaugagugcuuua

SEQ ID NO: 1819376 - RNA, 19 nt, Artificial Sequence
  Description of Artificial Sequence: Synthetic oligonucleotide
  Antisense strand to SEQ ID NO: 1819375
uaaagcacucaugucuuau

SEQ ID NO: 1819377 - RNA, 19 nt, Artificial Sequence
  Description of Artificial Sequence: Synthetic oligonucleotide
  Sense strand starting at position 1283 of SEQ ID NO: 1563558
agacaugagugcuuuaaag

SEQ ID NO: 1819378 - RNA, 19 nt, Artificial Sequence
  Description of Artificial Sequence: Synthetic oligonucleotide
  Antisense strand to SEQ ID NO: 1819377
cuuuaaagcacucaugucu

SEQ ID NO: 1819379 - RNA, 19 nt, Artificial Sequence
  Description of Artificial Sequence: Synthetic oligonucleotide
  Sense strand starting at position 1355 of SEQ ID NO: 1563558
auguaaacaugcuugauua

SEQ ID NO: 1819380 - RNA, 19 nt, Artificial Sequence
  Description of Artificial Sequence: Synthetic oligonucleotide
  Antisense strand to SEQ ID NO: 1819379
uaaucaagcauguuuacau

SEQ ID NO: 1819381 - RNA, 19 nt, Artificial Sequence
  Description of Artificial Sequence: Synthetic oligonucleotide
  Sense strand starting at position 1356 of SEQ ID NO: 1563558
uguaaacaugcuugauuac

SEQ ID NO: 1819382 - RNA, 19 nt, Artificial Sequence
  Description of Artificial Sequence: Synthetic oligonucleotide
  Antisense strand to SEQ ID NO: 1819381
guaaucaagcauguuuaca

SEQ ID NO: 1819383 - RNA, 19 nt, Artificial Sequence
  Description of Artificial Sequence: Synthetic oligonucleotide
  Sense strand starting at position 1363 of SEQ ID NO: 1563558
augcuugauuaccugacaa

SEQ ID NO: 1819384 - RNA, 19 nt, Artificial Sequence
  Description of Artificial Sequence: Synthetic oligonucleotide
  Antisense strand to SEQ ID NO: 1819383
uugucagguaaucaagcau

SEQ ID NO: 1819385 - RNA, 19 nt, Artificial Sequence
  Description of Artificial Sequence: Synthetic oligonucleotide
  Sense strand starting at position 1365 of SEQ ID NO: 1563558
gcuugauuaccugacaaua

SEQ ID NO: 1819386 - RNA, 19 nt, Artificial Sequence
  Description of Artificial Sequence: Synthetic oligonucleotide
  Antisense strand to SEQ ID NO: 1819385
uauugucagguaaucaagc

SEQ ID NO: 1819387 - RNA, 19 nt, Artificial Sequence
  Description of Artificial Sequence: Synthetic oligonucleotide
  Sense strand starting at position 1511 of SEQ ID NO: 1563558
uugagaugucaauguguca

SEQ ID NO: 1819388 - RNA, 19 nt, Artificial Sequence
  Description of Artificial Sequence: Synthetic oligonucleotide
  Antisense strand to SEQ ID NO: 1819387
ugacacauugacaucucaa

SEQ ID NO: 1819389 - RNA, 19 nt, Artificial Sequence
  Description of Artificial Sequence: Synthetic oligonucleotide
  Sense strand starting at position 1524 of SEQ ID NO: 1563558
gugucagucaauuaaugua

SEQ ID NO: 1819390 - RNA, 19 nt, Artificial Sequence
  Description of Artificial Sequence: Synthetic oligonucleotide
  Antisense strand to SEQ ID NO: 1819389
uacauuaauugacugacac

SEQ ID NO: 1819391 - RNA, 19 nt, Artificial Sequence
  Description of Artificial Sequence: Synthetic oligonucleotide
  Sense strand starting at position 1531 of SEQ ID NO: 1563558
ucaauuaauguaggacgua

SEQ ID NO: 1819392 - RNA, 19 nt, Artificial Sequence
  Description of Artificial Sequence: Synthetic oligonucleotide
  Antisense strand to SEQ ID NO: 1819391
uacguccuacauuaauuga

SEQ ID NO: 1819393 - RNA, 19 nt, Artificial Sequence
  Description of Artificial Sequence: Synthetic oligonucleotide
  Sense strand starting at position 1562 of SEQ ID NO: 1563558
acucucuuacucuagaguu

SEQ ID NO: 1819394 - RNA, 19 nt, Artificial Sequence
  Description of Artificial Sequence: Synthetic oligonucleotide
  Antisense strand to SEQ ID NO: 1819393
aacucuagaguaagagagu

SEQ ID NO: 1819395 - RNA, 19 nt, Artificial Sequence
  Description of Artificial Sequence: Synthetic oligonucleotide
  Sense strand starting at position 1564 of SEQ ID NO: 1563558
ucucuuacucuagaguucu

SEQ ID NO: 1819396 - RNA, 19 nt, Artificial Sequence
  Description of Artificial Sequence: Synthetic oligonucleotide
  Antisense strand to SEQ ID NO: 1819395
agaacucuagaguaagaga

SEQ ID NO: 1819397 - RNA, 19 nt, Artificial Sequence
  Description of Artificial Sequence: Synthetic oligonucleotide
  Sense strand starting at position 1785 of SEQ ID NO: 1563558
ucaaauaaguuucuggaca

SEQ ID NO: 1819398 - RNA, 19 nt, Artificial Sequence
  Description of Artificial Sequence: Synthetic oligonucleotide
  Antisense strand to SEQ ID NO: 1819397
uguccagaaacuuauuuga

SEQ ID NO: 1819399 - RNA, 19 nt, Artificial Sequence
  Description of Artificial Sequence: Synthetic oligonucleotide
  Sense strand starting at position 1998 of SEQ ID NO: 1563558
cugcaauuccaggguuacu

SEQ ID NO: 1819400 - RNA, 19 nt, Artificial Sequence
  Description of Artificial Sequence: Synthetic oligonucleotide
  Antisense strand to SEQ ID NO: 1819399
aguaacccuggaauugcag

SEQ ID NO: 1819401 - RNA, 19 nt, Artificial Sequence
  Description of Artificial Sequence: Synthetic oligonucleotide
  Sense strand starting at position 2013 of SEQ ID NO: 1563558
uacuguugccaggagacaa

SEQ ID NO: 1819402 - RNA, 19 nt, Artificial Sequence
  Description of Artificial Sequence: Synthetic oligonucleotide
  Antisense strand to SEQ ID NO: 1819401
uugucuccuggcaacagua

SEQ ID NO: 1819403 - RNA, 19 nt, Artificial Sequence
  Description of Artificial Sequence: Synthetic oligonucleotide
  Sense strand starting at position 2032 of SEQ ID NO: 1563558
ggaauauuauuauugcauc

SEQ ID NO: 1819404 - RNA, 19 nt, Artificial Sequence
  Description of Artificial Sequence: Synthetic oligonucleotide
  Antisense strand to SEQ ID NO: 1819403
gaugcaauaauaauauucc

SEQ ID NO: 1819405 - RNA, 19 nt, Artificial Sequence
  Description of Artificial Sequence: Synthetic oligonucleotide
  Sense strand starting at position 2099 of SEQ ID NO: 1563558
gggcaauucugagucccaa

SEQ ID NO: 1819406 - RNA, 19 nt, Artificial Sequence
  Description of Artificial Sequence: Synthetic oligonucleotide
  Antisense strand to SEQ ID NO: 1819405
uugggacucagaauugccc

SEQ ID NO: 1819407 - RNA, 19 nt, Artificial Sequence
  Description of Artificial Sequence: Synthetic oligonucleotide
  Sense strand starting at position 2240 of SEQ ID NO: 1563558
ccaguuaaaccaugcagau

SEQ ID NO: 1819408 - RNA, 19 nt, Artificial Sequence
  Description of Artificial Sequence: Synthetic oligonucleotide
  Antisense strand to SEQ ID NO: 1819407
aucugcaugguuuaacugg

SEQ ID NO: 1819409 - RNA, 19 nt, Artificial Sequence
  Description of Artificial Sequence: Synthetic oligonucleotide
  Sense strand starting at position 2296 of SEQ ID NO: 1563558
uguaacugccuacauguaa

SEQ ID NO: 1819410 - RNA, 19 nt, Artificial Sequence
  Description of Artificial Sequence: Synthetic oligonucleotide
  Antisense strand to SEQ ID NO: 1819409
uuacauguaggcaguuaca

SEQ ID NO: 1819411 - RNA, 19 nt, Artificial Sequence
  Description of Artificial Sequence: Synthetic oligonucleotide
  Sense strand starting at position 2327 of SEQ ID NO: 1563558
guuguaauuucugaaauac

SEQ ID NO: 1819412 - RNA, 19 nt, Artificial Sequence
  Description of Artificial Sequence: Synthetic oligonucleotide
  Antisense strand to SEQ ID NO: 1819411
guauuucagaaauuacaac

SEQ ID NO: 1819413 - RNA, 19 nt, Artificial Sequence
  Description of Artificial Sequence: Synthetic oligonucleotide
  Sense strand starting at position 2738 of SEQ ID NO: 1563558
aaguauuaugguugauaag

SEQ ID NO: 1819414 - RNA, 19 nt, Artificial Sequence
  Description of Artificial Sequence: Synthetic oligonucleotide
  Antisense strand to SEQ ID NO: 1819413
cuuaucaaccauaauacuu

SEQ ID NO: 1819415 - RNA, 19 nt, Artificial Sequence
  Description of Artificial Sequence: Synthetic oligonucleotide
  Sense strand starting at position 2739 of SEQ ID NO: 1563558
aguauuaugguugauaagu

SEQ ID NO: 1819416 - RNA, 19 nt, Artificial Sequence
  Description of Artificial Sequence: Synthetic oligonucleotide
  Antisense strand to SEQ ID NO: 1819415
acuuaucaaccauaauacu

SEQ ID NO: 1819417 - RNA, 19 nt, Artificial Sequence
  Description of Artificial Sequence: Synthetic oligonucleotide
  Sense strand starting at position 2747 of SEQ ID NO: 1563558
gguugauaaguauaauugu

SEQ ID NO: 1819418 - RNA, 19 nt, Artificial Sequence
  Description of Artificial Sequence: Synthetic oligonucleotide
  Antisense strand to SEQ ID NO: 1819417
acaauuauacuuaucaacc

SEQ ID NO: 1819419 - RNA, 19 nt, Artificial Sequence
  Description of Artificial Sequence: Synthetic oligonucleotide
  Sense strand starting at position 2835 of SEQ ID NO: 1563558
guuacaguauguccaauuu

SEQ ID NO: 1819420 - RNA, 19 nt, Artificial Sequence
  Description of Artificial Sequence: Synthetic oligonucleotide
  Antisense strand to SEQ ID NO: 1819419
aaauuggacauacuguaac

SEQ ID NO: 1819421 - RNA, 19 nt, Artificial Sequence
  Description of Artificial Sequence: Synthetic oligonucleotide
  Sense strand starting at position 2939 of SEQ ID NO: 1563558
ggcuaagccagugauccau

SEQ ID NO: 1819422 - RNA, 19 nt, Artificial Sequence
  Description of Artificial Sequence: Synthetic oligonucleotide
  Antisense strand to SEQ ID NO: 1819421
auggaucacuggcuuagcc

SEQ ID NO: 1819423 - RNA, 19 nt, Artificial Sequence
  Description of Artificial Sequence: Synthetic oligonucleotide
  Sense strand starting at position 2945 of SEQ ID NO: 1563558
gccagugauccaugugaua

SEQ ID NO: 1819424 - RNA, 19 nt, Artificial Sequence
  Description of Artificial Sequence: Synthetic oligonucleotide
  Antisense strand to SEQ ID NO: 1819423
uaucacauggaucacuggc

SEQ ID NO: 1819425 - RNA, 19 nt, Artificial Sequence
  Description of Artificial Sequence: Synthetic oligonucleotide
  Sense strand starting at position 3148 of SEQ ID NO: 1563558
aauguuacacuggaguuua

SEQ ID NO: 1819426 - RNA, 19 nt, Artificial Sequence
  Description of Artificial Sequence: Synthetic oligonucleotide
  Antisense strand to SEQ ID NO: 1819425
uaaacuccaguguaacauu

SEQ ID NO: 1819427 - RNA, 19 nt, Artificial Sequence
  Description of Artificial Sequence: Synthetic oligonucleotide
  Sense strand starting at position 3186 of SEQ ID NO: 1563558
guguacaguuucuuaaaga

SEQ ID NO: 1819428 - RNA, 19 nt, Artificial Sequence
  Description of Artificial Sequence: Synthetic oligonucleotide
  Antisense strand to SEQ ID NO: 1819427
ucuuuaagaaacuguacac

SEQ ID NO: 1819429 - RNA, 19 nt, Artificial Sequence
  Description of Artificial Sequence: Synthetic oligonucleotide
  Sense strand starting at position 3395 of SEQ ID NO: 1563558
uagggucuaugaucccauu

SEQ ID NO: 1819430 - RNA, 19 nt, Artificial Sequence
  Description of Artificial Sequence: Synthetic oligonucleotide
  Antisense strand to SEQ ID NO: 1819429
aaugggaucauagacccua

SEQ ID NO: 1819431 - RNA, 19 nt, Artificial Sequence
  Description of Artificial Sequence: Synthetic oligonucleotide
  Sense strand starting at position 3556 of SEQ ID NO: 1563558
ggugccauuuaauauacaa

SEQ ID NO: 1819432 - RNA, 19 nt, Artificial Sequence
  Description of Artificial Sequence: Synthetic oligonucleotide
  Antisense strand to SEQ ID NO: 1819431
uuguauauuaaauggcacc

SEQ ID NO: 1819433 - RNA, 19 nt, Artificial Sequence
  Description of Artificial Sequence: Synthetic oligonucleotide
  Sense strand starting at position 3573 of SEQ ID NO: 1563558
aagcaaggguuauuggaaa

SEQ ID NO: 1819434 - RNA, 19 nt, Artificial Sequence
  Description of Artificial Sequence: Synthetic oligonucleotide
  Antisense strand to SEQ ID NO: 1819433
uuuccaauaacccuugcuu

SEQ ID NO: 1819435 - RNA, 19 nt, Artificial Sequence
  Description of Artificial Sequence: Synthetic oligonucleotide
  Sense strand starting at position 3643 of SEQ ID NO: 1563558
uguaaaguacuacauguuu

SEQ ID NO: 1819436 - RNA, 19 nt, Artificial Sequence
  Description of Artificial Sequence: Synthetic oligonucleotide
  Antisense strand to SEQ ID NO: 1819435
aaacauguaguacuuuaca

SEQ ID NO: 1819437 - RNA, 19 nt, Artificial Sequence
  Description of Artificial Sequence: Synthetic oligonucleotide
  Sense strand starting at position 3813 of SEQ ID NO: 1563558
guacaaguaucagugagaa

SEQ ID NO: 1819438 - RNA, 19 nt, Artificial Sequence
  Description of Artificial Sequence: Synthetic oligonucleotide
  Antisense strand to SEQ ID NO: 1819437
uucucacugauacuuguac

SEQ ID NO: 1819439 - RNA, 19 nt, Artificial Sequence
  Description of Artificial Sequence: Synthetic oligonucleotide
  Sense strand starting at position 3897 of SEQ ID NO: 1563558
cuaaauagcuguuuagcaa

SEQ ID NO: 1819440 - RNA, 19 nt, Artificial Sequence
  Description of Artificial Sequence: Synthetic oligonucleotide
  Antisense strand to SEQ ID NO: 1819439
uugcuaaacagcuauuuag

SEQ ID NO: 1819441 - RNA, 19 nt, Artificial Sequence
  Description of Artificial Sequence: Synthetic oligonucleotide
  Sense strand starting at position 3952 of SEQ ID NO: 1563558
ggucauaauucccaauuug

SEQ ID NO: 1819442 - RNA, 19 nt, Artificial Sequence
  Description of Artificial Sequence: Synthetic oligonucleotide
  Antisense strand to SEQ ID NO: 1819441
caaauugggaauuaugacc

SEQ ID NO: 1819443 - RNA, 19 nt, Artificial Sequence
  Description of Artificial Sequence: Synthetic oligonucleotide
  Sense strand starting at position 3972 of SEQ ID NO: 1563558
ccaauagugucauucucuu

SEQ ID NO: 1819444 - RNA, 19 nt, Artificial Sequence
  Description of Artificial Sequence: Synthetic oligonucleotide
  Antisense strand to SEQ ID NO: 1819443
aagagaaugacacuauugg

SEQ ID NO: 1819445 - RNA, 19 nt, Artificial Sequence
  Description of Artificial Sequence: Synthetic oligonucleotide
  Sense strand starting at position 239 of SEQ ID NO: 1563559
cgagaauugaugggacucu

SEQ ID NO: 1819446 - RNA, 19 nt, Artificial Sequence
  Description of Artificial Sequence: Synthetic oligonucleotide
  Antisense strand to SEQ ID NO: 1819445
agagucccaucaauucucg

SEQ ID NO: 1819447 - RNA, 19 nt, Artificial Sequence
  Description of Artificial Sequence: Synthetic oligonucleotide
  Sense strand starting at position 664 of SEQ ID NO: 1563559
guauguauaguaggagauu

SEQ ID NO: 1819448 - RNA, 19 nt, Artificial Sequence
  Description of Artificial Sequence: Synthetic oligonucleotide
  Antisense strand to SEQ ID NO: 1819447
aaucuccuacuauacauac

SEQ ID NO: 1819449 - RNA, 19 nt, Artificial Sequence
  Description of Artificial Sequence: Synthetic oligonucleotide
  Sense strand starting at position 702 of SEQ ID NO: 1563559
ggagguuccaggcggagau

SEQ ID NO: 1819450 - RNA, 19 nt, Artificial Sequence
  Description of Artificial Sequence: Synthetic oligonucleotide
  Antisense strand to SEQ ID NO: 1819449
aucuccgccuggaaccucc

SEQ ID NO: 1819451 - RNA, 19 nt, Artificial Sequence
  Description of Artificial Sequence: Synthetic oligonucleotide
  Sense strand starting at position 924 of SEQ ID NO: 1563559
gaaugcucuaggcggagau

SEQ ID NO: 1819452 - RNA, 19 nt, Artificial Sequence
  Description of Artificial Sequence: Synthetic oligonucleotide
  Antisense strand to SEQ ID NO: 1819451
aucuccgccuagagcauuc

SEQ ID NO: 1819453 - RNA, 19 nt, Artificial Sequence
  Description of Artificial Sequence: Synthetic oligonucleotide
  Sense strand starting at position 1078 of SEQ ID NO: 1563559
uggguucgucaguugucuu

SEQ ID NO: 1819454 - RNA, 19 nt, Artificial Sequence
  Description of Artificial Sequence: Synthetic oligonucleotide
  Antisense strand to SEQ ID NO: 1819453
aagacaacugacgaaccca

SEQ ID NO: 1819455 - RNA, 19 nt, Artificial Sequence
  Description of Artificial Sequence: Synthetic oligonucleotide
  Sense strand starting at position 1173 of SEQ ID NO: 1563559
cuggaucuccgacgaguga

SEQ ID NO: 1819456 - RNA, 19 nt, Artificial Sequence
  Description of Artificial Sequence: Synthetic oligonucleotide
  Antisense strand to SEQ ID NO: 1819455
ucacucgucggagauccag

SEQ ID NO: 1819457 - RNA, 19 nt, Artificial Sequence
  Description of Artificial Sequence: Synthetic oligonucleotide
  Sense strand starting at position 1174 of SEQ ID NO: 1563559
uggaucuccgacgagugau

SEQ ID NO: 1819458 - RNA, 19 nt, Artificial Sequence
  Description of Artificial Sequence: Synthetic oligonucleotide
  Antisense strand to SEQ ID NO: 1819457
aucacucgucggagaucca

SEQ ID NO: 1819459 - RNA, 19 nt, Artificial Sequence
  Description of Artificial Sequence: Synthetic oligonucleotide
  Sense strand starting at position 1557 of SEQ ID NO: 1563559
aagggaugcuuggccauua

SEQ ID NO: 1819460 - RNA, 19 nt, Artificial Sequence
  Description of Artificial Sequence: Synthetic oligonucleotide
  Antisense strand to SEQ ID NO: 1819459
uaauggccaagcaucccuu

SEQ ID NO: 1819461 - RNA, 19 nt, Artificial Sequence
  Description of Artificial Sequence: Synthetic oligonucleotide
  Sense strand starting at position 2129 of SEQ ID NO: 1563559
ucauuugcguuuccuaaug

SEQ ID NO: 1819462 - RNA, 19 nt, Artificial Sequence
  Description of Artificial Sequence: Synthetic oligonucleotide
  Antisense strand to SEQ ID NO: 1819461
cauuaggaaacgcaaauga

SEQ ID NO: 1819463 - RNA, 19 nt, Artificial Sequence
  Description of Artificial Sequence: Synthetic oligonucleotide
  Sense strand starting at position 2191 of SEQ ID NO: 1563559
uuaucucuccuugguugaa

SEQ ID NO: 1819464 - RNA, 19 nt, Artificial Sequence
  Description of Artificial Sequence: Synthetic oligonucleotide
  Antisense strand to SEQ ID NO: 1819463
uucaaccaaggagagauaa

SEQ ID NO: 1819465 - RNA, 19 nt, Artificial Sequence
  Description of Artificial Sequence: Synthetic oligonucleotide
  Sense strand starting at position 2236 of SEQ ID NO: 1563559
uaaauuguguuucuggaua

SEQ ID NO: 1819466 - RNA, 19 nt, Artificial Sequence
  Description of Artificial Sequence: Synthetic oligonucleotide
  Antisense strand to SEQ ID NO: 1819465
uauccagaaacacaauuua

SEQ ID NO: 1819467 - RNA, 19 nt, Artificial Sequence
  Description of Artificial Sequence: Synthetic oligonucleotide
  Sense strand starting at position 2241 of SEQ ID NO: 1563559
uguguuucuggauaucaua

SEQ ID NO: 1819468 - RNA, 19 nt, Artificial Sequence
  Description of Artificial Sequence: Synthetic oligonucleotide
  Antisense strand to SEQ ID NO: 1819467
uaugauauccagaaacaca

SEQ ID NO: 1819469 - RNA, 19 nt, Artificial Sequence
  Description of Artificial Sequence: Synthetic oligonucleotide
  Sense strand starting at position 2282 of SEQ ID NO: 1563559
guguucuagauguaaauag

SEQ ID NO: 1819470 - RNA, 19 nt, Artificial Sequence
  Description of Artificial Sequence: Synthetic oligonucleotide
  Antisense strand to SEQ ID NO: 1819469
cuauuuacaucuagaacac

SEQ ID NO: 1819471 - RNA, 19 nt, Artificial Sequence
  Description of Artificial Sequence: Synthetic oligonucleotide
  Sense strand starting at position 2291 of SEQ ID NO: 1563559
auguaaauagguuaucgga

SEQ ID NO: 1819472 - RNA, 19 nt, Artificial Sequence
  Description of Artificial Sequence: Synthetic oligonucleotide
  Antisense strand to SEQ ID NO: 1819471
uccgauaaccuauuuacau

SEQ ID NO: 1819473 - RNA, 19 nt, Artificial Sequence
  Description of Artificial Sequence: Synthetic oligonucleotide
  Sense strand starting at position 2293 of SEQ ID NO: 1563559
guaaauagguuaucggaua

SEQ ID NO: 1819474 - RNA, 19 nt, Artificial Sequence
  Description of Artificial Sequence: Synthetic oligonucleotide
  Antisense strand to SEQ ID NO: 1819473
uauccgauaaccuauuuac

SEQ ID NO: 1819475 - RNA, 19 nt, Artificial Sequence
  Description of Artificial Sequence: Synthetic oligonucleotide
  Sense strand starting at position 2300 of SEQ ID NO: 1563559
gguuaucggauauaugauu

SEQ ID NO: 1819476 - RNA, 19 nt, Artificial Sequence
  Description of Artificial Sequence: Synthetic oligonucleotide
  Antisense strand to SEQ ID NO: 1819475
aaucauauauccgauaacc

SEQ ID NO: 1819477 - RNA, 19 nt, Artificial Sequence
  Description of Artificial Sequence: Synthetic oligonucleotide
  Sense strand starting at position 2462 of SEQ ID NO: 1563559
ggccuauccaaaggucaag

SEQ ID NO: 1819478 - RNA, 19 nt, Artificial Sequence
  Description of Artificial Sequence: Synthetic oligonucleotide
  Antisense strand to SEQ ID NO: 1819477
cuugaccuuuggauaggcc

SEQ ID NO: 1819479 - RNA, 19 nt, Artificial Sequence
  Description of Artificial Sequence: Synthetic oligonucleotide
  Sense strand starting at position 2535 of SEQ ID NO: 1563559
guaccuauugcuuacauau

SEQ ID NO: 1819480 - RNA, 19 nt, Artificial Sequence
  Description of Artificial Sequence: Synthetic oligonucleotide
  Antisense strand to SEQ ID NO: 1819479
auauguaagcaauagguac

SEQ ID NO: 1819481 - RNA, 19 nt, Artificial Sequence
  Description of Artificial Sequence: Synthetic oligonucleotide
  Sense strand starting at position 2741 of SEQ ID NO: 1563559
ucuagaaauuaggcuguau

SEQ ID NO: 1819482 - RNA, 19 nt, Artificial Sequence
  Description of Artificial Sequence: Synthetic oligonucleotide
  Antisense strand to SEQ ID NO: 1819481
auacagccuaauuucuaga

SEQ ID NO: 1819483 - RNA, 19 nt, Artificial Sequence
  Description of Artificial Sequence: Synthetic oligonucleotide
  Sense strand starting at position 2743 of SEQ ID NO: 1563559
uagaaauuaggcuguauua

SEQ ID NO: 1819484 - RNA, 19 nt, Artificial Sequence
  Description of Artificial Sequence: Synthetic oligonucleotide
  Antisense strand to SEQ ID NO: 1819483
uaauacagccuaauuucua

SEQ ID NO: 1819485 - RNA, 19 nt, Artificial Sequence
  Description of Artificial Sequence: Synthetic oligonucleotide
  Sense strand starting at position 2745 of SEQ ID NO: 1563559
gaaauuaggcuguauuagu

SEQ ID NO: 1819486 - RNA, 19 nt, Artificial Sequence
  Description of Artificial Sequence: Synthetic oligonucleotide
  Antisense strand to SEQ ID NO: 1819485
acuaauacagccuaauuuc

SEQ ID NO: 1819487 - RNA, 19 nt, Artificial Sequence
  Description of Artificial Sequence: Synthetic oligonucleotide
  Sense strand starting at position 2756 of SEQ ID NO: 1563559
guauuaguccuuuaacaau

SEQ ID NO: 1819488 - RNA, 19 nt, Artificial Sequence
  Description of Artificial Sequence: Synthetic oligonucleotide
  Antisense strand to SEQ ID NO: 1819487
auuguuaaaggacuaauac

SEQ ID NO: 1819489 - RNA, 19 nt, Artificial Sequence
  Description of Artificial Sequence: Synthetic oligonucleotide
  Sense strand starting at position 2795 of SEQ ID NO: 1563559
uuuccuagguccuuugaau

SEQ ID NO: 1819490 - RNA, 19 nt, Artificial Sequence
  Description of Artificial Sequence: Synthetic oligonucleotide
  Antisense strand to SEQ ID NO: 1819489
auucaaaggaccuaggaaa

SEQ ID NO: 1819491 - RNA, 19 nt, Artificial Sequence
  Description of Artificial Sequence: Synthetic oligonucleotide
  Sense strand starting at position 2914 of SEQ ID NO: 1563559
ggauaauuggcauguuaac

SEQ ID NO: 1819492 - RNA, 19 nt, Artificial Sequence
  Description of Artificial Sequence: Synthetic oligonucleotide
  Antisense strand to SEQ ID NO: 1819491
guuaacaugccaauuaucc

SEQ ID NO: 1819493 - RNA, 19 nt, Artificial Sequence
  Description of Artificial Sequence: Synthetic oligonucleotide
  Sense strand starting at position 2950 of SEQ ID NO: 1563559
cugagaaauguacagcuuu

SEQ ID NO: 1819494 - RNA, 19 nt, Artificial Sequence
  Description of Artificial Sequence: Synthetic oligonucleotide
  Antisense strand to SEQ ID NO: 1819493
aaagcuguacauuucucag

SEQ ID NO: 1819495 - RNA, 19 nt, Artificial Sequence
  Description of Artificial Sequence: Synthetic oligonucleotide
  Sense strand starting at position 2961 of SEQ ID NO: 1563559
acagcuuucuauuuguuua

SEQ ID NO: 1819496 - RNA, 19 nt, Artificial Sequence
  Description of Artificial Sequence: Synthetic oligonucleotide
  Antisense strand to SEQ ID NO: 1819495
uaaacaaauagaaagcugu

SEQ ID NO: 1819497 - RNA, 19 nt, Artificial Sequence
  Description of Artificial Sequence: Synthetic oligonucleotide
  Sense strand starting at position 3147 of SEQ ID NO: 1563559
uuguauauccauugguauc

SEQ ID NO: 1819498 - RNA, 19 nt, Artificial Sequence
  Description of Artificial Sequence: Synthetic oligonucleotide
  Antisense strand to SEQ ID NO: 1819497
gauaccaauggauauacaa

SEQ ID NO: 1819499 - RNA, 19 nt, Artificial Sequence
  Description of Artificial Sequence: Synthetic oligonucleotide
  Sense strand starting at position 3149 of SEQ ID NO: 1563559
guauauccauugguaucau

SEQ ID NO: 1819500 - RNA, 19 nt, Artificial Sequence
  Description of Artificial Sequence: Synthetic oligonucleotide
  Antisense strand to SEQ ID NO: 1819499
augauaccaauggauauac

SEQ ID NO: 1819501 - RNA, 19 nt, Artificial Sequence
  Description of Artificial Sequence: Synthetic oligonucleotide
  Sense strand starting at position 3237 of SEQ ID NO: 1563559
augauagugucaucuguga

SEQ ID NO: 1819502 - RNA, 19 nt, Artificial Sequence
  Description of Artificial Sequence: Synthetic oligonucleotide
  Antisense strand to SEQ ID NO: 1819501
ucacagaugacacuaucau

SEQ ID NO: 1819503 - RNA, 19 nt, Artificial Sequence
  Description of Artificial Sequence: Synthetic oligonucleotide
  Sense strand starting at position 3241 of SEQ ID NO: 1563559
uagugucaucugugaauaa

SEQ ID NO: 1819504 - RNA, 19 nt, Artificial Sequence
  Description of Artificial Sequence: Synthetic oligonucleotide
  Antisense strand to SEQ ID NO: 1819503
uuauucacagaugacacua

SEQ ID NO: 1819505 - RNA, 19 nt, Artificial Sequence
  Description of Artificial Sequence: Synthetic oligonucleotide
  Sense strand starting at position 3280 of SEQ ID NO: 1563559
uuccaaucugaauaucguu

SEQ ID NO: 1819506 - RNA, 19 nt, Artificial Sequence
  Description of Artificial Sequence: Synthetic oligonucleotide
  Antisense strand to SEQ ID NO: 1819505
aacgauauucagauuggaa

SEQ ID NO: 1819507 - RNA, 19 nt, Artificial Sequence
  Description of Artificial Sequence: Synthetic oligonucleotide
  Sense strand starting at position 3286 of SEQ ID NO: 1563559
ucugaauaucguuauaccu

SEQ ID NO: 1819508 - RNA, 19 nt, Artificial Sequence
  Description of Artificial Sequence: Synthetic oligonucleotide
  Antisense strand to SEQ ID NO: 1819507
agguauaacgauauucaga

SEQ ID NO: 1819509 - RNA, 19 nt, Artificial Sequence
  Description of Artificial Sequence: Synthetic oligonucleotide
  Sense strand starting at position 3294 of SEQ ID NO: 1563559
ucguuauaccuccaccagu

SEQ ID NO: 1819510 - RNA, 19 nt, Artificial Sequence
  Description of Artificial Sequence: Synthetic oligonucleotide
  Antisense strand to SEQ ID NO: 1819509
acugguggagguauaacga

SEQ ID NO: 1819511 - RNA, 19 nt, Artificial Sequence
  Description of Artificial Sequence: Synthetic oligonucleotide
  Sense strand starting at position 3590 of SEQ ID NO: 1563559
uuguaaaugagguacgauc

SEQ ID NO: 1819512 - RNA, 19 nt, Artificial Sequence
  Description of Artificial Sequence: Synthetic oligonucleotide
  Antisense strand to SEQ ID NO: 1819511
gaucguaccucauuuacaa

SEQ ID NO: 1819513 - RNA, 19 nt, Artificial Sequence
  Description of Artificial Sequence: Synthetic oligonucleotide
  Sense strand starting at position 3592 of SEQ ID NO: 1563559
guaaaugagguacgaucaa

SEQ ID NO: 1819514 - RNA, 19 nt, Artificial Sequence
  Description of Artificial Sequence: Synthetic oligonucleotide
  Antisense strand to SEQ ID NO: 1819513
uugaucguaccucauuuac

SEQ ID NO: 1819515 - RNA, 19 nt, Artificial Sequence
  Description of Artificial Sequence: Synthetic oligonucleotide
  Sense strand starting at position 3688 of SEQ ID NO: 1563559
gaacuagauuauguguaaa

SEQ ID NO: 1819516 - RNA, 19 nt, Artificial Sequence
  Description of Artificial Sequence: Synthetic oligonucleotide
  Antisense strand to SEQ ID NO: 1819515
uuuacacauaaucuaguuc

SEQ ID NO: 1819517 - RNA, 19 nt, Artificial Sequence
  Description of Artificial Sequence: Synthetic oligonucleotide
  Sense strand starting at position 3690 of SEQ ID NO: 1563559
acuagauuauguguaaauc

SEQ ID NO: 1819518 - RNA, 19 nt, Artificial Sequence
  Description of Artificial Sequence: Synthetic oligonucleotide
  Antisense strand to SEQ ID NO: 1819517
gauuuacacauaaucuagu

SEQ ID NO: 1819519 - RNA, 19 nt, Artificial Sequence
  Description of Artificial Sequence: Synthetic oligonucleotide
  Sense strand starting at position 3691 of SEQ ID NO: 1563559
cuagauuauguguaaauca

SEQ ID NO: 1819520 - RNA, 19 nt, Artificial Sequence
  Description of Artificial Sequence: Synthetic oligonucleotide
  Antisense strand to SEQ ID NO: 1819519
ugauuuacacauaaucuag

SEQ ID NO: 1819521 - RNA, 19 nt, Artificial Sequence
  Description of Artificial Sequence: Synthetic oligonucleotide
  Sense strand starting at position 3732 of SEQ ID NO: 1563559
uuguauagugucuggaaca

SEQ ID NO: 1819522 - RNA, 19 nt, Artificial Sequence
  Description of Artificial Sequence: Synthetic oligonucleotide
  Antisense strand to SEQ ID NO: 1819521
uguuccagacacuauacaa

SEQ ID NO: 1819523 - RNA, 19 nt, Artificial Sequence
  Description of Artificial Sequence: Synthetic oligonucleotide
  Sense strand starting at position 3934 of SEQ ID NO: 1563559
uaaugugauguugguaaga

SEQ ID NO: 1819524 - RNA, 19 nt, Artificial Sequence
  Description of Artificial Sequence: Synthetic oligonucleotide
  Antisense strand to SEQ ID NO: 1819523
ucuuaccaacaucacauua

SEQ ID NO: 1819525 - RNA, 19 nt, Artificial Sequence
  Description of Artificial Sequence: Synthetic oligonucleotide
  Sense strand starting at position 2104 of SEQ ID NO: 1563560
cccggauucuaacaggugu

SEQ ID NO: 1819526 - RNA, 19 nt, Artificial Sequence
  Description of Artificial Sequence: Synthetic oligonucleotide
  Antisense strand to SEQ ID NO: 1819525
acaccuguuagaauccggg

SEQ ID NO: 1819527 - RNA, 19 nt, Artificial Sequence
  Description of Artificial Sequence: Synthetic oligonucleotide
  Sense strand starting at position 2285 of SEQ ID NO: 1563560
ugagaauccuugcuguguu

SEQ ID NO: 1819528 - RNA, 19 nt, Artificial Sequence
  Description of Artificial Sequence: Synthetic oligonucleotide
  Antisense strand to SEQ ID NO: 1819527
aacacagcaaggauucuca

SEQ ID NO: 1819529 - RNA, 19 nt, Artificial Sequence
  Description of Artificial Sequence: Synthetic oligonucleotide
  Sense strand starting at position 2288 of SEQ ID NO: 1563560
gaauccuugcuguguucua

SEQ ID NO: 1819530 - RNA, 19 nt, Artificial Sequence
  Description of Artificial Sequence: Synthetic oligonucleotide
  Antisense strand to SEQ ID NO: 1819529
uagaacacagcaaggauuc

SEQ ID NO: 1819531 - RNA, 19 nt, Artificial Sequence
  Description of Artificial Sequence: Synthetic oligonucleotide
  Sense strand starting at position 2293 of SEQ ID NO: 1563560
cuugcuguguucuagaugu

SEQ ID NO: 1819532 - RNA, 19 nt, Artificial Sequence
  Description of Artificial Sequence: Synthetic oligonucleotide
  Antisense strand to SEQ ID NO: 1819531
acaucuagaacacagcaag

SEQ ID NO: 1819533 - RNA, 19 nt, Artificial Sequence
  Description of Artificial Sequence: Synthetic oligonucleotide
  Sense strand starting at position 2295 of SEQ ID NO: 1563560
ugcuguguucuagauguaa

SEQ ID NO: 1819534 - RNA, 19 nt, Artificial Sequence
  Description of Artificial Sequence: Synthetic oligonucleotide
  Antisense strand to SEQ ID NO: 1819533
uuacaucuagaacacagca

SEQ ID NO: 1819535 - RNA, 19 nt, Artificial Sequence
  Description of Artificial Sequence: Synthetic oligonucleotide
  Sense strand starting at position 2297 of SEQ ID NO: 1563560
cuguguucuagauguaaau

SEQ ID NO: 1819536 - RNA, 19 nt, Artificial Sequence
  Description of Artificial Sequence: Synthetic oligonucleotide
  Antisense strand to SEQ ID NO: 1819535
auuuacaucuagaacacag

SEQ ID NO: 1819537 - RNA, 19 nt, Artificial Sequence
  Description of Artificial Sequence: Synthetic oligonucleotide
  Sense strand starting at position 2299 of SEQ ID NO: 1563560
guguucuagauguaaauag

SEQ ID NO: 1819538 - RNA, 19 nt, Artificial Sequence
  Description of Artificial Sequence: Synthetic oligonucleotide
  Antisense strand to SEQ ID NO: 1819537
cuauuuacaucuagaacac

SEQ ID NO: 1819539 - RNA, 19 nt, Artificial Sequence
  Description of Artificial Sequence: Synthetic oligonucleotide
  Sense strand starting at position 2306 of SEQ ID NO: 1563560
agauguaaauagguuauca

SEQ ID NO: 1819540 - RNA, 19 nt, Artificial Sequence
  Description of Artificial Sequence: Synthetic oligonucleotide
  Antisense strand to SEQ ID NO: 1819539
ugauaaccuauuuacaucu

SEQ ID NO: 1819541 - RNA, 19 nt, Artificial Sequence
  Description of Artificial Sequence: Synthetic oligonucleotide
  Sense strand starting at position 2310 of SEQ ID NO: 1563560
guaaauagguuaucagaug

SEQ ID NO: 1819542 - RNA, 19 nt, Artificial Sequence
  Description of Artificial Sequence: Synthetic oligonucleotide
  Antisense strand to SEQ ID NO: 1819541
caucugauaaccuauuuac

SEQ ID NO: 1819543 - RNA, 19 nt, Artificial Sequence
  Description of Artificial Sequence: Synthetic oligonucleotide
  Sense strand starting at position 2317 of SEQ ID NO: 1563560
gguuaucagaugcaugauu

SEQ ID NO: 1819544 - RNA, 19 nt, Artificial Sequence
  Description of Artificial Sequence: Synthetic oligonucleotide
  Antisense strand to SEQ ID NO: 1819543
aaucaugcaucugauaacc

SEQ ID NO: 1819545 - RNA, 19 nt, Artificial Sequence
  Description of Artificial Sequence: Synthetic oligonucleotide
  Sense strand starting at position 2326 of SEQ ID NO: 1563560
augcaugauuugcaaauuu

SEQ ID NO: 1819546 - RNA, 19 nt, Artificial Sequence
  Description of Artificial Sequence: Synthetic oligonucleotide
  Antisense strand to SEQ ID NO: 1819545
aaauuugcaaaucaugcau

SEQ ID NO: 1819547 - RNA, 19 nt, Artificial Sequence
  Description of Artificial Sequence: Synthetic oligonucleotide
  Sense strand starting at position 2376 of SEQ ID NO: 1563560
gucugugucaaagagaagu

SEQ ID NO: 1819548 - RNA, 19 nt, Artificial Sequence
  Description of Artificial Sequence: Synthetic oligonucleotide
  Antisense strand to SEQ ID NO: 1819547
acuucucuuugacacagac

SEQ ID NO: 1819549 - RNA, 19 nt, Artificial Sequence
  Description of Artificial Sequence: Synthetic oligonucleotide
  Sense strand starting at position 2378 of SEQ ID NO: 1563560
cugugucaaagagaaguuu

SEQ ID NO: 1819550 - RNA, 19 nt, Artificial Sequence
  Description of Artificial Sequence: Synthetic oligonucleotide
  Antisense strand to SEQ ID NO: 1819549
aaacuucucuuugacacag

SEQ ID NO: 1819551 - RNA, 19 nt, Artificial Sequence
  Description of Artificial Sequence: Synthetic oligonucleotide
  Sense strand starting at position 2568 of SEQ ID NO: 1563560
guaccuauugcuuacgcau

SEQ ID NO: 1819552 - RNA, 19 nt, Artificial Sequence
  Description of Artificial Sequence: Synthetic oligonucleotide
  Antisense strand to SEQ ID NO: 1819551
augcguaagcaauagguac

SEQ ID NO: 1819553 - RNA, 19 nt, Artificial Sequence
  Description of Artificial Sequence: Synthetic oligonucleotide
  Sense strand starting at position 2570 of SEQ ID NO: 1563560
accuauugcuuacgcauau

SEQ ID NO: 1819554 - RNA, 19 nt, Artificial Sequence
  Description of Artificial Sequence: Synthetic oligonucleotide
  Antisense strand to SEQ ID NO: 1819553
auaugcguaagcaauaggu

SEQ ID NO: 1819555 - RNA, 19 nt, Artificial Sequence
  Description of Artificial Sequence: Synthetic oligonucleotide
  Sense strand starting at position 2574 of SEQ ID NO: 1563560
auugcuuacgcauaucuga

SEQ ID NO: 1819556 - RNA, 19 nt, Artificial Sequence
  Description of Artificial Sequence: Synthetic oligonucleotide
  Antisense strand to SEQ ID NO: 1819555
ucagauaugcguaagcaau

SEQ ID NO: 1819557 - RNA, 19 nt, Artificial Sequence
  Description of Artificial Sequence: Synthetic oligonucleotide
  Sense strand starting at position 2577 of SEQ ID NO: 1563560
gcuuacgcauaucugauaa

SEQ ID NO: 1819558 - RNA, 19 nt, Artificial Sequence
  Description of Artificial Sequence: Synthetic oligonucleotide
  Antisense strand to SEQ ID NO: 1819557
uuaucagauaugcguaagc

SEQ ID NO: 1819559 - RNA, 19 nt, Artificial Sequence
  Description of Artificial Sequence: Synthetic oligonucleotide
  Sense strand starting at position 2579 of SEQ ID NO: 1563560
uuacgcauaucugauaauu

SEQ ID NO: 1819560 - RNA, 19 nt, Artificial Sequence
  Description of Artificial Sequence: Synthetic oligonucleotide
  Antisense strand to SEQ ID NO: 1819559
aauuaucagauaugcguaa

SEQ ID NO: 1819561 - RNA, 19 nt, Artificial Sequence
  Description of Artificial Sequence: Synthetic oligonucleotide
  Sense strand starting at position 2581 of SEQ ID NO: 1563560
acgcauaucugauaauuuc

SEQ ID NO: 1819562 - RNA, 19 nt, Artificial Sequence
  Description of Artificial Sequence: Synthetic oligonucleotide
  Antisense strand to SEQ ID NO: 1819561
gaaauuaucagauaugcgu

SEQ ID NO: 1819563 - RNA, 19 nt, Artificial Sequence
  Description of Artificial Sequence: Synthetic oligonucleotide
  Sense strand starting at position 2634 of SEQ ID NO: 1563560
ugaauuacauucggaaauu

SEQ ID NO: 1819564 - RNA, 19 nt, Artificial Sequence
  Description of Artificial Sequence: Synthetic oligonucleotide
  Antisense strand to SEQ ID NO: 1819563
aauuuccgaauguaauuca

SEQ ID NO: 1819565 - RNA, 19 nt, Artificial Sequence
  Description of Artificial Sequence: Synthetic oligonucleotide
  Sense strand starting at position 2635 of SEQ ID NO: 1563560
gaauuacauucggaaauug

SEQ ID NO: 1819566 - RNA, 19 nt, Artificial Sequence
  Description of Artificial Sequence: Synthetic oligonucleotide
  Antisense strand to SEQ ID NO: 1819565
caauuuccgaauguaauuc

SEQ ID NO: 1819567 - RNA, 19 nt, Artificial Sequence
  Description of Artificial Sequence: Synthetic oligonucleotide
  Sense strand starting at position 2643 of SEQ ID NO: 1563560
uucggaaauugguagagua

SEQ ID NO: 1819568 - RNA, 19 nt, Artificial Sequence
  Description of Artificial Sequence: Synthetic oligonucleotide
  Antisense strand to SEQ ID NO: 1819567
uacucuaccaauuuccgaa

SEQ ID NO: 1819569 - RNA, 19 nt, Artificial Sequence
  Description of Artificial Sequence: Synthetic oligonucleotide
  Sense strand starting at position 2645 of SEQ ID NO: 1563560
cggaaauugguagaguauc

SEQ ID NO: 1819570 - RNA, 19 nt, Artificial Sequence
  Description of Artificial Sequence: Synthetic oligonucleotide
  Antisense strand to SEQ ID NO: 1819569
gauacucuaccaauuuccg

SEQ ID NO: 1819571 - RNA, 19 nt, Artificial Sequence
  Description of Artificial Sequence: Synthetic oligonucleotide
  Sense strand starting at position 2653 of SEQ ID NO: 1563560
gguagaguaucaguugucu

SEQ ID NO: 1819572 - RNA, 19 nt, Artificial Sequence
  Description of Artificial Sequence: Synthetic oligonucleotide
  Antisense strand to SEQ ID NO: 1819571
agacaacugauacucuacc

SEQ ID NO: 1819573 - RNA, 19 nt, Artificial Sequence
  Description of Artificial Sequence: Synthetic oligonucleotide
  Sense strand starting at position 2657 of SEQ ID NO: 1563560
gaguaucaguugucuauuu

SEQ ID NO: 1819574 - RNA, 19 nt, Artificial Sequence
  Description of Artificial Sequence: Synthetic oligonucleotide
  Antisense strand to SEQ ID NO: 1819573
aaauagacaacugauacuc

SEQ ID NO: 1819575 - RNA, 19 nt, Artificial Sequence
  Description of Artificial Sequence: Synthetic oligonucleotide
  Sense strand starting at position 2678 of SEQ ID NO: 1563560
aggucaauuucugggcacu

SEQ ID NO: 1819576 - RNA, 19 nt, Artificial Sequence
  Description of Artificial Sequence: Synthetic oligonucleotide
  Antisense strand to SEQ ID NO: 1819575
agugcccagaaauugaccu

SEQ ID NO: 1819577 - RNA, 19 nt, Artificial Sequence
  Description of Artificial Sequence: Synthetic oligonucleotide
  Sense strand starting at position 2744 of SEQ ID NO: 1563560
ugguuacucuagcuuuaua

SEQ ID NO: 1819578 - RNA, 19 nt, Artificial Sequence
  Description of Artificial Sequence: Synthetic oligonucleotide
  Antisense strand to SEQ ID NO: 1819577
uauaaagcuagaguaacca

SEQ ID NO: 1819579 - RNA, 19 nt, Artificial Sequence
  Description of Artificial Sequence: Synthetic oligonucleotide
  Sense strand starting at position 2770 of SEQ ID NO: 1563560
uagaaauuaggcuguacua

SEQ ID NO: 1819580 - RNA, 19 nt, Artificial Sequence
  Description of Artificial Sequence: Synthetic oligonucleotide
  Antisense strand to SEQ ID NO: 1819579
uaguacagccuaauuucua

SEQ ID NO: 1819581 - RNA, 19 nt, Artificial Sequence
  Description of Artificial Sequence: Synthetic oligonucleotide
  Sense strand starting at position 2772 of SEQ ID NO: 1563560
gaaauuaggcuguacuaau

SEQ ID NO: 1819582 - RNA, 19 nt, Artificial Sequence
  Description of Artificial Sequence: Synthetic oligonucleotide
  Antisense strand to SEQ ID NO: 1819581
auuaguacagccuaauuuc

SEQ ID NO: 1819583 - RNA, 19 nt, Artificial Sequence
  Description of Artificial Sequence: Synthetic oligonucleotide
  Sense strand starting at position 2859 of SEQ ID NO: 1563560
ucugcuugucuaugucuua

SEQ ID NO: 1819584 - RNA, 19 nt, Artificial Sequence
  Description of Artificial Sequence: Synthetic oligonucleotide
  Antisense strand to SEQ ID NO: 1819583
uaagacauagacaagcaga

SEQ ID NO: 1819585 - RNA, 19 nt, Artificial Sequence
  Description of Artificial Sequence: Synthetic oligonucleotide
  Sense strand starting at position 2862 of SEQ ID NO: 1563560
gcuugucuaugucuuagaa

SEQ ID NO: 1819586 - RNA, 19 nt, Artificial Sequence
  Description of Artificial Sequence: Synthetic oligonucleotide
  Antisense strand to SEQ ID NO: 1819585
uucuaagacauagacaagc

SEQ ID NO: 1819587 - RNA, 19 nt, Artificial Sequence
  Description of Artificial Sequence: Synthetic oligonucleotide
  Sense strand starting at position 2899 of SEQ ID NO: 1563560
ugauuaggauucuguugaa

SEQ ID NO: 1819588 - RNA, 19 nt, Artificial Sequence
  Description of Artificial Sequence: Synthetic oligonucleotide
  Antisense strand to SEQ ID NO: 1819587
uucaacagaauccuaauca

SEQ ID NO: 1819589 - RNA, 19 nt, Artificial Sequence
  Description of Artificial Sequence: Synthetic oligonucleotide
  Sense strand starting at position 2902 of SEQ ID NO: 1563560
uuaggauucuguugaaucu

SEQ ID NO: 1819590 - RNA, 19 nt, Artificial Sequence
  Description of Artificial Sequence: Synthetic oligonucleotide
  Antisense strand to SEQ ID NO: 1819589
agauucaacagaauccuaa

SEQ ID NO: 1819591 - RNA, 19 nt, Artificial Sequence
  Description of Artificial Sequence: Synthetic oligonucleotide
  Sense strand starting at position 2932 of SEQ ID NO: 1563560
ugaggauaauuggcauauu

SEQ ID NO: 1819592 - RNA, 19 nt, Artificial Sequence
  Description of Artificial Sequence: Synthetic oligonucleotide
  Antisense strand to SEQ ID NO: 1819591
aauaugccaauuauccuca

SEQ ID NO: 1819593 - RNA, 19 nt, Artificial Sequence
  Description of Artificial Sequence: Synthetic oligonucleotide
  Sense strand starting at position 2933 of SEQ ID NO: 1563560
gaggauaauuggcauauua

SEQ ID NO: 1819594 - RNA, 19 nt, Artificial Sequence
  Description of Artificial Sequence: Synthetic oligonucleotide
  Antisense strand to SEQ ID NO: 1819593
uaauaugccaauuauccuc

SEQ ID NO: 1819595 - RNA, 19 nt, Artificial Sequence
  Description of Artificial Sequence: Synthetic oligonucleotide
  Sense strand starting at position 2957 of SEQ ID NO: 1563560
augaaauguucugaccacu

SEQ ID NO: 1819596 - RNA, 19 nt, Artificial Sequence
  Description of Artificial Sequence: Synthetic oligonucleotide
  Antisense strand to SEQ ID NO: 1819595
aguggucagaacauuucau

SEQ ID NO: 1819597 - RNA, 19 nt, Artificial Sequence
  Description of Artificial Sequence: Synthetic oligonucleotide
  Sense strand starting at position 2963 of SEQ ID NO: 1563560
uguucugaccacugaggaa

SEQ ID NO: 1819598 - RNA, 19 nt, Artificial Sequence
  Description of Artificial Sequence: Synthetic oligonucleotide
  Antisense strand to SEQ ID NO: 1819597
uuccucaguggucagaaca

SEQ ID NO: 1819599 - RNA, 19 nt, Artificial Sequence
  Description of Artificial Sequence: Synthetic oligonucleotide
  Sense strand starting at position 2991 of SEQ ID NO: 1563560
uccauuuguuuaugugauu

SEQ ID NO: 1819600 - RNA, 19 nt, Artificial Sequence
  Description of Artificial Sequence: Synthetic oligonucleotide
  Antisense strand to SEQ ID NO: 1819599
aaucacauaaacaaaugga

SEQ ID NO: 1819601 - RNA, 19 nt, Artificial Sequence
  Description of Artificial Sequence: Synthetic oligonucleotide
  Sense strand starting at position 2088 of SEQ ID NO: 1563561
cccagauucuaacaggugu

SEQ ID NO: 1819602 - RNA, 19 nt, Artificial Sequence
  Description of Artificial Sequence: Synthetic oligonucleotide
  Antisense strand to SEQ ID NO: 1819601
acaccuguuagaaucuggg

SEQ ID NO: 1819603 - RNA, 19 nt, Artificial Sequence
  Description of Artificial Sequence: Synthetic oligonucleotide
  Sense strand starting at position 2191 of SEQ ID NO: 1563561
cuuaucucuccuugguuga

SEQ ID NO: 1819604 - RNA, 19 nt, Artificial Sequence
  Description of Artificial Sequence: Synthetic oligonucleotide
  Antisense strand to SEQ ID NO: 1819603
ucaaccaaggagagauaag

SEQ ID NO: 1819605 - RNA, 19 nt, Artificial Sequence
  Description of Artificial Sequence: Synthetic oligonucleotide
  Sense strand starting at position 2192 of SEQ ID NO: 1563561
uuaucucuccuugguugaa

SEQ ID NO: 1819606 - RNA, 19 nt, Artificial Sequence
  Description of Artificial Sequence: Synthetic oligonucleotide
  Antisense strand to SEQ ID NO: 1819605
uucaaccaaggagagauaa

SEQ ID NO: 1819607 - RNA, 19 nt, Artificial Sequence
  Description of Artificial Sequence: Synthetic oligonucleotide
  Sense strand starting at position 2279 of SEQ ID NO: 1563561
uguucuguucuacaucuaa

SEQ ID NO: 1819608 - RNA, 19 nt, Artificial Sequence
  Description of Artificial Sequence: Synthetic oligonucleotide
  Antisense strand to SEQ ID NO: 1819607
uuagauguagaacagaaca

SEQ ID NO: 1819609 - RNA, 19 nt, Artificial Sequence
  Description of Artificial Sequence: Synthetic oligonucleotide
  Sense strand starting at position 2290 of SEQ ID NO: 1563561
acaucuaaguccguuauca

SEQ ID NO: 1819610 - RNA, 19 nt, Artificial Sequence
  Description of Artificial Sequence: Synthetic oligonucleotide
  Antisense strand to SEQ ID NO: 1819609
ugauaacggacuuagaugu

SEQ ID NO: 1819611 - RNA, 19 nt, Artificial Sequence
  Description of Artificial Sequence: Synthetic oligonucleotide
  Sense strand starting at position 2292 of SEQ ID NO: 1563561
aucuaaguccguuaucauc

SEQ ID NO: 1819612 - RNA, 19 nt, Artificial Sequence
  Description of Artificial Sequence: Synthetic oligonucleotide
  Antisense strand to SEQ ID NO: 1819611
gaugauaacggacuuagau

SEQ ID NO: 1819613 - RNA, 19 nt, Artificial Sequence
  Description of Artificial Sequence: Synthetic oligonucleotide
  Sense strand starting at position 2294 of SEQ ID NO: 1563561
cuaaguccguuaucaucua

SEQ ID NO: 1819614 - RNA, 19 nt, Artificial Sequence
  Description of Artificial Sequence: Synthetic oligonucleotide
  Antisense strand to SEQ ID NO: 1819613
uagaugauaacggacuuag

SEQ ID NO: 1819615 - RNA, 19 nt, Artificial Sequence
  Description of Artificial Sequence: Synthetic oligonucleotide
  Sense strand starting at position 2301 of SEQ ID NO: 1563561
cguuaucaucuauaugauu

SEQ ID NO: 1819616 - RNA, 19 nt, Artificial Sequence
  Description of Artificial Sequence: Synthetic oligonucleotide
  Antisense strand to SEQ ID NO: 1819615
aaucauauagaugauaacg

SEQ ID NO: 1819617 - RNA, 19 nt, Artificial Sequence
  Description of Artificial Sequence: Synthetic oligonucleotide
  Sense strand starting at position 2358 of SEQ ID NO: 1563561
uugucuuaacagugucuau

SEQ ID NO: 1819618 - RNA, 19 nt, Artificial Sequence
  Description of Artificial Sequence: Synthetic oligonucleotide
  Antisense strand to SEQ ID NO: 1819617
auagacacuguuaagacaa

SEQ ID NO: 1819619 - RNA, 19 nt, Artificial Sequence
  Description of Artificial Sequence: Synthetic oligonucleotide
  Sense strand starting at position 2369 of SEQ ID NO: 1563561
gugucuaucaaagagaagu

SEQ ID NO: 1819620 - RNA, 19 nt, Artificial Sequence
  Description of Artificial Sequence: Synthetic oligonucleotide
  Antisense strand to SEQ ID NO: 1819619
acuucucuuugauagacac

SEQ ID NO: 1819621 - RNA, 19 nt, Artificial Sequence
  Description of Artificial Sequence: Synthetic oligonucleotide
  Sense strand starting at position 2565 of SEQ ID NO: 1563561
gugucuauugccuguguau

SEQ ID NO: 1819622 - RNA, 19 nt, Artificial Sequence
  Description of Artificial Sequence: Synthetic oligonucleotide
  Antisense strand to SEQ ID NO: 1819621
auacacaggcaauagacac

SEQ ID NO: 1819623 - RNA, 19 nt, Artificial Sequence
  Description of Artificial Sequence: Synthetic oligonucleotide
  Sense strand starting at position 2567 of SEQ ID NO: 1563561
gucuauugccuguguauau

SEQ ID NO: 1819624 - RNA, 19 nt, Artificial Sequence
  Description of Artificial Sequence: Synthetic oligonucleotide
  Antisense strand to SEQ ID NO: 1819623
auauacacaggcaauagac

SEQ ID NO: 1819625 - RNA, 19 nt, Artificial Sequence
  Description of Artificial Sequence: Synthetic oligonucleotide
  Sense strand starting at position 2574 of SEQ ID NO: 1563561
gccuguguauaucugguaa

SEQ ID NO: 1819626 - RNA, 19 nt, Artificial Sequence
  Description of Artificial Sequence: Synthetic oligonucleotide
  Antisense strand to SEQ ID NO: 1819625
uuaccagauauacacaggc

SEQ ID NO: 1819627 - RNA, 19 nt, Artificial Sequence
  Description of Artificial Sequence: Synthetic oligonucleotide
  Sense strand starting at position 2578 of SEQ ID NO: 1563561
guguauaucugguaauuuc

SEQ ID NO: 1819628 - RNA, 19 nt, Artificial Sequence
  Description of Artificial Sequence: Synthetic oligonucleotide
  Antisense strand to SEQ ID NO: 1819627
gaaauuaccagauauacac

SEQ ID NO: 1819629 - RNA, 19 nt, Artificial Sequence
  Description of Artificial Sequence: Synthetic oligonucleotide
  Sense strand starting at position 2619 of SEQ ID NO: 1563561
cugaauuaccuuuggaaau

SEQ ID NO: 1819630 - RNA, 19 nt, Artificial Sequence
  Description of Artificial Sequence: Synthetic oligonucleotide
  Antisense strand to SEQ ID NO: 1819629
auuuccaaagguaauucag

SEQ ID NO: 1819631 - RNA, 19 nt, Artificial Sequence
  Description of Artificial Sequence: Synthetic oligonucleotide
  Sense strand starting at position 2620 of SEQ ID NO: 1563561
ugaauuaccuuuggaaauu

SEQ ID NO: 1819632 - RNA, 19 nt, Artificial Sequence
  Description of Artificial Sequence: Synthetic oligonucleotide
  Antisense strand to SEQ ID NO: 1819631
aauuuccaaagguaauuca

SEQ ID NO: 1819633 - RNA, 19 nt, Artificial Sequence
  Description of Artificial Sequence: Synthetic oligonucleotide
  Sense strand starting at position 2639 of SEQ ID NO: 1563561
uguagaauaucagcugugu

SEQ ID NO: 1819634 - RNA, 19 nt, Artificial Sequence
  Description of Artificial Sequence: Synthetic oligonucleotide
  Antisense strand to SEQ ID NO: 1819633
acacagcugauauucuaca

SEQ ID NO: 1819635 - RNA, 19 nt, Artificial Sequence
  Description of Artificial Sequence: Synthetic oligonucleotide
  Sense strand starting at position 2643 of SEQ ID NO: 1563561
gaauaucagcuguguauau

SEQ ID NO: 1819636 - RNA, 19 nt, Artificial Sequence
  Description of Artificial Sequence: Synthetic oligonucleotide
  Antisense strand to SEQ ID NO: 1819635
auauacacagcugauauuc

SEQ ID NO: 1819637 - RNA, 19 nt, Artificial Sequence
  Description of Artificial Sequence: Synthetic oligonucleotide
  Sense strand starting at position 2670 of SEQ ID NO: 1563561
gggucaauuucuuggcacu

SEQ ID NO: 1819638 - RNA, 19 nt, Artificial Sequence
  Description of Artificial Sequence: Synthetic oligonucleotide
  Antisense strand to SEQ ID NO: 1819637
agugccaagaaauugaccc

SEQ ID NO: 1819639 - RNA, 19 nt, Artificial Sequence
  Description of Artificial Sequence: Synthetic oligonucleotide
  Sense strand starting at position 2726 of SEQ ID NO: 1563561
cccucuguugauuacuuua

SEQ ID NO: 1819640 - RNA, 19 nt, Artificial Sequence
  Description of Artificial Sequence: Synthetic oligonucleotide
  Antisense strand to SEQ ID NO: 1819639
uaaaguaaucaacagaggg

SEQ ID NO: 1819641 - RNA, 19 nt, Artificial Sequence
  Description of Artificial Sequence: Synthetic oligonucleotide
  Sense strand starting at position 2758 of SEQ ID NO: 1563561
ccuagaaauuaggcuguau

SEQ ID NO: 1819642 - RNA, 19 nt, Artificial Sequence
  Description of Artificial Sequence: Synthetic oligonucleotide
  Antisense strand to SEQ ID NO: 1819641
auacagccuaauuucuagg

SEQ ID NO: 1819643 - RNA, 19 nt, Artificial Sequence
  Description of Artificial Sequence: Synthetic oligonucleotide
  Sense strand starting at position 2760 of SEQ ID NO: 1563561
uagaaauuaggcuguauua

SEQ ID NO: 1819644 - RNA, 19 nt, Artificial Sequence
  Description of Artificial Sequence: Synthetic oligonucleotide
  Antisense strand to SEQ ID NO: 1819643
uaauacagccuaauuucua

SEQ ID NO: 1819645 - RNA, 19 nt, Artificial Sequence
  Description of Artificial Sequence: Synthetic oligonucleotide
  Sense strand starting at position 2762 of SEQ ID NO: 1563561
gaaauuaggcuguauuagu

SEQ ID NO: 1819646 - RNA, 19 nt, Artificial Sequence
  Description of Artificial Sequence: Synthetic oligonucleotide
  Antisense strand to SEQ ID NO: 1819645
acuaauacagccuaauuuc

SEQ ID NO: 1819647 - RNA, 19 nt, Artificial Sequence
  Description of Artificial Sequence: Synthetic oligonucleotide
  Sense strand starting at position 2771 of SEQ ID NO: 1563561
cuguauuaguucuuuaaca

SEQ ID NO: 1819648 - RNA, 19 nt, Artificial Sequence
  Description of Artificial Sequence: Synthetic oligonucleotide
  Antisense strand to SEQ ID NO: 1819647
uguuaaagaacuaauacag

SEQ ID NO: 1819649 - RNA, 19 nt, Artificial Sequence
  Description of Artificial Sequence: Synthetic oligonucleotide
  Sense strand starting at position 2849 of SEQ ID NO: 1563561
ucaguuuaucaaugucuaa

SEQ ID NO: 1819650 - RNA, 19 nt, Artificial Sequence
  Description of Artificial Sequence: Synthetic oligonucleotide
  Antisense strand to SEQ ID NO: 1819649
uuagacauugauaaacuga

SEQ ID NO: 1819651 - RNA, 19 nt, Artificial Sequence
  Description of Artificial Sequence: Synthetic oligonucleotide
  Sense strand starting at position 2911 of SEQ ID NO: 1563561
uagauaaauuuguggguaa

SEQ ID NO: 1819652 - RNA, 19 nt, Artificial Sequence
  Description of Artificial Sequence: Synthetic oligonucleotide
  Antisense strand to SEQ ID NO: 1819651
uuacccacaaauuuaucua

SEQ ID NO: 1819653 - RNA, 19 nt, Artificial Sequence
  Description of Artificial Sequence: Synthetic oligonucleotide
  Sense strand starting at position 2912 of SEQ ID NO: 1563561
agauaaauuuguggguaau

SEQ ID NO: 1819654 - RNA, 19 nt, Artificial Sequence
  Description of Artificial Sequence: Synthetic oligonucleotide
  Antisense strand to SEQ ID NO: 1819653
auuacccacaaauuuaucu

SEQ ID NO: 1819655 - RNA, 19 nt, Artificial Sequence
  Description of Artificial Sequence: Synthetic oligonucleotide
  Sense strand starting at position 2922 of SEQ ID NO: 1563561
guggguaauugacauauua

SEQ ID NO: 1819656 - RNA, 19 nt, Artificial Sequence
  Description of Artificial Sequence: Synthetic oligonucleotide
  Antisense strand to SEQ ID NO: 1819655
uaauaugucaauuacccac

SEQ ID NO: 1819657 - RNA, 19 nt, Artificial Sequence
  Description of Artificial Sequence: Synthetic oligonucleotide
  Sense strand starting at position 2948 of SEQ ID NO: 1563561
gaagucuucugaccacuga

SEQ ID NO: 1819658 - RNA, 19 nt, Artificial Sequence
  Description of Artificial Sequence: Synthetic oligonucleotide
  Antisense strand to SEQ ID NO: 1819657
ucaguggucagaagacuuc

SEQ ID NO: 1819659 - RNA, 19 nt, Artificial Sequence
  Description of Artificial Sequence: Synthetic oligonucleotide
  Sense strand starting at position 2981 of SEQ ID NO: 1563561
cccauuuguuuacgugauu

SEQ ID NO: 1819660 - RNA, 19 nt, Artificial Sequence
  Description of Artificial Sequence: Synthetic oligonucleotide
  Antisense strand to SEQ ID NO: 1819659
aaucacguaaacaaauggg

SEQ ID NO: 1819661 - RNA, 19 nt, Artificial Sequence
  Description of Artificial Sequence: Synthetic oligonucleotide
  Sense strand starting at position 3503 of SEQ ID NO: 1563561
uguacauucuuguccauuu

SEQ ID NO: 1819662 - RNA, 19 nt, Artificial Sequence
  Description of Artificial Sequence: Synthetic oligonucleotide
  Antisense strand to SEQ ID NO: 1819661
aaauggacaagaauguaca

SEQ ID NO: 1819663 - RNA, 19 nt, Artificial Sequence
  Description of Artificial Sequence: Synthetic oligonucleotide
  Sense strand starting at position 3550 of SEQ ID NO: 1563561
uuaagugcagcugaacaau

SEQ ID NO: 1819664 - RNA, 19 nt, Artificial Sequence
  Description of Artificial Sequence: Synthetic oligonucleotide
  Antisense strand to SEQ ID NO: 1819663
auuguucagcugcacuuaa

SEQ ID NO: 1819665 - RNA, 19 nt, Artificial Sequence
  Description of Artificial Sequence: Synthetic oligonucleotide
  Sense strand starting at position 3599 of SEQ ID NO: 1563561
aguuccuccuuguaaauaa

SEQ ID NO: 1819666 - RNA, 19 nt, Artificial Sequence
  Description of Artificial Sequence: Synthetic oligonucleotide
  Antisense strand to SEQ ID NO: 1819665
uuauuuacaaggaggaacu

SEQ ID NO: 1819667 - RNA, 19 nt, Artificial Sequence
  Description of Artificial Sequence: Synthetic oligonucleotide
  Sense strand starting at position 3610 of SEQ ID NO: 1563561
guaaauaaggcaugaucaa

SEQ ID NO: 1819668 - RNA, 19 nt, Artificial Sequence
  Description of Artificial Sequence: Synthetic oligonucleotide
  Antisense strand to SEQ ID NO: 1819667
uugaucaugccuuauuuac

SEQ ID NO: 1819669 - RNA, 19 nt, Artificial Sequence
  Description of Artificial Sequence: Synthetic oligonucleotide
  Sense strand starting at position 3642 of SEQ ID NO: 1563561
uguggcuccuccucuguaa

SEQ ID NO: 1819670 - RNA, 19 nt, Artificial Sequence
  Description of Artificial Sequence: Synthetic oligonucleotide
  Antisense strand to SEQ ID NO: 1819669
uuacagaggaggagccaca

SEQ ID NO: 1819671 - RNA, 19 nt, Artificial Sequence
  Description of Artificial Sequence: Synthetic oligonucleotide
  Sense strand starting at position 3701 of SEQ ID NO: 1563561
gcuaauaaaugguuuaugu

SEQ ID NO: 1819672 - RNA, 19 nt, Artificial Sequence
  Description of Artificial Sequence: Synthetic oligonucleotide
  Antisense strand to SEQ ID NO: 1819671
acauaaaccauuuauuagc

SEQ ID NO: 1819673 - RNA, 19 nt, Artificial Sequence
  Description of Artificial Sequence: Synthetic oligonucleotide
  Sense strand starting at position 3771 of SEQ ID NO: 1563561
auaagcauccaguaaagua

SEQ ID NO: 1819674 - RNA, 19 nt, Artificial Sequence
  Description of Artificial Sequence: Synthetic oligonucleotide
  Antisense strand to SEQ ID NO: 1819673
uacuuuacuggaugcuuau

SEQ ID NO: 1819675 - RNA, 19 nt, Artificial Sequence
  Description of Artificial Sequence: Synthetic oligonucleotide
  Sense strand starting at position 3916 of SEQ ID NO: 1563561
auaagaaucuguuaaacug

SEQ ID NO: 1819676 - RNA, 19 nt, Artificial Sequence
  Description of Artificial Sequence: Synthetic oligonucleotide
  Antisense strand to SEQ ID NO: 1819675
caguuuaacagauucuuau

SEQ ID NO: 1819677 - RNA, 19 nt, Artificial Sequence
  Description of Artificial Sequence: Synthetic oligonucleotide
  Sense strand starting at position 3924 of SEQ ID NO: 1563561
cuguuaaacugucaacaca

SEQ ID NO: 1819678 - RNA, 19 nt, Artificial Sequence
  Description of Artificial Sequence: Synthetic oligonucleotide
  Antisense strand to SEQ ID NO: 1819677
uguguugacaguuuaacag

SEQ ID NO: 1819679 - RNA, 19 nt, Artificial Sequence
  Description of Artificial Sequence: Synthetic oligonucleotide
  Sense strand starting at position 3962 of SEQ ID NO: 1563561
ugaaguugguaagaccauu

SEQ ID NO: 1819680 - RNA, 19 nt, Artificial Sequence
  Description of Artificial Sequence: Synthetic oligonucleotide
  Antisense strand to SEQ ID NO: 1819679
aauggucuuaccaacuuca

SEQ ID NO: 1819681 - RNA, 19 nt, Artificial Sequence
  Description of Artificial Sequence: Synthetic oligonucleotide
  Sense strand starting at position 307 of SEQ ID NO: 1563562
ucacgagaccuuugaagca

SEQ ID NO: 1819682 - RNA, 19 nt, Artificial Sequence
  Description of Artificial Sequence: Synthetic oligonucleotide
  Antisense strand to SEQ ID NO: 1819681
ugcuucaaaggucucguga

SEQ ID NO: 1819683 - RNA, 19 nt, Artificial Sequence
  Description of Artificial Sequence: Synthetic oligonucleotide
  Sense strand starting at position 565 of SEQ ID NO: 1563562
ugcguuauaguccaaaucu

SEQ ID NO: 1819684 - RNA, 19 nt, Artificial Sequence
  Description of Artificial Sequence: Synthetic oligonucleotide
  Antisense strand to SEQ ID NO: 1819683
agauuuggacuauaacgca

SEQ ID NO: 1819685 - RNA, 19 nt, Artificial Sequence
  Description of Artificial Sequence: Synthetic oligonucleotide
  Sense strand starting at position 782 of SEQ ID NO: 1563562
ugaagcuuccgagacccaa

SEQ ID NO: 1819686 - RNA, 19 nt, Artificial Sequence
  Description of Artificial Sequence: Synthetic oligonucleotide
  Antisense strand to SEQ ID NO: 1819685
uugggucucggaagcuuca

SEQ ID NO: 1819687 - RNA, 19 nt, Artificial Sequence
  Description of Artificial Sequence: Synthetic oligonucleotide
  Sense strand starting at position 886 of SEQ ID NO: 1563562
cccagaaugucaucaacag

SEQ ID NO: 1819688 - RNA, 19 nt, Artificial Sequence
  Description of Artificial Sequence: Synthetic oligonucleotide
  Antisense strand to SEQ ID NO: 1819687
cuguugaugacauucuggg

SEQ ID NO: 1819689 - RNA, 19 nt, Artificial Sequence
  Description of Artificial Sequence: Synthetic oligonucleotide
  Sense strand starting at position 1053 of SEQ ID NO: 1563562
gcaugaggacuugguguuu

SEQ ID NO: 1819690 - RNA, 19 nt, Artificial Sequence
  Description of Artificial Sequence: Synthetic oligonucleotide
  Antisense strand to SEQ ID NO: 1819689
aaacaccaaguccucaugc

SEQ ID NO: 1819691 - RNA, 19 nt, Artificial Sequence
  Description of Artificial Sequence: Synthetic oligonucleotide
  Sense strand starting at position 2489 of SEQ ID NO: 1563562
agccuuaagcuuuaaguca

SEQ ID NO: 1819692 - RNA, 19 nt, Artificial Sequence
  Description of Artificial Sequence: Synthetic oligonucleotide
  Antisense strand to SEQ ID NO: 1819691
ugacuuaaagcuuaaggcu

SEQ ID NO: 1819693 - RNA, 19 nt, Artificial Sequence
  Description of Artificial Sequence: Synthetic oligonucleotide
  Sense strand starting at position 2519 of SEQ ID NO: 1563562
gcgugcucugggugaggaa

SEQ ID NO: 1819694 - RNA, 19 nt, Artificial Sequence
  Description of Artificial Sequence: Synthetic oligonucleotide
  Antisense strand to SEQ ID NO: 1819693
uuccucacccagagcacgc

SEQ ID NO: 1819695 - RNA, 19 nt, Artificial Sequence
  Description of Artificial Sequence: Synthetic oligonucleotide
  Sense strand starting at position 2520 of SEQ ID NO: 1563562
cgugcucugggugaggaau

SEQ ID NO: 1819696 - RNA, 19 nt, Artificial Sequence
  Description of Artificial Sequence: Synthetic oligonucleotide
  Antisense strand to SEQ ID NO: 1819695
auuccucacccagagcacg

SEQ ID NO: 1819697 - RNA, 19 nt, Artificial Sequence
  Description of Artificial Sequence: Synthetic oligonucleotide
  Sense strand starting at position 2531 of SEQ ID NO: 1563562
ugaggaauucccuggugaa

SEQ ID NO: 1819698 - RNA, 19 nt, Artificial Sequence
  Description of Artificial Sequence: Synthetic oligonucleotide
  Antisense strand to SEQ ID NO: 1819697
uucaccagggaauuccuca

SEQ ID NO: 1819699 - RNA, 19 nt, Artificial Sequence
  Description of Artificial Sequence: Synthetic oligonucleotide
  Sense strand starting at position 2532 of SEQ ID NO: 1563562
gaggaauucccuggugaag

SEQ ID NO: 1819700 - RNA, 19 nt, Artificial Sequence
  Description of Artificial Sequence: Synthetic oligonucleotide
  Antisense strand to SEQ ID NO: 1819699
cuucaccagggaauuccuc

SEQ ID NO: 1819701 - RNA, 19 nt, Artificial Sequence
  Description of Artificial Sequence: Synthetic oligonucleotide
  Sense strand starting at position 2534 of SEQ ID NO: 1563562
ggaauucccuggugaagaa

SEQ ID NO: 1819702 - RNA, 19 nt, Artificial Sequence
  Description of Artificial Sequence: Synthetic oligonucleotide
  Antisense strand to SEQ ID NO: 1819701
uucuucaccagggaauucc

SEQ ID NO: 1819703 - RNA, 19 nt, Artificial Sequence
  Description of Artificial Sequence: Synthetic oligonucleotide
  Sense strand starting at position 2544 of SEQ ID NO: 1563562
ggugaagaaugccaccuuu

SEQ ID NO: 1819704 - RNA, 19 nt, Artificial Sequence
  Description of Artificial Sequence: Synthetic oligonucleotide
  Antisense strand to SEQ ID NO: 1819703
aaagguggcauucuucacc

SEQ ID NO: 1819705 - RNA, 19 nt, Artificial Sequence
  Description of Artificial Sequence: Synthetic oligonucleotide
  Sense strand starting at position 42 of SEQ ID NO: 1563563
gucagcauccucugccuaa

SEQ ID NO: 1819706 - RNA, 19 nt, Artificial Sequence
  Description of Artificial Sequence: Synthetic oligonucleotide
  Antisense strand to SEQ ID NO: 1819705
uuaggcagaggaugcugac

SEQ ID NO: 1819707 - RNA, 19 nt, Artificial Sequence
  Description of Artificial Sequence: Synthetic oligonucleotide
  Sense strand starting at position 45 of SEQ ID NO: 1563563
agcauccucugccuaagaa

SEQ ID NO: 1819708 - RNA, 19 nt, Artificial Sequence
  Description of Artificial Sequence: Synthetic oligonucleotide
  Antisense strand to SEQ ID NO: 1819707
uucuuaggcagaggaugcu

SEQ ID NO: 1819709 - RNA, 19 nt, Artificial Sequence
  Description of Artificial Sequence: Synthetic oligonucleotide
  Sense strand starting at position 46 of SEQ ID NO: 1563563
gcauccucugccuaagaag

SEQ ID NO: 1819710 - RNA, 19 nt, Artificial Sequence
  Description of Artificial Sequence: Synthetic oligonucleotide
  Antisense strand to SEQ ID NO: 1819709
cuucuuaggcagaggaugc

SEQ ID NO: 1819711 - RNA, 19 nt, Artificial Sequence
  Description of Artificial Sequence: Synthetic oligonucleotide
  Sense strand starting at position 179 of SEQ ID NO: 1563563
agcuaagaucaacgucuaa

SEQ ID NO: 1819712 - RNA, 19 nt, Artificial Sequence
  Description of Artificial Sequence: Synthetic oligonucleotide
  Antisense strand to SEQ ID NO: 1819711
uuagacguugaucuuagcu

SEQ ID NO: 1819713 - RNA, 19 nt, Artificial Sequence
  Description of Artificial Sequence: Synthetic oligonucleotide
  Sense strand starting at position 368 of SEQ ID NO: 1563563
gccuuauaaggaugggugu

SEQ ID NO: 1819714 - RNA, 19 nt, Artificial Sequence
  Description of Artificial Sequence: Synthetic oligonucleotide
  Antisense strand to SEQ ID NO: 1819713
acacccauccuuauaaggc

SEQ ID NO: 1819715 - RNA, 19 nt, Artificial Sequence
  Description of Artificial Sequence: Synthetic oligonucleotide
  Sense strand starting at position 454 of SEQ ID NO: 1563563
uuugcuauauaagaugaca

SEQ ID NO: 1819716 - RNA, 19 nt, Artificial Sequence
  Description of Artificial Sequence: Synthetic oligonucleotide
  Antisense strand to SEQ ID NO: 1819715
ugucaucuuauauagcaaa

SEQ ID NO: 1819717 - RNA, 19 nt, Artificial Sequence
  Description of Artificial Sequence: Synthetic oligonucleotide
  Sense strand starting at position 497 of SEQ ID NO: 1563563
agggacaucuuugggaaau

SEQ ID NO: 1819718 - RNA, 19 nt, Artificial Sequence
  Description of Artificial Sequence: Synthetic oligonucleotide
  Antisense strand to SEQ ID NO: 1819717
auuucccaaagaugucccu

SEQ ID NO: 1819719 - RNA, 19 nt, Artificial Sequence
  Description of Artificial Sequence: Synthetic oligonucleotide
  Sense strand starting at position 498 of SEQ ID NO: 1563563
gggacaucuuugggaaauc

SEQ ID NO: 1819720 - RNA, 19 nt, Artificial Sequence
  Description of Artificial Sequence: Synthetic oligonucleotide
  Antisense strand to SEQ ID NO: 1819719
gauuucccaaagauguccc

SEQ ID NO: 1819721 - RNA, 19 nt, Artificial Sequence
  Description of Artificial Sequence: Synthetic oligonucleotide
  Sense strand starting at position 543 of SEQ ID NO: 1563563
aggauuguguaauacauuu

SEQ ID NO: 1819722 - RNA, 19 nt, Artificial Sequence
  Description of Artificial Sequence: Synthetic oligonucleotide
  Antisense strand to SEQ ID NO: 1819721
aaauguauuacacaauccu

SEQ ID NO: 1819723 - RNA, 19 nt, Artificial Sequence
  Description of Artificial Sequence: Synthetic oligonucleotide
  Sense strand starting at position 582 of SEQ ID NO: 1563563
ggucuaaacuuguuauaua

SEQ ID NO: 1819724 - RNA, 19 nt, Artificial Sequence
  Description of Artificial Sequence: Synthetic oligonucleotide
  Antisense strand to SEQ ID NO: 1819723
uauauaacaaguuuagacc

SEQ ID NO: 1819725 - RNA, 19 nt, Artificial Sequence
  Description of Artificial Sequence: Synthetic oligonucleotide
  Sense strand starting at position 648 of SEQ ID NO: 1563563
ggugcuguuacugacauga

SEQ ID NO: 1819726 - RNA, 19 nt, Artificial Sequence
  Description of Artificial Sequence: Synthetic oligonucleotide
  Antisense strand to SEQ ID NO: 1819725
ucaugucaguaacagcacc

SEQ ID NO: 1819727 - RNA, 19 nt, Artificial Sequence
  Description of Artificial Sequence: Synthetic oligonucleotide
  Sense strand starting at position 801 of SEQ ID NO: 1563563
acauaucacugggaugaac

SEQ ID NO: 1819728 - RNA, 19 nt, Artificial Sequence
  Description of Artificial Sequence: Synthetic oligonucleotide
  Antisense strand to SEQ ID NO: 1819727
guucaucccagugauaugu

SEQ ID NO: 1819729 - RNA, 19 nt, Artificial Sequence
  Description of Artificial Sequence: Synthetic oligonucleotide
  Sense strand starting at position 893 of SEQ ID NO: 1563563
gcaguaaagguaggaaaua

SEQ ID NO: 1819730 - RNA, 19 nt, Artificial Sequence
  Description of Artificial Sequence: Synthetic oligonucleotide
  Antisense strand to SEQ ID NO: 1819729
uauuuccuaccuuuacugc

SEQ ID NO: 1819731 - RNA, 19 nt, Artificial Sequence
  Description of Artificial Sequence: Synthetic oligonucleotide
  Sense strand starting at position 894 of SEQ ID NO: 1563563
caguaaagguaggaaauaa

SEQ ID NO: 1819732 - RNA, 19 nt, Artificial Sequence
  Description of Artificial Sequence: Synthetic oligonucleotide
  Antisense strand to SEQ ID NO: 1819731
uuauuuccuaccuuuacug

SEQ ID NO: 1819733 - RNA, 19 nt, Artificial Sequence
  Description of Artificial Sequence: Synthetic oligonucleotide
  Sense strand starting at position 905 of SEQ ID NO: 1563563
ggaaauaacuacccgccaa

SEQ ID NO: 1819734 - RNA, 19 nt, Artificial Sequence
  Description of Artificial Sequence: Synthetic oligonucleotide
  Antisense strand to SEQ ID NO: 1819733
uuggcggguaguuauuucc

SEQ ID NO: 1819735 - RNA, 19 nt, Artificial Sequence
  Description of Artificial Sequence: Synthetic oligonucleotide
  Sense strand starting at position 1134 of SEQ ID NO: 1563563
aagcgugaggaaggauaau

SEQ ID NO: 1819736 - RNA, 19 nt, Artificial Sequence
  Description of Artificial Sequence: Synthetic oligonucleotide
  Antisense strand to SEQ ID NO: 1819735
auuauccuuccucacgcuu

SEQ ID NO: 1819737 - RNA, 19 nt, Artificial Sequence
  Description of Artificial Sequence: Synthetic oligonucleotide
  Sense strand starting at position 1143 of SEQ ID NO: 1563563
gaaggauaauugcuuuagu

SEQ ID NO: 1819738 - RNA, 19 nt, Artificial Sequence
  Description of Artificial Sequence: Synthetic oligonucleotide
  Antisense strand to SEQ ID NO: 1819737
acuaaagcaauuauccuuc

SEQ ID NO: 1819739 - RNA, 19 nt, Artificial Sequence
  Description of Artificial Sequence: Synthetic oligonucleotide
  Sense strand starting at position 1144 of SEQ ID NO: 1563563
aaggauaauugcuuuaguc

SEQ ID NO: 1819740 - RNA, 19 nt, Artificial Sequence
  Description of Artificial Sequence: Synthetic oligonucleotide
  Antisense strand to SEQ ID NO: 1819739
gacuaaagcaauuauccuu

SEQ ID NO: 1819741 - RNA, 19 nt, Artificial Sequence
  Description of Artificial Sequence: Synthetic oligonucleotide
  Sense strand starting at position 1151 of SEQ ID NO: 1563563
auugcuuuaguccgggaga

SEQ ID NO: 1819742 - RNA, 19 nt, Artificial Sequence
  Description of Artificial Sequence: Synthetic oligonucleotide
  Antisense strand to SEQ ID NO: 1819741
ucucccggacuaaagcaau

SEQ ID NO: 1819743 - RNA, 19 nt, Artificial Sequence
  Description of Artificial Sequence: Synthetic oligonucleotide
  Sense strand starting at position 1256 of SEQ ID NO: 1563563
uguugauggcuggauggaa

SEQ ID NO: 1819744 - RNA, 19 nt, Artificial Sequence
  Description of Artificial Sequence: Synthetic oligonucleotide
  Antisense strand to SEQ ID NO: 1819743
uuccauccagccaucaaca

SEQ ID NO: 1819745 - RNA, 19 nt, Artificial Sequence
  Description of Artificial Sequence: Synthetic oligonucleotide
  Sense strand starting at position 1270 of SEQ ID NO: 1563563
uggaaacgauguuucuaca

SEQ ID NO: 1819746 - RNA, 19 nt, Artificial Sequence
  Description of Artificial Sequence: Synthetic oligonucleotide
  Antisense strand to SEQ ID NO: 1819745
uguagaaacaucguuucca

SEQ ID NO: 1819747 - RNA, 19 nt, Artificial Sequence
  Description of Artificial Sequence: Synthetic oligonucleotide
  Sense strand starting at position 1435 of SEQ ID NO: 1563563
cgcgacuaagcgccauaaa

SEQ ID NO: 1819748 - RNA, 19 nt, Artificial Sequence
  Description of Artificial Sequence: Synthetic oligonucleotide
  Antisense strand to SEQ ID NO: 1819747
uuuauggcgcuuagucgcg

SEQ ID NO: 1819749 - RNA, 19 nt, Artificial Sequence
  Description of Artificial Sequence: Synthetic oligonucleotide
  Sense strand starting at position 1438 of SEQ ID NO: 1563563
gacuaagcgccauaaaguc

SEQ ID NO: 1819750 - RNA, 19 nt, Artificial Sequence
  Description of Artificial Sequence: Synthetic oligonucleotide
  Antisense strand to SEQ ID NO: 1819749
gacuuuauggcgcuuaguc

SEQ ID NO: 1819751 - RNA, 19 nt, Artificial Sequence
  Description of Artificial Sequence: Synthetic oligonucleotide
  Sense strand starting at position 2382 of SEQ ID NO: 1563563
uggcuuaggccagguacaa

SEQ ID NO: 1819752 - RNA, 19 nt, Artificial Sequence
  Description of Artificial Sequence: Synthetic oligonucleotide
  Antisense strand to SEQ ID NO: 1819751
uuguaccuggccuaagcca

SEQ ID NO: 1819753 - RNA, 19 nt, Artificial Sequence
  Description of Artificial Sequence: Synthetic oligonucleotide
  Sense strand starting at position 2462 of SEQ ID NO: 1563563
gugucugaggucugagaag

SEQ ID NO: 1819754 - RNA, 19 nt, Artificial Sequence
  Description of Artificial Sequence: Synthetic oligonucleotide
  Antisense strand to SEQ ID NO: 1819753
cuucucagaccucagacac

SEQ ID NO: 1819755 - RNA, 19 nt, Artificial Sequence
  Description of Artificial Sequence: Synthetic oligonucleotide
  Sense strand starting at position 2498 of SEQ ID NO: 1563563
aggugcuaauguuugcaga

SEQ ID NO: 1819756 - RNA, 19 nt, Artificial Sequence
  Description of Artificial Sequence: Synthetic oligonucleotide
  Antisense strand to SEQ ID NO: 1819755
ucugcaaacauuagcaccu

SEQ ID NO: 1819757 - RNA, 19 nt, Artificial Sequence
  Description of Artificial Sequence: Synthetic oligonucleotide
  Sense strand starting at position 2537 of SEQ ID NO: 1563563
aaggaaaugcugugcacaa

SEQ ID NO: 1819758 - RNA, 19 nt, Artificial Sequence
  Description of Artificial Sequence: Synthetic oligonucleotide
  Antisense strand to SEQ ID NO: 1819757
uugugcacagcauuuccuu

SEQ ID NO: 1819759 - RNA, 19 nt, Artificial Sequence
  Description of Artificial Sequence: Synthetic oligonucleotide
  Sense strand starting at position 2538 of SEQ ID NO: 1563563
aggaaaugcugugcacaaa

SEQ ID NO: 1819760 - RNA, 19 nt, Artificial Sequence
  Description of Artificial Sequence: Synthetic oligonucleotide
  Antisense strand to SEQ ID NO: 1819759
uuugugcacagcauuuccu

SEQ ID NO: 1819761 - RNA, 19 nt, Artificial Sequence
  Description of Artificial Sequence: Synthetic oligonucleotide
  Sense strand starting at position 2584 of SEQ ID NO: 1563563
gcaugaacgguguuugugu

SEQ ID NO: 1819762 - RNA, 19 nt, Artificial Sequence
  Description of Artificial Sequence: Synthetic oligonucleotide
  Antisense strand to SEQ ID NO: 1819761
acacaaacaccguucaugc

SEQ ID NO: 1819763 - RNA, 19 nt, Artificial Sequence
  Description of Artificial Sequence: Synthetic oligonucleotide
  Sense strand starting at position 2620 of SEQ ID NO: 1563563
ccgggaucgauugggaauc

SEQ ID NO: 1819764 - RNA, 19 nt, Artificial Sequence
  Description of Artificial Sequence: Synthetic oligonucleotide
  Antisense strand to SEQ ID NO: 1819763
gauucccaaucgaucccgg

SEQ ID NO: 1819765 - RNA, 19 nt, Artificial Sequence
  Description of Artificial Sequence: Synthetic oligonucleotide
  Sense strand starting at position 2622 of SEQ ID NO: 1563563
gggaucgauugggaaucua

SEQ ID NO: 1819766 - RNA, 19 nt, Artificial Sequence
  Description of Artificial Sequence: Synthetic oligonucleotide
  Antisense strand to SEQ ID NO: 1819765
uagauucccaaucgauccc

SEQ ID NO: 1819767 - RNA, 19 nt, Artificial Sequence
  Description of Artificial Sequence: Synthetic oligonucleotide
  Sense strand starting at position 2718 of SEQ ID NO: 1563563
ucagguauuuaccaucuca

SEQ ID NO: 1819768 - RNA, 19 nt, Artificial Sequence
  Description of Artificial Sequence: Synthetic oligonucleotide
  Antisense strand to SEQ ID NO: 1819767
ugagaugguaaauaccuga

SEQ ID NO: 1819769 - RNA, 19 nt, Artificial Sequence
  Description of Artificial Sequence: Synthetic oligonucleotide
  Sense strand starting at position 3097 of SEQ ID NO: 1563563
cacaaauuggguugcuaaa

SEQ ID NO: 1819770 - RNA, 19 nt, Artificial Sequence
  Description of Artificial Sequence: Synthetic oligonucleotide
  Antisense strand to SEQ ID NO: 1819769
uuuagcaacccaauuugug

SEQ ID NO: 1819771 - RNA, 19 nt, Artificial Sequence
  Description of Artificial Sequence: Synthetic oligonucleotide
  Sense strand starting at position 3179 of SEQ ID NO: 1563563
gggcuuugcucccucaaag

SEQ ID NO: 1819772 - RNA, 19 nt, Artificial Sequence
  Description of Artificial Sequence: Synthetic oligonucleotide
  Antisense strand to SEQ ID NO: 1819771
cuuugagggagcaaagccc

SEQ ID NO: 1819773 - RNA, 19 nt, Artificial Sequence
  Description of Artificial Sequence: Synthetic oligonucleotide
  Sense strand starting at position 3338 of SEQ ID NO: 1563563
gcacaccugucacuggauu

SEQ ID NO: 1819774 - RNA, 19 nt, Artificial Sequence
  Description of Artificial Sequence: Synthetic oligonucleotide
  Antisense strand to SEQ ID NO: 1819773
aauccagugacaggugugc

SEQ ID NO: 1819775 - RNA, 19 nt, Artificial Sequence
  Description of Artificial Sequence: Synthetic oligonucleotide
  Sense strand starting at position 3432 of SEQ ID NO: 1563563
gcuaaauaaggucacagua

SEQ ID NO: 1819776 - RNA, 19 nt, Artificial Sequence
  Description of Artificial Sequence: Synthetic oligonucleotide
  Antisense strand to SEQ ID NO: 1819775
uacugugaccuuauuuagc

SEQ ID NO: 1819777 - RNA, 19 nt, Artificial Sequence
  Description of Artificial Sequence: Synthetic oligonucleotide
  Sense strand starting at position 3442 of SEQ ID NO: 1563563
gucacaguaacagggauua

SEQ ID NO: 1819778 - RNA, 19 nt, Artificial Sequence
  Description of Artificial Sequence: Synthetic oligonucleotide
  Antisense strand to SEQ ID NO: 1819777
uaaucccuguuacugugac

SEQ ID NO: 1819779 - RNA, 19 nt, Artificial Sequence
  Description of Artificial Sequence: Synthetic oligonucleotide
  Sense strand starting at position 3737 of SEQ ID NO: 1563563
cacguauucugccugguga

SEQ ID NO: 1819780 - RNA, 19 nt, Artificial Sequence
  Description of Artificial Sequence: Synthetic oligonucleotide
  Antisense strand to SEQ ID NO: 1819779
ucaccaggcagaauacgug

SEQ ID NO: 1819781 - RNA, 19 nt, Artificial Sequence
  Description of Artificial Sequence: Synthetic oligonucleotide
  Sense strand starting at position 3738 of SEQ ID NO: 1563563
acguauucugccuggugaa

SEQ ID NO: 1819782 - RNA, 19 nt, Artificial Sequence
  Description of Artificial Sequence: Synthetic oligonucleotide
  Antisense strand to SEQ ID NO: 1819781
uucaccaggcagaauacgu

SEQ ID NO: 1819783 - RNA, 19 nt, Artificial Sequence
  Description of Artificial Sequence: Synthetic oligonucleotide
  Sense strand starting at position 3739 of SEQ ID NO: 1563563
cguauucugccuggugaag

SEQ ID NO: 1819784 - RNA, 19 nt, Artificial Sequence
  Description of Artificial Sequence: Synthetic oligonucleotide
  Antisense strand to SEQ ID NO: 1819783
cuucaccaggcagaauacg

SEQ ID NO: 1819785 - RNA, 19 nt, Artificial Sequence
  Description of Artificial Sequence: Synthetic oligonucleotide
  Sense strand starting at position 92 of SEQ ID NO: 1563564
ccagccaucucugggagaa

SEQ ID NO: 1819786 - RNA, 19 nt, Artificial Sequence
  Description of Artificial Sequence: Synthetic oligonucleotide
  Antisense strand to SEQ ID NO: 1819785
uucucccagagauggcugg

SEQ ID NO: 1819787 - RNA, 19 nt, Artificial Sequence
  Description of Artificial Sequence: Synthetic oligonucleotide
  Sense strand starting at position 93 of SEQ ID NO: 1563564
cagccaucucugggagaau

SEQ ID NO: 1819788 - RNA, 19 nt, Artificial Sequence
  Description of Artificial Sequence: Synthetic oligonucleotide
  Antisense strand to SEQ ID NO: 1819787
auucucccagagauggcug

SEQ ID NO: 1819789 - RNA, 19 nt, Artificial Sequence
  Description of Artificial Sequence: Synthetic oligonucleotide
  Sense strand starting at position 94 of SEQ ID NO: 1563564
agccaucucugggagaaug

SEQ ID NO: 1819790 - RNA, 19 nt, Artificial Sequence
  Description of Artificial Sequence: Synthetic oligonucleotide
  Antisense strand to SEQ ID NO: 1819789
cauucucccagagauggcu

SEQ ID NO: 1819791 - RNA, 19 nt, Artificial Sequence
  Description of Artificial Sequence: Synthetic oligonucleotide
  Sense strand starting at position 836 of SEQ ID NO: 1563564
guuggcuguccugggaagu

SEQ ID NO: 1819792 - RNA, 19 nt, Artificial Sequence
  Description of Artificial Sequence: Synthetic oligonucleotide
  Antisense strand to SEQ ID NO: 1819791
acuucccaggacagccaac

SEQ ID NO: 1819793 - RNA, 19 nt, Artificial Sequence
  Description of Artificial Sequence: Synthetic oligonucleotide
  Sense strand starting at position 837 of SEQ ID NO: 1563564
uuggcuguccugggaaguu

SEQ ID NO: 1819794 - RNA, 19 nt, Artificial Sequence
  Description of Artificial Sequence: Synthetic oligonucleotide
  Antisense strand to SEQ ID NO: 1819793
aacuucccaggacagccaa

SEQ ID NO: 1819795 - RNA, 19 nt, Artificial Sequence
  Description of Artificial Sequence: Synthetic oligonucleotide
  Sense strand starting at position 869 of SEQ ID NO: 1563564
gaaccugguugagugcaaa

SEQ ID NO: 1819796 - RNA, 19 nt, Artificial Sequence
  Description of Artificial Sequence: Synthetic oligonucleotide
  Antisense strand to SEQ ID NO: 1819795
uuugcacucaaccagguuc

SEQ ID NO: 1819797 - RNA, 19 nt, Artificial Sequence
  Description of Artificial Sequence: Synthetic oligonucleotide
  Sense strand starting at position 1118 of SEQ ID NO: 1563564
gcggugucccugggacaga

SEQ ID NO: 1819798 - RNA, 19 nt, Artificial Sequence
  Description of Artificial Sequence: Synthetic oligonucleotide
  Antisense strand to SEQ ID NO: 1819797
ucugucccagggacaccgc

SEQ ID NO: 1819799 - RNA, 19 nt, Artificial Sequence
  Description of Artificial Sequence: Synthetic oligonucleotide
  Sense strand starting at position 1721 of SEQ ID NO: 1563564
gccauuuccugcuuugaaa

SEQ ID NO: 1819800 - RNA, 19 nt, Artificial Sequence
  Description of Artificial Sequence: Synthetic oligonucleotide
  Antisense strand to SEQ ID NO: 1819799
uuucaaagcaggaaauggc

SEQ ID NO: 1819801 - RNA, 19 nt, Artificial Sequence
  Description of Artificial Sequence: Synthetic oligonucleotide
  Sense strand starting at position 2023 of SEQ ID NO: 1563564
ccacgacgcucucuuagaa

SEQ ID NO: 1819802 - RNA, 19 nt, Artificial Sequence
  Description of Artificial Sequence: Synthetic oligonucleotide
  Antisense strand to SEQ ID NO: 1819801
uucuaagagagcgucgugg

SEQ ID NO: 1819803 - RNA, 19 nt, Artificial Sequence
  Description of Artificial Sequence: Synthetic oligonucleotide
  Sense strand starting at position 2051 of SEQ ID NO: 1563564
cucaguucucgcgagagca

SEQ ID NO: 1819804 - RNA, 19 nt, Artificial Sequence
  Description of Artificial Sequence: Synthetic oligonucleotide
  Antisense strand to SEQ ID NO: 1819803
ugcucucgcgagaacugag

SEQ ID NO: 1819805 - RNA, 19 nt, Artificial Sequence
  Description of Artificial Sequence: Synthetic oligonucleotide
  Sense strand starting at position 2052 of SEQ ID NO: 1563564
ucaguucucgcgagagcag

SEQ ID NO: 1819806 - RNA, 19 nt, Artificial Sequence
  Description of Artificial Sequence: Synthetic oligonucleotide
  Antisense strand to SEQ ID NO: 1819805
cugcucucgcgagaacuga

SEQ ID NO: 1819807 - RNA, 19 nt, Artificial Sequence
  Description of Artificial Sequence: Synthetic oligonucleotide
  Sense strand starting at position 2088 of SEQ ID NO: 1563564
gcuccucucugauugguca

SEQ ID NO: 1819808 - RNA, 19 nt, Artificial Sequence
  Description of Artificial Sequence: Synthetic oligonucleotide
  Antisense strand to SEQ ID NO: 1819807
ugaccaaucagagaggagc

SEQ ID NO: 1819809 - RNA, 19 nt, Artificial Sequence
  Description of Artificial Sequence: Synthetic oligonucleotide
  Sense strand starting at position 2092 of SEQ ID NO: 1563564
cucucugauuggucagcua

SEQ ID NO: 1819810 - RNA, 19 nt, Artificial Sequence
  Description of Artificial Sequence: Synthetic oligonucleotide
  Antisense strand to SEQ ID NO: 1819809
uagcugaccaaucagagag

SEQ ID NO: 1819811 - RNA, 19 nt, Artificial Sequence
  Description of Artificial Sequence: Synthetic oligonucleotide
  Sense strand starting at position 2095 of SEQ ID NO: 1563564
ucugauuggucagcuaagu

SEQ ID NO: 1819812 - RNA, 19 nt, Artificial Sequence
  Description of Artificial Sequence: Synthetic oligonucleotide
  Antisense strand to SEQ ID NO: 1819811
acuuagcugaccaaucaga

SEQ ID NO: 1819813 - RNA, 19 nt, Artificial Sequence
  Description of Artificial Sequence: Synthetic oligonucleotide
  Sense strand starting at position 2170 of SEQ ID NO: 1563564
ucccucuuuccguaaggga

SEQ ID NO: 1819814 - RNA, 19 nt, Artificial Sequence
  Description of Artificial Sequence: Synthetic oligonucleotide
  Antisense strand to SEQ ID NO: 1819813
ucccuuacggaaagaggga

SEQ ID NO: 1819815 - RNA, 19 nt, Artificial Sequence
  Description of Artificial Sequence: Synthetic oligonucleotide
  Sense strand starting at position 2408 of SEQ ID NO: 1563564
cccuguguguuuccaccau

SEQ ID NO: 1819816 - RNA, 19 nt, Artificial Sequence
  Description of Artificial Sequence: Synthetic oligonucleotide
  Antisense strand to SEQ ID NO: 1819815
augguggaaacacacaggg

SEQ ID NO: 1819817 - RNA, 19 nt, Artificial Sequence
  Description of Artificial Sequence: Synthetic oligonucleotide
  Sense strand starting at position 2799 of SEQ ID NO: 1563564
gcaucaacuguaugaugua

SEQ ID NO: 1819818 - RNA, 19 nt, Artificial Sequence
  Description of Artificial Sequence: Synthetic oligonucleotide
  Antisense strand to SEQ ID NO: 1819817
uacaucauacaguugaugc

SEQ ID NO: 1819819 - RNA, 19 nt, Artificial Sequence
  Description of Artificial Sequence: Synthetic oligonucleotide
  Sense strand starting at position 2812 of SEQ ID NO: 1563564
gauguauaguuguuuccaa

SEQ ID NO: 1819820 - RNA, 19 nt, Artificial Sequence
  Description of Artificial Sequence: Synthetic oligonucleotide
  Antisense strand to SEQ ID NO: 1819819
uuggaaacaacuauacauc

SEQ ID NO: 1819821 - RNA, 19 nt, Artificial Sequence
  Description of Artificial Sequence: Synthetic oligonucleotide
  Sense strand starting at position 2813 of SEQ ID NO: 1563564
auguauaguuguuuccaag

SEQ ID NO: 1819822 - RNA, 19 nt, Artificial Sequence
  Description of Artificial Sequence: Synthetic oligonucleotide
  Antisense strand to SEQ ID NO: 1819821
cuuggaaacaacuauacau

SEQ ID NO: 1819823 - RNA, 19 nt, Artificial Sequence
  Description of Artificial Sequence: Synthetic oligonucleotide
  Sense strand starting at position 2847 of SEQ ID NO: 1563564
gguacugauugagaaacuu

SEQ ID NO: 1819824 - RNA, 19 nt, Artificial Sequence
  Description of Artificial Sequence: Synthetic oligonucleotide
  Antisense strand to SEQ ID NO: 1819823
aaguuucucaaucaguacc

SEQ ID NO: 1819825 - RNA, 19 nt, Artificial Sequence
  Description of Artificial Sequence: Synthetic oligonucleotide
  Sense strand starting at position 2890 of SEQ ID NO: 1563564
gucaacuaguuuccugcua

SEQ ID NO: 1819826 - RNA, 19 nt, Artificial Sequence
  Description of Artificial Sequence: Synthetic oligonucleotide
  Antisense strand to SEQ ID NO: 1819825
uagcaggaaacuaguugac

SEQ ID NO: 1819827 - RNA, 19 nt, Artificial Sequence
  Description of Artificial Sequence: Synthetic oligonucleotide
  Sense strand starting at position 2905 of SEQ ID NO: 1563564
gcuaguucuugccacuuaa

SEQ ID NO: 1819828 - RNA, 19 nt, Artificial Sequence
  Description of Artificial Sequence: Synthetic oligonucleotide
  Antisense strand to SEQ ID NO: 1819827
uuaaguggcaagaacuagc

SEQ ID NO: 1819829 - RNA, 19 nt, Artificial Sequence
  Description of Artificial Sequence: Synthetic oligonucleotide
  Sense strand starting at position 2920 of SEQ ID NO: 1563564
uuaaguuagccauagaaau

SEQ ID NO: 1819830 - RNA, 19 nt, Artificial Sequence
  Description of Artificial Sequence: Synthetic oligonucleotide
  Antisense strand to SEQ ID NO: 1819829
auuucuauggcuaacuuaa

SEQ ID NO: 1819831 - RNA, 19 nt, Artificial Sequence
  Description of Artificial Sequence: Synthetic oligonucleotide
  Sense strand starting at position 2947 of SEQ ID NO: 1563564
ugaccaucagguugucaaa

SEQ ID NO: 1819832 - RNA, 19 nt, Artificial Sequence
  Description of Artificial Sequence: Synthetic oligonucleotide
  Antisense strand to SEQ ID NO: 1819831
uuugacaaccugaugguca

SEQ ID NO: 1819833 - RNA, 19 nt, Artificial Sequence
  Description of Artificial Sequence: Synthetic oligonucleotide
  Sense strand starting at position 2989 of SEQ ID NO: 1563564
gguugaccugcugauagua

SEQ ID NO: 1819834 - RNA, 19 nt, Artificial Sequence
  Description of Artificial Sequence: Synthetic oligonucleotide
  Antisense strand to SEQ ID NO: 1819833
uacuaucagcaggucaacc

SEQ ID NO: 1819835 - RNA, 19 nt, Artificial Sequence
  Description of Artificial Sequence: Synthetic oligonucleotide
  Sense strand starting at position 3242 of SEQ ID NO: 1563564
gucaacaaugacuguaagu

SEQ ID NO: 1819836 - RNA, 19 nt, Artificial Sequence
  Description of Artificial Sequence: Synthetic oligonucleotide
  Antisense strand to SEQ ID NO: 1819835
acuuacagucauuguugac

SEQ ID NO: 1819837 - RNA, 19 nt, Artificial Sequence
  Description of Artificial Sequence: Synthetic oligonucleotide
  Sense strand starting at position 3684 of SEQ ID NO: 1563564
acauauaaguguucuuaug

SEQ ID NO: 1819838 - RNA, 19 nt, Artificial Sequence
  Description of Artificial Sequence: Synthetic oligonucleotide
  Antisense strand to SEQ ID NO: 1819837
cauaagaacacuuauaugu

SEQ ID NO: 1819839 - RNA, 19 nt, Artificial Sequence
  Description of Artificial Sequence: Synthetic oligonucleotide
  Sense strand starting at position 3686 of SEQ ID NO: 1563564
auauaaguguucuuaugug

SEQ ID NO: 1819840 - RNA, 19 nt, Artificial Sequence
  Description of Artificial Sequence: Synthetic oligonucleotide
  Antisense strand to SEQ ID NO: 1819839
cacauaagaacacuuauau

SEQ ID NO: 1819841 - RNA, 19 nt, Artificial Sequence
  Description of Artificial Sequence: Synthetic oligonucleotide
  Sense strand starting at position 3690 of SEQ ID NO: 1563564
aaguguucuuaugugauga

SEQ ID NO: 1819842 - RNA, 19 nt, Artificial Sequence
  Description of Artificial Sequence: Synthetic oligonucleotide
  Antisense strand to SEQ ID NO: 1819841
ucaucacauaagaacacuu

SEQ ID NO: 1819843 - RNA, 19 nt, Artificial Sequence
  Description of Artificial Sequence: Synthetic oligonucleotide
  Sense strand starting at position 3691 of SEQ ID NO: 1563564
aguguucuuaugugaugau

SEQ ID NO: 1819844 - RNA, 19 nt, Artificial Sequence
  Description of Artificial Sequence: Synthetic oligonucleotide
  Antisense strand to SEQ ID NO: 1819843
aucaucacauaagaacacu

SEQ ID NO: 1819845 - RNA, 19 nt, Artificial Sequence
  Description of Artificial Sequence: Synthetic oligonucleotide
  Sense strand starting at position 3692 of SEQ ID NO: 1563564
guguucuuaugugaugauu

SEQ ID NO: 1819846 - RNA, 19 nt, Artificial Sequence
  Description of Artificial Sequence: Synthetic oligonucleotide
  Antisense strand to SEQ ID NO: 1819845
aaucaucacauaagaacac

SEQ ID NO: 1819847 - RNA, 19 nt, Artificial Sequence
  Description of Artificial Sequence: Synthetic oligonucleotide
  Sense strand starting at position 3695 of SEQ ID NO: 1563564
uucuuaugugaugauuauc

SEQ ID NO: 1819848 - RNA, 19 nt, Artificial Sequence
  Description of Artificial Sequence: Synthetic oligonucleotide
  Antisense strand to SEQ ID NO: 1819847
gauaaucaucacauaagaa

SEQ ID NO: 1819849 - RNA, 19 nt, Artificial Sequence
  Description of Artificial Sequence: Synthetic oligonucleotide
  Sense strand starting at position 3700 of SEQ ID NO: 1563564
augugaugauuaucugaau

SEQ ID NO: 1819850 - RNA, 19 nt, Artificial Sequence
  Description of Artificial Sequence: Synthetic oligonucleotide
  Antisense strand to SEQ ID NO: 1819849
auucagauaaucaucacau

SEQ ID NO: 1819851 - RNA, 19 nt, Artificial Sequence
  Description of Artificial Sequence: Synthetic oligonucleotide
  Sense strand starting at position 3703 of SEQ ID NO: 1563564
ugaugauuaucugaauugu

SEQ ID NO: 1819852 - RNA, 19 nt, Artificial Sequence
  Description of Artificial Sequence: Synthetic oligonucleotide
  Antisense strand to SEQ ID NO: 1819851
acaauucagauaaucauca

SEQ ID NO: 1819853 - RNA, 19 nt, Artificial Sequence
  Description of Artificial Sequence: Synthetic oligonucleotide
  Sense strand starting at position 3738 of SEQ ID NO: 1563564
uuuauucuacauggguauu

SEQ ID NO: 1819854 - RNA, 19 nt, Artificial Sequence
  Description of Artificial Sequence: Synthetic oligonucleotide
  Antisense strand to SEQ ID NO: 1819853
aauacccauguagaauaaa

SEQ ID NO: 1819855 - RNA, 19 nt, Artificial Sequence
  Description of Artificial Sequence: Synthetic oligonucleotide
  Sense strand starting at position 3768 of SEQ ID NO: 1563564
uuuaaagaguuguguguuc

SEQ ID NO: 1819856 - RNA, 19 nt, Artificial Sequence
  Description of Artificial Sequence: Synthetic oligonucleotide
  Antisense strand to SEQ ID NO: 1819855
gaacacacaacucuuuaaa

SEQ ID NO: 1819857 - RNA, 19 nt, Artificial Sequence
  Description of Artificial Sequence: Synthetic oligonucleotide
  Sense strand starting at position 3773 of SEQ ID NO: 1563564
agaguuguguguucauaau

SEQ ID NO: 1819858 - RNA, 19 nt, Artificial Sequence
  Description of Artificial Sequence: Synthetic oligonucleotide
  Antisense strand to SEQ ID NO: 1819857
auuaugaacacacaacucu

SEQ ID NO: 1819859 - RNA, 19 nt, Artificial Sequence
  Description of Artificial Sequence: Synthetic oligonucleotide
  Sense strand starting at position 3946 of SEQ ID NO: 1563564
ggaaccaaaugauguuuaa

SEQ ID NO: 1819860 - RNA, 19 nt, Artificial Sequence
  Description of Artificial Sequence: Synthetic oligonucleotide
  Antisense strand to SEQ ID NO: 1819859
uuaaacaucauuugguucc

SEQ ID NO: 1819861 - RNA, 19 nt, Artificial Sequence
  Description of Artificial Sequence: Synthetic oligonucleotide
  Sense strand starting at position 3959 of SEQ ID NO: 1563564
guuuaauucucccagcagu

SEQ ID NO: 1819862 - RNA, 19 nt, Artificial Sequence
  Description of Artificial Sequence: Synthetic oligonucleotide
  Antisense strand to SEQ ID NO: 1819861
acugcugggagaauuaaac

SEQ ID NO: 1819863 - RNA, 19 nt, Artificial Sequence
  Description of Artificial Sequence: Synthetic oligonucleotide
  Sense strand starting at position 3970 of SEQ ID NO: 1563564
ccagcagugaugugaggaa

SEQ ID NO: 1819864 - RNA, 19 nt, Artificial Sequence
  Description of Artificial Sequence: Synthetic oligonucleotide
  Antisense strand to SEQ ID NO: 1819863
uuccucacaucacugcugg

SEQ ID NO: 1819865 - RNA, 19 nt, Artificial Sequence
  Description of Artificial Sequence: Synthetic oligonucleotide
  Sense strand starting at position 46 of SEQ ID NO: 1563565
ccagccaucucugggagaa

SEQ ID NO: 1819866 - RNA, 19 nt, Artificial Sequence
  Description of Artificial Sequence: Synthetic oligonucleotide
  Antisense strand to SEQ ID NO: 1819865
uucucccagagauggcugg

SEQ ID NO: 1819867 - RNA, 19 nt, Artificial Sequence
  Description of Artificial Sequence: Synthetic oligonucleotide
  Sense strand starting at position 47 of SEQ ID NO: 1563565
cagccaucucugggagaau

SEQ ID NO: 1819868 - RNA, 19 nt, Artificial Sequence
  Description of Artificial Sequence: Synthetic oligonucleotide
  Antisense strand to SEQ ID NO: 1819867
auucucccagagauggcug

SEQ ID NO: 1819869 - RNA, 19 nt, Artificial Sequence
  Description of Artificial Sequence: Synthetic oligonucleotide
  Sense strand starting at position 48 of SEQ ID NO: 1563565
agccaucucugggagaaug

SEQ ID NO: 1819870 - RNA, 19 nt, Artificial Sequence
  Description of Artificial Sequence: Synthetic oligonucleotide
  Antisense strand to SEQ ID NO: 1819869
cauucucccagagauggcu

SEQ ID NO: 1819871 - RNA, 19 nt, Artificial Sequence
  Description of Artificial Sequence: Synthetic oligonucleotide
  Sense strand starting at position 790 of SEQ ID NO: 1563565
guuggcuguccugggaagu

SEQ ID NO: 1819872 - RNA, 19 nt, Artificial Sequence
  Description of Artificial Sequence: Synthetic oligonucleotide
  Antisense strand to SEQ ID NO: 1819871
acuucccaggacagccaac

SEQ ID NO: 1819873 - RNA, 19 nt, Artificial Sequence
  Description of Artificial Sequence: Synthetic oligonucleotide
  Sense strand starting at position 791 of SEQ ID NO: 1563565
uuggcuguccugggaaguu

SEQ ID NO: 1819874 - RNA, 19 nt, Artificial Sequence
  Description of Artificial Sequence: Synthetic oligonucleotide
  Antisense strand to SEQ ID NO: 1819873
aacuucccaggacagccaa

SEQ ID NO: 1819875 - RNA, 19 nt, Artificial Sequence
  Description of Artificial Sequence: Synthetic oligonucleotide
  Sense strand starting at position 823 of SEQ ID NO: 1563565
gaaccugguugagugcaaa

SEQ ID NO: 1819876 - RNA, 19 nt, Artificial Sequence
  Description of Artificial Sequence: Synthetic oligonucleotide
  Antisense strand to SEQ ID NO: 1819875
uuugcacucaaccagguuc

SEQ ID NO: 1819877 - RNA, 19 nt, Artificial Sequence
  Description of Artificial Sequence: Synthetic oligonucleotide
  Sense strand starting at position 1072 of SEQ ID NO: 1563565
gcggugucccugggacaga

SEQ ID NO: 1819878 - RNA, 19 nt, Artificial Sequence
  Description of Artificial Sequence: Synthetic oligonucleotide
  Antisense strand to SEQ ID NO: 1819877
ucugucccagggacaccgc

SEQ ID NO: 1819879 - RNA, 19 nt, Artificial Sequence
  Description of Artificial Sequence: Synthetic oligonucleotide
  Sense strand starting at position 1675 of SEQ ID NO: 1563565
gccauuuccugcuuugaaa

SEQ ID NO: 1819880 - RNA, 19 nt, Artificial Sequence
  Description of Artificial Sequence: Synthetic oligonucleotide
  Antisense strand to SEQ ID NO: 1819879
uuucaaagcaggaaauggc

SEQ ID NO: 1819881 - RNA, 19 nt, Artificial Sequence
  Description of Artificial Sequence: Synthetic oligonucleotide
  Sense strand starting at position 1977 of SEQ ID NO: 1563565
ccacgacgcucucuuagaa

SEQ ID NO: 1819882 - RNA, 19 nt, Artificial Sequence
  Description of Artificial Sequence: Synthetic oligonucleotide
  Antisense strand to SEQ ID NO: 1819881
uucuaagagagcgucgugg

SEQ ID NO: 1819883 - RNA, 19 nt, Artificial Sequence
  Description of Artificial Sequence: Synthetic oligonucleotide
  Sense strand starting at position 2005 of SEQ ID NO: 1563565
cucaguucucgcgagagca

SEQ ID NO: 1819884 - RNA, 19 nt, Artificial Sequence
  Description of Artificial Sequence: Synthetic oligonucleotide
  Antisense strand to SEQ ID NO: 1819883
ugcucucgcgagaacugag

SEQ ID NO: 1819885 - RNA, 19 nt, Artificial Sequence
  Description of Artificial Sequence: Synthetic oligonucleotide
  Sense strand starting at position 2006 of SEQ ID NO: 1563565
ucaguucucgcgagagcag

SEQ ID NO: 1819886 - RNA, 19 nt, Artificial Sequence
  Description of Artificial Sequence: Synthetic oligonucleotide
  Antisense strand to SEQ ID NO: 1819885
cugcucucgcgagaacuga

SEQ ID NO: 1819887 - RNA, 19 nt, Artificial Sequence
  Description of Artificial Sequence: Synthetic oligonucleotide
  Sense strand starting at position 2042 of SEQ ID NO: 1563565
gcuccucucugauugguca

SEQ ID NO: 1819888 - RNA, 19 nt, Artificial Sequence
  Description of Artificial Sequence: Synthetic oligonucleotide
  Antisense strand to SEQ ID NO: 1819887
ugaccaaucagagaggagc

SEQ ID NO: 1819889 - RNA, 19 nt, Artificial Sequence
  Description of Artificial Sequence: Synthetic oligonucleotide
  Sense strand starting at position 2046 of SEQ ID NO: 1563565
cucucugauuggucagcua

SEQ ID NO: 1819890 - RNA, 19 nt, Artificial Sequence
  Description of Artificial Sequence: Synthetic oligonucleotide
  Antisense strand to SEQ ID NO: 1819889
uagcugaccaaucagagag

SEQ ID NO: 1819891 - RNA, 19 nt, Artificial Sequence
  Description of Artificial Sequence: Synthetic oligonucleotide
  Sense strand starting at position 2049 of SEQ ID NO: 1563565
ucugauuggucagcuaagu

SEQ ID NO: 1819892 - RNA, 19 nt, Artificial Sequence
  Description of Artificial Sequence: Synthetic oligonucleotide
  Antisense strand to SEQ ID NO: 1819891
acuuagcugaccaaucaga

SEQ ID NO: 1819893 - RNA, 19 nt, Artificial Sequence
  Description of Artificial Sequence: Synthetic oligonucleotide
  Sense strand starting at position 2124 of SEQ ID NO: 1563565
ucccucuuuccguaaggga

SEQ ID NO: 1819894 - RNA, 19 nt, Artificial Sequence
  Description of Artificial Sequence: Synthetic oligonucleotide
  Antisense strand to SEQ ID NO: 1819893
ucccuuacggaaagaggga

SEQ ID NO: 1819895 - RNA, 19 nt, Artificial Sequence
  Description of Artificial Sequence: Synthetic oligonucleotide
  Sense strand starting at position 2362 of SEQ ID NO: 1563565
cccuguguguuuccaccau

SEQ ID NO: 1819896 - RNA, 19 nt, Artificial Sequence
  Description of Artificial Sequence: Synthetic oligonucleotide
  Antisense strand to SEQ ID NO: 1819895
augguggaaacacacaggg

SEQ ID NO: 1819897 - RNA, 19 nt, Artificial Sequence
  Description of Artificial Sequence: Synthetic oligonucleotide
  Sense strand starting at position 2753 of SEQ ID NO: 1563565
gcaucaacuguaugaugua

SEQ ID NO: 1819898 - RNA, 19 nt, Artificial Sequence
  Description of Artificial Sequence: Synthetic oligonucleotide
  Antisense strand to SEQ ID NO: 1819897
uacaucauacaguugaugc

SEQ ID NO: 1819899 - RNA, 19 nt, Artificial Sequence
  Description of Artificial Sequence: Synthetic oligonucleotide
  Sense strand starting at position 2766 of SEQ ID NO: 1563565
gauguauaguuguuuccaa

SEQ ID NO: 1819900 - RNA, 19 nt, Artificial Sequence
  Description of Artificial Sequence: Synthetic oligonucleotide
  Antisense strand to SEQ ID NO: 1819899
uuggaaacaacuauacauc

SEQ ID NO: 1819901 - RNA, 19 nt, Artificial Sequence
  Description of Artificial Sequence: Synthetic oligonucleotide
  Sense strand starting at position 2767 of SEQ ID NO: 1563565
auguauaguuguuuccaag

SEQ ID NO: 1819902 - RNA, 19 nt, Artificial Sequence
  Description of Artificial Sequence: Synthetic oligonucleotide
  Antisense strand to SEQ ID NO: 1819901
cuuggaaacaacuauacau

SEQ ID NO: 1819903 - RNA, 19 nt, Artificial Sequence
  Description of Artificial Sequence: Synthetic oligonucleotide
  Sense strand starting at position 2801 of SEQ ID NO: 1563565
gguacugauugagaaacuu

SEQ ID NO: 1819904 - RNA, 19 nt, Artificial Sequence
  Description of Artificial Sequence: Synthetic oligonucleotide
  Antisense strand to SEQ ID NO: 1819903
aaguuucucaaucaguacc

SEQ ID NO: 1819905 - RNA, 19 nt, Artificial Sequence
  Description of Artificial Sequence: Synthetic oligonucleotide
  Sense strand starting at position 2844 of SEQ ID NO: 1563565
gucaacuaguuuccugcua

SEQ ID NO: 1819906 - RNA, 19 nt, Artificial Sequence
  Description of Artificial Sequence: Synthetic oligonucleotide
  Antisense strand to SEQ ID NO: 1819905
uagcaggaaacuaguugac

SEQ ID NO: 1819907 - RNA, 19 nt, Artificial Sequence
  Description of Artificial Sequence: Synthetic oligonucleotide
  Sense strand starting at position 2859 of SEQ ID NO: 1563565
gcuaguucuugccacuuaa

SEQ ID NO: 1819908 - RNA, 19 nt, Artificial Sequence
  Description of Artificial Sequence: Synthetic oligonucleotide
  Antisense strand to SEQ ID NO: 1819907
uuaaguggcaagaacuagc

SEQ ID NO: 1819909 - RNA, 19 nt, Artificial Sequence
  Description of Artificial Sequence: Synthetic oligonucleotide
  Sense strand starting at position 2874 of SEQ ID NO: 1563565
uuaaguuagccauagaaau

SEQ ID NO: 1819910 - RNA, 19 nt, Artificial Sequence
  Description of Artificial Sequence: Synthetic oligonucleotide
  Antisense strand to SEQ ID NO: 1819909
auuucuauggcuaacuuaa

SEQ ID NO: 1819911 - RNA, 19 nt, Artificial Sequence
  Description of Artificial Sequence: Synthetic oligonucleotide
  Sense strand starting at position 2901 of SEQ ID NO: 1563565
ugaccaucagguugucaaa

SEQ ID NO: 1819912 - RNA, 19 nt, Artificial Sequence
  Description of Artificial Sequence: Synthetic oligonucleotide
  Antisense strand to SEQ ID NO: 1819911
uuugacaaccugaugguca

SEQ ID NO: 1819913 - RNA, 19 nt, Artificial Sequence
  Description of Artificial Sequence: Synthetic oligonucleotide
  Sense strand starting at position 2943 of SEQ ID NO: 1563565
gguugaccugcugauagua

SEQ ID NO: 1819914 - RNA, 19 nt, Artificial Sequence
  Description of Artificial Sequence: Synthetic oligonucleotide
  Antisense strand to SEQ ID NO: 1819913
uacuaucagcaggucaacc

SEQ ID NO: 1819915 - RNA, 19 nt, Artificial Sequence
  Description of Artificial Sequence: Synthetic oligonucleotide
  Sense strand starting at position 3196 of SEQ ID NO: 1563565
gucaacaaugacuguaagu

SEQ ID NO: 1819916 - RNA, 19 nt, Artificial Sequence
  Description of Artificial Sequence: Synthetic oligonucleotide
  Antisense strand to SEQ ID NO: 1819915
acuuacagucauuguugac

SEQ ID NO: 1819917 - RNA, 19 nt, Artificial Sequence
  Description of Artificial Sequence: Synthetic oligonucleotide
  Sense strand starting at position 3638 of SEQ ID NO: 1563565
acauauaaguguucuuaug

SEQ ID NO: 1819918 - RNA, 19 nt, Artificial Sequence
  Description of Artificial Sequence: Synthetic oligonucleotide
  Antisense strand to SEQ ID NO: 1819917
cauaagaacacuuauaugu

SEQ ID NO: 1819919 - RNA, 19 nt, Artificial Sequence
  Description of Artificial Sequence: Synthetic oligonucleotide
  Sense strand starting at position 3640 of SEQ ID NO: 1563565
auauaaguguucuuaugug

SEQ ID NO: 1819920 - RNA, 19 nt, Artificial Sequence
  Description of Artificial Sequence: Synthetic oligonucleotide
  Antisense strand to SEQ ID NO: 1819919
cacauaagaacacuuauau

SEQ ID NO: 1819921 - RNA, 19 nt, Artificial Sequence
  Description of Artificial Sequence: Synthetic oligonucleotide
  Sense strand starting at position 3644 of SEQ ID NO: 1563565
aaguguucuuaugugauga

SEQ ID NO: 1819922 - RNA, 19 nt, Artificial Sequence
  Description of Artificial Sequence: Synthetic oligonucleotide
  Antisense strand to SEQ ID NO: 1819921
ucaucacauaagaacacuu

SEQ ID NO: 1819923 - RNA, 19 nt, Artificial Sequence
  Description of Artificial Sequence: Synthetic oligonucleotide
  Sense strand starting at position 3645 of SEQ ID NO: 1563565
aguguucuuaugugaugau

SEQ ID NO: 1819924 - RNA, 19 nt, Artificial Sequence
  Description of Artificial Sequence: Synthetic oligonucleotide
  Antisense strand to SEQ ID NO: 1819923
aucaucacauaagaacacu

SEQ ID NO: 1819925 - RNA, 19 nt, Artificial Sequence
  Description of Artificial Sequence: Synthetic oligonucleotide
  Sense strand starting at position 3646 of SEQ ID NO: 1563565
guguucuuaugugaugauu

SEQ ID NO: 1819926 - RNA, 19 nt, Artificial Sequence
  Description of Artificial Sequence: Synthetic oligonucleotide
  Antisense strand to SEQ ID NO: 1819925
aaucaucacauaagaacac

SEQ ID NO: 1819927 - RNA, 19 nt, Artificial Sequence
  Description of Artificial Sequence: Synthetic oligonucleotide
  Sense strand starting at position 3649 of SEQ ID NO: 1563565
uucuuaugugaugauuauc

SEQ ID NO: 1819928 - RNA, 19 nt, Artificial Sequence
  Description of Artificial Sequence: Synthetic oligonucleotide
  Antisense strand to SEQ ID NO: 1819927
gauaaucaucacauaagaa

SEQ ID NO: 1819929 - RNA, 19 nt, Artificial Sequence
  Description of Artificial Sequence: Synthetic oligonucleotide
  Sense strand starting at position 3654 of SEQ ID NO: 1563565
augugaugauuaucugaau

SEQ ID NO: 1819930 - RNA, 19 nt, Artificial Sequence
  Description of Artificial Sequence: Synthetic oligonucleotide
  Antisense strand to SEQ ID NO: 1819929
auucagauaaucaucacau

SEQ ID NO: 1819931 - RNA, 19 nt, Artificial Sequence
  Description of Artificial Sequence: Synthetic oligonucleotide
  Sense strand starting at position 3657 of SEQ ID NO: 1563565
ugaugauuaucugaauugu

SEQ ID NO: 1819932 - RNA, 19 nt, Artificial Sequence
  Description of Artificial Sequence: Synthetic oligonucleotide
  Antisense strand to SEQ ID NO: 1819931
acaauucagauaaucauca

SEQ ID NO: 1819933 - RNA, 19 nt, Artificial Sequence
  Description of Artificial Sequence: Synthetic oligonucleotide
  Sense strand starting at position 3692 of SEQ ID NO: 1563565
uuuauucuacauggguauu

SEQ ID NO: 1819934 - RNA, 19 nt, Artificial Sequence
  Description of Artificial Sequence: Synthetic oligonucleotide
  Antisense strand to SEQ ID NO: 1819933
aauacccauguagaauaaa

SEQ ID NO: 1819935 - RNA, 19 nt, Artificial Sequence
  Description of Artificial Sequence: Synthetic oligonucleotide
  Sense strand starting at position 3727 of SEQ ID NO: 1563565
agaguuguguguucauaau

SEQ ID NO: 1819936 - RNA, 19 nt, Artificial Sequence
  Description of Artificial Sequence: Synthetic oligonucleotide
  Antisense strand to SEQ ID NO: 1819935
auuaugaacacacaacucu

SEQ ID NO: 1819937 - RNA, 19 nt, Artificial Sequence
  Description of Artificial Sequence: Synthetic oligonucleotide
  Sense strand starting at position 3900 of SEQ ID NO: 1563565
ggaaccaaaugauguuuaa

SEQ ID NO: 1819938 - RNA, 19 nt, Artificial Sequence
  Description of Artificial Sequence: Synthetic oligonucleotide
  Antisense strand to SEQ ID NO: 1819937
uuaaacaucauuugguucc

SEQ ID NO: 1819939 - RNA, 19 nt, Artificial Sequence
  Description of Artificial Sequence: Synthetic oligonucleotide
  Sense strand starting at position 3913 of SEQ ID NO: 1563565
guuuaauucucccagcagu

SEQ ID NO: 1819940 - RNA, 19 nt, Artificial Sequence
  Description of Artificial Sequence: Synthetic oligonucleotide
  Antisense strand to SEQ ID NO: 1819939
acugcugggagaauuaaac

SEQ ID NO: 1819941 - RNA, 19 nt, Artificial Sequence
  Description of Artificial Sequence: Synthetic oligonucleotide
  Sense strand starting at position 3924 of SEQ ID NO: 1563565
ccagcagugaugugaggaa

SEQ ID NO: 1819942 - RNA, 19 nt, Artificial Sequence
  Description of Artificial Sequence: Synthetic oligonucleotide
  Antisense strand to SEQ ID NO: 1819941
uuccucacaucacugcugg

SEQ ID NO: 1819943 - RNA, 19 nt, Artificial Sequence
  Description of Artificial Sequence: Synthetic oligonucleotide
  Sense strand starting at position 3982 of SEQ ID NO: 1563565
ccugacauccagugugguu

SEQ ID NO: 1819944 - RNA, 19 nt, Artificial Sequence
  Description of Artificial Sequence: Synthetic oligonucleotide
  Antisense strand to SEQ ID NO: 1819943
aaccacacuggaugucagg

SEQ ID NO: 1819945 - RNA, 19 nt, Artificial Sequence
  Description of Artificial Sequence: Synthetic oligonucleotide
  Sense strand starting at position 98 of SEQ ID NO: 1563566
aaagaaaugucuuauguga

SEQ ID NO: 1819946 - RNA, 19 nt, Artificial Sequence
  Description of Artificial Sequence: Synthetic oligonucleotide
  Antisense strand to SEQ ID NO: 1819945
ucacauaagacauuucuuu

SEQ ID NO: 1819947 - RNA, 19 nt, Artificial Sequence
  Description of Artificial Sequence: Synthetic oligonucleotide
  Sense strand starting at position 100 of SEQ ID NO: 1563566
agaaaugucuuaugugaaa

SEQ ID NO: 1819948 - RNA, 19 nt, Artificial Sequence
  Description of Artificial Sequence: Synthetic oligonucleotide
  Antisense strand to SEQ ID NO: 1819947
uuucacauaagacauuucu

SEQ ID NO: 1819949 - RNA, 19 nt, Artificial Sequence
  Description of Artificial Sequence: Synthetic oligonucleotide
  Sense strand starting at position 103 of SEQ ID NO: 1563566
aaugucuuaugugaaaugu

SEQ ID NO: 1819950 - RNA, 19 nt, Artificial Sequence
  Description of Artificial Sequence: Synthetic oligonucleotide
  Antisense strand to SEQ ID NO: 1819949
acauuucacauaagacauu

SEQ ID NO: 1819951 - RNA, 19 nt, Artificial Sequence
  Description of Artificial Sequence: Synthetic oligonucleotide
  Sense strand starting at position 138 of SEQ ID NO: 1563566
cagugaugacaugguccaa

SEQ ID NO: 1819952 - RNA, 19 nt, Artificial Sequence
  Description of Artificial Sequence: Synthetic oligonucleotide
  Antisense strand to SEQ ID NO: 1819951
uuggaccaugucaucacug

SEQ ID NO: 1819953 - RNA, 19 nt, Artificial Sequence
  Description of Artificial Sequence: Synthetic oligonucleotide
  Sense strand starting at position 294 of SEQ ID NO: 1563566
acgguuucuuuccucacau

SEQ ID NO: 1819954 - RNA, 19 nt, Artificial Sequence
  Description of Artificial Sequence: Synthetic oligonucleotide
  Antisense strand to SEQ ID NO: 1819953
augugaggaaagaaaccgu

SEQ ID NO: 1819955 - RNA, 19 nt, Artificial Sequence
  Description of Artificial Sequence: Synthetic oligonucleotide
  Sense strand starting at position 295 of SEQ ID NO: 1563566
cgguuucuuuccucacauu

SEQ ID NO: 1819956 - RNA, 19 nt, Artificial Sequence
  Description of Artificial Sequence: Synthetic oligonucleotide
  Antisense strand to SEQ ID NO: 1819955
aaugugaggaaagaaaccg

SEQ ID NO: 1819957 - RNA, 19 nt, Artificial Sequence
  Description of Artificial Sequence: Synthetic oligonucleotide
  Sense strand starting at position 395 of SEQ ID NO: 1563566
uguggagaaauguacuagu

SEQ ID NO: 1819958 - RNA, 19 nt, Artificial Sequence
  Description of Artificial Sequence: Synthetic oligonucleotide
  Antisense strand to SEQ ID NO: 1819957
acuaguacauuucuccaca

SEQ ID NO: 1819959 - RNA, 19 nt, Artificial Sequence
  Description of Artificial Sequence: Synthetic oligonucleotide
  Sense strand starting at position 398 of SEQ ID NO: 1563566
ggagaaauguacuaguugu

SEQ ID NO: 1819960 - RNA, 19 nt, Artificial Sequence
  Description of Artificial Sequence: Synthetic oligonucleotide
  Antisense strand to SEQ ID NO: 1819959
acaacuaguacauuucucc

SEQ ID NO: 1819961 - RNA, 19 nt, Artificial Sequence
  Description of Artificial Sequence: Synthetic oligonucleotide
  Sense strand starting at position 465 of SEQ ID NO: 1563566
agagcuauacauggaauca

SEQ ID NO: 1819962 - RNA, 19 nt, Artificial Sequence
  Description of Artificial Sequence: Synthetic oligonucleotide
  Antisense strand to SEQ ID NO: 1819961
ugauuccauguauagcucu

SEQ ID NO: 1819963 - RNA, 19 nt, Artificial Sequence
  Description of Artificial Sequence: Synthetic oligonucleotide
  Sense strand starting at position 527 of SEQ ID NO: 1563566
ggguucagguuccaguaaa

SEQ ID NO: 1819964 - RNA, 19 nt, Artificial Sequence
  Description of Artificial Sequence: Synthetic oligonucleotide
  Antisense strand to SEQ ID NO: 1819963
uuuacuggaaccugaaccc

SEQ ID NO: 1819965 - RNA, 19 nt, Artificial Sequence
  Description of Artificial Sequence: Synthetic oligonucleotide
  Sense strand starting at position 823 of SEQ ID NO: 1563566
uguauuuaccugcaugcuu

SEQ ID NO: 1819966 - RNA, 19 nt, Artificial Sequence
  Description of Artificial Sequence: Synthetic oligonucleotide
  Antisense strand to SEQ ID NO: 1819965
aagcaugcagguaaauaca

SEQ ID NO: 1819967 - RNA, 19 nt, Artificial Sequence
  Description of Artificial Sequence: Synthetic oligonucleotide
  Sense strand starting at position 913 of SEQ ID NO: 1563566
cugguuguccugggaagcu

SEQ ID NO: 1819968 - RNA, 19 nt, Artificial Sequence
  Description of Artificial Sequence: Synthetic oligonucleotide
  Antisense strand to SEQ ID NO: 1819967
agcuucccaggacaaccag

SEQ ID NO: 1819969 - RNA, 19 nt, Artificial Sequence
  Description of Artificial Sequence: Synthetic oligonucleotide
  Sense strand starting at position 1966 of SEQ ID NO: 1563566
cucaguucucgugagagcu

SEQ ID NO: 1819970 - RNA, 19 nt, Artificial Sequence
  Description of Artificial Sequence: Synthetic oligonucleotide
  Antisense strand to SEQ ID NO: 1819969
agcucucacgagaacugag

SEQ ID NO: 1819971 - RNA, 19 nt, Artificial Sequence
  Description of Artificial Sequence: Synthetic oligonucleotide
  Sense strand starting at position 2354 of SEQ ID NO: 1563566
uaaucaauggauugugcuu

SEQ ID NO: 1819972 - RNA, 19 nt, Artificial Sequence
  Description of Artificial Sequence: Synthetic oligonucleotide
  Antisense strand to SEQ ID NO: 1819971
aagcacaauccauugauua

SEQ ID NO: 1819973 - RNA, 19 nt, Artificial Sequence
  Description of Artificial Sequence: Synthetic oligonucleotide
  Sense strand starting at position 2593 of SEQ ID NO: 1563566
auugcauauucgguagaga

SEQ ID NO: 1819974 - RNA, 19 nt, Artificial Sequence
  Description of Artificial Sequence: Synthetic oligonucleotide
  Antisense strand to SEQ ID NO: 1819973
ucucuaccgaauaugcaau

SEQ ID NO: 1819975 - RNA, 19 nt, Artificial Sequence
  Description of Artificial Sequence: Synthetic oligonucleotide
  Sense strand starting at position 2594 of SEQ ID NO: 1563566
uugcauauucgguagagac

SEQ ID NO: 1819976 - RNA, 19 nt, Artificial Sequence
  Description of Artificial Sequence: Synthetic oligonucleotide
  Antisense strand to SEQ ID NO: 1819975
gucucuaccgaauaugcaa

SEQ ID NO: 1819977 - RNA, 19 nt, Artificial Sequence
  Description of Artificial Sequence: Synthetic oligonucleotide
  Sense strand starting at position 2899 of SEQ ID NO: 1563566
gggagagaguuguuucgga

SEQ ID NO: 1819978 - RNA, 19 nt, Artificial Sequence
  Description of Artificial Sequence: Synthetic oligonucleotide
  Antisense strand to SEQ ID NO: 1819977
uccgaaacaacucucuccc

SEQ ID NO: 1819979 - RNA, 19 nt, Artificial Sequence
  Description of Artificial Sequence: Synthetic oligonucleotide
  Sense strand starting at position 2914 of SEQ ID NO: 1563566
cggaguugggagugaauaa

SEQ ID NO: 1819980 - RNA, 19 nt, Artificial Sequence
  Description of Artificial Sequence: Synthetic oligonucleotide
  Antisense strand to SEQ ID NO: 1819979
uuauucacucccaacuccg

SEQ ID NO: 1819981 - RNA, 19 nt, Artificial Sequence
  Description of Artificial Sequence: Synthetic oligonucleotide
  Sense strand starting at position 2925 of SEQ ID NO: 1563566
gugaauaaauauugccuaa

SEQ ID NO: 1819982 - RNA, 19 nt, Artificial Sequence
  Description of Artificial Sequence: Synthetic oligonucleotide
  Antisense strand to SEQ ID NO: 1819981
uuaggcaauauuuauucac

SEQ ID NO: 1819983 - RNA, 19 nt, Artificial Sequence
  Description of Artificial Sequence: Synthetic oligonucleotide
  Sense strand starting at position 2936 of SEQ ID NO: 1563566
uugccuaaaguuuguaaau

SEQ ID NO: 1819984 - RNA, 19 nt, Artificial Sequence
  Description of Artificial Sequence: Synthetic oligonucleotide
  Antisense strand to SEQ ID NO: 1819983
auuuacaaacuuuaggcaa

SEQ ID NO: 1819985 - RNA, 19 nt, Artificial Sequence
  Description of Artificial Sequence: Synthetic oligonucleotide
  Sense strand starting at position 2937 of SEQ ID NO: 1563566
ugccuaaaguuuguaaauc

SEQ ID NO: 1819986 - RNA, 19 nt, Artificial Sequence
  Description of Artificial Sequence: Synthetic oligonucleotide
  Antisense strand to SEQ ID NO: 1819985
gauuuacaaacuuuaggca

SEQ ID NO: 1819987 - RNA, 19 nt, Artificial Sequence
  Description of Artificial Sequence: Synthetic oligonucleotide
  Sense strand starting at position 3147 of SEQ ID NO: 1563566
ugaaucuguugagcaagaa

SEQ ID NO: 1819988 - RNA, 19 nt, Artificial Sequence
  Description of Artificial Sequence: Synthetic oligonucleotide
  Antisense strand to SEQ ID NO: 1819987
uucuugcucaacagauuca

SEQ ID NO: 1819989 - RNA, 19 nt, Artificial Sequence
  Description of Artificial Sequence: Synthetic oligonucleotide
  Sense strand starting at position 3151 of SEQ ID NO: 1563566
ucuguugagcaagaaauau

SEQ ID NO: 1819990 - RNA, 19 nt, Artificial Sequence
  Description of Artificial Sequence: Synthetic oligonucleotide
  Antisense strand to SEQ ID NO: 1819989
auauuucuugcucaacaga

SEQ ID NO: 1819991 - RNA, 19 nt, Artificial Sequence
  Description of Artificial Sequence: Synthetic oligonucleotide
  Sense strand starting at position 3195 of SEQ ID NO: 1563566
ggaaaugacuuccaacuug

SEQ ID NO: 1819992 - RNA, 19 nt, Artificial Sequence
  Description of Artificial Sequence: Synthetic oligonucleotide
  Antisense strand to SEQ ID NO: 1819991
caaguuggaagucauuucc

SEQ ID NO: 1819993 - RNA, 19 nt, Artificial Sequence
  Description of Artificial Sequence: Synthetic oligonucleotide
  Sense strand starting at position 3231 of SEQ ID NO: 1563566
aaguauaugcuguauguaa

SEQ ID NO: 1819994 - RNA, 19 nt, Artificial Sequence
  Description of Artificial Sequence: Synthetic oligonucleotide
  Antisense strand to SEQ ID NO: 1819993
uuacauacagcauauacuu

SEQ ID NO: 1819995 - RNA, 19 nt, Artificial Sequence
  Description of Artificial Sequence: Synthetic oligonucleotide
  Sense strand starting at position 3233 of SEQ ID NO: 1563566
guauaugcuguauguaaga

SEQ ID NO: 1819996 - RNA, 19 nt, Artificial Sequence
  Description of Artificial Sequence: Synthetic oligonucleotide
  Antisense strand to SEQ ID NO: 1819995
ucuuacauacagcauauac

SEQ ID NO: 1819997 - RNA, 19 nt, Artificial Sequence
  Description of Artificial Sequence: Synthetic oligonucleotide
  Sense strand starting at position 3238 of SEQ ID NO: 1563566
ugcuguauguaagaaugga

SEQ ID NO: 1819998 - RNA, 19 nt, Artificial Sequence
  Description of Artificial Sequence: Synthetic oligonucleotide
  Antisense strand to SEQ ID NO: 1819997
uccauucuuacauacagca

SEQ ID NO: 1819999 - RNA, 19 nt, Artificial Sequence
  Description of Artificial Sequence: Synthetic oligonucleotide
  Sense strand starting at position 3325 of SEQ ID NO: 1563566
auugauaucucaugaaugu

SEQ ID NO: 1820000 - RNA, 19 nt, Artificial Sequence
  Description of Artificial Sequence: Synthetic oligonucleotide
  Antisense strand to SEQ ID NO: 1819999
acauucaugagauaucaau

SEQ ID NO: 1820001 - RNA, 19 nt, Artificial Sequence
  Description of Artificial Sequence: Synthetic oligonucleotide
  Sense strand starting at position 3377 of SEQ ID NO: 1563566
ggcagaguacacugaacaa

SEQ ID NO: 1820002 - RNA, 19 nt, Artificial Sequence
  Description of Artificial Sequence: Synthetic oligonucleotide
  Antisense strand to SEQ ID NO: 1820001
uuguucaguguacucugcc

SEQ ID NO: 1820003 - RNA, 19 nt, Artificial Sequence
  Description of Artificial Sequence: Synthetic oligonucleotide
  Sense strand starting at position 3402 of SEQ ID NO: 1563566
ggcacaaucuacucugaca

SEQ ID NO: 1820004 - RNA, 19 nt, Artificial Sequence
  Description of Artificial Sequence: Synthetic oligonucleotide
  Antisense strand to SEQ ID NO: 1820003
ugucagaguagauugugcc

SEQ ID NO: 1820005 - RNA, 19 nt, Artificial Sequence
  Description of Artificial Sequence: Synthetic oligonucleotide
  Sense strand starting at position 3508 of SEQ ID NO: 1563566
aaugaacagugauaugaga

SEQ ID NO: 1820006 - RNA, 19 nt, Artificial Sequence
  Description of Artificial Sequence: Synthetic oligonucleotide
  Antisense strand to SEQ ID NO: 1820005
ucucauaucacuguucauu

SEQ ID NO: 1820007 - RNA, 19 nt, Artificial Sequence
  Description of Artificial Sequence: Synthetic oligonucleotide
  Sense strand starting at position 3525 of SEQ ID NO: 1563566
gaguuuaagcuccgucugu

SEQ ID NO: 1820008 - RNA, 19 nt, Artificial Sequence
  Description of Artificial Sequence: Synthetic oligonucleotide
  Antisense strand to SEQ ID NO: 1820007
acagacggagcuuaaacuc

SEQ ID NO: 1820009 - RNA, 19 nt, Artificial Sequence
  Description of Artificial Sequence: Synthetic oligonucleotide
  Sense strand starting at position 3535 of SEQ ID NO: 1563566
uccgucuguccaggagaga

SEQ ID NO: 1820010 - RNA, 19 nt, Artificial Sequence
  Description of Artificial Sequence: Synthetic oligonucleotide
  Antisense strand to SEQ ID NO: 1820009
ucucuccuggacagacgga

SEQ ID NO: 1820011 - RNA, 19 nt, Artificial Sequence
  Description of Artificial Sequence: Synthetic oligonucleotide
  Sense strand starting at position 3560 of SEQ ID NO: 1563566
acaaauguauugucuugga

SEQ ID NO: 1820012 - RNA, 19 nt, Artificial Sequence
  Description of Artificial Sequence: Synthetic oligonucleotide
  Antisense strand to SEQ ID NO: 1820011
uccaagacaauacauuugu

SEQ ID NO: 1820013 - RNA, 19 nt, Artificial Sequence
  Description of Artificial Sequence: Synthetic oligonucleotide
  Sense strand starting at position 3564 of SEQ ID NO: 1563566
auguauugucuuggauaca

SEQ ID NO: 1820014 - RNA, 19 nt, Artificial Sequence
  Description of Artificial Sequence: Synthetic oligonucleotide
  Antisense strand to SEQ ID NO: 1820013
uguauccaagacaauacau

SEQ ID NO: 1820015 - RNA, 19 nt, Artificial Sequence
  Description of Artificial Sequence: Synthetic oligonucleotide
  Sense strand starting at position 3565 of SEQ ID NO: 1563566
uguauugucuuggauacag

SEQ ID NO: 1820016 - RNA, 19 nt, Artificial Sequence
  Description of Artificial Sequence: Synthetic oligonucleotide
  Antisense strand to SEQ ID NO: 1820015
cuguauccaagacaauaca

SEQ ID NO: 1820017 - RNA, 19 nt, Artificial Sequence
  Description of Artificial Sequence: Synthetic oligonucleotide
  Sense strand starting at position 3573 of SEQ ID NO: 1563566
cuuggauacaggcauagua

SEQ ID NO: 1820018 - RNA, 19 nt, Artificial Sequence
  Description of Artificial Sequence: Synthetic oligonucleotide
  Antisense strand to SEQ ID NO: 1820017
uacuaugccuguauccaag

SEQ ID NO: 1820019 - RNA, 19 nt, Artificial Sequence
  Description of Artificial Sequence: Synthetic oligonucleotide
  Sense strand starting at position 3583 of SEQ ID NO: 1563566
ggcauaguaucuuaaauug

SEQ ID NO: 1820020 - RNA, 19 nt, Artificial Sequence
  Description of Artificial Sequence: Synthetic oligonucleotide
  Antisense strand to SEQ ID NO: 1820019
caauuuaagauacuaugcc

SEQ ID NO: 1820021 - RNA, 19 nt, Artificial Sequence
  Description of Artificial Sequence: Synthetic oligonucleotide
  Sense strand starting at position 3594 of SEQ ID NO: 1563566
uuaaauugcucucuuggca

SEQ ID NO: 1820022 - RNA, 19 nt, Artificial Sequence
  Description of Artificial Sequence: Synthetic oligonucleotide
  Antisense strand to SEQ ID NO: 1820021
ugccaagagagcaauuuaa

SEQ ID NO: 1820023 - RNA, 19 nt, Artificial Sequence
  Description of Artificial Sequence: Synthetic oligonucleotide
  Sense strand starting at position 3597 of SEQ ID NO: 1563566
aauugcucucuuggcagua

SEQ ID NO: 1820024 - RNA, 19 nt, Artificial Sequence
  Description of Artificial Sequence: Synthetic oligonucleotide
  Antisense strand to SEQ ID NO: 1820023
uacugccaagagagcaauu

SEQ ID NO: 1820025 - RNA, 19 nt, Artificial Sequence
  Description of Artificial Sequence: Synthetic oligonucleotide
  Sense strand starting at position 26 of SEQ ID NO: 1563567
acagucuugucauccacua

SEQ ID NO: 1820026 - RNA, 19 nt, Artificial Sequence
  Description of Artificial Sequence: Synthetic oligonucleotide
  Antisense strand to SEQ ID NO: 1820025
uaguggaugacaagacugu

SEQ ID NO: 1820027 - RNA, 19 nt, Artificial Sequence
  Description of Artificial Sequence: Synthetic oligonucleotide
  Sense strand starting at position 131 of SEQ ID NO: 1563567
ucuagcuccuugguaucaa

SEQ ID NO: 1820028 - RNA, 19 nt, Artificial Sequence
  Description of Artificial Sequence: Synthetic oligonucleotide
  Antisense strand to SEQ ID NO: 1820027
uugauaccaaggagcuaga

SEQ ID NO: 1820029 - RNA, 19 nt, Artificial Sequence
  Description of Artificial Sequence: Synthetic oligonucleotide
  Sense strand starting at position 141 of SEQ ID NO: 1563567
ugguaucaacccuguaaca

SEQ ID NO: 1820030 - RNA, 19 nt, Artificial Sequence
  Description of Artificial Sequence: Synthetic oligonucleotide
  Antisense strand to SEQ ID NO: 1820029
uguuacaggguugauacca

SEQ ID NO: 1820031 - RNA, 19 nt, Artificial Sequence
  Description of Artificial Sequence: Synthetic oligonucleotide
  Sense strand starting at position 198 of SEQ ID NO: 1563567
aggccuuguuuguugggaa

SEQ ID NO: 1820032 - RNA, 19 nt, Artificial Sequence
  Description of Artificial Sequence: Synthetic oligonucleotide
  Antisense strand to SEQ ID NO: 1820031
uucccaacaaacaaggccu

SEQ ID NO: 1820033 - RNA, 19 nt, Artificial Sequence
  Description of Artificial Sequence: Synthetic oligonucleotide
  Sense strand starting at position 205 of SEQ ID NO: 1563567
guuuguugggaagaaaugu

SEQ ID NO: 1820034 - RNA, 19 nt, Artificial Sequence
  Description of Artificial Sequence: Synthetic oligonucleotide
  Antisense strand to SEQ ID NO: 1820033
acauuucuucccaacaaac

SEQ ID NO: 1820035 - RNA, 19 nt, Artificial Sequence
  Description of Artificial Sequence: Synthetic oligonucleotide
  Sense strand starting at position 218 of SEQ ID NO: 1563567
aaaugucuugugugaaaug

SEQ ID NO: 1820036 - RNA, 19 nt, Artificial Sequence
  Description of Artificial Sequence: Synthetic oligonucleotide
  Antisense strand to SEQ ID NO: 1820035
cauuucacacaagacauuu

SEQ ID NO: 1820037 - RNA, 19 nt, Artificial Sequence
  Description of Artificial Sequence: Synthetic oligonucleotide
  Sense strand starting at position 392 of SEQ ID NO: 1563567
cuccuuugucucuguaaca

SEQ ID NO: 1820038 - RNA, 19 nt, Artificial Sequence
  Description of Artificial Sequence: Synthetic oligonucleotide
  Antisense strand to SEQ ID NO: 1820037
uguuacagagacaaaggag

SEQ ID NO: 1820039 - RNA, 19 nt, Artificial Sequence
  Description of Artificial Sequence: Synthetic oligonucleotide
  Sense strand starting at position 514 of SEQ ID NO: 1563567
agagaaacguacuauuugu

SEQ ID NO: 1820040 - RNA, 19 nt, Artificial Sequence
  Description of Artificial Sequence: Synthetic oligonucleotide
  Antisense strand to SEQ ID NO: 1820039
acaaauaguacguuucucu

SEQ ID NO: 1820041 - RNA, 19 nt, Artificial Sequence
  Description of Artificial Sequence: Synthetic oligonucleotide
  Sense strand starting at position 541 of SEQ ID NO: 1563567
uuggcucuccgccaauuaa

SEQ ID NO: 1820042 - RNA, 19 nt, Artificial Sequence
  Description of Artificial Sequence: Synthetic oligonucleotide
  Antisense strand to SEQ ID NO: 1820041
uuaauuggcggagagccaa

SEQ ID NO: 1820043 - RNA, 19 nt, Artificial Sequence
  Description of Artificial Sequence: Synthetic oligonucleotide
  Sense strand starting at position 568 of SEQ ID NO: 1563567
cgcagagcuauacauggaa

SEQ ID NO: 1820044 - RNA, 19 nt, Artificial Sequence
  Description of Artificial Sequence: Synthetic oligonucleotide
  Antisense strand to SEQ ID NO: 1820043
uuccauguauagcucugcg

SEQ ID NO: 1820045 - RNA, 19 nt, Artificial Sequence
  Description of Artificial Sequence: Synthetic oligonucleotide
  Sense strand starting at position 661 of SEQ ID NO: 1563567
caggucagaucccuuggau

SEQ ID NO: 1820046 - RNA, 19 nt, Artificial Sequence
  Description of Artificial Sequence: Synthetic oligonucleotide
  Antisense strand to SEQ ID NO: 1820045
auccaagggaucugaccug

SEQ ID NO: 1820047 - RNA, 19 nt, Artificial Sequence
  Description of Artificial Sequence: Synthetic oligonucleotide
  Sense strand starting at position 664 of SEQ ID NO: 1563567
gucagaucccuuggauguc

SEQ ID NO: 1820048 - RNA, 19 nt, Artificial Sequence
  Description of Artificial Sequence: Synthetic oligonucleotide
  Antisense strand to SEQ ID NO: 1820047
gacauccaagggaucugac

SEQ ID NO: 1820049 - RNA, 19 nt, Artificial Sequence
  Description of Artificial Sequence: Synthetic oligonucleotide
  Sense strand starting at position 921 of SEQ ID NO: 1563567
cuguguuuaccugcaagcu

SEQ ID NO: 1820050 - RNA, 19 nt, Artificial Sequence
  Description of Artificial Sequence: Synthetic oligonucleotide
  Antisense strand to SEQ ID NO: 1820049
agcuugcagguaaacacag

SEQ ID NO: 1820051 - RNA, 19 nt, Artificial Sequence
  Description of Artificial Sequence: Synthetic oligonucleotide
  Sense strand starting at position 1091 of SEQ ID NO: 1563567
aaggaaacgaggcguguua

SEQ ID NO: 1820052 - RNA, 19 nt, Artificial Sequence
  Description of Artificial Sequence: Synthetic oligonucleotide
  Antisense strand to SEQ ID NO: 1820051
uaacacgccucguuuccuu

SEQ ID NO: 1820053 - RNA, 19 nt, Artificial Sequence
  Description of Artificial Sequence: Synthetic oligonucleotide
  Sense strand starting at position 1093 of SEQ ID NO: 1563567
ggaaacgaggcguguuaaa

SEQ ID NO: 1820054 - RNA, 19 nt, Artificial Sequence
  Description of Artificial Sequence: Synthetic oligonucleotide
  Antisense strand to SEQ ID NO: 1820053
uuuaacacgccucguuucc

SEQ ID NO: 1820055 - RNA, 19 nt, Artificial Sequence
  Description of Artificial Sequence: Synthetic oligonucleotide
  Sense strand starting at position 1370 of SEQ ID NO: 1563567
gccaucuccaugggaauga

SEQ ID NO: 1820056 - RNA, 19 nt, Artificial Sequence
  Description of Artificial Sequence: Synthetic oligonucleotide
  Antisense strand to SEQ ID NO: 1820055
ucauucccauggagauggc

SEQ ID NO: 1820057 - RNA, 19 nt, Artificial Sequence
  Description of Artificial Sequence: Synthetic oligonucleotide
  Sense strand starting at position 1819 of SEQ ID NO: 1563567
cucuguucucacgagagca

SEQ ID NO: 1820058 - RNA, 19 nt, Artificial Sequence
  Description of Artificial Sequence: Synthetic oligonucleotide
  Antisense strand to SEQ ID NO: 1820057
ugcucucgugagaacagag

SEQ ID NO: 1820059 - RNA, 19 nt, Artificial Sequence
  Description of Artificial Sequence: Synthetic oligonucleotide
  Sense strand starting at position 2340 of SEQ ID NO: 1563567
augauucugcaguggauau

SEQ ID NO: 1820060 - RNA, 19 nt, Artificial Sequence
  Description of Artificial Sequence: Synthetic oligonucleotide
  Antisense strand to SEQ ID NO: 1820059
auauccacugcagaaucau

SEQ ID NO: 1820061 - RNA, 19 nt, Artificial Sequence
  Description of Artificial Sequence: Synthetic oligonucleotide
  Sense strand starting at position 2341 of SEQ ID NO: 1563567
ugauucugcaguggauaua

SEQ ID NO: 1820062 - RNA, 19 nt, Artificial Sequence
  Description of Artificial Sequence: Synthetic oligonucleotide
  Antisense strand to SEQ ID NO: 1820061
uauauccacugcagaauca

SEQ ID NO: 1820063 - RNA, 19 nt, Artificial Sequence
  Description of Artificial Sequence: Synthetic oligonucleotide
  Sense strand starting at position 2363 of SEQ ID NO: 1563567
aguuaaagacuuuaugucu

SEQ ID NO: 1820064 - RNA, 19 nt, Artificial Sequence
  Description of Artificial Sequence: Synthetic oligonucleotide
  Antisense strand to SEQ ID NO: 1820063
agacauaaagucuuuaacu

SEQ ID NO: 1820065 - RNA, 19 nt, Artificial Sequence
  Description of Artificial Sequence: Synthetic oligonucleotide
  Sense strand starting at position 2484 of SEQ ID NO: 1563567
ugguguaaucacuacucac

SEQ ID NO: 1820066 - RNA, 19 nt, Artificial Sequence
  Description of Artificial Sequence: Synthetic oligonucleotide
  Antisense strand to SEQ ID NO: 1820065
gugaguagugauuacacca

SEQ ID NO: 1820067 - RNA, 19 nt, Artificial Sequence
  Description of Artificial Sequence: Synthetic oligonucleotide
  Sense strand starting at position 3078 of SEQ ID NO: 1563567
gccaucuuucccugacaag

SEQ ID NO: 1820068 - RNA, 19 nt, Artificial Sequence
  Description of Artificial Sequence: Synthetic oligonucleotide
  Antisense strand to SEQ ID NO: 1820067
cuugucagggaaagauggc

SEQ ID NO: 1820069 - RNA, 19 nt, Artificial Sequence
  Description of Artificial Sequence: Synthetic oligonucleotide
  Sense strand starting at position 3264 of SEQ ID NO: 1563567
cucuuucgagcuuaagaug

SEQ ID NO: 1820070 - RNA, 19 nt, Artificial Sequence
  Description of Artificial Sequence: Synthetic oligonucleotide
  Antisense strand to SEQ ID NO: 1820069
caucuuaagcucgaaagag

SEQ ID NO: 1820071 - RNA, 19 nt, Artificial Sequence
  Description of Artificial Sequence: Synthetic oligonucleotide
  Sense strand starting at position 3269 of SEQ ID NO: 1563567
ucgagcuuaagauguguaa

SEQ ID NO: 1820072 - RNA, 19 nt, Artificial Sequence
  Description of Artificial Sequence: Synthetic oligonucleotide
  Antisense strand to SEQ ID NO: 1820071
uuacacaucuuaagcucga

SEQ ID NO: 1820073 - RNA, 19 nt, Artificial Sequence
  Description of Artificial Sequence: Synthetic oligonucleotide
  Sense strand starting at position 3272 of SEQ ID NO: 1563567
agcuuaagauguguaacau

SEQ ID NO: 1820074 - RNA, 19 nt, Artificial Sequence
  Description of Artificial Sequence: Synthetic oligonucleotide
  Antisense strand to SEQ ID NO: 1820073
auguuacacaucuuaagcu

SEQ ID NO: 1820075 - RNA, 19 nt, Artificial Sequence
  Description of Artificial Sequence: Synthetic oligonucleotide
  Sense strand starting at position 3273 of SEQ ID NO: 1563567
gcuuaagauguguaacauu

SEQ ID NO: 1820076 - RNA, 19 nt, Artificial Sequence
  Description of Artificial Sequence: Synthetic oligonucleotide
  Antisense strand to SEQ ID NO: 1820075
aauguuacacaucuuaagc

SEQ ID NO: 1820077 - RNA, 19 nt, Artificial Sequence
  Description of Artificial Sequence: Synthetic oligonucleotide
  Sense strand starting at position 3348 of SEQ ID NO: 1563567
ucccaucuggaucaaugua

SEQ ID NO: 1820078 - RNA, 19 nt, Artificial Sequence
  Description of Artificial Sequence: Synthetic oligonucleotide
  Antisense strand to SEQ ID NO: 1820077
uacauugauccagauggga

SEQ ID NO: 1820079 - RNA, 19 nt, Artificial Sequence
  Description of Artificial Sequence: Synthetic oligonucleotide
  Sense strand starting at position 3407 of SEQ ID NO: 1563567
auaccagguucugucuaua

SEQ ID NO: 1820080 - RNA, 19 nt, Artificial Sequence
  Description of Artificial Sequence: Synthetic oligonucleotide
  Antisense strand to SEQ ID NO: 1820079
uauagacagaaccugguau

SEQ ID NO: 1820081 - RNA, 19 nt, Artificial Sequence
  Description of Artificial Sequence: Synthetic oligonucleotide
  Sense strand starting at position 3410 of SEQ ID NO: 1563567
ccagguucugucuauaauu

SEQ ID NO: 1820082 - RNA, 19 nt, Artificial Sequence
  Description of Artificial Sequence: Synthetic oligonucleotide
  Antisense strand to SEQ ID NO: 1820081
aauuauagacagaaccugg

SEQ ID NO: 1820083 - RNA, 19 nt, Artificial Sequence
  Description of Artificial Sequence: Synthetic oligonucleotide
  Sense strand starting at position 3415 of SEQ ID NO: 1563567
uucugucuauaauuggaaa

SEQ ID NO: 1820084 - RNA, 19 nt, Artificial Sequence
  Description of Artificial Sequence: Synthetic oligonucleotide
  Antisense strand to SEQ ID NO: 1820083
uuuccaauuauagacagaa

SEQ ID NO: 1820085 - RNA, 19 nt, Artificial Sequence
  Description of Artificial Sequence: Synthetic oligonucleotide
  Sense strand starting at position 3540 of SEQ ID NO: 1563567
ggaauuugaugucagguga

SEQ ID NO: 1820086 - RNA, 19 nt, Artificial Sequence
  Description of Artificial Sequence: Synthetic oligonucleotide
  Antisense strand to SEQ ID NO: 1820085
ucaccugacaucaaauucc

SEQ ID NO: 1820087 - RNA, 19 nt, Artificial Sequence
  Description of Artificial Sequence: Synthetic oligonucleotide
  Sense strand starting at position 3577 of SEQ ID NO: 1563567
gagcuacuucuuuggcaua

SEQ ID NO: 1820088 - RNA, 19 nt, Artificial Sequence
  Description of Artificial Sequence: Synthetic oligonucleotide
  Antisense strand to SEQ ID NO: 1820087
uaugccaaagaaguagcuc

SEQ ID NO: 1820089 - RNA, 19 nt, Artificial Sequence
  Description of Artificial Sequence: Synthetic oligonucleotide
  Sense strand starting at position 3579 of SEQ ID NO: 1563567
gcuacuucuuuggcauaac

SEQ ID NO: 1820090 - RNA, 19 nt, Artificial Sequence
  Description of Artificial Sequence: Synthetic oligonucleotide
  Antisense strand to SEQ ID NO: 1820089
guuaugccaaagaaguagc

SEQ ID NO: 1820091 - RNA, 19 nt, Artificial Sequence
  Description of Artificial Sequence: Synthetic oligonucleotide
  Sense strand starting at position 3662 of SEQ ID NO: 1563567
acaccaaguguccaaguua

SEQ ID NO: 1820092 - RNA, 19 nt, Artificial Sequence
  Description of Artificial Sequence: Synthetic oligonucleotide
  Antisense strand to SEQ ID NO: 1820091
uaacuuggacacuuggugu

SEQ ID NO: 1820093 - RNA, 19 nt, Artificial Sequence
  Description of Artificial Sequence: Synthetic oligonucleotide
  Sense strand starting at position 3741 of SEQ ID NO: 1563567
uggaguauuugugagaugu

SEQ ID NO: 1820094 - RNA, 19 nt, Artificial Sequence
  Description of Artificial Sequence: Synthetic oligonucleotide
  Antisense strand to SEQ ID NO: 1820093
acaucucacaaauacucca

SEQ ID NO: 1820095 - RNA, 19 nt, Artificial Sequence
  Description of Artificial Sequence: Synthetic oligonucleotide
  Sense strand starting at position 3790 of SEQ ID NO: 1563567
ucauuaagccuuuguaaag

SEQ ID NO: 1820096 - RNA, 19 nt, Artificial Sequence
  Description of Artificial Sequence: Synthetic oligonucleotide
  Antisense strand to SEQ ID NO: 1820095
cuuuacaaaggcuuaauga

SEQ ID NO: 1820097 - RNA, 19 nt, Artificial Sequence
  Description of Artificial Sequence: Synthetic oligonucleotide
  Sense strand starting at position 3797 of SEQ ID NO: 1563567
gccuuuguaaagggaggaa

SEQ ID NO: 1820098 - RNA, 19 nt, Artificial Sequence
  Description of Artificial Sequence: Synthetic oligonucleotide
  Antisense strand to SEQ ID NO: 1820097
uuccucccuuuacaaaggc

SEQ ID NO: 1820099 - RNA, 19 nt, Artificial Sequence
  Description of Artificial Sequence: Synthetic oligonucleotide
  Sense strand starting at position 3812 of SEQ ID NO: 1563567
ggaagucuauuugaagcaa

SEQ ID NO: 1820100 - RNA, 19 nt, Artificial Sequence
  Description of Artificial Sequence: Synthetic oligonucleotide
  Antisense strand to SEQ ID NO: 1820099
uugcuucaaauagacuucc

SEQ ID NO: 1820101 - RNA, 19 nt, Artificial Sequence
  Description of Artificial Sequence: Synthetic oligonucleotide
  Sense strand starting at position 3938 of SEQ ID NO: 1563567
ggaaauguuuaagcaaauu

SEQ ID NO: 1820102 - RNA, 19 nt, Artificial Sequence
  Description of Artificial Sequence: Synthetic oligonucleotide
  Antisense strand to SEQ ID NO: 1820101
aauuugcuuaaacauuucc

SEQ ID NO: 1820103 - RNA, 19 nt, Artificial Sequence
  Description of Artificial Sequence: Synthetic oligonucleotide
  Sense strand starting at position 3968 of SEQ ID NO: 1563567
ucucaagaguuauuagaau

SEQ ID NO: 1820104 - RNA, 19 nt, Artificial Sequence
  Description of Artificial Sequence: Synthetic oligonucleotide
  Antisense strand to SEQ ID NO: 1820103
auucuaauaacucuugaga

SEQ ID NO: 1820105 - RNA, 19 nt, Artificial Sequence
  Description of Artificial Sequence: Synthetic oligonucleotide
  Sense strand starting at position 34 of SEQ ID NO: 1563568
aucuaauaugccugaaaug

SEQ ID NO: 1820106 - RNA, 19 nt, Artificial Sequence
  Description of Artificial Sequence: Synthetic oligonucleotide
  Antisense strand to SEQ ID NO: 1820105
cauuucaggcauauuagau

SEQ ID NO: 1820107 - RNA, 19 nt, Artificial Sequence
  Description of Artificial Sequence: Synthetic oligonucleotide
  Sense strand starting at position 35 of SEQ ID NO: 1563568
ucuaauaugccugaaaugu

SEQ ID NO: 1820108 - RNA, 19 nt, Artificial Sequence
  Description of Artificial Sequence: Synthetic oligonucleotide
  Antisense strand to SEQ ID NO: 1820107
acauuucaggcauauuaga

SEQ ID NO: 1820109 - RNA, 19 nt, Artificial Sequence
  Description of Artificial Sequence: Synthetic oligonucleotide
  Sense strand starting at position 44 of SEQ ID NO: 1563568
ccugaaaugugaguaaaug

SEQ ID NO: 1820110 - RNA, 19 nt, Artificial Sequence
  Description of Artificial Sequence: Synthetic oligonucleotide
  Antisense strand to SEQ ID NO: 1820109
cauuuacucacauuucagg

SEQ ID NO: 1820111 - RNA, 19 nt, Artificial Sequence
  Description of Artificial Sequence: Synthetic oligonucleotide
  Sense strand starting at position 53 of SEQ ID NO: 1563568
ugaguaaaugcgggagaau

SEQ ID NO: 1820112 - RNA, 19 nt, Artificial Sequence
  Description of Artificial Sequence: Synthetic oligonucleotide
  Antisense strand to SEQ ID NO: 1820111
auucucccgcauuuacuca

SEQ ID NO: 1820113 - RNA, 19 nt, Artificial Sequence
  Description of Artificial Sequence: Synthetic oligonucleotide
  Sense strand starting at position 54 of SEQ ID NO: 1563568
gaguaaaugcgggagaauc

SEQ ID NO: 1820114 - RNA, 19 nt, Artificial Sequence
  Description of Artificial Sequence: Synthetic oligonucleotide
  Antisense strand to SEQ ID NO: 1820113
gauucucccgcauuuacuc

SEQ ID NO: 1820115 - RNA, 19 nt, Artificial Sequence
  Description of Artificial Sequence: Synthetic oligonucleotide
  Sense strand starting at position 65 of SEQ ID NO: 1563568
ggagaaucgugaucaacua

SEQ ID NO: 1820116 - RNA, 19 nt, Artificial Sequence
  Description of Artificial Sequence: Synthetic oligonucleotide
  Antisense strand to SEQ ID NO: 1820115
uaguugaucacgauucucc

SEQ ID NO: 1820117 - RNA, 19 nt, Artificial Sequence
  Description of Artificial Sequence: Synthetic oligonucleotide
  Sense strand starting at position 96 of SEQ ID NO: 1563568
ugggaagauuacgcuaaag

SEQ ID NO: 1820118 - RNA, 19 nt, Artificial Sequence
  Description of Artificial Sequence: Synthetic oligonucleotide
  Antisense strand to SEQ ID NO: 1820117
cuuuagcguaaucuuccca

SEQ ID NO: 1820119 - RNA, 19 nt, Artificial Sequence
  Description of Artificial Sequence: Synthetic oligonucleotide
  Sense strand starting at position 218 of SEQ ID NO: 1563568
uaugaagauccuggugaca

SEQ ID NO: 1820120 - RNA, 19 nt, Artificial Sequence
  Description of Artificial Sequence: Synthetic oligonucleotide
  Antisense strand to SEQ ID NO: 1820119
ugucaccaggaucuucaua

SEQ ID NO: 1820121 - RNA, 19 nt, Artificial Sequence
  Description of Artificial Sequence: Synthetic oligonucleotide
  Sense strand starting at position 319 of SEQ ID NO: 1563568
gaugacucugaagguaauu

SEQ ID NO: 1820122 - RNA, 19 nt, Artificial Sequence
  Description of Artificial Sequence: Synthetic oligonucleotide
  Antisense strand to SEQ ID NO: 1820121
aauuaccuucagagucauc

SEQ ID NO: 1820123 - RNA, 19 nt, Artificial Sequence
  Description of Artificial Sequence: Synthetic oligonucleotide
  Sense strand starting at position 414 of SEQ ID NO: 1563568
augaauacauugcucuaga

SEQ ID NO: 1820124 - RNA, 19 nt, Artificial Sequence
  Description of Artificial Sequence: Synthetic oligonucleotide
  Antisense strand to SEQ ID NO: 1820123
ucuagagcaauguauucau

SEQ ID NO: 1820125 - RNA, 19 nt, Artificial Sequence
  Description of Artificial Sequence: Synthetic oligonucleotide
  Sense strand starting at position 415 of SEQ ID NO: 1563568
ugaauacauugcucuagaa

SEQ ID NO: 1820126 - RNA, 19 nt, Artificial Sequence
  Description of Artificial Sequence: Synthetic oligonucleotide
  Antisense strand to SEQ ID NO: 1820125
uucuagagcaauguauuca

SEQ ID NO: 1820127 - RNA, 19 nt, Artificial Sequence
  Description of Artificial Sequence: Synthetic oligonucleotide
  Sense strand starting at position 434 of SEQ ID NO: 1563568
gcucacugugcugauauuu

SEQ ID NO: 1820128 - RNA, 19 nt, Artificial Sequence
  Description of Artificial Sequence: Synthetic oligonucleotide
  Antisense strand to SEQ ID NO: 1820127
aaauaucagcacagugagc

SEQ ID NO: 1820129 - RNA, 19 nt, Artificial Sequence
  Description of Artificial Sequence: Synthetic oligonucleotide
  Sense strand starting at position 493 of SEQ ID NO: 1563568
gggaaugaguauagaugga

SEQ ID NO: 1820130 - RNA, 19 nt, Artificial Sequence
  Description of Artificial Sequence: Synthetic oligonucleotide
  Antisense strand to SEQ ID NO: 1820129
uccaucuauacucauuccc

SEQ ID NO: 1820131 - RNA, 19 nt, Artificial Sequence
  Description of Artificial Sequence: Synthetic oligonucleotide
  Sense strand starting at position 654 of SEQ ID NO: 1563568
gcagcauauuauuuaugua

SEQ ID NO: 1820132 - RNA, 19 nt, Artificial Sequence
  Description of Artificial Sequence: Synthetic oligonucleotide
  Antisense strand to SEQ ID NO: 1820131
uacauaaauaauaugcugc

SEQ ID NO: 1820133 - RNA, 19 nt, Artificial Sequence
  Description of Artificial Sequence: Synthetic oligonucleotide
  Sense strand starting at position 731 of SEQ ID NO: 1563568
gugcuuucucaagaaauag

SEQ ID NO: 1820134 - RNA, 19 nt, Artificial Sequence
  Description of Artificial Sequence: Synthetic oligonucleotide
  Antisense strand to SEQ ID NO: 1820133
cuauuucuugagaaagcac

SEQ ID NO: 1820135 - RNA, 19 nt, Artificial Sequence
  Description of Artificial Sequence: Synthetic oligonucleotide
  Sense strand starting at position 1040 of SEQ ID NO: 1563568
ggaaguguccaggauaggu

SEQ ID NO: 1820136 - RNA, 19 nt, Artificial Sequence
  Description of Artificial Sequence: Synthetic oligonucleotide
  Antisense strand to SEQ ID NO: 1820135
accuauccuggacacuucc

SEQ ID NO: 1820137 - RNA, 19 nt, Artificial Sequence
  Description of Artificial Sequence: Synthetic oligonucleotide
  Sense strand starting at position 1072 of SEQ ID NO: 1563568
aggagacuuuaguuauauc

SEQ ID NO: 1820138 - RNA, 19 nt, Artificial Sequence
  Description of Artificial Sequence: Synthetic oligonucleotide
  Antisense strand to SEQ ID NO: 1820137
gauauaacuaaagucuccu

SEQ ID NO: 1820139 - RNA, 19 nt, Artificial Sequence
  Description of Artificial Sequence: Synthetic oligonucleotide
  Sense strand starting at position 1511 of SEQ ID NO: 1563568
ccuagcaguggugacuaaa

SEQ ID NO: 1820140 - RNA, 19 nt, Artificial Sequence
  Description of Artificial Sequence: Synthetic oligonucleotide
  Antisense strand to SEQ ID NO: 1820139
uuuagucaccacugcuagg

SEQ ID NO: 1820141 - RNA, 19 nt, Artificial Sequence
  Description of Artificial Sequence: Synthetic oligonucleotide
  Sense strand starting at position 2579 of SEQ ID NO: 1563568
cggguugaugcaaguagua

SEQ ID NO: 1820142 - RNA, 19 nt, Artificial Sequence
  Description of Artificial Sequence: Synthetic oligonucleotide
  Antisense strand to SEQ ID NO: 1820141
uacuacuugcaucaacccg

SEQ ID NO: 1820143 - RNA, 19 nt, Artificial Sequence
  Description of Artificial Sequence: Synthetic oligonucleotide
  Sense strand starting at position 2767 of SEQ ID NO: 1563568
aguguauuugugggaggug

SEQ ID NO: 1820144 - RNA, 19 nt, Artificial Sequence
  Description of Artificial Sequence: Synthetic oligonucleotide
  Antisense strand to SEQ ID NO: 1820143
caccucccacaaauacacu

SEQ ID NO: 1820145 - RNA, 19 nt, Artificial Sequence
  Description of Artificial Sequence: Synthetic oligonucleotide
  Sense strand starting at position 2770 of SEQ ID NO: 1563568
guauuugugggagguguua

SEQ ID NO: 1820146 - RNA, 19 nt, Artificial Sequence
  Description of Artificial Sequence: Synthetic oligonucleotide
  Antisense strand to SEQ ID NO: 1820145
uaacaccucccacaaauac

SEQ ID NO: 1820147 - RNA, 19 nt, Artificial Sequence
  Description of Artificial Sequence: Synthetic oligonucleotide
  Sense strand starting at position 2900 of SEQ ID NO: 1563568
ccuuuaaaggguuaaugua

SEQ ID NO: 1820148 - RNA, 19 nt, Artificial Sequence
  Description of Artificial Sequence: Synthetic oligonucleotide
  Antisense strand to SEQ ID NO: 1820147
uacauuaacccuuuaaagg

SEQ ID NO: 1820149 - RNA, 19 nt, Artificial Sequence
  Description of Artificial Sequence: Synthetic oligonucleotide
  Sense strand starting at position 2908 of SEQ ID NO: 1563568
ggguuaauguaaguuggaa

SEQ ID NO: 1820150 - RNA, 19 nt, Artificial Sequence
  Description of Artificial Sequence: Synthetic oligonucleotide
  Antisense strand to SEQ ID NO: 1820149
uuccaacuuacauuaaccc

SEQ ID NO: 1820151 - RNA, 19 nt, Artificial Sequence
  Description of Artificial Sequence: Synthetic oligonucleotide
  Sense strand starting at position 2921 of SEQ ID NO: 1563568
uuggaaaucgguuaaguuu

SEQ ID NO: 1820152 - RNA, 19 nt, Artificial Sequence
  Description of Artificial Sequence: Synthetic oligonucleotide
  Antisense strand to SEQ ID NO: 1820151
aaacuuaaccgauuuccaa

SEQ ID NO: 1820153 - RNA, 19 nt, Artificial Sequence
  Description of Artificial Sequence: Synthetic oligonucleotide
  Sense strand starting at position 2941 of SEQ ID NO: 1563568
uagcaugcccucguguuua

SEQ ID NO: 1820154 - RNA, 19 nt, Artificial Sequence
  Description of Artificial Sequence: Synthetic oligonucleotide
  Antisense strand to SEQ ID NO: 1820153
uaaacacgagggcaugcua

SEQ ID NO: 1820155 - RNA, 19 nt, Artificial Sequence
  Description of Artificial Sequence: Synthetic oligonucleotide
  Sense strand starting at position 2975 of SEQ ID NO: 1563568
acuuguuaggcccacaaca

SEQ ID NO: 1820156 - RNA, 19 nt, Artificial Sequence
  Description of Artificial Sequence: Synthetic oligonucleotide
  Antisense strand to SEQ ID NO: 1820155
uguugugggccuaacaagu

SEQ ID NO: 1820157 - RNA, 19 nt, Artificial Sequence
  Description of Artificial Sequence: Synthetic oligonucleotide
  Sense strand starting at position 3078 of SEQ ID NO: 1563568
acuauugauguguacuuaa

SEQ ID NO: 1820158 - RNA, 19 nt, Artificial Sequence
  Description of Artificial Sequence: Synthetic oligonucleotide
  Antisense strand to SEQ ID NO: 1820157
uuaaguacacaucaauagu

SEQ ID NO: 1820159 - RNA, 19 nt, Artificial Sequence
  Description of Artificial Sequence: Synthetic oligonucleotide
  Sense strand starting at position 3089 of SEQ ID NO: 1563568
guacuuaauuggguauaca

SEQ ID NO: 1820160 - RNA, 19 nt, Artificial Sequence
  Description of Artificial Sequence: Synthetic oligonucleotide
  Antisense strand to SEQ ID NO: 1820159
uguauacccaauuaaguac

SEQ ID NO: 1820161 - RNA, 19 nt, Artificial Sequence
  Description of Artificial Sequence: Synthetic oligonucleotide
  Sense strand starting at position 3101 of SEQ ID NO: 1563568
guauacaaauuccuuggau

SEQ ID NO: 1820162 - RNA, 19 nt, Artificial Sequence
  Description of Artificial Sequence: Synthetic oligonucleotide
  Antisense strand to SEQ ID NO: 1820161
auccaaggaauuuguauac

SEQ ID NO: 1820163 - RNA, 19 nt, Artificial Sequence
  Description of Artificial Sequence: Synthetic oligonucleotide
  Sense strand starting at position 3282 of SEQ ID NO: 1563568
ugaguugucagguacuuaa

SEQ ID NO: 1820164 - RNA, 19 nt, Artificial Sequence
  Description of Artificial Sequence: Synthetic oligonucleotide
  Antisense strand to SEQ ID NO: 1820163
uuaaguaccugacaacuca

SEQ ID NO: 1820165 - RNA, 19 nt, Artificial Sequence
  Description of Artificial Sequence: Synthetic oligonucleotide
  Sense strand starting at position 3289 of SEQ ID NO: 1563568
ucagguacuuaacugaaua

SEQ ID NO: 1820166 - RNA, 19 nt, Artificial Sequence
  Description of Artificial Sequence: Synthetic oligonucleotide
  Antisense strand to SEQ ID NO: 1820165
uauucaguuaaguaccuga

SEQ ID NO: 1820167 - RNA, 19 nt, Artificial Sequence
  Description of Artificial Sequence: Synthetic oligonucleotide
  Sense strand starting at position 3341 of SEQ ID NO: 1563568
cggaauaacuuauuguaaa

SEQ ID NO: 1820168 - RNA, 19 nt, Artificial Sequence
  Description of Artificial Sequence: Synthetic oligonucleotide
  Antisense strand to SEQ ID NO: 1820167
uuuacaauaaguuauuccg

SEQ ID NO: 1820169 - RNA, 19 nt, Artificial Sequence
  Description of Artificial Sequence: Synthetic oligonucleotide
  Sense strand starting at position 3393 of SEQ ID NO: 1563568
ccuuaagauugauuguaau

SEQ ID NO: 1820170 - RNA, 19 nt, Artificial Sequence
  Description of Artificial Sequence: Synthetic oligonucleotide
  Antisense strand to SEQ ID NO: 1820169
auuacaaucaaucuuaagg

SEQ ID NO: 1820171 - RNA, 19 nt, Artificial Sequence
  Description of Artificial Sequence: Synthetic oligonucleotide
  Sense strand starting at position 3543 of SEQ ID NO: 1563568
aguggauucucagugaaua

SEQ ID NO: 1820172 - RNA, 19 nt, Artificial Sequence
  Description of Artificial Sequence: Synthetic oligonucleotide
  Antisense strand to SEQ ID NO: 1820171
uauucacugagaauccacu

SEQ ID NO: 1820173 - RNA, 19 nt, Artificial Sequence
  Description of Artificial Sequence: Synthetic oligonucleotide
  Sense strand starting at position 3589 of SEQ ID NO: 1563568
ugugaaaggaguuaagcuu

SEQ ID NO: 1820174 - RNA, 19 nt, Artificial Sequence
  Description of Artificial Sequence: Synthetic oligonucleotide
  Antisense strand to SEQ ID NO: 1820173
aagcuuaacuccuuucaca

SEQ ID NO: 1820175 - RNA, 19 nt, Artificial Sequence
  Description of Artificial Sequence: Synthetic oligonucleotide
  Sense strand starting at position 3605 of SEQ ID NO: 1563568
cuucuacaucuugacuagu

SEQ ID NO: 1820176 - RNA, 19 nt, Artificial Sequence
  Description of Artificial Sequence: Synthetic oligonucleotide
  Antisense strand to SEQ ID NO: 1820175
acuagucaagauguagaag

SEQ ID NO: 1820177 - RNA, 19 nt, Artificial Sequence
  Description of Artificial Sequence: Synthetic oligonucleotide
  Sense strand starting at position 3608 of SEQ ID NO: 1563568
cuacaucuugacuaguacu

SEQ ID NO: 1820178 - RNA, 19 nt, Artificial Sequence
  Description of Artificial Sequence: Synthetic oligonucleotide
  Antisense strand to SEQ ID NO: 1820177
aguacuagucaagauguag

SEQ ID NO: 1820179 - RNA, 19 nt, Artificial Sequence
  Description of Artificial Sequence: Synthetic oligonucleotide
  Sense strand starting at position 3618 of SEQ ID NO: 1563568
acuaguacucagcagaggu

SEQ ID NO: 1820180 - RNA, 19 nt, Artificial Sequence
  Description of Artificial Sequence: Synthetic oligonucleotide
  Antisense strand to SEQ ID NO: 1820179
accucugcugaguacuagu

SEQ ID NO: 1820181 - RNA, 19 nt, Artificial Sequence
  Description of Artificial Sequence: Synthetic oligonucleotide
  Sense strand starting at position 3661 of SEQ ID NO: 1563568
gauuauacaucaguugaug

SEQ ID NO: 1820182 - RNA, 19 nt, Artificial Sequence
  Description of Artificial Sequence: Synthetic oligonucleotide
  Antisense strand to SEQ ID NO: 1820181
caucaacugauguauaauc

SEQ ID NO: 1820183 - RNA, 19 nt, Artificial Sequence
  Description of Artificial Sequence: Synthetic oligonucleotide
  Sense strand starting at position 3763 of SEQ ID NO: 1563568
aacuuuguuccagagaguu

SEQ ID NO: 1820184 - RNA, 19 nt, Artificial Sequence
  Description of Artificial Sequence: Synthetic oligonucleotide
  Antisense strand to SEQ ID NO: 1820183
aacucucuggaacaaaguu

SEQ ID NO: 1820185 - RNA, 19 nt, Artificial Sequence
  Description of Artificial Sequence: Synthetic oligonucleotide
  Sense strand starting at position 268 of SEQ ID NO: 1563569
ggagccucaccugacuuau

SEQ ID NO: 1820186 - RNA, 19 nt, Artificial Sequence
  Description of Artificial Sequence: Synthetic oligonucleotide
  Antisense strand to SEQ ID NO: 1820185
auaagucaggugaggcucc

SEQ ID NO: 1820187 - RNA, 19 nt, Artificial Sequence
  Description of Artificial Sequence: Synthetic oligonucleotide
  Sense strand starting at position 280 of SEQ ID NO: 1563569
gacuuauuguguguauaca

SEQ ID NO: 1820188 - RNA, 19 nt, Artificial Sequence
  Description of Artificial Sequence: Synthetic oligonucleotide
  Antisense strand to SEQ ID NO: 1820187
uguauacacacaauaaguc

SEQ ID NO: 1820189 - RNA, 19 nt, Artificial Sequence
  Description of Artificial Sequence: Synthetic oligonucleotide
  Sense strand starting at position 424 of SEQ ID NO: 1563569
cugaauucccaagguugaa

SEQ ID NO: 1820190 - RNA, 19 nt, Artificial Sequence
  Description of Artificial Sequence: Synthetic oligonucleotide
  Antisense strand to SEQ ID NO: 1820189
uucaaccuugggaauucag

SEQ ID NO: 1820191 - RNA, 19 nt, Artificial Sequence
  Description of Artificial Sequence: Synthetic oligonucleotide
  Sense strand starting at position 459 of SEQ ID NO: 1563569
ggaugacccugaccuuuaa

SEQ ID NO: 1820192 - RNA, 19 nt, Artificial Sequence
  Description of Artificial Sequence: Synthetic oligonucleotide
  Antisense strand to SEQ ID NO: 1820191
uuaaaggucagggucaucc

SEQ ID NO: 1820193 - RNA, 19 nt, Artificial Sequence
  Description of Artificial Sequence: Synthetic oligonucleotide
  Sense strand starting at position 480 of SEQ ID NO: 1563569
ggaacuuccuguccucauu

SEQ ID NO: 1820194 - RNA, 19 nt, Artificial Sequence
  Description of Artificial Sequence: Synthetic oligonucleotide
  Antisense strand to SEQ ID NO: 1820193
aaugaggacaggaaguucc

SEQ ID NO: 1820195 - RNA, 19 nt, Artificial Sequence
  Description of Artificial Sequence: Synthetic oligonucleotide
  Sense strand starting at position 755 of SEQ ID NO: 1563569
cuccaucauuucuagagag

SEQ ID NO: 1820196 - RNA, 19 nt, Artificial Sequence
  Description of Artificial Sequence: Synthetic oligonucleotide
  Antisense strand to SEQ ID NO: 1820195
cucucuagaaaugauggag

SEQ ID NO: 1820197 - RNA, 19 nt, Artificial Sequence
  Description of Artificial Sequence: Synthetic oligonucleotide
  Sense strand starting at position 813 of SEQ ID NO: 1563569
aggguuucuugggcacaaa

SEQ ID NO: 1820198 - RNA, 19 nt, Artificial Sequence
  Description of Artificial Sequence: Synthetic oligonucleotide
  Antisense strand to SEQ ID NO: 1820197
uuugugcccaagaaacccu

SEQ ID NO: 1820199 - RNA, 19 nt, Artificial Sequence
  Description of Artificial Sequence: Synthetic oligonucleotide
  Sense strand starting at position 854 of SEQ ID NO: 1563569
ucuccagcuuucuugggaa

SEQ ID NO: 1820200 - RNA, 19 nt, Artificial Sequence
  Description of Artificial Sequence: Synthetic oligonucleotide
  Antisense strand to SEQ ID NO: 1820199
uucccaagaaagcuggaga

SEQ ID NO: 1820201 - RNA, 19 nt, Artificial Sequence
  Description of Artificial Sequence: Synthetic oligonucleotide
  Sense strand starting at position 960 of SEQ ID NO: 1563569
agggcugagcucgagacua

SEQ ID NO: 1820202 - RNA, 19 nt, Artificial Sequence
  Description of Artificial Sequence: Synthetic oligonucleotide
  Antisense strand to SEQ ID NO: 1820201
uagucucgagcucagcccu

SEQ ID NO: 1820203 - RNA, 19 nt, Artificial Sequence
  Description of Artificial Sequence: Synthetic oligonucleotide
  Sense strand starting at position 976 of SEQ ID NO: 1563569
cuagguuacucuccaguaa

SEQ ID NO: 1820204 - RNA, 19 nt, Artificial Sequence
  Description of Artificial Sequence: Synthetic oligonucleotide
  Antisense strand to SEQ ID NO: 1820203
uuacuggagaguaaccuag

SEQ ID NO: 1820205 - RNA, 19 nt, Artificial Sequence
  Description of Artificial Sequence: Synthetic oligonucleotide
  Sense strand starting at position 980 of SEQ ID NO: 1563569
guuacucuccaguaaccua

SEQ ID NO: 1820206 - RNA, 19 nt, Artificial Sequence
  Description of Artificial Sequence: Synthetic oligonucleotide
  Antisense strand to SEQ ID NO: 1820205
uagguuacuggagaguaac

SEQ ID NO: 1820207 - RNA, 19 nt, Artificial Sequence
  Description of Artificial Sequence: Synthetic oligonucleotide
  Sense strand starting at position 1041 of SEQ ID NO: 1563569
gaccaucuguuuguguaua

SEQ ID NO: 1820208 - RNA, 19 nt, Artificial Sequence
  Description of Artificial Sequence: Synthetic oligonucleotide
  Antisense strand to SEQ ID NO: 1820207
uauacacaaacagaugguc

SEQ ID NO: 1820209 - RNA, 19 nt, Artificial Sequence
  Description of Artificial Sequence: Synthetic oligonucleotide
  Sense strand starting at position 1043 of SEQ ID NO: 1563569
ccaucuguuuguguauaag

SEQ ID NO: 1820210 - RNA, 19 nt, Artificial Sequence
  Description of Artificial Sequence: Synthetic oligonucleotide
  Antisense strand to SEQ ID NO: 1820209
cuuauacacaaacagaugg

SEQ ID NO: 1820211 - RNA, 19 nt, Artificial Sequence
  Description of Artificial Sequence: Synthetic oligonucleotide
  Sense strand starting at position 1117 of SEQ ID NO: 1563569
agaugcaggcuccauaaau

SEQ ID NO: 1820212 - RNA, 19 nt, Artificial Sequence
  Description of Artificial Sequence: Synthetic oligonucleotide
  Antisense strand to SEQ ID NO: 1820211
auuuauggagccugcaucu

SEQ ID NO: 1820213 - RNA, 19 nt, Artificial Sequence
  Description of Artificial Sequence: Synthetic oligonucleotide
  Sense strand starting at position 1329 of SEQ ID NO: 1563569
acauaaaugcaaugugauc

SEQ ID NO: 1820214 - RNA, 19 nt, Artificial Sequence
  Description of Artificial Sequence: Synthetic oligonucleotide
  Antisense strand to SEQ ID NO: 1820213
gaucacauugcauuuaugu

SEQ ID NO: 1820215 - RNA, 19 nt, Artificial Sequence
  Description of Artificial Sequence: Synthetic oligonucleotide
  Sense strand starting at position 1334 of SEQ ID NO: 1563569
aaugcaaugugaucuggau

SEQ ID NO: 1820216 - RNA, 19 nt, Artificial Sequence
  Description of Artificial Sequence: Synthetic oligonucleotide
  Antisense strand to SEQ ID NO: 1820215
auccagaucacauugcauu

SEQ ID NO: 1820217 - RNA, 19 nt, Artificial Sequence
  Description of Artificial Sequence: Synthetic oligonucleotide
  Sense strand starting at position 1355 of SEQ ID NO: 1563569
cuuugugugcuauagaaau

SEQ ID NO: 1820218 - RNA, 19 nt, Artificial Sequence
  Description of Artificial Sequence: Synthetic oligonucleotide
  Antisense strand to SEQ ID NO: 1820217
auuucuauagcacacaaag

SEQ ID NO: 1820219 - RNA, 19 nt, Artificial Sequence
  Description of Artificial Sequence: Synthetic oligonucleotide
  Sense strand starting at position 1361 of SEQ ID NO: 1563569
gugcuauagaaaugguauu

SEQ ID NO: 1820220 - RNA, 19 nt, Artificial Sequence
  Description of Artificial Sequence: Synthetic oligonucleotide
  Antisense strand to SEQ ID NO: 1820219
aauaccauuucuauagcac

SEQ ID NO: 1820221 - RNA, 19 nt, Artificial Sequence
  Description of Artificial Sequence: Synthetic oligonucleotide
  Sense strand starting at position 1388 of SEQ ID NO: 1563569
auaucauagcaugaaacgu

SEQ ID NO: 1820222 - RNA, 19 nt, Artificial Sequence
  Description of Artificial Sequence: Synthetic oligonucleotide
  Antisense strand to SEQ ID NO: 1820221
acguuucaugcuaugauau

SEQ ID NO: 1820223 - RNA, 19 nt, Artificial Sequence
  Description of Artificial Sequence: Synthetic oligonucleotide
  Sense strand starting at position 1496 of SEQ ID NO: 1563569
auugaucucuggucucaua

SEQ ID NO: 1820224 - RNA, 19 nt, Artificial Sequence
  Description of Artificial Sequence: Synthetic oligonucleotide
  Antisense strand to SEQ ID NO: 1820223
uaugagaccagagaucaau

SEQ ID NO: 1820225 - RNA, 19 nt, Artificial Sequence
  Description of Artificial Sequence: Synthetic oligonucleotide
  Sense strand starting at position 1752 of SEQ ID NO: 1563569
gguauagacacguaucuac

SEQ ID NO: 1820226 - RNA, 19 nt, Artificial Sequence
  Description of Artificial Sequence: Synthetic oligonucleotide
  Antisense strand to SEQ ID NO: 1820225
guagauacgugucuauacc

SEQ ID NO: 1820227 - RNA, 19 nt, Artificial Sequence
  Description of Artificial Sequence: Synthetic oligonucleotide
  Sense strand starting at position 2083 of SEQ ID NO: 1563569
acaguacuuucuguuucua

SEQ ID NO: 1820228 - RNA, 19 nt, Artificial Sequence
  Description of Artificial Sequence: Synthetic oligonucleotide
  Antisense strand to SEQ ID NO: 1820227
uagaaacagaaaguacugu

SEQ ID NO: 1820229 - RNA, 19 nt, Artificial Sequence
  Description of Artificial Sequence: Synthetic oligonucleotide
  Sense strand starting at position 2136 of SEQ ID NO: 1563569
ucugcuacucuguaagcaa

SEQ ID NO: 1820230 - RNA, 19 nt, Artificial Sequence
  Description of Artificial Sequence: Synthetic oligonucleotide
  Antisense strand to SEQ ID NO: 1820229
uugcuuacagaguagcaga

SEQ ID NO: 1820231 - RNA, 19 nt, Artificial Sequence
  Description of Artificial Sequence: Synthetic oligonucleotide
  Sense strand starting at position 2191 of SEQ ID NO: 1563569
ugagaacugcucuggcuca

SEQ ID NO: 1820232 - RNA, 19 nt, Artificial Sequence
  Description of Artificial Sequence: Synthetic oligonucleotide
  Antisense strand to SEQ ID NO: 1820231
ugagccagagcaguucuca

SEQ ID NO: 1820233 - RNA, 19 nt, Artificial Sequence
  Description of Artificial Sequence: Synthetic oligonucleotide
  Sense strand starting at position 2196 of SEQ ID NO: 1563569
acugcucuggcucaugaau

SEQ ID NO: 1820234 - RNA, 19 nt, Artificial Sequence
  Description of Artificial Sequence: Synthetic oligonucleotide
  Antisense strand to SEQ ID NO: 1820233
auucaugagccagagcagu

SEQ ID NO: 1820235 - RNA, 19 nt, Artificial Sequence
  Description of Artificial Sequence: Synthetic oligonucleotide
  Sense strand starting at position 2362 of SEQ ID NO: 1563569
ggauucucuggagagcgua

SEQ ID NO: 1820236 - RNA, 19 nt, Artificial Sequence
  Description of Artificial Sequence: Synthetic oligonucleotide
  Antisense strand to SEQ ID NO: 1820235
uacgcucuccagagaaucc

SEQ ID NO: 1820237 - RNA, 19 nt, Artificial Sequence
  Description of Artificial Sequence: Synthetic oligonucleotide
  Sense strand starting at position 2570 of SEQ ID NO: 1563569
ugauuagaccacugugaug

SEQ ID NO: 1820238 - RNA, 19 nt, Artificial Sequence
  Description of Artificial Sequence: Synthetic oligonucleotide
  Antisense strand to SEQ ID NO: 1820237
caucacaguggucuaauca

SEQ ID NO: 1820239 - RNA, 19 nt, Artificial Sequence
  Description of Artificial Sequence: Synthetic oligonucleotide
  Sense strand starting at position 2579 of SEQ ID NO: 1563569
cacugugauggucagguuu

SEQ ID NO: 1820240 - RNA, 19 nt, Artificial Sequence
  Description of Artificial Sequence: Synthetic oligonucleotide
  Antisense strand to SEQ ID NO: 1820239
aaaccugaccaucacagug

SEQ ID NO: 1820241 - RNA, 19 nt, Artificial Sequence
  Description of Artificial Sequence: Synthetic oligonucleotide
  Sense strand starting at position 2719 of SEQ ID NO: 1563569
gagacccauccucgaugau

SEQ ID NO: 1820242 - RNA, 19 nt, Artificial Sequence
  Description of Artificial Sequence: Synthetic oligonucleotide
  Antisense strand to SEQ ID NO: 1820241
aucaucgaggaugggucuc

SEQ ID NO: 1820243 - RNA, 19 nt, Artificial Sequence
  Description of Artificial Sequence: Synthetic oligonucleotide
  Sense strand starting at position 2738 of SEQ ID NO: 1563569
gugagugggccucacacaa

SEQ ID NO: 1820244 - RNA, 19 nt, Artificial Sequence
  Description of Artificial Sequence: Synthetic oligonucleotide
  Antisense strand to SEQ ID NO: 1820243
uugugugaggcccacucac

SEQ ID NO: 1820245 - RNA, 19 nt, Artificial Sequence
  Description of Artificial Sequence: Synthetic oligonucleotide
  Sense strand starting at position 2782 of SEQ ID NO: 1563569
gacugagguuucccaaagu

SEQ ID NO: 1820246 - RNA, 19 nt, Artificial Sequence
  Description of Artificial Sequence: Synthetic oligonucleotide
  Antisense strand to SEQ ID NO: 1820245
acuuugggaaaccucaguc

SEQ ID NO: 1820247 - RNA, 19 nt, Artificial Sequence
  Description of Artificial Sequence: Synthetic oligonucleotide
  Sense strand starting at position 2828 of SEQ ID NO: 1563569
ugucaacucuuccuugagu

SEQ ID NO: 1820248 - RNA, 19 nt, Artificial Sequence
  Description of Artificial Sequence: Synthetic oligonucleotide
  Antisense strand to SEQ ID NO: 1820247
acucaaggaagaguugaca

SEQ ID NO: 1820249 - RNA, 19 nt, Artificial Sequence
  Description of Artificial Sequence: Synthetic oligonucleotide
  Sense strand starting at position 2829 of SEQ ID NO: 1563569
gucaacucuuccuugaguu

SEQ ID NO: 1820250 - RNA, 19 nt, Artificial Sequence
  Description of Artificial Sequence: Synthetic oligonucleotide
  Antisense strand to SEQ ID NO: 1820249
aacucaaggaagaguugac

SEQ ID NO: 1820251 - RNA, 19 nt, Artificial Sequence
  Description of Artificial Sequence: Synthetic oligonucleotide
  Sense strand starting at position 2830 of SEQ ID NO: 1563569
ucaacucuuccuugaguug

SEQ ID NO: 1820252 - RNA, 19 nt, Artificial Sequence
  Description of Artificial Sequence: Synthetic oligonucleotide
  Antisense strand to SEQ ID NO: 1820251
caacucaaggaagaguuga

SEQ ID NO: 1820253 - RNA, 19 nt, Artificial Sequence
  Description of Artificial Sequence: Synthetic oligonucleotide
  Sense strand starting at position 2933 of SEQ ID NO: 1563569
acuugugcauaugcagaua

SEQ ID NO: 1820254 - RNA, 19 nt, Artificial Sequence
  Description of Artificial Sequence: Synthetic oligonucleotide
  Antisense strand to SEQ ID NO: 1820253
uaucugcauaugcacaagu

SEQ ID NO: 1820255 - RNA, 19 nt, Artificial Sequence
  Description of Artificial Sequence: Synthetic oligonucleotide
  Sense strand starting at position 2936 of SEQ ID NO: 1563569
ugugcauaugcagauauau

SEQ ID NO: 1820256 - RNA, 19 nt, Artificial Sequence
  Description of Artificial Sequence: Synthetic oligonucleotide
  Antisense strand to SEQ ID NO: 1820255
auauaucugcauaugcaca

SEQ ID NO: 1820257 - RNA, 19 nt, Artificial Sequence
  Description of Artificial Sequence: Synthetic oligonucleotide
  Sense strand starting at position 3051 of SEQ ID NO: 1563569
uacaacuaccuguggugaa

SEQ ID NO: 1820258 - RNA, 19 nt, Artificial Sequence
  Description of Artificial Sequence: Synthetic oligonucleotide
  Antisense strand to SEQ ID NO: 1820257
uucaccacagguaguugua

SEQ ID NO: 1820259 - RNA, 19 nt, Artificial Sequence
  Description of Artificial Sequence: Synthetic oligonucleotide
  Sense strand starting at position 3711 of SEQ ID NO: 1563569
cugcauauccuguauucca

SEQ ID NO: 1820260 - RNA, 19 nt, Artificial Sequence
  Description of Artificial Sequence: Synthetic oligonucleotide
  Antisense strand to SEQ ID NO: 1820259
uggaauacaggauaugcag

SEQ ID NO: 1820261 - RNA, 19 nt, Artificial Sequence
  Description of Artificial Sequence: Synthetic oligonucleotide
  Sense strand starting at position 3917 of SEQ ID NO: 1563569
ccagauuucugucucgcua

SEQ ID NO: 1820262 - RNA, 19 nt, Artificial Sequence
  Description of Artificial Sequence: Synthetic oligonucleotide
  Antisense strand to SEQ ID NO: 1820261
uagcgagacagaaaucugg

SEQ ID NO: 1820263 - RNA, 19 nt, Artificial Sequence
  Description of Artificial Sequence: Synthetic oligonucleotide
  Sense strand starting at position 3921 of SEQ ID NO: 1563569
auuucugucucgcuaucaa

SEQ ID NO: 1820264 - RNA, 19 nt, Artificial Sequence
  Description of Artificial Sequence: Synthetic oligonucleotide
  Antisense strand to SEQ ID NO: 1820263
uugauagcgagacagaaau

SEQ ID NO: 1820265 - RNA, 19 nt, Artificial Sequence
  Description of Artificial Sequence: Synthetic oligonucleotide
  Sense strand starting at position 217 of SEQ ID NO: 1563570
ggaucaauccaccgucuuu

SEQ ID NO: 1820266 - RNA, 19 nt, Artificial Sequence
  Description of Artificial Sequence: Synthetic oligonucleotide
  Antisense strand to SEQ ID NO: 1820265
aaagacgguggauugaucc

SEQ ID NO: 1820267 - RNA, 19 nt, Artificial Sequence
  Description of Artificial Sequence: Synthetic oligonucleotide
  Sense strand starting at position 309 of SEQ ID NO: 1563570
agcagaaggcuuggcauua

SEQ ID NO: 1820268 - RNA, 19 nt, Artificial Sequence
  Description of Artificial Sequence: Synthetic oligonucleotide
  Antisense strand to SEQ ID NO: 1820267
uaaugccaagccuucugcu

SEQ ID NO: 1820269 - RNA, 19 nt, Artificial Sequence
  Description of Artificial Sequence: Synthetic oligonucleotide
  Sense strand starting at position 397 of SEQ ID NO: 1563570
uuugaaucguggcuccaua

SEQ ID NO: 1820270 - RNA, 19 nt, Artificial Sequence
  Description of Artificial Sequence: Synthetic oligonucleotide
  Antisense strand to SEQ ID NO: 1820269
uauggagccacgauucaaa

SEQ ID NO: 1820271 - RNA, 19 nt, Artificial Sequence
  Description of Artificial Sequence: Synthetic oligonucleotide
  Sense strand starting at position 508 of SEQ ID NO: 1563570
guuccugaagcugaaauga

SEQ ID NO: 1820272 - RNA, 19 nt, Artificial Sequence
  Description of Artificial Sequence: Synthetic oligonucleotide
  Antisense strand to SEQ ID NO: 1820271
ucauuucagcuucaggaac

SEQ ID NO: 1820273 - RNA, 19 nt, Artificial Sequence
  Description of Artificial Sequence: Synthetic oligonucleotide
  Sense strand starting at position 599 of SEQ ID NO: 1563570
ucuucuguucuccaaacga

SEQ ID NO: 1820274 - RNA, 19 nt, Artificial Sequence
  Description of Artificial Sequence: Synthetic oligonucleotide
  Antisense strand to SEQ ID NO: 1820273
ucguuuggagaacagaaga

SEQ ID NO: 1820275 - RNA, 19 nt, Artificial Sequence
  Description of Artificial Sequence: Synthetic oligonucleotide
  Sense strand starting at position 645 of SEQ ID NO: 1563570
aaggauugcugccuugcaa

SEQ ID NO: 1820276 - RNA, 19 nt, Artificial Sequence
  Description of Artificial Sequence: Synthetic oligonucleotide
  Antisense strand to SEQ ID NO: 1820275
uugcaaggcagcaauccuu

SEQ ID NO: 1820277 - RNA, 19 nt, Artificial Sequence
  Description of Artificial Sequence: Synthetic oligonucleotide
  Sense strand starting at position 681 of SEQ ID NO: 1563570
gcgagugcucccucuccca

SEQ ID NO: 1820278 - RNA, 19 nt, Artificial Sequence
  Description of Artificial Sequence: Synthetic oligonucleotide
  Antisense strand to SEQ ID NO: 1820277
ugggagagggagcacucgc

SEQ ID NO: 1820279 - RNA, 19 nt, Artificial Sequence
  Description of Artificial Sequence: Synthetic oligonucleotide
  Sense strand starting at position 695 of SEQ ID NO: 1563570
ucccauuagccucagcaga

SEQ ID NO: 1820280 - RNA, 19 nt, Artificial Sequence
  Description of Artificial Sequence: Synthetic oligonucleotide
  Antisense strand to SEQ ID NO: 1820279
ucugcugaggcuaauggga

SEQ ID NO: 1820281 - RNA, 19 nt, Artificial Sequence
  Description of Artificial Sequence: Synthetic oligonucleotide
  Sense strand starting at position 1665 of SEQ ID NO: 1563570
ggcgagaagucggucggau

SEQ ID NO: 1820282 - RNA, 19 nt, Artificial Sequence
  Description of Artificial Sequence: Synthetic oligonucleotide
  Antisense strand to SEQ ID NO: 1820281
auccgaccgacuucucgcc

SEQ ID NO: 1820283 - RNA, 19 nt, Artificial Sequence
  Description of Artificial Sequence: Synthetic oligonucleotide
  Sense strand starting at position 1716 of SEQ ID NO: 1563570
gggaauagaucugggcucu

SEQ ID NO: 1820284 - RNA, 19 nt, Artificial Sequence
  Description of Artificial Sequence: Synthetic oligonucleotide
  Antisense strand to SEQ ID NO: 1820283
agagcccagaucuauuccc

SEQ ID NO: 1820285 - RNA, 19 nt, Artificial Sequence
  Description of Artificial Sequence: Synthetic oligonucleotide
  Sense strand starting at position 1884 of SEQ ID NO: 1563570
ccaguagucccagacgaug

SEQ ID NO: 1820286 - RNA, 19 nt, Artificial Sequence
  Description of Artificial Sequence: Synthetic oligonucleotide
  Antisense strand to SEQ ID NO: 1820285
caucgucugggacuacugg

SEQ ID NO: 1820287 - RNA, 19 nt, Artificial Sequence
  Description of Artificial Sequence: Synthetic oligonucleotide
  Sense strand starting at position 2092 of SEQ ID NO: 1563570
gggauuugcgccugaccac

SEQ ID NO: 1820288 - RNA, 19 nt, Artificial Sequence
  Description of Artificial Sequence: Synthetic oligonucleotide
  Antisense strand to SEQ ID NO: 1820287
guggucaggcgcaaauccc

SEQ ID NO: 1820289 - RNA, 19 nt, Artificial Sequence
  Description of Artificial Sequence: Synthetic oligonucleotide
  Sense strand starting at position 2333 of SEQ ID NO: 1563570
gggcuuggcucauagagga

SEQ ID NO: 1820290 - RNA, 19 nt, Artificial Sequence
  Description of Artificial Sequence: Synthetic oligonucleotide
  Antisense strand to SEQ ID NO: 1820289
uccucuaugagccaagccc

SEQ ID NO: 1820291 - RNA, 19 nt, Artificial Sequence
  Description of Artificial Sequence: Synthetic oligonucleotide
  Sense strand starting at position 2370 of SEQ ID NO: 1563570
ucacuuugcucagaccaga

SEQ ID NO: 1820292 - RNA, 19 nt, Artificial Sequence
  Description of Artificial Sequence: Synthetic oligonucleotide
  Antisense strand to SEQ ID NO: 1820291
ucuggucugagcaaaguga

SEQ ID NO: 1820293 - RNA, 19 nt, Artificial Sequence
  Description of Artificial Sequence: Synthetic oligonucleotide
  Sense strand starting at position 2373 of SEQ ID NO: 1563570
cuuugcucagaccagauau

SEQ ID NO: 1820294 - RNA, 19 nt, Artificial Sequence
  Description of Artificial Sequence: Synthetic oligonucleotide
  Antisense strand to SEQ ID NO: 1820293
auaucuggucugagcaaag

SEQ ID NO: 1820295 - RNA, 19 nt, Artificial Sequence
  Description of Artificial Sequence: Synthetic oligonucleotide
  Sense strand starting at position 2383 of SEQ ID NO: 1563570
accagauaucuuggucccu

SEQ ID NO: 1820296 - RNA, 19 nt, Artificial Sequence
  Description of Artificial Sequence: Synthetic oligonucleotide
  Antisense strand to SEQ ID NO: 1820295
agggaccaagauaucuggu

SEQ ID NO: 1820297 - RNA, 19 nt, Artificial Sequence
  Description of Artificial Sequence: Synthetic oligonucleotide
  Sense strand starting at position 2384 of SEQ ID NO: 1563570
ccagauaucuuggucccuu

SEQ ID NO: 1820298 - RNA, 19 nt, Artificial Sequence
  Description of Artificial Sequence: Synthetic oligonucleotide
  Antisense strand to SEQ ID NO: 1820297
aagggaccaagauaucugg

SEQ ID NO: 1820299 - RNA, 19 nt, Artificial Sequence
  Description of Artificial Sequence: Synthetic oligonucleotide
  Sense strand starting at position 2549 of SEQ ID NO: 1563570
acagauuugugccacuaua

SEQ ID NO: 1820300 - RNA, 19 nt, Artificial Sequence
  Description of Artificial Sequence: Synthetic oligonucleotide
  Antisense strand to SEQ ID NO: 1820299
uauaguggcacaaaucugu

SEQ ID NO: 1820301 - RNA, 19 nt, Artificial Sequence
  Description of Artificial Sequence: Synthetic oligonucleotide
  Sense strand starting at position 2757 of SEQ ID NO: 1563570
agaggaagcucuugacuuu

SEQ ID NO: 1820302 - RNA, 19 nt, Artificial Sequence
  Description of Artificial Sequence: Synthetic oligonucleotide
  Antisense strand to SEQ ID NO: 1820301
aaagucaagagcuuccucu

SEQ ID NO: 1820303 - RNA, 19 nt, Artificial Sequence
  Description of Artificial Sequence: Synthetic oligonucleotide
  Sense strand starting at position 2788 of SEQ ID NO: 1563570
cuaggaauuuguccuugcu

SEQ ID NO: 1820304 - RNA, 19 nt, Artificial Sequence
  Description of Artificial Sequence: Synthetic oligonucleotide
  Antisense strand to SEQ ID NO: 1820303
agcaaggacaaauuccuag

SEQ ID NO: 1820305 - RNA, 19 nt, Artificial Sequence
  Description of Artificial Sequence: Synthetic oligonucleotide
  Sense strand starting at position 2791 of SEQ ID NO: 1563570
ggaauuuguccuugcuccu

SEQ ID NO: 1820306 - RNA, 19 nt, Artificial Sequence
  Description of Artificial Sequence: Synthetic oligonucleotide
  Antisense strand to SEQ ID NO: 1820305
aggagcaaggacaaauucc

SEQ ID NO: 1820307 - RNA, 19 nt, Artificial Sequence
  Description of Artificial Sequence: Synthetic oligonucleotide
  Sense strand starting at position 3023 of SEQ ID NO: 1563570
cagggucugccaugaaaca

SEQ ID NO: 1820308 - RNA, 19 nt, Artificial Sequence
  Description of Artificial Sequence: Synthetic oligonucleotide
  Antisense strand to SEQ ID NO: 1820307
uguuucauggcagacccug

SEQ ID NO: 1820309 - RNA, 19 nt, Artificial Sequence
  Description of Artificial Sequence: Synthetic oligonucleotide
  Sense strand starting at position 3024 of SEQ ID NO: 1563570
agggucugccaugaaacau

SEQ ID NO: 1820310 - RNA, 19 nt, Artificial Sequence
  Description of Artificial Sequence: Synthetic oligonucleotide
  Antisense strand to SEQ ID NO: 1820309
auguuucauggcagacccu

SEQ ID NO: 1820311 - RNA, 19 nt, Artificial Sequence
  Description of Artificial Sequence: Synthetic oligonucleotide
  Sense strand starting at position 3362 of SEQ ID NO: 1563570
agguuauccuacuugguuu

SEQ ID NO: 1820312 - RNA, 19 nt, Artificial Sequence
  Description of Artificial Sequence: Synthetic oligonucleotide
  Antisense strand to SEQ ID NO: 1820311
aaaccaaguaggauaaccu

SEQ ID NO: 1820313 - RNA, 19 nt, Artificial Sequence
  Description of Artificial Sequence: Synthetic oligonucleotide
  Sense strand starting at position 3369 of SEQ ID NO: 1563570
ccuacuugguuucuugaua

SEQ ID NO: 1820314 - RNA, 19 nt, Artificial Sequence
  Description of Artificial Sequence: Synthetic oligonucleotide
  Antisense strand to SEQ ID NO: 1820313
uaucaagaaaccaaguagg

SEQ ID NO: 1820315 - RNA, 19 nt, Artificial Sequence
  Description of Artificial Sequence: Synthetic oligonucleotide
  Sense strand starting at position 3370 of SEQ ID NO: 1563570
cuacuugguuucuugauag

SEQ ID NO: 1820316 - RNA, 19 nt, Artificial Sequence
  Description of Artificial Sequence: Synthetic oligonucleotide
  Antisense strand to SEQ ID NO: 1820315
cuaucaagaaaccaaguag

SEQ ID NO: 1820317 - RNA, 19 nt, Artificial Sequence
  Description of Artificial Sequence: Synthetic oligonucleotide
  Sense strand starting at position 3374 of SEQ ID NO: 1563570
uugguuucuugauagcauu

SEQ ID NO: 1820318 - RNA, 19 nt, Artificial Sequence
  Description of Artificial Sequence: Synthetic oligonucleotide
  Antisense strand to SEQ ID NO: 1820317
aaugcuaucaagaaaccaa

SEQ ID NO: 1820319 - RNA, 19 nt, Artificial Sequence
  Description of Artificial Sequence: Synthetic oligonucleotide
  Sense strand starting at position 3498 of SEQ ID NO: 1563570
cucuuuguccaacgcuuua

SEQ ID NO: 1820320 - RNA, 19 nt, Artificial Sequence
  Description of Artificial Sequence: Synthetic oligonucleotide
  Antisense strand to SEQ ID NO: 1820319
uaaagcguuggacaaagag

SEQ ID NO: 1820321 - RNA, 19 nt, Artificial Sequence
  Description of Artificial Sequence: Synthetic oligonucleotide
  Sense strand starting at position 3511 of SEQ ID NO: 1563570
gcuuuaugcuggugcucuu

SEQ ID NO: 1820322 - RNA, 19 nt, Artificial Sequence
  Description of Artificial Sequence: Synthetic oligonucleotide
  Antisense strand to SEQ ID NO: 1820321
aagagcaccagcauaaagc

SEQ ID NO: 1820323 - RNA, 19 nt, Artificial Sequence
  Description of Artificial Sequence: Synthetic oligonucleotide
  Sense strand starting at position 3830 of SEQ ID NO: 1563570
aagagaagccucggauuac

SEQ ID NO: 1820324 - RNA, 19 nt, Artificial Sequence
  Description of Artificial Sequence: Synthetic oligonucleotide
  Antisense strand to SEQ ID NO: 1820323
guaauccgaggcuucucuu

SEQ ID NO: 1820325 - RNA, 19 nt, Artificial Sequence
  Description of Artificial Sequence: Synthetic oligonucleotide
  Sense strand starting at position 3831 of SEQ ID NO: 1563570
agagaagccucggauuaca

SEQ ID NO: 1820326 - RNA, 19 nt, Artificial Sequence
  Description of Artificial Sequence: Synthetic oligonucleotide
  Antisense strand to SEQ ID NO: 1820325
uguaauccgaggcuucucu

SEQ ID NO: 1820327 - RNA, 19 nt, Artificial Sequence
  Description of Artificial Sequence: Synthetic oligonucleotide
  Sense strand starting at position 3892 of SEQ ID NO: 1563570
gaucauaucuuugcugaug

SEQ ID NO: 1820328 - RNA, 19 nt, Artificial Sequence
  Description of Artificial Sequence: Synthetic oligonucleotide
  Antisense strand to SEQ ID NO: 1820327
caucagcaaagauaugauc

SEQ ID NO: 1820329 - RNA, 19 nt, Artificial Sequence
  Description of Artificial Sequence: Synthetic oligonucleotide
  Sense strand starting at position 3893 of SEQ ID NO: 1563570
aucauaucuuugcugauga

SEQ ID NO: 1820330 - RNA, 19 nt, Artificial Sequence
  Description of Artificial Sequence: Synthetic oligonucleotide
  Antisense strand to SEQ ID NO: 1820329
ucaucagcaaagauaugau

SEQ ID NO: 1820331 - RNA, 19 nt, Artificial Sequence
  Description of Artificial Sequence: Synthetic oligonucleotide
  Sense strand starting at position 3975 of SEQ ID NO: 1563570
gcagcucuaccugaauauc

SEQ ID NO: 1820332 - RNA, 19 nt, Artificial Sequence
  Description of Artificial Sequence: Synthetic oligonucleotide
  Antisense strand to SEQ ID NO: 1820331
gauauucagguagagcugc

SEQ ID NO: 1820333 - RNA, 19 nt, Artificial Sequence
  Description of Artificial Sequence: Synthetic oligonucleotide
  Sense strand starting at position 26 of SEQ ID NO: 1563571
guuuacauucuggagcuaa

SEQ ID NO: 1820334 - RNA, 19 nt, Artificial Sequence
  Description of Artificial Sequence: Synthetic oligonucleotide
  Antisense strand to SEQ ID NO: 1820333
uuagcuccagaauguaaac

SEQ ID NO: 1820335 - RNA, 19 nt, Artificial Sequence
  Description of Artificial Sequence: Synthetic oligonucleotide
  Sense strand starting at position 609 of SEQ ID NO: 1563571
cagggcagauuccugagua

SEQ ID NO: 1820336 - RNA, 19 nt, Artificial Sequence
  Description of Artificial Sequence: Synthetic oligonucleotide
  Antisense strand to SEQ ID NO: 1820335
uacucaggaaucugcccug

SEQ ID NO: 1820337 - RNA, 19 nt, Artificial Sequence
  Description of Artificial Sequence: Synthetic oligonucleotide
  Sense strand starting at position 613 of SEQ ID NO: 1563571
gcagauuccugaguauguc

SEQ ID NO: 1820338 - RNA, 19 nt, Artificial Sequence
  Description of Artificial Sequence: Synthetic oligonucleotide
  Antisense strand to SEQ ID NO: 1820337
gacauacucaggaaucugc

SEQ ID NO: 1820339 - RNA, 19 nt, Artificial Sequence
  Description of Artificial Sequence: Synthetic oligonucleotide
  Sense strand starting at position 614 of SEQ ID NO: 1563571
cagauuccugaguauguca

SEQ ID NO: 1820340 - RNA, 19 nt, Artificial Sequence
  Description of Artificial Sequence: Synthetic oligonucleotide
  Antisense strand to SEQ ID NO: 1820339
ugacauacucaggaaucug

SEQ ID NO: 1820341 - RNA, 19 nt, Artificial Sequence
  Description of Artificial Sequence: Synthetic oligonucleotide
  Sense strand starting at position 621 of SEQ ID NO: 1563571
cugaguaugucaccauguu

SEQ ID NO: 1820342 - RNA, 19 nt, Artificial Sequence
  Description of Artificial Sequence: Synthetic oligonucleotide
  Antisense strand to SEQ ID NO: 1820341
aacauggugacauacucag

SEQ ID NO: 1820343 - RNA, 19 nt, Artificial Sequence
  Description of Artificial Sequence: Synthetic oligonucleotide
  Sense strand starting at position 622 of SEQ ID NO: 1563571
ugaguaugucaccauguug

SEQ ID NO: 1820344 - RNA, 19 nt, Artificial Sequence
  Description of Artificial Sequence: Synthetic oligonucleotide
  Antisense strand to SEQ ID NO: 1820343
caacauggugacauacuca

SEQ ID NO: 1820345 - RNA, 19 nt, Artificial Sequence
  Description of Artificial Sequence: Synthetic oligonucleotide
  Sense strand starting at position 825 of SEQ ID NO: 1563571
ucgacaauuccgcgaggaa

SEQ ID NO: 1820346 - RNA, 19 nt, Artificial Sequence
  Description of Artificial Sequence: Synthetic oligonucleotide
  Antisense strand to SEQ ID NO: 1820345
uuccucgcggaauugucga

SEQ ID NO: 1820347 - RNA, 19 nt, Artificial Sequence
  Description of Artificial Sequence: Synthetic oligonucleotide
  Sense strand starting at position 826 of SEQ ID NO: 1563571
cgacaauuccgcgaggaag

SEQ ID NO: 1820348 - RNA, 19 nt, Artificial Sequence
  Description of Artificial Sequence: Synthetic oligonucleotide
  Antisense strand to SEQ ID NO: 1820347
cuuccucgcggaauugucg

SEQ ID NO: 1820349 - RNA, 19 nt, Artificial Sequence
  Description of Artificial Sequence: Synthetic oligonucleotide
  Sense strand starting at position 1087 of SEQ ID NO: 1563571
aucccagcuugcuugacaa

SEQ ID NO: 1820350 - RNA, 19 nt, Artificial Sequence
  Description of Artificial Sequence: Synthetic oligonucleotide
  Antisense strand to SEQ ID NO: 1820349
uugucaagcaagcugggau

SEQ ID NO: 1820351 - RNA, 19 nt, Artificial Sequence
  Description of Artificial Sequence: Synthetic oligonucleotide
  Sense strand starting at position 1099 of SEQ ID NO: 1563571
uugacaagguucgcucaga

SEQ ID NO: 1820352 - RNA, 19 nt, Artificial Sequence
  Description of Artificial Sequence: Synthetic oligonucleotide
  Antisense strand to SEQ ID NO: 1820351
ucugagcgaaccuugucaa

SEQ ID NO: 1820353 - RNA, 19 nt, Artificial Sequence
  Description of Artificial Sequence: Synthetic oligonucleotide
  Sense strand starting at position 1100 of SEQ ID NO: 1563571
ugacaagguucgcucagaa

SEQ ID NO: 1820354 - RNA, 19 nt, Artificial Sequence
  Description of Artificial Sequence: Synthetic oligonucleotide
  Antisense strand to SEQ ID NO: 1820353
uucugagcgaaccuuguca

SEQ ID NO: 1820355 - RNA, 19 nt, Artificial Sequence
  Description of Artificial Sequence: Synthetic oligonucleotide
  Sense strand starting at position 1694 of SEQ ID NO: 1563571
agggaaauguuugaacaug

SEQ ID NO: 1820356 - RNA, 19 nt, Artificial Sequence
  Description of Artificial Sequence: Synthetic oligonucleotide
  Antisense strand to SEQ ID NO: 1820355
cauguucaaacauuucccu

SEQ ID NO: 1820357 - RNA, 19 nt, Artificial Sequence
  Description of Artificial Sequence: Synthetic oligonucleotide
  Sense strand starting at position 1730 of SEQ ID NO: 1563571
gccuguuacaccgcagagu

SEQ ID NO: 1820358 - RNA, 19 nt, Artificial Sequence
  Description of Artificial Sequence: Synthetic oligonucleotide
  Antisense strand to SEQ ID NO: 1820357
acucugcgguguaacaggc

SEQ ID NO: 1820359 - RNA, 19 nt, Artificial Sequence
  Description of Artificial Sequence: Synthetic oligonucleotide
  Sense strand starting at position 1986 of SEQ ID NO: 1563571
guccuagagagccacgaau

SEQ ID NO: 1820360 - RNA, 19 nt, Artificial Sequence
  Description of Artificial Sequence: Synthetic oligonucleotide
  Antisense strand to SEQ ID NO: 1820359
auucguggcucucuaggac

SEQ ID NO: 1820361 - RNA, 19 nt, Artificial Sequence
  Description of Artificial Sequence: Synthetic oligonucleotide
  Sense strand starting at position 2013 of SEQ ID NO: 1563571
cggcgcauucuauauaaac

SEQ ID NO: 1820362 - RNA, 19 nt, Artificial Sequence
  Description of Artificial Sequence: Synthetic oligonucleotide
  Antisense strand to SEQ ID NO: 1820361
guuuauauagaaugcgccg

SEQ ID NO: 1820363 - RNA, 19 nt, Artificial Sequence
  Description of Artificial Sequence: Synthetic oligonucleotide
  Sense strand starting at position 2497 of SEQ ID NO: 1563571
cugggaucugggugucagu

SEQ ID NO: 1820364 - RNA, 19 nt, Artificial Sequence
  Description of Artificial Sequence: Synthetic oligonucleotide
  Antisense strand to SEQ ID NO: 1820363
acugacacccagaucccag

SEQ ID NO: 1820365 - RNA, 19 nt, Artificial Sequence
  Description of Artificial Sequence: Synthetic oligonucleotide
  Sense strand starting at position 2682 of SEQ ID NO: 1563571
gcgagugcugaagaggaau

SEQ ID NO: 1820366 - RNA, 19 nt, Artificial Sequence
  Description of Artificial Sequence: Synthetic oligonucleotide
  Antisense strand to SEQ ID NO: 1820365
auuccucuucagcacucgc

SEQ ID NO: 1820367 - RNA, 19 nt, Artificial Sequence
  Description of Artificial Sequence: Synthetic oligonucleotide
  Sense strand starting at position 2695 of SEQ ID NO: 1563571
aggaauaaguaggauugaa

SEQ ID NO: 1820368 - RNA, 19 nt, Artificial Sequence
  Description of Artificial Sequence: Synthetic oligonucleotide
  Antisense strand to SEQ ID NO: 1820367
uucaauccuacuuauuccu

SEQ ID NO: 1820369 - RNA, 19 nt, Artificial Sequence
  Description of Artificial Sequence: Synthetic oligonucleotide
  Sense strand starting at position 2710 of SEQ ID NO: 1563571
ugaaacguugccugaggaa

SEQ ID NO: 1820370 - RNA, 19 nt, Artificial Sequence
  Description of Artificial Sequence: Synthetic oligonucleotide
  Antisense strand to SEQ ID NO: 1820369
uuccucaggcaacguuuca

SEQ ID NO: 1820371 - RNA, 19 nt, Artificial Sequence
  Description of Artificial Sequence: Synthetic oligonucleotide
  Sense strand starting at position 2723 of SEQ ID NO: 1563571
gaggaauacuugugacaaa

SEQ ID NO: 1820372 - RNA, 19 nt, Artificial Sequence
  Description of Artificial Sequence: Synthetic oligonucleotide
  Antisense strand to SEQ ID NO: 1820371
uuugucacaaguauuccuc

SEQ ID NO: 1820373 - RNA, 19 nt, Artificial Sequence
  Description of Artificial Sequence: Synthetic oligonucleotide
  Sense strand starting at position 2784 of SEQ ID NO: 1563571
gcucaagaauuguucuaca

SEQ ID NO: 1820374 - RNA, 19 nt, Artificial Sequence
  Description of Artificial Sequence: Synthetic oligonucleotide
  Antisense strand to SEQ ID NO: 1820373
uguagaacaauucuugagc

SEQ ID NO: 1820375 - RNA, 19 nt, Artificial Sequence
  Description of Artificial Sequence: Synthetic oligonucleotide
  Sense strand starting at position 2787 of SEQ ID NO: 1563571
caagaauuguucuacagag

SEQ ID NO: 1820376 - RNA, 19 nt, Artificial Sequence
  Description of Artificial Sequence: Synthetic oligonucleotide
  Antisense strand to SEQ ID NO: 1820375
cucuguagaacaauucuug

SEQ ID NO: 1820377 - RNA, 19 nt, Artificial Sequence
  Description of Artificial Sequence: Synthetic oligonucleotide
  Sense strand starting at position 3146 of SEQ ID NO: 1563571
gugagauaguagucaggaa

SEQ ID NO: 1820378 - RNA, 19 nt, Artificial Sequence
  Description of Artificial Sequence: Synthetic oligonucleotide
  Antisense strand to SEQ ID NO: 1820377
uuccugacuacuaucucac

SEQ ID NO: 1820379 - RNA, 19 nt, Artificial Sequence
  Description of Artificial Sequence: Synthetic oligonucleotide
  Sense strand starting at position 3273 of SEQ ID NO: 1563571
aggacuugguccucagaac

SEQ ID NO: 1820380 - RNA, 19 nt, Artificial Sequence
  Description of Artificial Sequence: Synthetic oligonucleotide
  Antisense strand to SEQ ID NO: 1820379
guucugaggaccaaguccu

SEQ ID NO: 1820381 - RNA, 19 nt, Artificial Sequence
  Description of Artificial Sequence: Synthetic oligonucleotide
  Sense strand starting at position 3339 of SEQ ID NO: 1563571
uagcgacucccaugcagaa

SEQ ID NO: 1820382 - RNA, 19 nt, Artificial Sequence
  Description of Artificial Sequence: Synthetic oligonucleotide
  Antisense strand to SEQ ID NO: 1820381
uucugcaugggagucgcua

SEQ ID NO: 1820383 - RNA, 19 nt, Artificial Sequence
  Description of Artificial Sequence: Synthetic oligonucleotide
  Sense strand starting at position 3409 of SEQ ID NO: 1563571
uguuaauggcauuaaacca

SEQ ID NO: 1820384 - RNA, 19 nt, Artificial Sequence
  Description of Artificial Sequence: Synthetic oligonucleotide
  Antisense strand to SEQ ID NO: 1820383
ugguuuaaugccauuaaca

SEQ ID NO: 1820385 - RNA, 19 nt, Artificial Sequence
  Description of Artificial Sequence: Synthetic oligonucleotide
  Sense strand starting at position 3446 of SEQ ID NO: 1563571
auggauuagucuuacugca

SEQ ID NO: 1820386 - RNA, 19 nt, Artificial Sequence
  Description of Artificial Sequence: Synthetic oligonucleotide
  Antisense strand to SEQ ID NO: 1820385
ugcaguaagacuaauccau

SEQ ID NO: 1820387 - RNA, 19 nt, Artificial Sequence
  Description of Artificial Sequence: Synthetic oligonucleotide
  Sense strand starting at position 3448 of SEQ ID NO: 1563571
ggauuagucuuacugcauc

SEQ ID NO: 1820388 - RNA, 19 nt, Artificial Sequence
  Description of Artificial Sequence: Synthetic oligonucleotide
  Antisense strand to SEQ ID NO: 1820387
gaugcaguaagacuaaucc

SEQ ID NO: 1820389 - RNA, 19 nt, Artificial Sequence
  Description of Artificial Sequence: Synthetic oligonucleotide
  Sense strand starting at position 3634 of SEQ ID NO: 1563571
aucuaauaaucugaggcuu

SEQ ID NO: 1820390 - RNA, 19 nt, Artificial Sequence
  Description of Artificial Sequence: Synthetic oligonucleotide
  Antisense strand to SEQ ID NO: 1820389
aagccucagauuauuagau

SEQ ID NO: 1820391 - RNA, 19 nt, Artificial Sequence
  Description of Artificial Sequence: Synthetic oligonucleotide
  Sense strand starting at position 3636 of SEQ ID NO: 1563571
cuaauaaucugaggcuuga

SEQ ID NO: 1820392 - RNA, 19 nt, Artificial Sequence
  Description of Artificial Sequence: Synthetic oligonucleotide
  Antisense strand to SEQ ID NO: 1820391
ucaagccucagauuauuag

SEQ ID NO: 1820393 - RNA, 19 nt, Artificial Sequence
  Description of Artificial Sequence: Synthetic oligonucleotide
  Sense strand starting at position 3649 of SEQ ID NO: 1563571
gcuugaugacacgauguga

SEQ ID NO: 1820394 - RNA, 19 nt, Artificial Sequence
  Description of Artificial Sequence: Synthetic oligonucleotide
  Antisense strand to SEQ ID NO: 1820393
ucacaucgugucaucaagc

SEQ ID NO: 1820395 - RNA, 19 nt, Artificial Sequence
  Description of Artificial Sequence: Synthetic oligonucleotide
  Sense strand starting at position 3657 of SEQ ID NO: 1563571
acacgaugugauuauccaa

SEQ ID NO: 1820396 - RNA, 19 nt, Artificial Sequence
  Description of Artificial Sequence: Synthetic oligonucleotide
  Antisense strand to SEQ ID NO: 1820395
uuggauaaucacaucgugu

SEQ ID NO: 1820397 - RNA, 19 nt, Artificial Sequence
  Description of Artificial Sequence: Synthetic oligonucleotide
  Sense strand starting at position 3696 of SEQ ID NO: 1563571
ucauaucaguugucuggga

SEQ ID NO: 1820398 - RNA, 19 nt, Artificial Sequence
  Description of Artificial Sequence: Synthetic oligonucleotide
  Antisense strand to SEQ ID NO: 1820397
ucccagacaacugauauga

SEQ ID NO: 1820399 - RNA, 19 nt, Artificial Sequence
  Description of Artificial Sequence: Synthetic oligonucleotide
  Sense strand starting at position 3697 of SEQ ID NO: 1563571
cauaucaguugucugggaa

SEQ ID NO: 1820400 - RNA, 19 nt, Artificial Sequence
  Description of Artificial Sequence: Synthetic oligonucleotide
  Antisense strand to SEQ ID NO: 1820399
uucccagacaacugauaug

SEQ ID NO: 1820401 - RNA, 19 nt, Artificial Sequence
  Description of Artificial Sequence: Synthetic oligonucleotide
  Sense strand starting at position 3698 of SEQ ID NO: 1563571
auaucaguugucugggaag

SEQ ID NO: 1820402 - RNA, 19 nt, Artificial Sequence
  Description of Artificial Sequence: Synthetic oligonucleotide
  Antisense strand to SEQ ID NO: 1820401
cuucccagacaacugauau

SEQ ID NO: 1820403 - RNA, 19 nt, Artificial Sequence
  Description of Artificial Sequence: Synthetic oligonucleotide
  Sense strand starting at position 3700 of SEQ ID NO: 1563571
aucaguugucugggaagga

SEQ ID NO: 1820404 - RNA, 19 nt, Artificial Sequence
  Description of Artificial Sequence: Synthetic oligonucleotide
  Antisense strand to SEQ ID NO: 1820403
uccuucccagacaacugau

SEQ ID NO: 1820405 - RNA, 19 nt, Artificial Sequence
  Description of Artificial Sequence: Synthetic oligonucleotide
  Sense strand starting at position 3701 of SEQ ID NO: 1563571
ucaguugucugggaaggaa

SEQ ID NO: 1820406 - RNA, 19 nt, Artificial Sequence
  Description of Artificial Sequence: Synthetic oligonucleotide
  Antisense strand to SEQ ID NO: 1820405
uuccuucccagacaacuga

SEQ ID NO: 1820407 - RNA, 19 nt, Artificial Sequence
  Description of Artificial Sequence: Synthetic oligonucleotide
  Sense strand starting at position 3756 of SEQ ID NO: 1563571
ggagguuuagauggguuua

SEQ ID NO: 1820408 - RNA, 19 nt, Artificial Sequence
  Description of Artificial Sequence: Synthetic oligonucleotide
  Antisense strand to SEQ ID NO: 1820407
uaaacccaucuaaaccucc

SEQ ID NO: 1820409 - RNA, 19 nt, Artificial Sequence
  Description of Artificial Sequence: Synthetic oligonucleotide
  Sense strand starting at position 3758 of SEQ ID NO: 1563571
agguuuagauggguuuaga

SEQ ID NO: 1820410 - RNA, 19 nt, Artificial Sequence
  Description of Artificial Sequence: Synthetic oligonucleotide
  Antisense strand to SEQ ID NO: 1820409
ucuaaacccaucuaaaccu

SEQ ID NO: 1820411 - RNA, 19 nt, Artificial Sequence
  Description of Artificial Sequence: Synthetic oligonucleotide
  Sense strand starting at position 3824 of SEQ ID NO: 1563571
gcaguauacccaugugaug

SEQ ID NO: 1820412 - RNA, 19 nt, Artificial Sequence
  Description of Artificial Sequence: Synthetic oligonucleotide
  Antisense strand to SEQ ID NO: 1820411
caucacauggguauacugc

SEQ ID NO: 1820413 - RNA, 19 nt, Artificial Sequence
  Description of Artificial Sequence: Synthetic oligonucleotide
  Sense strand starting at position 30 of SEQ ID NO: 1563572
guauguacucuugugcagu

SEQ ID NO: 1820414 - RNA, 19 nt, Artificial Sequence
  Description of Artificial Sequence: Synthetic oligonucleotide
  Antisense strand to SEQ ID NO: 1820413
acugcacaagaguacauac

SEQ ID NO: 1820415 - RNA, 19 nt, Artificial Sequence
  Description of Artificial Sequence: Synthetic oligonucleotide
  Sense strand starting at position 134 of SEQ ID NO: 1563572
cucagaguucuauagcauu

SEQ ID NO: 1820416 - RNA, 19 nt, Artificial Sequence
  Description of Artificial Sequence: Synthetic oligonucleotide
  Antisense strand to SEQ ID NO: 1820415
aaugcuauagaacucugag

SEQ ID NO: 1820417 - RNA, 19 nt, Artificial Sequence
  Description of Artificial Sequence: Synthetic oligonucleotide
  Sense strand starting at position 257 of SEQ ID NO: 1563572
ccaagaacuuagguuagca

SEQ ID NO: 1820418 - RNA, 19 nt, Artificial Sequence
  Description of Artificial Sequence: Synthetic oligonucleotide
  Antisense strand to SEQ ID NO: 1820417
ugcuaaccuaaguucuugg

SEQ ID NO: 1820419 - RNA, 19 nt, Artificial Sequence
  Description of Artificial Sequence: Synthetic oligonucleotide
  Sense strand starting at position 261 of SEQ ID NO: 1563572
gaacuuagguuagcaagaa

SEQ ID NO: 1820420 - RNA, 19 nt, Artificial Sequence
  Description of Artificial Sequence: Synthetic oligonucleotide
  Antisense strand to SEQ ID NO: 1820419
uucuugcuaaccuaaguuc

SEQ ID NO: 1820421 - RNA, 19 nt, Artificial Sequence
  Description of Artificial Sequence: Synthetic oligonucleotide
  Sense strand starting at position 468 of SEQ ID NO: 1563572
uuggaaaucuuguugguga

SEQ ID NO: 1820422 - RNA, 19 nt, Artificial Sequence
  Description of Artificial Sequence: Synthetic oligonucleotide
  Antisense strand to SEQ ID NO: 1820421
ucaccaacaagauuuccaa

SEQ ID NO: 1820423 - RNA, 19 nt, Artificial Sequence
  Description of Artificial Sequence: Synthetic oligonucleotide
  Sense strand starting at position 470 of SEQ ID NO: 1563572
ggaaaucuuguuggugaau

SEQ ID NO: 1820424 - RNA, 19 nt, Artificial Sequence
  Description of Artificial Sequence: Synthetic oligonucleotide
  Antisense strand to SEQ ID NO: 1820423
auucaccaacaagauuucc

SEQ ID NO: 1820425 - RNA, 19 nt, Artificial Sequence
  Description of Artificial Sequence: Synthetic oligonucleotide
  Sense strand starting at position 471 of SEQ ID NO: 1563572
gaaaucuuguuggugaaug

SEQ ID NO: 1820426 - RNA, 19 nt, Artificial Sequence
  Description of Artificial Sequence: Synthetic oligonucleotide
  Antisense strand to SEQ ID NO: 1820425
cauucaccaacaagauuuc

SEQ ID NO: 1820427 - RNA, 19 nt, Artificial Sequence
  Description of Artificial Sequence: Synthetic oligonucleotide
  Sense strand starting at position 483 of SEQ ID NO: 1563572
gugaaugucuaguuaaaua

SEQ ID NO: 1820428 - RNA, 19 nt, Artificial Sequence
  Description of Artificial Sequence: Synthetic oligonucleotide
  Antisense strand to SEQ ID NO: 1820427
uauuuaacuagacauucac

SEQ ID NO: 1820429 - RNA, 19 nt, Artificial Sequence
  Description of Artificial Sequence: Synthetic oligonucleotide
  Sense strand starting at position 503 of SEQ ID NO: 1563572
acuggaccuucuuuaauga

SEQ ID NO: 1820430 - RNA, 19 nt, Artificial Sequence
  Description of Artificial Sequence: Synthetic oligonucleotide
  Antisense strand to SEQ ID NO: 1820429
ucauuaaagaagguccagu

SEQ ID NO: 1820431 - RNA, 19 nt, Artificial Sequence
  Description of Artificial Sequence: Synthetic oligonucleotide
  Sense strand starting at position 558 of SEQ ID NO: 1563572
agaaauuguuuccuugaau

SEQ ID NO: 1820432 - RNA, 19 nt, Artificial Sequence
  Description of Artificial Sequence: Synthetic oligonucleotide
  Antisense strand to SEQ ID NO: 1820431
auucaaggaaacaauuucu

SEQ ID NO: 1820433 - RNA, 19 nt, Artificial Sequence
  Description of Artificial Sequence: Synthetic oligonucleotide
  Sense strand starting at position 714 of SEQ ID NO: 1563572
uagaguucccaaggugaag

SEQ ID NO: 1820434 - RNA, 19 nt, Artificial Sequence
  Description of Artificial Sequence: Synthetic oligonucleotide
  Antisense strand to SEQ ID NO: 1820433
cuucaccuugggaacucua

SEQ ID NO: 1820435 - RNA, 19 nt, Artificial Sequence
  Description of Artificial Sequence: Synthetic oligonucleotide
  Sense strand starting at position 747 of SEQ ID NO: 1563572
caaagugucuaucugaaga

SEQ ID NO: 1820436 - RNA, 19 nt, Artificial Sequence
  Description of Artificial Sequence: Synthetic oligonucleotide
  Antisense strand to SEQ ID NO: 1820435
ucuucagauagacacuuug

SEQ ID NO: 1820437 - RNA, 19 nt, Artificial Sequence
  Description of Artificial Sequence: Synthetic oligonucleotide
  Sense strand starting at position 1101 of SEQ ID NO: 1563572
ugagaugauagcuaggguu

SEQ ID NO: 1820438 - RNA, 19 nt, Artificial Sequence
  Description of Artificial Sequence: Synthetic oligonucleotide
  Antisense strand to SEQ ID NO: 1820437
aacccuagcuaucaucuca

SEQ ID NO: 1820439 - RNA, 19 nt, Artificial Sequence
  Description of Artificial Sequence: Synthetic oligonucleotide
  Sense strand starting at position 1103 of SEQ ID NO: 1563572
agaugauagcuaggguuaa

SEQ ID NO: 1820440 - RNA, 19 nt, Artificial Sequence
  Description of Artificial Sequence: Synthetic oligonucleotide
  Antisense strand to SEQ ID NO: 1820439
uuaacccuagcuaucaucu

SEQ ID NO: 1820441 - RNA, 19 nt, Artificial Sequence
  Description of Artificial Sequence: Synthetic oligonucleotide
  Sense strand starting at position 1250 of SEQ ID NO: 1563572
gcacauuaaaguuggagau

SEQ ID NO: 1820442 - RNA, 19 nt, Artificial Sequence
  Description of Artificial Sequence: Synthetic oligonucleotide
  Antisense strand to SEQ ID NO: 1820441
aucuccaacuuuaaugugc

SEQ ID NO: 1820443 - RNA, 19 nt, Artificial Sequence
  Description of Artificial Sequence: Synthetic oligonucleotide
  Sense strand starting at position 1296 of SEQ ID NO: 1563572
ucacauagucaguacuaag

SEQ ID NO: 1820444 - RNA, 19 nt, Artificial Sequence
  Description of Artificial Sequence: Synthetic oligonucleotide
  Antisense strand to SEQ ID NO: 1820443
cuuaguacugacuauguga

SEQ ID NO: 1820445 - RNA, 19 nt, Artificial Sequence
  Description of Artificial Sequence: Synthetic oligonucleotide
  Sense strand starting at position 1308 of SEQ ID NO: 1563572
uacuaaguaugggucaauu

SEQ ID NO: 1820446 - RNA, 19 nt, Artificial Sequence
  Description of Artificial Sequence: Synthetic oligonucleotide
  Antisense strand to SEQ ID NO: 1820445
aauugacccauacuuagua

SEQ ID NO: 1820447 - RNA, 19 nt, Artificial Sequence
  Description of Artificial Sequence: Synthetic oligonucleotide
  Sense strand starting at position 1310 of SEQ ID NO: 1563572
cuaaguaugggucaauucu

SEQ ID NO: 1820448 - RNA, 19 nt, Artificial Sequence
  Description of Artificial Sequence: Synthetic oligonucleotide
  Antisense strand to SEQ ID NO: 1820447
agaauugacccauacuuag

SEQ ID NO: 1820449 - RNA, 19 nt, Artificial Sequence
  Description of Artificial Sequence: Synthetic oligonucleotide
  Sense strand starting at position 1418 of SEQ ID NO: 1563572
acaacaugaccuugugcaa

SEQ ID NO: 1820450 - RNA, 19 nt, Artificial Sequence
  Description of Artificial Sequence: Synthetic oligonucleotide
  Antisense strand to SEQ ID NO: 1820449
uugcacaaggucauguugu

SEQ ID NO: 1820451 - RNA, 19 nt, Artificial Sequence
  Description of Artificial Sequence: Synthetic oligonucleotide
  Sense strand starting at position 1560 of SEQ ID NO: 1563572
auagcuauucccuauguau

SEQ ID NO: 1820452 - RNA, 19 nt, Artificial Sequence
  Description of Artificial Sequence: Synthetic oligonucleotide
  Antisense strand to SEQ ID NO: 1820451
auacauagggaauagcuau

SEQ ID NO: 1820453 - RNA, 19 nt, Artificial Sequence
  Description of Artificial Sequence: Synthetic oligonucleotide
  Sense strand starting at position 2475 of SEQ ID NO: 1563572
cugcuuauggauuaucaaa

SEQ ID NO: 1820454 - RNA, 19 nt, Artificial Sequence
  Description of Artificial Sequence: Synthetic oligonucleotide
  Antisense strand to SEQ ID NO: 1820453
uuugauaauccauaagcag

SEQ ID NO: 1820455 - RNA, 19 nt, Artificial Sequence
  Description of Artificial Sequence: Synthetic oligonucleotide
  Sense strand starting at position 2477 of SEQ ID NO: 1563572
gcuuauggauuaucaaauu

SEQ ID NO: 1820456 - RNA, 19 nt, Artificial Sequence
  Description of Artificial Sequence: Synthetic oligonucleotide
  Antisense strand to SEQ ID NO: 1820455
aauuugauaauccauaagc

SEQ ID NO: 1820457 - RNA, 19 nt, Artificial Sequence
  Description of Artificial Sequence: Synthetic oligonucleotide
  Sense strand starting at position 2643 of SEQ ID NO: 1563572
cuaggcagccuuuaaagau

SEQ ID NO: 1820458 - RNA, 19 nt, Artificial Sequence
  Description of Artificial Sequence: Synthetic oligonucleotide
  Antisense strand to SEQ ID NO: 1820457
aucuuuaaaggcugccuag

SEQ ID NO: 1820459 - RNA, 19 nt, Artificial Sequence
  Description of Artificial Sequence: Synthetic oligonucleotide
  Sense strand starting at position 2749 of SEQ ID NO: 1563572
caggcaaaguuucuagaaa

SEQ ID NO: 1820460 - RNA, 19 nt, Artificial Sequence
  Description of Artificial Sequence: Synthetic oligonucleotide
  Antisense strand to SEQ ID NO: 1820459
uuucuagaaacuuugccug

SEQ ID NO: 1820461 - RNA, 19 nt, Artificial Sequence
  Description of Artificial Sequence: Synthetic oligonucleotide
  Sense strand starting at position 2863 of SEQ ID NO: 1563572
ggacauaugucuuugacau

SEQ ID NO: 1820462 - RNA, 19 nt, Artificial Sequence
  Description of Artificial Sequence: Synthetic oligonucleotide
  Antisense strand to SEQ ID NO: 1820461
augucaaagacauaugucc

SEQ ID NO: 1820463 - RNA, 19 nt, Artificial Sequence
  Description of Artificial Sequence: Synthetic oligonucleotide
  Sense strand starting at position 2870 of SEQ ID NO: 1563572
ugucuuugacauuaguaac

SEQ ID NO: 1820464 - RNA, 19 nt, Artificial Sequence
  Description of Artificial Sequence: Synthetic oligonucleotide
  Antisense strand to SEQ ID NO: 1820463
guuacuaaugucaaagaca

SEQ ID NO: 1820465 - RNA, 19 nt, Artificial Sequence
  Description of Artificial Sequence: Synthetic oligonucleotide
  Sense strand starting at position 2996 of SEQ ID NO: 1563572
gcaauauuauaggcuaaau

SEQ ID NO: 1820466 - RNA, 19 nt, Artificial Sequence
  Description of Artificial Sequence: Synthetic oligonucleotide
  Antisense strand to SEQ ID NO: 1820465
auuuagccuauaauauugc

SEQ ID NO: 1820467 - RNA, 19 nt, Artificial Sequence
  Description of Artificial Sequence: Synthetic oligonucleotide
  Sense strand starting at position 3005 of SEQ ID NO: 1563572
uaggcuaaauugcuagaga

SEQ ID NO: 1820468 - RNA, 19 nt, Artificial Sequence
  Description of Artificial Sequence: Synthetic oligonucleotide
  Antisense strand to SEQ ID NO: 1820467
ucucuagcaauuuagccua

SEQ ID NO: 1820469 - RNA, 19 nt, Artificial Sequence
  Description of Artificial Sequence: Synthetic oligonucleotide
  Sense strand starting at position 3078 of SEQ ID NO: 1563572
gacugagguuuccucacca

SEQ ID NO: 1820470 - RNA, 19 nt, Artificial Sequence
  Description of Artificial Sequence: Synthetic oligonucleotide
  Antisense strand to SEQ ID NO: 1820469
uggugaggaaaccucaguc

SEQ ID NO: 1820471 - RNA, 19 nt, Artificial Sequence
  Description of Artificial Sequence: Synthetic oligonucleotide
  Sense strand starting at position 3315 of SEQ ID NO: 1563572
cagggauguguccagagcu

SEQ ID NO: 1820472 - RNA, 19 nt, Artificial Sequence
  Description of Artificial Sequence: Synthetic oligonucleotide
  Antisense strand to SEQ ID NO: 1820471
agcucuggacacaucccug

SEQ ID NO: 1820473 - RNA, 19 nt, Artificial Sequence
  Description of Artificial Sequence: Synthetic oligonucleotide
  Sense strand starting at position 3363 of SEQ ID NO: 1563572
ucaguugaccgcuaggaau

SEQ ID NO: 1820474 - RNA, 19 nt, Artificial Sequence
  Description of Artificial Sequence: Synthetic oligonucleotide
  Antisense strand to SEQ ID NO: 1820473
auuccuagcggucaacuga

SEQ ID NO: 1820475 - RNA, 19 nt, Artificial Sequence
  Description of Artificial Sequence: Synthetic oligonucleotide
  Sense strand starting at position 3375 of SEQ ID NO: 1563572
uaggaauuccuugguucua

SEQ ID NO: 1820476 - RNA, 19 nt, Artificial Sequence
  Description of Artificial Sequence: Synthetic oligonucleotide
  Antisense strand to SEQ ID NO: 1820475
uagaaccaaggaauuccua

SEQ ID NO: 1820477 - RNA, 19 nt, Artificial Sequence
  Description of Artificial Sequence: Synthetic oligonucleotide
  Sense strand starting at position 3528 of SEQ ID NO: 1563572
uuaccuuauuagucaggaa

SEQ ID NO: 1820478 - RNA, 19 nt, Artificial Sequence
  Description of Artificial Sequence: Synthetic oligonucleotide
  Antisense strand to SEQ ID NO: 1820477
uuccugacuaauaagguaa

SEQ ID NO: 1820479 - RNA, 19 nt, Artificial Sequence
  Description of Artificial Sequence: Synthetic oligonucleotide
  Sense strand starting at position 3596 of SEQ ID NO: 1563572
acguucugugaucauauau

SEQ ID NO: 1820480 - RNA, 19 nt, Artificial Sequence
  Description of Artificial Sequence: Synthetic oligonucleotide
  Antisense strand to SEQ ID NO: 1820479
auauaugaucacagaacgu

SEQ ID NO: 1820481 - RNA, 19 nt, Artificial Sequence
  Description of Artificial Sequence: Synthetic oligonucleotide
  Sense strand starting at position 3762 of SEQ ID NO: 1563572
ugaaauaugaaguaugugu

SEQ ID NO: 1820482 - RNA, 19 nt, Artificial Sequence
  Description of Artificial Sequence: Synthetic oligonucleotide
  Antisense strand to SEQ ID NO: 1820481
acacauacuucauauuuca

SEQ ID NO: 1820483 - RNA, 19 nt, Artificial Sequence
  Description of Artificial Sequence: Synthetic oligonucleotide
  Sense strand starting at position 3766 of SEQ ID NO: 1563572
auaugaaguauguguauga

SEQ ID NO: 1820484 - RNA, 19 nt, Artificial Sequence
  Description of Artificial Sequence: Synthetic oligonucleotide
  Antisense strand to SEQ ID NO: 1820483
ucauacacauacuucauau

SEQ ID NO: 1820485 - RNA, 19 nt, Artificial Sequence
  Description of Artificial Sequence: Synthetic oligonucleotide
  Sense strand starting at position 3803 of SEQ ID NO: 1563572
ccuggcuuuccauaugaug

SEQ ID NO: 1820486 - RNA, 19 nt, Artificial Sequence
  Description of Artificial Sequence: Synthetic oligonucleotide
  Antisense strand to SEQ ID NO: 1820485
caucauauggaaagccagg

SEQ ID NO: 1820487 - RNA, 19 nt, Artificial Sequence
  Description of Artificial Sequence: Synthetic oligonucleotide
  Sense strand starting at position 3823 of SEQ ID NO: 1563572
ggcugugccacugaugaga

SEQ ID NO: 1820488 - RNA, 19 nt, Artificial Sequence
  Description of Artificial Sequence: Synthetic oligonucleotide
  Antisense strand to SEQ ID NO: 1820487
ucucaucaguggcacagcc

SEQ ID NO: 1820489 - RNA, 19 nt, Artificial Sequence
  Description of Artificial Sequence: Synthetic oligonucleotide
  Sense strand starting at position 3905 of SEQ ID NO: 1563572
agacaugaguccuuggauc

SEQ ID NO: 1820490 - RNA, 19 nt, Artificial Sequence
  Description of Artificial Sequence: Synthetic oligonucleotide
  Antisense strand to SEQ ID NO: 1820489
gauccaaggacucaugucu

SEQ ID NO: 1820491 - RNA, 19 nt, Artificial Sequence
  Description of Artificial Sequence: Synthetic oligonucleotide
  Sense strand starting at position 3907 of SEQ ID NO: 1563572
acaugaguccuuggauccu

SEQ ID NO: 1820492 - RNA, 19 nt, Artificial Sequence
  Description of Artificial Sequence: Synthetic oligonucleotide
  Antisense strand to SEQ ID NO: 1820491
aggauccaaggacucaugu

SEQ ID NO: 1820493 - RNA, 19 nt, Artificial Sequence
  Description of Artificial Sequence: Synthetic oligonucleotide
  Sense strand starting at position 82 of SEQ ID NO: 1563573
auagacuccugcgcugaaa

SEQ ID NO: 1820494 - RNA, 19 nt, Artificial Sequence
  Description of Artificial Sequence: Synthetic oligonucleotide
  Antisense strand to SEQ ID NO: 1820493
uuucagcgcaggagucuau

SEQ ID NO: 1820495 - RNA, 19 nt, Artificial Sequence
  Description of Artificial Sequence: Synthetic oligonucleotide
  Sense strand starting at position 84 of SEQ ID NO: 1563573
agacuccugcgcugaaaua

SEQ ID NO: 1820496 - RNA, 19 nt, Artificial Sequence
  Description of Artificial Sequence: Synthetic oligonucleotide
  Antisense strand to SEQ ID NO: 1820495
uauuucagcgcaggagucu

SEQ ID NO: 1820497 - RNA, 19 nt, Artificial Sequence
  Description of Artificial Sequence: Synthetic oligonucleotide
  Sense strand starting at position 85 of SEQ ID NO: 1563573
gacuccugcgcugaaauaa

SEQ ID NO: 1820498 - RNA, 19 nt, Artificial Sequence
  Description of Artificial Sequence: Synthetic oligonucleotide
  Antisense strand to SEQ ID NO: 1820497
uuauuucagcgcaggaguc

SEQ ID NO: 1820499 - RNA, 19 nt, Artificial Sequence
  Description of Artificial Sequence: Synthetic oligonucleotide
  Sense strand starting at position 126 of SEQ ID NO: 1563573
acauaagcaugcuuugcaa

SEQ ID NO: 1820500 - RNA, 19 nt, Artificial Sequence
  Description of Artificial Sequence: Synthetic oligonucleotide
  Antisense strand to SEQ ID NO: 1820499
uugcaaagcaugcuuaugu

SEQ ID NO: 1820501 - RNA, 19 nt, Artificial Sequence
  Description of Artificial Sequence: Synthetic oligonucleotide
  Sense strand starting at position 238 of SEQ ID NO: 1563573
ggguguagcacacauaaau

SEQ ID NO: 1820502 - RNA, 19 nt, Artificial Sequence
  Description of Artificial Sequence: Synthetic oligonucleotide
  Antisense strand to SEQ ID NO: 1820501
auuuaugugugcuacaccc

SEQ ID NO: 1820503 - RNA, 19 nt, Artificial Sequence
  Description of Artificial Sequence: Synthetic oligonucleotide
  Sense strand starting at position 263 of SEQ ID NO: 1563573
auaacagaucggugacucu

SEQ ID NO: 1820504 - RNA, 19 nt, Artificial Sequence
  Description of Artificial Sequence: Synthetic oligonucleotide
  Antisense strand to SEQ ID NO: 1820503
agagucaccgaucuguuau

SEQ ID NO: 1820505 - RNA, 19 nt, Artificial Sequence
  Description of Artificial Sequence: Synthetic oligonucleotide
  Sense strand starting at position 266 of SEQ ID NO: 1563573
acagaucggugacucuuau

SEQ ID NO: 1820506 - RNA, 19 nt, Artificial Sequence
  Description of Artificial Sequence: Synthetic oligonucleotide
  Antisense strand to SEQ ID NO: 1820505
auaagagucaccgaucugu

SEQ ID NO: 1820507 - RNA, 19 nt, Artificial Sequence
  Description of Artificial Sequence: Synthetic oligonucleotide
  Sense strand starting at position 337 of SEQ ID NO: 1563573
uuugguuaagaauggcaaa

SEQ ID NO: 1820508 - RNA, 19 nt, Artificial Sequence
  Description of Artificial Sequence: Synthetic oligonucleotide
  Antisense strand to SEQ ID NO: 1820507
uuugccauucuuaaccaaa

SEQ ID NO: 1820509 - RNA, 19 nt, Artificial Sequence
  Description of Artificial Sequence: Synthetic oligonucleotide
  Sense strand starting at position 338 of SEQ ID NO: 1563573
uugguuaagaauggcaaau

SEQ ID NO: 1820510 - RNA, 19 nt, Artificial Sequence
  Description of Artificial Sequence: Synthetic oligonucleotide
  Antisense strand to SEQ ID NO: 1820509
auuugccauucuuaaccaa

SEQ ID NO: 1820511 - RNA, 19 nt, Artificial Sequence
  Description of Artificial Sequence: Synthetic oligonucleotide
  Sense strand starting at position 412 of SEQ ID NO: 1563573
auuuccagucgcuggaaua

SEQ ID NO: 1820512 - RNA, 19 nt, Artificial Sequence
  Description of Artificial Sequence: Synthetic oligonucleotide
  Antisense strand to SEQ ID NO: 1820511
uauuccagcgacuggaaau

SEQ ID NO: 1820513 - RNA, 19 nt, Artificial Sequence
  Description of Artificial Sequence: Synthetic oligonucleotide
  Sense strand starting at position 514 of SEQ ID NO: 1563573
aguagcauguaaccgauua

SEQ ID NO: 1820514 - RNA, 19 nt, Artificial Sequence
  Description of Artificial Sequence: Synthetic oligonucleotide
  Antisense strand to SEQ ID NO: 1820513
uaaucgguuacaugcuacu

SEQ ID NO: 1820515 - RNA, 19 nt, Artificial Sequence
  Description of Artificial Sequence: Synthetic oligonucleotide
  Sense strand starting at position 808 of SEQ ID NO: 1563573
cugcaauuuccacgccaua

SEQ ID NO: 1820516 - RNA, 19 nt, Artificial Sequence
  Description of Artificial Sequence: Synthetic oligonucleotide
  Antisense strand to SEQ ID NO: 1820515
uauggcguggaaauugcag

SEQ ID NO: 1820517 - RNA, 19 nt, Artificial Sequence
  Description of Artificial Sequence: Synthetic oligonucleotide
  Sense strand starting at position 869 of SEQ ID NO: 1563573
cgggcaugcacauauguga

SEQ ID NO: 1820518 - RNA, 19 nt, Artificial Sequence
  Description of Artificial Sequence: Synthetic oligonucleotide
  Antisense strand to SEQ ID NO: 1820517
ucacauaugugcaugcccg

SEQ ID NO: 1820519 - RNA, 19 nt, Artificial Sequence
  Description of Artificial Sequence: Synthetic oligonucleotide
  Sense strand starting at position 878 of SEQ ID NO: 1563573
acauaugugacauguccga

SEQ ID NO: 1820520 - RNA, 19 nt, Artificial Sequence
  Description of Artificial Sequence: Synthetic oligonucleotide
  Antisense strand to SEQ ID NO: 1820519
ucggacaugucacauaugu

SEQ ID NO: 1820521 - RNA, 19 nt, Artificial Sequence
  Description of Artificial Sequence: Synthetic oligonucleotide
  Sense strand starting at position 966 of SEQ ID NO: 1563573
gcagcaagcguguuacugu

SEQ ID NO: 1820522 - RNA, 19 nt, Artificial Sequence
  Description of Artificial Sequence: Synthetic oligonucleotide
  Antisense strand to SEQ ID NO: 1820521
acaguaacacgcuugcugc

SEQ ID NO: 1820523 - RNA, 19 nt, Artificial Sequence
  Description of Artificial Sequence: Synthetic oligonucleotide
  Sense strand starting at position 977 of SEQ ID NO: 1563573
guuacuguuacggaggcaa

SEQ ID NO: 1820524 - RNA, 19 nt, Artificial Sequence
  Description of Artificial Sequence: Synthetic oligonucleotide
  Antisense strand to SEQ ID NO: 1820523
uugccuccguaacaguaac

SEQ ID NO: 1820525 - RNA, 19 nt, Artificial Sequence
  Description of Artificial Sequence: Synthetic oligonucleotide
  Sense strand starting at position 979 of SEQ ID NO: 1563573
uacuguuacggaggcaaga

SEQ ID NO: 1820526 - RNA, 19 nt, Artificial Sequence
  Description of Artificial Sequence: Synthetic oligonucleotide
  Antisense strand to SEQ ID NO: 1820525
ucuugccuccguaacagua

SEQ ID NO: 1820527 - RNA, 19 nt, Artificial Sequence
  Description of Artificial Sequence: Synthetic oligonucleotide
  Sense strand starting at position 1034 of SEQ ID NO: 1563573
uggccucuucugcacaaga

SEQ ID NO: 1820528 - RNA, 19 nt, Artificial Sequence
  Description of Artificial Sequence: Synthetic oligonucleotide
  Antisense strand to SEQ ID NO: 1820527
ucuugugcagaagaggcca

SEQ ID NO: 1820529 - RNA, 19 nt, Artificial Sequence
  Description of Artificial Sequence: Synthetic oligonucleotide
  Sense strand starting at position 1036 of SEQ ID NO: 1563573
gccucuucugcacaagaug

SEQ ID NO: 1820530 - RNA, 19 nt, Artificial Sequence
  Description of Artificial Sequence: Synthetic oligonucleotide
  Antisense strand to SEQ ID NO: 1820529
caucuugugcagaagaggc

SEQ ID NO: 1820531 - RNA, 19 nt, Artificial Sequence
  Description of Artificial Sequence: Synthetic oligonucleotide
  Sense strand starting at position 1184 of SEQ ID NO: 1563573
aagaguuugacccgggaaa

SEQ ID NO: 1820532 - RNA, 19 nt, Artificial Sequence
  Description of Artificial Sequence: Synthetic oligonucleotide
  Antisense strand to SEQ ID NO: 1820531
uuucccgggucaaacucuu

SEQ ID NO: 1820533 - RNA, 19 nt, Artificial Sequence
  Description of Artificial Sequence: Synthetic oligonucleotide
  Sense strand starting at position 1890 of SEQ ID NO: 1563573
aacuucuuggcgugauaau

SEQ ID NO: 1820534 - RNA, 19 nt, Artificial Sequence
  Description of Artificial Sequence: Synthetic oligonucleotide
  Antisense strand to SEQ ID NO: 1820533
auuaucacgccaagaaguu

SEQ ID NO: 1820535 - RNA, 19 nt, Artificial Sequence
  Description of Artificial Sequence: Synthetic oligonucleotide
  Sense strand starting at position 1891 of SEQ ID NO: 1563573
acuucuuggcgugauaauc

SEQ ID NO: 1820536 - RNA, 19 nt, Artificial Sequence
  Description of Artificial Sequence: Synthetic oligonucleotide
  Antisense strand to SEQ ID NO: 1820535
gauuaucacgccaagaagu

SEQ ID NO: 1820537 - RNA, 19 nt, Artificial Sequence
  Description of Artificial Sequence: Synthetic oligonucleotide
  Sense strand starting at position 1897 of SEQ ID NO: 1563573
uggcgugauaaucgggaaa

SEQ ID NO: 1820538 - RNA, 19 nt, Artificial Sequence
  Description of Artificial Sequence: Synthetic oligonucleotide
  Antisense strand to SEQ ID NO: 1820537
uuucccgauuaucacgcca

SEQ ID NO: 1820539 - RNA, 19 nt, Artificial Sequence
  Description of Artificial Sequence: Synthetic oligonucleotide
  Sense strand starting at position 1928 of SEQ ID NO: 1563573
ccagguuuccgacagggau

SEQ ID NO: 1820540 - RNA, 19 nt, Artificial Sequence
  Description of Artificial Sequence: Synthetic oligonucleotide
  Antisense strand to SEQ ID NO: 1820539
aucccugucggaaaccugg

SEQ ID NO: 1820541 - RNA, 19 nt, Artificial Sequence
  Description of Artificial Sequence: Synthetic oligonucleotide
  Sense strand starting at position 2252 of SEQ ID NO: 1563573
ggagcuucgggaggaaaca

SEQ ID NO: 1820542 - RNA, 19 nt, Artificial Sequence
  Description of Artificial Sequence: Synthetic oligonucleotide
  Antisense strand to SEQ ID NO: 1820541
uguuuccucccgaagcucc

SEQ ID NO: 1820543 - RNA, 19 nt, Artificial Sequence
  Description of Artificial Sequence: Synthetic oligonucleotide
  Sense strand starting at position 2362 of SEQ ID NO: 1563573
aguguuugagcugaccaga

SEQ ID NO: 1820544 - RNA, 19 nt, Artificial Sequence
  Description of Artificial Sequence: Synthetic oligonucleotide
  Antisense strand to SEQ ID NO: 1820543
ucuggucagcucaaacacu

SEQ ID NO: 1820545 - RNA, 19 nt, Artificial Sequence
  Description of Artificial Sequence: Synthetic oligonucleotide
  Sense strand starting at position 2401 of SEQ ID NO: 1563573
cucagaaguucgccagauc

SEQ ID NO: 1820546 - RNA, 19 nt, Artificial Sequence
  Description of Artificial Sequence: Synthetic oligonucleotide
  Antisense strand to SEQ ID NO: 1820545
gaucuggcgaacuucugag

SEQ ID NO: 1820547 - RNA, 19 nt, Artificial Sequence
  Description of Artificial Sequence: Synthetic oligonucleotide
  Sense strand starting at position 2971 of SEQ ID NO: 1563573
agagaaauggccugucuac

SEQ ID NO: 1820548 - RNA, 19 nt, Artificial Sequence
  Description of Artificial Sequence: Synthetic oligonucleotide
  Antisense strand to SEQ ID NO: 1820547
guagacaggccauuucucu

SEQ ID NO: 1820549 - RNA, 19 nt, Artificial Sequence
  Description of Artificial Sequence: Synthetic oligonucleotide
  Sense strand starting at position 3344 of SEQ ID NO: 1563573
cucugcaaucuugaaaugu

SEQ ID NO: 1820550 - RNA, 19 nt, Artificial Sequence
  Description of Artificial Sequence: Synthetic oligonucleotide
  Antisense strand to SEQ ID NO: 1820549
acauuucaagauugcagag

SEQ ID NO: 1820551 - RNA, 19 nt, Artificial Sequence
  Description of Artificial Sequence: Synthetic oligonucleotide
  Sense strand starting at position 3360 of SEQ ID NO: 1563573
ugucucuugcuccaucaga

SEQ ID NO: 1820552 - RNA, 19 nt, Artificial Sequence
  Description of Artificial Sequence: Synthetic oligonucleotide
  Antisense strand to SEQ ID NO: 1820551
ucugauggagcaagagaca

SEQ ID NO: 1820553 - RNA, 19 nt, Artificial Sequence
  Description of Artificial Sequence: Synthetic oligonucleotide
  Sense strand starting at position 3423 of SEQ ID NO: 1563573
guggguugagacugauagu

SEQ ID NO: 1820554 - RNA, 19 nt, Artificial Sequence
  Description of Artificial Sequence: Synthetic oligonucleotide
  Antisense strand to SEQ ID NO: 1820553
acuaucagucucaacccac

SEQ ID NO: 1820555 - RNA, 19 nt, Artificial Sequence
  Description of Artificial Sequence: Synthetic oligonucleotide
  Sense strand starting at position 3424 of SEQ ID NO: 1563573
uggguugagacugauaguu

SEQ ID NO: 1820556 - RNA, 19 nt, Artificial Sequence
  Description of Artificial Sequence: Synthetic oligonucleotide
  Antisense strand to SEQ ID NO: 1820555
aacuaucagucucaaccca

SEQ ID NO: 1820557 - RNA, 19 nt, Artificial Sequence
  Description of Artificial Sequence: Synthetic oligonucleotide
  Sense strand starting at position 3455 of SEQ ID NO: 1563573
ugccaaagggucugacauu

SEQ ID NO: 1820558 - RNA, 19 nt, Artificial Sequence
  Description of Artificial Sequence: Synthetic oligonucleotide
  Antisense strand to SEQ ID NO: 1820557
aaugucagacccuuuggca

SEQ ID NO: 1820559 - RNA, 19 nt, Artificial Sequence
  Description of Artificial Sequence: Synthetic oligonucleotide
  Sense strand starting at position 3456 of SEQ ID NO: 1563573
gccaaagggucugacauuu

SEQ ID NO: 1820560 - RNA, 19 nt, Artificial Sequence
  Description of Artificial Sequence: Synthetic oligonucleotide
  Antisense strand to SEQ ID NO: 1820559
aaaugucagacccuuuggc

SEQ ID NO: 1820561 - RNA, 19 nt, Artificial Sequence
  Description of Artificial Sequence: Synthetic oligonucleotide
  Sense strand starting at position 3634 of SEQ ID NO: 1563573
ugaagaguaggaggcuauu

SEQ ID NO: 1820562 - RNA, 19 nt, Artificial Sequence
  Description of Artificial Sequence: Synthetic oligonucleotide
  Antisense strand to SEQ ID NO: 1820561
aauagccuccuacucuuca

SEQ ID NO: 1820563 - RNA, 19 nt, Artificial Sequence
  Description of Artificial Sequence: Synthetic oligonucleotide
  Sense strand starting at position 3702 of SEQ ID NO: 1563573
agggaaauaucuuacauaa

SEQ ID NO: 1820564 - RNA, 19 nt, Artificial Sequence
  Description of Artificial Sequence: Synthetic oligonucleotide
  Antisense strand to SEQ ID NO: 1820563
uuauguaagauauuucccu

SEQ ID NO: 1820565 - RNA, 19 nt, Artificial Sequence
  Description of Artificial Sequence: Synthetic oligonucleotide
  Sense strand starting at position 3704 of SEQ ID NO: 1563573
ggaaauaucuuacauaaag

SEQ ID NO: 1820566 - RNA, 19 nt, Artificial Sequence
  Description of Artificial Sequence: Synthetic oligonucleotide
  Antisense strand to SEQ ID NO: 1820565
cuuuauguaagauauuucc

SEQ ID NO: 1820567 - RNA, 19 nt, Artificial Sequence
  Description of Artificial Sequence: Synthetic oligonucleotide
  Sense strand starting at position 3765 of SEQ ID NO: 1563573
gggugaugaacagguacaa

SEQ ID NO: 1820568 - RNA, 19 nt, Artificial Sequence
  Description of Artificial Sequence: Synthetic oligonucleotide
  Antisense strand to SEQ ID NO: 1820567
uuguaccuguucaucaccc

SEQ ID NO: 1820569 - RNA, 19 nt, Artificial Sequence
  Description of Artificial Sequence: Synthetic oligonucleotide
  Sense strand starting at position 3777 of SEQ ID NO: 1563573
gguacaaggucucugcuua

SEQ ID NO: 1820570 - RNA, 19 nt, Artificial Sequence
  Description of Artificial Sequence: Synthetic oligonucleotide
  Antisense strand to SEQ ID NO: 1820569
uaagcagagaccuuguacc

SEQ ID NO: 1820571 - RNA, 19 nt, Artificial Sequence
  Description of Artificial Sequence: Synthetic oligonucleotide
  Sense strand starting at position 3899 of SEQ ID NO: 1563573
gcuaaagaaggaugaaguu

SEQ ID NO: 1820572 - RNA, 19 nt, Artificial Sequence
  Description of Artificial Sequence: Synthetic oligonucleotide
  Antisense strand to SEQ ID NO: 1820571
aacuucauccuucuuuagc

SEQ ID NO: 1820573 - RNA, 19 nt, Artificial Sequence
  Description of Artificial Sequence: Synthetic oligonucleotide
  Sense strand starting at position 31 of SEQ ID NO: 1563574
gagccuaugcuauaucaga

SEQ ID NO: 1820574 - RNA, 19 nt, Artificial Sequence
  Description of Artificial Sequence: Synthetic oligonucleotide
  Antisense strand to SEQ ID NO: 1820573
ucugauauagcauaggcuc

SEQ ID NO: 1820575 - RNA, 19 nt, Artificial Sequence
  Description of Artificial Sequence: Synthetic oligonucleotide
  Sense strand starting at position 311 of SEQ ID NO: 1563574
aauaauuguuuggugagaa

SEQ ID NO: 1820576 - RNA, 19 nt, Artificial Sequence
  Description of Artificial Sequence: Synthetic oligonucleotide
  Antisense strand to SEQ ID NO: 1820575
uucucaccaaacaauuauu

SEQ ID NO: 1820577 - RNA, 19 nt, Artificial Sequence
  Description of Artificial Sequence: Synthetic oligonucleotide
  Sense strand starting at position 321 of SEQ ID NO: 1563574
uggugagaauuuccugugu

SEQ ID NO: 1820578 - RNA, 19 nt, Artificial Sequence
  Description of Artificial Sequence: Synthetic oligonucleotide
  Antisense strand to SEQ ID NO: 1820577
acacaggaaauucucacca

SEQ ID NO: 1820579 - RNA, 19 nt, Artificial Sequence
  Description of Artificial Sequence: Synthetic oligonucleotide
  Sense strand starting at position 387 of SEQ ID NO: 1563574
acuuuacaagcagagugau

SEQ ID NO: 1820580 - RNA, 19 nt, Artificial Sequence
  Description of Artificial Sequence: Synthetic oligonucleotide
  Antisense strand to SEQ ID NO: 1820579
aucacucugcuuguaaagu

SEQ ID NO: 1820581 - RNA, 19 nt, Artificial Sequence
  Description of Artificial Sequence: Synthetic oligonucleotide
  Sense strand starting at position 431 of SEQ ID NO: 1563574
acuguauccugaguaaaga

SEQ ID NO: 1820582 - RNA, 19 nt, Artificial Sequence
  Description of Artificial Sequence: Synthetic oligonucleotide
  Antisense strand to SEQ ID NO: 1820581
ucuuuacucaggauacagu

SEQ ID NO: 1820583 - RNA, 19 nt, Artificial Sequence
  Description of Artificial Sequence: Synthetic oligonucleotide
  Sense strand starting at position 471 of SEQ ID NO: 1563574
gccuuuaaugaugauuaua

SEQ ID NO: 1820584 - RNA, 19 nt, Artificial Sequence
  Description of Artificial Sequence: Synthetic oligonucleotide
  Antisense strand to SEQ ID NO: 1820583
uauaaucaucauuaaaggc

SEQ ID NO: 1820585 - RNA, 19 nt, Artificial Sequence
  Description of Artificial Sequence: Synthetic oligonucleotide
  Sense strand starting at position 581 of SEQ ID NO: 1563574
cucacaaauucuguaacga

SEQ ID NO: 1820586 - RNA, 19 nt, Artificial Sequence
  Description of Artificial Sequence: Synthetic oligonucleotide
  Antisense strand to SEQ ID NO: 1820585
ucguuacagaauuugugag

SEQ ID NO: 1820587 - RNA, 19 nt, Artificial Sequence
  Description of Artificial Sequence: Synthetic oligonucleotide
  Sense strand starting at position 582 of SEQ ID NO: 1563574
ucacaaauucuguaacgau

SEQ ID NO: 1820588 - RNA, 19 nt, Artificial Sequence
  Description of Artificial Sequence: Synthetic oligonucleotide
  Antisense strand to SEQ ID NO: 1820587
aucguuacagaauuuguga

SEQ ID NO: 1820589 - RNA, 19 nt, Artificial Sequence
  Description of Artificial Sequence: Synthetic oligonucleotide
  Sense strand starting at position 771 of SEQ ID NO: 1563574
gaggauauccugugaagua

SEQ ID NO: 1820590 - RNA, 19 nt, Artificial Sequence
  Description of Artificial Sequence: Synthetic oligonucleotide
  Antisense strand to SEQ ID NO: 1820589
uacuucacaggauauccuc

SEQ ID NO: 1820591 - RNA, 19 nt, Artificial Sequence
  Description of Artificial Sequence: Synthetic oligonucleotide
  Sense strand starting at position 949 of SEQ ID NO: 1563574
gguuaagaguucucuggga

SEQ ID NO: 1820592 - RNA, 19 nt, Artificial Sequence
  Description of Artificial Sequence: Synthetic oligonucleotide
  Antisense strand to SEQ ID NO: 1820591
ucccagagaacucuuaacc

SEQ ID NO: 1820593 - RNA, 19 nt, Artificial Sequence
  Description of Artificial Sequence: Synthetic oligonucleotide
  Sense strand starting at position 951 of SEQ ID NO: 1563574
uuaagaguucucugggauu

SEQ ID NO: 1820594 - RNA, 19 nt, Artificial Sequence
  Description of Artificial Sequence: Synthetic oligonucleotide
  Antisense strand to SEQ ID NO: 1820593
aaucccagagaacucuuaa

SEQ ID NO: 1820595 - RNA, 19 nt, Artificial Sequence
  Description of Artificial Sequence: Synthetic oligonucleotide
  Sense strand starting at position 953 of SEQ ID NO: 1563574
aagaguucucugggauucu

SEQ ID NO: 1820596 - RNA, 19 nt, Artificial Sequence
  Description of Artificial Sequence: Synthetic oligonucleotide
  Antisense strand to SEQ ID NO: 1820595
agaaucccagagaacucuu

SEQ ID NO: 1820597 - RNA, 19 nt, Artificial Sequence
  Description of Artificial Sequence: Synthetic oligonucleotide
  Sense strand starting at position 1323 of SEQ ID NO: 1563574
ugccuaucuucugugauuu

SEQ ID NO: 1820598 - RNA, 19 nt, Artificial Sequence
  Description of Artificial Sequence: Synthetic oligonucleotide
  Antisense strand to SEQ ID NO: 1820597
aaaucacagaagauaggca

SEQ ID NO: 1820599 - RNA, 19 nt, Artificial Sequence
  Description of Artificial Sequence: Synthetic oligonucleotide
  Sense strand starting at position 1324 of SEQ ID NO: 1563574
gccuaucuucugugauuuc

SEQ ID NO: 1820600 - RNA, 19 nt, Artificial Sequence
  Description of Artificial Sequence: Synthetic oligonucleotide
  Antisense strand to SEQ ID NO: 1820599
gaaaucacagaagauaggc

SEQ ID NO: 1820601 - RNA, 19 nt, Artificial Sequence
  Description of Artificial Sequence: Synthetic oligonucleotide
  Sense strand starting at position 1782 of SEQ ID NO: 1563574
gcagaaagaucccugguau

SEQ ID NO: 1820602 - RNA, 19 nt, Artificial Sequence
  Description of Artificial Sequence: Synthetic oligonucleotide
  Antisense strand to SEQ ID NO: 1820601
auaccagggaucuuucugc

SEQ ID NO: 1820603 - RNA, 19 nt, Artificial Sequence
  Description of Artificial Sequence: Synthetic oligonucleotide
  Sense strand starting at position 1783 of SEQ ID NO: 1563574
cagaaagaucccugguaua

SEQ ID NO: 1820604 - RNA, 19 nt, Artificial Sequence
  Description of Artificial Sequence: Synthetic oligonucleotide
  Antisense strand to SEQ ID NO: 1820603
uauaccagggaucuuucug

SEQ ID NO: 1820605 - RNA, 19 nt, Artificial Sequence
  Description of Artificial Sequence: Synthetic oligonucleotide
  Sense strand starting at position 1821 of SEQ ID NO: 1563574
aggcauuaauguccaggau

SEQ ID NO: 1820606 - RNA, 19 nt, Artificial Sequence
  Description of Artificial Sequence: Synthetic oligonucleotide
  Antisense strand to SEQ ID NO: 1820605
auccuggacauuaaugccu

SEQ ID NO: 1820607 - RNA, 19 nt, Artificial Sequence
  Description of Artificial Sequence: Synthetic oligonucleotide
  Sense strand starting at position 1822 of SEQ ID NO: 1563574
ggcauuaauguccaggaua

SEQ ID NO: 1820608 - RNA, 19 nt, Artificial Sequence
  Description of Artificial Sequence: Synthetic oligonucleotide
  Antisense strand to SEQ ID NO: 1820607
uauccuggacauuaaugcc

SEQ ID NO: 1820609 - RNA, 19 nt, Artificial Sequence
  Description of Artificial Sequence: Synthetic oligonucleotide
  Sense strand starting at position 1931 of SEQ ID NO: 1563574
ugguccuacccagacaauu

SEQ ID NO: 1820610 - RNA, 19 nt, Artificial Sequence
  Description of Artificial Sequence: Synthetic oligonucleotide
  Antisense strand to SEQ ID NO: 1820609
aauugucuggguaggacca

SEQ ID NO: 1820611 - RNA, 19 nt, Artificial Sequence
  Description of Artificial Sequence: Synthetic oligonucleotide
  Sense strand starting at position 2014 of SEQ ID NO: 1563574
aguauucuccaagguaaug

SEQ ID NO: 1820612 - RNA, 19 nt, Artificial Sequence
  Description of Artificial Sequence: Synthetic oligonucleotide
  Antisense strand to SEQ ID NO: 1820611
cauuaccuuggagaauacu

SEQ ID NO: 1820613 - RNA, 19 nt, Artificial Sequence
  Description of Artificial Sequence: Synthetic oligonucleotide
  Sense strand starting at position 2048 of SEQ ID NO: 1563574
cccauacucucaguauaga

SEQ ID NO: 1820614 - RNA, 19 nt, Artificial Sequence
  Description of Artificial Sequence: Synthetic oligonucleotide
  Antisense strand to SEQ ID NO: 1820613
ucuauacugagaguauggg

SEQ ID NO: 1820615 - RNA, 19 nt, Artificial Sequence
  Description of Artificial Sequence: Synthetic oligonucleotide
  Sense strand starting at position 2100 of SEQ ID NO: 1563574
auggcucucccagaucauu

SEQ ID NO: 1820616 - RNA, 19 nt, Artificial Sequence
  Description of Artificial Sequence: Synthetic oligonucleotide
  Antisense strand to SEQ ID NO: 1820615
aaugaucugggagagccau

SEQ ID NO: 1820617 - RNA, 19 nt, Artificial Sequence
  Description of Artificial Sequence: Synthetic oligonucleotide
  Sense strand starting at position 2158 of SEQ ID NO: 1563574
agaccauugcuuggacuca

SEQ ID NO: 1820618 - RNA, 19 nt, Artificial Sequence
  Description of Artificial Sequence: Synthetic oligonucleotide
  Antisense strand to SEQ ID NO: 1820617
ugaguccaagcaauggucu

SEQ ID NO: 1820619 - RNA, 19 nt, Artificial Sequence
  Description of Artificial Sequence: Synthetic oligonucleotide
  Sense strand starting at position 2308 of SEQ ID NO: 1563574
ggcugccuuauuugguaga

SEQ ID NO: 1820620 - RNA, 19 nt, Artificial Sequence
  Description of Artificial Sequence: Synthetic oligonucleotide
  Antisense strand to SEQ ID NO: 1820619
ucuaccaaauaaggcagcc

SEQ ID NO: 1820621 - RNA, 19 nt, Artificial Sequence
  Description of Artificial Sequence: Synthetic oligonucleotide
  Sense strand starting at position 2310 of SEQ ID NO: 1563574
cugccuuauuugguagacu

SEQ ID NO: 1820622 - RNA, 19 nt, Artificial Sequence
  Description of Artificial Sequence: Synthetic oligonucleotide
  Antisense strand to SEQ ID NO: 1820621
agucuaccaaauaaggcag

SEQ ID NO: 1820623 - RNA, 19 nt, Artificial Sequence
  Description of Artificial Sequence: Synthetic oligonucleotide
  Sense strand starting at position 2319 of SEQ ID NO: 1563574
uugguagacuucucccaca

SEQ ID NO: 1820624 - RNA, 19 nt, Artificial Sequence
  Description of Artificial Sequence: Synthetic oligonucleotide
  Antisense strand to SEQ ID NO: 1820623
ugugggagaagucuaccaa

SEQ ID NO: 1820625 - RNA, 19 nt, Artificial Sequence
  Description of Artificial Sequence: Synthetic oligonucleotide
  Sense strand starting at position 2547 of SEQ ID NO: 1563574
aucaaagucccuuguuaaa

SEQ ID NO: 1820626 - RNA, 19 nt, Artificial Sequence
  Description of Artificial Sequence: Synthetic oligonucleotide
  Antisense strand to SEQ ID NO: 1820625
uuuaacaagggacuuugau

SEQ ID NO: 1820627 - RNA, 19 nt, Artificial Sequence
  Description of Artificial Sequence: Synthetic oligonucleotide
  Sense strand starting at position 2578 of SEQ ID NO: 1563574
cuaugagcagccuaugaaa

SEQ ID NO: 1820628 - RNA, 19 nt, Artificial Sequence
  Description of Artificial Sequence: Synthetic oligonucleotide
  Antisense strand to SEQ ID NO: 1820627
uuucauaggcugcucauag

SEQ ID NO: 1820629 - RNA, 19 nt, Artificial Sequence
  Description of Artificial Sequence: Synthetic oligonucleotide
  Sense strand starting at position 2664 of SEQ ID NO: 1563574
ugaagcacucaauaguguu

SEQ ID NO: 1820630 - RNA, 19 nt, Artificial Sequence
  Description of Artificial Sequence: Synthetic oligonucleotide
  Antisense strand to SEQ ID NO: 1820629
aacacuauugagugcuuca

SEQ ID NO: 1820631 - RNA, 19 nt, Artificial Sequence
  Description of Artificial Sequence: Synthetic oligonucleotide
  Sense strand starting at position 2798 of SEQ ID NO: 1563574
aauguaaguuauucuggga

SEQ ID NO: 1820632 - RNA, 19 nt, Artificial Sequence
  Description of Artificial Sequence: Synthetic oligonucleotide
  Antisense strand to SEQ ID NO: 1820631
ucccagaauaacuuacauu

SEQ ID NO: 1820633 - RNA, 19 nt, Artificial Sequence
  Description of Artificial Sequence: Synthetic oligonucleotide
  Sense strand starting at position 2802 of SEQ ID NO: 1563574
uaaguuauucugggaucaa

SEQ ID NO: 1820634 - RNA, 19 nt, Artificial Sequence
  Description of Artificial Sequence: Synthetic oligonucleotide
  Antisense strand to SEQ ID NO: 1820633
uugaucccagaauaacuua

SEQ ID NO: 1820635 - RNA, 19 nt, Artificial Sequence
  Description of Artificial Sequence: Synthetic oligonucleotide
  Sense strand starting at position 2896 of SEQ ID NO: 1563574
aaggaaaucugucucaagu

SEQ ID NO: 1820636 - RNA, 19 nt, Artificial Sequence
  Description of Artificial Sequence: Synthetic oligonucleotide
  Antisense strand to SEQ ID NO: 1820635
acuugagacagauuuccuu

SEQ ID NO: 1820637 - RNA, 19 nt, Artificial Sequence
  Description of Artificial Sequence: Synthetic oligonucleotide
  Sense strand starting at position 3124 of SEQ ID NO: 1563574
acacuaagcguguaacaga

SEQ ID NO: 1820638 - RNA, 19 nt, Artificial Sequence
  Description of Artificial Sequence: Synthetic oligonucleotide
  Antisense strand to SEQ ID NO: 1820637
ucuguuacacgcuuagugu

SEQ ID NO: 1820639 - RNA, 19 nt, Artificial Sequence
  Description of Artificial Sequence: Synthetic oligonucleotide
  Sense strand starting at position 3423 of SEQ ID NO: 1563574
cugcacuggguuuaaugau

SEQ ID NO: 1820640 - RNA, 19 nt, Artificial Sequence
  Description of Artificial Sequence: Synthetic oligonucleotide
  Antisense strand to SEQ ID NO: 1820639
aucauuaaacccagugcag

SEQ ID NO: 1820641 - RNA, 19 nt, Artificial Sequence
  Description of Artificial Sequence: Synthetic oligonucleotide
  Sense strand starting at position 3431 of SEQ ID NO: 1563574
gguuuaaugauuugcuguc

SEQ ID NO: 1820642 - RNA, 19 nt, Artificial Sequence
  Description of Artificial Sequence: Synthetic oligonucleotide
  Antisense strand to SEQ ID NO: 1820641
gacagcaaaucauuaaacc

SEQ ID NO: 1820643 - RNA, 19 nt, Artificial Sequence
  Description of Artificial Sequence: Synthetic oligonucleotide
  Sense strand starting at position 3432 of SEQ ID NO: 1563574
guuuaaugauuugcuguca

SEQ ID NO: 1820644 - RNA, 19 nt, Artificial Sequence
  Description of Artificial Sequence: Synthetic oligonucleotide
  Antisense strand to SEQ ID NO: 1820643
ugacagcaaaucauuaaac

SEQ ID NO: 1820645 - RNA, 19 nt, Artificial Sequence
  Description of Artificial Sequence: Synthetic oligonucleotide
  Sense strand starting at position 3562 of SEQ ID NO: 1563574
agucaaucaugcuuagaag

SEQ ID NO: 1820646 - RNA, 19 nt, Artificial Sequence
  Description of Artificial Sequence: Synthetic oligonucleotide
  Antisense strand to SEQ ID NO: 1820645
cuucuaagcaugauugacu

SEQ ID NO: 1820647 - RNA, 19 nt, Artificial Sequence
  Description of Artificial Sequence: Synthetic oligonucleotide
  Sense strand starting at position 3835 of SEQ ID NO: 1563574
aaaggcauuucucaaggga

SEQ ID NO: 1820648 - RNA, 19 nt, Artificial Sequence
  Description of Artificial Sequence: Synthetic oligonucleotide
  Antisense strand to SEQ ID NO: 1820647
ucccuugagaaaugccuuu

SEQ ID NO: 1820649 - RNA, 19 nt, Artificial Sequence
  Description of Artificial Sequence: Synthetic oligonucleotide
  Sense strand starting at position 3866 of SEQ ID NO: 1563574
aucuuaauaugaguggucu

SEQ ID NO: 1820650 - RNA, 19 nt, Artificial Sequence
  Description of Artificial Sequence: Synthetic oligonucleotide
  Antisense strand to SEQ ID NO: 1820649
agaccacucauauuaagau

SEQ ID NO: 1820651 - RNA, 19 nt, Artificial Sequence
  Description of Artificial Sequence: Synthetic oligonucleotide
  Sense strand starting at position 3870 of SEQ ID NO: 1563574
uaauaugaguggucuuauc

SEQ ID NO: 1820652 - RNA, 19 nt, Artificial Sequence
  Description of Artificial Sequence: Synthetic oligonucleotide
  Antisense strand to SEQ ID NO: 1820651
gauaagaccacucauauua

SEQ ID NO: 1820653 - RNA, 19 nt, Artificial Sequence
  Description of Artificial Sequence: Synthetic oligonucleotide
  Sense strand starting at position 153 of SEQ ID NO: 1563575
gguuacauaucggcaauga

SEQ ID NO: 1820654 - RNA, 19 nt, Artificial Sequence
  Description of Artificial Sequence: Synthetic oligonucleotide
  Antisense strand to SEQ ID NO: 1820653
ucauugccgauauguaacc

SEQ ID NO: 1820655 - RNA, 19 nt, Artificial Sequence
  Description of Artificial Sequence: Synthetic oligonucleotide
  Sense strand starting at position 154 of SEQ ID NO: 1563575
guuacauaucggcaaugag

SEQ ID NO: 1820656 - RNA, 19 nt, Artificial Sequence
  Description of Artificial Sequence: Synthetic oligonucleotide
  Antisense strand to SEQ ID NO: 1820655
cucauugccgauauguaac

SEQ ID NO: 1820657 - RNA, 19 nt, Artificial Sequence
  Description of Artificial Sequence: Synthetic oligonucleotide
  Sense strand starting at position 157 of SEQ ID NO: 1563575
acauaucggcaaugaguua

SEQ ID NO: 1820658 - RNA, 19 nt, Artificial Sequence
  Description of Artificial Sequence: Synthetic oligonucleotide
  Antisense strand to SEQ ID NO: 1820657
uaacucauugccgauaugu

SEQ ID NO: 1820659 - RNA, 19 nt, Artificial Sequence
  Description of Artificial Sequence: Synthetic oligonucleotide
  Sense strand starting at position 222 of SEQ ID NO: 1563575
ggaguccuauuccuuaaga

SEQ ID NO: 1820660 - RNA, 19 nt, Artificial Sequence
  Description of Artificial Sequence: Synthetic oligonucleotide
  Antisense strand to SEQ ID NO: 1820659
ucuuaaggaauaggacucc

SEQ ID NO: 1820661 - RNA, 19 nt, Artificial Sequence
  Description of Artificial Sequence: Synthetic oligonucleotide
  Sense strand starting at position 392 of SEQ ID NO: 1563575
ccuacuguacucuagcuau

SEQ ID NO: 1820662 - RNA, 19 nt, Artificial Sequence
  Description of Artificial Sequence: Synthetic oligonucleotide
  Antisense strand to SEQ ID NO: 1820661
auagcuagaguacaguagg

SEQ ID NO: 1820663 - RNA, 19 nt, Artificial Sequence
  Description of Artificial Sequence: Synthetic oligonucleotide
  Sense strand starting at position 458 of SEQ ID NO: 1563575
gccuguucccagcaaggaa

SEQ ID NO: 1820664 - RNA, 19 nt, Artificial Sequence
  Description of Artificial Sequence: Synthetic oligonucleotide
  Antisense strand to SEQ ID NO: 1820663
uuccuugcugggaacaggc

SEQ ID NO: 1820665 - RNA, 19 nt, Artificial Sequence
  Description of Artificial Sequence: Synthetic oligonucleotide
  Sense strand starting at position 570 of SEQ ID NO: 1563575
cuagcaaggcauggagaau

SEQ ID NO: 1820666 - RNA, 19 nt, Artificial Sequence
  Description of Artificial Sequence: Synthetic oligonucleotide
  Antisense strand to SEQ ID NO: 1820665
auucuccaugccuugcuag

SEQ ID NO: 1820667 - RNA, 19 nt, Artificial Sequence
  Description of Artificial Sequence: Synthetic oligonucleotide
  Sense strand starting at position 661 of SEQ ID NO: 1563575
gugucaugucugaguguag

SEQ ID NO: 1820668 - RNA, 19 nt, Artificial Sequence
  Description of Artificial Sequence: Synthetic oligonucleotide
  Antisense strand to SEQ ID NO: 1820667
cuacacucagacaugacac

SEQ ID NO: 1820669 - RNA, 19 nt, Artificial Sequence
  Description of Artificial Sequence: Synthetic oligonucleotide
  Sense strand starting at position 708 of SEQ ID NO: 1563575
ggugucuuucuuggauuau

SEQ ID NO: 1820670 - RNA, 19 nt, Artificial Sequence
  Description of Artificial Sequence: Synthetic oligonucleotide
  Antisense strand to SEQ ID NO: 1820669
auaauccaagaaagacacc

SEQ ID NO: 1820671 - RNA, 19 nt, Artificial Sequence
  Description of Artificial Sequence: Synthetic oligonucleotide
  Sense strand starting at position 770 of SEQ ID NO: 1563575
ggcaaagguagcugucaca

SEQ ID NO: 1820672 - RNA, 19 nt, Artificial Sequence
  Description of Artificial Sequence: Synthetic oligonucleotide
  Antisense strand to SEQ ID NO: 1820671
ugugacagcuaccuuugcc

SEQ ID NO: 1820673 - RNA, 19 nt, Artificial Sequence
  Description of Artificial Sequence: Synthetic oligonucleotide
  Sense strand starting at position 797 of SEQ ID NO: 1563575
caugaugucuuaguauaga

SEQ ID NO: 1820674 - RNA, 19 nt, Artificial Sequence
  Description of Artificial Sequence: Synthetic oligonucleotide
  Antisense strand to SEQ ID NO: 1820673
ucuauacuaagacaucaug

SEQ ID NO: 1820675 - RNA, 19 nt, Artificial Sequence
  Description of Artificial Sequence: Synthetic oligonucleotide
  Sense strand starting at position 800 of SEQ ID NO: 1563575
gaugucuuaguauagaauu

SEQ ID NO: 1820676 - RNA, 19 nt, Artificial Sequence
  Description of Artificial Sequence: Synthetic oligonucleotide
  Antisense strand to SEQ ID NO: 1820675
aauucuauacuaagacauc

SEQ ID NO: 1820677 - RNA, 19 nt, Artificial Sequence
  Description of Artificial Sequence: Synthetic oligonucleotide
  Sense strand starting at position 839 of SEQ ID NO: 1563575
gcaaauuaccgaggagcga

SEQ ID NO: 1820678 - RNA, 19 nt, Artificial Sequence
  Description of Artificial Sequence: Synthetic oligonucleotide
  Antisense strand to SEQ ID NO: 1820677
ucgcuccucgguaauuugc

SEQ ID NO: 1820679 - RNA, 19 nt, Artificial Sequence
  Description of Artificial Sequence: Synthetic oligonucleotide
  Sense strand starting at position 854 of SEQ ID NO: 1563575
gcgaacacauuugcuuaga

SEQ ID NO: 1820680 - RNA, 19 nt, Artificial Sequence
  Description of Artificial Sequence: Synthetic oligonucleotide
  Antisense strand to SEQ ID NO: 1820679
ucuaagcaaauguguucgc

SEQ ID NO: 1820681 - RNA, 19 nt, Artificial Sequence
  Description of Artificial Sequence: Synthetic oligonucleotide
  Sense strand starting at position 888 of SEQ ID NO: 1563575
gucucagaucaaggcuuau

SEQ ID NO: 1820682 - RNA, 19 nt, Artificial Sequence
  Description of Artificial Sequence: Synthetic oligonucleotide
  Antisense strand to SEQ ID NO: 1820681
auaagccuugaucugagac

SEQ ID NO: 1820683 - RNA, 19 nt, Artificial Sequence
  Description of Artificial Sequence: Synthetic oligonucleotide
  Sense strand starting at position 900 of SEQ ID NO: 1563575
ggcuuauauuaauugugua

SEQ ID NO: 1820684 - RNA, 19 nt, Artificial Sequence
  Description of Artificial Sequence: Synthetic oligonucleotide
  Antisense strand to SEQ ID NO: 1820683
uacacaauuaauauaagcc

SEQ ID NO: 1820685 - RNA, 19 nt, Artificial Sequence
  Description of Artificial Sequence: Synthetic oligonucleotide
  Sense strand starting at position 948 of SEQ ID NO: 1563575
uguugaacaguuuguauag

SEQ ID NO: 1820686 - RNA, 19 nt, Artificial Sequence
  Description of Artificial Sequence: Synthetic oligonucleotide
  Antisense strand to SEQ ID NO: 1820685
cuauacaaacuguucaaca

SEQ ID NO: 1820687 - RNA, 19 nt, Artificial Sequence
  Description of Artificial Sequence: Synthetic oligonucleotide
  Sense strand starting at position 949 of SEQ ID NO: 1563575
guugaacaguuuguauagu

SEQ ID NO: 1820688 - RNA, 19 nt, Artificial Sequence
  Description of Artificial Sequence: Synthetic oligonucleotide
  Antisense strand to SEQ ID NO: 1820687
acuauacaaacuguucaac

SEQ ID NO: 1820689 - RNA, 19 nt, Artificial Sequence
  Description of Artificial Sequence: Synthetic oligonucleotide
  Sense strand starting at position 1009 of SEQ ID NO: 1563575
cugcuuugggcccaagaga

SEQ ID NO: 1820690 - RNA, 19 nt, Artificial Sequence
  Description of Artificial Sequence: Synthetic oligonucleotide
  Antisense strand to SEQ ID NO: 1820689
ucucuugggcccaaagcag

SEQ ID NO: 1820691 - RNA, 19 nt, Artificial Sequence
  Description of Artificial Sequence: Synthetic oligonucleotide
  Sense strand starting at position 1062 of SEQ ID NO: 1563575
gguuuccucacugaggcaa

SEQ ID NO: 1820692 - RNA, 19 nt, Artificial Sequence
  Description of Artificial Sequence: Synthetic oligonucleotide
  Antisense strand to SEQ ID NO: 1820691
uugccucagugaggaaacc

SEQ ID NO: 1820693 - RNA, 19 nt, Artificial Sequence
  Description of Artificial Sequence: Synthetic oligonucleotide
  Sense strand starting at position 1115 of SEQ ID NO: 1563575
caggacuugugcccuuaca

SEQ ID NO: 1820694 - RNA, 19 nt, Artificial Sequence
  Description of Artificial Sequence: Synthetic oligonucleotide
  Antisense strand to SEQ ID NO: 1820693
uguaagggcacaaguccug

SEQ ID NO: 1820695 - RNA, 19 nt, Artificial Sequence
  Description of Artificial Sequence: Synthetic oligonucleotide
  Sense strand starting at position 1305 of SEQ ID NO: 1563575
gcaggauccuguuccagga

SEQ ID NO: 1820696 - RNA, 19 nt, Artificial Sequence
  Description of Artificial Sequence: Synthetic oligonucleotide
  Antisense strand to SEQ ID NO: 1820695
uccuggaacaggauccugc

SEQ ID NO: 1820697 - RNA, 19 nt, Artificial Sequence
  Description of Artificial Sequence: Synthetic oligonucleotide
  Sense strand starting at position 1309 of SEQ ID NO: 1563575
gauccuguuccaggaaauc

SEQ ID NO: 1820698 - RNA, 19 nt, Artificial Sequence
  Description of Artificial Sequence: Synthetic oligonucleotide
  Antisense strand to SEQ ID NO: 1820697
gauuuccuggaacaggauc

SEQ ID NO: 1820699 - RNA, 19 nt, Artificial Sequence
  Description of Artificial Sequence: Synthetic oligonucleotide
  Sense strand starting at position 2157 of SEQ ID NO: 1563575
gucuguucgcguccaagga

SEQ ID NO: 1820700 - RNA, 19 nt, Artificial Sequence
  Description of Artificial Sequence: Synthetic oligonucleotide
  Antisense strand to SEQ ID NO: 1820699
uccuuggacgcgaacagac

SEQ ID NO: 1820701 - RNA, 19 nt, Artificial Sequence
  Description of Artificial Sequence: Synthetic oligonucleotide
  Sense strand starting at position 2277 of SEQ ID NO: 1563575
uggcuucguccagcuauca

SEQ ID NO: 1820702 - RNA, 19 nt, Artificial Sequence
  Description of Artificial Sequence: Synthetic oligonucleotide
  Antisense strand to SEQ ID NO: 1820701
ugauagcuggacgaagcca

SEQ ID NO: 1820703 - RNA, 19 nt, Artificial Sequence
  Description of Artificial Sequence: Synthetic oligonucleotide
  Sense strand starting at position 2387 of SEQ ID NO: 1563575
ggagauugguguguggguu

SEQ ID NO: 1820704 - RNA, 19 nt, Artificial Sequence
  Description of Artificial Sequence: Synthetic oligonucleotide
  Antisense strand to SEQ ID NO: 1820703
aacccacacaccaaucucc

SEQ ID NO: 1820705 - RNA, 19 nt, Artificial Sequence
  Description of Artificial Sequence: Synthetic oligonucleotide
  Sense strand starting at position 2549 of SEQ ID NO: 1563575
uuggcagguucuucugaaa

SEQ ID NO: 1820706 - RNA, 19 nt, Artificial Sequence
  Description of Artificial Sequence: Synthetic oligonucleotide
  Antisense strand to SEQ ID NO: 1820705
uuucagaagaaccugccaa

SEQ ID NO: 1820707 - RNA, 19 nt, Artificial Sequence
  Description of Artificial Sequence: Synthetic oligonucleotide
  Sense strand starting at position 2699 of SEQ ID NO: 1563575
ugugcuagccuuuggaaag

SEQ ID NO: 1820708 - RNA, 19 nt, Artificial Sequence
  Description of Artificial Sequence: Synthetic oligonucleotide
  Antisense strand to SEQ ID NO: 1820707
cuuuccaaaggcuagcaca

SEQ ID NO: 1820709 - RNA, 19 nt, Artificial Sequence
  Description of Artificial Sequence: Synthetic oligonucleotide
  Sense strand starting at position 3044 of SEQ ID NO: 1563575
acagcuuaggcuuaggaaa

SEQ ID NO: 1820710 - RNA, 19 nt, Artificial Sequence
  Description of Artificial Sequence: Synthetic oligonucleotide
  Antisense strand to SEQ ID NO: 1820709
uuuccuaagccuaagcugu

SEQ ID NO: 1820711 - RNA, 19 nt, Artificial Sequence
  Description of Artificial Sequence: Synthetic oligonucleotide
  Sense strand starting at position 3201 of SEQ ID NO: 1563575
ccucguuucuuguuggaaa

SEQ ID NO: 1820712 - RNA, 19 nt, Artificial Sequence
  Description of Artificial Sequence: Synthetic oligonucleotide
  Antisense strand to SEQ ID NO: 1820711
uuuccaacaagaaacgagg

SEQ ID NO: 1820713 - RNA, 19 nt, Artificial Sequence
  Description of Artificial Sequence: Synthetic oligonucleotide
  Sense strand starting at position 3203 of SEQ ID NO: 1563575
ucguuucuuguuggaaaca

SEQ ID NO: 1820714 - RNA, 19 nt, Artificial Sequence
  Description of Artificial Sequence: Synthetic oligonucleotide
  Antisense strand to SEQ ID NO: 1820713
uguuuccaacaagaaacga

SEQ ID NO: 1820715 - RNA, 19 nt, Artificial Sequence
  Description of Artificial Sequence: Synthetic oligonucleotide
  Sense strand starting at position 3221 of SEQ ID NO: 1563575
agguguuuccucguucugu

SEQ ID NO: 1820716 - RNA, 19 nt, Artificial Sequence
  Description of Artificial Sequence: Synthetic oligonucleotide
  Antisense strand to SEQ ID NO: 1820715
acagaacgaggaaacaccu

SEQ ID NO: 1820717 - RNA, 19 nt, Artificial Sequence
  Description of Artificial Sequence: Synthetic oligonucleotide
  Sense strand starting at position 3255 of SEQ ID NO: 1563575
gagauauucuaucaggaag

SEQ ID NO: 1820718 - RNA, 19 nt, Artificial Sequence
  Description of Artificial Sequence: Synthetic oligonucleotide
  Antisense strand to SEQ ID NO: 1820717
cuuccugauagaauaucuc

SEQ ID NO: 1820719 - RNA, 19 nt, Artificial Sequence
  Description of Artificial Sequence: Synthetic oligonucleotide
  Sense strand starting at position 3700 of SEQ ID NO: 1563575
uagcaauucucguuuggga

SEQ ID NO: 1820720 - RNA, 19 nt, Artificial Sequence
  Description of Artificial Sequence: Synthetic oligonucleotide
  Antisense strand to SEQ ID NO: 1820719
ucccaaacgagaauugcua

SEQ ID NO: 1820721 - RNA, 19 nt, Artificial Sequence
  Description of Artificial Sequence: Synthetic oligonucleotide
  Sense strand starting at position 3716 of SEQ ID NO: 1563575
ggaguauuguggcuuggua

SEQ ID NO: 1820722 - RNA, 19 nt, Artificial Sequence
  Description of Artificial Sequence: Synthetic oligonucleotide
  Antisense strand to SEQ ID NO: 1820721
uaccaagccacaauacucc

SEQ ID NO: 1820723 - RNA, 19 nt, Artificial Sequence
  Description of Artificial Sequence: Synthetic oligonucleotide
  Sense strand starting at position 3779 of SEQ ID NO: 1563575
caagaugcggcacauaaua

SEQ ID NO: 1820724 - RNA, 19 nt, Artificial Sequence
  Description of Artificial Sequence: Synthetic oligonucleotide
  Antisense strand to SEQ ID NO: 1820723
uauuaugugccgcaucuug

SEQ ID NO: 1820725 - RNA, 19 nt, Artificial Sequence
  Description of Artificial Sequence: Synthetic oligonucleotide
  Sense strand starting at position 3844 of SEQ ID NO: 1563575
agaugcaagucaucuucca

SEQ ID NO: 1820726 - RNA, 19 nt, Artificial Sequence
  Description of Artificial Sequence: Synthetic oligonucleotide
  Antisense strand to SEQ ID NO: 1820725
uggaagaugacuugcaucu

SEQ ID NO: 1820727 - RNA, 19 nt, Artificial Sequence
  Description of Artificial Sequence: Synthetic oligonucleotide
  Sense strand starting at position 3930 of SEQ ID NO: 1563575
cugucugggauuugcuauu

SEQ ID NO: 1820728 - RNA, 19 nt, Artificial Sequence
  Description of Artificial Sequence: Synthetic oligonucleotide
  Antisense strand to SEQ ID NO: 1820727
aauagcaaaucccagacag

SEQ ID NO: 1820729 - RNA, 19 nt, Artificial Sequence
  Description of Artificial Sequence: Synthetic oligonucleotide
  Sense strand starting at position 3936 of SEQ ID NO: 1563575
gggauuugcuauuaaauua

SEQ ID NO: 1820730 - RNA, 19 nt, Artificial Sequence
  Description of Artificial Sequence: Synthetic oligonucleotide
  Antisense strand to SEQ ID NO: 1820729
uaauuuaauagcaaauccc

SEQ ID NO: 1820731 - RNA, 19 nt, Artificial Sequence
  Description of Artificial Sequence: Synthetic oligonucleotide
  Sense strand starting at position 3981 of SEQ ID NO: 1563575
gagguauagaugcgauuau

SEQ ID NO: 1820732 - RNA, 19 nt, Artificial Sequence
  Description of Artificial Sequence: Synthetic oligonucleotide
  Antisense strand to SEQ ID NO: 1820731
auaaucgcaucuauaccuc

SEQ ID NO: 1820733 - RNA, 19 nt, Artificial Sequence
  Description of Artificial Sequence: Synthetic oligonucleotide
  Sense strand starting at position 190 of SEQ ID NO: 1563576
guccucucaguauauggau

SEQ ID NO: 1820734 - RNA, 19 nt, Artificial Sequence
  Description of Artificial Sequence: Synthetic oligonucleotide
  Antisense strand to SEQ ID NO: 1820733
auccauauacugagaggac

SEQ ID NO: 1820735 - RNA, 19 nt, Artificial Sequence
  Description of Artificial Sequence: Synthetic oligonucleotide
  Sense strand starting at position 199 of SEQ ID NO: 1563576
guauauggauagucacuaa

SEQ ID NO: 1820736 - RNA, 19 nt, Artificial Sequence
  Description of Artificial Sequence: Synthetic oligonucleotide
  Antisense strand to SEQ ID NO: 1820735
uuagugacuauccauauac

SEQ ID NO: 1820737 - RNA, 19 nt, Artificial Sequence
  Description of Artificial Sequence: Synthetic oligonucleotide
  Sense strand starting at position 295 of SEQ ID NO: 1563576
ugaggacuucucugucuca

SEQ ID NO: 1820738 - RNA, 19 nt, Artificial Sequence
  Description of Artificial Sequence: Synthetic oligonucleotide
  Antisense strand to SEQ ID NO: 1820737
ugagacagagaaguccuca

SEQ ID NO: 1820739 - RNA, 19 nt, Artificial Sequence
  Description of Artificial Sequence: Synthetic oligonucleotide
  Sense strand starting at position 296 of SEQ ID NO: 1563576
gaggacuucucugucucau

SEQ ID NO: 1820740 - RNA, 19 nt, Artificial Sequence
  Description of Artificial Sequence: Synthetic oligonucleotide
  Antisense strand to SEQ ID NO: 1820739
augagacagagaaguccuc

SEQ ID NO: 1820741 - RNA, 19 nt, Artificial Sequence
  Description of Artificial Sequence: Synthetic oligonucleotide
  Sense strand starting at position 498 of SEQ ID NO: 1563576
uuggguaugcuauaaacuu

SEQ ID NO: 1820742 - RNA, 19 nt, Artificial Sequence
  Description of Artificial Sequence: Synthetic oligonucleotide
  Antisense strand to SEQ ID NO: 1820741
aaguuuauagcauacccaa

SEQ ID NO: 1820743 - RNA, 19 nt, Artificial Sequence
  Description of Artificial Sequence: Synthetic oligonucleotide
  Sense strand starting at position 555 of SEQ ID NO: 1563576
ucugucacuuaauuaguaa

SEQ ID NO: 1820744 - RNA, 19 nt, Artificial Sequence
  Description of Artificial Sequence: Synthetic oligonucleotide
  Antisense strand to SEQ ID NO: 1820743
uuacuaauuaagugacaga

SEQ ID NO: 1820745 - RNA, 19 nt, Artificial Sequence
  Description of Artificial Sequence: Synthetic oligonucleotide
  Sense strand starting at position 558 of SEQ ID NO: 1563576
gucacuuaauuaguaaaca

SEQ ID NO: 1820746 - RNA, 19 nt, Artificial Sequence
  Description of Artificial Sequence: Synthetic oligonucleotide
  Antisense strand to SEQ ID NO: 1820745
uguuuacuaauuaagugac

SEQ ID NO: 1820747 - RNA, 19 nt, Artificial Sequence
  Description of Artificial Sequence: Synthetic oligonucleotide
  Sense strand starting at position 585 of SEQ ID NO: 1563576
guuauucuaccagguaaca

SEQ ID NO: 1820748 - RNA, 19 nt, Artificial Sequence
  Description of Artificial Sequence: Synthetic oligonucleotide
  Antisense strand to SEQ ID NO: 1820747
uguuaccugguagaauaac

SEQ ID NO: 1820749 - RNA, 19 nt, Artificial Sequence
  Description of Artificial Sequence: Synthetic oligonucleotide
  Sense strand starting at position 655 of SEQ ID NO: 1563576
cccagagaauguguaucuu

SEQ ID NO: 1820750 - RNA, 19 nt, Artificial Sequence
  Description of Artificial Sequence: Synthetic oligonucleotide
  Antisense strand to SEQ ID NO: 1820749
aagauacacauucucuggg

SEQ ID NO: 1820751 - RNA, 19 nt, Artificial Sequence
  Description of Artificial Sequence: Synthetic oligonucleotide
  Sense strand starting at position 701 of SEQ ID NO: 1563576
gguaccauguuugugaaac

SEQ ID NO: 1820752 - RNA, 19 nt, Artificial Sequence
  Description of Artificial Sequence: Synthetic oligonucleotide
  Antisense strand to SEQ ID NO: 1820751
guuucacaaacaugguacc

SEQ ID NO: 1820753 - RNA, 19 nt, Artificial Sequence
  Description of Artificial Sequence: Synthetic oligonucleotide
  Sense strand starting at position 715 of SEQ ID NO: 1563576
gaaacagcuccugaggguu

SEQ ID NO: 1820754 - RNA, 19 nt, Artificial Sequence
  Description of Artificial Sequence: Synthetic oligonucleotide
  Antisense strand to SEQ ID NO: 1820753
aacccucaggagcuguuuc

SEQ ID NO: 1820755 - RNA, 19 nt, Artificial Sequence
  Description of Artificial Sequence: Synthetic oligonucleotide
  Sense strand starting at position 844 of SEQ ID NO: 1563576
agagaaauuuccuaaagua

SEQ ID NO: 1820756 - RNA, 19 nt, Artificial Sequence
  Description of Artificial Sequence: Synthetic oligonucleotide
  Antisense strand to SEQ ID NO: 1820755
uacuuuaggaaauuucucu

SEQ ID NO: 1820757 - RNA, 19 nt, Artificial Sequence
  Description of Artificial Sequence: Synthetic oligonucleotide
  Sense strand starting at position 1116 of SEQ ID NO: 1563576
auuucuugucgauggccaa

SEQ ID NO: 1820758 - RNA, 19 nt, Artificial Sequence
  Description of Artificial Sequence: Synthetic oligonucleotide
  Antisense strand to SEQ ID NO: 1820757
uuggccaucgacaagaaau

SEQ ID NO: 1820759 - RNA, 19 nt, Artificial Sequence
  Description of Artificial Sequence: Synthetic oligonucleotide
  Sense strand starting at position 1261 of SEQ ID NO: 1563576
cuguuacuucgggaagauu

SEQ ID NO: 1820760 - RNA, 19 nt, Artificial Sequence
  Description of Artificial Sequence: Synthetic oligonucleotide
  Antisense strand to SEQ ID NO: 1820759
aaucuucccgaaguaacag

SEQ ID NO: 1820761 - RNA, 19 nt, Artificial Sequence
  Description of Artificial Sequence: Synthetic oligonucleotide
  Sense strand starting at position 1307 of SEQ ID NO: 1563576
gugcuaggucauuauggac

SEQ ID NO: 1820762 - RNA, 19 nt, Artificial Sequence
  Description of Artificial Sequence: Synthetic oligonucleotide
  Antisense strand to SEQ ID NO: 1820761
guccauaaugaccuagcac

SEQ ID NO: 1820763 - RNA, 19 nt, Artificial Sequence
  Description of Artificial Sequence: Synthetic oligonucleotide
  Sense strand starting at position 1321 of SEQ ID NO: 1563576
uggacuuucuuaguuacaa

SEQ ID NO: 1820764 - RNA, 19 nt, Artificial Sequence
  Description of Artificial Sequence: Synthetic oligonucleotide
  Antisense strand to SEQ ID NO: 1820763
uuguaacuaagaaagucca

SEQ ID NO: 1820765 - RNA, 19 nt, Artificial Sequence
  Description of Artificial Sequence: Synthetic oligonucleotide
  Sense strand starting at position 1322 of SEQ ID NO: 1563576
ggacuuucuuaguuacaaa

SEQ ID NO: 1820766 - RNA, 19 nt, Artificial Sequence
  Description of Artificial Sequence: Synthetic oligonucleotide
  Antisense strand to SEQ ID NO: 1820765
uuuguaacuaagaaagucc

SEQ ID NO: 1820767 - RNA, 19 nt, Artificial Sequence
  Description of Artificial Sequence: Synthetic oligonucleotide
  Sense strand starting at position 1390 of SEQ ID NO: 1563576
gauguaaagcacugucaag

SEQ ID NO: 1820768 - RNA, 19 nt, Artificial Sequence
  Description of Artificial Sequence: Synthetic oligonucleotide
  Antisense strand to SEQ ID NO: 1820767
cuugacagugcuuuacauc

SEQ ID NO: 1820769 - RNA, 19 nt, Artificial Sequence
  Description of Artificial Sequence: Synthetic oligonucleotide
  Sense strand starting at position 1521 of SEQ ID NO: 1563576
gugguaacauguuuauaua

SEQ ID NO: 1820770 - RNA, 19 nt, Artificial Sequence
  Description of Artificial Sequence: Synthetic oligonucleotide
  Antisense strand to SEQ ID NO: 1820769
uauauaaacauguuaccac

SEQ ID NO: 1820771 - RNA, 19 nt, Artificial Sequence
  Description of Artificial Sequence: Synthetic oligonucleotide
  Sense strand starting at position 1522 of SEQ ID NO: 1563576
ugguaacauguuuauauac

SEQ ID NO: 1820772 - RNA, 19 nt, Artificial Sequence
  Description of Artificial Sequence: Synthetic oligonucleotide
  Antisense strand to SEQ ID NO: 1820771
guauauaaacauguuacca

SEQ ID NO: 1820773 - RNA, 19 nt, Artificial Sequence
  Description of Artificial Sequence: Synthetic oligonucleotide
  Sense strand starting at position 1740 of SEQ ID NO: 1563576
agauaaagagcaugaaguu

SEQ ID NO: 1820774 - RNA, 19 nt, Artificial Sequence
  Description of Artificial Sequence: Synthetic oligonucleotide
  Antisense strand to SEQ ID NO: 1820773
aacuucaugcucuuuaucu

SEQ ID NO: 1820775 - RNA, 19 nt, Artificial Sequence
  Description of Artificial Sequence: Synthetic oligonucleotide
  Sense strand starting at position 2172 of SEQ ID NO: 1563576
gccucaagagcuugcauuu

SEQ ID NO: 1820776 - RNA, 19 nt, Artificial Sequence
  Description of Artificial Sequence: Synthetic oligonucleotide
  Antisense strand to SEQ ID NO: 1820775
aaaugcaagcucuugaggc

SEQ ID NO: 1820777 - RNA, 19 nt, Artificial Sequence
  Description of Artificial Sequence: Synthetic oligonucleotide
  Sense strand starting at position 2184 of SEQ ID NO: 1563576
ugcauuuggcccuguaaau

SEQ ID NO: 1820778 - RNA, 19 nt, Artificial Sequence
  Description of Artificial Sequence: Synthetic oligonucleotide
  Antisense strand to SEQ ID NO: 1820777
auuuacagggccaaaugca

SEQ ID NO: 1820779 - RNA, 19 nt, Artificial Sequence
  Description of Artificial Sequence: Synthetic oligonucleotide
  Sense strand starting at position 2261 of SEQ ID NO: 1563576
aguguaacucaaggagauu

SEQ ID NO: 1820780 - RNA, 19 nt, Artificial Sequence
  Description of Artificial Sequence: Synthetic oligonucleotide
  Antisense strand to SEQ ID NO: 1820779
aaucuccuugaguuacacu

SEQ ID NO: 1820781 - RNA, 19 nt, Artificial Sequence
  Description of Artificial Sequence: Synthetic oligonucleotide
  Sense strand starting at position 2326 of SEQ ID NO: 1563576
cuauguccuccuuaguaug

SEQ ID NO: 1820782 - RNA, 19 nt, Artificial Sequence
  Description of Artificial Sequence: Synthetic oligonucleotide
  Antisense strand to SEQ ID NO: 1820781
cauacuaaggaggacauag

SEQ ID NO: 1820783 - RNA, 19 nt, Artificial Sequence
  Description of Artificial Sequence: Synthetic oligonucleotide
  Sense strand starting at position 2338 of SEQ ID NO: 1563576
uaguauguuccagagauca

SEQ ID NO: 1820784 - RNA, 19 nt, Artificial Sequence
  Description of Artificial Sequence: Synthetic oligonucleotide
  Antisense strand to SEQ ID NO: 1820783
ugaucucuggaacauacua

SEQ ID NO: 1820785 - RNA, 19 nt, Artificial Sequence
  Description of Artificial Sequence: Synthetic oligonucleotide
  Sense strand starting at position 2340 of SEQ ID NO: 1563576
guauguuccagagaucagc

SEQ ID NO: 1820786 - RNA, 19 nt, Artificial Sequence
  Description of Artificial Sequence: Synthetic oligonucleotide
  Antisense strand to SEQ ID NO: 1820785
gcugaucucuggaacauac

SEQ ID NO: 1820787 - RNA, 19 nt, Artificial Sequence
  Description of Artificial Sequence: Synthetic oligonucleotide
  Sense strand starting at position 2374 of SEQ ID NO: 1563576
aaaggagagugaucguaau

SEQ ID NO: 1820788 - RNA, 19 nt, Artificial Sequence
  Description of Artificial Sequence: Synthetic oligonucleotide
  Antisense strand to SEQ ID NO: 1820787
auuacgaucacucuccuuu

SEQ ID NO: 1820789 - RNA, 19 nt, Artificial Sequence
  Description of Artificial Sequence: Synthetic oligonucleotide
  Sense strand starting at position 2605 of SEQ ID NO: 1563576
cuauuaggagcauguucua

SEQ ID NO: 1820790 - RNA, 19 nt, Artificial Sequence
  Description of Artificial Sequence: Synthetic oligonucleotide
  Antisense strand to SEQ ID NO: 1820789
uagaacaugcuccuaauag

SEQ ID NO: 1820791 - RNA, 19 nt, Artificial Sequence
  Description of Artificial Sequence: Synthetic oligonucleotide
  Sense strand starting at position 2778 of SEQ ID NO: 1563576
cugguauugcacugauuuc

SEQ ID NO: 1820792 - RNA, 19 nt, Artificial Sequence
  Description of Artificial Sequence: Synthetic oligonucleotide
  Antisense strand to SEQ ID NO: 1820791
gaaaucagugcaauaccag

SEQ ID NO: 1820793 - RNA, 19 nt, Artificial Sequence
  Description of Artificial Sequence: Synthetic oligonucleotide
  Sense strand starting at position 2816 of SEQ ID NO: 1563576
ccugcuuugcuccaugaag

SEQ ID NO: 1820794 - RNA, 19 nt, Artificial Sequence
  Description of Artificial Sequence: Synthetic oligonucleotide
  Antisense strand to SEQ ID NO: 1820793
cuucauggagcaaagcagg

SEQ ID NO: 1820795 - RNA, 19 nt, Artificial Sequence
  Description of Artificial Sequence: Synthetic oligonucleotide
  Sense strand starting at position 3159 of SEQ ID NO: 1563576
acaguaggugagcaguaaa

SEQ ID NO: 1820796 - RNA, 19 nt, Artificial Sequence
  Description of Artificial Sequence: Synthetic oligonucleotide
  Antisense strand to SEQ ID NO: 1820795
uuuacugcucaccuacugu

SEQ ID NO: 1820797 - RNA, 19 nt, Artificial Sequence
  Description of Artificial Sequence: Synthetic oligonucleotide
  Sense strand starting at position 3173 of SEQ ID NO: 1563576
guaaaugcuccaugaauaa

SEQ ID NO: 1820798 - RNA, 19 nt, Artificial Sequence
  Description of Artificial Sequence: Synthetic oligonucleotide
  Antisense strand to SEQ ID NO: 1820797
uuauucauggagcauuuac

SEQ ID NO: 1820799 - RNA, 19 nt, Artificial Sequence
  Description of Artificial Sequence: Synthetic oligonucleotide
  Sense strand starting at position 3272 of SEQ ID NO: 1563576
acucccaguuagcuagaaa

SEQ ID NO: 1820800 - RNA, 19 nt, Artificial Sequence
  Description of Artificial Sequence: Synthetic oligonucleotide
  Antisense strand to SEQ ID NO: 1820799
uuucuagcuaacugggagu

SEQ ID NO: 1820801 - RNA, 19 nt, Artificial Sequence
  Description of Artificial Sequence: Synthetic oligonucleotide
  Sense strand starting at position 3427 of SEQ ID NO: 1563576
uaaauuauggugcggagau

SEQ ID NO: 1820802 - RNA, 19 nt, Artificial Sequence
  Description of Artificial Sequence: Synthetic oligonucleotide
  Antisense strand to SEQ ID NO: 1820801
aucuccgcaccauaauuua

SEQ ID NO: 1820803 - RNA, 19 nt, Artificial Sequence
  Description of Artificial Sequence: Synthetic oligonucleotide
  Sense strand starting at position 3429 of SEQ ID NO: 1563576
aauuauggugcggagauua

SEQ ID NO: 1820804 - RNA, 19 nt, Artificial Sequence
  Description of Artificial Sequence: Synthetic oligonucleotide
  Antisense strand to SEQ ID NO: 1820803
uaaucuccgcaccauaauu

SEQ ID NO: 1820805 - RNA, 19 nt, Artificial Sequence
  Description of Artificial Sequence: Synthetic oligonucleotide
  Sense strand starting at position 3573 of SEQ ID NO: 1563576
uuaggaagagcccauguau

SEQ ID NO: 1820806 - RNA, 19 nt, Artificial Sequence
  Description of Artificial Sequence: Synthetic oligonucleotide
  Antisense strand to SEQ ID NO: 1820805
auacaugggcucuuccuaa

SEQ ID NO: 1820807 - RNA, 19 nt, Artificial Sequence
  Description of Artificial Sequence: Synthetic oligonucleotide
  Sense strand starting at position 3580 of SEQ ID NO: 1563576
gagcccauguauguugaaa

SEQ ID NO: 1820808 - RNA, 19 nt, Artificial Sequence
  Description of Artificial Sequence: Synthetic oligonucleotide
  Antisense strand to SEQ ID NO: 1820807
uuucaacauacaugggcuc

SEQ ID NO: 1820809 - RNA, 19 nt, Artificial Sequence
  Description of Artificial Sequence: Synthetic oligonucleotide
  Sense strand starting at position 3711 of SEQ ID NO: 1563576
augguaguucuuuagguuu

SEQ ID NO: 1820810 - RNA, 19 nt, Artificial Sequence
  Description of Artificial Sequence: Synthetic oligonucleotide
  Antisense strand to SEQ ID NO: 1820809
aaaccuaaagaacuaccau

SEQ ID NO: 1820811 - RNA, 19 nt, Artificial Sequence
  Description of Artificial Sequence: Synthetic oligonucleotide
  Sense strand starting at position 3718 of SEQ ID NO: 1563576
uucuuuagguuucugauca

SEQ ID NO: 1820812 - RNA, 19 nt, Artificial Sequence
  Description of Artificial Sequence: Synthetic oligonucleotide
  Antisense strand to SEQ ID NO: 1820811
ugaucagaaaccuaaagaa

SEQ ID NO: 1820813 - RNA, 19 nt, Artificial Sequence
  Description of Artificial Sequence: Synthetic oligonucleotide
  Sense strand starting at position 136 of SEQ ID NO: 1563577
ucgagcaagcaggaauauu

SEQ ID NO: 1820814 - RNA, 19 nt, Artificial Sequence
  Description of Artificial Sequence: Synthetic oligonucleotide
  Antisense strand to SEQ ID NO: 1820813
aauauuccugcuugcucga

SEQ ID NO: 1820815 - RNA, 19 nt, Artificial Sequence
  Description of Artificial Sequence: Synthetic oligonucleotide
  Sense strand starting at position 322 of SEQ ID NO: 1563577
uuuagaggugaggguuaau

SEQ ID NO: 1820816 - RNA, 19 nt, Artificial Sequence
  Description of Artificial Sequence: Synthetic oligonucleotide
  Antisense strand to SEQ ID NO: 1820815
auuaacccucaccucuaaa

SEQ ID NO: 1820817 - RNA, 19 nt, Artificial Sequence
  Description of Artificial Sequence: Synthetic oligonucleotide
  Sense strand starting at position 333 of SEQ ID NO: 1563577
ggguuaauuucuuacauga

SEQ ID NO: 1820818 - RNA, 19 nt, Artificial Sequence
  Description of Artificial Sequence: Synthetic oligonucleotide
  Antisense strand to SEQ ID NO: 1820817
ucauguaagaaauuaaccc

SEQ ID NO: 1820819 - RNA, 19 nt, Artificial Sequence
  Description of Artificial Sequence: Synthetic oligonucleotide
  Sense strand starting at position 407 of SEQ ID NO: 1563577
gcaagagaauuugauccga

SEQ ID NO: 1820820 - RNA, 19 nt, Artificial Sequence
  Description of Artificial Sequence: Synthetic oligonucleotide
  Antisense strand to SEQ ID NO: 1820819
ucggaucaaauucucuugc

SEQ ID NO: 1820821 - RNA, 19 nt, Artificial Sequence
  Description of Artificial Sequence: Synthetic oligonucleotide
  Sense strand starting at position 412 of SEQ ID NO: 1563577
agaauuugauccgacuucu

SEQ ID NO: 1820822 - RNA, 19 nt, Artificial Sequence
  Description of Artificial Sequence: Synthetic oligonucleotide
  Antisense strand to SEQ ID NO: 1820821
agaagucggaucaaauucu

SEQ ID NO: 1820823 - RNA, 19 nt, Artificial Sequence
  Description of Artificial Sequence: Synthetic oligonucleotide
  Sense strand starting at position 429 of SEQ ID NO: 1563577
cuguuaauuccugaaaugu

SEQ ID NO: 1820824 - RNA, 19 nt, Artificial Sequence
  Description of Artificial Sequence: Synthetic oligonucleotide
  Antisense strand to SEQ ID NO: 1820823
acauuucaggaauuaacag

SEQ ID NO: 1820825 - RNA, 19 nt, Artificial Sequence
  Description of Artificial Sequence: Synthetic oligonucleotide
  Sense strand starting at position 587 of SEQ ID NO: 1563577
gcauucuacuccucagaga

SEQ ID NO: 1820826 - RNA, 19 nt, Artificial Sequence
  Description of Artificial Sequence: Synthetic oligonucleotide
  Antisense strand to SEQ ID NO: 1820825
ucucugaggaguagaaugc

SEQ ID NO: 1820827 - RNA, 19 nt, Artificial Sequence
  Description of Artificial Sequence: Synthetic oligonucleotide
  Sense strand starting at position 811 of SEQ ID NO: 1563577
gcggucgauucauuuaaua

SEQ ID NO: 1820828 - RNA, 19 nt, Artificial Sequence
  Description of Artificial Sequence: Synthetic oligonucleotide
  Antisense strand to SEQ ID NO: 1820827
uauuaaaugaaucgaccgc

SEQ ID NO: 1820829 - RNA, 19 nt, Artificial Sequence
  Description of Artificial Sequence: Synthetic oligonucleotide
  Sense strand starting at position 842 of SEQ ID NO: 1563577
ccuccaaugcacugguauu

SEQ ID NO: 1820830 - RNA, 19 nt, Artificial Sequence
  Description of Artificial Sequence: Synthetic oligonucleotide
  Antisense strand to SEQ ID NO: 1820829
aauaccagugcauuggagg

SEQ ID NO: 1820831 - RNA, 19 nt, Artificial Sequence
  Description of Artificial Sequence: Synthetic oligonucleotide
  Sense strand starting at position 968 of SEQ ID NO: 1563577
ugggaaugguagccuagaa

SEQ ID NO: 1820832 - RNA, 19 nt, Artificial Sequence
  Description of Artificial Sequence: Synthetic oligonucleotide
  Antisense strand to SEQ ID NO: 1820831
uucuaggcuaccauuccca

SEQ ID NO: 1820833 - RNA, 19 nt, Artificial Sequence
  Description of Artificial Sequence: Synthetic oligonucleotide
  Sense strand starting at position 1014 of SEQ ID NO: 1563577
ucuauaugauagucuuaga

SEQ ID NO: 1820834 - RNA, 19 nt, Artificial Sequence
  Description of Artificial Sequence: Synthetic oligonucleotide
  Antisense strand to SEQ ID NO: 1820833
ucuaagacuaucauauaga

SEQ ID NO: 1820835 - RNA, 19 nt, Artificial Sequence
  Description of Artificial Sequence: Synthetic oligonucleotide
  Sense strand starting at position 1024 of SEQ ID NO: 1563577
agucuuagacuauguacuu

SEQ ID NO: 1820836 - RNA, 19 nt, Artificial Sequence
  Description of Artificial Sequence: Synthetic oligonucleotide
  Antisense strand to SEQ ID NO: 1820835
aaguacauagucuaagacu

SEQ ID NO: 1820837 - RNA, 19 nt, Artificial Sequence
  Description of Artificial Sequence: Synthetic oligonucleotide
  Sense strand starting at position 1025 of SEQ ID NO: 1563577
gucuuagacuauguacuua

SEQ ID NO: 1820838 - RNA, 19 nt, Artificial Sequence
  Description of Artificial Sequence: Synthetic oligonucleotide
  Antisense strand to SEQ ID NO: 1820837
uaaguacauagucuaagac

SEQ ID NO: 1820839 - RNA, 19 nt, Artificial Sequence
  Description of Artificial Sequence: Synthetic oligonucleotide
  Sense strand starting at position 1037 of SEQ ID NO: 1563577
guacuuaucgugagguggu

SEQ ID NO: 1820840 - RNA, 19 nt, Artificial Sequence
  Description of Artificial Sequence: Synthetic oligonucleotide
  Antisense strand to SEQ ID NO: 1820839
accaccucacgauaaguac

SEQ ID NO: 1820841 - RNA, 19 nt, Artificial Sequence
  Description of Artificial Sequence: Synthetic oligonucleotide
  Sense strand starting at position 1057 of SEQ ID NO: 1563577
ugcacaaaucauggccuau

SEQ ID NO: 1820842 - RNA, 19 nt, Artificial Sequence
  Description of Artificial Sequence: Synthetic oligonucleotide
  Antisense strand to SEQ ID NO: 1820841
auaggccaugauuugugca

SEQ ID NO: 1820843 - RNA, 19 nt, Artificial Sequence
  Description of Artificial Sequence: Synthetic oligonucleotide
  Sense strand starting at position 1084 of SEQ ID NO: 1563577
uuuccuguugcauaaagau

SEQ ID NO: 1820844 - RNA, 19 nt, Artificial Sequence
  Description of Artificial Sequence: Synthetic oligonucleotide
  Antisense strand to SEQ ID NO: 1820843
aucuuuaugcaacaggaaa

SEQ ID NO: 1820845 - RNA, 19 nt, Artificial Sequence
  Description of Artificial Sequence: Synthetic oligonucleotide
  Sense strand starting at position 1217 of SEQ ID NO: 1563577
gcaaaugccugcuuaauac

SEQ ID NO: 1820846 - RNA, 19 nt, Artificial Sequence
  Description of Artificial Sequence: Synthetic oligonucleotide
  Antisense strand to SEQ ID NO: 1820845
guauuaagcaggcauuugc

SEQ ID NO: 1820847 - RNA, 19 nt, Artificial Sequence
  Description of Artificial Sequence: Synthetic oligonucleotide
  Sense strand starting at position 1253 of SEQ ID NO: 1563577
acaugaacaugaguuugua

SEQ ID NO: 1820848 - RNA, 19 nt, Artificial Sequence
  Description of Artificial Sequence: Synthetic oligonucleotide
  Antisense strand to SEQ ID NO: 1820847
uacaaacucauguucaugu

SEQ ID NO: 1820849 - RNA, 19 nt, Artificial Sequence
  Description of Artificial Sequence: Synthetic oligonucleotide
  Sense strand starting at position 1256 of SEQ ID NO: 1563577
ugaacaugaguuuguaaag

SEQ ID NO: 1820850 - RNA, 19 nt, Artificial Sequence
  Description of Artificial Sequence: Synthetic oligonucleotide
  Antisense strand to SEQ ID NO: 1820849
cuuuacaaacucauguuca

SEQ ID NO: 1820851 - RNA, 19 nt, Artificial Sequence
  Description of Artificial Sequence: Synthetic oligonucleotide
  Sense strand starting at position 1397 of SEQ ID NO: 1563577
uugugcuauucugcaaaug

SEQ ID NO: 1820852 - RNA, 19 nt, Artificial Sequence
  Description of Artificial Sequence: Synthetic oligonucleotide
  Antisense strand to SEQ ID NO: 1820851
cauuugcagaauagcacaa

SEQ ID NO: 1820853 - RNA, 19 nt, Artificial Sequence
  Description of Artificial Sequence: Synthetic oligonucleotide
  Sense strand starting at position 1398 of SEQ ID NO: 1563577
ugugcuauucugcaaaugu

SEQ ID NO: 1820854 - RNA, 19 nt, Artificial Sequence
  Description of Artificial Sequence: Synthetic oligonucleotide
  Antisense strand to SEQ ID NO: 1820853
acauuugcagaauagcaca

SEQ ID NO: 1820855 - RNA, 19 nt, Artificial Sequence
  Description of Artificial Sequence: Synthetic oligonucleotide
  Sense strand starting at position 1433 of SEQ ID NO: 1563577
caccguaacguuuacauua

SEQ ID NO: 1820856 - RNA, 19 nt, Artificial Sequence
  Description of Artificial Sequence: Synthetic oligonucleotide
  Antisense strand to SEQ ID NO: 1820855
uaauguaaacguuacggug

SEQ ID NO: 1820857 - RNA, 19 nt, Artificial Sequence
  Description of Artificial Sequence: Synthetic oligonucleotide
  Sense strand starting at position 1483 of SEQ ID NO: 1563577
ccugcuguucuauaagcuu

SEQ ID NO: 1820858 - RNA, 19 nt, Artificial Sequence
  Description of Artificial Sequence: Synthetic oligonucleotide
  Antisense strand to SEQ ID NO: 1820857
aagcuuauagaacagcagg

SEQ ID NO: 1820859 - RNA, 19 nt, Artificial Sequence
  Description of Artificial Sequence: Synthetic oligonucleotide
  Sense strand starting at position 1489 of SEQ ID NO: 1563577
guucuauaagcuugccaua

SEQ ID NO: 1820860 - RNA, 19 nt, Artificial Sequence
  Description of Artificial Sequence: Synthetic oligonucleotide
  Antisense strand to SEQ ID NO: 1820859
uauggcaagcuuauagaac

SEQ ID NO: 1820861 - RNA, 19 nt, Artificial Sequence
  Description of Artificial Sequence: Synthetic oligonucleotide
  Sense strand starting at position 1491 of SEQ ID NO: 1563577
ucuauaagcuugccauaga

SEQ ID NO: 1820862 - RNA, 19 nt, Artificial Sequence
  Description of Artificial Sequence: Synthetic oligonucleotide
  Antisense strand to SEQ ID NO: 1820861
ucuauggcaagcuuauaga

SEQ ID NO: 1820863 - RNA, 19 nt, Artificial Sequence
  Description of Artificial Sequence: Synthetic oligonucleotide
  Sense strand starting at position 1494 of SEQ ID NO: 1563577
auaagcuugccauagacuu

SEQ ID NO: 1820864 - RNA, 19 nt, Artificial Sequence
  Description of Artificial Sequence: Synthetic oligonucleotide
  Antisense strand to SEQ ID NO: 1820863
aagucuauggcaagcuuau

SEQ ID NO: 1820865 - RNA, 19 nt, Artificial Sequence
  Description of Artificial Sequence: Synthetic oligonucleotide
  Sense strand starting at position 1521 of SEQ ID NO: 1563577
agagaagaauuacaagcaa

SEQ ID NO: 1820866 - RNA, 19 nt, Artificial Sequence
  Description of Artificial Sequence: Synthetic oligonucleotide
  Antisense strand to SEQ ID NO: 1820865
uugcuuguaauucuucucu

SEQ ID NO: 1820867 - RNA, 19 nt, Artificial Sequence
  Description of Artificial Sequence: Synthetic oligonucleotide
  Sense strand starting at position 1542 of SEQ ID NO: 1563577
acaagaugauggcuccaau

SEQ ID NO: 1820868 - RNA, 19 nt, Artificial Sequence
  Description of Artificial Sequence: Synthetic oligonucleotide
  Antisense strand to SEQ ID NO: 1820867
auuggagccaucaucuugu

SEQ ID NO: 1820869 - RNA, 19 nt, Artificial Sequence
  Description of Artificial Sequence: Synthetic oligonucleotide
  Sense strand starting at position 1650 of SEQ ID NO: 1563577
gcaaauacauacgcuuauu

SEQ ID NO: 1820870 - RNA, 19 nt, Artificial Sequence
  Description of Artificial Sequence: Synthetic oligonucleotide
  Antisense strand to SEQ ID NO: 1820869
aauaagcguauguauuugc

SEQ ID NO: 1820871 - RNA, 19 nt, Artificial Sequence
  Description of Artificial Sequence: Synthetic oligonucleotide
  Sense strand starting at position 1696 of SEQ ID NO: 1563577
agcgaaaugcuacaaggau

SEQ ID NO: 1820872 - RNA, 19 nt, Artificial Sequence
  Description of Artificial Sequence: Synthetic oligonucleotide
  Antisense strand to SEQ ID NO: 1820871
auccuuguagcauuucgcu

SEQ ID NO: 1820873 - RNA, 19 nt, Artificial Sequence
  Description of Artificial Sequence: Synthetic oligonucleotide
  Sense strand starting at position 1751 of SEQ ID NO: 1563577
cuggcaucccauuaauaag

SEQ ID NO: 1820874 - RNA, 19 nt, Artificial Sequence
  Description of Artificial Sequence: Synthetic oligonucleotide
  Antisense strand to SEQ ID NO: 1820873
cuuauuaaugggaugccag

SEQ ID NO: 1820875 - RNA, 19 nt, Artificial Sequence
  Description of Artificial Sequence: Synthetic oligonucleotide
  Sense strand starting at position 2124 of SEQ ID NO: 1563577
cgugcuucucuagauucca

SEQ ID NO: 1820876 - RNA, 19 nt, Artificial Sequence
  Description of Artificial Sequence: Synthetic oligonucleotide
  Antisense strand to SEQ ID NO: 1820875
uggaaucuagagaagcacg

SEQ ID NO: 1820877 - RNA, 19 nt, Artificial Sequence
  Description of Artificial Sequence: Synthetic oligonucleotide
  Sense strand starting at position 2140 of SEQ ID NO: 1563577
ccacgcuggagcugaaaua

SEQ ID NO: 1820878 - RNA, 19 nt, Artificial Sequence
  Description of Artificial Sequence: Synthetic oligonucleotide
  Antisense strand to SEQ ID NO: 1820877
uauuucagcuccagcgugg

SEQ ID NO: 1820879 - RNA, 19 nt, Artificial Sequence
  Description of Artificial Sequence: Synthetic oligonucleotide
  Sense strand starting at position 2467 of SEQ ID NO: 1563577
uagcuauccuggcugaaag

SEQ ID NO: 1820880 - RNA, 19 nt, Artificial Sequence
  Description of Artificial Sequence: Synthetic oligonucleotide
  Antisense strand to SEQ ID NO: 1820879
cuuucagccaggauagcua

SEQ ID NO: 1820881 - RNA, 19 nt, Artificial Sequence
  Description of Artificial Sequence: Synthetic oligonucleotide
  Sense strand starting at position 2468 of SEQ ID NO: 1563577
agcuauccuggcugaaaga

SEQ ID NO: 1820882 - RNA, 19 nt, Artificial Sequence
  Description of Artificial Sequence: Synthetic oligonucleotide
  Antisense strand to SEQ ID NO: 1820881
ucuuucagccaggauagcu

SEQ ID NO: 1820883 - RNA, 19 nt, Artificial Sequence
  Description of Artificial Sequence: Synthetic oligonucleotide
  Sense strand starting at position 2469 of SEQ ID NO: 1563577
gcuauccuggcugaaagaa

SEQ ID NO: 1820884 - RNA, 19 nt, Artificial Sequence
  Description of Artificial Sequence: Synthetic oligonucleotide
  Antisense strand to SEQ ID NO: 1820883
uucuuucagccaggauagc

SEQ ID NO: 1820885 - RNA, 19 nt, Artificial Sequence
  Description of Artificial Sequence: Synthetic oligonucleotide
  Sense strand starting at position 2525 of SEQ ID NO: 1563577
ccgccauccuuggugacaa

SEQ ID NO: 1820886 - RNA, 19 nt, Artificial Sequence
  Description of Artificial Sequence: Synthetic oligonucleotide
  Antisense strand to SEQ ID NO: 1820885
uugucaccaaggauggcgg

SEQ ID NO: 1820887 - RNA, 19 nt, Artificial Sequence
  Description of Artificial Sequence: Synthetic oligonucleotide
  Sense strand starting at position 3957 of SEQ ID NO: 1563577
ggauaaagccugugcagga

SEQ ID NO: 1820888 - RNA, 19 nt, Artificial Sequence
  Description of Artificial Sequence: Synthetic oligonucleotide
  Antisense strand to SEQ ID NO: 1820887
uccugcacaggcuuuaucc

SEQ ID NO: 1820889 - RNA, 19 nt, Artificial Sequence
  Description of Artificial Sequence: Synthetic oligonucleotide
  Sense strand starting at position 3979 of SEQ ID NO: 1563577
guacaaauagugugauuag

SEQ ID NO: 1820890 - RNA, 19 nt, Artificial Sequence
  Description of Artificial Sequence: Synthetic oligonucleotide
  Antisense strand to SEQ ID NO: 1820889
cuaaucacacuauuuguac

SEQ ID NO: 1820891 - RNA, 19 nt, Artificial Sequence
  Description of Artificial Sequence: Synthetic oligonucleotide
  Sense strand starting at position 3982 of SEQ ID NO: 1563577
caaauagugugauuaggaa

SEQ ID NO: 1820892 - RNA, 19 nt, Artificial Sequence
  Description of Artificial Sequence: Synthetic oligonucleotide
  Antisense strand to SEQ ID NO: 1820891
uuccuaaucacacuauuug

SEQ ID NO: 1820893 - RNA, 19 nt, Artificial Sequence
  Description of Artificial Sequence: Synthetic oligonucleotide
  Sense strand starting at position 48 of SEQ ID NO: 1563578
guccucucaguauauggau

SEQ ID NO: 1820894 - RNA, 19 nt, Artificial Sequence
  Description of Artificial Sequence: Synthetic oligonucleotide
  Antisense strand to SEQ ID NO: 1820893
auccauauacugagaggac

SEQ ID NO: 1820895 - RNA, 19 nt, Artificial Sequence
  Description of Artificial Sequence: Synthetic oligonucleotide
  Sense strand starting at position 57 of SEQ ID NO: 1563578
guauauggauagucacuaa

SEQ ID NO: 1820896 - RNA, 19 nt, Artificial Sequence
  Description of Artificial Sequence: Synthetic oligonucleotide
  Antisense strand to SEQ ID NO: 1820895
uuagugacuauccauauac

SEQ ID NO: 1820897 - RNA, 19 nt, Artificial Sequence
  Description of Artificial Sequence: Synthetic oligonucleotide
  Sense strand starting at position 153 of SEQ ID NO: 1563578
ugaggacuucucugucuca

SEQ ID NO: 1820898 - RNA, 19 nt, Artificial Sequence
  Description of Artificial Sequence: Synthetic oligonucleotide
  Antisense strand to SEQ ID NO: 1820897
ugagacagagaaguccuca

SEQ ID NO: 1820899 - RNA, 19 nt, Artificial Sequence
  Description of Artificial Sequence: Synthetic oligonucleotide
  Sense strand starting at position 154 of SEQ ID NO: 1563578
gaggacuucucugucucau

SEQ ID NO: 1820900 - RNA, 19 nt, Artificial Sequence
  Description of Artificial Sequence: Synthetic oligonucleotide
  Antisense strand to SEQ ID NO: 1820899
augagacagagaaguccuc

SEQ ID NO: 1820901 - RNA, 19 nt, Artificial Sequence
  Description of Artificial Sequence: Synthetic oligonucleotide
  Sense strand starting at position 356 of SEQ ID NO: 1563578
uuggguaugcuauaaacuu

SEQ ID NO: 1820902 - RNA, 19 nt, Artificial Sequence
  Description of Artificial Sequence: Synthetic oligonucleotide
  Antisense strand to SEQ ID NO: 1820901
aaguuuauagcauacccaa

SEQ ID NO: 1820903 - RNA, 19 nt, Artificial Sequence
  Description of Artificial Sequence: Synthetic oligonucleotide
  Sense strand starting at position 413 of SEQ ID NO: 1563578
ucugucacuuaauuaguaa

SEQ ID NO: 1820904 - RNA, 19 nt, Artificial Sequence
  Description of Artificial Sequence: Synthetic oligonucleotide
  Antisense strand to SEQ ID NO: 1820903
uuacuaauuaagugacaga

SEQ ID NO: 1820905 - RNA, 19 nt, Artificial Sequence
  Description of Artificial Sequence: Synthetic oligonucleotide
  Sense strand starting at position 416 of SEQ ID NO: 1563578
gucacuuaauuaguaaaca

SEQ ID NO: 1820906 - RNA, 19 nt, Artificial Sequence
  Description of Artificial Sequence: Synthetic oligonucleotide
  Antisense strand to SEQ ID NO: 1820905
uguuuacuaauuaagugac

SEQ ID NO: 1820907 - RNA, 19 nt, Artificial Sequence
  Description of Artificial Sequence: Synthetic oligonucleotide
  Sense strand starting at position 443 of SEQ ID NO: 1563578
guuauucuaccagguaaca

SEQ ID NO: 1820908 - RNA, 19 nt, Artificial Sequence
  Description of Artificial Sequence: Synthetic oligonucleotide
  Antisense strand to SEQ ID NO: 1820907
uguuaccugguagaauaac

SEQ ID NO: 1820909 - RNA, 19 nt, Artificial Sequence
  Description of Artificial Sequence: Synthetic oligonucleotide
  Sense strand starting at position 513 of SEQ ID NO: 1563578
cccagagaauguguaucuu

SEQ ID NO: 1820910 - RNA, 19 nt, Artificial Sequence
  Description of Artificial Sequence: Synthetic oligonucleotide
  Antisense strand to SEQ ID NO: 1820909
aagauacacauucucuggg

SEQ ID NO: 1820911 - RNA, 19 nt, Artificial Sequence
  Description of Artificial Sequence: Synthetic oligonucleotide
  Sense strand starting at position 573 of SEQ ID NO: 1563578
gaaacagcuccugaggguu

SEQ ID NO: 1820912 - RNA, 19 nt, Artificial Sequence
  Description of Artificial Sequence: Synthetic oligonucleotide
  Antisense strand to SEQ ID NO: 1820911
aacccucaggagcuguuuc

SEQ ID NO: 1820913 - RNA, 19 nt, Artificial Sequence
  Description of Artificial Sequence: Synthetic oligonucleotide
  Sense strand starting at position 702 of SEQ ID NO: 1563578
agagaaauuuccuaaagua

SEQ ID NO: 1820914 - RNA, 19 nt, Artificial Sequence
  Description of Artificial Sequence: Synthetic oligonucleotide
  Antisense strand to SEQ ID NO: 1820913
uacuuuaggaaauuucucu

SEQ ID NO: 1820915 - RNA, 19 nt, Artificial Sequence
  Description of Artificial Sequence: Synthetic oligonucleotide
  Sense strand starting at position 974 of SEQ ID NO: 1563578
auuucuugucgauggccaa

SEQ ID NO: 1820916 - RNA, 19 nt, Artificial Sequence
  Description of Artificial Sequence: Synthetic oligonucleotide
  Antisense strand to SEQ ID NO: 1820915
uuggccaucgacaagaaau

SEQ ID NO: 1820917 - RNA, 19 nt, Artificial Sequence
  Description of Artificial Sequence: Synthetic oligonucleotide
  Sense strand starting at position 1119 of SEQ ID NO: 1563578
cuguuacuucgggaagauu

SEQ ID NO: 1820918 - RNA, 19 nt, Artificial Sequence
  Description of Artificial Sequence: Synthetic oligonucleotide
  Antisense strand to SEQ ID NO: 1820917
aaucuucccgaaguaacag

SEQ ID NO: 1820919 - RNA, 19 nt, Artificial Sequence
  Description of Artificial Sequence: Synthetic oligonucleotide
  Sense strand starting at position 1165 of SEQ ID NO: 1563578
gugcuaggucauuauggac

SEQ ID NO: 1820920 - RNA, 19 nt, Artificial Sequence
  Description of Artificial Sequence: Synthetic oligonucleotide
  Antisense strand to SEQ ID NO: 1820919
guccauaaugaccuagcac

SEQ ID NO: 1820921 - RNA, 19 nt, Artificial Sequence
  Description of Artificial Sequence: Synthetic oligonucleotide
  Sense strand starting at position 1179 of SEQ ID NO: 1563578
uggacuuucuuaguuacaa

SEQ ID NO: 1820922 - RNA, 19 nt, Artificial Sequence
  Description of Artificial Sequence: Synthetic oligonucleotide
  Antisense strand to SEQ ID NO: 1820921
uuguaacuaagaaagucca

SEQ ID NO: 1820923 - RNA, 19 nt, Artificial Sequence
  Description of Artificial Sequence: Synthetic oligonucleotide
  Sense strand starting at position 1180 of SEQ ID NO: 1563578
ggacuuucuuaguuacaaa

SEQ ID NO: 1820924 - RNA, 19 nt, Artificial Sequence
  Description of Artificial Sequence: Synthetic oligonucleotide
  Antisense strand to SEQ ID NO: 1820923
uuuguaacuaagaaagucc

SEQ ID NO: 1820925 - RNA, 19 nt, Artificial Sequence
  Description of Artificial Sequence: Synthetic oligonucleotide
  Sense strand starting at position 1248 of SEQ ID NO: 1563578
gauguaaagcacugucaag

SEQ ID NO: 1820926 - RNA, 19 nt, Artificial Sequence
  Description of Artificial Sequence: Synthetic oligonucleotide
  Antisense strand to SEQ ID NO: 1820925
cuugacagugcuuuacauc

SEQ ID NO: 1820927 - RNA, 19 nt, Artificial Sequence
  Description of Artificial Sequence: Synthetic oligonucleotide
  Sense strand starting at position 1379 of SEQ ID NO: 1563578
gugguaacauguuuauaua

SEQ ID NO: 1820928 - RNA, 19 nt, Artificial Sequence
  Description of Artificial Sequence: Synthetic oligonucleotide
  Antisense strand to SEQ ID NO: 1820927
uauauaaacauguuaccac

SEQ ID NO: 1820929 - RNA, 19 nt, Artificial Sequence
  Description of Artificial Sequence: Synthetic oligonucleotide
  Sense strand starting at position 1380 of SEQ ID NO: 1563578
ugguaacauguuuauauac

SEQ ID NO: 1820930 - RNA, 19 nt, Artificial Sequence
  Description of Artificial Sequence: Synthetic oligonucleotide
  Antisense strand to SEQ ID NO: 1820929
guauauaaacauguuacca

SEQ ID NO: 1820931 - RNA, 19 nt, Artificial Sequence
  Description of Artificial Sequence: Synthetic oligonucleotide
  Sense strand starting at position 1598 of SEQ ID NO: 1563578
agauaaagagcaugaaguu

SEQ ID NO: 1820932 - RNA, 19 nt, Artificial Sequence
  Description of Artificial Sequence: Synthetic oligonucleotide
  Antisense strand to SEQ ID NO: 1820931
aacuucaugcucuuuaucu

SEQ ID NO: 1820933 - RNA, 19 nt, Artificial Sequence
  Description of Artificial Sequence: Synthetic oligonucleotide
  Sense strand starting at position 2030 of SEQ ID NO: 1563578
gccucaagagcuugcauuu

SEQ ID NO: 1820934 - RNA, 19 nt, Artificial Sequence
  Description of Artificial Sequence: Synthetic oligonucleotide
  Antisense strand to SEQ ID NO: 1820933
aaaugcaagcucuugaggc

SEQ ID NO: 1820935 - RNA, 19 nt, Artificial Sequence
  Description of Artificial Sequence: Synthetic oligonucleotide
  Sense strand starting at position 2042 of SEQ ID NO: 1563578
ugcauuuggcccuguaaau

SEQ ID NO: 1820936 - RNA, 19 nt, Artificial Sequence
  Description of Artificial Sequence: Synthetic oligonucleotide
  Antisense strand to SEQ ID NO: 1820935
auuuacagggccaaaugca

SEQ ID NO: 1820937 - RNA, 19 nt, Artificial Sequence
  Description of Artificial Sequence: Synthetic oligonucleotide
  Sense strand starting at position 2119 of SEQ ID NO: 1563578
aguguaacucaaggagauu

SEQ ID NO: 1820938 - RNA, 19 nt, Artificial Sequence
  Description of Artificial Sequence: Synthetic oligonucleotide
  Antisense strand to SEQ ID NO: 1820937
aaucuccuugaguuacacu

SEQ ID NO: 1820939 - RNA, 19 nt, Artificial Sequence
  Description of Artificial Sequence: Synthetic oligonucleotide
  Sense strand starting at position 2184 of SEQ ID NO: 1563578
cuauguccuccuuaguaug

SEQ ID NO: 1820940 - RNA, 19 nt, Artificial Sequence
  Description of Artificial Sequence: Synthetic oligonucleotide
  Antisense strand to SEQ ID NO: 1820939
cauacuaaggaggacauag

SEQ ID NO: 1820941 - RNA, 19 nt, Artificial Sequence
  Description of Artificial Sequence: Synthetic oligonucleotide
  Sense strand starting at position 2196 of SEQ ID NO: 1563578
uaguauguuccagagauca

SEQ ID NO: 1820942 - RNA, 19 nt, Artificial Sequence
  Description of Artificial Sequence: Synthetic oligonucleotide
  Antisense strand to SEQ ID NO: 1820941
ugaucucuggaacauacua

SEQ ID NO: 1820943 - RNA, 19 nt, Artificial Sequence
  Description of Artificial Sequence: Synthetic oligonucleotide
  Sense strand starting at position 2198 of SEQ ID NO: 1563578
guauguuccagagaucagc

SEQ ID NO: 1820944 - RNA, 19 nt, Artificial Sequence
  Description of Artificial Sequence: Synthetic oligonucleotide
  Antisense strand to SEQ ID NO: 1820943
gcugaucucuggaacauac

SEQ ID NO: 1820945 - RNA, 19 nt, Artificial Sequence
  Description of Artificial Sequence: Synthetic oligonucleotide
  Sense strand starting at position 2232 of SEQ ID NO: 1563578
aaaggagagugaucguaau

SEQ ID NO: 1820946 - RNA, 19 nt, Artificial Sequence
  Description of Artificial Sequence: Synthetic oligonucleotide
  Antisense strand to SEQ ID NO: 1820945
auuacgaucacucuccuuu

SEQ ID NO: 1820947 - RNA, 19 nt, Artificial Sequence
  Description of Artificial Sequence: Synthetic oligonucleotide
  Sense strand starting at position 2636 of SEQ ID NO: 1563578
cugguauugcacugauuuc

SEQ ID NO: 1820948 - RNA, 19 nt, Artificial Sequence
  Description of Artificial Sequence: Synthetic oligonucleotide
  Antisense strand to SEQ ID NO: 1820947
gaaaucagugcaauaccag

SEQ ID NO: 1820949 - RNA, 19 nt, Artificial Sequence
  Description of Artificial Sequence: Synthetic oligonucleotide
  Sense strand starting at position 3017 of SEQ ID NO: 1563578
acaguaggugagcaguaaa

SEQ ID NO: 1820950 - RNA, 19 nt, Artificial Sequence
  Description of Artificial Sequence: Synthetic oligonucleotide
  Antisense strand to SEQ ID NO: 1820949
uuuacugcucaccuacugu

SEQ ID NO: 1820951 - RNA, 19 nt, Artificial Sequence
  Description of Artificial Sequence: Synthetic oligonucleotide
  Sense strand starting at position 3031 of SEQ ID NO: 1563578
guaaaugcuccaugaauaa

SEQ ID NO: 1820952 - RNA, 19 nt, Artificial Sequence
  Description of Artificial Sequence: Synthetic oligonucleotide
  Antisense strand to SEQ ID NO: 1820951
uuauucauggagcauuuac

SEQ ID NO: 1820953 - RNA, 19 nt, Artificial Sequence
  Description of Artificial Sequence: Synthetic oligonucleotide
  Sense strand starting at position 3130 of SEQ ID NO: 1563578
acucccaguuagcuagaaa

SEQ ID NO: 1820954 - RNA, 19 nt, Artificial Sequence
  Description of Artificial Sequence: Synthetic oligonucleotide
  Antisense strand to SEQ ID NO: 1820953
uuucuagcuaacugggagu

SEQ ID NO: 1820955 - RNA, 19 nt, Artificial Sequence
  Description of Artificial Sequence: Synthetic oligonucleotide
  Sense strand starting at position 3285 of SEQ ID NO: 1563578
uaaauuauggugcggagau

SEQ ID NO: 1820956 - RNA, 19 nt, Artificial Sequence
  Description of Artificial Sequence: Synthetic oligonucleotide
  Antisense strand to SEQ ID NO: 1820955
aucuccgcaccauaauuua

SEQ ID NO: 1820957 - RNA, 19 nt, Artificial Sequence
  Description of Artificial Sequence: Synthetic oligonucleotide
  Sense strand starting at position 3287 of SEQ ID NO: 1563578
aauuauggugcggagauua

SEQ ID NO: 1820958 - RNA, 19 nt, Artificial Sequence
  Description of Artificial Sequence: Synthetic oligonucleotide
  Antisense strand to SEQ ID NO: 1820957
uaaucuccgcaccauaauu

SEQ ID NO: 1820959 - RNA, 19 nt, Artificial Sequence
  Description of Artificial Sequence: Synthetic oligonucleotide
  Sense strand starting at position 3431 of SEQ ID NO: 1563578
uuaggaagagcccauguau

SEQ ID NO: 1820960 - RNA, 19 nt, Artificial Sequence
  Description of Artificial Sequence: Synthetic oligonucleotide
  Antisense strand to SEQ ID NO: 1820959
auacaugggcucuuccuaa

SEQ ID NO: 1820961 - RNA, 19 nt, Artificial Sequence
  Description of Artificial Sequence: Synthetic oligonucleotide
  Sense strand starting at position 3569 of SEQ ID NO: 1563578
augguaguucuuuagguuu

SEQ ID NO: 1820962 - RNA, 19 nt, Artificial Sequence
  Description of Artificial Sequence: Synthetic oligonucleotide
  Antisense strand to SEQ ID NO: 1820961
aaaccuaaagaacuaccau

SEQ ID NO: 1820963 - RNA, 19 nt, Artificial Sequence
  Description of Artificial Sequence: Synthetic oligonucleotide
  Sense strand starting at position 3576 of SEQ ID NO: 1563578
uucuuuagguuucugauca

SEQ ID NO: 1820964 - RNA, 19 nt, Artificial Sequence
  Description of Artificial Sequence: Synthetic oligonucleotide
  Antisense strand to SEQ ID NO: 1820963
ugaucagaaaccuaaagaa

SEQ ID NO: 1820965 - RNA, 19 nt, Artificial Sequence
  Description of Artificial Sequence: Synthetic oligonucleotide
  Sense strand starting at position 3880 of SEQ ID NO: 1563578
guccucaagccacagaauu

SEQ ID NO: 1820966 - RNA, 19 nt, Artificial Sequence
  Description of Artificial Sequence: Synthetic oligonucleotide
  Antisense strand to SEQ ID NO: 1820965
aauucuguggcuugaggac

SEQ ID NO: 1820967 - RNA, 19 nt, Artificial Sequence
  Description of Artificial Sequence: Synthetic oligonucleotide
  Sense strand starting at position 3947 of SEQ ID NO: 1563578
acaauuucuuaggaagaau

SEQ ID NO: 1820968 - RNA, 19 nt, Artificial Sequence
  Description of Artificial Sequence: Synthetic oligonucleotide
  Antisense strand to SEQ ID NO: 1820967
auucuuccuaagaaauugu

SEQ ID NO: 1820969 - RNA, 19 nt, Artificial Sequence
  Description of Artificial Sequence: Synthetic oligonucleotide
  Sense strand starting at position 3958 of SEQ ID NO: 1563578
ggaagaauaguugguaacu

SEQ ID NO: 1820970 - RNA, 19 nt, Artificial Sequence
  Description of Artificial Sequence: Synthetic oligonucleotide
  Antisense strand to SEQ ID NO: 1820969
aguuaccaacuauucuucc

SEQ ID NO: 1820971 - RNA, 19 nt, Artificial Sequence
  Description of Artificial Sequence: Synthetic oligonucleotide
  Sense strand starting at position 3959 of SEQ ID NO: 1563578
gaagaauaguugguaacuu

SEQ ID NO: 1820972 - RNA, 19 nt, Artificial Sequence
  Description of Artificial Sequence: Synthetic oligonucleotide
  Antisense strand to SEQ ID NO: 1820971
aaguuaccaacuauucuuc

SEQ ID NO: 1820973 - RNA, 19 nt, Artificial Sequence
  Description of Artificial Sequence: Synthetic oligonucleotide
  Sense strand starting at position 39 of SEQ ID NO: 1563579
gcaaaugccugcuuaauac

SEQ ID NO: 1820974 - RNA, 19 nt, Artificial Sequence
  Description of Artificial Sequence: Synthetic oligonucleotide
  Antisense strand to SEQ ID NO: 1820973
guauuaagcaggcauuugc

SEQ ID NO: 1820975 - RNA, 19 nt, Artificial Sequence
  Description of Artificial Sequence: Synthetic oligonucleotide
  Sense strand starting at position 75 of SEQ ID NO: 1563579
acaugaacaugaguuugua

SEQ ID NO: 1820976 - RNA, 19 nt, Artificial Sequence
  Description of Artificial Sequence: Synthetic oligonucleotide
  Antisense strand to SEQ ID NO: 1820975
uacaaacucauguucaugu

SEQ ID NO: 1820977 - RNA, 19 nt, Artificial Sequence
  Description of Artificial Sequence: Synthetic oligonucleotide
  Sense strand starting at position 78 of SEQ ID NO: 1563579
ugaacaugaguuuguaaag

SEQ ID NO: 1820978 - RNA, 19 nt, Artificial Sequence
  Description of Artificial Sequence: Synthetic oligonucleotide
  Antisense strand to SEQ ID NO: 1820977
cuuuacaaacucauguuca

SEQ ID NO: 1820979 - RNA, 19 nt, Artificial Sequence
  Description of Artificial Sequence: Synthetic oligonucleotide
  Sense strand starting at position 219 of SEQ ID NO: 1563579
uugugcuauucugcaaaug

SEQ ID NO: 1820980 - RNA, 19 nt, Artificial Sequence
  Description of Artificial Sequence: Synthetic oligonucleotide
  Antisense strand to SEQ ID NO: 1820979
cauuugcagaauagcacaa

SEQ ID NO: 1820981 - RNA, 19 nt, Artificial Sequence
  Description of Artificial Sequence: Synthetic oligonucleotide
  Sense strand starting at position 220 of SEQ ID NO: 1563579
ugugcuauucugcaaaugu

SEQ ID NO: 1820982 - RNA, 19 nt, Artificial Sequence
  Description of Artificial Sequence: Synthetic oligonucleotide
  Antisense strand to SEQ ID NO: 1820981
acauuugcagaauagcaca

SEQ ID NO: 1820983 - RNA, 19 nt, Artificial Sequence
  Description of Artificial Sequence: Synthetic oligonucleotide
  Sense strand starting at position 255 of SEQ ID NO: 1563579
caccguaacguuuacauua

SEQ ID NO: 1820984 - RNA, 19 nt, Artificial Sequence
  Description of Artificial Sequence: Synthetic oligonucleotide
  Antisense strand to SEQ ID NO: 1820983
uaauguaaacguuacggug

SEQ ID NO: 1820985 - RNA, 19 nt, Artificial Sequence
  Description of Artificial Sequence: Synthetic oligonucleotide
  Sense strand starting at position 305 of SEQ ID NO: 1563579
ccugcuguucuauaagcuu

SEQ ID NO: 1820986 - RNA, 19 nt, Artificial Sequence
  Description of Artificial Sequence: Synthetic oligonucleotide
  Antisense strand to SEQ ID NO: 1820985
aagcuuauagaacagcagg

SEQ ID NO: 1820987 - RNA, 19 nt, Artificial Sequence
  Description of Artificial Sequence: Synthetic oligonucleotide
  Sense strand starting at position 311 of SEQ ID NO: 1563579
guucuauaagcuugccaua

SEQ ID NO: 1820988 - RNA, 19 nt, Artificial Sequence
  Description of Artificial Sequence: Synthetic oligonucleotide
  Antisense strand to SEQ ID NO: 1820987
uauggcaagcuuauagaac

SEQ ID NO: 1820989 - RNA, 19 nt, Artificial Sequence
  Description of Artificial Sequence: Synthetic oligonucleotide
  Sense strand starting at position 313 of SEQ ID NO: 1563579
ucuauaagcuugccauaga

SEQ ID NO: 1820990 - RNA, 19 nt, Artificial Sequence
  Description of Artificial Sequence: Synthetic oligonucleotide
  Antisense strand to SEQ ID NO: 1820989
ucuauggcaagcuuauaga

SEQ ID NO: 1820991 - RNA, 19 nt, Artificial Sequence
  Description of Artificial Sequence: Synthetic oligonucleotide
  Sense strand starting at position 316 of SEQ ID NO: 1563579
auaagcuugccauagacuu

SEQ ID NO: 1820992 - RNA, 19 nt, Artificial Sequence
  Description of Artificial Sequence: Synthetic oligonucleotide
  Antisense strand to SEQ ID NO: 1820991
aagucuauggcaagcuuau

SEQ ID NO: 1820993 - RNA, 19 nt, Artificial Sequence
  Description of Artificial Sequence: Synthetic oligonucleotide
  Sense strand starting at position 343 of SEQ ID NO: 1563579
agagaagaauuacaagcaa

SEQ ID NO: 1820994 - RNA, 19 nt, Artificial Sequence
  Description of Artificial Sequence: Synthetic oligonucleotide
  Antisense strand to SEQ ID NO: 1820993
uugcuuguaauucuucucu

SEQ ID NO: 1820995 - RNA, 19 nt, Artificial Sequence
  Description of Artificial Sequence: Synthetic oligonucleotide
  Sense strand starting at position 364 of SEQ ID NO: 1563579
acaagaugauggcuccaau

SEQ ID NO: 1820996 - RNA, 19 nt, Artificial Sequence
  Description of Artificial Sequence: Synthetic oligonucleotide
  Antisense strand to SEQ ID NO: 1820995
auuggagccaucaucuugu

SEQ ID NO: 1820997 - RNA, 19 nt, Artificial Sequence
  Description of Artificial Sequence: Synthetic oligonucleotide
  Sense strand starting at position 472 of SEQ ID NO: 1563579
gcaaauacauacgcuuauu

SEQ ID NO: 1820998 - RNA, 19 nt, Artificial Sequence
  Description of Artificial Sequence: Synthetic oligonucleotide
  Antisense strand to SEQ ID NO: 1820997
aauaagcguauguauuugc

SEQ ID NO: 1820999 - RNA, 19 nt, Artificial Sequence
  Description of Artificial Sequence: Synthetic oligonucleotide
  Sense strand starting at position 518 of SEQ ID NO: 1563579
agcgaaaugcuacaaggau

SEQ ID NO: 1821000 - RNA, 19 nt, Artificial Sequence
  Description of Artificial Sequence: Synthetic oligonucleotide
  Antisense strand to SEQ ID NO: 1820999
auccuuguagcauuucgcu

SEQ ID NO: 1821001 - RNA, 19 nt, Artificial Sequence
  Description of Artificial Sequence: Synthetic oligonucleotide
  Sense strand starting at position 573 of SEQ ID NO: 1563579
cuggcaucccauuaauaag

SEQ ID NO: 1821002 - RNA, 19 nt, Artificial Sequence
  Description of Artificial Sequence: Synthetic oligonucleotide
  Antisense strand to SEQ ID NO: 1821001
cuuauuaaugggaugccag

SEQ ID NO: 1821003 - RNA, 19 nt, Artificial Sequence
  Description of Artificial Sequence: Synthetic oligonucleotide
  Sense strand starting at position 946 of SEQ ID NO: 1563579
cgugcuucucuagauucca

SEQ ID NO: 1821004 - RNA, 19 nt, Artificial Sequence
  Description of Artificial Sequence: Synthetic oligonucleotide
  Antisense strand to SEQ ID NO: 1821003
uggaaucuagagaagcacg

SEQ ID NO: 1821005 - RNA, 19 nt, Artificial Sequence
  Description of Artificial Sequence: Synthetic oligonucleotide
  Sense strand starting at position 962 of SEQ ID NO: 1563579
ccacgcuggagcugaaaua

SEQ ID NO: 1821006 - RNA, 19 nt, Artificial Sequence
  Description of Artificial Sequence: Synthetic oligonucleotide
  Antisense strand to SEQ ID NO: 1821005
uauuucagcuccagcgugg

SEQ ID NO: 1821007 - RNA, 19 nt, Artificial Sequence
  Description of Artificial Sequence: Synthetic oligonucleotide
  Sense strand starting at position 1287 of SEQ ID NO: 1563579
gcuagcuauccuggcugaa

SEQ ID NO: 1821008 - RNA, 19 nt, Artificial Sequence
  Description of Artificial Sequence: Synthetic oligonucleotide
  Antisense strand to SEQ ID NO: 1821007
uucagccaggauagcuagc

SEQ ID NO: 1821009 - RNA, 19 nt, Artificial Sequence
  Description of Artificial Sequence: Synthetic oligonucleotide
  Sense strand starting at position 1289 of SEQ ID NO: 1563579
uagcuauccuggcugaaag

SEQ ID NO: 1821010 - RNA, 19 nt, Artificial Sequence
  Description of Artificial Sequence: Synthetic oligonucleotide
  Antisense strand to SEQ ID NO: 1821009
cuuucagccaggauagcua

SEQ ID NO: 1821011 - RNA, 19 nt, Artificial Sequence
  Description of Artificial Sequence: Synthetic oligonucleotide
  Sense strand starting at position 1290 of SEQ ID NO: 1563579
agcuauccuggcugaaaga

SEQ ID NO: 1821012 - RNA, 19 nt, Artificial Sequence
  Description of Artificial Sequence: Synthetic oligonucleotide
  Antisense strand to SEQ ID NO: 1821011
ucuuucagccaggauagcu

SEQ ID NO: 1821013 - RNA, 19 nt, Artificial Sequence
  Description of Artificial Sequence: Synthetic oligonucleotide
  Sense strand starting at position 1291 of SEQ ID NO: 1563579
gcuauccuggcugaaagaa

SEQ ID NO: 1821014 - RNA, 19 nt, Artificial Sequence
  Description of Artificial Sequence: Synthetic oligonucleotide
  Antisense strand to SEQ ID NO: 1821013
uucuuucagccaggauagc

SEQ ID NO: 1821015 - RNA, 19 nt, Artificial Sequence
  Description of Artificial Sequence: Synthetic oligonucleotide
  Sense strand starting at position 1347 of SEQ ID NO: 1563579
ccgccauccuuggugacaa

SEQ ID NO: 1821016 - RNA, 19 nt, Artificial Sequence
  Description of Artificial Sequence: Synthetic oligonucleotide
  Antisense strand to SEQ ID NO: 1821015
uugucaccaaggauggcgg

SEQ ID NO: 1821017 - RNA, 19 nt, Artificial Sequence
  Description of Artificial Sequence: Synthetic oligonucleotide
  Sense strand starting at position 2779 of SEQ ID NO: 1563579
ggauaaagccugugcagga

SEQ ID NO: 1821018 - RNA, 19 nt, Artificial Sequence
  Description of Artificial Sequence: Synthetic oligonucleotide
  Antisense strand to SEQ ID NO: 1821017
uccugcacaggcuuuaucc

SEQ ID NO: 1821019 - RNA, 19 nt, Artificial Sequence
  Description of Artificial Sequence: Synthetic oligonucleotide
  Sense strand starting at position 2801 of SEQ ID NO: 1563579
guacaaauagugugauuag

SEQ ID NO: 1821020 - RNA, 19 nt, Artificial Sequence
  Description of Artificial Sequence: Synthetic oligonucleotide
  Antisense strand to SEQ ID NO: 1821019
cuaaucacacuauuuguac

SEQ ID NO: 1821021 - RNA, 19 nt, Artificial Sequence
  Description of Artificial Sequence: Synthetic oligonucleotide
  Sense strand starting at position 2804 of SEQ ID NO: 1563579
caaauagugugauuaggaa

SEQ ID NO: 1821022 - RNA, 19 nt, Artificial Sequence
  Description of Artificial Sequence: Synthetic oligonucleotide
  Antisense strand to SEQ ID NO: 1821021
uuccuaaucacacuauuug

SEQ ID NO: 1821023 - RNA, 19 nt, Artificial Sequence
  Description of Artificial Sequence: Synthetic oligonucleotide
  Sense strand starting at position 2808 of SEQ ID NO: 1563579
uagugugauuaggaaagga

SEQ ID NO: 1821024 - RNA, 19 nt, Artificial Sequence
  Description of Artificial Sequence: Synthetic oligonucleotide
  Antisense strand to SEQ ID NO: 1821023
uccuuuccuaaucacacua

SEQ ID NO: 1821025 - RNA, 19 nt, Artificial Sequence
  Description of Artificial Sequence: Synthetic oligonucleotide
  Sense strand starting at position 2905 of SEQ ID NO: 1563579
ggaccaaaucuugaugcuu

SEQ ID NO: 1821026 - RNA, 19 nt, Artificial Sequence
  Description of Artificial Sequence: Synthetic oligonucleotide
  Antisense strand to SEQ ID NO: 1821025
aagcaucaagauuuggucc

SEQ ID NO: 1821027 - RNA, 19 nt, Artificial Sequence
  Description of Artificial Sequence: Synthetic oligonucleotide
  Sense strand starting at position 2944 of SEQ ID NO: 1563579
caugauuggcgccaggaaa

SEQ ID NO: 1821028 - RNA, 19 nt, Artificial Sequence
  Description of Artificial Sequence: Synthetic oligonucleotide
  Antisense strand to SEQ ID NO: 1821027
uuuccuggcgccaaucaug

SEQ ID NO: 1821029 - RNA, 19 nt, Artificial Sequence
  Description of Artificial Sequence: Synthetic oligonucleotide
  Sense strand starting at position 3115 of SEQ ID NO: 1563579
cgugacacggucugacuua

SEQ ID NO: 1821030 - RNA, 19 nt, Artificial Sequence
  Description of Artificial Sequence: Synthetic oligonucleotide
  Antisense strand to SEQ ID NO: 1821029
uaagucagaccgugucacg

SEQ ID NO: 1821031 - RNA, 19 nt, Artificial Sequence
  Description of Artificial Sequence: Synthetic oligonucleotide
  Sense strand starting at position 3122 of SEQ ID NO: 1563579
cggucugacuuauauuucu

SEQ ID NO: 1821032 - RNA, 19 nt, Artificial Sequence
  Description of Artificial Sequence: Synthetic oligonucleotide
  Antisense strand to SEQ ID NO: 1821031
agaaauauaagucagaccg

SEQ ID NO: 1821033 - RNA, 19 nt, Artificial Sequence
  Description of Artificial Sequence: Synthetic oligonucleotide
  Sense strand starting at position 3430 of SEQ ID NO: 1563579
ucaucauugcaaggaucuu

SEQ ID NO: 1821034 - RNA, 19 nt, Artificial Sequence
  Description of Artificial Sequence: Synthetic oligonucleotide
  Antisense strand to SEQ ID NO: 1821033
aagauccuugcaaugauga

SEQ ID NO: 1821035 - RNA, 19 nt, Artificial Sequence
  Description of Artificial Sequence: Synthetic oligonucleotide
  Sense strand starting at position 3439 of SEQ ID NO: 1563579
caaggaucuuaccuguugu

SEQ ID NO: 1821036 - RNA, 19 nt, Artificial Sequence
  Description of Artificial Sequence: Synthetic oligonucleotide
  Antisense strand to SEQ ID NO: 1821035
acaacagguaagauccuug

SEQ ID NO: 1821037 - RNA, 19 nt, Artificial Sequence
  Description of Artificial Sequence: Synthetic oligonucleotide
  Sense strand starting at position 3522 of SEQ ID NO: 1563579
acugauccguccuccauuu

SEQ ID NO: 1821038 - RNA, 19 nt, Artificial Sequence
  Description of Artificial Sequence: Synthetic oligonucleotide
  Antisense strand to SEQ ID NO: 1821037
aaauggaggacggaucagu

SEQ ID NO: 1821039 - RNA, 19 nt, Artificial Sequence
  Description of Artificial Sequence: Synthetic oligonucleotide
  Sense strand starting at position 3531 of SEQ ID NO: 1563579
uccuccauuucuguaaguu

SEQ ID NO: 1821040 - RNA, 19 nt, Artificial Sequence
  Description of Artificial Sequence: Synthetic oligonucleotide
  Antisense strand to SEQ ID NO: 1821039
aacuuacagaaauggagga

SEQ ID NO: 1821041 - RNA, 19 nt, Artificial Sequence
  Description of Artificial Sequence: Synthetic oligonucleotide
  Sense strand starting at position 3784 of SEQ ID NO: 1563579
uuaggaggcuuucucaaua

SEQ ID NO: 1821042 - RNA, 19 nt, Artificial Sequence
  Description of Artificial Sequence: Synthetic oligonucleotide
  Antisense strand to SEQ ID NO: 1821041
uauugagaaagccuccuaa

SEQ ID NO: 1821043 - RNA, 19 nt, Artificial Sequence
  Description of Artificial Sequence: Synthetic oligonucleotide
  Sense strand starting at position 3814 of SEQ ID NO: 1563579
agcugauggugguuuagau

SEQ ID NO: 1821044 - RNA, 19 nt, Artificial Sequence
  Description of Artificial Sequence: Synthetic oligonucleotide
  Antisense strand to SEQ ID NO: 1821043
aucuaaaccaccaucagcu

SEQ ID NO: 1821045 - RNA, 19 nt, Artificial Sequence
  Description of Artificial Sequence: Synthetic oligonucleotide
  Sense strand starting at position 3856 of SEQ ID NO: 1563579
guggaaggauuugauggaa

SEQ ID NO: 1821046 - RNA, 19 nt, Artificial Sequence
  Description of Artificial Sequence: Synthetic oligonucleotide
  Antisense strand to SEQ ID NO: 1821045
uuccaucaaauccuuccac

SEQ ID NO: 1821047 - RNA, 19 nt, Artificial Sequence
  Description of Artificial Sequence: Synthetic oligonucleotide
  Sense strand starting at position 3875 of SEQ ID NO: 1563579
caggguugcagagggaauu

SEQ ID NO: 1821048 - RNA, 19 nt, Artificial Sequence
  Description of Artificial Sequence: Synthetic oligonucleotide
  Antisense strand to SEQ ID NO: 1821047
aauucccucugcaacccug

SEQ ID NO: 1821049 - RNA, 19 nt, Artificial Sequence
  Description of Artificial Sequence: Synthetic oligonucleotide
  Sense strand starting at position 3887 of SEQ ID NO: 1563579
gggaauuggaguugaagua

SEQ ID NO: 1821050 - RNA, 19 nt, Artificial Sequence
  Description of Artificial Sequence: Synthetic oligonucleotide
  Antisense strand to SEQ ID NO: 1821049
uacuucaacuccaauuccc

SEQ ID NO: 1821051 - RNA, 19 nt, Artificial Sequence
  Description of Artificial Sequence: Synthetic oligonucleotide
  Sense strand starting at position 3943 of SEQ ID NO: 1563579
caauguaaaugggaagaaa

SEQ ID NO: 1821052 - RNA, 19 nt, Artificial Sequence
  Description of Artificial Sequence: Synthetic oligonucleotide
  Antisense strand to SEQ ID NO: 1821051
uuucuucccauuuacauug

SEQ ID NO: 1821053 - RNA, 19 nt, Artificial Sequence
  Description of Artificial Sequence: Synthetic oligonucleotide
  Sense strand starting at position 18 of SEQ ID NO: 1563580
gaagauagguuucuaucau

SEQ ID NO: 1821054 - RNA, 19 nt, Artificial Sequence
  Description of Artificial Sequence: Synthetic oligonucleotide
  Antisense strand to SEQ ID NO: 1821053
augauagaaaccuaucuuc

SEQ ID NO: 1821055 - RNA, 19 nt, Artificial Sequence
  Description of Artificial Sequence: Synthetic oligonucleotide
  Sense strand starting at position 380 of SEQ ID NO: 1563580
gagcauguacccuaacuga

SEQ ID NO: 1821056 - RNA, 19 nt, Artificial Sequence
  Description of Artificial Sequence: Synthetic oligonucleotide
  Antisense strand to SEQ ID NO: 1821055
ucaguuaggguacaugcuc

SEQ ID NO: 1821057 - RNA, 19 nt, Artificial Sequence
  Description of Artificial Sequence: Synthetic oligonucleotide
  Sense strand starting at position 596 of SEQ ID NO: 1563580
ggaugagccuucucuuaga

SEQ ID NO: 1821058 - RNA, 19 nt, Artificial Sequence
  Description of Artificial Sequence: Synthetic oligonucleotide
  Antisense strand to SEQ ID NO: 1821057
ucuaagagaaggcucaucc

SEQ ID NO: 1821059 - RNA, 19 nt, Artificial Sequence
  Description of Artificial Sequence: Synthetic oligonucleotide
  Sense strand starting at position 664 of SEQ ID NO: 1563580
gaggaacccugagucauca

SEQ ID NO: 1821060 - RNA, 19 nt, Artificial Sequence
  Description of Artificial Sequence: Synthetic oligonucleotide
  Antisense strand to SEQ ID NO: 1821059
ugaugacucaggguuccuc

SEQ ID NO: 1821061 - RNA, 19 nt, Artificial Sequence
  Description of Artificial Sequence: Synthetic oligonucleotide
  Sense strand starting at position 774 of SEQ ID NO: 1563580
ucugaacuugagggcaaau

SEQ ID NO: 1821062 - RNA, 19 nt, Artificial Sequence
  Description of Artificial Sequence: Synthetic oligonucleotide
  Antisense strand to SEQ ID NO: 1821061
auuugcccucaaguucaga

SEQ ID NO: 1821063 - RNA, 19 nt, Artificial Sequence
  Description of Artificial Sequence: Synthetic oligonucleotide
  Sense strand starting at position 816 of SEQ ID NO: 1563580
auuaaugucaccgagcaga

SEQ ID NO: 1821064 - RNA, 19 nt, Artificial Sequence
  Description of Artificial Sequence: Synthetic oligonucleotide
  Antisense strand to SEQ ID NO: 1821063
ucugcucggugacauuaau

SEQ ID NO: 1821065 - RNA, 19 nt, Artificial Sequence
  Description of Artificial Sequence: Synthetic oligonucleotide
  Sense strand starting at position 845 of SEQ ID NO: 1563580
ggccuucuaucaccagauu

SEQ ID NO: 1821066 - RNA, 19 nt, Artificial Sequence
  Description of Artificial Sequence: Synthetic oligonucleotide
  Antisense strand to SEQ ID NO: 1821065
aaucuggugauagaaggcc

SEQ ID NO: 1821067 - RNA, 19 nt, Artificial Sequence
  Description of Artificial Sequence: Synthetic oligonucleotide
  Sense strand starting at position 996 of SEQ ID NO: 1563580
gcagcuuuccugcucccua

SEQ ID NO: 1821068 - RNA, 19 nt, Artificial Sequence
  Description of Artificial Sequence: Synthetic oligonucleotide
  Antisense strand to SEQ ID NO: 1821067
uagggagcaggaaagcugc

SEQ ID NO: 1821069 - RNA, 19 nt, Artificial Sequence
  Description of Artificial Sequence: Synthetic oligonucleotide
  Sense strand starting at position 1011 of SEQ ID NO: 1563580
ccuacuguucgugcaacga

SEQ ID NO: 1821070 - RNA, 19 nt, Artificial Sequence
  Description of Artificial Sequence: Synthetic oligonucleotide
  Antisense strand to SEQ ID NO: 1821069
ucguugcacgaacaguagg

SEQ ID NO: 1821071 - RNA, 19 nt, Artificial Sequence
  Description of Artificial Sequence: Synthetic oligonucleotide
  Sense strand starting at position 1026 of SEQ ID NO: 1563580
acgacaugagcagaucuuu

SEQ ID NO: 1821072 - RNA, 19 nt, Artificial Sequence
  Description of Artificial Sequence: Synthetic oligonucleotide
  Antisense strand to SEQ ID NO: 1821071
aaagaucugcucaugucgu

SEQ ID NO: 1821073 - RNA, 19 nt, Artificial Sequence
  Description of Artificial Sequence: Synthetic oligonucleotide
  Sense strand starting at position 1031 of SEQ ID NO: 1563580
augagcagaucuuuacuuu

SEQ ID NO: 1821074 - RNA, 19 nt, Artificial Sequence
  Description of Artificial Sequence: Synthetic oligonucleotide
  Antisense strand to SEQ ID NO: 1821073
aaaguaaagaucugcucau

SEQ ID NO: 1821075 - RNA, 19 nt, Artificial Sequence
  Description of Artificial Sequence: Synthetic oligonucleotide
  Sense strand starting at position 1032 of SEQ ID NO: 1563580
ugagcagaucuuuacuuua

SEQ ID NO: 1821076 - RNA, 19 nt, Artificial Sequence
  Description of Artificial Sequence: Synthetic oligonucleotide
  Antisense strand to SEQ ID NO: 1821075
uaaaguaaagaucugcuca

SEQ ID NO: 1821077 - RNA, 19 nt, Artificial Sequence
  Description of Artificial Sequence: Synthetic oligonucleotide
  Sense strand starting at position 1035 of SEQ ID NO: 1563580
gcagaucuuuacuuuaaag

SEQ ID NO: 1821078 - RNA, 19 nt, Artificial Sequence
  Description of Artificial Sequence: Synthetic oligonucleotide
  Antisense strand to SEQ ID NO: 1821077
cuuuaaaguaaagaucugc

SEQ ID NO: 1821079 - RNA, 19 nt, Artificial Sequence
  Description of Artificial Sequence: Synthetic oligonucleotide
  Sense strand starting at position 1108 of SEQ ID NO: 1563580
guugaaagcaaaugagauu

SEQ ID NO: 1821080 - RNA, 19 nt, Artificial Sequence
  Description of Artificial Sequence: Synthetic oligonucleotide
  Antisense strand to SEQ ID NO: 1821079
aaucucauuugcuuucaac

SEQ ID NO: 1821081 - RNA, 19 nt, Artificial Sequence
  Description of Artificial Sequence: Synthetic oligonucleotide
  Sense strand starting at position 1175 of SEQ ID NO: 1563580
gugacauugguugagucaa

SEQ ID NO: 1821082 - RNA, 19 nt, Artificial Sequence
  Description of Artificial Sequence: Synthetic oligonucleotide
  Antisense strand to SEQ ID NO: 1821081
uugacucaaccaaugucac

SEQ ID NO: 1821083 - RNA, 19 nt, Artificial Sequence
  Description of Artificial Sequence: Synthetic oligonucleotide
  Sense strand starting at position 1177 of SEQ ID NO: 1563580
gacauugguugagucaauu

SEQ ID NO: 1821084 - RNA, 19 nt, Artificial Sequence
  Description of Artificial Sequence: Synthetic oligonucleotide
  Antisense strand to SEQ ID NO: 1821083
aauugacucaaccaauguc

SEQ ID NO: 1821085 - RNA, 19 nt, Artificial Sequence
  Description of Artificial Sequence: Synthetic oligonucleotide
  Sense strand starting at position 1208 of SEQ ID NO: 1563580
cugaaaccuccugguacaa

SEQ ID NO: 1821086 - RNA, 19 nt, Artificial Sequence
  Description of Artificial Sequence: Synthetic oligonucleotide
  Antisense strand to SEQ ID NO: 1821085
uuguaccaggagguuucag

SEQ ID NO: 1821087 - RNA, 19 nt, Artificial Sequence
  Description of Artificial Sequence: Synthetic oligonucleotide
  Sense strand starting at position 1273 of SEQ ID NO: 1563580
guuggagaucaguguaaga

SEQ ID NO: 1821088 - RNA, 19 nt, Artificial Sequence
  Description of Artificial Sequence: Synthetic oligonucleotide
  Antisense strand to SEQ ID NO: 1821087
ucuuacacugaucuccaac

SEQ ID NO: 1821089 - RNA, 19 nt, Artificial Sequence
  Description of Artificial Sequence: Synthetic oligonucleotide
  Sense strand starting at position 1278 of SEQ ID NO: 1563580
agaucaguguaagaauuug

SEQ ID NO: 1821090 - RNA, 19 nt, Artificial Sequence
  Description of Artificial Sequence: Synthetic oligonucleotide
  Antisense strand to SEQ ID NO: 1821089
caaauucuuacacugaucu

SEQ ID NO: 1821091 - RNA, 19 nt, Artificial Sequence
  Description of Artificial Sequence: Synthetic oligonucleotide
  Sense strand starting at position 2160 of SEQ ID NO: 1563580
aagggagugugaucacugu

SEQ ID NO: 1821092 - RNA, 19 nt, Artificial Sequence
  Description of Artificial Sequence: Synthetic oligonucleotide
  Antisense strand to SEQ ID NO: 1821091
acagugaucacacucccuu

SEQ ID NO: 1821093 - RNA, 19 nt, Artificial Sequence
  Description of Artificial Sequence: Synthetic oligonucleotide
  Sense strand starting at position 2166 of SEQ ID NO: 1563580
gugugaucacuguauuauc

SEQ ID NO: 1821094 - RNA, 19 nt, Artificial Sequence
  Description of Artificial Sequence: Synthetic oligonucleotide
  Antisense strand to SEQ ID NO: 1821093
gauaauacagugaucacac

SEQ ID NO: 1821095 - RNA, 19 nt, Artificial Sequence
  Description of Artificial Sequence: Synthetic oligonucleotide
  Sense strand starting at position 2253 of SEQ ID NO: 1563580
gcgaaugaaaucugaggaa

SEQ ID NO: 1821096 - RNA, 19 nt, Artificial Sequence
  Description of Artificial Sequence: Synthetic oligonucleotide
  Antisense strand to SEQ ID NO: 1821095
uuccucagauuucauucgc

SEQ ID NO: 1821097 - RNA, 19 nt, Artificial Sequence
  Description of Artificial Sequence: Synthetic oligonucleotide
  Sense strand starting at position 2567 of SEQ ID NO: 1563580
ugacgacgauugucaggau

SEQ ID NO: 1821098 - RNA, 19 nt, Artificial Sequence
  Description of Artificial Sequence: Synthetic oligonucleotide
  Antisense strand to SEQ ID NO: 1821097
auccugacaaucgucguca

SEQ ID NO: 1821099 - RNA, 19 nt, Artificial Sequence
  Description of Artificial Sequence: Synthetic oligonucleotide
  Sense strand starting at position 2579 of SEQ ID NO: 1563580
ucaggaucguugucaggaa

SEQ ID NO: 1821100 - RNA, 19 nt, Artificial Sequence
  Description of Artificial Sequence: Synthetic oligonucleotide
  Antisense strand to SEQ ID NO: 1821099
uuccugacaacgauccuga

SEQ ID NO: 1821101 - RNA, 19 nt, Artificial Sequence
  Description of Artificial Sequence: Synthetic oligonucleotide
  Sense strand starting at position 2583 of SEQ ID NO: 1563580
gaucguugucaggaagaaa

SEQ ID NO: 1821102 - RNA, 19 nt, Artificial Sequence
  Description of Artificial Sequence: Synthetic oligonucleotide
  Antisense strand to SEQ ID NO: 1821101
uuucuuccugacaacgauc

SEQ ID NO: 1821103 - RNA, 19 nt, Artificial Sequence
  Description of Artificial Sequence: Synthetic oligonucleotide
  Sense strand starting at position 2606 of SEQ ID NO: 1563580
ugaagauaaugcuucccaa

SEQ ID NO: 1821104 - RNA, 19 nt, Artificial Sequence
  Description of Artificial Sequence: Synthetic oligonucleotide
  Antisense strand to SEQ ID NO: 1821103
uugggaagcauuaucuuca

SEQ ID NO: 1821105 - RNA, 19 nt, Artificial Sequence
  Description of Artificial Sequence: Synthetic oligonucleotide
  Sense strand starting at position 2787 of SEQ ID NO: 1563580
accuguacuuaaguagaga

SEQ ID NO: 1821106 - RNA, 19 nt, Artificial Sequence
  Description of Artificial Sequence: Synthetic oligonucleotide
  Antisense strand to SEQ ID NO: 1821105
ucucuacuuaaguacaggu

SEQ ID NO: 1821107 - RNA, 19 nt, Artificial Sequence
  Description of Artificial Sequence: Synthetic oligonucleotide
  Sense strand starting at position 2927 of SEQ ID NO: 1563580
aguauuuagcaugguaugu

SEQ ID NO: 1821108 - RNA, 19 nt, Artificial Sequence
  Description of Artificial Sequence: Synthetic oligonucleotide
  Antisense strand to SEQ ID NO: 1821107
acauaccaugcuaaauacu

SEQ ID NO: 1821109 - RNA, 19 nt, Artificial Sequence
  Description of Artificial Sequence: Synthetic oligonucleotide
  Sense strand starting at position 3000 of SEQ ID NO: 1563580
agaacucacugcuucuaga

SEQ ID NO: 1821110 - RNA, 19 nt, Artificial Sequence
  Description of Artificial Sequence: Synthetic oligonucleotide
  Antisense strand to SEQ ID NO: 1821109
ucuagaagcagugaguucu

SEQ ID NO: 1821111 - RNA, 19 nt, Artificial Sequence
  Description of Artificial Sequence: Synthetic oligonucleotide
  Sense strand starting at position 3228 of SEQ ID NO: 1563580
caagguacccauugaaugu

SEQ ID NO: 1821112 - RNA, 19 nt, Artificial Sequence
  Description of Artificial Sequence: Synthetic oligonucleotide
  Antisense strand to SEQ ID NO: 1821111
acauucaauggguaccuug

SEQ ID NO: 1821113 - RNA, 19 nt, Artificial Sequence
  Description of Artificial Sequence: Synthetic oligonucleotide
  Sense strand starting at position 3232 of SEQ ID NO: 1563580
guacccauugaauguuaaa

SEQ ID NO: 1821114 - RNA, 19 nt, Artificial Sequence
  Description of Artificial Sequence: Synthetic oligonucleotide
  Antisense strand to SEQ ID NO: 1821113
uuuaacauucaauggguac

SEQ ID NO: 1821115 - RNA, 19 nt, Artificial Sequence
  Description of Artificial Sequence: Synthetic oligonucleotide
  Sense strand starting at position 3264 of SEQ ID NO: 1563580
cuauuauuacagcaggcaa

SEQ ID NO: 1821116 - RNA, 19 nt, Artificial Sequence
  Description of Artificial Sequence: Synthetic oligonucleotide
  Antisense strand to SEQ ID NO: 1821115
uugccugcuguaauaauag

SEQ ID NO: 1821117 - RNA, 19 nt, Artificial Sequence
  Description of Artificial Sequence: Synthetic oligonucleotide
  Sense strand starting at position 3441 of SEQ ID NO: 1563580
aauugauguuuccuagaga

SEQ ID NO: 1821118 - RNA, 19 nt, Artificial Sequence
  Description of Artificial Sequence: Synthetic oligonucleotide
  Antisense strand to SEQ ID NO: 1821117
ucucuaggaaacaucaauu

SEQ ID NO: 1821119 - RNA, 19 nt, Artificial Sequence
  Description of Artificial Sequence: Synthetic oligonucleotide
  Sense strand starting at position 3446 of SEQ ID NO: 1563580
auguuuccuagagaugggu

SEQ ID NO: 1821120 - RNA, 19 nt, Artificial Sequence
  Description of Artificial Sequence: Synthetic oligonucleotide
  Antisense strand to SEQ ID NO: 1821119
acccaucucuaggaaacau

SEQ ID NO: 1821121 - RNA, 19 nt, Artificial Sequence
  Description of Artificial Sequence: Synthetic oligonucleotide
  Sense strand starting at position 3450 of SEQ ID NO: 1563580
uuccuagagauggguacaa

SEQ ID NO: 1821122 - RNA, 19 nt, Artificial Sequence
  Description of Artificial Sequence: Synthetic oligonucleotide
  Antisense strand to SEQ ID NO: 1821121
uuguacccaucucuaggaa

SEQ ID NO: 1821123 - RNA, 19 nt, Artificial Sequence
  Description of Artificial Sequence: Synthetic oligonucleotide
  Sense strand starting at position 3474 of SEQ ID NO: 1563580
accgauucuacuugacgga

SEQ ID NO: 1821124 - RNA, 19 nt, Artificial Sequence
  Description of Artificial Sequence: Synthetic oligonucleotide
  Antisense strand to SEQ ID NO: 1821123
uccgucaaguagaaucggu

SEQ ID NO: 1821125 - RNA, 19 nt, Artificial Sequence
  Description of Artificial Sequence: Synthetic oligonucleotide
  Sense strand starting at position 3475 of SEQ ID NO: 1563580
ccgauucuacuugacggaa

SEQ ID NO: 1821126 - RNA, 19 nt, Artificial Sequence
  Description of Artificial Sequence: Synthetic oligonucleotide
  Antisense strand to SEQ ID NO: 1821125
uuccgucaaguagaaucgg

SEQ ID NO: 1821127 - RNA, 19 nt, Artificial Sequence
  Description of Artificial Sequence: Synthetic oligonucleotide
  Sense strand starting at position 3632 of SEQ ID NO: 1563580
gggaaagugucuucuagua

SEQ ID NO: 1821128 - RNA, 19 nt, Artificial Sequence
  Description of Artificial Sequence: Synthetic oligonucleotide
  Antisense strand to SEQ ID NO: 1821127
uacuagaagacacuuuccc

SEQ ID NO: 1821129 - RNA, 19 nt, Artificial Sequence
  Description of Artificial Sequence: Synthetic oligonucleotide
  Sense strand starting at position 3666 of SEQ ID NO: 1563580
uggcuauucuuuccagaaa

SEQ ID NO: 1821130 - RNA, 19 nt, Artificial Sequence
  Description of Artificial Sequence: Synthetic oligonucleotide
  Antisense strand to SEQ ID NO: 1821129
uuucuggaaagaauagcca

SEQ ID NO: 1821131 - RNA, 19 nt, Artificial Sequence
  Description of Artificial Sequence: Synthetic oligonucleotide
  Sense strand starting at position 3733 of SEQ ID NO: 1563580
uuguuaguccuguaagaug

SEQ ID NO: 1821132 - RNA, 19 nt, Artificial Sequence
  Description of Artificial Sequence: Synthetic oligonucleotide
  Antisense strand to SEQ ID NO: 1821131
caucuuacaggacuaacaa

SEQ ID NO: 1821133 - RNA, 19 nt, Artificial Sequence
  Description of Artificial Sequence: Synthetic oligonucleotide
  Sense strand starting at position 1 of SEQ ID NO: 1563581
ugaugaagcugauugaauu

SEQ ID NO: 1821134 - RNA, 19 nt, Artificial Sequence
  Description of Artificial Sequence: Synthetic oligonucleotide
  Antisense strand to SEQ ID NO: 1821133
aauucaaucagcuucauca

SEQ ID NO: 1821135 - RNA, 19 nt, Artificial Sequence
  Description of Artificial Sequence: Synthetic oligonucleotide
  Sense strand starting at position 98 of SEQ ID NO: 1563581
augagaggaugucuuugua

SEQ ID NO: 1821136 - RNA, 19 nt, Artificial Sequence
  Description of Artificial Sequence: Synthetic oligonucleotide
  Antisense strand to SEQ ID NO: 1821135
uacaaagacauccucucau

SEQ ID NO: 1821137 - RNA, 19 nt, Artificial Sequence
  Description of Artificial Sequence: Synthetic oligonucleotide
  Sense strand starting at position 359 of SEQ ID NO: 1563581
gaagauagguuucuaucau

SEQ ID NO: 1821138 - RNA, 19 nt, Artificial Sequence
  Description of Artificial Sequence: Synthetic oligonucleotide
  Antisense strand to SEQ ID NO: 1821137
augauagaaaccuaucuuc

SEQ ID NO: 1821139 - RNA, 19 nt, Artificial Sequence
  Description of Artificial Sequence: Synthetic oligonucleotide
  Sense strand starting at position 721 of SEQ ID NO: 1563581
gagcauguacccuaacuga

SEQ ID NO: 1821140 - RNA, 19 nt, Artificial Sequence
  Description of Artificial Sequence: Synthetic oligonucleotide
  Antisense strand to SEQ ID NO: 1821139
ucaguuaggguacaugcuc

SEQ ID NO: 1821141 - RNA, 19 nt, Artificial Sequence
  Description of Artificial Sequence: Synthetic oligonucleotide
  Sense strand starting at position 937 of SEQ ID NO: 1563581
ggaugagccuucucuuaga

SEQ ID NO: 1821142 - RNA, 19 nt, Artificial Sequence
  Description of Artificial Sequence: Synthetic oligonucleotide
  Antisense strand to SEQ ID NO: 1821141
ucuaagagaaggcucaucc

SEQ ID NO: 1821143 - RNA, 19 nt, Artificial Sequence
  Description of Artificial Sequence: Synthetic oligonucleotide
  Sense strand starting at position 1005 of SEQ ID NO: 1563581
gaggaacccugagucauca

SEQ ID NO: 1821144 - RNA, 19 nt, Artificial Sequence
  Description of Artificial Sequence: Synthetic oligonucleotide
  Antisense strand to SEQ ID NO: 1821143
ugaugacucaggguuccuc

SEQ ID NO: 1821145 - RNA, 19 nt, Artificial Sequence
  Description of Artificial Sequence: Synthetic oligonucleotide
  Sense strand starting at position 1115 of SEQ ID NO: 1563581
ucugaacuugagggcaaau

SEQ ID NO: 1821146 - RNA, 19 nt, Artificial Sequence
  Description of Artificial Sequence: Synthetic oligonucleotide
  Antisense strand to SEQ ID NO: 1821145
auuugcccucaaguucaga

SEQ ID NO: 1821147 - RNA, 19 nt, Artificial Sequence
  Description of Artificial Sequence: Synthetic oligonucleotide
  Sense strand starting at position 1157 of SEQ ID NO: 1563581
auuaaugucaccgagcaga

SEQ ID NO: 1821148 - RNA, 19 nt, Artificial Sequence
  Description of Artificial Sequence: Synthetic oligonucleotide
  Antisense strand to SEQ ID NO: 1821147
ucugcucggugacauuaau

SEQ ID NO: 1821149 - RNA, 19 nt, Artificial Sequence
  Description of Artificial Sequence: Synthetic oligonucleotide
  Sense strand starting at position 1186 of SEQ ID NO: 1563581
ggccuucuaucaccagauu

SEQ ID NO: 1821150 - RNA, 19 nt, Artificial Sequence
  Description of Artificial Sequence: Synthetic oligonucleotide
  Antisense strand to SEQ ID NO: 1821149
aaucuggugauagaaggcc

SEQ ID NO: 1821151 - RNA, 19 nt, Artificial Sequence
  Description of Artificial Sequence: Synthetic oligonucleotide
  Sense strand starting at position 1337 of SEQ ID NO: 1563581
gcagcuuuccugcucccua

SEQ ID NO: 1821152 - RNA, 19 nt, Artificial Sequence
  Description of Artificial Sequence: Synthetic oligonucleotide
  Antisense strand to SEQ ID NO: 1821151
uagggagcaggaaagcugc

SEQ ID NO: 1821153 - RNA, 19 nt, Artificial Sequence
  Description of Artificial Sequence: Synthetic oligonucleotide
  Sense strand starting at position 1352 of SEQ ID NO: 1563581
ccuacuguucgugcaacga

SEQ ID NO: 1821154 - RNA, 19 nt, Artificial Sequence
  Description of Artificial Sequence: Synthetic oligonucleotide
  Antisense strand to SEQ ID NO: 1821153
ucguugcacgaacaguagg

SEQ ID NO: 1821155 - RNA, 19 nt, Artificial Sequence
  Description of Artificial Sequence: Synthetic oligonucleotide
  Sense strand starting at position 1367 of SEQ ID NO: 1563581
acgacaugagcagaucuuu

SEQ ID NO: 1821156 - RNA, 19 nt, Artificial Sequence
  Description of Artificial Sequence: Synthetic oligonucleotide
  Antisense strand to SEQ ID NO: 1821155
aaagaucugcucaugucgu

SEQ ID NO: 1821157 - RNA, 19 nt, Artificial Sequence
  Description of Artificial Sequence: Synthetic oligonucleotide
  Sense strand starting at position 1372 of SEQ ID NO: 1563581
augagcagaucuuuacuuu

SEQ ID NO: 1821158 - RNA, 19 nt, Artificial Sequence
  Description of Artificial Sequence: Synthetic oligonucleotide
  Antisense strand to SEQ ID NO: 1821157
aaaguaaagaucugcucau

SEQ ID NO: 1821159 - RNA, 19 nt, Artificial Sequence
  Description of Artificial Sequence: Synthetic oligonucleotide
  Sense strand starting at position 1373 of SEQ ID NO: 1563581
ugagcagaucuuuacuuua

SEQ ID NO: 1821160 - RNA, 19 nt, Artificial Sequence
  Description of Artificial Sequence: Synthetic oligonucleotide
  Antisense strand to SEQ ID NO: 1821159
uaaaguaaagaucugcuca

SEQ ID NO: 1821161 - RNA, 19 nt, Artificial Sequence
  Description of Artificial Sequence: Synthetic oligonucleotide
  Sense strand starting at position 1376 of SEQ ID NO: 1563581
gcagaucuuuacuuuaaag

SEQ ID NO: 1821162 - RNA, 19 nt, Artificial Sequence
  Description of Artificial Sequence: Synthetic oligonucleotide
  Antisense strand to SEQ ID NO: 1821161
cuuuaaaguaaagaucugc

SEQ ID NO: 1821163 - RNA, 19 nt, Artificial Sequence
  Description of Artificial Sequence: Synthetic oligonucleotide
  Sense strand starting at position 1449 of SEQ ID NO: 1563581
guugaaagcaaaugagauu

SEQ ID NO: 1821164 - RNA, 19 nt, Artificial Sequence
  Description of Artificial Sequence: Synthetic oligonucleotide
  Antisense strand to SEQ ID NO: 1821163
aaucucauuugcuuucaac

SEQ ID NO: 1821165 - RNA, 19 nt, Artificial Sequence
  Description of Artificial Sequence: Synthetic oligonucleotide
  Sense strand starting at position 1516 of SEQ ID NO: 1563581
gugacauugguugagucaa

SEQ ID NO: 1821166 - RNA, 19 nt, Artificial Sequence
  Description of Artificial Sequence: Synthetic oligonucleotide
  Antisense strand to SEQ ID NO: 1821165
uugacucaaccaaugucac

SEQ ID NO: 1821167 - RNA, 19 nt, Artificial Sequence
  Description of Artificial Sequence: Synthetic oligonucleotide
  Sense strand starting at position 1518 of SEQ ID NO: 1563581
gacauugguugagucaauu

SEQ ID NO: 1821168 - RNA, 19 nt, Artificial Sequence
  Description of Artificial Sequence: Synthetic oligonucleotide
  Antisense strand to SEQ ID NO: 1821167
aauugacucaaccaauguc

SEQ ID NO: 1821169 - RNA, 19 nt, Artificial Sequence
  Description of Artificial Sequence: Synthetic oligonucleotide
  Sense strand starting at position 1549 of SEQ ID NO: 1563581
cugaaaccuccugguacaa

SEQ ID NO: 1821170 - RNA, 19 nt, Artificial Sequence
  Description of Artificial Sequence: Synthetic oligonucleotide
  Antisense strand to SEQ ID NO: 1821169
uuguaccaggagguuucag

SEQ ID NO: 1821171 - RNA, 19 nt, Artificial Sequence
  Description of Artificial Sequence: Synthetic oligonucleotide
  Sense strand starting at position 1614 of SEQ ID NO: 1563581
guuggagaucaguguaaga

SEQ ID NO: 1821172 - RNA, 19 nt, Artificial Sequence
  Description of Artificial Sequence: Synthetic oligonucleotide
  Antisense strand to SEQ ID NO: 1821171
ucuuacacugaucuccaac

SEQ ID NO: 1821173 - RNA, 19 nt, Artificial Sequence
  Description of Artificial Sequence: Synthetic oligonucleotide
  Sense strand starting at position 1619 of SEQ ID NO: 1563581
agaucaguguaagaauuug

SEQ ID NO: 1821174 - RNA, 19 nt, Artificial Sequence
  Description of Artificial Sequence: Synthetic oligonucleotide
  Antisense strand to SEQ ID NO: 1821173
caaauucuuacacugaucu

SEQ ID NO: 1821175 - RNA, 19 nt, Artificial Sequence
  Description of Artificial Sequence: Synthetic oligonucleotide
  Sense strand starting at position 2501 of SEQ ID NO: 1563581
aagggagugugaucacugu

SEQ ID NO: 1821176 - RNA, 19 nt, Artificial Sequence
  Description of Artificial Sequence: Synthetic oligonucleotide
  Antisense strand to SEQ ID NO: 1821175
acagugaucacacucccuu

SEQ ID NO: 1821177 - RNA, 19 nt, Artificial Sequence
  Description of Artificial Sequence: Synthetic oligonucleotide
  Sense strand starting at position 2507 of SEQ ID NO: 1563581
gugugaucacuguauuauc

SEQ ID NO: 1821178 - RNA, 19 nt, Artificial Sequence
  Description of Artificial Sequence: Synthetic oligonucleotide
  Antisense strand to SEQ ID NO: 1821177
gauaauacagugaucacac

SEQ ID NO: 1821179 - RNA, 19 nt, Artificial Sequence
  Description of Artificial Sequence: Synthetic oligonucleotide
  Sense strand starting at position 2594 of SEQ ID NO: 1563581
gcgaaugaaaucugaggaa

SEQ ID NO: 1821180 - RNA, 19 nt, Artificial Sequence
  Description of Artificial Sequence: Synthetic oligonucleotide
  Antisense strand to SEQ ID NO: 1821179
uuccucagauuucauucgc

SEQ ID NO: 1821181 - RNA, 19 nt, Artificial Sequence
  Description of Artificial Sequence: Synthetic oligonucleotide
  Sense strand starting at position 2908 of SEQ ID NO: 1563581
ugacgacgauugucaggau

SEQ ID NO: 1821182 - RNA, 19 nt, Artificial Sequence
  Description of Artificial Sequence: Synthetic oligonucleotide
  Antisense strand to SEQ ID NO: 1821181
auccugacaaucgucguca

SEQ ID NO: 1821183 - RNA, 19 nt, Artificial Sequence
  Description of Artificial Sequence: Synthetic oligonucleotide
  Sense strand starting at position 2920 of SEQ ID NO: 1563581
ucaggaucguugucaggaa

SEQ ID NO: 1821184 - RNA, 19 nt, Artificial Sequence
  Description of Artificial Sequence: Synthetic oligonucleotide
  Antisense strand to SEQ ID NO: 1821183
uuccugacaacgauccuga

SEQ ID NO: 1821185 - RNA, 19 nt, Artificial Sequence
  Description of Artificial Sequence: Synthetic oligonucleotide
  Sense strand starting at position 2924 of SEQ ID NO: 1563581
gaucguugucaggaagaaa

SEQ ID NO: 1821186 - RNA, 19 nt, Artificial Sequence
  Description of Artificial Sequence: Synthetic oligonucleotide
  Antisense strand to SEQ ID NO: 1821185
uuucuuccugacaacgauc

SEQ ID NO: 1821187 - RNA, 19 nt, Artificial Sequence
  Description of Artificial Sequence: Synthetic oligonucleotide
  Sense strand starting at position 2947 of SEQ ID NO: 1563581
ugaagauaaugcuucccaa

SEQ ID NO: 1821188 - RNA, 19 nt, Artificial Sequence
  Description of Artificial Sequence: Synthetic oligonucleotide
  Antisense strand to SEQ ID NO: 1821187
uugggaagcauuaucuuca

SEQ ID NO: 1821189 - RNA, 19 nt, Artificial Sequence
  Description of Artificial Sequence: Synthetic oligonucleotide
  Sense strand starting at position 3128 of SEQ ID NO: 1563581
accuguacuuaaguagaga

SEQ ID NO: 1821190 - RNA, 19 nt, Artificial Sequence
  Description of Artificial Sequence: Synthetic oligonucleotide
  Antisense strand to SEQ ID NO: 1821189
ucucuacuuaaguacaggu

SEQ ID NO: 1821191 - RNA, 19 nt, Artificial Sequence
  Description of Artificial Sequence: Synthetic oligonucleotide
  Sense strand starting at position 3268 of SEQ ID NO: 1563581
aguauuuagcaugguaugu

SEQ ID NO: 1821192 - RNA, 19 nt, Artificial Sequence
  Description of Artificial Sequence: Synthetic oligonucleotide
  Antisense strand to SEQ ID NO: 1821191
acauaccaugcuaaauacu

SEQ ID NO: 1821193 - RNA, 19 nt, Artificial Sequence
  Description of Artificial Sequence: Synthetic oligonucleotide
  Sense strand starting at position 3341 of SEQ ID NO: 1563581
agaacucacugcuucuaga

SEQ ID NO: 1821194 - RNA, 19 nt, Artificial Sequence
  Description of Artificial Sequence: Synthetic oligonucleotide
  Antisense strand to SEQ ID NO: 1821193
ucuagaagcagugaguucu

SEQ ID NO: 1821195 - RNA, 19 nt, Artificial Sequence
  Description of Artificial Sequence: Synthetic oligonucleotide
  Sense strand starting at position 3569 of SEQ ID NO: 1563581
caagguacccauugaaugu

SEQ ID NO: 1821196 - RNA, 19 nt, Artificial Sequence
  Description of Artificial Sequence: Synthetic oligonucleotide
  Antisense strand to SEQ ID NO: 1821195
acauucaauggguaccuug

SEQ ID NO: 1821197 - RNA, 19 nt, Artificial Sequence
  Description of Artificial Sequence: Synthetic oligonucleotide
  Sense strand starting at position 3573 of SEQ ID NO: 1563581
guacccauugaauguuaaa

SEQ ID NO: 1821198 - RNA, 19 nt, Artificial Sequence
  Description of Artificial Sequence: Synthetic oligonucleotide
  Antisense strand to SEQ ID NO: 1821197
uuuaacauucaauggguac

SEQ ID NO: 1821199 - RNA, 19 nt, Artificial Sequence
  Description of Artificial Sequence: Synthetic oligonucleotide
  Sense strand starting at position 3605 of SEQ ID NO: 1563581
cuauuauuacagcaggcaa

SEQ ID NO: 1821200 - RNA, 19 nt, Artificial Sequence
  Description of Artificial Sequence: Synthetic oligonucleotide
  Antisense strand to SEQ ID NO: 1821199
uugccugcuguaauaauag

SEQ ID NO: 1821201 - RNA, 19 nt, Artificial Sequence
  Description of Artificial Sequence: Synthetic oligonucleotide
  Sense strand starting at position 3782 of SEQ ID NO: 1563581
aauugauguuuccuagaga

SEQ ID NO: 1821202 - RNA, 19 nt, Artificial Sequence
  Description of Artificial Sequence: Synthetic oligonucleotide
  Antisense strand to SEQ ID NO: 1821201
ucucuaggaaacaucaauu

SEQ ID NO: 1821203 - RNA, 19 nt, Artificial Sequence
  Description of Artificial Sequence: Synthetic oligonucleotide
  Sense strand starting at position 3787 of SEQ ID NO: 1563581
auguuuccuagagaugggu

SEQ ID NO: 1821204 - RNA, 19 nt, Artificial Sequence
  Description of Artificial Sequence: Synthetic oligonucleotide
  Antisense strand to SEQ ID NO: 1821203
acccaucucuaggaaacau

SEQ ID NO: 1821205 - RNA, 19 nt, Artificial Sequence
  Description of Artificial Sequence: Synthetic oligonucleotide
  Sense strand starting at position 3791 of SEQ ID NO: 1563581
uuccuagagauggguacaa

SEQ ID NO: 1821206 - RNA, 19 nt, Artificial Sequence
  Description of Artificial Sequence: Synthetic oligonucleotide
  Antisense strand to SEQ ID NO: 1821205
uuguacccaucucuaggaa

SEQ ID NO: 1821207 - RNA, 19 nt, Artificial Sequence
  Description of Artificial Sequence: Synthetic oligonucleotide
  Sense strand starting at position 3815 of SEQ ID NO: 1563581
accgauucuacuugacgga

SEQ ID NO: 1821208 - RNA, 19 nt, Artificial Sequence
  Description of Artificial Sequence: Synthetic oligonucleotide
  Antisense strand to SEQ ID NO: 1821207
uccgucaaguagaaucggu

SEQ ID NO: 1821209 - RNA, 19 nt, Artificial Sequence
  Description of Artificial Sequence: Synthetic oligonucleotide
  Sense strand starting at position 3816 of SEQ ID NO: 1563581
ccgauucuacuugacggaa

SEQ ID NO: 1821210 - RNA, 19 nt, Artificial Sequence
  Description of Artificial Sequence: Synthetic oligonucleotide
  Antisense strand to SEQ ID NO: 1821209
uuccgucaaguagaaucgg

SEQ ID NO: 1821211 - RNA, 19 nt, Artificial Sequence
  Description of Artificial Sequence: Synthetic oligonucleotide
  Sense strand starting at position 3973 of SEQ ID NO: 1563581
gggaaagugucuucuagua

SEQ ID NO: 1821212 - RNA, 19 nt, Artificial Sequence
  Description of Artificial Sequence: Synthetic oligonucleotide
  Antisense strand to SEQ ID NO: 1821211
uacuagaagacacuuuccc

SEQ ID NO: 1821213 - RNA, 19 nt, Artificial Sequence
  Description of Artificial Sequence: Synthetic oligonucleotide
  Sense strand starting at position 237 of SEQ ID NO: 1563582
acaaucuggccuugagauc

SEQ ID NO: 1821214 - RNA, 19 nt, Artificial Sequence
  Description of Artificial Sequence: Synthetic oligonucleotide
  Antisense strand to SEQ ID NO: 1821213
gaucucaaggccagauugu

SEQ ID NO: 1821215 - RNA, 19 nt, Artificial Sequence
  Description of Artificial Sequence: Synthetic oligonucleotide
  Sense strand starting at position 283 of SEQ ID NO: 1563582
ggagccaaacacugugauu

SEQ ID NO: 1821216 - RNA, 19 nt, Artificial Sequence
  Description of Artificial Sequence: Synthetic oligonucleotide
  Antisense strand to SEQ ID NO: 1821215
aaucacaguguuuggcucc

SEQ ID NO: 1821217 - RNA, 19 nt, Artificial Sequence
  Description of Artificial Sequence: Synthetic oligonucleotide
  Sense strand starting at position 306 of SEQ ID NO: 1563582
ccauguaaauuuggaauuu

SEQ ID NO: 1821218 - RNA, 19 nt, Artificial Sequence
  Description of Artificial Sequence: Synthetic oligonucleotide
  Antisense strand to SEQ ID NO: 1821217
aaauuccaaauuuacaugg

SEQ ID NO: 1821219 - RNA, 19 nt, Artificial Sequence
  Description of Artificial Sequence: Synthetic oligonucleotide
  Sense strand starting at position 315 of SEQ ID NO: 1563582
uuuggaauuugagaaguua

SEQ ID NO: 1821220 - RNA, 19 nt, Artificial Sequence
  Description of Artificial Sequence: Synthetic oligonucleotide
  Antisense strand to SEQ ID NO: 1821219
uaacuucucaaauuccaaa

SEQ ID NO: 1821221 - RNA, 19 nt, Artificial Sequence
  Description of Artificial Sequence: Synthetic oligonucleotide
  Sense strand starting at position 1085 of SEQ ID NO: 1563582
cccacaaaguuaucaguca

SEQ ID NO: 1821222 - RNA, 19 nt, Artificial Sequence
  Description of Artificial Sequence: Synthetic oligonucleotide
  Antisense strand to SEQ ID NO: 1821221
ugacugauaacuuuguggg

SEQ ID NO: 1821223 - RNA, 19 nt, Artificial Sequence
  Description of Artificial Sequence: Synthetic oligonucleotide
  Sense strand starting at position 1247 of SEQ ID NO: 1563582
ucaaauacucauggccaga

SEQ ID NO: 1821224 - RNA, 19 nt, Artificial Sequence
  Description of Artificial Sequence: Synthetic oligonucleotide
  Antisense strand to SEQ ID NO: 1821223
ucuggccaugaguauuuga

SEQ ID NO: 1821225 - RNA, 19 nt, Artificial Sequence
  Description of Artificial Sequence: Synthetic oligonucleotide
  Sense strand starting at position 1380 of SEQ ID NO: 1563582
aagaaaguccucuguauga

SEQ ID NO: 1821226 - RNA, 19 nt, Artificial Sequence
  Description of Artificial Sequence: Synthetic oligonucleotide
  Antisense strand to SEQ ID NO: 1821225
ucauacagaggacuuucuu

SEQ ID NO: 1821227 - RNA, 19 nt, Artificial Sequence
  Description of Artificial Sequence: Synthetic oligonucleotide
  Sense strand starting at position 1382 of SEQ ID NO: 1563582
gaaaguccucuguaugagc

SEQ ID NO: 1821228 - RNA, 19 nt, Artificial Sequence
  Description of Artificial Sequence: Synthetic oligonucleotide
  Antisense strand to SEQ ID NO: 1821227
gcucauacagaggacuuuc

SEQ ID NO: 1821229 - RNA, 19 nt, Artificial Sequence
  Description of Artificial Sequence: Synthetic oligonucleotide
  Sense strand starting at position 1939 of SEQ ID NO: 1563582
ccaacucuggauugaaacu

SEQ ID NO: 1821230 - RNA, 19 nt, Artificial Sequence
  Description of Artificial Sequence: Synthetic oligonucleotide
  Antisense strand to SEQ ID NO: 1821229
aguuucaauccagaguugg

SEQ ID NO: 1821231 - RNA, 19 nt, Artificial Sequence
  Description of Artificial Sequence: Synthetic oligonucleotide
  Sense strand starting at position 1986 of SEQ ID NO: 1563582
agaagcaugugucuuaaau

SEQ ID NO: 1821232 - RNA, 19 nt, Artificial Sequence
  Description of Artificial Sequence: Synthetic oligonucleotide
  Antisense strand to SEQ ID NO: 1821231
auuuaagacacaugcuucu

SEQ ID NO: 1821233 - RNA, 19 nt, Artificial Sequence
  Description of Artificial Sequence: Synthetic oligonucleotide
  Sense strand starting at position 2031 of SEQ ID NO: 1563582
agagaagucuuggcuguaa

SEQ ID NO: 1821234 - RNA, 19 nt, Artificial Sequence
  Description of Artificial Sequence: Synthetic oligonucleotide
  Antisense strand to SEQ ID NO: 1821233
uuacagccaagacuucucu

SEQ ID NO: 1821235 - RNA, 19 nt, Artificial Sequence
  Description of Artificial Sequence: Synthetic oligonucleotide
  Sense strand starting at position 2042 of SEQ ID NO: 1563582
ggcuguaauccuguugcgu

SEQ ID NO: 1821236 - RNA, 19 nt, Artificial Sequence
  Description of Artificial Sequence: Synthetic oligonucleotide
  Antisense strand to SEQ ID NO: 1821235
acgcaacaggauuacagcc

SEQ ID NO: 1821237 - RNA, 19 nt, Artificial Sequence
  Description of Artificial Sequence: Synthetic oligonucleotide
  Sense strand starting at position 2043 of SEQ ID NO: 1563582
gcuguaauccuguugcguc

SEQ ID NO: 1821238 - RNA, 19 nt, Artificial Sequence
  Description of Artificial Sequence: Synthetic oligonucleotide
  Antisense strand to SEQ ID NO: 1821237
gacgcaacaggauuacagc

SEQ ID NO: 1821239 - RNA, 19 nt, Artificial Sequence
  Description of Artificial Sequence: Synthetic oligonucleotide
  Sense strand starting at position 2125 of SEQ ID NO: 1563582
gcagauaaccuguaacaug

SEQ ID NO: 1821240 - RNA, 19 nt, Artificial Sequence
  Description of Artificial Sequence: Synthetic oligonucleotide
  Antisense strand to SEQ ID NO: 1821239
cauguuacagguuaucugc

SEQ ID NO: 1821241 - RNA, 19 nt, Artificial Sequence
  Description of Artificial Sequence: Synthetic oligonucleotide
  Sense strand starting at position 2199 of SEQ ID NO: 1563582
accucagaugcucaugcau

SEQ ID NO: 1821242 - RNA, 19 nt, Artificial Sequence
  Description of Artificial Sequence: Synthetic oligonucleotide
  Antisense strand to SEQ ID NO: 1821241
augcaugagcaucugaggu

SEQ ID NO: 1821243 - RNA, 19 nt, Artificial Sequence
  Description of Artificial Sequence: Synthetic oligonucleotide
  Sense strand starting at position 2407 of SEQ ID NO: 1563582
gguuuauuugcaugugcca

SEQ ID NO: 1821244 - RNA, 19 nt, Artificial Sequence
  Description of Artificial Sequence: Synthetic oligonucleotide
  Antisense strand to SEQ ID NO: 1821243
uggcacaugcaaauaaacc

SEQ ID NO: 1821245 - RNA, 19 nt, Artificial Sequence
  Description of Artificial Sequence: Synthetic oligonucleotide
  Sense strand starting at position 2473 of SEQ ID NO: 1563582
uguggaauucuuuagaagc

SEQ ID NO: 1821246 - RNA, 19 nt, Artificial Sequence
  Description of Artificial Sequence: Synthetic oligonucleotide
  Antisense strand to SEQ ID NO: 1821245
gcuucuaaagaauuccaca

SEQ ID NO: 1821247 - RNA, 19 nt, Artificial Sequence
  Description of Artificial Sequence: Synthetic oligonucleotide
  Sense strand starting at position 2724 of SEQ ID NO: 1563582
cagaaaguucuggguggca

SEQ ID NO: 1821248 - RNA, 19 nt, Artificial Sequence
  Description of Artificial Sequence: Synthetic oligonucleotide
  Antisense strand to SEQ ID NO: 1821247
ugccacccagaacuuucug

SEQ ID NO: 1821249 - RNA, 19 nt, Artificial Sequence
  Description of Artificial Sequence: Synthetic oligonucleotide
  Sense strand starting at position 2726 of SEQ ID NO: 1563582
gaaaguucuggguggcaau

SEQ ID NO: 1821250 - RNA, 19 nt, Artificial Sequence
  Description of Artificial Sequence: Synthetic oligonucleotide
  Antisense strand to SEQ ID NO: 1821249
auugccacccagaacuuuc

SEQ ID NO: 1821251 - RNA, 19 nt, Artificial Sequence
  Description of Artificial Sequence: Synthetic oligonucleotide
  Sense strand starting at position 2727 of SEQ ID NO: 1563582
aaaguucuggguggcaaua

SEQ ID NO: 1821252 - RNA, 19 nt, Artificial Sequence
  Description of Artificial Sequence: Synthetic oligonucleotide
  Antisense strand to SEQ ID NO: 1821251
uauugccacccagaacuuu

SEQ ID NO: 1821253 - RNA, 19 nt, Artificial Sequence
  Description of Artificial Sequence: Synthetic oligonucleotide
  Sense strand starting at position 2807 of SEQ ID NO: 1563582
agcacauccgaagaguaaa

SEQ ID NO: 1821254 - RNA, 19 nt, Artificial Sequence
  Description of Artificial Sequence: Synthetic oligonucleotide
  Antisense strand to SEQ ID NO: 1821253
uuuacucuucggaugugcu

SEQ ID NO: 1821255 - RNA, 19 nt, Artificial Sequence
  Description of Artificial Sequence: Synthetic oligonucleotide
  Sense strand starting at position 2854 of SEQ ID NO: 1563582
aggacuguaagaugaguuu

SEQ ID NO: 1821256 - RNA, 19 nt, Artificial Sequence
  Description of Artificial Sequence: Synthetic oligonucleotide
  Antisense strand to SEQ ID NO: 1821255
aaacucaucuuacaguccu

SEQ ID NO: 1821257 - RNA, 19 nt, Artificial Sequence
  Description of Artificial Sequence: Synthetic oligonucleotide
  Sense strand starting at position 2857 of SEQ ID NO: 1563582
acuguaagaugaguuucuu

SEQ ID NO: 1821258 - RNA, 19 nt, Artificial Sequence
  Description of Artificial Sequence: Synthetic oligonucleotide
  Antisense strand to SEQ ID NO: 1821257
aagaaacucaucuuacagu

SEQ ID NO: 1821259 - RNA, 19 nt, Artificial Sequence
  Description of Artificial Sequence: Synthetic oligonucleotide
  Sense strand starting at position 2861 of SEQ ID NO: 1563582
uaagaugaguuucuugacu

SEQ ID NO: 1821260 - RNA, 19 nt, Artificial Sequence
  Description of Artificial Sequence: Synthetic oligonucleotide
  Antisense strand to SEQ ID NO: 1821259
agucaagaaacucaucuua

SEQ ID NO: 1821261 - RNA, 19 nt, Artificial Sequence
  Description of Artificial Sequence: Synthetic oligonucleotide
  Sense strand starting at position 2866 of SEQ ID NO: 1563582
ugaguuucuugacuaggau

SEQ ID NO: 1821262 - RNA, 19 nt, Artificial Sequence
  Description of Artificial Sequence: Synthetic oligonucleotide
  Antisense strand to SEQ ID NO: 1821261
auccuagucaagaaacuca

SEQ ID NO: 1821263 - RNA, 19 nt, Artificial Sequence
  Description of Artificial Sequence: Synthetic oligonucleotide
  Sense strand starting at position 2873 of SEQ ID NO: 1563582
cuugacuaggauuguauau

SEQ ID NO: 1821264 - RNA, 19 nt, Artificial Sequence
  Description of Artificial Sequence: Synthetic oligonucleotide
  Antisense strand to SEQ ID NO: 1821263
auauacaauccuagucaag

SEQ ID NO: 1821265 - RNA, 19 nt, Artificial Sequence
  Description of Artificial Sequence: Synthetic oligonucleotide
  Sense strand starting at position 2919 of SEQ ID NO: 1563582
agauaaaugcaauggcauc

SEQ ID NO: 1821266 - RNA, 19 nt, Artificial Sequence
  Description of Artificial Sequence: Synthetic oligonucleotide
  Antisense strand to SEQ ID NO: 1821265
gaugccauugcauuuaucu

SEQ ID NO: 1821267 - RNA, 19 nt, Artificial Sequence
  Description of Artificial Sequence: Synthetic oligonucleotide
  Sense strand starting at position 2951 of SEQ ID NO: 1563582
auagguuucucaccagcaa

SEQ ID NO: 1821268 - RNA, 19 nt, Artificial Sequence
  Description of Artificial Sequence: Synthetic oligonucleotide
  Antisense strand to SEQ ID NO: 1821267
uugcuggugagaaaccuau

SEQ ID NO: 1821269 - RNA, 19 nt, Artificial Sequence
  Description of Artificial Sequence: Synthetic oligonucleotide
  Sense strand starting at position 3038 of SEQ ID NO: 1563582
auaacauuagcugauguca

SEQ ID NO: 1821270 - RNA, 19 nt, Artificial Sequence
  Description of Artificial Sequence: Synthetic oligonucleotide
  Antisense strand to SEQ ID NO: 1821269
ugacaucagcuaauguuau

SEQ ID NO: 1821271 - RNA, 19 nt, Artificial Sequence
  Description of Artificial Sequence: Synthetic oligonucleotide
  Sense strand starting at position 3108 of SEQ ID NO: 1563582
gugucuaagcagcauauaa

SEQ ID NO: 1821272 - RNA, 19 nt, Artificial Sequence
  Description of Artificial Sequence: Synthetic oligonucleotide
  Antisense strand to SEQ ID NO: 1821271
uuauaugcugcuuagacac

SEQ ID NO: 1821273 - RNA, 19 nt, Artificial Sequence
  Description of Artificial Sequence: Synthetic oligonucleotide
  Sense strand starting at position 3131 of SEQ ID NO: 1563582
guauacuuauuugaggauu

SEQ ID NO: 1821274 - RNA, 19 nt, Artificial Sequence
  Description of Artificial Sequence: Synthetic oligonucleotide
  Antisense strand to SEQ ID NO: 1821273
aauccucaaauaaguauac

SEQ ID NO: 1821275 - RNA, 19 nt, Artificial Sequence
  Description of Artificial Sequence: Synthetic oligonucleotide
  Sense strand starting at position 3139 of SEQ ID NO: 1563582
auuugaggauucuaaguca

SEQ ID NO: 1821276 - RNA, 19 nt, Artificial Sequence
  Description of Artificial Sequence: Synthetic oligonucleotide
  Antisense strand to SEQ ID NO: 1821275
ugacuuagaauccucaaau

SEQ ID NO: 1821277 - RNA, 19 nt, Artificial Sequence
  Description of Artificial Sequence: Synthetic oligonucleotide
  Sense strand starting at position 3646 of SEQ ID NO: 1563582
cauugacagugucuuuaga

SEQ ID NO: 1821278 - RNA, 19 nt, Artificial Sequence
  Description of Artificial Sequence: Synthetic oligonucleotide
  Antisense strand to SEQ ID NO: 1821277
ucuaaagacacugucaaug

SEQ ID NO: 1821279 - RNA, 19 nt, Artificial Sequence
  Description of Artificial Sequence: Synthetic oligonucleotide
  Sense strand starting at position 3710 of SEQ ID NO: 1563582
gcagaaguuccugacauuc

SEQ ID NO: 1821280 - RNA, 19 nt, Artificial Sequence
  Description of Artificial Sequence: Synthetic oligonucleotide
  Antisense strand to SEQ ID NO: 1821279
gaaugucaggaacuucugc

SEQ ID NO: 1821281 - RNA, 19 nt, Artificial Sequence
  Description of Artificial Sequence: Synthetic oligonucleotide
  Sense strand starting at position 3754 of SEQ ID NO: 1563582
gggcuuucucugggagauu

SEQ ID NO: 1821282 - RNA, 19 nt, Artificial Sequence
  Description of Artificial Sequence: Synthetic oligonucleotide
  Antisense strand to SEQ ID NO: 1821281
aaucucccagagaaagccc

SEQ ID NO: 1821283 - RNA, 19 nt, Artificial Sequence
  Description of Artificial Sequence: Synthetic oligonucleotide
  Sense strand starting at position 3786 of SEQ ID NO: 1563582
aacuguauugcuuagagaa

SEQ ID NO: 1821284 - RNA, 19 nt, Artificial Sequence
  Description of Artificial Sequence: Synthetic oligonucleotide
  Antisense strand to SEQ ID NO: 1821283
uucucuaagcaauacaguu

SEQ ID NO: 1821285 - RNA, 19 nt, Artificial Sequence
  Description of Artificial Sequence: Synthetic oligonucleotide
  Sense strand starting at position 3852 of SEQ ID NO: 1563582
uuuggugaucacuauaauu

SEQ ID NO: 1821286 - RNA, 19 nt, Artificial Sequence
  Description of Artificial Sequence: Synthetic oligonucleotide
  Antisense strand to SEQ ID NO: 1821285
aauuauagugaucaccaaa

SEQ ID NO: 1821287 - RNA, 19 nt, Artificial Sequence
  Description of Artificial Sequence: Synthetic oligonucleotide
  Sense strand starting at position 3891 of SEQ ID NO: 1563582
acaggauaauaugucuuga

SEQ ID NO: 1821288 - RNA, 19 nt, Artificial Sequence
  Description of Artificial Sequence: Synthetic oligonucleotide
  Antisense strand to SEQ ID NO: 1821287
ucaagacauauuauccugu

SEQ ID NO: 1821289 - RNA, 19 nt, Artificial Sequence
  Description of Artificial Sequence: Synthetic oligonucleotide
  Sense strand starting at position 3893 of SEQ ID NO: 1563582
aggauaauaugucuugaug

SEQ ID NO: 1821290 - RNA, 19 nt, Artificial Sequence
  Description of Artificial Sequence: Synthetic oligonucleotide
  Antisense strand to SEQ ID NO: 1821289
caucaagacauauuauccu

SEQ ID NO: 1821291 - RNA, 19 nt, Artificial Sequence
  Description of Artificial Sequence: Synthetic oligonucleotide
  Sense strand starting at position 3905 of SEQ ID NO: 1563582
cuugaugaugcugaaaucu

SEQ ID NO: 1821292 - RNA, 19 nt, Artificial Sequence
  Description of Artificial Sequence: Synthetic oligonucleotide
  Antisense strand to SEQ ID NO: 1821291
agauuucagcaucaucaag

SEQ ID NO: 1821293 - RNA, 19 nt, Artificial Sequence
  Description of Artificial Sequence: Synthetic oligonucleotide
  Sense strand starting at position 149 of SEQ ID NO: 1563583
guucucucugaccauauga

SEQ ID NO: 1821294 - RNA, 19 nt, Artificial Sequence
  Description of Artificial Sequence: Synthetic oligonucleotide
  Antisense strand to SEQ ID NO: 1821293
ucauauggucagagagaac

SEQ ID NO: 1821295 - RNA, 19 nt, Artificial Sequence
  Description of Artificial Sequence: Synthetic oligonucleotide
  Sense strand starting at position 184 of SEQ ID NO: 1563583
ucuugugcuaaugggaaca

SEQ ID NO: 1821296 - RNA, 19 nt, Artificial Sequence
  Description of Artificial Sequence: Synthetic oligonucleotide
  Antisense strand to SEQ ID NO: 1821295
uguucccauuagcacaaga

SEQ ID NO: 1821297 - RNA, 19 nt, Artificial Sequence
  Description of Artificial Sequence: Synthetic oligonucleotide
  Sense strand starting at position 251 of SEQ ID NO: 1563583
aggcauauagaguauugua

SEQ ID NO: 1821298 - RNA, 19 nt, Artificial Sequence
  Description of Artificial Sequence: Synthetic oligonucleotide
  Antisense strand to SEQ ID NO: 1821297
uacaauacucuauaugccu

SEQ ID NO: 1821299 - RNA, 19 nt, Artificial Sequence
  Description of Artificial Sequence: Synthetic oligonucleotide
  Sense strand starting at position 300 of SEQ ID NO: 1563583
acaucaaggugucugagaa

SEQ ID NO: 1821300 - RNA, 19 nt, Artificial Sequence
  Description of Artificial Sequence: Synthetic oligonucleotide
  Antisense strand to SEQ ID NO: 1821299
uucucagacaccuugaugu

SEQ ID NO: 1821301 - RNA, 19 nt, Artificial Sequence
  Description of Artificial Sequence: Synthetic oligonucleotide
  Sense strand starting at position 301 of SEQ ID NO: 1563583
caucaaggugucugagaau

SEQ ID NO: 1821302 - RNA, 19 nt, Artificial Sequence
  Description of Artificial Sequence: Synthetic oligonucleotide
  Antisense strand to SEQ ID NO: 1821301
auucucagacaccuugaug

SEQ ID NO: 1821303 - RNA, 19 nt, Artificial Sequence
  Description of Artificial Sequence: Synthetic oligonucleotide
  Sense strand starting at position 425 of SEQ ID NO: 1563583
aguaacaaggccuauacua

SEQ ID NO: 1821304 - RNA, 19 nt, Artificial Sequence
  Description of Artificial Sequence: Synthetic oligonucleotide
  Antisense strand to SEQ ID NO: 1821303
uaguauaggccuuguuacu

SEQ ID NO: 1821305 - RNA, 19 nt, Artificial Sequence
  Description of Artificial Sequence: Synthetic oligonucleotide
  Sense strand starting at position 443 of SEQ ID NO: 1563583
augugagucccauacucag

SEQ ID NO: 1821306 - RNA, 19 nt, Artificial Sequence
  Description of Artificial Sequence: Synthetic oligonucleotide
  Antisense strand to SEQ ID NO: 1821305
cugaguaugggacucacau

SEQ ID NO: 1821307 - RNA, 19 nt, Artificial Sequence
  Description of Artificial Sequence: Synthetic oligonucleotide
  Sense strand starting at position 479 of SEQ ID NO: 1563583
ucauaaugguucccaagga

SEQ ID NO: 1821308 - RNA, 19 nt, Artificial Sequence
  Description of Artificial Sequence: Synthetic oligonucleotide
  Antisense strand to SEQ ID NO: 1821307
uccuugggaaccauuauga

SEQ ID NO: 1821309 - RNA, 19 nt, Artificial Sequence
  Description of Artificial Sequence: Synthetic oligonucleotide
  Sense strand starting at position 576 of SEQ ID NO: 1563583
uuggaauucuaagucugga

SEQ ID NO: 1821310 - RNA, 19 nt, Artificial Sequence
  Description of Artificial Sequence: Synthetic oligonucleotide
  Antisense strand to SEQ ID NO: 1821309
uccagacuuagaauuccaa

SEQ ID NO: 1821311 - RNA, 19 nt, Artificial Sequence
  Description of Artificial Sequence: Synthetic oligonucleotide
  Sense strand starting at position 579 of SEQ ID NO: 1563583
gaauucuaagucuggagca

SEQ ID NO: 1821312 - RNA, 19 nt, Artificial Sequence
  Description of Artificial Sequence: Synthetic oligonucleotide
  Antisense strand to SEQ ID NO: 1821311
ugcuccagacuuagaauuc

SEQ ID NO: 1821313 - RNA, 19 nt, Artificial Sequence
  Description of Artificial Sequence: Synthetic oligonucleotide
  Sense strand starting at position 581 of SEQ ID NO: 1563583
auucuaagucuggagcaga

SEQ ID NO: 1821314 - RNA, 19 nt, Artificial Sequence
  Description of Artificial Sequence: Synthetic oligonucleotide
  Antisense strand to SEQ ID NO: 1821313
ucugcuccagacuuagaau

SEQ ID NO: 1821315 - RNA, 19 nt, Artificial Sequence
  Description of Artificial Sequence: Synthetic oligonucleotide
  Sense strand starting at position 754 of SEQ ID NO: 1563583
gucgaagugcugguugcaa

SEQ ID NO: 1821316 - RNA, 19 nt, Artificial Sequence
  Description of Artificial Sequence: Synthetic oligonucleotide
  Antisense strand to SEQ ID NO: 1821315
uugcaaccagcacuucgac

SEQ ID NO: 1821317 - RNA, 19 nt, Artificial Sequence
  Description of Artificial Sequence: Synthetic oligonucleotide
  Sense strand starting at position 854 of SEQ ID NO: 1563583
uugugagaggcccaaguuu

SEQ ID NO: 1821318 - RNA, 19 nt, Artificial Sequence
  Description of Artificial Sequence: Synthetic oligonucleotide
  Antisense strand to SEQ ID NO: 1821317
aaacuugggccucucacaa

SEQ ID NO: 1821319 - RNA, 19 nt, Artificial Sequence
  Description of Artificial Sequence: Synthetic oligonucleotide
  Sense strand starting at position 1014 of SEQ ID NO: 1563583
gagguugaccauugaaucu

SEQ ID NO: 1821320 - RNA, 19 nt, Artificial Sequence
  Description of Artificial Sequence: Synthetic oligonucleotide
  Antisense strand to SEQ ID NO: 1821319
agauucaauggucaaccuc

SEQ ID NO: 1821321 - RNA, 19 nt, Artificial Sequence
  Description of Artificial Sequence: Synthetic oligonucleotide
  Sense strand starting at position 1064 of SEQ ID NO: 1563583
gggaacucucuuugugaag

SEQ ID NO: 1821322 - RNA, 19 nt, Artificial Sequence
  Description of Artificial Sequence: Synthetic oligonucleotide
  Antisense strand to SEQ ID NO: 1821321
cuucacaaagagaguuccc

SEQ ID NO: 1821323 - RNA, 19 nt, Artificial Sequence
  Description of Artificial Sequence: Synthetic oligonucleotide
  Sense strand starting at position 1076 of SEQ ID NO: 1563583
ugugaagcaggcuacaauu

SEQ ID NO: 1821324 - RNA, 19 nt, Artificial Sequence
  Description of Artificial Sequence: Synthetic oligonucleotide
  Antisense strand to SEQ ID NO: 1821323
aauuguagccugcuucaca

SEQ ID NO: 1821325 - RNA, 19 nt, Artificial Sequence
  Description of Artificial Sequence: Synthetic oligonucleotide
  Sense strand starting at position 1270 of SEQ ID NO: 1563583
aauaguuagugccuauaag

SEQ ID NO: 1821326 - RNA, 19 nt, Artificial Sequence
  Description of Artificial Sequence: Synthetic oligonucleotide
  Antisense strand to SEQ ID NO: 1821325
cuuauaggcacuaacuauu

SEQ ID NO: 1821327 - RNA, 19 nt, Artificial Sequence
  Description of Artificial Sequence: Synthetic oligonucleotide
  Sense strand starting at position 1317 of SEQ ID NO: 1563583
ucgcaaugauuauucugaa

SEQ ID NO: 1821328 - RNA, 19 nt, Artificial Sequence
  Description of Artificial Sequence: Synthetic oligonucleotide
  Antisense strand to SEQ ID NO: 1821327
uucagaauaaucauugcga

SEQ ID NO: 1821329 - RNA, 19 nt, Artificial Sequence
  Description of Artificial Sequence: Synthetic oligonucleotide
  Sense strand starting at position 1318 of SEQ ID NO: 1563583
cgcaaugauuauucugaag

SEQ ID NO: 1821330 - RNA, 19 nt, Artificial Sequence
  Description of Artificial Sequence: Synthetic oligonucleotide
  Antisense strand to SEQ ID NO: 1821329
cuucagaauaaucauugcg

SEQ ID NO: 1821331 - RNA, 19 nt, Artificial Sequence
  Description of Artificial Sequence: Synthetic oligonucleotide
  Sense strand starting at position 1390 of SEQ ID NO: 1563583
auugaaagcuggucaaaca

SEQ ID NO: 1821332 - RNA, 19 nt, Artificial Sequence
  Description of Artificial Sequence: Synthetic oligonucleotide
  Antisense strand to SEQ ID NO: 1821331
uguuugaccagcuuucaau

SEQ ID NO: 1821333 - RNA, 19 nt, Artificial Sequence
  Description of Artificial Sequence: Synthetic oligonucleotide
  Sense strand starting at position 2106 of SEQ ID NO: 1563583
gcuaaacugugguugagga

SEQ ID NO: 1821334 - RNA, 19 nt, Artificial Sequence
  Description of Artificial Sequence: Synthetic oligonucleotide
  Antisense strand to SEQ ID NO: 1821333
uccucaaccacaguuuagc

SEQ ID NO: 1821335 - RNA, 19 nt, Artificial Sequence
  Description of Artificial Sequence: Synthetic oligonucleotide
  Sense strand starting at position 2366 of SEQ ID NO: 1563583
agaagaaacucgguaguca

SEQ ID NO: 1821336 - RNA, 19 nt, Artificial Sequence
  Description of Artificial Sequence: Synthetic oligonucleotide
  Antisense strand to SEQ ID NO: 1821335
ugacuaccgaguuucuucu

SEQ ID NO: 1821337 - RNA, 19 nt, Artificial Sequence
  Description of Artificial Sequence: Synthetic oligonucleotide
  Sense strand starting at position 2367 of SEQ ID NO: 1563583
gaagaaacucgguagucag

SEQ ID NO: 1821338 - RNA, 19 nt, Artificial Sequence
  Description of Artificial Sequence: Synthetic oligonucleotide
  Antisense strand to SEQ ID NO: 1821337
cugacuaccgaguuucuuc

SEQ ID NO: 1821339 - RNA, 19 nt, Artificial Sequence
  Description of Artificial Sequence: Synthetic oligonucleotide
  Sense strand starting at position 2386 of SEQ ID NO: 1563583
ucaugacaagcuuauaagu

SEQ ID NO: 1821340 - RNA, 19 nt, Artificial Sequence
  Description of Artificial Sequence: Synthetic oligonucleotide
  Antisense strand to SEQ ID NO: 1821339
acuuauaagcuugucauga

SEQ ID NO: 1821341 - RNA, 19 nt, Artificial Sequence
  Description of Artificial Sequence: Synthetic oligonucleotide
  Sense strand starting at position 2391 of SEQ ID NO: 1563583
acaagcuuauaaguaugaa

SEQ ID NO: 1821342 - RNA, 19 nt, Artificial Sequence
  Description of Artificial Sequence: Synthetic oligonucleotide
  Antisense strand to SEQ ID NO: 1821341
uucauacuuauaagcuugu

SEQ ID NO: 1821343 - RNA, 19 nt, Artificial Sequence
  Description of Artificial Sequence: Synthetic oligonucleotide
  Sense strand starting at position 2421 of SEQ ID NO: 1563583
gucugaagaugauuaagug

SEQ ID NO: 1821344 - RNA, 19 nt, Artificial Sequence
  Description of Artificial Sequence: Synthetic oligonucleotide
  Antisense strand to SEQ ID NO: 1821343
cacuuaaucaucuucagac

SEQ ID NO: 1821345 - RNA, 19 nt, Artificial Sequence
  Description of Artificial Sequence: Synthetic oligonucleotide
  Sense strand starting at position 2431 of SEQ ID NO: 1563583
gauuaagugccagaugauu

SEQ ID NO: 1821346 - RNA, 19 nt, Artificial Sequence
  Description of Artificial Sequence: Synthetic oligonucleotide
  Antisense strand to SEQ ID NO: 1821345
aaucaucuggcacuuaauc

SEQ ID NO: 1821347 - RNA, 19 nt, Artificial Sequence
  Description of Artificial Sequence: Synthetic oligonucleotide
  Sense strand starting at position 2483 of SEQ ID NO: 1563583
uccagagugugaguuaaua

SEQ ID NO: 1821348 - RNA, 19 nt, Artificial Sequence
  Description of Artificial Sequence: Synthetic oligonucleotide
  Antisense strand to SEQ ID NO: 1821347
uauuaacucacacucugga

SEQ ID NO: 1821349 - RNA, 19 nt, Artificial Sequence
  Description of Artificial Sequence: Synthetic oligonucleotide
  Sense strand starting at position 2529 of SEQ ID NO: 1563583
caugguucuguuuaaagac

SEQ ID NO: 1821350 - RNA, 19 nt, Artificial Sequence
  Description of Artificial Sequence: Synthetic oligonucleotide
  Antisense strand to SEQ ID NO: 1821349
gucuuuaaacagaaccaug

SEQ ID NO: 1821351 - RNA, 19 nt, Artificial Sequence
  Description of Artificial Sequence: Synthetic oligonucleotide
  Sense strand starting at position 2940 of SEQ ID NO: 1563583
agagaaaguuuggucugag

SEQ ID NO: 1821352 - RNA, 19 nt, Artificial Sequence
  Description of Artificial Sequence: Synthetic oligonucleotide
  Antisense strand to SEQ ID NO: 1821351
cucagaccaaacuuucucu

SEQ ID NO: 1821353 - RNA, 19 nt, Artificial Sequence
  Description of Artificial Sequence: Synthetic oligonucleotide
  Sense strand starting at position 2941 of SEQ ID NO: 1563583
gagaaaguuuggucugagu

SEQ ID NO: 1821354 - RNA, 19 nt, Artificial Sequence
  Description of Artificial Sequence: Synthetic oligonucleotide
  Antisense strand to SEQ ID NO: 1821353
acucagaccaaacuuucuc

SEQ ID NO: 1821355 - RNA, 19 nt, Artificial Sequence
  Description of Artificial Sequence: Synthetic oligonucleotide
  Sense strand starting at position 2943 of SEQ ID NO: 1563583
gaaaguuuggucugaguga

SEQ ID NO: 1821356 - RNA, 19 nt, Artificial Sequence
  Description of Artificial Sequence: Synthetic oligonucleotide
  Antisense strand to SEQ ID NO: 1821355
ucacucagaccaaacuuuc

SEQ ID NO: 1821357 - RNA, 19 nt, Artificial Sequence
  Description of Artificial Sequence: Synthetic oligonucleotide
  Sense strand starting at position 2960 of SEQ ID NO: 1563583
gaguuaaugcagcagacau

SEQ ID NO: 1821358 - RNA, 19 nt, Artificial Sequence
  Description of Artificial Sequence: Synthetic oligonucleotide
  Antisense strand to SEQ ID NO: 1821357
augucugcugcauuaacuc

SEQ ID NO: 1821359 - RNA, 19 nt, Artificial Sequence
  Description of Artificial Sequence: Synthetic oligonucleotide
  Sense strand starting at position 3249 of SEQ ID NO: 1563583
gacugauccuguucuggac

SEQ ID NO: 1821360 - RNA, 19 nt, Artificial Sequence
  Description of Artificial Sequence: Synthetic oligonucleotide
  Antisense strand to SEQ ID NO: 1821359
guccagaacaggaucaguc

SEQ ID NO: 1821361 - RNA, 19 nt, Artificial Sequence
  Description of Artificial Sequence: Synthetic oligonucleotide
  Sense strand starting at position 3270 of SEQ ID NO: 1563583
guggucuagcuccaauaau

SEQ ID NO: 1821362 - RNA, 19 nt, Artificial Sequence
  Description of Artificial Sequence: Synthetic oligonucleotide
  Antisense strand to SEQ ID NO: 1821361
auuauuggagcuagaccac

SEQ ID NO: 1821363 - RNA, 19 nt, Artificial Sequence
  Description of Artificial Sequence: Synthetic oligonucleotide
  Sense strand starting at position 3440 of SEQ ID NO: 1563583
gaauucugugaaggguuaa

SEQ ID NO: 1821364 - RNA, 19 nt, Artificial Sequence
  Description of Artificial Sequence: Synthetic oligonucleotide
  Antisense strand to SEQ ID NO: 1821363
uuaacccuucacagaauuc

SEQ ID NO: 1821365 - RNA, 19 nt, Artificial Sequence
  Description of Artificial Sequence: Synthetic oligonucleotide
  Sense strand starting at position 3453 of SEQ ID NO: 1563583
gguuaaaugucucugacua

SEQ ID NO: 1821366 - RNA, 19 nt, Artificial Sequence
  Description of Artificial Sequence: Synthetic oligonucleotide
  Antisense strand to SEQ ID NO: 1821365
uagucagagacauuuaacc

SEQ ID NO: 1821367 - RNA, 19 nt, Artificial Sequence
  Description of Artificial Sequence: Synthetic oligonucleotide
  Sense strand starting at position 3632 of SEQ ID NO: 1563583
cacauauguggguaucuga

SEQ ID NO: 1821368 - RNA, 19 nt, Artificial Sequence
  Description of Artificial Sequence: Synthetic oligonucleotide
  Antisense strand to SEQ ID NO: 1821367
ucagauacccacauaugug

SEQ ID NO: 1821369 - RNA, 19 nt, Artificial Sequence
  Description of Artificial Sequence: Synthetic oligonucleotide
  Sense strand starting at position 3814 of SEQ ID NO: 1563583
ugcagaccuguguaucaca

SEQ ID NO: 1821370 - RNA, 19 nt, Artificial Sequence
  Description of Artificial Sequence: Synthetic oligonucleotide
  Antisense strand to SEQ ID NO: 1821369
ugugauacacaggucugca

SEQ ID NO: 1821371 - RNA, 19 nt, Artificial Sequence
  Description of Artificial Sequence: Synthetic oligonucleotide
  Sense strand starting at position 3975 of SEQ ID NO: 1563583
gaaugacuuugaccacagu

SEQ ID NO: 1821372 - RNA, 19 nt, Artificial Sequence
  Description of Artificial Sequence: Synthetic oligonucleotide
  Antisense strand to SEQ ID NO: 1821371
acuguggucaaagucauuc

SEQ ID NO: 1821373 - RNA, 19 nt, Artificial Sequence
  Description of Artificial Sequence: Synthetic oligonucleotide
  Sense strand starting at position 161 of SEQ ID NO: 1563584
gcuaaagaccagugagaga

SEQ ID NO: 1821374 - RNA, 19 nt, Artificial Sequence
  Description of Artificial Sequence: Synthetic oligonucleotide
  Antisense strand to SEQ ID NO: 1821373
ucucucacuggucuuuagc

SEQ ID NO: 1821375 - RNA, 19 nt, Artificial Sequence
  Description of Artificial Sequence: Synthetic oligonucleotide
  Sense strand starting at position 200 of SEQ ID NO: 1563584
gcacgucaugcccaaauau

SEQ ID NO: 1821376 - RNA, 19 nt, Artificial Sequence
  Description of Artificial Sequence: Synthetic oligonucleotide
  Antisense strand to SEQ ID NO: 1821375
auauuugggcaugacgugc

SEQ ID NO: 1821377 - RNA, 19 nt, Artificial Sequence
  Description of Artificial Sequence: Synthetic oligonucleotide
  Sense strand starting at position 210 of SEQ ID NO: 1563584
cccaaauaugguugacucu

SEQ ID NO: 1821378 - RNA, 19 nt, Artificial Sequence
  Description of Artificial Sequence: Synthetic oligonucleotide
  Antisense strand to SEQ ID NO: 1821377
agagucaaccauauuuggg

SEQ ID NO: 1821379 - RNA, 19 nt, Artificial Sequence
  Description of Artificial Sequence: Synthetic oligonucleotide
  Sense strand starting at position 266 of SEQ ID NO: 1563584
cugugauccgcccagcaca

SEQ ID NO: 1821380 - RNA, 19 nt, Artificial Sequence
  Description of Artificial Sequence: Synthetic oligonucleotide
  Antisense strand to SEQ ID NO: 1821379
ugugcugggcggaucacag

SEQ ID NO: 1821381 - RNA, 19 nt, Artificial Sequence
  Description of Artificial Sequence: Synthetic oligonucleotide
  Sense strand starting at position 396 of SEQ ID NO: 1563584
uccugaccacuuugagaca

SEQ ID NO: 1821382 - RNA, 19 nt, Artificial Sequence
  Description of Artificial Sequence: Synthetic oligonucleotide
  Antisense strand to SEQ ID NO: 1821381
ugucucaaaguggucagga

SEQ ID NO: 1821383 - RNA, 19 nt, Artificial Sequence
  Description of Artificial Sequence: Synthetic oligonucleotide
  Sense strand starting at position 629 of SEQ ID NO: 1563584
cuggguugucuggguucau

SEQ ID NO: 1821384 - RNA, 19 nt, Artificial Sequence
  Description of Artificial Sequence: Synthetic oligonucleotide
  Antisense strand to SEQ ID NO: 1821383
augaacccagacaacccag

SEQ ID NO: 1821385 - RNA, 19 nt, Artificial Sequence
  Description of Artificial Sequence: Synthetic oligonucleotide
  Sense strand starting at position 630 of SEQ ID NO: 1563584
uggguugucuggguucauu

SEQ ID NO: 1821386 - RNA, 19 nt, Artificial Sequence
  Description of Artificial Sequence: Synthetic oligonucleotide
  Antisense strand to SEQ ID NO: 1821385
aaugaacccagacaaccca

SEQ ID NO: 1821387 - RNA, 19 nt, Artificial Sequence
  Description of Artificial Sequence: Synthetic oligonucleotide
  Sense strand starting at position 680 of SEQ ID NO: 1563584
cagagugaccaguggucaa

SEQ ID NO: 1821388 - RNA, 19 nt, Artificial Sequence
  Description of Artificial Sequence: Synthetic oligonucleotide
  Antisense strand to SEQ ID NO: 1821387
uugaccacuggucacucug

SEQ ID NO: 1821389 - RNA, 19 nt, Artificial Sequence
  Description of Artificial Sequence: Synthetic oligonucleotide
  Sense strand starting at position 787 of SEQ ID NO: 1563584
gaggguucuugucccuaga

SEQ ID NO: 1821390 - RNA, 19 nt, Artificial Sequence
  Description of Artificial Sequence: Synthetic oligonucleotide
  Antisense strand to SEQ ID NO: 1821389
ucuagggacaagaacccuc

SEQ ID NO: 1821391 - RNA, 19 nt, Artificial Sequence
  Description of Artificial Sequence: Synthetic oligonucleotide
  Sense strand starting at position 789 of SEQ ID NO: 1563584
ggguucuugucccuagaac

SEQ ID NO: 1821392 - RNA, 19 nt, Artificial Sequence
  Description of Artificial Sequence: Synthetic oligonucleotide
  Antisense strand to SEQ ID NO: 1821391
guucuagggacaagaaccc

SEQ ID NO: 1821393 - RNA, 19 nt, Artificial Sequence
  Description of Artificial Sequence: Synthetic oligonucleotide
  Sense strand starting at position 790 of SEQ ID NO: 1563584
gguucuugucccuagaaca

SEQ ID NO: 1821394 - RNA, 19 nt, Artificial Sequence
  Description of Artificial Sequence: Synthetic oligonucleotide
  Antisense strand to SEQ ID NO: 1821393
uguucuagggacaagaacc

SEQ ID NO: 1821395 - RNA, 19 nt, Artificial Sequence
  Description of Artificial Sequence: Synthetic oligonucleotide
  Sense strand starting at position 893 of SEQ ID NO: 1563584
uucccuuauuuggaguaga

SEQ ID NO: 1821396 - RNA, 19 nt, Artificial Sequence
  Description of Artificial Sequence: Synthetic oligonucleotide
  Antisense strand to SEQ ID NO: 1821395
ucuacuccaaauaagggaa

SEQ ID NO: 1821397 - RNA, 19 nt, Artificial Sequence
  Description of Artificial Sequence: Synthetic oligonucleotide
  Sense strand starting at position 1185 of SEQ ID NO: 1563584
uacaaaugggucugccagu

SEQ ID NO: 1821398 - RNA, 19 nt, Artificial Sequence
  Description of Artificial Sequence: Synthetic oligonucleotide
  Antisense strand to SEQ ID NO: 1821397
acuggcagacccauuugua

SEQ ID NO: 1821399 - RNA, 19 nt, Artificial Sequence
  Description of Artificial Sequence: Synthetic oligonucleotide
  Sense strand starting at position 1191 of SEQ ID NO: 1563584
ugggucugccaguggauuu

SEQ ID NO: 1821400 - RNA, 19 nt, Artificial Sequence
  Description of Artificial Sequence: Synthetic oligonucleotide
  Antisense strand to SEQ ID NO: 1821399
aaauccacuggcagaccca

SEQ ID NO: 1821401 - RNA, 19 nt, Artificial Sequence
  Description of Artificial Sequence: Synthetic oligonucleotide
  Sense strand starting at position 1249 of SEQ ID NO: 1563584
gggacauuguugguuauau

SEQ ID NO: 1821402 - RNA, 19 nt, Artificial Sequence
  Description of Artificial Sequence: Synthetic oligonucleotide
  Antisense strand to SEQ ID NO: 1821401
auauaaccaacaauguccc

SEQ ID NO: 1821403 - RNA, 19 nt, Artificial Sequence
  Description of Artificial Sequence: Synthetic oligonucleotide
  Sense strand starting at position 1250 of SEQ ID NO: 1563584
ggacauuguugguuauauc

SEQ ID NO: 1821404 - RNA, 19 nt, Artificial Sequence
  Description of Artificial Sequence: Synthetic oligonucleotide
  Antisense strand to SEQ ID NO: 1821403
gauauaaccaacaaugucc

SEQ ID NO: 1821405 - RNA, 19 nt, Artificial Sequence
  Description of Artificial Sequence: Synthetic oligonucleotide
  Sense strand starting at position 1476 of SEQ ID NO: 1563584
ugagaaguguccuuccagg

SEQ ID NO: 1821406 - RNA, 19 nt, Artificial Sequence
  Description of Artificial Sequence: Synthetic oligonucleotide
  Antisense strand to SEQ ID NO: 1821405
ccuggaaggacacuucuca

SEQ ID NO: 1821407 - RNA, 19 nt, Artificial Sequence
  Description of Artificial Sequence: Synthetic oligonucleotide
  Sense strand starting at position 1515 of SEQ ID NO: 1563584
acacaaguuccugguguca

SEQ ID NO: 1821408 - RNA, 19 nt, Artificial Sequence
  Description of Artificial Sequence: Synthetic oligonucleotide
  Antisense strand to SEQ ID NO: 1821407
ugacaccaggaacuugugu

SEQ ID NO: 1821409 - RNA, 19 nt, Artificial Sequence
  Description of Artificial Sequence: Synthetic oligonucleotide
  Sense strand starting at position 1626 of SEQ ID NO: 1563584
ccacauucgugggcacaga

SEQ ID NO: 1821410 - RNA, 19 nt, Artificial Sequence
  Description of Artificial Sequence: Synthetic oligonucleotide
  Antisense strand to SEQ ID NO: 1821409
ucugugcccacgaaugugg

SEQ ID NO: 1821411 - RNA, 19 nt, Artificial Sequence
  Description of Artificial Sequence: Synthetic oligonucleotide
  Sense strand starting at position 1666 of SEQ ID NO: 1563584
ggaagcuauucucuggaca

SEQ ID NO: 1821412 - RNA, 19 nt, Artificial Sequence
  Description of Artificial Sequence: Synthetic oligonucleotide
  Antisense strand to SEQ ID NO: 1821411
uguccagagaauagcuucc

SEQ ID NO: 1821413 - RNA, 19 nt, Artificial Sequence
  Description of Artificial Sequence: Synthetic oligonucleotide
  Sense strand starting at position 2072 of SEQ ID NO: 1563584
gcgagaaagccuuaauugg

SEQ ID NO: 1821414 - RNA, 19 nt, Artificial Sequence
  Description of Artificial Sequence: Synthetic oligonucleotide
  Antisense strand to SEQ ID NO: 1821413
ccaauuaaggcuuucucgc

SEQ ID NO: 1821415 - RNA, 19 nt, Artificial Sequence
  Description of Artificial Sequence: Synthetic oligonucleotide
  Sense strand starting at position 2604 of SEQ ID NO: 1563584
ggacgagaaaguuaaguuu

SEQ ID NO: 1821416 - RNA, 19 nt, Artificial Sequence
  Description of Artificial Sequence: Synthetic oligonucleotide
  Antisense strand to SEQ ID NO: 1821415
aaacuuaacuuucucgucc

SEQ ID NO: 1821417 - RNA, 19 nt, Artificial Sequence
  Description of Artificial Sequence: Synthetic oligonucleotide
  Sense strand starting at position 2607 of SEQ ID NO: 1563584
cgagaaaguuaaguuuguu

SEQ ID NO: 1821418 - RNA, 19 nt, Artificial Sequence
  Description of Artificial Sequence: Synthetic oligonucleotide
  Antisense strand to SEQ ID NO: 1821417
aacaaacuuaacuuucucg

SEQ ID NO: 1821419 - RNA, 19 nt, Artificial Sequence
  Description of Artificial Sequence: Synthetic oligonucleotide
  Sense strand starting at position 2610 of SEQ ID NO: 1563584
gaaaguuaaguuuguuuag

SEQ ID NO: 1821420 - RNA, 19 nt, Artificial Sequence
  Description of Artificial Sequence: Synthetic oligonucleotide
  Antisense strand to SEQ ID NO: 1821419
cuaaacaaacuuaacuuuc

SEQ ID NO: 1821421 - RNA, 19 nt, Artificial Sequence
  Description of Artificial Sequence: Synthetic oligonucleotide
  Sense strand starting at position 2637 of SEQ ID NO: 1563584
agauucugaucuuaaagaa

SEQ ID NO: 1821422 - RNA, 19 nt, Artificial Sequence
  Description of Artificial Sequence: Synthetic oligonucleotide
  Antisense strand to SEQ ID NO: 1821421
uucuuuaagaucagaaucu

SEQ ID NO: 1821423 - RNA, 19 nt, Artificial Sequence
  Description of Artificial Sequence: Synthetic oligonucleotide
  Sense strand starting at position 2721 of SEQ ID NO: 1563584
auuaauugagcccgggagu

SEQ ID NO: 1821424 - RNA, 19 nt, Artificial Sequence
  Description of Artificial Sequence: Synthetic oligonucleotide
  Antisense strand to SEQ ID NO: 1821423
acucccgggcucaauuaau

SEQ ID NO: 1821425 - RNA, 19 nt, Artificial Sequence
  Description of Artificial Sequence: Synthetic oligonucleotide
  Sense strand starting at position 2722 of SEQ ID NO: 1563584
uuaauugagcccgggaguu

SEQ ID NO: 1821426 - RNA, 19 nt, Artificial Sequence
  Description of Artificial Sequence: Synthetic oligonucleotide
  Antisense strand to SEQ ID NO: 1821425
aacucccgggcucaauuaa

SEQ ID NO: 1821427 - RNA, 19 nt, Artificial Sequence
  Description of Artificial Sequence: Synthetic oligonucleotide
  Sense strand starting at position 3514 of SEQ ID NO: 1563584
gcuagacugugucuuggaa

SEQ ID NO: 1821428 - RNA, 19 nt, Artificial Sequence
  Description of Artificial Sequence: Synthetic oligonucleotide
  Antisense strand to SEQ ID NO: 1821427
uuccaagacacagucuagc

SEQ ID NO: 1821429 - RNA, 19 nt, Artificial Sequence
  Description of Artificial Sequence: Synthetic oligonucleotide
  Sense strand starting at position 3575 of SEQ ID NO: 1563584
acguuaacagcucagugaa

SEQ ID NO: 1821430 - RNA, 19 nt, Artificial Sequence
  Description of Artificial Sequence: Synthetic oligonucleotide
  Antisense strand to SEQ ID NO: 1821429
uucacugagcuguuaacgu

SEQ ID NO: 1821431 - RNA, 19 nt, Artificial Sequence
  Description of Artificial Sequence: Synthetic oligonucleotide
  Sense strand starting at position 3577 of SEQ ID NO: 1563584
guuaacagcucagugaaca

SEQ ID NO: 1821432 - RNA, 19 nt, Artificial Sequence
  Description of Artificial Sequence: Synthetic oligonucleotide
  Antisense strand to SEQ ID NO: 1821431
uguucacugagcuguuaac

SEQ ID NO: 1821433 - RNA, 19 nt, Artificial Sequence
  Description of Artificial Sequence: Synthetic oligonucleotide
  Sense strand starting at position 3578 of SEQ ID NO: 1563584
uuaacagcucagugaacaa

SEQ ID NO: 1821434 - RNA, 19 nt, Artificial Sequence
  Description of Artificial Sequence: Synthetic oligonucleotide
  Antisense strand to SEQ ID NO: 1821433
uuguucacugagcuguuaa

SEQ ID NO: 1821435 - RNA, 19 nt, Artificial Sequence
  Description of Artificial Sequence: Synthetic oligonucleotide
  Sense strand starting at position 3596 of SEQ ID NO: 1563584
aucaucuacuugucauaga

SEQ ID NO: 1821436 - RNA, 19 nt, Artificial Sequence
  Description of Artificial Sequence: Synthetic oligonucleotide
  Antisense strand to SEQ ID NO: 1821435
ucuaugacaaguagaugau

SEQ ID NO: 1821437 - RNA, 19 nt, Artificial Sequence
  Description of Artificial Sequence: Synthetic oligonucleotide
  Sense strand starting at position 3618 of SEQ ID NO: 1563584
ugaggaauguuuccauguu

SEQ ID NO: 1821438 - RNA, 19 nt, Artificial Sequence
  Description of Artificial Sequence: Synthetic oligonucleotide
  Antisense strand to SEQ ID NO: 1821437
aacauggaaacauuccuca

SEQ ID NO: 1821439 - RNA, 19 nt, Artificial Sequence
  Description of Artificial Sequence: Synthetic oligonucleotide
  Sense strand starting at position 3660 of SEQ ID NO: 1563584
ucauguugggauuguaagu

SEQ ID NO: 1821440 - RNA, 19 nt, Artificial Sequence
  Description of Artificial Sequence: Synthetic oligonucleotide
  Antisense strand to SEQ ID NO: 1821439
acuuacaaucccaacauga

SEQ ID NO: 1821441 - RNA, 19 nt, Artificial Sequence
  Description of Artificial Sequence: Synthetic oligonucleotide
  Sense strand starting at position 3702 of SEQ ID NO: 1563584
gccauuccauccuuaagga

SEQ ID NO: 1821442 - RNA, 19 nt, Artificial Sequence
  Description of Artificial Sequence: Synthetic oligonucleotide
  Antisense strand to SEQ ID NO: 1821441
uccuuaaggauggaauggc

SEQ ID NO: 1821443 - RNA, 19 nt, Artificial Sequence
  Description of Artificial Sequence: Synthetic oligonucleotide
  Sense strand starting at position 3742 of SEQ ID NO: 1563584
ugacuuagaauugguugca

SEQ ID NO: 1821444 - RNA, 19 nt, Artificial Sequence
  Description of Artificial Sequence: Synthetic oligonucleotide
  Antisense strand to SEQ ID NO: 1821443
ugcaaccaauucuaaguca

SEQ ID NO: 1821445 - RNA, 19 nt, Artificial Sequence
  Description of Artificial Sequence: Synthetic oligonucleotide
  Sense strand starting at position 3743 of SEQ ID NO: 1563584
gacuuagaauugguugcau

SEQ ID NO: 1821446 - RNA, 19 nt, Artificial Sequence
  Description of Artificial Sequence: Synthetic oligonucleotide
  Antisense strand to SEQ ID NO: 1821445
augcaaccaauucuaaguc

SEQ ID NO: 1821447 - RNA, 19 nt, Artificial Sequence
  Description of Artificial Sequence: Synthetic oligonucleotide
  Sense strand starting at position 3841 of SEQ ID NO: 1563584
cccucugaugacugcaaau

SEQ ID NO: 1821448 - RNA, 19 nt, Artificial Sequence
  Description of Artificial Sequence: Synthetic oligonucleotide
  Antisense strand to SEQ ID NO: 1821447
auuugcagucaucagaggg

SEQ ID NO: 1821449 - RNA, 19 nt, Artificial Sequence
  Description of Artificial Sequence: Synthetic oligonucleotide
  Sense strand starting at position 3876 of SEQ ID NO: 1563584
cgggaaacucucugaggcu

SEQ ID NO: 1821450 - RNA, 19 nt, Artificial Sequence
  Description of Artificial Sequence: Synthetic oligonucleotide
  Antisense strand to SEQ ID NO: 1821449
agccucagagaguuucccg

SEQ ID NO: 1821451 - RNA, 19 nt, Artificial Sequence
  Description of Artificial Sequence: Synthetic oligonucleotide
  Sense strand starting at position 3932 of SEQ ID NO: 1563584
gggaauguuccaugaauua

SEQ ID NO: 1821452 - RNA, 19 nt, Artificial Sequence
  Description of Artificial Sequence: Synthetic oligonucleotide
  Antisense strand to SEQ ID NO: 1821451
uaauucauggaacauuccc

SEQ ID NO: 1821453 - RNA, 19 nt, Artificial Sequence
  Description of Artificial Sequence: Synthetic oligonucleotide
  Sense strand starting at position 80 of SEQ ID NO: 1563585
uuauuagugccagaaaucu

SEQ ID NO: 1821454 - RNA, 19 nt, Artificial Sequence
  Description of Artificial Sequence: Synthetic oligonucleotide
  Antisense strand to SEQ ID NO: 1821453
agauuucuggcacuaauaa

SEQ ID NO: 1821455 - RNA, 19 nt, Artificial Sequence
  Description of Artificial Sequence: Synthetic oligonucleotide
  Sense strand starting at position 128 of SEQ ID NO: 1563585
gaacgauucuacgcaaacu

SEQ ID NO: 1821456 - RNA, 19 nt, Artificial Sequence
  Description of Artificial Sequence: Synthetic oligonucleotide
  Antisense strand to SEQ ID NO: 1821455
aguuugcguagaaucguuc

SEQ ID NO: 1821457 - RNA, 19 nt, Artificial Sequence
  Description of Artificial Sequence: Synthetic oligonucleotide
  Sense strand starting at position 532 of SEQ ID NO: 1563585
acuguaguaaggugggaua

SEQ ID NO: 1821458 - RNA, 19 nt, Artificial Sequence
  Description of Artificial Sequence: Synthetic oligonucleotide
  Antisense strand to SEQ ID NO: 1821457
uaucccaccuuacuacagu

SEQ ID NO: 1821459 - RNA, 19 nt, Artificial Sequence
  Description of Artificial Sequence: Synthetic oligonucleotide
  Sense strand starting at position 534 of SEQ ID NO: 1563585
uguaguaaggugggauauu

SEQ ID NO: 1821460 - RNA, 19 nt, Artificial Sequence
  Description of Artificial Sequence: Synthetic oligonucleotide
  Antisense strand to SEQ ID NO: 1821459
aauaucccaccuuacuaca

SEQ ID NO: 1821461 - RNA, 19 nt, Artificial Sequence
  Description of Artificial Sequence: Synthetic oligonucleotide
  Sense strand starting at position 682 of SEQ ID NO: 1563585
uuaguugaucugcaauggu

SEQ ID NO: 1821462 - RNA, 19 nt, Artificial Sequence
  Description of Artificial Sequence: Synthetic oligonucleotide
  Antisense strand to SEQ ID NO: 1821461
accauugcagaucaacuaa

SEQ ID NO: 1821463 - RNA, 19 nt, Artificial Sequence
  Description of Artificial Sequence: Synthetic oligonucleotide
  Sense strand starting at position 690 of SEQ ID NO: 1563585
ucugcaaugguguaacuuu

SEQ ID NO: 1821464 - RNA, 19 nt, Artificial Sequence
  Description of Artificial Sequence: Synthetic oligonucleotide
  Antisense strand to SEQ ID NO: 1821463
aaaguuacaccauugcaga

SEQ ID NO: 1821465 - RNA, 19 nt, Artificial Sequence
  Description of Artificial Sequence: Synthetic oligonucleotide
  Sense strand starting at position 782 of SEQ ID NO: 1563585
aaggaaauguggucaaguu

SEQ ID NO: 1821466 - RNA, 19 nt, Artificial Sequence
  Description of Artificial Sequence: Synthetic oligonucleotide
  Antisense strand to SEQ ID NO: 1821465
aacuugaccacauuuccuu

SEQ ID NO: 1821467 - RNA, 19 nt, Artificial Sequence
  Description of Artificial Sequence: Synthetic oligonucleotide
  Sense strand starting at position 783 of SEQ ID NO: 1563585
aggaaauguggucaaguuc

SEQ ID NO: 1821468 - RNA, 19 nt, Artificial Sequence
  Description of Artificial Sequence: Synthetic oligonucleotide
  Antisense strand to SEQ ID NO: 1821467
gaacuugaccacauuuccu

SEQ ID NO: 1821469 - RNA, 19 nt, Artificial Sequence
  Description of Artificial Sequence: Synthetic oligonucleotide
  Sense strand starting at position 849 of SEQ ID NO: 1563585
guaauaauauacucucagu

SEQ ID NO: 1821470 - RNA, 19 nt, Artificial Sequence
  Description of Artificial Sequence: Synthetic oligonucleotide
  Antisense strand to SEQ ID NO: 1821469
acugagaguauauuauuac

SEQ ID NO: 1821471 - RNA, 19 nt, Artificial Sequence
  Description of Artificial Sequence: Synthetic oligonucleotide
  Sense strand starting at position 863 of SEQ ID NO: 1563585
ucaguuaauuaccugaagu

SEQ ID NO: 1821472 - RNA, 19 nt, Artificial Sequence
  Description of Artificial Sequence: Synthetic oligonucleotide
  Antisense strand to SEQ ID NO: 1821471
acuucagguaauuaacuga

SEQ ID NO: 1821473 - RNA, 19 nt, Artificial Sequence
  Description of Artificial Sequence: Synthetic oligonucleotide
  Sense strand starting at position 865 of SEQ ID NO: 1563585
aguuaauuaccugaaguuu

SEQ ID NO: 1821474 - RNA, 19 nt, Artificial Sequence
  Description of Artificial Sequence: Synthetic oligonucleotide
  Antisense strand to SEQ ID NO: 1821473
aaacuucagguaauuaacu

SEQ ID NO: 1821475 - RNA, 19 nt, Artificial Sequence
  Description of Artificial Sequence: Synthetic oligonucleotide
  Sense strand starting at position 1058 of SEQ ID NO: 1563585
auguuagggucuuccugaa

SEQ ID NO: 1821476 - RNA, 19 nt, Artificial Sequence
  Description of Artificial Sequence: Synthetic oligonucleotide
  Antisense strand to SEQ ID NO: 1821475
uucaggaagacccuaacau

SEQ ID NO: 1821477 - RNA, 19 nt, Artificial Sequence
  Description of Artificial Sequence: Synthetic oligonucleotide
  Sense strand starting at position 1062 of SEQ ID NO: 1563585
uagggucuuccugaaacuu

SEQ ID NO: 1821478 - RNA, 19 nt, Artificial Sequence
  Description of Artificial Sequence: Synthetic oligonucleotide
  Antisense strand to SEQ ID NO: 1821477
aaguuucaggaagacccua

SEQ ID NO: 1821479 - RNA, 19 nt, Artificial Sequence
  Description of Artificial Sequence: Synthetic oligonucleotide
  Sense strand starting at position 1373 of SEQ ID NO: 1563585
aagccaucgccgucacuua

SEQ ID NO: 1821480 - RNA, 19 nt, Artificial Sequence
  Description of Artificial Sequence: Synthetic oligonucleotide
  Antisense strand to SEQ ID NO: 1821479
uaagugacggcgauggcuu

SEQ ID NO: 1821481 - RNA, 19 nt, Artificial Sequence
  Description of Artificial Sequence: Synthetic oligonucleotide
  Sense strand starting at position 1498 of SEQ ID NO: 1563585
gcuggucucucauuucgau

SEQ ID NO: 1821482 - RNA, 19 nt, Artificial Sequence
  Description of Artificial Sequence: Synthetic oligonucleotide
  Antisense strand to SEQ ID NO: 1821481
aucgaaaugagagaccagc

SEQ ID NO: 1821483 - RNA, 19 nt, Artificial Sequence
  Description of Artificial Sequence: Synthetic oligonucleotide
  Sense strand starting at position 1712 of SEQ ID NO: 1563585
agccaaguaccuuguagaa

SEQ ID NO: 1821484 - RNA, 19 nt, Artificial Sequence
  Description of Artificial Sequence: Synthetic oligonucleotide
  Antisense strand to SEQ ID NO: 1821483
uucuacaagguacuuggcu

SEQ ID NO: 1821485 - RNA, 19 nt, Artificial Sequence
  Description of Artificial Sequence: Synthetic oligonucleotide
  Sense strand starting at position 2294 of SEQ ID NO: 1563585
cgcccauuucugcagaggu

SEQ ID NO: 1821486 - RNA, 19 nt, Artificial Sequence
  Description of Artificial Sequence: Synthetic oligonucleotide
  Antisense strand to SEQ ID NO: 1821485
accucugcagaaaugggcg

SEQ ID NO: 1821487 - RNA, 19 nt, Artificial Sequence
  Description of Artificial Sequence: Synthetic oligonucleotide
  Sense strand starting at position 2488 of SEQ ID NO: 1563585
ggugaaggauuagacagaa

SEQ ID NO: 1821488 - RNA, 19 nt, Artificial Sequence
  Description of Artificial Sequence: Synthetic oligonucleotide
  Antisense strand to SEQ ID NO: 1821487
uucugucuaauccuucacc

SEQ ID NO: 1821489 - RNA, 19 nt, Artificial Sequence
  Description of Artificial Sequence: Synthetic oligonucleotide
  Sense strand starting at position 2504 of SEQ ID NO: 1563585
gaagaagacuuugaacuag

SEQ ID NO: 1821490 - RNA, 19 nt, Artificial Sequence
  Description of Artificial Sequence: Synthetic oligonucleotide
  Antisense strand to SEQ ID NO: 1821489
cuaguucaaagucuucuuc

SEQ ID NO: 1821491 - RNA, 19 nt, Artificial Sequence
  Description of Artificial Sequence: Synthetic oligonucleotide
  Sense strand starting at position 2646 of SEQ ID NO: 1563585
cauggauugagucgggauc

SEQ ID NO: 1821492 - RNA, 19 nt, Artificial Sequence
  Description of Artificial Sequence: Synthetic oligonucleotide
  Antisense strand to SEQ ID NO: 1821491
gaucccgacucaauccaug

SEQ ID NO: 1821493 - RNA, 19 nt, Artificial Sequence
  Description of Artificial Sequence: Synthetic oligonucleotide
  Sense strand starting at position 2670 of SEQ ID NO: 1563585
augugagccuuuccucaga

SEQ ID NO: 1821494 - RNA, 19 nt, Artificial Sequence
  Description of Artificial Sequence: Synthetic oligonucleotide
  Antisense strand to SEQ ID NO: 1821493
ucugaggaaaggcucacau

SEQ ID NO: 1821495 - RNA, 19 nt, Artificial Sequence
  Description of Artificial Sequence: Synthetic oligonucleotide
  Sense strand starting at position 2986 of SEQ ID NO: 1563585
cugguauccaacugagaag

SEQ ID NO: 1821496 - RNA, 19 nt, Artificial Sequence
  Description of Artificial Sequence: Synthetic oligonucleotide
  Antisense strand to SEQ ID NO: 1821495
cuucucaguuggauaccag

SEQ ID NO: 1821497 - RNA, 19 nt, Artificial Sequence
  Description of Artificial Sequence: Synthetic oligonucleotide
  Sense strand starting at position 2998 of SEQ ID NO: 1563585
ugagaaguugacggagcau

SEQ ID NO: 1821498 - RNA, 19 nt, Artificial Sequence
  Description of Artificial Sequence: Synthetic oligonucleotide
  Antisense strand to SEQ ID NO: 1821497
augcuccgucaacuucuca

SEQ ID NO: 1821499 - RNA, 19 nt, Artificial Sequence
  Description of Artificial Sequence: Synthetic oligonucleotide
  Sense strand starting at position 3039 of SEQ ID NO: 1563585
cuaagugcuaacgagaaau

SEQ ID NO: 1821500 - RNA, 19 nt, Artificial Sequence
  Description of Artificial Sequence: Synthetic oligonucleotide
  Antisense strand to SEQ ID NO: 1821499
auuucucguuagcacuuag

SEQ ID NO: 1821501 - RNA, 19 nt, Artificial Sequence
  Description of Artificial Sequence: Synthetic oligonucleotide
  Sense strand starting at position 3049 of SEQ ID NO: 1563585
acgagaaaucggugagcaa

SEQ ID NO: 1821502 - RNA, 19 nt, Artificial Sequence
  Description of Artificial Sequence: Synthetic oligonucleotide
  Antisense strand to SEQ ID NO: 1821501
uugcucaccgauuucucgu

SEQ ID NO: 1821503 - RNA, 19 nt, Artificial Sequence
  Description of Artificial Sequence: Synthetic oligonucleotide
  Sense strand starting at position 3050 of SEQ ID NO: 1563585
cgagaaaucggugagcaaa

SEQ ID NO: 1821504 - RNA, 19 nt, Artificial Sequence
  Description of Artificial Sequence: Synthetic oligonucleotide
  Antisense strand to SEQ ID NO: 1821503
uuugcucaccgauuucucg

SEQ ID NO: 1821505 - RNA, 19 nt, Artificial Sequence
  Description of Artificial Sequence: Synthetic oligonucleotide
  Sense strand starting at position 3262 of SEQ ID NO: 1563585
uggaauauggcaggugaga

SEQ ID NO: 1821506 - RNA, 19 nt, Artificial Sequence
  Description of Artificial Sequence: Synthetic oligonucleotide
  Antisense strand to SEQ ID NO: 1821505
ucucaccugccauauucca

SEQ ID NO: 1821507 - RNA, 19 nt, Artificial Sequence
  Description of Artificial Sequence: Synthetic oligonucleotide
  Sense strand starting at position 3264 of SEQ ID NO: 1563585
gaauauggcaggugagagu

SEQ ID NO: 1821508 - RNA, 19 nt, Artificial Sequence
  Description of Artificial Sequence: Synthetic oligonucleotide
  Antisense strand to SEQ ID NO: 1821507
acucucaccugccauauuc

SEQ ID NO: 1821509 - RNA, 19 nt, Artificial Sequence
  Description of Artificial Sequence: Synthetic oligonucleotide
  Sense strand starting at position 3271 of SEQ ID NO: 1563585
gcaggugagaguuaacuaa

SEQ ID NO: 1821510 - RNA, 19 nt, Artificial Sequence
  Description of Artificial Sequence: Synthetic oligonucleotide
  Antisense strand to SEQ ID NO: 1821509
uuaguuaacucucaccugc

SEQ ID NO: 1821511 - RNA, 19 nt, Artificial Sequence
  Description of Artificial Sequence: Synthetic oligonucleotide
  Sense strand starting at position 3275 of SEQ ID NO: 1563585
gugagaguuaacuaauagc

SEQ ID NO: 1821512 - RNA, 19 nt, Artificial Sequence
  Description of Artificial Sequence: Synthetic oligonucleotide
  Antisense strand to SEQ ID NO: 1821511
gcuauuaguuaacucucac

SEQ ID NO: 1821513 - RNA, 19 nt, Artificial Sequence
  Description of Artificial Sequence: Synthetic oligonucleotide
  Sense strand starting at position 3374 of SEQ ID NO: 1563585
cuuuaaagcgguggaucua

SEQ ID NO: 1821514 - RNA, 19 nt, Artificial Sequence
  Description of Artificial Sequence: Synthetic oligonucleotide
  Antisense strand to SEQ ID NO: 1821513
uagauccaccgcuuuaaag

SEQ ID NO: 1821515 - RNA, 19 nt, Artificial Sequence
  Description of Artificial Sequence: Synthetic oligonucleotide
  Sense strand starting at position 3436 of SEQ ID NO: 1563585
ggacuagggucuuuggagu

SEQ ID NO: 1821516 - RNA, 19 nt, Artificial Sequence
  Description of Artificial Sequence: Synthetic oligonucleotide
  Antisense strand to SEQ ID NO: 1821515
acuccaaagacccuagucc

SEQ ID NO: 1821517 - RNA, 19 nt, Artificial Sequence
  Description of Artificial Sequence: Synthetic oligonucleotide
  Sense strand starting at position 3494 of SEQ ID NO: 1563585
aucucaucauaggcugaau

SEQ ID NO: 1821518 - RNA, 19 nt, Artificial Sequence
  Description of Artificial Sequence: Synthetic oligonucleotide
  Antisense strand to SEQ ID NO: 1821517
auucagccuaugaugagau

SEQ ID NO: 1821519 - RNA, 19 nt, Artificial Sequence
  Description of Artificial Sequence: Synthetic oligonucleotide
  Sense strand starting at position 3810 of SEQ ID NO: 1563585
gagaguuaacuuugcuccu

SEQ ID NO: 1821520 - RNA, 19 nt, Artificial Sequence
  Description of Artificial Sequence: Synthetic oligonucleotide
  Antisense strand to SEQ ID NO: 1821519
aggagcaaaguuaacucuc

SEQ ID NO: 1821521 - RNA, 19 nt, Artificial Sequence
  Description of Artificial Sequence: Synthetic oligonucleotide
  Sense strand starting at position 3842 of SEQ ID NO: 1563585
auugucauaucagucccua

SEQ ID NO: 1821522 - RNA, 19 nt, Artificial Sequence
  Description of Artificial Sequence: Synthetic oligonucleotide
  Antisense strand to SEQ ID NO: 1821521
uagggacugauaugacaau

SEQ ID NO: 1821523 - RNA, 19 nt, Artificial Sequence
  Description of Artificial Sequence: Synthetic oligonucleotide
  Sense strand starting at position 3857 of SEQ ID NO: 1563585
ccuacaggguccuuguuua

SEQ ID NO: 1821524 - RNA, 19 nt, Artificial Sequence
  Description of Artificial Sequence: Synthetic oligonucleotide
  Antisense strand to SEQ ID NO: 1821523
uaaacaaggacccuguagg

SEQ ID NO: 1821525 - RNA, 19 nt, Artificial Sequence
  Description of Artificial Sequence: Synthetic oligonucleotide
  Sense strand starting at position 3861 of SEQ ID NO: 1563585
caggguccuuguuuacauu

SEQ ID NO: 1821526 - RNA, 19 nt, Artificial Sequence
  Description of Artificial Sequence: Synthetic oligonucleotide
  Antisense strand to SEQ ID NO: 1821525
aauguaaacaaggacccug

SEQ ID NO: 1821527 - RNA, 19 nt, Artificial Sequence
  Description of Artificial Sequence: Synthetic oligonucleotide
  Sense strand starting at position 3862 of SEQ ID NO: 1563585
aggguccuuguuuacauua

SEQ ID NO: 1821528 - RNA, 19 nt, Artificial Sequence
  Description of Artificial Sequence: Synthetic oligonucleotide
  Antisense strand to SEQ ID NO: 1821527
uaauguaaacaaggacccu

SEQ ID NO: 1821529 - RNA, 19 nt, Artificial Sequence
  Description of Artificial Sequence: Synthetic oligonucleotide
  Sense strand starting at position 3949 of SEQ ID NO: 1563585
cugcaauauguucgauaga

SEQ ID NO: 1821530 - RNA, 19 nt, Artificial Sequence
  Description of Artificial Sequence: Synthetic oligonucleotide
  Antisense strand to SEQ ID NO: 1821529
ucuaucgaacauauugcag

SEQ ID NO: 1821531 - RNA, 19 nt, Artificial Sequence
  Description of Artificial Sequence: Synthetic oligonucleotide
  Sense strand starting at position 3965 of SEQ ID NO: 1563585
agagauccuugauaauuua

SEQ ID NO: 1821532 - RNA, 19 nt, Artificial Sequence
  Description of Artificial Sequence: Synthetic oligonucleotide
  Antisense strand to SEQ ID NO: 1821531
uaaauuaucaaggaucucu

SEQ ID NO: 1821533 - RNA, 19 nt, Artificial Sequence
  Description of Artificial Sequence: Synthetic oligonucleotide
  Sense strand starting at position 111 of SEQ ID NO: 1563586
ugcucauagcaguauuguu

SEQ ID NO: 1821534 - RNA, 19 nt, Artificial Sequence
  Description of Artificial Sequence: Synthetic oligonucleotide
  Antisense strand to SEQ ID NO: 1821533
aacaauacugcuaugagca

SEQ ID NO: 1821535 - RNA, 19 nt, Artificial Sequence
  Description of Artificial Sequence: Synthetic oligonucleotide
  Sense strand starting at position 232 of SEQ ID NO: 1563586
ggaauuaaguacccuuaug

SEQ ID NO: 1821536 - RNA, 19 nt, Artificial Sequence
  Description of Artificial Sequence: Synthetic oligonucleotide
  Antisense strand to SEQ ID NO: 1821535
cauaaggguacuuaauucc

SEQ ID NO: 1821537 - RNA, 19 nt, Artificial Sequence
  Description of Artificial Sequence: Synthetic oligonucleotide
  Sense strand starting at position 356 of SEQ ID NO: 1563586
acgaaaucccuuuaauugu

SEQ ID NO: 1821538 - RNA, 19 nt, Artificial Sequence
  Description of Artificial Sequence: Synthetic oligonucleotide
  Antisense strand to SEQ ID NO: 1821537
acaauuaaagggauuucgu

SEQ ID NO: 1821539 - RNA, 19 nt, Artificial Sequence
  Description of Artificial Sequence: Synthetic oligonucleotide
  Sense strand starting at position 1312 of SEQ ID NO: 1563586
cgugccuuguccucaauuu

SEQ ID NO: 1821540 - RNA, 19 nt, Artificial Sequence
  Description of Artificial Sequence: Synthetic oligonucleotide
  Antisense strand to SEQ ID NO: 1821539
aaauugaggacaaggcacg

SEQ ID NO: 1821541 - RNA, 19 nt, Artificial Sequence
  Description of Artificial Sequence: Synthetic oligonucleotide
  Sense strand starting at position 1429 of SEQ ID NO: 1563586
aagugaguuuaggcaggaa

SEQ ID NO: 1821542 - RNA, 19 nt, Artificial Sequence
  Description of Artificial Sequence: Synthetic oligonucleotide
  Antisense strand to SEQ ID NO: 1821541
uuccugccuaaacucacuu

SEQ ID NO: 1821543 - RNA, 19 nt, Artificial Sequence
  Description of Artificial Sequence: Synthetic oligonucleotide
  Sense strand starting at position 1432 of SEQ ID NO: 1563586
ugaguuuaggcaggaaaga

SEQ ID NO: 1821544 - RNA, 19 nt, Artificial Sequence
  Description of Artificial Sequence: Synthetic oligonucleotide
  Antisense strand to SEQ ID NO: 1821543
ucuuuccugccuaaacuca

SEQ ID NO: 1821545 - RNA, 19 nt, Artificial Sequence
  Description of Artificial Sequence: Synthetic oligonucleotide
  Sense strand starting at position 2085 of SEQ ID NO: 1563586
ggcaguccgugacucagaa

SEQ ID NO: 1821546 - RNA, 19 nt, Artificial Sequence
  Description of Artificial Sequence: Synthetic oligonucleotide
  Antisense strand to SEQ ID NO: 1821545
uucugagucacggacugcc

SEQ ID NO: 1821547 - RNA, 19 nt, Artificial Sequence
  Description of Artificial Sequence: Synthetic oligonucleotide
  Sense strand starting at position 2263 of SEQ ID NO: 1563586
gcauauaggugcuugcuaa

SEQ ID NO: 1821548 - RNA, 19 nt, Artificial Sequence
  Description of Artificial Sequence: Synthetic oligonucleotide
  Antisense strand to SEQ ID NO: 1821547
uuagcaagcaccuauaugc

SEQ ID NO: 1821549 - RNA, 19 nt, Artificial Sequence
  Description of Artificial Sequence: Synthetic oligonucleotide
  Sense strand starting at position 2264 of SEQ ID NO: 1563586
cauauaggugcuugcuaaa

SEQ ID NO: 1821550 - RNA, 19 nt, Artificial Sequence
  Description of Artificial Sequence: Synthetic oligonucleotide
  Antisense strand to SEQ ID NO: 1821549
uuuagcaagcaccuauaug

SEQ ID NO: 1821551 - RNA, 19 nt, Artificial Sequence
  Description of Artificial Sequence: Synthetic oligonucleotide
  Sense strand starting at position 2275 of SEQ ID NO: 1563586
uugcuaaaugcuuguggaa

SEQ ID NO: 1821552 - RNA, 19 nt, Artificial Sequence
  Description of Artificial Sequence: Synthetic oligonucleotide
  Antisense strand to SEQ ID NO: 1821551
uuccacaagcauuuagcaa

SEQ ID NO: 1821553 - RNA, 19 nt, Artificial Sequence
  Description of Artificial Sequence: Synthetic oligonucleotide
  Sense strand starting at position 2327 of SEQ ID NO: 1563586
caugacugcuugccauaga

SEQ ID NO: 1821554 - RNA, 19 nt, Artificial Sequence
  Description of Artificial Sequence: Synthetic oligonucleotide
  Antisense strand to SEQ ID NO: 1821553
ucuauggcaagcagucaug

SEQ ID NO: 1821555 - RNA, 19 nt, Artificial Sequence
  Description of Artificial Sequence: Synthetic oligonucleotide
  Sense strand starting at position 2330 of SEQ ID NO: 1563586
gacugcuugccauagauca

SEQ ID NO: 1821556 - RNA, 19 nt, Artificial Sequence
  Description of Artificial Sequence: Synthetic oligonucleotide
  Antisense strand to SEQ ID NO: 1821555
ugaucuauggcaagcaguc

SEQ ID NO: 1821557 - RNA, 19 nt, Artificial Sequence
  Description of Artificial Sequence: Synthetic oligonucleotide
  Sense strand starting at position 2354 of SEQ ID NO: 1563586
aaggaauaacucggauucu

SEQ ID NO: 1821558 - RNA, 19 nt, Artificial Sequence
  Description of Artificial Sequence: Synthetic oligonucleotide
  Antisense strand to SEQ ID NO: 1821557
agaauccgaguuauuccuu

SEQ ID NO: 1821559 - RNA, 19 nt, Artificial Sequence
  Description of Artificial Sequence: Synthetic oligonucleotide
  Sense strand starting at position 2355 of SEQ ID NO: 1563586
aggaauaacucggauucug

SEQ ID NO: 1821560 - RNA, 19 nt, Artificial Sequence
  Description of Artificial Sequence: Synthetic oligonucleotide
  Antisense strand to SEQ ID NO: 1821559
cagaauccgaguuauuccu

SEQ ID NO: 1821561 - RNA, 19 nt, Artificial Sequence
  Description of Artificial Sequence: Synthetic oligonucleotide
  Sense strand starting at position 2423 of SEQ ID NO: 1563586
aguguauggucacuacagu

SEQ ID NO: 1821562 - RNA, 19 nt, Artificial Sequence
  Description of Artificial Sequence: Synthetic oligonucleotide
  Antisense strand to SEQ ID NO: 1821561
acuguagugaccauacacu

SEQ ID NO: 1821563 - RNA, 19 nt, Artificial Sequence
  Description of Artificial Sequence: Synthetic oligonucleotide
  Sense strand starting at position 2424 of SEQ ID NO: 1563586
guguauggucacuacaguu

SEQ ID NO: 1821564 - RNA, 19 nt, Artificial Sequence
  Description of Artificial Sequence: Synthetic oligonucleotide
  Antisense strand to SEQ ID NO: 1821563
aacuguagugaccauacac

SEQ ID NO: 1821565 - RNA, 19 nt, Artificial Sequence
  Description of Artificial Sequence: Synthetic oligonucleotide
  Sense strand starting at position 2431 of SEQ ID NO: 1563586
gucacuacaguucgucauu

SEQ ID NO: 1821566 - RNA, 19 nt, Artificial Sequence
  Description of Artificial Sequence: Synthetic oligonucleotide
  Antisense strand to SEQ ID NO: 1821565
aaugacgaacuguagugac

SEQ ID NO: 1821567 - RNA, 19 nt, Artificial Sequence
  Description of Artificial Sequence: Synthetic oligonucleotide
  Sense strand starting at position 2432 of SEQ ID NO: 1563586
ucacuacaguucgucauua

SEQ ID NO: 1821568 - RNA, 19 nt, Artificial Sequence
  Description of Artificial Sequence: Synthetic oligonucleotide
  Antisense strand to SEQ ID NO: 1821567
uaaugacgaacuguaguga

SEQ ID NO: 1821569 - RNA, 19 nt, Artificial Sequence
  Description of Artificial Sequence: Synthetic oligonucleotide
  Sense strand starting at position 2434 of SEQ ID NO: 1563586
acuacaguucgucauuaca

SEQ ID NO: 1821570 - RNA, 19 nt, Artificial Sequence
  Description of Artificial Sequence: Synthetic oligonucleotide
  Antisense strand to SEQ ID NO: 1821569
uguaaugacgaacuguagu

SEQ ID NO: 1821571 - RNA, 19 nt, Artificial Sequence
  Description of Artificial Sequence: Synthetic oligonucleotide
  Sense strand starting at position 2561 of SEQ ID NO: 1563586
uuaacaagugcucaauagu

SEQ ID NO: 1821572 - RNA, 19 nt, Artificial Sequence
  Description of Artificial Sequence: Synthetic oligonucleotide
  Antisense strand to SEQ ID NO: 1821571
acuauugagcacuuguuaa

SEQ ID NO: 1821573 - RNA, 19 nt, Artificial Sequence
  Description of Artificial Sequence: Synthetic oligonucleotide
  Sense strand starting at position 2985 of SEQ ID NO: 1563586
aguauuggauuugaagagu

SEQ ID NO: 1821574 - RNA, 19 nt, Artificial Sequence
  Description of Artificial Sequence: Synthetic oligonucleotide
  Antisense strand to SEQ ID NO: 1821573
acucuucaaauccaauacu

SEQ ID NO: 1821575 - RNA, 19 nt, Artificial Sequence
  Description of Artificial Sequence: Synthetic oligonucleotide
  Sense strand starting at position 3002 of SEQ ID NO: 1563586
gugacuagugaauaucgua

SEQ ID NO: 1821576 - RNA, 19 nt, Artificial Sequence
  Description of Artificial Sequence: Synthetic oligonucleotide
  Antisense strand to SEQ ID NO: 1821575
uacgauauucacuagucac

SEQ ID NO: 1821577 - RNA, 19 nt, Artificial Sequence
  Description of Artificial Sequence: Synthetic oligonucleotide
  Sense strand starting at position 3009 of SEQ ID NO: 1563586
gugaauaucguagauauuc

SEQ ID NO: 1821578 - RNA, 19 nt, Artificial Sequence
  Description of Artificial Sequence: Synthetic oligonucleotide
  Antisense strand to SEQ ID NO: 1821577
gaauaucuacgauauucac

SEQ ID NO: 1821579 - RNA, 19 nt, Artificial Sequence
  Description of Artificial Sequence: Synthetic oligonucleotide
  Sense strand starting at position 3033 of SEQ ID NO: 1563586
auuguuacacuuuaguaga

SEQ ID NO: 1821580 - RNA, 19 nt, Artificial Sequence
  Description of Artificial Sequence: Synthetic oligonucleotide
  Antisense strand to SEQ ID NO: 1821579
ucuacuaaaguguaacaau

SEQ ID NO: 1821581 - RNA, 19 nt, Artificial Sequence
  Description of Artificial Sequence: Synthetic oligonucleotide
  Sense strand starting at position 3049 of SEQ ID NO: 1563586
agaagcuuuacguguuaga

SEQ ID NO: 1821582 - RNA, 19 nt, Artificial Sequence
  Description of Artificial Sequence: Synthetic oligonucleotide
  Antisense strand to SEQ ID NO: 1821581
ucuaacacguaaagcuucu

SEQ ID NO: 1821583 - RNA, 19 nt, Artificial Sequence
  Description of Artificial Sequence: Synthetic oligonucleotide
  Sense strand starting at position 3125 of SEQ ID NO: 1563586
acgauaacaugagaacaaa

SEQ ID NO: 1821584 - RNA, 19 nt, Artificial Sequence
  Description of Artificial Sequence: Synthetic oligonucleotide
  Antisense strand to SEQ ID NO: 1821583
uuuguucucauguuaucgu

SEQ ID NO: 1821585 - RNA, 19 nt, Artificial Sequence
  Description of Artificial Sequence: Synthetic oligonucleotide
  Sense strand starting at position 3139 of SEQ ID NO: 1563586
acaaauaaugugugacgaa

SEQ ID NO: 1821586 - RNA, 19 nt, Artificial Sequence
  Description of Artificial Sequence: Synthetic oligonucleotide
  Antisense strand to SEQ ID NO: 1821585
uucgucacacauuauuugu

SEQ ID NO: 1821587 - RNA, 19 nt, Artificial Sequence
  Description of Artificial Sequence: Synthetic oligonucleotide
  Sense strand starting at position 3280 of SEQ ID NO: 1563586
guuggacauuguuucuaga

SEQ ID NO: 1821588 - RNA, 19 nt, Artificial Sequence
  Description of Artificial Sequence: Synthetic oligonucleotide
  Antisense strand to SEQ ID NO: 1821587
ucuagaaacaauguccaac

SEQ ID NO: 1821589 - RNA, 19 nt, Artificial Sequence
  Description of Artificial Sequence: Synthetic oligonucleotide
  Sense strand starting at position 3338 of SEQ ID NO: 1563586
ccauuaucuuccuugguuu

SEQ ID NO: 1821590 - RNA, 19 nt, Artificial Sequence
  Description of Artificial Sequence: Synthetic oligonucleotide
  Antisense strand to SEQ ID NO: 1821589
aaaccaaggaagauaaugg

SEQ ID NO: 1821591 - RNA, 19 nt, Artificial Sequence
  Description of Artificial Sequence: Synthetic oligonucleotide
  Sense strand starting at position 3398 of SEQ ID NO: 1563586
acuguuagcuuaccacauu

SEQ ID NO: 1821592 - RNA, 19 nt, Artificial Sequence
  Description of Artificial Sequence: Synthetic oligonucleotide
  Antisense strand to SEQ ID NO: 1821591
aaugugguaagcuaacagu

SEQ ID NO: 1821593 - RNA, 19 nt, Artificial Sequence
  Description of Artificial Sequence: Synthetic oligonucleotide
  Sense strand starting at position 3401 of SEQ ID NO: 1563586
guuagcuuaccacauucua

SEQ ID NO: 1821594 - RNA, 19 nt, Artificial Sequence
  Description of Artificial Sequence: Synthetic oligonucleotide
  Antisense strand to SEQ ID NO: 1821593
uagaaugugguaagcuaac

SEQ ID NO: 1821595 - RNA, 19 nt, Artificial Sequence
  Description of Artificial Sequence: Synthetic oligonucleotide
  Sense strand starting at position 3483 of SEQ ID NO: 1563586
cguacuuuccguuucuacu

SEQ ID NO: 1821596 - RNA, 19 nt, Artificial Sequence
  Description of Artificial Sequence: Synthetic oligonucleotide
  Antisense strand to SEQ ID NO: 1821595
aguagaaacggaaaguacg

SEQ ID NO: 1821597 - RNA, 19 nt, Artificial Sequence
  Description of Artificial Sequence: Synthetic oligonucleotide
  Sense strand starting at position 3515 of SEQ ID NO: 1563586
ucuuauuuccaguguuccu

SEQ ID NO: 1821598 - RNA, 19 nt, Artificial Sequence
  Description of Artificial Sequence: Synthetic oligonucleotide
  Antisense strand to SEQ ID NO: 1821597
aggaacacuggaaauaaga

SEQ ID NO: 1821599 - RNA, 19 nt, Artificial Sequence
  Description of Artificial Sequence: Synthetic oligonucleotide
  Sense strand starting at position 3520 of SEQ ID NO: 1563586
uuuccaguguuccuaagca

SEQ ID NO: 1821600 - RNA, 19 nt, Artificial Sequence
  Description of Artificial Sequence: Synthetic oligonucleotide
  Antisense strand to SEQ ID NO: 1821599
ugcuuaggaacacuggaaa

SEQ ID NO: 1821601 - RNA, 19 nt, Artificial Sequence
  Description of Artificial Sequence: Synthetic oligonucleotide
  Sense strand starting at position 3574 of SEQ ID NO: 1563586
ccaauaauucuugaaacgu

SEQ ID NO: 1821602 - RNA, 19 nt, Artificial Sequence
  Description of Artificial Sequence: Synthetic oligonucleotide
  Antisense strand to SEQ ID NO: 1821601
acguuucaagaauuauugg

SEQ ID NO: 1821603 - RNA, 19 nt, Artificial Sequence
  Description of Artificial Sequence: Synthetic oligonucleotide
  Sense strand starting at position 3639 of SEQ ID NO: 1563586
ugcuguuuaguuuaucaaa

SEQ ID NO: 1821604 - RNA, 19 nt, Artificial Sequence
  Description of Artificial Sequence: Synthetic oligonucleotide
  Antisense strand to SEQ ID NO: 1821603
uuugauaaacuaaacagca

SEQ ID NO: 1821605 - RNA, 19 nt, Artificial Sequence
  Description of Artificial Sequence: Synthetic oligonucleotide
  Sense strand starting at position 3641 of SEQ ID NO: 1563586
cuguuuaguuuaucaaaga

SEQ ID NO: 1821606 - RNA, 19 nt, Artificial Sequence
  Description of Artificial Sequence: Synthetic oligonucleotide
  Antisense strand to SEQ ID NO: 1821605
ucuuugauaaacuaaacag

SEQ ID NO: 1821607 - RNA, 19 nt, Artificial Sequence
  Description of Artificial Sequence: Synthetic oligonucleotide
  Sense strand starting at position 3733 of SEQ ID NO: 1563586
cgaauuugaugagaggauu

SEQ ID NO: 1821608 - RNA, 19 nt, Artificial Sequence
  Description of Artificial Sequence: Synthetic oligonucleotide
  Antisense strand to SEQ ID NO: 1821607
aauccucucaucaaauucg

SEQ ID NO: 1821609 - RNA, 19 nt, Artificial Sequence
  Description of Artificial Sequence: Synthetic oligonucleotide
  Sense strand starting at position 3807 of SEQ ID NO: 1563586
ggagcugugaaguaucuga

SEQ ID NO: 1821610 - RNA, 19 nt, Artificial Sequence
  Description of Artificial Sequence: Synthetic oligonucleotide
  Antisense strand to SEQ ID NO: 1821609
ucagauacuucacagcucc

SEQ ID NO: 1821611 - RNA, 19 nt, Artificial Sequence
  Description of Artificial Sequence: Synthetic oligonucleotide
  Sense strand starting at position 3895 of SEQ ID NO: 1563586
acuacugagucagagacaa

SEQ ID NO: 1821612 - RNA, 19 nt, Artificial Sequence
  Description of Artificial Sequence: Synthetic oligonucleotide
  Antisense strand to SEQ ID NO: 1821611
uugucucugacucaguagu

SEQ ID NO: 1821613 - RNA, 19 nt, Artificial Sequence
  Description of Artificial Sequence: Synthetic oligonucleotide
  Sense strand starting at position 123 of SEQ ID NO: 1563587
guggcagucuacccagaaa

SEQ ID NO: 1821614 - RNA, 19 nt, Artificial Sequence
  Description of Artificial Sequence: Synthetic oligonucleotide
  Antisense strand to SEQ ID NO: 1821613
uuucuggguagacugccac

SEQ ID NO: 1821615 - RNA, 19 nt, Artificial Sequence
  Description of Artificial Sequence: Synthetic oligonucleotide
  Sense strand starting at position 126 of SEQ ID NO: 1563587
gcagucuacccagaaauag

SEQ ID NO: 1821616 - RNA, 19 nt, Artificial Sequence
  Description of Artificial Sequence: Synthetic oligonucleotide
  Antisense strand to SEQ ID NO: 1821615
cuauuucuggguagacugc

SEQ ID NO: 1821617 - RNA, 19 nt, Artificial Sequence
  Description of Artificial Sequence: Synthetic oligonucleotide
  Sense strand starting at position 260 of SEQ ID NO: 1563587
uucuguacuugguuauaug

SEQ ID NO: 1821618 - RNA, 19 nt, Artificial Sequence
  Description of Artificial Sequence: Synthetic oligonucleotide
  Antisense strand to SEQ ID NO: 1821617
cauauaaccaaguacagaa

SEQ ID NO: 1821619 - RNA, 19 nt, Artificial Sequence
  Description of Artificial Sequence: Synthetic oligonucleotide
  Sense strand starting at position 269 of SEQ ID NO: 1563587
ugguuauaugcugaccuca

SEQ ID NO: 1821620 - RNA, 19 nt, Artificial Sequence
  Description of Artificial Sequence: Synthetic oligonucleotide
  Antisense strand to SEQ ID NO: 1821619
ugaggucagcauauaacca

SEQ ID NO: 1821621 - RNA, 19 nt, Artificial Sequence
  Description of Artificial Sequence: Synthetic oligonucleotide
  Sense strand starting at position 375 of SEQ ID NO: 1563587
cagaguauccuuugagaua

SEQ ID NO: 1821622 - RNA, 19 nt, Artificial Sequence
  Description of Artificial Sequence: Synthetic oligonucleotide
  Antisense strand to SEQ ID NO: 1821621
uaucucaaaggauacucug

SEQ ID NO: 1821623 - RNA, 19 nt, Artificial Sequence
  Description of Artificial Sequence: Synthetic oligonucleotide
  Sense strand starting at position 386 of SEQ ID NO: 1563587
uugagauauucucucacag

SEQ ID NO: 1821624 - RNA, 19 nt, Artificial Sequence
  Description of Artificial Sequence: Synthetic oligonucleotide
  Antisense strand to SEQ ID NO: 1821623
cugugagagaauaucucaa

SEQ ID NO: 1821625 - RNA, 19 nt, Artificial Sequence
  Description of Artificial Sequence: Synthetic oligonucleotide
  Sense strand starting at position 432 of SEQ ID NO: 1563587
ccaacuuugugcucuaaag

SEQ ID NO: 1821626 - RNA, 19 nt, Artificial Sequence
  Description of Artificial Sequence: Synthetic oligonucleotide
  Antisense strand to SEQ ID NO: 1821625
cuuuagagcacaaaguugg

SEQ ID NO: 1821627 - RNA, 19 nt, Artificial Sequence
  Description of Artificial Sequence: Synthetic oligonucleotide
  Sense strand starting at position 594 of SEQ ID NO: 1563587
uucuucuuagugcaugaga

SEQ ID NO: 1821628 - RNA, 19 nt, Artificial Sequence
  Description of Artificial Sequence: Synthetic oligonucleotide
  Antisense strand to SEQ ID NO: 1821627
ucucaugcacuaagaagaa

SEQ ID NO: 1821629 - RNA, 19 nt, Artificial Sequence
  Description of Artificial Sequence: Synthetic oligonucleotide
  Sense strand starting at position 596 of SEQ ID NO: 1563587
cuucuuagugcaugagauc

SEQ ID NO: 1821630 - RNA, 19 nt, Artificial Sequence
  Description of Artificial Sequence: Synthetic oligonucleotide
  Antisense strand to SEQ ID NO: 1821629
gaucucaugcacuaagaag

SEQ ID NO: 1821631 - RNA, 19 nt, Artificial Sequence
  Description of Artificial Sequence: Synthetic oligonucleotide
  Sense strand starting at position 597 of SEQ ID NO: 1563587
uucuuagugcaugagauca

SEQ ID NO: 1821632 - RNA, 19 nt, Artificial Sequence
  Description of Artificial Sequence: Synthetic oligonucleotide
  Antisense strand to SEQ ID NO: 1821631
ugaucucaugcacuaagaa

SEQ ID NO: 1821633 - RNA, 19 nt, Artificial Sequence
  Description of Artificial Sequence: Synthetic oligonucleotide
  Sense strand starting at position 679 of SEQ ID NO: 1563587
agagcagugcuagaacagu

SEQ ID NO: 1821634 - RNA, 19 nt, Artificial Sequence
  Description of Artificial Sequence: Synthetic oligonucleotide
  Antisense strand to SEQ ID NO: 1821633
acuguucuagcacugcucu

SEQ ID NO: 1821635 - RNA, 19 nt, Artificial Sequence
  Description of Artificial Sequence: Synthetic oligonucleotide
  Sense strand starting at position 843 of SEQ ID NO: 1563587
uaaagacuucucuguggga

SEQ ID NO: 1821636 - RNA, 19 nt, Artificial Sequence
  Description of Artificial Sequence: Synthetic oligonucleotide
  Antisense strand to SEQ ID NO: 1821635
ucccacagagaagucuuua

SEQ ID NO: 1821637 - RNA, 19 nt, Artificial Sequence
  Description of Artificial Sequence: Synthetic oligonucleotide
  Sense strand starting at position 844 of SEQ ID NO: 1563587
aaagacuucucugugggaa

SEQ ID NO: 1821638 - RNA, 19 nt, Artificial Sequence
  Description of Artificial Sequence: Synthetic oligonucleotide
  Antisense strand to SEQ ID NO: 1821637
uucccacagagaagucuuu

SEQ ID NO: 1821639 - RNA, 19 nt, Artificial Sequence
  Description of Artificial Sequence: Synthetic oligonucleotide
  Sense strand starting at position 845 of SEQ ID NO: 1563587
aagacuucucugugggaau

SEQ ID NO: 1821640 - RNA, 19 nt, Artificial Sequence
  Description of Artificial Sequence: Synthetic oligonucleotide
  Antisense strand to SEQ ID NO: 1821639
auucccacagagaagucuu

SEQ ID NO: 1821641 - RNA, 19 nt, Artificial Sequence
  Description of Artificial Sequence: Synthetic oligonucleotide
  Sense strand starting at position 847 of SEQ ID NO: 1563587
gacuucucugugggaauaa

SEQ ID NO: 1821642 - RNA, 19 nt, Artificial Sequence
  Description of Artificial Sequence: Synthetic oligonucleotide
  Antisense strand to SEQ ID NO: 1821641
uuauucccacagagaaguc

SEQ ID NO: 1821643 - RNA, 19 nt, Artificial Sequence
  Description of Artificial Sequence: Synthetic oligonucleotide
  Sense strand starting at position 982 of SEQ ID NO: 1563587
ccgaguguggcauauacua

SEQ ID NO: 1821644 - RNA, 19 nt, Artificial Sequence
  Description of Artificial Sequence: Synthetic oligonucleotide
  Antisense strand to SEQ ID NO: 1821643
uaguauaugccacacucgg

SEQ ID NO: 1821645 - RNA, 19 nt, Artificial Sequence
  Description of Artificial Sequence: Synthetic oligonucleotide
  Sense strand starting at position 989 of SEQ ID NO: 1563587
uggcauauacuauguacua

SEQ ID NO: 1821646 - RNA, 19 nt, Artificial Sequence
  Description of Artificial Sequence: Synthetic oligonucleotide
  Antisense strand to SEQ ID NO: 1821645
uaguacauaguauaugcca

SEQ ID NO: 1821647 - RNA, 19 nt, Artificial Sequence
  Description of Artificial Sequence: Synthetic oligonucleotide
  Sense strand starting at position 990 of SEQ ID NO: 1563587
ggcauauacuauguacuaa

SEQ ID NO: 1821648 - RNA, 19 nt, Artificial Sequence
  Description of Artificial Sequence: Synthetic oligonucleotide
  Antisense strand to SEQ ID NO: 1821647
uuaguacauaguauaugcc

SEQ ID NO: 1821649 - RNA, 19 nt, Artificial Sequence
  Description of Artificial Sequence: Synthetic oligonucleotide
  Sense strand starting at position 1005 of SEQ ID NO: 1563587
cuaaguaaauguuugucua

SEQ ID NO: 1821650 - RNA, 19 nt, Artificial Sequence
  Description of Artificial Sequence: Synthetic oligonucleotide
  Antisense strand to SEQ ID NO: 1821649
uagacaaacauuuacuuag

SEQ ID NO: 1821651 - RNA, 19 nt, Artificial Sequence
  Description of Artificial Sequence: Synthetic oligonucleotide
  Sense strand starting at position 1008 of SEQ ID NO: 1563587
aguaaauguuugucuaacu

SEQ ID NO: 1821652 - RNA, 19 nt, Artificial Sequence
  Description of Artificial Sequence: Synthetic oligonucleotide
  Antisense strand to SEQ ID NO: 1821651
aguuagacaaacauuuacu

SEQ ID NO: 1821653 - RNA, 19 nt, Artificial Sequence
  Description of Artificial Sequence: Synthetic oligonucleotide
  Sense strand starting at position 1009 of SEQ ID NO: 1563587
guaaauguuugucuaacug

SEQ ID NO: 1821654 - RNA, 19 nt, Artificial Sequence
  Description of Artificial Sequence: Synthetic oligonucleotide
  Antisense strand to SEQ ID NO: 1821653
caguuagacaaacauuuac

SEQ ID NO: 1821655 - RNA, 19 nt, Artificial Sequence
  Description of Artificial Sequence: Synthetic oligonucleotide
  Sense strand starting at position 1013 of SEQ ID NO: 1563587
auguuugucuaacuggaga

SEQ ID NO: 1821656 - RNA, 19 nt, Artificial Sequence
  Description of Artificial Sequence: Synthetic oligonucleotide
  Antisense strand to SEQ ID NO: 1821655
ucuccaguuagacaaacau

SEQ ID NO: 1821657 - RNA, 19 nt, Artificial Sequence
  Description of Artificial Sequence: Synthetic oligonucleotide
  Sense strand starting at position 1015 of SEQ ID NO: 1563587
guuugucuaacuggagauu

SEQ ID NO: 1821658 - RNA, 19 nt, Artificial Sequence
  Description of Artificial Sequence: Synthetic oligonucleotide
  Antisense strand to SEQ ID NO: 1821657
aaucuccaguuagacaaac

SEQ ID NO: 1821659 - RNA, 19 nt, Artificial Sequence
  Description of Artificial Sequence: Synthetic oligonucleotide
  Sense strand starting at position 1129 of SEQ ID NO: 1563587
guagaugguguugggaaga

SEQ ID NO: 1821660 - RNA, 19 nt, Artificial Sequence
  Description of Artificial Sequence: Synthetic oligonucleotide
  Antisense strand to SEQ ID NO: 1821659
ucuucccaacaccaucuac

SEQ ID NO: 1821661 - RNA, 19 nt, Artificial Sequence
  Description of Artificial Sequence: Synthetic oligonucleotide
  Sense strand starting at position 2536 of SEQ ID NO: 1563587
uucagagucguguagguga

SEQ ID NO: 1821662 - RNA, 19 nt, Artificial Sequence
  Description of Artificial Sequence: Synthetic oligonucleotide
  Antisense strand to SEQ ID NO: 1821661
ucaccuacacgacucugaa

SEQ ID NO: 1821663 - RNA, 19 nt, Artificial Sequence
  Description of Artificial Sequence: Synthetic oligonucleotide
  Sense strand starting at position 2554 of SEQ ID NO: 1563587
accagauugagaggugcua

SEQ ID NO: 1821664 - RNA, 19 nt, Artificial Sequence
  Description of Artificial Sequence: Synthetic oligonucleotide
  Antisense strand to SEQ ID NO: 1821663
uagcaccucucaaucuggu

SEQ ID NO: 1821665 - RNA, 19 nt, Artificial Sequence
  Description of Artificial Sequence: Synthetic oligonucleotide
  Sense strand starting at position 2871 of SEQ ID NO: 1563587
caccgauauucuccagguu

SEQ ID NO: 1821666 - RNA, 19 nt, Artificial Sequence
  Description of Artificial Sequence: Synthetic oligonucleotide
  Antisense strand to SEQ ID NO: 1821665
aaccuggagaauaucggug

SEQ ID NO: 1821667 - RNA, 19 nt, Artificial Sequence
  Description of Artificial Sequence: Synthetic oligonucleotide
  Sense strand starting at position 2923 of SEQ ID NO: 1563587
gguccaaacucauuaucug

SEQ ID NO: 1821668 - RNA, 19 nt, Artificial Sequence
  Description of Artificial Sequence: Synthetic oligonucleotide
  Antisense strand to SEQ ID NO: 1821667
cagauaaugaguuuggacc

SEQ ID NO: 1821669 - RNA, 19 nt, Artificial Sequence
  Description of Artificial Sequence: Synthetic oligonucleotide
  Sense strand starting at position 2924 of SEQ ID NO: 1563587
guccaaacucauuaucugu

SEQ ID NO: 1821670 - RNA, 19 nt, Artificial Sequence
  Description of Artificial Sequence: Synthetic oligonucleotide
  Antisense strand to SEQ ID NO: 1821669
acagauaaugaguuuggac

SEQ ID NO: 1821671 - RNA, 19 nt, Artificial Sequence
  Description of Artificial Sequence: Synthetic oligonucleotide
  Sense strand starting at position 2990 of SEQ ID NO: 1563587
gacuuaugguaguccugau

SEQ ID NO: 1821672 - RNA, 19 nt, Artificial Sequence
  Description of Artificial Sequence: Synthetic oligonucleotide
  Antisense strand to SEQ ID NO: 1821671
aucaggacuaccauaaguc

SEQ ID NO: 1821673 - RNA, 19 nt, Artificial Sequence
  Description of Artificial Sequence: Synthetic oligonucleotide
  Sense strand starting at position 2994 of SEQ ID NO: 1563587
uaugguaguccugaucuac

SEQ ID NO: 1821674 - RNA, 19 nt, Artificial Sequence
  Description of Artificial Sequence: Synthetic oligonucleotide
  Antisense strand to SEQ ID NO: 1821673
guagaucaggacuaccaua

SEQ ID NO: 1821675 - RNA, 19 nt, Artificial Sequence
  Description of Artificial Sequence: Synthetic oligonucleotide
  Sense strand starting at position 3035 of SEQ ID NO: 1563587
gcagcuuagagguaauuac

SEQ ID NO: 1821676 - RNA, 19 nt, Artificial Sequence
  Description of Artificial Sequence: Synthetic oligonucleotide
  Antisense strand to SEQ ID NO: 1821675
guaauuaccucuaagcugc

SEQ ID NO: 1821677 - RNA, 19 nt, Artificial Sequence
  Description of Artificial Sequence: Synthetic oligonucleotide
  Sense strand starting at position 3118 of SEQ ID NO: 1563587
gcauuuaaauuguaggauc

SEQ ID NO: 1821678 - RNA, 19 nt, Artificial Sequence
  Description of Artificial Sequence: Synthetic oligonucleotide
  Antisense strand to SEQ ID NO: 1821677
gauccuacaauuuaaaugc

SEQ ID NO: 1821679 - RNA, 19 nt, Artificial Sequence
  Description of Artificial Sequence: Synthetic oligonucleotide
  Sense strand starting at position 3428 of SEQ ID NO: 1563587
ggugcaguaucaucuuaau

SEQ ID NO: 1821680 - RNA, 19 nt, Artificial Sequence
  Description of Artificial Sequence: Synthetic oligonucleotide
  Antisense strand to SEQ ID NO: 1821679
auuaagaugauacugcacc

SEQ ID NO: 1821681 - RNA, 19 nt, Artificial Sequence
  Description of Artificial Sequence: Synthetic oligonucleotide
  Sense strand starting at position 3434 of SEQ ID NO: 1563587
guaucaucuuaauuggauc

SEQ ID NO: 1821682 - RNA, 19 nt, Artificial Sequence
  Description of Artificial Sequence: Synthetic oligonucleotide
  Antisense strand to SEQ ID NO: 1821681
gauccaauuaagaugauac

SEQ ID NO: 1821683 - RNA, 19 nt, Artificial Sequence
  Description of Artificial Sequence: Synthetic oligonucleotide
  Sense strand starting at position 3464 of SEQ ID NO: 1563587
gucuuuaccucacuacagu

SEQ ID NO: 1821684 - RNA, 19 nt, Artificial Sequence
  Description of Artificial Sequence: Synthetic oligonucleotide
  Antisense strand to SEQ ID NO: 1821683
acuguagugagguaaagac

SEQ ID NO: 1821685 - RNA, 19 nt, Artificial Sequence
  Description of Artificial Sequence: Synthetic oligonucleotide
  Sense strand starting at position 3516 of SEQ ID NO: 1563587
uaagaaacaugucugguaa

SEQ ID NO: 1821686 - RNA, 19 nt, Artificial Sequence
  Description of Artificial Sequence: Synthetic oligonucleotide
  Antisense strand to SEQ ID NO: 1821685
uuaccagacauguuucuua

SEQ ID NO: 1821687 - RNA, 19 nt, Artificial Sequence
  Description of Artificial Sequence: Synthetic oligonucleotide
  Sense strand starting at position 3579 of SEQ ID NO: 1563587
ugcaaauugcuuuacgaac

SEQ ID NO: 1821688 - RNA, 19 nt, Artificial Sequence
  Description of Artificial Sequence: Synthetic oligonucleotide
  Antisense strand to SEQ ID NO: 1821687
guucguaaagcaauuugca

SEQ ID NO: 1821689 - RNA, 19 nt, Artificial Sequence
  Description of Artificial Sequence: Synthetic oligonucleotide
  Sense strand starting at position 3585 of SEQ ID NO: 1563587
uugcuuuacgaacauuagu

SEQ ID NO: 1821690 - RNA, 19 nt, Artificial Sequence
  Description of Artificial Sequence: Synthetic oligonucleotide
  Antisense strand to SEQ ID NO: 1821689
acuaauguucguaaagcaa

SEQ ID NO: 1821691 - RNA, 19 nt, Artificial Sequence
  Description of Artificial Sequence: Synthetic oligonucleotide
  Sense strand starting at position 3718 of SEQ ID NO: 1563587
gaggcagaacugggauuau

SEQ ID NO: 1821692 - RNA, 19 nt, Artificial Sequence
  Description of Artificial Sequence: Synthetic oligonucleotide
  Antisense strand to SEQ ID NO: 1821691
auaaucccaguucugccuc

SEQ ID NO: 1821693 - RNA, 19 nt, Artificial Sequence
  Description of Artificial Sequence: Synthetic oligonucleotide
  Sense strand starting at position 45 of SEQ ID NO: 1563588
gccaacauaggugaacauu

SEQ ID NO: 1821694 - RNA, 19 nt, Artificial Sequence
  Description of Artificial Sequence: Synthetic oligonucleotide
  Antisense strand to SEQ ID NO: 1821693
aauguucaccuauguuggc

SEQ ID NO: 1821695 - RNA, 19 nt, Artificial Sequence
  Description of Artificial Sequence: Synthetic oligonucleotide
  Sense strand starting at position 85 of SEQ ID NO: 1563588
aggacuuucuaagcacaaa

SEQ ID NO: 1821696 - RNA, 19 nt, Artificial Sequence
  Description of Artificial Sequence: Synthetic oligonucleotide
  Antisense strand to SEQ ID NO: 1821695
uuugugcuuagaaaguccu

SEQ ID NO: 1821697 - RNA, 19 nt, Artificial Sequence
  Description of Artificial Sequence: Synthetic oligonucleotide
  Sense strand starting at position 233 of SEQ ID NO: 1563588
auauguaauggcugaugaa

SEQ ID NO: 1821698 - RNA, 19 nt, Artificial Sequence
  Description of Artificial Sequence: Synthetic oligonucleotide
  Antisense strand to SEQ ID NO: 1821697
uucaucagccauuacauau

SEQ ID NO: 1821699 - RNA, 19 nt, Artificial Sequence
  Description of Artificial Sequence: Synthetic oligonucleotide
  Sense strand starting at position 270 of SEQ ID NO: 1563588
aauaaagagcuguggcaaa

SEQ ID NO: 1821700 - RNA, 19 nt, Artificial Sequence
  Description of Artificial Sequence: Synthetic oligonucleotide
  Antisense strand to SEQ ID NO: 1821699
uuugccacagcucuuuauu

SEQ ID NO: 1821701 - RNA, 19 nt, Artificial Sequence
  Description of Artificial Sequence: Synthetic oligonucleotide
  Sense strand starting at position 439 of SEQ ID NO: 1563588
accugucauguugggaaau

SEQ ID NO: 1821702 - RNA, 19 nt, Artificial Sequence
  Description of Artificial Sequence: Synthetic oligonucleotide
  Antisense strand to SEQ ID NO: 1821701
auuucccaacaugacaggu

SEQ ID NO: 1821703 - RNA, 19 nt, Artificial Sequence
  Description of Artificial Sequence: Synthetic oligonucleotide
  Sense strand starting at position 613 of SEQ ID NO: 1563588
agcagucagggauguuuau

SEQ ID NO: 1821704 - RNA, 19 nt, Artificial Sequence
  Description of Artificial Sequence: Synthetic oligonucleotide
  Antisense strand to SEQ ID NO: 1821703
auaaacaucccugacugcu

SEQ ID NO: 1821705 - RNA, 19 nt, Artificial Sequence
  Description of Artificial Sequence: Synthetic oligonucleotide
  Sense strand starting at position 707 of SEQ ID NO: 1563588
aggacagucuuguccauca

SEQ ID NO: 1821706 - RNA, 19 nt, Artificial Sequence
  Description of Artificial Sequence: Synthetic oligonucleotide
  Antisense strand to SEQ ID NO: 1821705
ugauggacaagacuguccu

SEQ ID NO: 1821707 - RNA, 19 nt, Artificial Sequence
  Description of Artificial Sequence: Synthetic oligonucleotide
  Sense strand starting at position 709 of SEQ ID NO: 1563588
gacagucuuguccaucaug

SEQ ID NO: 1821708 - RNA, 19 nt, Artificial Sequence
  Description of Artificial Sequence: Synthetic oligonucleotide
  Antisense strand to SEQ ID NO: 1821707
caugauggacaagacuguc

SEQ ID NO: 1821709 - RNA, 19 nt, Artificial Sequence
  Description of Artificial Sequence: Synthetic oligonucleotide
  Sense strand starting at position 712 of SEQ ID NO: 1563588
agucuuguccaucaugaaa

SEQ ID NO: 1821710 - RNA, 19 nt, Artificial Sequence
  Description of Artificial Sequence: Synthetic oligonucleotide
  Antisense strand to SEQ ID NO: 1821709
uuucaugauggacaagacu

SEQ ID NO: 1821711 - RNA, 19 nt, Artificial Sequence
  Description of Artificial Sequence: Synthetic oligonucleotide
  Sense strand starting at position 774 of SEQ ID NO: 1563588
cuguuaauugaauaaagca

SEQ ID NO: 1821712 - RNA, 19 nt, Artificial Sequence
  Description of Artificial Sequence: Synthetic oligonucleotide
  Antisense strand to SEQ ID NO: 1821711
ugcuuuauucaauuaacag

SEQ ID NO: 1821713 - RNA, 19 nt, Artificial Sequence
  Description of Artificial Sequence: Synthetic oligonucleotide
  Sense strand starting at position 809 of SEQ ID NO: 1563588
auagcaugauucuaauuug

SEQ ID NO: 1821714 - RNA, 19 nt, Artificial Sequence
  Description of Artificial Sequence: Synthetic oligonucleotide
  Antisense strand to SEQ ID NO: 1821713
caaauuagaaucaugcuau

SEQ ID NO: 1821715 - RNA, 19 nt, Artificial Sequence
  Description of Artificial Sequence: Synthetic oligonucleotide
  Sense strand starting at position 820 of SEQ ID NO: 1563588
cuaauuugguuacagaaau

SEQ ID NO: 1821716 - RNA, 19 nt, Artificial Sequence
  Description of Artificial Sequence: Synthetic oligonucleotide
  Antisense strand to SEQ ID NO: 1821715
auuucuguaaccaaauuag

SEQ ID NO: 1821717 - RNA, 19 nt, Artificial Sequence
  Description of Artificial Sequence: Synthetic oligonucleotide
  Sense strand starting at position 849 of SEQ ID NO: 1563588
aacacuucgugagcacuua

SEQ ID NO: 1821718 - RNA, 19 nt, Artificial Sequence
  Description of Artificial Sequence: Synthetic oligonucleotide
  Antisense strand to SEQ ID NO: 1821717
uaagugcucacgaaguguu

SEQ ID NO: 1821719 - RNA, 19 nt, Artificial Sequence
  Description of Artificial Sequence: Synthetic oligonucleotide
  Sense strand starting at position 990 of SEQ ID NO: 1563588
cuaaacuacgguugacaau

SEQ ID NO: 1821720 - RNA, 19 nt, Artificial Sequence
  Description of Artificial Sequence: Synthetic oligonucleotide
  Antisense strand to SEQ ID NO: 1821719
auugucaaccguaguuuag

SEQ ID NO: 1821721 - RNA, 19 nt, Artificial Sequence
  Description of Artificial Sequence: Synthetic oligonucleotide
  Sense strand starting at position 1285 of SEQ ID NO: 1563588
gauggaguguggucaagau

SEQ ID NO: 1821722 - RNA, 19 nt, Artificial Sequence
  Description of Artificial Sequence: Synthetic oligonucleotide
  Antisense strand to SEQ ID NO: 1821721
aucuugaccacacuccauc

SEQ ID NO: 1821723 - RNA, 19 nt, Artificial Sequence
  Description of Artificial Sequence: Synthetic oligonucleotide
  Sense strand starting at position 1697 of SEQ ID NO: 1563588
gaccuuaccuggcuggaau

SEQ ID NO: 1821724 - RNA, 19 nt, Artificial Sequence
  Description of Artificial Sequence: Synthetic oligonucleotide
  Antisense strand to SEQ ID NO: 1821723
auuccagccagguaagguc

SEQ ID NO: 1821725 - RNA, 19 nt, Artificial Sequence
  Description of Artificial Sequence: Synthetic oligonucleotide
  Sense strand starting at position 1825 of SEQ ID NO: 1563588
ggacacucaccuuggugaa

SEQ ID NO: 1821726 - RNA, 19 nt, Artificial Sequence
  Description of Artificial Sequence: Synthetic oligonucleotide
  Antisense strand to SEQ ID NO: 1821725
uucaccaaggugagugucc

SEQ ID NO: 1821727 - RNA, 19 nt, Artificial Sequence
  Description of Artificial Sequence: Synthetic oligonucleotide
  Sense strand starting at position 1838 of SEQ ID NO: 1563588
ggugaaguggacugacaga

SEQ ID NO: 1821728 - RNA, 19 nt, Artificial Sequence
  Description of Artificial Sequence: Synthetic oligonucleotide
  Antisense strand to SEQ ID NO: 1821727
ucugucaguccacuucacc

SEQ ID NO: 1821729 - RNA, 19 nt, Artificial Sequence
  Description of Artificial Sequence: Synthetic oligonucleotide
  Sense strand starting at position 2124 of SEQ ID NO: 1563588
cuuuacgagucaucugaaa

SEQ ID NO: 1821730 - RNA, 19 nt, Artificial Sequence
  Description of Artificial Sequence: Synthetic oligonucleotide
  Antisense strand to SEQ ID NO: 1821729
uuucagaugacucguaaag

SEQ ID NO: 1821731 - RNA, 19 nt, Artificial Sequence
  Description of Artificial Sequence: Synthetic oligonucleotide
  Sense strand starting at position 2304 of SEQ ID NO: 1563588
gacaccauucugugaguga

SEQ ID NO: 1821732 - RNA, 19 nt, Artificial Sequence
  Description of Artificial Sequence: Synthetic oligonucleotide
  Antisense strand to SEQ ID NO: 1821731
ucacucacagaaugguguc

SEQ ID NO: 1821733 - RNA, 19 nt, Artificial Sequence
  Description of Artificial Sequence: Synthetic oligonucleotide
  Sense strand starting at position 2313 of SEQ ID NO: 1563588
cugugagugagaggauauu

SEQ ID NO: 1821734 - RNA, 19 nt, Artificial Sequence
  Description of Artificial Sequence: Synthetic oligonucleotide
  Antisense strand to SEQ ID NO: 1821733
aauauccucucacucacag

SEQ ID NO: 1821735 - RNA, 19 nt, Artificial Sequence
  Description of Artificial Sequence: Synthetic oligonucleotide
  Sense strand starting at position 2365 of SEQ ID NO: 1563588
gcucuauguguggauggga

SEQ ID NO: 1821736 - RNA, 19 nt, Artificial Sequence
  Description of Artificial Sequence: Synthetic oligonucleotide
  Antisense strand to SEQ ID NO: 1821735
ucccauccacacauagagc

SEQ ID NO: 1821737 - RNA, 19 nt, Artificial Sequence
  Description of Artificial Sequence: Synthetic oligonucleotide
  Sense strand starting at position 2368 of SEQ ID NO: 1563588
cuauguguggaugggaaau

SEQ ID NO: 1821738 - RNA, 19 nt, Artificial Sequence
  Description of Artificial Sequence: Synthetic oligonucleotide
  Antisense strand to SEQ ID NO: 1821737
auuucccauccacacauag

SEQ ID NO: 1821739 - RNA, 19 nt, Artificial Sequence
  Description of Artificial Sequence: Synthetic oligonucleotide
  Sense strand starting at position 2442 of SEQ ID NO: 1563588
gccucaguuucccuauaga

SEQ ID NO: 1821740 - RNA, 19 nt, Artificial Sequence
  Description of Artificial Sequence: Synthetic oligonucleotide
  Antisense strand to SEQ ID NO: 1821739
ucuauagggaaacugaggc

SEQ ID NO: 1821741 - RNA, 19 nt, Artificial Sequence
  Description of Artificial Sequence: Synthetic oligonucleotide
  Sense strand starting at position 2611 of SEQ ID NO: 1563588
acuugaagagucggagaau

SEQ ID NO: 1821742 - RNA, 19 nt, Artificial Sequence
  Description of Artificial Sequence: Synthetic oligonucleotide
  Antisense strand to SEQ ID NO: 1821741
auucuccgacucuucaagu

SEQ ID NO: 1821743 - RNA, 19 nt, Artificial Sequence
  Description of Artificial Sequence: Synthetic oligonucleotide
  Sense strand starting at position 2924 of SEQ ID NO: 1563588
ccaucaucucaguagcuga

SEQ ID NO: 1821744 - RNA, 19 nt, Artificial Sequence
  Description of Artificial Sequence: Synthetic oligonucleotide
  Antisense strand to SEQ ID NO: 1821743
ucagcuacugagaugaugg

SEQ ID NO: 1821745 - RNA, 19 nt, Artificial Sequence
  Description of Artificial Sequence: Synthetic oligonucleotide
  Sense strand starting at position 2937 of SEQ ID NO: 1563588
agcugauguuuaucuugaa

SEQ ID NO: 1821746 - RNA, 19 nt, Artificial Sequence
  Description of Artificial Sequence: Synthetic oligonucleotide
  Antisense strand to SEQ ID NO: 1821745
uucaagauaaacaucagcu

SEQ ID NO: 1821747 - RNA, 19 nt, Artificial Sequence
  Description of Artificial Sequence: Synthetic oligonucleotide
  Sense strand starting at position 2938 of SEQ ID NO: 1563588
gcugauguuuaucuugaau

SEQ ID NO: 1821748 - RNA, 19 nt, Artificial Sequence
  Description of Artificial Sequence: Synthetic oligonucleotide
  Antisense strand to SEQ ID NO: 1821747
auucaagauaaacaucagc

SEQ ID NO: 1821749 - RNA, 19 nt, Artificial Sequence
  Description of Artificial Sequence: Synthetic oligonucleotide
  Sense strand starting at position 2977 of SEQ ID NO: 1563588
ugcugaacaugucucacaa

SEQ ID NO: 1821750 - RNA, 19 nt, Artificial Sequence
  Description of Artificial Sequence: Synthetic oligonucleotide
  Antisense strand to SEQ ID NO: 1821749
uugugagacauguucagca

SEQ ID NO: 1821751 - RNA, 19 nt, Artificial Sequence
  Description of Artificial Sequence: Synthetic oligonucleotide
  Sense strand starting at position 2988 of SEQ ID NO: 1563588
ucucacaagugaucauguu

SEQ ID NO: 1821752 - RNA, 19 nt, Artificial Sequence
  Description of Artificial Sequence: Synthetic oligonucleotide
  Antisense strand to SEQ ID NO: 1821751
aacaugaucacuugugaga

SEQ ID NO: 1821753 - RNA, 19 nt, Artificial Sequence
  Description of Artificial Sequence: Synthetic oligonucleotide
  Sense strand starting at position 3079 of SEQ ID NO: 1563588
agguauaaguagucaagca

SEQ ID NO: 1821754 - RNA, 19 nt, Artificial Sequence
  Description of Artificial Sequence: Synthetic oligonucleotide
  Antisense strand to SEQ ID NO: 1821753
ugcuugacuacuuauaccu

SEQ ID NO: 1821755 - RNA, 19 nt, Artificial Sequence
  Description of Artificial Sequence: Synthetic oligonucleotide
  Sense strand starting at position 3080 of SEQ ID NO: 1563588
gguauaaguagucaagcaa

SEQ ID NO: 1821756 - RNA, 19 nt, Artificial Sequence
  Description of Artificial Sequence: Synthetic oligonucleotide
  Antisense strand to SEQ ID NO: 1821755
uugcuugacuacuuauacc

SEQ ID NO: 1821757 - RNA, 19 nt, Artificial Sequence
  Description of Artificial Sequence: Synthetic oligonucleotide
  Sense strand starting at position 3198 of SEQ ID NO: 1563588
uaaauucuaggaugugaug

SEQ ID NO: 1821758 - RNA, 19 nt, Artificial Sequence
  Description of Artificial Sequence: Synthetic oligonucleotide
  Antisense strand to SEQ ID NO: 1821757
caucacauccuagaauuua

SEQ ID NO: 1821759 - RNA, 19 nt, Artificial Sequence
  Description of Artificial Sequence: Synthetic oligonucleotide
  Sense strand starting at position 3234 of SEQ ID NO: 1563588
uuuggagaguccuuggaga

SEQ ID NO: 1821760 - RNA, 19 nt, Artificial Sequence
  Description of Artificial Sequence: Synthetic oligonucleotide
  Antisense strand to SEQ ID NO: 1821759
ucuccaaggacucuccaaa

SEQ ID NO: 1821761 - RNA, 19 nt, Artificial Sequence
  Description of Artificial Sequence: Synthetic oligonucleotide
  Sense strand starting at position 3236 of SEQ ID NO: 1563588
uggagaguccuuggagacu

SEQ ID NO: 1821762 - RNA, 19 nt, Artificial Sequence
  Description of Artificial Sequence: Synthetic oligonucleotide
  Antisense strand to SEQ ID NO: 1821761
agucuccaaggacucucca

SEQ ID NO: 1821763 - RNA, 19 nt, Artificial Sequence
  Description of Artificial Sequence: Synthetic oligonucleotide
  Sense strand starting at position 3272 of SEQ ID NO: 1563588
uuagguuguccaggaauug

SEQ ID NO: 1821764 - RNA, 19 nt, Artificial Sequence
  Description of Artificial Sequence: Synthetic oligonucleotide
  Antisense strand to SEQ ID NO: 1821763
caauuccuggacaaccuaa

SEQ ID NO: 1821765 - RNA, 19 nt, Artificial Sequence
  Description of Artificial Sequence: Synthetic oligonucleotide
  Sense strand starting at position 3422 of SEQ ID NO: 1563588
guucuagucguccaacaac

SEQ ID NO: 1821766 - RNA, 19 nt, Artificial Sequence
  Description of Artificial Sequence: Synthetic oligonucleotide
  Antisense strand to SEQ ID NO: 1821765
guuguuggacgacuagaac

SEQ ID NO: 1821767 - RNA, 19 nt, Artificial Sequence
  Description of Artificial Sequence: Synthetic oligonucleotide
  Sense strand starting at position 3515 of SEQ ID NO: 1563588
caaaucugguggccaagau

SEQ ID NO: 1821768 - RNA, 19 nt, Artificial Sequence
  Description of Artificial Sequence: Synthetic oligonucleotide
  Antisense strand to SEQ ID NO: 1821767
aucuuggccaccagauuug

SEQ ID NO: 1821769 - RNA, 19 nt, Artificial Sequence
  Description of Artificial Sequence: Synthetic oligonucleotide
  Sense strand starting at position 3913 of SEQ ID NO: 1563588
gugaacagcagguguuuaa

SEQ ID NO: 1821770 - RNA, 19 nt, Artificial Sequence
  Description of Artificial Sequence: Synthetic oligonucleotide
  Antisense strand to SEQ ID NO: 1821769
uuaaacaccugcuguucac

SEQ ID NO: 1821771 - RNA, 19 nt, Artificial Sequence
  Description of Artificial Sequence: Synthetic oligonucleotide
  Sense strand starting at position 3922 of SEQ ID NO: 1563588
agguguuuaacagauguca

SEQ ID NO: 1821772 - RNA, 19 nt, Artificial Sequence
  Description of Artificial Sequence: Synthetic oligonucleotide
  Antisense strand to SEQ ID NO: 1821771
ugacaucuguuaaacaccu

SEQ ID NO: 1821773 - RNA, 19 nt, Artificial Sequence
  Description of Artificial Sequence: Synthetic oligonucleotide
  Sense strand starting at position 2008 of SEQ ID NO: 1563589
acugaauuaugugcaaacu

SEQ ID NO: 1821774 - RNA, 19 nt, Artificial Sequence
  Description of Artificial Sequence: Synthetic oligonucleotide
  Antisense strand to SEQ ID NO: 1821773
aguuugcacauaauucagu

SEQ ID NO: 1821775 - RNA, 19 nt, Artificial Sequence
  Description of Artificial Sequence: Synthetic oligonucleotide
  Sense strand starting at position 2009 of SEQ ID NO: 1563589
cugaauuaugugcaaacua

SEQ ID NO: 1821776 - RNA, 19 nt, Artificial Sequence
  Description of Artificial Sequence: Synthetic oligonucleotide
  Antisense strand to SEQ ID NO: 1821775
uaguuugcacauaauucag

SEQ ID NO: 1821777 - RNA, 19 nt, Artificial Sequence
  Description of Artificial Sequence: Synthetic oligonucleotide
  Sense strand starting at position 2022 of SEQ ID NO: 1563589
aaacuauggugacuugcau

SEQ ID NO: 1821778 - RNA, 19 nt, Artificial Sequence
  Description of Artificial Sequence: Synthetic oligonucleotide
  Antisense strand to SEQ ID NO: 1821777
augcaagucaccauaguuu

SEQ ID NO: 1821779 - RNA, 19 nt, Artificial Sequence
  Description of Artificial Sequence: Synthetic oligonucleotide
  Sense strand starting at position 2036 of SEQ ID NO: 1563589
ugcauaauaggugaucauc

SEQ ID NO: 1821780 - RNA, 19 nt, Artificial Sequence
  Description of Artificial Sequence: Synthetic oligonucleotide
  Antisense strand to SEQ ID NO: 1821779
gaugaucaccuauuaugca

SEQ ID NO: 1821781 - RNA, 19 nt, Artificial Sequence
  Description of Artificial Sequence: Synthetic oligonucleotide
  Sense strand starting at position 2116 of SEQ ID NO: 1563589
acauuauauuucugagucu

SEQ ID NO: 1821782 - RNA, 19 nt, Artificial Sequence
  Description of Artificial Sequence: Synthetic oligonucleotide
  Antisense strand to SEQ ID NO: 1821781
agacucagaaauauaaugu

SEQ ID NO: 1821783 - RNA, 19 nt, Artificial Sequence
  Description of Artificial Sequence: Synthetic oligonucleotide
  Sense strand starting at position 2127 of SEQ ID NO: 1563589
cugagucuuccuuaauggu

SEQ ID NO: 1821784 - RNA, 19 nt, Artificial Sequence
  Description of Artificial Sequence: Synthetic oligonucleotide
  Antisense strand to SEQ ID NO: 1821783
accauuaaggaagacucag

SEQ ID NO: 1821785 - RNA, 19 nt, Artificial Sequence
  Description of Artificial Sequence: Synthetic oligonucleotide
  Sense strand starting at position 2224 of SEQ ID NO: 1563589
aucacagcccugcaagaua

SEQ ID NO: 1821786 - RNA, 19 nt, Artificial Sequence
  Description of Artificial Sequence: Synthetic oligonucleotide
  Antisense strand to SEQ ID NO: 1821785
uaucuugcagggcugugau

SEQ ID NO: 1821787 - RNA, 19 nt, Artificial Sequence
  Description of Artificial Sequence: Synthetic oligonucleotide
  Sense strand starting at position 2235 of SEQ ID NO: 1563589
gcaagauaacaugguauua

SEQ ID NO: 1821788 - RNA, 19 nt, Artificial Sequence
  Description of Artificial Sequence: Synthetic oligonucleotide
  Antisense strand to SEQ ID NO: 1821787
uaauaccauguuaucuugc

SEQ ID NO: 1821789 - RNA, 19 nt, Artificial Sequence
  Description of Artificial Sequence: Synthetic oligonucleotide
  Sense strand starting at position 2390 of SEQ ID NO: 1563589
gcaguaauaugugcaaccu

SEQ ID NO: 1821790 - RNA, 19 nt, Artificial Sequence
  Description of Artificial Sequence: Synthetic oligonucleotide
  Antisense strand to SEQ ID NO: 1821789
agguugcacauauuacugc

SEQ ID NO: 1821791 - RNA, 19 nt, Artificial Sequence
  Description of Artificial Sequence: Synthetic oligonucleotide
  Sense strand starting at position 2423 of SEQ ID NO: 1563589
gaugguaacuaucagaaca

SEQ ID NO: 1821792 - RNA, 19 nt, Artificial Sequence
  Description of Artificial Sequence: Synthetic oligonucleotide
  Antisense strand to SEQ ID NO: 1821791
uguucugauaguuaccauc

SEQ ID NO: 1821793 - RNA, 19 nt, Artificial Sequence
  Description of Artificial Sequence: Synthetic oligonucleotide
  Sense strand starting at position 2425 of SEQ ID NO: 1563589
ugguaacuaucagaacaug

SEQ ID NO: 1821794 - RNA, 19 nt, Artificial Sequence
  Description of Artificial Sequence: Synthetic oligonucleotide
  Antisense strand to SEQ ID NO: 1821793
cauguucugauaguuacca

SEQ ID NO: 1821795 - RNA, 19 nt, Artificial Sequence
  Description of Artificial Sequence: Synthetic oligonucleotide
  Sense strand starting at position 2531 of SEQ ID NO: 1563589
caggucaccuucuuaggaa

SEQ ID NO: 1821796 - RNA, 19 nt, Artificial Sequence
  Description of Artificial Sequence: Synthetic oligonucleotide
  Antisense strand to SEQ ID NO: 1821795
uuccuaagaaggugaccug

SEQ ID NO: 1821797 - RNA, 19 nt, Artificial Sequence
  Description of Artificial Sequence: Synthetic oligonucleotide
  Sense strand starting at position 2535 of SEQ ID NO: 1563589
ucaccuucuuaggaaauga

SEQ ID NO: 1821798 - RNA, 19 nt, Artificial Sequence
  Description of Artificial Sequence: Synthetic oligonucleotide
  Antisense strand to SEQ ID NO: 1821797
ucauuuccuaagaagguga

SEQ ID NO: 1821799 - RNA, 19 nt, Artificial Sequence
  Description of Artificial Sequence: Synthetic oligonucleotide
  Sense strand starting at position 2649 of SEQ ID NO: 1563589
ccaggacauuuguaagaaa

SEQ ID NO: 1821800 - RNA, 19 nt, Artificial Sequence
  Description of Artificial Sequence: Synthetic oligonucleotide
  Antisense strand to SEQ ID NO: 1821799
uuucuuacaaauguccugg

SEQ ID NO: 1821801 - RNA, 19 nt, Artificial Sequence
  Description of Artificial Sequence: Synthetic oligonucleotide
  Sense strand starting at position 2674 of SEQ ID NO: 1563589
auggcaagguuuccuuuaa

SEQ ID NO: 1821802 - RNA, 19 nt, Artificial Sequence
  Description of Artificial Sequence: Synthetic oligonucleotide
  Antisense strand to SEQ ID NO: 1821801
uuaaaggaaaccuugccau

SEQ ID NO: 1821803 - RNA, 19 nt, Artificial Sequence
  Description of Artificial Sequence: Synthetic oligonucleotide
  Sense strand starting at position 2675 of SEQ ID NO: 1563589
uggcaagguuuccuuuaau

SEQ ID NO: 1821804 - RNA, 19 nt, Artificial Sequence
  Description of Artificial Sequence: Synthetic oligonucleotide
  Antisense strand to SEQ ID NO: 1821803
auuaaaggaaaccuugcca

SEQ ID NO: 1821805 - RNA, 19 nt, Artificial Sequence
  Description of Artificial Sequence: Synthetic oligonucleotide
  Sense strand starting at position 2712 of SEQ ID NO: 1563589
auguguaaaguaugcgaua

SEQ ID NO: 1821806 - RNA, 19 nt, Artificial Sequence
  Description of Artificial Sequence: Synthetic oligonucleotide
  Antisense strand to SEQ ID NO: 1821805
uaucgcauacuuuacacau

SEQ ID NO: 1821807 - RNA, 19 nt, Artificial Sequence
  Description of Artificial Sequence: Synthetic oligonucleotide
  Sense strand starting at position 2713 of SEQ ID NO: 1563589
uguguaaaguaugcgauau

SEQ ID NO: 1821808 - RNA, 19 nt, Artificial Sequence
  Description of Artificial Sequence: Synthetic oligonucleotide
  Antisense strand to SEQ ID NO: 1821807
auaucgcauacuuuacaca

SEQ ID NO: 1821809 - RNA, 19 nt, Artificial Sequence
  Description of Artificial Sequence: Synthetic oligonucleotide
  Sense strand starting at position 2717 of SEQ ID NO: 1563589
uaaaguaugcgauaucauu

SEQ ID NO: 1821810 - RNA, 19 nt, Artificial Sequence
  Description of Artificial Sequence: Synthetic oligonucleotide
  Antisense strand to SEQ ID NO: 1821809
aaugauaucgcauacuuua

SEQ ID NO: 1821811 - RNA, 19 nt, Artificial Sequence
  Description of Artificial Sequence: Synthetic oligonucleotide
  Sense strand starting at position 2779 of SEQ ID NO: 1563589
gucaaugggagcuauugga

SEQ ID NO: 1821812 - RNA, 19 nt, Artificial Sequence
  Description of Artificial Sequence: Synthetic oligonucleotide
  Antisense strand to SEQ ID NO: 1821811
uccaauagcucccauugac

SEQ ID NO: 1821813 - RNA, 19 nt, Artificial Sequence
  Description of Artificial Sequence: Synthetic oligonucleotide
  Sense strand starting at position 2872 of SEQ ID NO: 1563589
guugucuuucuacagcaua

SEQ ID NO: 1821814 - RNA, 19 nt, Artificial Sequence
  Description of Artificial Sequence: Synthetic oligonucleotide
  Antisense strand to SEQ ID NO: 1821813
uaugcuguagaaagacaac

SEQ ID NO: 1821815 - RNA, 19 nt, Artificial Sequence
  Description of Artificial Sequence: Synthetic oligonucleotide
  Sense strand starting at position 2928 of SEQ ID NO: 1563589
auuauuacagaaugcugua

SEQ ID NO: 1821816 - RNA, 19 nt, Artificial Sequence
  Description of Artificial Sequence: Synthetic oligonucleotide
  Antisense strand to SEQ ID NO: 1821815
uacagcauucuguaauaau

SEQ ID NO: 1821817 - RNA, 19 nt, Artificial Sequence
  Description of Artificial Sequence: Synthetic oligonucleotide
  Sense strand starting at position 3208 of SEQ ID NO: 1563589
uuaccuuuccaggguaacu

SEQ ID NO: 1821818 - RNA, 19 nt, Artificial Sequence
  Description of Artificial Sequence: Synthetic oligonucleotide
  Antisense strand to SEQ ID NO: 1821817
aguuacccuggaaagguaa

SEQ ID NO: 1821819 - RNA, 19 nt, Artificial Sequence
  Description of Artificial Sequence: Synthetic oligonucleotide
  Sense strand starting at position 3210 of SEQ ID NO: 1563589
accuuuccaggguaacuua

SEQ ID NO: 1821820 - RNA, 19 nt, Artificial Sequence
  Description of Artificial Sequence: Synthetic oligonucleotide
  Antisense strand to SEQ ID NO: 1821819
uaaguuacccuggaaaggu

SEQ ID NO: 1821821 - RNA, 19 nt, Artificial Sequence
  Description of Artificial Sequence: Synthetic oligonucleotide
  Sense strand starting at position 3270 of SEQ ID NO: 1563589
acugaaaugcugggaucuu

SEQ ID NO: 1821822 - RNA, 19 nt, Artificial Sequence
  Description of Artificial Sequence: Synthetic oligonucleotide
  Antisense strand to SEQ ID NO: 1821821
aagaucccagcauuucagu

SEQ ID NO: 1821823 - RNA, 19 nt, Artificial Sequence
  Description of Artificial Sequence: Synthetic oligonucleotide
  Sense strand starting at position 3619 of SEQ ID NO: 1563589
cugggagagugcuccaauc

SEQ ID NO: 1821824 - RNA, 19 nt, Artificial Sequence
  Description of Artificial Sequence: Synthetic oligonucleotide
  Antisense strand to SEQ ID NO: 1821823
gauuggagcacucucccag

SEQ ID NO: 1821825 - RNA, 19 nt, Artificial Sequence
  Description of Artificial Sequence: Synthetic oligonucleotide
  Sense strand starting at position 3621 of SEQ ID NO: 1563589
gggagagugcuccaauccu

SEQ ID NO: 1821826 - RNA, 19 nt, Artificial Sequence
  Description of Artificial Sequence: Synthetic oligonucleotide
  Antisense strand to SEQ ID NO: 1821825
aggauuggagcacucuccc

SEQ ID NO: 1821827 - RNA, 19 nt, Artificial Sequence
  Description of Artificial Sequence: Synthetic oligonucleotide
  Sense strand starting at position 3627 of SEQ ID NO: 1563589
gugcuccaauccuuagaua

SEQ ID NO: 1821828 - RNA, 19 nt, Artificial Sequence
  Description of Artificial Sequence: Synthetic oligonucleotide
  Antisense strand to SEQ ID NO: 1821827
uaucuaaggauuggagcac

SEQ ID NO: 1821829 - RNA, 19 nt, Artificial Sequence
  Description of Artificial Sequence: Synthetic oligonucleotide
  Sense strand starting at position 3638 of SEQ ID NO: 1563589
cuuagauauuggcuaguaa

SEQ ID NO: 1821830 - RNA, 19 nt, Artificial Sequence
  Description of Artificial Sequence: Synthetic oligonucleotide
  Antisense strand to SEQ ID NO: 1821829
uuacuagccaauaucuaag

SEQ ID NO: 1821831 - RNA, 19 nt, Artificial Sequence
  Description of Artificial Sequence: Synthetic oligonucleotide
  Sense strand starting at position 3639 of SEQ ID NO: 1563589
uuagauauuggcuaguaaa

SEQ ID NO: 1821832 - RNA, 19 nt, Artificial Sequence
  Description of Artificial Sequence: Synthetic oligonucleotide
  Antisense strand to SEQ ID NO: 1821831
uuuacuagccaauaucuaa

SEQ ID NO: 1821833 - RNA, 19 nt, Artificial Sequence
  Description of Artificial Sequence: Synthetic oligonucleotide
  Sense strand starting at position 3659 of SEQ ID NO: 1563589
ccaaguuaucacuguguau

SEQ ID NO: 1821834 - RNA, 19 nt, Artificial Sequence
  Description of Artificial Sequence: Synthetic oligonucleotide
  Antisense strand to SEQ ID NO: 1821833
auacacagugauaacuugg

SEQ ID NO: 1821835 - RNA, 19 nt, Artificial Sequence
  Description of Artificial Sequence: Synthetic oligonucleotide
  Sense strand starting at position 3661 of SEQ ID NO: 1563589
aaguuaucacuguguauug

SEQ ID NO: 1821836 - RNA, 19 nt, Artificial Sequence
  Description of Artificial Sequence: Synthetic oligonucleotide
  Antisense strand to SEQ ID NO: 1821835
caauacacagugauaacuu

SEQ ID NO: 1821837 - RNA, 19 nt, Artificial Sequence
  Description of Artificial Sequence: Synthetic oligonucleotide
  Sense strand starting at position 3662 of SEQ ID NO: 1563589
aguuaucacuguguauugu

SEQ ID NO: 1821838 - RNA, 19 nt, Artificial Sequence
  Description of Artificial Sequence: Synthetic oligonucleotide
  Antisense strand to SEQ ID NO: 1821837
acaauacacagugauaacu

SEQ ID NO: 1821839 - RNA, 19 nt, Artificial Sequence
  Description of Artificial Sequence: Synthetic oligonucleotide
  Sense strand starting at position 3663 of SEQ ID NO: 1563589
guuaucacuguguauuguu

SEQ ID NO: 1821840 - RNA, 19 nt, Artificial Sequence
  Description of Artificial Sequence: Synthetic oligonucleotide
  Antisense strand to SEQ ID NO: 1821839
aacaauacacagugauaac

SEQ ID NO: 1821841 - RNA, 19 nt, Artificial Sequence
  Description of Artificial Sequence: Synthetic oligonucleotide
  Sense strand starting at position 3687 of SEQ ID NO: 1563589
gggccucauuuagaaacau

SEQ ID NO: 1821842 - RNA, 19 nt, Artificial Sequence
  Description of Artificial Sequence: Synthetic oligonucleotide
  Antisense strand to SEQ ID NO: 1821841
auguuucuaaaugaggccc

SEQ ID NO: 1821843 - RNA, 19 nt, Artificial Sequence
  Description of Artificial Sequence: Synthetic oligonucleotide
  Sense strand starting at position 3736 of SEQ ID NO: 1563589
uuccaagaaguauguaaua

SEQ ID NO: 1821844 - RNA, 19 nt, Artificial Sequence
  Description of Artificial Sequence: Synthetic oligonucleotide
  Antisense strand to SEQ ID NO: 1821843
uauuacauacuucuuggaa

SEQ ID NO: 1821845 - RNA, 19 nt, Artificial Sequence
  Description of Artificial Sequence: Synthetic oligonucleotide
  Sense strand starting at position 3747 of SEQ ID NO: 1563589
auguaauagaucuggcaga

SEQ ID NO: 1821846 - RNA, 19 nt, Artificial Sequence
  Description of Artificial Sequence: Synthetic oligonucleotide
  Antisense strand to SEQ ID NO: 1821845
ucugccagaucuauuacau

SEQ ID NO: 1821847 - RNA, 19 nt, Artificial Sequence
  Description of Artificial Sequence: Synthetic oligonucleotide
  Sense strand starting at position 3754 of SEQ ID NO: 1563589
agaucuggcagaugaguaa

SEQ ID NO: 1821848 - RNA, 19 nt, Artificial Sequence
  Description of Artificial Sequence: Synthetic oligonucleotide
  Antisense strand to SEQ ID NO: 1821847
uuacucaucugccagaucu

SEQ ID NO: 1821849 - RNA, 19 nt, Artificial Sequence
  Description of Artificial Sequence: Synthetic oligonucleotide
  Sense strand starting at position 3840 of SEQ ID NO: 1563589
cagugugaugaguauuaga

SEQ ID NO: 1821850 - RNA, 19 nt, Artificial Sequence
  Description of Artificial Sequence: Synthetic oligonucleotide
  Antisense strand to SEQ ID NO: 1821849
ucuaauacucaucacacug

SEQ ID NO: 1821851 - RNA, 19 nt, Artificial Sequence
  Description of Artificial Sequence: Synthetic oligonucleotide
  Sense strand starting at position 3895 of SEQ ID NO: 1563589
cccagauaauaggaaucaa

SEQ ID NO: 1821852 - RNA, 19 nt, Artificial Sequence
  Description of Artificial Sequence: Synthetic oligonucleotide
  Antisense strand to SEQ ID NO: 1821851
uugauuccuauuaucuggg

SEQ ID NO: 1821853 - RNA, 19 nt, Artificial Sequence
  Description of Artificial Sequence: Synthetic oligonucleotide
  Sense strand starting at position 9 of SEQ ID NO: 1563590
aagugcuauccacagauga

SEQ ID NO: 1821854 - RNA, 19 nt, Artificial Sequence
  Description of Artificial Sequence: Synthetic oligonucleotide
  Antisense strand to SEQ ID NO: 1821853
ucaucuguggauagcacuu

SEQ ID NO: 1821855 - RNA, 19 nt, Artificial Sequence
  Description of Artificial Sequence: Synthetic oligonucleotide
  Sense strand starting at position 104 of SEQ ID NO: 1563590
uauuauuguuaagcagaga

SEQ ID NO: 1821856 - RNA, 19 nt, Artificial Sequence
  Description of Artificial Sequence: Synthetic oligonucleotide
  Antisense strand to SEQ ID NO: 1821855
ucucugcuuaacaauaaua

SEQ ID NO: 1821857 - RNA, 19 nt, Artificial Sequence
  Description of Artificial Sequence: Synthetic oligonucleotide
  Sense strand starting at position 109 of SEQ ID NO: 1563590
uuguuaagcagagaaggua

SEQ ID NO: 1821858 - RNA, 19 nt, Artificial Sequence
  Description of Artificial Sequence: Synthetic oligonucleotide
  Antisense strand to SEQ ID NO: 1821857
uaccuucucugcuuaacaa

SEQ ID NO: 1821859 - RNA, 19 nt, Artificial Sequence
  Description of Artificial Sequence: Synthetic oligonucleotide
  Sense strand starting at position 124 of SEQ ID NO: 1563590
gguacuauuggaugauuga

SEQ ID NO: 1821860 - RNA, 19 nt, Artificial Sequence
  Description of Artificial Sequence: Synthetic oligonucleotide
  Antisense strand to SEQ ID NO: 1821859
ucaaucauccaauaguacc

SEQ ID NO: 1821861 - RNA, 19 nt, Artificial Sequence
  Description of Artificial Sequence: Synthetic oligonucleotide
  Sense strand starting at position 242 of SEQ ID NO: 1563590
agcauucuuccacagagca

SEQ ID NO: 1821862 - RNA, 19 nt, Artificial Sequence
  Description of Artificial Sequence: Synthetic oligonucleotide
  Antisense strand to SEQ ID NO: 1821861
ugcucuguggaagaaugcu

SEQ ID NO: 1821863 - RNA, 19 nt, Artificial Sequence
  Description of Artificial Sequence: Synthetic oligonucleotide
  Sense strand starting at position 264 of SEQ ID NO: 1563590
gggaucacaugcuuugaca

SEQ ID NO: 1821864 - RNA, 19 nt, Artificial Sequence
  Description of Artificial Sequence: Synthetic oligonucleotide
  Antisense strand to SEQ ID NO: 1821863
ugucaaagcaugugauccc

SEQ ID NO: 1821865 - RNA, 19 nt, Artificial Sequence
  Description of Artificial Sequence: Synthetic oligonucleotide
  Sense strand starting at position 283 of SEQ ID NO: 1563590
ccugaauugcuggguauca

SEQ ID NO: 1821866 - RNA, 19 nt, Artificial Sequence
  Description of Artificial Sequence: Synthetic oligonucleotide
  Antisense strand to SEQ ID NO: 1821865
ugauacccagcaauucagg

SEQ ID NO: 1821867 - RNA, 19 nt, Artificial Sequence
  Description of Artificial Sequence: Synthetic oligonucleotide
  Sense strand starting at position 284 of SEQ ID NO: 1563590
cugaauugcuggguaucaa

SEQ ID NO: 1821868 - RNA, 19 nt, Artificial Sequence
  Description of Artificial Sequence: Synthetic oligonucleotide
  Antisense strand to SEQ ID NO: 1821867
uugauacccagcaauucag

SEQ ID NO: 1821869 - RNA, 19 nt, Artificial Sequence
  Description of Artificial Sequence: Synthetic oligonucleotide
  Sense strand starting at position 285 of SEQ ID NO: 1563590
ugaauugcuggguaucaaa

SEQ ID NO: 1821870 - RNA, 19 nt, Artificial Sequence
  Description of Artificial Sequence: Synthetic oligonucleotide
  Antisense strand to SEQ ID NO: 1821869
uuugauacccagcaauuca

SEQ ID NO: 1821871 - RNA, 19 nt, Artificial Sequence
  Description of Artificial Sequence: Synthetic oligonucleotide
  Sense strand starting at position 401 of SEQ ID NO: 1563590
cucuuccguaggugaauuu

SEQ ID NO: 1821872 - RNA, 19 nt, Artificial Sequence
  Description of Artificial Sequence: Synthetic oligonucleotide
  Antisense strand to SEQ ID NO: 1821871
aaauucaccuacggaagag

SEQ ID NO: 1821873 - RNA, 19 nt, Artificial Sequence
  Description of Artificial Sequence: Synthetic oligonucleotide
  Sense strand starting at position 473 of SEQ ID NO: 1563590
ucugaauuagacugcacau

SEQ ID NO: 1821874 - RNA, 19 nt, Artificial Sequence
  Description of Artificial Sequence: Synthetic oligonucleotide
  Antisense strand to SEQ ID NO: 1821873
augugcagucuaauucaga

SEQ ID NO: 1821875 - RNA, 19 nt, Artificial Sequence
  Description of Artificial Sequence: Synthetic oligonucleotide
  Sense strand starting at position 530 of SEQ ID NO: 1563590
cuuugaguuccuugaaaua

SEQ ID NO: 1821876 - RNA, 19 nt, Artificial Sequence
  Description of Artificial Sequence: Synthetic oligonucleotide
  Antisense strand to SEQ ID NO: 1821875
uauuucaaggaacucaaag

SEQ ID NO: 1821877 - RNA, 19 nt, Artificial Sequence
  Description of Artificial Sequence: Synthetic oligonucleotide
  Sense strand starting at position 709 of SEQ ID NO: 1563590
gccucauaccucuaaugga

SEQ ID NO: 1821878 - RNA, 19 nt, Artificial Sequence
  Description of Artificial Sequence: Synthetic oligonucleotide
  Antisense strand to SEQ ID NO: 1821877
uccauuagagguaugaggc

SEQ ID NO: 1821879 - RNA, 19 nt, Artificial Sequence
  Description of Artificial Sequence: Synthetic oligonucleotide
  Sense strand starting at position 1112 of SEQ ID NO: 1563590
ucuuaagauguuggaacau

SEQ ID NO: 1821880 - RNA, 19 nt, Artificial Sequence
  Description of Artificial Sequence: Synthetic oligonucleotide
  Antisense strand to SEQ ID NO: 1821879
auguuccaacaucuuaaga

SEQ ID NO: 1821881 - RNA, 19 nt, Artificial Sequence
  Description of Artificial Sequence: Synthetic oligonucleotide
  Sense strand starting at position 1135 of SEQ ID NO: 1563590
accaaaugaugugcuuaau

SEQ ID NO: 1821882 - RNA, 19 nt, Artificial Sequence
  Description of Artificial Sequence: Synthetic oligonucleotide
  Antisense strand to SEQ ID NO: 1821881
auuaagcacaucauuuggu

SEQ ID NO: 1821883 - RNA, 19 nt, Artificial Sequence
  Description of Artificial Sequence: Synthetic oligonucleotide
  Sense strand starting at position 1208 of SEQ ID NO: 1563590
cuaggaauuuauuaagaac

SEQ ID NO: 1821884 - RNA, 19 nt, Artificial Sequence
  Description of Artificial Sequence: Synthetic oligonucleotide
  Antisense strand to SEQ ID NO: 1821883
guucuuaauaaauuccuag

SEQ ID NO: 1821885 - RNA, 19 nt, Artificial Sequence
  Description of Artificial Sequence: Synthetic oligonucleotide
  Sense strand starting at position 1866 of SEQ ID NO: 1563590
gggugcuuucuccaggaau

SEQ ID NO: 1821886 - RNA, 19 nt, Artificial Sequence
  Description of Artificial Sequence: Synthetic oligonucleotide
  Antisense strand to SEQ ID NO: 1821885
auuccuggagaaagcaccc

SEQ ID NO: 1821887 - RNA, 19 nt, Artificial Sequence
  Description of Artificial Sequence: Synthetic oligonucleotide
  Sense strand starting at position 1868 of SEQ ID NO: 1563590
gugcuuucuccaggaauuu

SEQ ID NO: 1821888 - RNA, 19 nt, Artificial Sequence
  Description of Artificial Sequence: Synthetic oligonucleotide
  Antisense strand to SEQ ID NO: 1821887
aaauuccuggagaaagcac

SEQ ID NO: 1821889 - RNA, 19 nt, Artificial Sequence
  Description of Artificial Sequence: Synthetic oligonucleotide
  Sense strand starting at position 1954 of SEQ ID NO: 1563590
ggcacacuuccguuugcuu

SEQ ID NO: 1821890 - RNA, 19 nt, Artificial Sequence
  Description of Artificial Sequence: Synthetic oligonucleotide
  Antisense strand to SEQ ID NO: 1821889
aagcaaacggaagugugcc

SEQ ID NO: 1821891 - RNA, 19 nt, Artificial Sequence
  Description of Artificial Sequence: Synthetic oligonucleotide
  Sense strand starting at position 1972 of SEQ ID NO: 1563590
ugaaguaaugcacacccaa

SEQ ID NO: 1821892 - RNA, 19 nt, Artificial Sequence
  Description of Artificial Sequence: Synthetic oligonucleotide
  Antisense strand to SEQ ID NO: 1821891
uugggugugcauuacuuca

SEQ ID NO: 1821893 - RNA, 19 nt, Artificial Sequence
  Description of Artificial Sequence: Synthetic oligonucleotide
  Sense strand starting at position 2041 of SEQ ID NO: 1563590
cuguuuggucaauaucaaa

SEQ ID NO: 1821894 - RNA, 19 nt, Artificial Sequence
  Description of Artificial Sequence: Synthetic oligonucleotide
  Antisense strand to SEQ ID NO: 1821893
uuugauauugaccaaacag

SEQ ID NO: 1821895 - RNA, 19 nt, Artificial Sequence
  Description of Artificial Sequence: Synthetic oligonucleotide
  Sense strand starting at position 2280 of SEQ ID NO: 1563590
ggaagcaucuaucuaucua

SEQ ID NO: 1821896 - RNA, 19 nt, Artificial Sequence
  Description of Artificial Sequence: Synthetic oligonucleotide
  Antisense strand to SEQ ID NO: 1821895
uagauagauagaugcuucc

SEQ ID NO: 1821897 - RNA, 19 nt, Artificial Sequence
  Description of Artificial Sequence: Synthetic oligonucleotide
  Sense strand starting at position 2713 of SEQ ID NO: 1563590
ucauguauucuuggauaaa

SEQ ID NO: 1821898 - RNA, 19 nt, Artificial Sequence
  Description of Artificial Sequence: Synthetic oligonucleotide
  Antisense strand to SEQ ID NO: 1821897
uuuauccaagaauacauga

SEQ ID NO: 1821899 - RNA, 19 nt, Artificial Sequence
  Description of Artificial Sequence: Synthetic oligonucleotide
  Sense strand starting at position 2732 of SEQ ID NO: 1563590
ugaacuaauuaggauaaag

SEQ ID NO: 1821900 - RNA, 19 nt, Artificial Sequence
  Description of Artificial Sequence: Synthetic oligonucleotide
  Antisense strand to SEQ ID NO: 1821899
cuuuauccuaauuaguuca

SEQ ID NO: 1821901 - RNA, 19 nt, Artificial Sequence
  Description of Artificial Sequence: Synthetic oligonucleotide
  Sense strand starting at position 2821 of SEQ ID NO: 1563590
gacauuuauucuggacuga

SEQ ID NO: 1821902 - RNA, 19 nt, Artificial Sequence
  Description of Artificial Sequence: Synthetic oligonucleotide
  Antisense strand to SEQ ID NO: 1821901
ucaguccagaauaaauguc

SEQ ID NO: 1821903 - RNA, 19 nt, Artificial Sequence
  Description of Artificial Sequence: Synthetic oligonucleotide
  Sense strand starting at position 2825 of SEQ ID NO: 1563590
uuuauucuggacugagaua

SEQ ID NO: 1821904 - RNA, 19 nt, Artificial Sequence
  Description of Artificial Sequence: Synthetic oligonucleotide
  Antisense strand to SEQ ID NO: 1821903
uaucucaguccagaauaaa

SEQ ID NO: 1821905 - RNA, 19 nt, Artificial Sequence
  Description of Artificial Sequence: Synthetic oligonucleotide
  Sense strand starting at position 2931 of SEQ ID NO: 1563590
agcacaguagauuacauua

SEQ ID NO: 1821906 - RNA, 19 nt, Artificial Sequence
  Description of Artificial Sequence: Synthetic oligonucleotide
  Antisense strand to SEQ ID NO: 1821905
uaauguaaucuacugugcu

SEQ ID NO: 1821907 - RNA, 19 nt, Artificial Sequence
  Description of Artificial Sequence: Synthetic oligonucleotide
  Sense strand starting at position 2953 of SEQ ID NO: 1563590
uaggauucuuggcugaaag

SEQ ID NO: 1821908 - RNA, 19 nt, Artificial Sequence
  Description of Artificial Sequence: Synthetic oligonucleotide
  Antisense strand to SEQ ID NO: 1821907
cuuucagccaagaauccua

SEQ ID NO: 1821909 - RNA, 19 nt, Artificial Sequence
  Description of Artificial Sequence: Synthetic oligonucleotide
  Sense strand starting at position 2954 of SEQ ID NO: 1563590
aggauucuuggcugaaagu

SEQ ID NO: 1821910 - RNA, 19 nt, Artificial Sequence
  Description of Artificial Sequence: Synthetic oligonucleotide
  Antisense strand to SEQ ID NO: 1821909
acuuucagccaagaauccu

SEQ ID NO: 1821911 - RNA, 19 nt, Artificial Sequence
  Description of Artificial Sequence: Synthetic oligonucleotide
  Sense strand starting at position 2955 of SEQ ID NO: 1563590
ggauucuuggcugaaagug

SEQ ID NO: 1821912 - RNA, 19 nt, Artificial Sequence
  Description of Artificial Sequence: Synthetic oligonucleotide
  Antisense strand to SEQ ID NO: 1821911
cacuuucagccaagaaucc

SEQ ID NO: 1821913 - RNA, 19 nt, Artificial Sequence
  Description of Artificial Sequence: Synthetic oligonucleotide
  Sense strand starting at position 3024 of SEQ ID NO: 1563590
agaacuagcucguuuauuu

SEQ ID NO: 1821914 - RNA, 19 nt, Artificial Sequence
  Description of Artificial Sequence: Synthetic oligonucleotide
  Antisense strand to SEQ ID NO: 1821913
aaauaaacgagcuaguucu

SEQ ID NO: 1821915 - RNA, 19 nt, Artificial Sequence
  Description of Artificial Sequence: Synthetic oligonucleotide
  Sense strand starting at position 3080 of SEQ ID NO: 1563590
uuaaauuguaccggauaug

SEQ ID NO: 1821916 - RNA, 19 nt, Artificial Sequence
  Description of Artificial Sequence: Synthetic oligonucleotide
  Antisense strand to SEQ ID NO: 1821915
cauauccgguacaauuuaa

SEQ ID NO: 1821917 - RNA, 19 nt, Artificial Sequence
  Description of Artificial Sequence: Synthetic oligonucleotide
  Sense strand starting at position 3081 of SEQ ID NO: 1563590
uaaauuguaccggauaugu

SEQ ID NO: 1821918 - RNA, 19 nt, Artificial Sequence
  Description of Artificial Sequence: Synthetic oligonucleotide
  Antisense strand to SEQ ID NO: 1821917
acauauccgguacaauuua

SEQ ID NO: 1821919 - RNA, 19 nt, Artificial Sequence
  Description of Artificial Sequence: Synthetic oligonucleotide
  Sense strand starting at position 3083 of SEQ ID NO: 1563590
aauuguaccggauauguuu

SEQ ID NO: 1821920 - RNA, 19 nt, Artificial Sequence
  Description of Artificial Sequence: Synthetic oligonucleotide
  Antisense strand to SEQ ID NO: 1821919
aaacauauccgguacaauu

SEQ ID NO: 1821921 - RNA, 19 nt, Artificial Sequence
  Description of Artificial Sequence: Synthetic oligonucleotide
  Sense strand starting at position 3086 of SEQ ID NO: 1563590
uguaccggauauguuuaaa

SEQ ID NO: 1821922 - RNA, 19 nt, Artificial Sequence
  Description of Artificial Sequence: Synthetic oligonucleotide
  Antisense strand to SEQ ID NO: 1821921
uuuaaacauauccgguaca

SEQ ID NO: 1821923 - RNA, 19 nt, Artificial Sequence
  Description of Artificial Sequence: Synthetic oligonucleotide
  Sense strand starting at position 3160 of SEQ ID NO: 1563590
acacauacuuugucaagua

SEQ ID NO: 1821924 - RNA, 19 nt, Artificial Sequence
  Description of Artificial Sequence: Synthetic oligonucleotide
  Antisense strand to SEQ ID NO: 1821923
uacuugacaaaguaugugu

SEQ ID NO: 1821925 - RNA, 19 nt, Artificial Sequence
  Description of Artificial Sequence: Synthetic oligonucleotide
  Sense strand starting at position 3257 of SEQ ID NO: 1563590
gucacaugagcagaauacu

SEQ ID NO: 1821926 - RNA, 19 nt, Artificial Sequence
  Description of Artificial Sequence: Synthetic oligonucleotide
  Antisense strand to SEQ ID NO: 1821925
aguauucugcucaugugac

SEQ ID NO: 1821927 - RNA, 19 nt, Artificial Sequence
  Description of Artificial Sequence: Synthetic oligonucleotide
  Sense strand starting at position 3265 of SEQ ID NO: 1563590
agcagaauacuuuguggac

SEQ ID NO: 1821928 - RNA, 19 nt, Artificial Sequence
  Description of Artificial Sequence: Synthetic oligonucleotide
  Antisense strand to SEQ ID NO: 1821927
guccacaaaguauucugcu

SEQ ID NO: 1821929 - RNA, 19 nt, Artificial Sequence
  Description of Artificial Sequence: Synthetic oligonucleotide
  Sense strand starting at position 3626 of SEQ ID NO: 1563590
cguggaggaggcuagaaau

SEQ ID NO: 1821930 - RNA, 19 nt, Artificial Sequence
  Description of Artificial Sequence: Synthetic oligonucleotide
  Antisense strand to SEQ ID NO: 1821929
auuucuagccuccuccacg

SEQ ID NO: 1821931 - RNA, 19 nt, Artificial Sequence
  Description of Artificial Sequence: Synthetic oligonucleotide
  Sense strand starting at position 3782 of SEQ ID NO: 1563590
agaagaaaguccuuuccca

SEQ ID NO: 1821932 - RNA, 19 nt, Artificial Sequence
  Description of Artificial Sequence: Synthetic oligonucleotide
  Antisense strand to SEQ ID NO: 1821931
ugggaaaggacuuucuucu

SEQ ID NO: 1821933 - RNA, 19 nt, Artificial Sequence
  Description of Artificial Sequence: Synthetic oligonucleotide
  Sense strand starting at position 126 of SEQ ID NO: 1563591
cuggaauguggcugauuag

SEQ ID NO: 1821934 - RNA, 19 nt, Artificial Sequence
  Description of Artificial Sequence: Synthetic oligonucleotide
  Antisense strand to SEQ ID NO: 1821933
cuaaucagccacauuccag

SEQ ID NO: 1821935 - RNA, 19 nt, Artificial Sequence
  Description of Artificial Sequence: Synthetic oligonucleotide
  Sense strand starting at position 127 of SEQ ID NO: 1563591
uggaauguggcugauuagu

SEQ ID NO: 1821936 - RNA, 19 nt, Artificial Sequence
  Description of Artificial Sequence: Synthetic oligonucleotide
  Antisense strand to SEQ ID NO: 1821935
acuaaucagccacauucca

SEQ ID NO: 1821937 - RNA, 19 nt, Artificial Sequence
  Description of Artificial Sequence: Synthetic oligonucleotide
  Sense strand starting at position 235 of SEQ ID NO: 1563591
ggagcucguccuugaagga

SEQ ID NO: 1821938 - RNA, 19 nt, Artificial Sequence
  Description of Artificial Sequence: Synthetic oligonucleotide
  Antisense strand to SEQ ID NO: 1821937
uccuucaaggacgagcucc

SEQ ID NO: 1821939 - RNA, 19 nt, Artificial Sequence
  Description of Artificial Sequence: Synthetic oligonucleotide
  Sense strand starting at position 236 of SEQ ID NO: 1563591
gagcucguccuugaaggaa

SEQ ID NO: 1821940 - RNA, 19 nt, Artificial Sequence
  Description of Artificial Sequence: Synthetic oligonucleotide
  Antisense strand to SEQ ID NO: 1821939
uuccuucaaggacgagcuc

SEQ ID NO: 1821941 - RNA, 19 nt, Artificial Sequence
  Description of Artificial Sequence: Synthetic oligonucleotide
  Sense strand starting at position 472 of SEQ ID NO: 1563591
ugcagaagcacuugggaua

SEQ ID NO: 1821942 - RNA, 19 nt, Artificial Sequence
  Description of Artificial Sequence: Synthetic oligonucleotide
  Antisense strand to SEQ ID NO: 1821941
uaucccaagugcuucugca

SEQ ID NO: 1821943 - RNA, 19 nt, Artificial Sequence
  Description of Artificial Sequence: Synthetic oligonucleotide
  Sense strand starting at position 725 of SEQ ID NO: 1563591
ucaagugccuacucagaca

SEQ ID NO: 1821944 - RNA, 19 nt, Artificial Sequence
  Description of Artificial Sequence: Synthetic oligonucleotide
  Antisense strand to SEQ ID NO: 1821943
ugucugaguaggcacuuga

SEQ ID NO: 1821945 - RNA, 19 nt, Artificial Sequence
  Description of Artificial Sequence: Synthetic oligonucleotide
  Sense strand starting at position 843 of SEQ ID NO: 1563591
agacaauuacagugcuaac

SEQ ID NO: 1821946 - RNA, 19 nt, Artificial Sequence
  Description of Artificial Sequence: Synthetic oligonucleotide
  Antisense strand to SEQ ID NO: 1821945
guuagcacuguaauugucu

SEQ ID NO: 1821947 - RNA, 19 nt, Artificial Sequence
  Description of Artificial Sequence: Synthetic oligonucleotide
  Sense strand starting at position 856 of SEQ ID NO: 1563591
gcuaacugagacugguaga

SEQ ID NO: 1821948 - RNA, 19 nt, Artificial Sequence
  Description of Artificial Sequence: Synthetic oligonucleotide
  Antisense strand to SEQ ID NO: 1821947
ucuaccagucucaguuagc

SEQ ID NO: 1821949 - RNA, 19 nt, Artificial Sequence
  Description of Artificial Sequence: Synthetic oligonucleotide
  Sense strand starting at position 857 of SEQ ID NO: 1563591
cuaacugagacugguagau

SEQ ID NO: 1821950 - RNA, 19 nt, Artificial Sequence
  Description of Artificial Sequence: Synthetic oligonucleotide
  Antisense strand to SEQ ID NO: 1821949
aucuaccagucucaguuag

SEQ ID NO: 1821951 - RNA, 19 nt, Artificial Sequence
  Description of Artificial Sequence: Synthetic oligonucleotide
  Sense strand starting at position 956 of SEQ ID NO: 1563591
gauuguacucacuggccaa

SEQ ID NO: 1821952 - RNA, 19 nt, Artificial Sequence
  Description of Artificial Sequence: Synthetic oligonucleotide
  Antisense strand to SEQ ID NO: 1821951
uuggccagugaguacaauc

SEQ ID NO: 1821953 - RNA, 19 nt, Artificial Sequence
  Description of Artificial Sequence: Synthetic oligonucleotide
  Sense strand starting at position 959 of SEQ ID NO: 1563591
uguacucacuggccaagaa

SEQ ID NO: 1821954 - RNA, 19 nt, Artificial Sequence
  Description of Artificial Sequence: Synthetic oligonucleotide
  Antisense strand to SEQ ID NO: 1821953
uucuuggccagugaguaca

SEQ ID NO: 1821955 - RNA, 19 nt, Artificial Sequence
  Description of Artificial Sequence: Synthetic oligonucleotide
  Sense strand starting at position 960 of SEQ ID NO: 1563591
guacucacuggccaagaaa

SEQ ID NO: 1821956 - RNA, 19 nt, Artificial Sequence
  Description of Artificial Sequence: Synthetic oligonucleotide
  Antisense strand to SEQ ID NO: 1821955
uuucuuggccagugaguac

SEQ ID NO: 1821957 - RNA, 19 nt, Artificial Sequence
  Description of Artificial Sequence: Synthetic oligonucleotide
  Sense strand starting at position 1109 of SEQ ID NO: 1563591
cuggguugucccuaacuga

SEQ ID NO: 1821958 - RNA, 19 nt, Artificial Sequence
  Description of Artificial Sequence: Synthetic oligonucleotide
  Antisense strand to SEQ ID NO: 1821957
ucaguuagggacaacccag

SEQ ID NO: 1821959 - RNA, 19 nt, Artificial Sequence
  Description of Artificial Sequence: Synthetic oligonucleotide
  Sense strand starting at position 1336 of SEQ ID NO: 1563591
gagacuugggagugacacu

SEQ ID NO: 1821960 - RNA, 19 nt, Artificial Sequence
  Description of Artificial Sequence: Synthetic oligonucleotide
  Antisense strand to SEQ ID NO: 1821959
agugucacucccaagucuc

SEQ ID NO: 1821961 - RNA, 19 nt, Artificial Sequence
  Description of Artificial Sequence: Synthetic oligonucleotide
  Sense strand starting at position 1438 of SEQ ID NO: 1563591
uuugaaagauguuuggcuu

SEQ ID NO: 1821962 - RNA, 19 nt, Artificial Sequence
  Description of Artificial Sequence: Synthetic oligonucleotide
  Antisense strand to SEQ ID NO: 1821961
aagccaaacaucuuucaaa

SEQ ID NO: 1821963 - RNA, 19 nt, Artificial Sequence
  Description of Artificial Sequence: Synthetic oligonucleotide
  Sense strand starting at position 1655 of SEQ ID NO: 1563591
ugcccucucuauuuaguga

SEQ ID NO: 1821964 - RNA, 19 nt, Artificial Sequence
  Description of Artificial Sequence: Synthetic oligonucleotide
  Antisense strand to SEQ ID NO: 1821963
ucacuaaauagagagggca

SEQ ID NO: 1821965 - RNA, 19 nt, Artificial Sequence
  Description of Artificial Sequence: Synthetic oligonucleotide
  Sense strand starting at position 1666 of SEQ ID NO: 1563591
uuuagugaccuggguaaag

SEQ ID NO: 1821966 - RNA, 19 nt, Artificial Sequence
  Description of Artificial Sequence: Synthetic oligonucleotide
  Antisense strand to SEQ ID NO: 1821965
cuuuacccaggucacuaaa

SEQ ID NO: 1821967 - RNA, 19 nt, Artificial Sequence
  Description of Artificial Sequence: Synthetic oligonucleotide
  Sense strand starting at position 1909 of SEQ ID NO: 1563591
gggccacaucucuaugcua

SEQ ID NO: 1821968 - RNA, 19 nt, Artificial Sequence
  Description of Artificial Sequence: Synthetic oligonucleotide
  Antisense strand to SEQ ID NO: 1821967
uagcauagagauguggccc

SEQ ID NO: 1821969 - RNA, 19 nt, Artificial Sequence
  Description of Artificial Sequence: Synthetic oligonucleotide
  Sense strand starting at position 2184 of SEQ ID NO: 1563591
ggcgauguuauugauagca

SEQ ID NO: 1821970 - RNA, 19 nt, Artificial Sequence
  Description of Artificial Sequence: Synthetic oligonucleotide
  Antisense strand to SEQ ID NO: 1821969
ugcuaucaauaacaucgcc

SEQ ID NO: 1821971 - RNA, 19 nt, Artificial Sequence
  Description of Artificial Sequence: Synthetic oligonucleotide
  Sense strand starting at position 2285 of SEQ ID NO: 1563591
acuccuugccucuaagaga

SEQ ID NO: 1821972 - RNA, 19 nt, Artificial Sequence
  Description of Artificial Sequence: Synthetic oligonucleotide
  Antisense strand to SEQ ID NO: 1821971
ucucuuagaggcaaggagu

SEQ ID NO: 1821973 - RNA, 19 nt, Artificial Sequence
  Description of Artificial Sequence: Synthetic oligonucleotide
  Sense strand starting at position 2478 of SEQ ID NO: 1563591
ggcagauguggcuaaagga

SEQ ID NO: 1821974 - RNA, 19 nt, Artificial Sequence
  Description of Artificial Sequence: Synthetic oligonucleotide
  Antisense strand to SEQ ID NO: 1821973
uccuuuagccacaucugcc

SEQ ID NO: 1821975 - RNA, 19 nt, Artificial Sequence
  Description of Artificial Sequence: Synthetic oligonucleotide
  Sense strand starting at position 2519 of SEQ ID NO: 1563591
gaaugauucuaagcugaug

SEQ ID NO: 1821976 - RNA, 19 nt, Artificial Sequence
  Description of Artificial Sequence: Synthetic oligonucleotide
  Antisense strand to SEQ ID NO: 1821975
caucagcuuagaaucauuc

SEQ ID NO: 1821977 - RNA, 19 nt, Artificial Sequence
  Description of Artificial Sequence: Synthetic oligonucleotide
  Sense strand starting at position 2551 of SEQ ID NO: 1563591
ugcucucaugcaggaagau

SEQ ID NO: 1821978 - RNA, 19 nt, Artificial Sequence
  Description of Artificial Sequence: Synthetic oligonucleotide
  Antisense strand to SEQ ID NO: 1821977
aucuuccugcaugagagca

SEQ ID NO: 1821979 - RNA, 19 nt, Artificial Sequence
  Description of Artificial Sequence: Synthetic oligonucleotide
  Sense strand starting at position 2726 of SEQ ID NO: 1563591
cucugauuccgguaacaga

SEQ ID NO: 1821980 - RNA, 19 nt, Artificial Sequence
  Description of Artificial Sequence: Synthetic oligonucleotide
  Antisense strand to SEQ ID NO: 1821979
ucuguuaccggaaucagag

SEQ ID NO: 1821981 - RNA, 19 nt, Artificial Sequence
  Description of Artificial Sequence: Synthetic oligonucleotide
  Sense strand starting at position 2904 of SEQ ID NO: 1563591
ccuuucuuccuguaaagga

SEQ ID NO: 1821982 - RNA, 19 nt, Artificial Sequence
  Description of Artificial Sequence: Synthetic oligonucleotide
  Antisense strand to SEQ ID NO: 1821981
uccuuuacaggaagaaagg

SEQ ID NO: 1821983 - RNA, 19 nt, Artificial Sequence
  Description of Artificial Sequence: Synthetic oligonucleotide
  Sense strand starting at position 2989 of SEQ ID NO: 1563591
uacaaaucacuugggagua

SEQ ID NO: 1821984 - RNA, 19 nt, Artificial Sequence
  Description of Artificial Sequence: Synthetic oligonucleotide
  Antisense strand to SEQ ID NO: 1821983
uacucccaagugauuugua

SEQ ID NO: 1821985 - RNA, 19 nt, Artificial Sequence
  Description of Artificial Sequence: Synthetic oligonucleotide
  Sense strand starting at position 3151 of SEQ ID NO: 1563591
gcuacagucaggugggaaa

SEQ ID NO: 1821986 - RNA, 19 nt, Artificial Sequence
  Description of Artificial Sequence: Synthetic oligonucleotide
  Antisense strand to SEQ ID NO: 1821985
uuucccaccugacuguagc

SEQ ID NO: 1821987 - RNA, 19 nt, Artificial Sequence
  Description of Artificial Sequence: Synthetic oligonucleotide
  Sense strand starting at position 3201 of SEQ ID NO: 1563591
cauugaaggccuggguuaa

SEQ ID NO: 1821988 - RNA, 19 nt, Artificial Sequence
  Description of Artificial Sequence: Synthetic oligonucleotide
  Antisense strand to SEQ ID NO: 1821987
uuaacccaggccuucaaug

SEQ ID NO: 1821989 - RNA, 19 nt, Artificial Sequence
  Description of Artificial Sequence: Synthetic oligonucleotide
  Sense strand starting at position 3202 of SEQ ID NO: 1563591
auugaaggccuggguuaaa

SEQ ID NO: 1821990 - RNA, 19 nt, Artificial Sequence
  Description of Artificial Sequence: Synthetic oligonucleotide
  Antisense strand to SEQ ID NO: 1821989
uuuaacccaggccuucaau

SEQ ID NO: 1821991 - RNA, 19 nt, Artificial Sequence
  Description of Artificial Sequence: Synthetic oligonucleotide
  Sense strand starting at position 3263 of SEQ ID NO: 1563591
aaaggacuugcugguugaa

SEQ ID NO: 1821992 - RNA, 19 nt, Artificial Sequence
  Description of Artificial Sequence: Synthetic oligonucleotide
  Antisense strand to SEQ ID NO: 1821991
uucaaccagcaaguccuuu

SEQ ID NO: 1821993 - RNA, 19 nt, Artificial Sequence
  Description of Artificial Sequence: Synthetic oligonucleotide
  Sense strand starting at position 3265 of SEQ ID NO: 1563591
aggacuugcugguugaauc

SEQ ID NO: 1821994 - RNA, 19 nt, Artificial Sequence
  Description of Artificial Sequence: Synthetic oligonucleotide
  Antisense strand to SEQ ID NO: 1821993
gauucaaccagcaaguccu

SEQ ID NO: 1821995 - RNA, 19 nt, Artificial Sequence
  Description of Artificial Sequence: Synthetic oligonucleotide
  Sense strand starting at position 3266 of SEQ ID NO: 1563591
ggacuugcugguugaauca

SEQ ID NO: 1821996 - RNA, 19 nt, Artificial Sequence
  Description of Artificial Sequence: Synthetic oligonucleotide
  Antisense strand to SEQ ID NO: 1821995
ugauucaaccagcaagucc

SEQ ID NO: 1821997 - RNA, 19 nt, Artificial Sequence
  Description of Artificial Sequence: Synthetic oligonucleotide
  Sense strand starting at position 3273 of SEQ ID NO: 1563591
cugguugaaucagauuuac

SEQ ID NO: 1821998 - RNA, 19 nt, Artificial Sequence
  Description of Artificial Sequence: Synthetic oligonucleotide
  Antisense strand to SEQ ID NO: 1821997
guaaaucugauucaaccag

SEQ ID NO: 1821999 - RNA, 19 nt, Artificial Sequence
  Description of Artificial Sequence: Synthetic oligonucleotide
  Sense strand starting at position 3334 of SEQ ID NO: 1563591
gacagauaugguugcacug

SEQ ID NO: 1822000 - RNA, 19 nt, Artificial Sequence
  Description of Artificial Sequence: Synthetic oligonucleotide
  Antisense strand to SEQ ID NO: 1821999
cagugcaaccauaucuguc

SEQ ID NO: 1822001 - RNA, 19 nt, Artificial Sequence
  Description of Artificial Sequence: Synthetic oligonucleotide
  Sense strand starting at position 3363 of SEQ ID NO: 1563591
gagagaagaucugaaagac

SEQ ID NO: 1822002 - RNA, 19 nt, Artificial Sequence
  Description of Artificial Sequence: Synthetic oligonucleotide
  Antisense strand to SEQ ID NO: 1822001
gucuuucagaucuucucuc

SEQ ID NO: 1822003 - RNA, 19 nt, Artificial Sequence
  Description of Artificial Sequence: Synthetic oligonucleotide
  Sense strand starting at position 3377 of SEQ ID NO: 1563591
aagacugggcacuguuuaa

SEQ ID NO: 1822004 - RNA, 19 nt, Artificial Sequence
  Description of Artificial Sequence: Synthetic oligonucleotide
  Antisense strand to SEQ ID NO: 1822003
uuaaacagugcccagucuu

SEQ ID NO: 1822005 - RNA, 19 nt, Artificial Sequence
  Description of Artificial Sequence: Synthetic oligonucleotide
  Sense strand starting at position 3403 of SEQ ID NO: 1563591
ugaagaguuuggucagcaa

SEQ ID NO: 1822006 - RNA, 19 nt, Artificial Sequence
  Description of Artificial Sequence: Synthetic oligonucleotide
  Antisense strand to SEQ ID NO: 1822005
uugcugaccaaacucuuca

SEQ ID NO: 1822007 - RNA, 19 nt, Artificial Sequence
  Description of Artificial Sequence: Synthetic oligonucleotide
  Sense strand starting at position 3537 of SEQ ID NO: 1563591
aggugcuguccauaaauua

SEQ ID NO: 1822008 - RNA, 19 nt, Artificial Sequence
  Description of Artificial Sequence: Synthetic oligonucleotide
  Antisense strand to SEQ ID NO: 1822007
uaauuuauggacagcaccu

SEQ ID NO: 1822009 - RNA, 19 nt, Artificial Sequence
  Description of Artificial Sequence: Synthetic oligonucleotide
  Sense strand starting at position 3747 of SEQ ID NO: 1563591
ccaagaaccugugcauaaa

SEQ ID NO: 1822010 - RNA, 19 nt, Artificial Sequence
  Description of Artificial Sequence: Synthetic oligonucleotide
  Antisense strand to SEQ ID NO: 1822009
uuuaugcacagguucuugg

SEQ ID NO: 1822011 - RNA, 19 nt, Artificial Sequence
  Description of Artificial Sequence: Synthetic oligonucleotide
  Sense strand starting at position 3750 of SEQ ID NO: 1563591
agaaccugugcauaaagua

SEQ ID NO: 1822012 - RNA, 19 nt, Artificial Sequence
  Description of Artificial Sequence: Synthetic oligonucleotide
  Antisense strand to SEQ ID NO: 1822011
uacuuuaugcacagguucu

SEQ ID NO: 1822013 - RNA, 19 nt, Artificial Sequence
  Description of Artificial Sequence: Synthetic oligonucleotide
  Sense strand starting at position 29 of SEQ ID NO: 1563592
agaauaguggugugaagca

SEQ ID NO: 1822014 - RNA, 19 nt, Artificial Sequence
  Description of Artificial Sequence: Synthetic oligonucleotide
  Antisense strand to SEQ ID NO: 1822013
ugcuucacaccacuauucu

SEQ ID NO: 1822015 - RNA, 19 nt, Artificial Sequence
  Description of Artificial Sequence: Synthetic oligonucleotide
  Sense strand starting at position 58 of SEQ ID NO: 1563592
augagaucagcuugaaagc

SEQ ID NO: 1822016 - RNA, 19 nt, Artificial Sequence
  Description of Artificial Sequence: Synthetic oligonucleotide
  Antisense strand to SEQ ID NO: 1822015
gcuuucaagcugaucucau

SEQ ID NO: 1822017 - RNA, 19 nt, Artificial Sequence
  Description of Artificial Sequence: Synthetic oligonucleotide
  Sense strand starting at position 59 of SEQ ID NO: 1563592
ugagaucagcuugaaagca

SEQ ID NO: 1822018 - RNA, 19 nt, Artificial Sequence
  Description of Artificial Sequence: Synthetic oligonucleotide
  Antisense strand to SEQ ID NO: 1822017
ugcuuucaagcugaucuca

SEQ ID NO: 1822019 - RNA, 19 nt, Artificial Sequence
  Description of Artificial Sequence: Synthetic oligonucleotide
  Sense strand starting at position 112 of SEQ ID NO: 1563592
acacaucagucuucugauc

SEQ ID NO: 1822020 - RNA, 19 nt, Artificial Sequence
  Description of Artificial Sequence: Synthetic oligonucleotide
  Antisense strand to SEQ ID NO: 1822019
gaucagaagacugaugugu

SEQ ID NO: 1822021 - RNA, 19 nt, Artificial Sequence
  Description of Artificial Sequence: Synthetic oligonucleotide
  Sense strand starting at position 119 of SEQ ID NO: 1563592
agucuucugaucugcagga

SEQ ID NO: 1822022 - RNA, 19 nt, Artificial Sequence
  Description of Artificial Sequence: Synthetic oligonucleotide
  Antisense strand to SEQ ID NO: 1822021
uccugcagaucagaagacu

SEQ ID NO: 1822023 - RNA, 19 nt, Artificial Sequence
  Description of Artificial Sequence: Synthetic oligonucleotide
  Sense strand starting at position 121 of SEQ ID NO: 1563592
ucuucugaucugcaggaca

SEQ ID NO: 1822024 - RNA, 19 nt, Artificial Sequence
  Description of Artificial Sequence: Synthetic oligonucleotide
  Antisense strand to SEQ ID NO: 1822023
uguccugcagaucagaaga

SEQ ID NO: 1822025 - RNA, 19 nt, Artificial Sequence
  Description of Artificial Sequence: Synthetic oligonucleotide
  Sense strand starting at position 193 of SEQ ID NO: 1563592
ucuccagucuacuuagagu

SEQ ID NO: 1822026 - RNA, 19 nt, Artificial Sequence
  Description of Artificial Sequence: Synthetic oligonucleotide
  Antisense strand to SEQ ID NO: 1822025
acucuaaguagacuggaga

SEQ ID NO: 1822027 - RNA, 19 nt, Artificial Sequence
  Description of Artificial Sequence: Synthetic oligonucleotide
  Sense strand starting at position 258 of SEQ ID NO: 1563592
aagacugacccauguuagu

SEQ ID NO: 1822028 - RNA, 19 nt, Artificial Sequence
  Description of Artificial Sequence: Synthetic oligonucleotide
  Antisense strand to SEQ ID NO: 1822027
acuaacaugggucagucuu

SEQ ID NO: 1822029 - RNA, 19 nt, Artificial Sequence
  Description of Artificial Sequence: Synthetic oligonucleotide
  Sense strand starting at position 263 of SEQ ID NO: 1563592
ugacccauguuaguagaaa

SEQ ID NO: 1822030 - RNA, 19 nt, Artificial Sequence
  Description of Artificial Sequence: Synthetic oligonucleotide
  Antisense strand to SEQ ID NO: 1822029
uuucuacuaacauggguca

SEQ ID NO: 1822031 - RNA, 19 nt, Artificial Sequence
  Description of Artificial Sequence: Synthetic oligonucleotide
  Sense strand starting at position 314 of SEQ ID NO: 1563592
ccuguagaugucggagaga

SEQ ID NO: 1822032 - RNA, 19 nt, Artificial Sequence
  Description of Artificial Sequence: Synthetic oligonucleotide
  Antisense strand to SEQ ID NO: 1822031
ucucuccgacaucuacagg

SEQ ID NO: 1822033 - RNA, 19 nt, Artificial Sequence
  Description of Artificial Sequence: Synthetic oligonucleotide
  Sense strand starting at position 357 of SEQ ID NO: 1563592
ucugaaguggucuaaugua

SEQ ID NO: 1822034 - RNA, 19 nt, Artificial Sequence
  Description of Artificial Sequence: Synthetic oligonucleotide
  Antisense strand to SEQ ID NO: 1822033
uacauuagaccacuucaga

SEQ ID NO: 1822035 - RNA, 19 nt, Artificial Sequence
  Description of Artificial Sequence: Synthetic oligonucleotide
  Sense strand starting at position 489 of SEQ ID NO: 1563592
ugggauuauucuguccaua

SEQ ID NO: 1822036 - RNA, 19 nt, Artificial Sequence
  Description of Artificial Sequence: Synthetic oligonucleotide
  Antisense strand to SEQ ID NO: 1822035
uauggacagaauaauccca

SEQ ID NO: 1822037 - RNA, 19 nt, Artificial Sequence
  Description of Artificial Sequence: Synthetic oligonucleotide
  Sense strand starting at position 491 of SEQ ID NO: 1563592
ggauuauucuguccauauu

SEQ ID NO: 1822038 - RNA, 19 nt, Artificial Sequence
  Description of Artificial Sequence: Synthetic oligonucleotide
  Antisense strand to SEQ ID NO: 1822037
aauauggacagaauaaucc

SEQ ID NO: 1822039 - RNA, 19 nt, Artificial Sequence
  Description of Artificial Sequence: Synthetic oligonucleotide
  Sense strand starting at position 494 of SEQ ID NO: 1563592
uuauucuguccauauugca

SEQ ID NO: 1822040 - RNA, 19 nt, Artificial Sequence
  Description of Artificial Sequence: Synthetic oligonucleotide
  Antisense strand to SEQ ID NO: 1822039
ugcaauauggacagaauaa

SEQ ID NO: 1822041 - RNA, 19 nt, Artificial Sequence
  Description of Artificial Sequence: Synthetic oligonucleotide
  Sense strand starting at position 737 of SEQ ID NO: 1563592
gagugcucuggccaggcaa

SEQ ID NO: 1822042 - RNA, 19 nt, Artificial Sequence
  Description of Artificial Sequence: Synthetic oligonucleotide
  Antisense strand to SEQ ID NO: 1822041
uugccuggccagagcacuc

SEQ ID NO: 1822043 - RNA, 19 nt, Artificial Sequence
  Description of Artificial Sequence: Synthetic oligonucleotide
  Sense strand starting at position 880 of SEQ ID NO: 1563592
ucuuucgaggcuuaagaau

SEQ ID NO: 1822044 - RNA, 19 nt, Artificial Sequence
  Description of Artificial Sequence: Synthetic oligonucleotide
  Antisense strand to SEQ ID NO: 1822043
auucuuaagccucgaaaga

SEQ ID NO: 1822045 - RNA, 19 nt, Artificial Sequence
  Description of Artificial Sequence: Synthetic oligonucleotide
  Sense strand starting at position 927 of SEQ ID NO: 1563592
ggcugaaagucuuucucuu

SEQ ID NO: 1822046 - RNA, 19 nt, Artificial Sequence
  Description of Artificial Sequence: Synthetic oligonucleotide
  Antisense strand to SEQ ID NO: 1822045
aagagaaagacuuucagcc

SEQ ID NO: 1822047 - RNA, 19 nt, Artificial Sequence
  Description of Artificial Sequence: Synthetic oligonucleotide
  Sense strand starting at position 978 of SEQ ID NO: 1563592
uugggagcaccuggucaau

SEQ ID NO: 1822048 - RNA, 19 nt, Artificial Sequence
  Description of Artificial Sequence: Synthetic oligonucleotide
  Antisense strand to SEQ ID NO: 1822047
auugaccaggugcucccaa

SEQ ID NO: 1822049 - RNA, 19 nt, Artificial Sequence
  Description of Artificial Sequence: Synthetic oligonucleotide
  Sense strand starting at position 981 of SEQ ID NO: 1563592
ggagcaccuggucaaucua

SEQ ID NO: 1822050 - RNA, 19 nt, Artificial Sequence
  Description of Artificial Sequence: Synthetic oligonucleotide
  Antisense strand to SEQ ID NO: 1822049
uagauugaccaggugcucc

SEQ ID NO: 1822051 - RNA, 19 nt, Artificial Sequence
  Description of Artificial Sequence: Synthetic oligonucleotide
  Sense strand starting at position 1284 of SEQ ID NO: 1563592
cucagcagccagugagaaa

SEQ ID NO: 1822052 - RNA, 19 nt, Artificial Sequence
  Description of Artificial Sequence: Synthetic oligonucleotide
  Antisense strand to SEQ ID NO: 1822051
uuucucacuggcugcugag

SEQ ID NO: 1822053 - RNA, 19 nt, Artificial Sequence
  Description of Artificial Sequence: Synthetic oligonucleotide
  Sense strand starting at position 1285 of SEQ ID NO: 1563592
ucagcagccagugagaaau

SEQ ID NO: 1822054 - RNA, 19 nt, Artificial Sequence
  Description of Artificial Sequence: Synthetic oligonucleotide
  Antisense strand to SEQ ID NO: 1822053
auuucucacuggcugcuga

SEQ ID NO: 1822055 - RNA, 19 nt, Artificial Sequence
  Description of Artificial Sequence: Synthetic oligonucleotide
  Sense strand starting at position 1296 of SEQ ID NO: 1563592
ugagaaauaaguugaacgu

SEQ ID NO: 1822056 - RNA, 19 nt, Artificial Sequence
  Description of Artificial Sequence: Synthetic oligonucleotide
  Antisense strand to SEQ ID NO: 1822055
acguucaacuuauuucuca

SEQ ID NO: 1822057 - RNA, 19 nt, Artificial Sequence
  Description of Artificial Sequence: Synthetic oligonucleotide
  Sense strand starting at position 2090 of SEQ ID NO: 1563592
ugccucuagaucugaagga

SEQ ID NO: 1822058 - RNA, 19 nt, Artificial Sequence
  Description of Artificial Sequence: Synthetic oligonucleotide
  Antisense strand to SEQ ID NO: 1822057
uccuucagaucuagaggca

SEQ ID NO: 1822059 - RNA, 19 nt, Artificial Sequence
  Description of Artificial Sequence: Synthetic oligonucleotide
  Sense strand starting at position 2099 of SEQ ID NO: 1563592
aucugaaggaucuggucua

SEQ ID NO: 1822060 - RNA, 19 nt, Artificial Sequence
  Description of Artificial Sequence: Synthetic oligonucleotide
  Antisense strand to SEQ ID NO: 1822059
uagaccagauccuucagau

SEQ ID NO: 1822061 - RNA, 19 nt, Artificial Sequence
  Description of Artificial Sequence: Synthetic oligonucleotide
  Sense strand starting at position 2112 of SEQ ID NO: 1563592
ggucuaacagucuauggca

SEQ ID NO: 1822062 - RNA, 19 nt, Artificial Sequence
  Description of Artificial Sequence: Synthetic oligonucleotide
  Antisense strand to SEQ ID NO: 1822061
ugccauagacuguuagacc

SEQ ID NO: 1822063 - RNA, 19 nt, Artificial Sequence
  Description of Artificial Sequence: Synthetic oligonucleotide
  Sense strand starting at position 2384 of SEQ ID NO: 1563592
gggaaggugugucuuugga

SEQ ID NO: 1822064 - RNA, 19 nt, Artificial Sequence
  Description of Artificial Sequence: Synthetic oligonucleotide
  Antisense strand to SEQ ID NO: 1822063
uccaaagacacaccuuccc

SEQ ID NO: 1822065 - RNA, 19 nt, Artificial Sequence
  Description of Artificial Sequence: Synthetic oligonucleotide
  Sense strand starting at position 2386 of SEQ ID NO: 1563592
gaaggugugucuuuggaca

SEQ ID NO: 1822066 - RNA, 19 nt, Artificial Sequence
  Description of Artificial Sequence: Synthetic oligonucleotide
  Antisense strand to SEQ ID NO: 1822065
uguccaaagacacaccuuc

SEQ ID NO: 1822067 - RNA, 19 nt, Artificial Sequence
  Description of Artificial Sequence: Synthetic oligonucleotide
  Sense strand starting at position 2698 of SEQ ID NO: 1563592
ucaccuuaggcagaguaaa

SEQ ID NO: 1822068 - RNA, 19 nt, Artificial Sequence
  Description of Artificial Sequence: Synthetic oligonucleotide
  Antisense strand to SEQ ID NO: 1822067
uuuacucugccuaagguga

SEQ ID NO: 1822069 - RNA, 19 nt, Artificial Sequence
  Description of Artificial Sequence: Synthetic oligonucleotide
  Sense strand starting at position 3007 of SEQ ID NO: 1563592
ggaagauccagccaguguu

SEQ ID NO: 1822070 - RNA, 19 nt, Artificial Sequence
  Description of Artificial Sequence: Synthetic oligonucleotide
  Antisense strand to SEQ ID NO: 1822069
aacacuggcuggaucuucc

SEQ ID NO: 1822071 - RNA, 19 nt, Artificial Sequence
  Description of Artificial Sequence: Synthetic oligonucleotide
  Sense strand starting at position 3062 of SEQ ID NO: 1563592
gguuuaaaguucccacacu

SEQ ID NO: 1822072 - RNA, 19 nt, Artificial Sequence
  Description of Artificial Sequence: Synthetic oligonucleotide
  Antisense strand to SEQ ID NO: 1822071
agugugggaacuuuaaacc

SEQ ID NO: 1822073 - RNA, 19 nt, Artificial Sequence
  Description of Artificial Sequence: Synthetic oligonucleotide
  Sense strand starting at position 3290 of SEQ ID NO: 1563592
guuuaauugcaugaacgca

SEQ ID NO: 1822074 - RNA, 19 nt, Artificial Sequence
  Description of Artificial Sequence: Synthetic oligonucleotide
  Antisense strand to SEQ ID NO: 1822073
ugcguucaugcaauuaaac

SEQ ID NO: 1822075 - RNA, 19 nt, Artificial Sequence
  Description of Artificial Sequence: Synthetic oligonucleotide
  Sense strand starting at position 3305 of SEQ ID NO: 1563592
cgcaguuacuacucaagga

SEQ ID NO: 1822076 - RNA, 19 nt, Artificial Sequence
  Description of Artificial Sequence: Synthetic oligonucleotide
  Antisense strand to SEQ ID NO: 1822075
uccuugaguaguaacugcg

SEQ ID NO: 1822077 - RNA, 19 nt, Artificial Sequence
  Description of Artificial Sequence: Synthetic oligonucleotide
  Sense strand starting at position 3353 of SEQ ID NO: 1563592
ugaacucuauuguuuguaa

SEQ ID NO: 1822078 - RNA, 19 nt, Artificial Sequence
  Description of Artificial Sequence: Synthetic oligonucleotide
  Antisense strand to SEQ ID NO: 1822077
uuacaaacaauagaguuca

SEQ ID NO: 1822079 - RNA, 19 nt, Artificial Sequence
  Description of Artificial Sequence: Synthetic oligonucleotide
  Sense strand starting at position 3388 of SEQ ID NO: 1563592
gucugcacugugcuuuaua

SEQ ID NO: 1822080 - RNA, 19 nt, Artificial Sequence
  Description of Artificial Sequence: Synthetic oligonucleotide
  Antisense strand to SEQ ID NO: 1822079
uauaaagcacagugcagac

SEQ ID NO: 1822081 - RNA, 19 nt, Artificial Sequence
  Description of Artificial Sequence: Synthetic oligonucleotide
  Sense strand starting at position 3428 of SEQ ID NO: 1563592
auuggagucucaucgcaac

SEQ ID NO: 1822082 - RNA, 19 nt, Artificial Sequence
  Description of Artificial Sequence: Synthetic oligonucleotide
  Antisense strand to SEQ ID NO: 1822081
guugcgaugagacuccaau

SEQ ID NO: 1822083 - RNA, 19 nt, Artificial Sequence
  Description of Artificial Sequence: Synthetic oligonucleotide
  Sense strand starting at position 3595 of SEQ ID NO: 1563592
aggcuacuugucugaucua

SEQ ID NO: 1822084 - RNA, 19 nt, Artificial Sequence
  Description of Artificial Sequence: Synthetic oligonucleotide
  Antisense strand to SEQ ID NO: 1822083
uagaucagacaaguagccu

SEQ ID NO: 1822085 - RNA, 19 nt, Artificial Sequence
  Description of Artificial Sequence: Synthetic oligonucleotide
  Sense strand starting at position 3647 of SEQ ID NO: 1563592
uaaaguugcgcuccugcaa

SEQ ID NO: 1822086 - RNA, 19 nt, Artificial Sequence
  Description of Artificial Sequence: Synthetic oligonucleotide
  Antisense strand to SEQ ID NO: 1822085
uugcaggagcgcaacuuua

SEQ ID NO: 1822087 - RNA, 19 nt, Artificial Sequence
  Description of Artificial Sequence: Synthetic oligonucleotide
  Sense strand starting at position 3810 of SEQ ID NO: 1563592
ccagcaauucuggacuucu

SEQ ID NO: 1822088 - RNA, 19 nt, Artificial Sequence
  Description of Artificial Sequence: Synthetic oligonucleotide
  Antisense strand to SEQ ID NO: 1822087
agaaguccagaauugcugg

SEQ ID NO: 1822089 - RNA, 19 nt, Artificial Sequence
  Description of Artificial Sequence: Synthetic oligonucleotide
  Sense strand starting at position 3901 of SEQ ID NO: 1563592
augcucuuuccugggauau

SEQ ID NO: 1822090 - RNA, 19 nt, Artificial Sequence
  Description of Artificial Sequence: Synthetic oligonucleotide
  Antisense strand to SEQ ID NO: 1822089
auaucccaggaaagagcau

SEQ ID NO: 1822091 - RNA, 19 nt, Artificial Sequence
  Description of Artificial Sequence: Synthetic oligonucleotide
  Sense strand starting at position 3943 of SEQ ID NO: 1563592
ugucaaauguaugcaccaa

SEQ ID NO: 1822092 - RNA, 19 nt, Artificial Sequence
  Description of Artificial Sequence: Synthetic oligonucleotide
  Antisense strand to SEQ ID NO: 1822091
uuggugcauacauuugaca

SEQ ID NO: 1822093 - RNA, 19 nt, Artificial Sequence
  Description of Artificial Sequence: Synthetic oligonucleotide
  Sense strand starting at position 199 of SEQ ID NO: 1563593
ugccauuaacaagaaaugu

SEQ ID NO: 1822094 - RNA, 19 nt, Artificial Sequence
  Description of Artificial Sequence: Synthetic oligonucleotide
  Antisense strand to SEQ ID NO: 1822093
acauuucuuguuaauggca

SEQ ID NO: 1822095 - RNA, 19 nt, Artificial Sequence
  Description of Artificial Sequence: Synthetic oligonucleotide
  Sense strand starting at position 293 of SEQ ID NO: 1563593
ucaagucacugccuugaca

SEQ ID NO: 1822096 - RNA, 19 nt, Artificial Sequence
  Description of Artificial Sequence: Synthetic oligonucleotide
  Antisense strand to SEQ ID NO: 1822095
ugucaaggcagugacuuga

SEQ ID NO: 1822097 - RNA, 19 nt, Artificial Sequence
  Description of Artificial Sequence: Synthetic oligonucleotide
  Sense strand starting at position 447 of SEQ ID NO: 1563593
guacaauugaagggcaaua

SEQ ID NO: 1822098 - RNA, 19 nt, Artificial Sequence
  Description of Artificial Sequence: Synthetic oligonucleotide
  Antisense strand to SEQ ID NO: 1822097
uauugcccuucaauuguac

SEQ ID NO: 1822099 - RNA, 19 nt, Artificial Sequence
  Description of Artificial Sequence: Synthetic oligonucleotide
  Sense strand starting at position 459 of SEQ ID NO: 1563593
ggcaauaugcaggaaguca

SEQ ID NO: 1822100 - RNA, 19 nt, Artificial Sequence
  Description of Artificial Sequence: Synthetic oligonucleotide
  Antisense strand to SEQ ID NO: 1822099
ugacuuccugcauauugcc

SEQ ID NO: 1822101 - RNA, 19 nt, Artificial Sequence
  Description of Artificial Sequence: Synthetic oligonucleotide
  Sense strand starting at position 700 of SEQ ID NO: 1563593
ccuucuucuccagaggcaa

SEQ ID NO: 1822102 - RNA, 19 nt, Artificial Sequence
  Description of Artificial Sequence: Synthetic oligonucleotide
  Antisense strand to SEQ ID NO: 1822101
uugccucuggagaagaagg

SEQ ID NO: 1822103 - RNA, 19 nt, Artificial Sequence
  Description of Artificial Sequence: Synthetic oligonucleotide
  Sense strand starting at position 1106 of SEQ ID NO: 1563593
uguuaacaauggucaaacu

SEQ ID NO: 1822104 - RNA, 19 nt, Artificial Sequence
  Description of Artificial Sequence: Synthetic oligonucleotide
  Antisense strand to SEQ ID NO: 1822103
aguuugaccauuguuaaca

SEQ ID NO: 1822105 - RNA, 19 nt, Artificial Sequence
  Description of Artificial Sequence: Synthetic oligonucleotide
  Sense strand starting at position 1366 of SEQ ID NO: 1563593
ggaagugguucuccaggaa

SEQ ID NO: 1822106 - RNA, 19 nt, Artificial Sequence
  Description of Artificial Sequence: Synthetic oligonucleotide
  Antisense strand to SEQ ID NO: 1822105
uuccuggagaaccacuucc

SEQ ID NO: 1822107 - RNA, 19 nt, Artificial Sequence
  Description of Artificial Sequence: Synthetic oligonucleotide
  Sense strand starting at position 1645 of SEQ ID NO: 1563593
cguccuggucgaaguagaa

SEQ ID NO: 1822108 - RNA, 19 nt, Artificial Sequence
  Description of Artificial Sequence: Synthetic oligonucleotide
  Antisense strand to SEQ ID NO: 1822107
uucuacuucgaccaggacg

SEQ ID NO: 1822109 - RNA, 19 nt, Artificial Sequence
  Description of Artificial Sequence: Synthetic oligonucleotide
  Sense strand starting at position 1944 of SEQ ID NO: 1563593
gguaguguggucgcugauu

SEQ ID NO: 1822110 - RNA, 19 nt, Artificial Sequence
  Description of Artificial Sequence: Synthetic oligonucleotide
  Antisense strand to SEQ ID NO: 1822109
aaucagcgaccacacuacc

SEQ ID NO: 1822111 - RNA, 19 nt, Artificial Sequence
  Description of Artificial Sequence: Synthetic oligonucleotide
  Sense strand starting at position 2108 of SEQ ID NO: 1563593
ggaacugggcgcuaucaga

SEQ ID NO: 1822112 - RNA, 19 nt, Artificial Sequence
  Description of Artificial Sequence: Synthetic oligonucleotide
  Antisense strand to SEQ ID NO: 1822111
ucugauagcgcccaguucc

SEQ ID NO: 1822113 - RNA, 19 nt, Artificial Sequence
  Description of Artificial Sequence: Synthetic oligonucleotide
  Sense strand starting at position 2239 of SEQ ID NO: 1563593
uuucuuaaacucugagagu

SEQ ID NO: 1822114 - RNA, 19 nt, Artificial Sequence
  Description of Artificial Sequence: Synthetic oligonucleotide
  Antisense strand to SEQ ID NO: 1822113
acucucagaguuuaagaaa

SEQ ID NO: 1822115 - RNA, 19 nt, Artificial Sequence
  Description of Artificial Sequence: Synthetic oligonucleotide
  Sense strand starting at position 2250 of SEQ ID NO: 1563593
cugagaguauguucuggua

SEQ ID NO: 1822116 - RNA, 19 nt, Artificial Sequence
  Description of Artificial Sequence: Synthetic oligonucleotide
  Antisense strand to SEQ ID NO: 1822115
uaccagaacauacucucag

SEQ ID NO: 1822117 - RNA, 19 nt, Artificial Sequence
  Description of Artificial Sequence: Synthetic oligonucleotide
  Sense strand starting at position 2277 of SEQ ID NO: 1563593
uucuguuuccuguauuaua

SEQ ID NO: 1822118 - RNA, 19 nt, Artificial Sequence
  Description of Artificial Sequence: Synthetic oligonucleotide
  Antisense strand to SEQ ID NO: 1822117
uauaauacaggaaacagaa

SEQ ID NO: 1822119 - RNA, 19 nt, Artificial Sequence
  Description of Artificial Sequence: Synthetic oligonucleotide
  Sense strand starting at position 2397 of SEQ ID NO: 1563593
cuggguuagccucagugau

SEQ ID NO: 1822120 - RNA, 19 nt, Artificial Sequence
  Description of Artificial Sequence: Synthetic oligonucleotide
  Antisense strand to SEQ ID NO: 1822119
aucacugaggcuaacccag

SEQ ID NO: 1822121 - RNA, 19 nt, Artificial Sequence
  Description of Artificial Sequence: Synthetic oligonucleotide
  Sense strand starting at position 2399 of SEQ ID NO: 1563593
ggguuagccucagugauaa

SEQ ID NO: 1822122 - RNA, 19 nt, Artificial Sequence
  Description of Artificial Sequence: Synthetic oligonucleotide
  Antisense strand to SEQ ID NO: 1822121
uuaucacugaggcuaaccc

SEQ ID NO: 1822123 - RNA, 19 nt, Artificial Sequence
  Description of Artificial Sequence: Synthetic oligonucleotide
  Sense strand starting at position 2407 of SEQ ID NO: 1563593
cucagugauaagcauggau

SEQ ID NO: 1822124 - RNA, 19 nt, Artificial Sequence
  Description of Artificial Sequence: Synthetic oligonucleotide
  Antisense strand to SEQ ID NO: 1822123
auccaugcuuaucacugag

SEQ ID NO: 1822125 - RNA, 19 nt, Artificial Sequence
  Description of Artificial Sequence: Synthetic oligonucleotide
  Sense strand starting at position 2410 of SEQ ID NO: 1563593
agugauaagcauggaucga

SEQ ID NO: 1822126 - RNA, 19 nt, Artificial Sequence
  Description of Artificial Sequence: Synthetic oligonucleotide
  Antisense strand to SEQ ID NO: 1822125
ucgauccaugcuuaucacu

SEQ ID NO: 1822127 - RNA, 19 nt, Artificial Sequence
  Description of Artificial Sequence: Synthetic oligonucleotide
  Sense strand starting at position 2411 of SEQ ID NO: 1563593
gugauaagcauggaucgaa

SEQ ID NO: 1822128 - RNA, 19 nt, Artificial Sequence
  Description of Artificial Sequence: Synthetic oligonucleotide
  Antisense strand to SEQ ID NO: 1822127
uucgauccaugcuuaucac

SEQ ID NO: 1822129 - RNA, 19 nt, Artificial Sequence
  Description of Artificial Sequence: Synthetic oligonucleotide
  Sense strand starting at position 2445 of SEQ ID NO: 1563593
cugggugaccaguaggauu

SEQ ID NO: 1822130 - RNA, 19 nt, Artificial Sequence
  Description of Artificial Sequence: Synthetic oligonucleotide
  Antisense strand to SEQ ID NO: 1822129
aauccuacuggucacccag

SEQ ID NO: 1822131 - RNA, 19 nt, Artificial Sequence
  Description of Artificial Sequence: Synthetic oligonucleotide
  Sense strand starting at position 2488 of SEQ ID NO: 1563593
guguuaauuagggagugcu

SEQ ID NO: 1822132 - RNA, 19 nt, Artificial Sequence
  Description of Artificial Sequence: Synthetic oligonucleotide
  Antisense strand to SEQ ID NO: 1822131
agcacucccuaauuaacac

SEQ ID NO: 1822133 - RNA, 19 nt, Artificial Sequence
  Description of Artificial Sequence: Synthetic oligonucleotide
  Sense strand starting at position 2491 of SEQ ID NO: 1563593
uuaauuagggagugcucau

SEQ ID NO: 1822134 - RNA, 19 nt, Artificial Sequence
  Description of Artificial Sequence: Synthetic oligonucleotide
  Antisense strand to SEQ ID NO: 1822133
augagcacucccuaauuaa

SEQ ID NO: 1822135 - RNA, 19 nt, Artificial Sequence
  Description of Artificial Sequence: Synthetic oligonucleotide
  Sense strand starting at position 2504 of SEQ ID NO: 1563593
gcucaucuccuuuggagau

SEQ ID NO: 1822136 - RNA, 19 nt, Artificial Sequence
  Description of Artificial Sequence: Synthetic oligonucleotide
  Antisense strand to SEQ ID NO: 1822135
aucuccaaaggagaugagc

SEQ ID NO: 1822137 - RNA, 19 nt, Artificial Sequence
  Description of Artificial Sequence: Synthetic oligonucleotide
  Sense strand starting at position 2574 of SEQ ID NO: 1563593
auggcauuucucuggcacu

SEQ ID NO: 1822138 - RNA, 19 nt, Artificial Sequence
  Description of Artificial Sequence: Synthetic oligonucleotide
  Antisense strand to SEQ ID NO: 1822137
agugccagagaaaugccau

SEQ ID NO: 1822139 - RNA, 19 nt, Artificial Sequence
  Description of Artificial Sequence: Synthetic oligonucleotide
  Sense strand starting at position 2608 of SEQ ID NO: 1563593
aucugucuucuagguagau

SEQ ID NO: 1822140 - RNA, 19 nt, Artificial Sequence
  Description of Artificial Sequence: Synthetic oligonucleotide
  Antisense strand to SEQ ID NO: 1822139
aucuaccuagaagacagau

SEQ ID NO: 1822141 - RNA, 19 nt, Artificial Sequence
  Description of Artificial Sequence: Synthetic oligonucleotide
  Sense strand starting at position 2609 of SEQ ID NO: 1563593
ucugucuucuagguagaug

SEQ ID NO: 1822142 - RNA, 19 nt, Artificial Sequence
  Description of Artificial Sequence: Synthetic oligonucleotide
  Antisense strand to SEQ ID NO: 1822141
caucuaccuagaagacaga

SEQ ID NO: 1822143 - RNA, 19 nt, Artificial Sequence
  Description of Artificial Sequence: Synthetic oligonucleotide
  Sense strand starting at position 2610 of SEQ ID NO: 1563593
cugucuucuagguagaugu

SEQ ID NO: 1822144 - RNA, 19 nt, Artificial Sequence
  Description of Artificial Sequence: Synthetic oligonucleotide
  Antisense strand to SEQ ID NO: 1822143
acaucuaccuagaagacag

SEQ ID NO: 1822145 - RNA, 19 nt, Artificial Sequence
  Description of Artificial Sequence: Synthetic oligonucleotide
  Sense strand starting at position 2677 of SEQ ID NO: 1563593
auucuuucugcaggagaga

SEQ ID NO: 1822146 - RNA, 19 nt, Artificial Sequence
  Description of Artificial Sequence: Synthetic oligonucleotide
  Antisense strand to SEQ ID NO: 1822145
ucucuccugcagaaagaau

SEQ ID NO: 1822147 - RNA, 19 nt, Artificial Sequence
  Description of Artificial Sequence: Synthetic oligonucleotide
  Sense strand starting at position 2877 of SEQ ID NO: 1563593
ggacucagcucacugaaga

SEQ ID NO: 1822148 - RNA, 19 nt, Artificial Sequence
  Description of Artificial Sequence: Synthetic oligonucleotide
  Antisense strand to SEQ ID NO: 1822147
ucuucagugagcugagucc

SEQ ID NO: 1822149 - RNA, 19 nt, Artificial Sequence
  Description of Artificial Sequence: Synthetic oligonucleotide
  Sense strand starting at position 2952 of SEQ ID NO: 1563593
agagaaacucacuguggca

SEQ ID NO: 1822150 - RNA, 19 nt, Artificial Sequence
  Description of Artificial Sequence: Synthetic oligonucleotide
  Antisense strand to SEQ ID NO: 1822149
ugccacagugaguuucucu

SEQ ID NO: 1822151 - RNA, 19 nt, Artificial Sequence
  Description of Artificial Sequence: Synthetic oligonucleotide
  Sense strand starting at position 3092 of SEQ ID NO: 1563593
acugguguauggccaaaua

SEQ ID NO: 1822152 - RNA, 19 nt, Artificial Sequence
  Description of Artificial Sequence: Synthetic oligonucleotide
  Antisense strand to SEQ ID NO: 1822151
uauuuggccauacaccagu

SEQ ID NO: 1822153 - RNA, 19 nt, Artificial Sequence
  Description of Artificial Sequence: Synthetic oligonucleotide
  Sense strand starting at position 3104 of SEQ ID NO: 1563593
ccaaauaaggccuaguuua

SEQ ID NO: 1822154 - RNA, 19 nt, Artificial Sequence
  Description of Artificial Sequence: Synthetic oligonucleotide
  Antisense strand to SEQ ID NO: 1822153
uaaacuaggccuuauuugg

SEQ ID NO: 1822155 - RNA, 19 nt, Artificial Sequence
  Description of Artificial Sequence: Synthetic oligonucleotide
  Sense strand starting at position 3263 of SEQ ID NO: 1563593
ugcacuggaccuugauaaa

SEQ ID NO: 1822156 - RNA, 19 nt, Artificial Sequence
  Description of Artificial Sequence: Synthetic oligonucleotide
  Antisense strand to SEQ ID NO: 1822155
uuuaucaagguccagugca

SEQ ID NO: 1822157 - RNA, 19 nt, Artificial Sequence
  Description of Artificial Sequence: Synthetic oligonucleotide
  Sense strand starting at position 3322 of SEQ ID NO: 1563593
uggaacauuuguuacagga

SEQ ID NO: 1822158 - RNA, 19 nt, Artificial Sequence
  Description of Artificial Sequence: Synthetic oligonucleotide
  Antisense strand to SEQ ID NO: 1822157
uccuguaacaaauguucca

SEQ ID NO: 1822159 - RNA, 19 nt, Artificial Sequence
  Description of Artificial Sequence: Synthetic oligonucleotide
  Sense strand starting at position 3324 of SEQ ID NO: 1563593
gaacauuuguuacaggaga

SEQ ID NO: 1822160 - RNA, 19 nt, Artificial Sequence
  Description of Artificial Sequence: Synthetic oligonucleotide
  Antisense strand to SEQ ID NO: 1822159
ucuccuguaacaaauguuc

SEQ ID NO: 1822161 - RNA, 19 nt, Artificial Sequence
  Description of Artificial Sequence: Synthetic oligonucleotide
  Sense strand starting at position 3339 of SEQ ID NO: 1563593
gagauagccucuccugacu

SEQ ID NO: 1822162 - RNA, 19 nt, Artificial Sequence
  Description of Artificial Sequence: Synthetic oligonucleotide
  Antisense strand to SEQ ID NO: 1822161
agucaggagaggcuaucuc

SEQ ID NO: 1822163 - RNA, 19 nt, Artificial Sequence
  Description of Artificial Sequence: Synthetic oligonucleotide
  Sense strand starting at position 3428 of SEQ ID NO: 1563593
gacuuauggcaauggagug

SEQ ID NO: 1822164 - RNA, 19 nt, Artificial Sequence
  Description of Artificial Sequence: Synthetic oligonucleotide
  Antisense strand to SEQ ID NO: 1822163
cacuccauugccauaaguc

SEQ ID NO: 1822165 - RNA, 19 nt, Artificial Sequence
  Description of Artificial Sequence: Synthetic oligonucleotide
  Sense strand starting at position 3442 of SEQ ID NO: 1563593
gagugcauuccagaacaca

SEQ ID NO: 1822166 - RNA, 19 nt, Artificial Sequence
  Description of Artificial Sequence: Synthetic oligonucleotide
  Antisense strand to SEQ ID NO: 1822165
uguguucuggaaugcacuc

SEQ ID NO: 1822167 - RNA, 19 nt, Artificial Sequence
  Description of Artificial Sequence: Synthetic oligonucleotide
  Sense strand starting at position 3498 of SEQ ID NO: 1563593
uuuagauagcucuggguca

SEQ ID NO: 1822168 - RNA, 19 nt, Artificial Sequence
  Description of Artificial Sequence: Synthetic oligonucleotide
  Antisense strand to SEQ ID NO: 1822167
ugacccagagcuaucuaaa

SEQ ID NO: 1822169 - RNA, 19 nt, Artificial Sequence
  Description of Artificial Sequence: Synthetic oligonucleotide
  Sense strand starting at position 3500 of SEQ ID NO: 1563593
uagauagcucugggucauc

SEQ ID NO: 1822170 - RNA, 19 nt, Artificial Sequence
  Description of Artificial Sequence: Synthetic oligonucleotide
  Antisense strand to SEQ ID NO: 1822169
gaugacccagagcuaucua

SEQ ID NO: 1822171 - RNA, 19 nt, Artificial Sequence
  Description of Artificial Sequence: Synthetic oligonucleotide
  Sense strand starting at position 3920 of SEQ ID NO: 1563593
gugagagacuuggucucca

SEQ ID NO: 1822172 - RNA, 19 nt, Artificial Sequence
  Description of Artificial Sequence: Synthetic oligonucleotide
  Antisense strand to SEQ ID NO: 1822171
uggagaccaagucucucac

SEQ ID NO: 1822173 - RNA, 19 nt, Artificial Sequence
  Description of Artificial Sequence: Synthetic oligonucleotide
  Sense strand starting at position 4 of SEQ ID NO: 1563594
ccugcugugcuugaagaga

SEQ ID NO: 1822174 - RNA, 19 nt, Artificial Sequence
  Description of Artificial Sequence: Synthetic oligonucleotide
  Antisense strand to SEQ ID NO: 1822173
ucucuucaagcacagcagg

SEQ ID NO: 1822175 - RNA, 19 nt, Artificial Sequence
  Description of Artificial Sequence: Synthetic oligonucleotide
  Sense strand starting at position 17 of SEQ ID NO: 1563594
aagagaagccacugacagu

SEQ ID NO: 1822176 - RNA, 19 nt, Artificial Sequence
  Description of Artificial Sequence: Synthetic oligonucleotide
  Antisense strand to SEQ ID NO: 1822175
acugucaguggcuucucuu

SEQ ID NO: 1822177 - RNA, 19 nt, Artificial Sequence
  Description of Artificial Sequence: Synthetic oligonucleotide
  Sense strand starting at position 208 of SEQ ID NO: 1563594
ccucauauagucuguuacu

SEQ ID NO: 1822178 - RNA, 19 nt, Artificial Sequence
  Description of Artificial Sequence: Synthetic oligonucleotide
  Antisense strand to SEQ ID NO: 1822177
aguaacagacuauaugagg

SEQ ID NO: 1822179 - RNA, 19 nt, Artificial Sequence
  Description of Artificial Sequence: Synthetic oligonucleotide
  Sense strand starting at position 209 of SEQ ID NO: 1563594
cucauauagucuguuacuu

SEQ ID NO: 1822180 - RNA, 19 nt, Artificial Sequence
  Description of Artificial Sequence: Synthetic oligonucleotide
  Antisense strand to SEQ ID NO: 1822179
aaguaacagacuauaugag

SEQ ID NO: 1822181 - RNA, 19 nt, Artificial Sequence
  Description of Artificial Sequence: Synthetic oligonucleotide
  Sense strand starting at position 217 of SEQ ID NO: 1563594
gucuguuacuuauucugaa

SEQ ID NO: 1822182 - RNA, 19 nt, Artificial Sequence
  Description of Artificial Sequence: Synthetic oligonucleotide
  Antisense strand to SEQ ID NO: 1822181
uucagaauaaguaacagac

SEQ ID NO: 1822183 - RNA, 19 nt, Artificial Sequence
  Description of Artificial Sequence: Synthetic oligonucleotide
  Sense strand starting at position 335 of SEQ ID NO: 1563594
cagggcugucuuuaagagu

SEQ ID NO: 1822184 - RNA, 19 nt, Artificial Sequence
  Description of Artificial Sequence: Synthetic oligonucleotide
  Antisense strand to SEQ ID NO: 1822183
acucuuaaagacagcccug

SEQ ID NO: 1822185 - RNA, 19 nt, Artificial Sequence
  Description of Artificial Sequence: Synthetic oligonucleotide
  Sense strand starting at position 380 of SEQ ID NO: 1563594
gcugguuauuuggcuagau

SEQ ID NO: 1822186 - RNA, 19 nt, Artificial Sequence
  Description of Artificial Sequence: Synthetic oligonucleotide
  Antisense strand to SEQ ID NO: 1822185
aucuagccaaauaaccagc

SEQ ID NO: 1822187 - RNA, 19 nt, Artificial Sequence
  Description of Artificial Sequence: Synthetic oligonucleotide
  Sense strand starting at position 421 of SEQ ID NO: 1563594
ucuuuaacccguugauaua

SEQ ID NO: 1822188 - RNA, 19 nt, Artificial Sequence
  Description of Artificial Sequence: Synthetic oligonucleotide
  Antisense strand to SEQ ID NO: 1822187
uauaucaacggguuaaaga

SEQ ID NO: 1822189 - RNA, 19 nt, Artificial Sequence
  Description of Artificial Sequence: Synthetic oligonucleotide
  Sense strand starting at position 435 of SEQ ID NO: 1563594
auauacuugcaggguaaca

SEQ ID NO: 1822190 - RNA, 19 nt, Artificial Sequence
  Description of Artificial Sequence: Synthetic oligonucleotide
  Antisense strand to SEQ ID NO: 1822189
uguuacccugcaaguauau

SEQ ID NO: 1822191 - RNA, 19 nt, Artificial Sequence
  Description of Artificial Sequence: Synthetic oligonucleotide
  Sense strand starting at position 472 of SEQ ID NO: 1563594
gcaucagaagaucgagguu

SEQ ID NO: 1822192 - RNA, 19 nt, Artificial Sequence
  Description of Artificial Sequence: Synthetic oligonucleotide
  Antisense strand to SEQ ID NO: 1822191
aaccucgaucuucugaugc

SEQ ID NO: 1822193 - RNA, 19 nt, Artificial Sequence
  Description of Artificial Sequence: Synthetic oligonucleotide
  Sense strand starting at position 475 of SEQ ID NO: 1563594
ucagaagaucgagguucau

SEQ ID NO: 1822194 - RNA, 19 nt, Artificial Sequence
  Description of Artificial Sequence: Synthetic oligonucleotide
  Antisense strand to SEQ ID NO: 1822193
augaaccucgaucuucuga

SEQ ID NO: 1822195 - RNA, 19 nt, Artificial Sequence
  Description of Artificial Sequence: Synthetic oligonucleotide
  Sense strand starting at position 484 of SEQ ID NO: 1563594
cgagguucauguccagauu

SEQ ID NO: 1822196 - RNA, 19 nt, Artificial Sequence
  Description of Artificial Sequence: Synthetic oligonucleotide
  Antisense strand to SEQ ID NO: 1822195
aaucuggacaugaaccucg

SEQ ID NO: 1822197 - RNA, 19 nt, Artificial Sequence
  Description of Artificial Sequence: Synthetic oligonucleotide
  Sense strand starting at position 1168 of SEQ ID NO: 1563594
gagaguugcagguguauca

SEQ ID NO: 1822198 - RNA, 19 nt, Artificial Sequence
  Description of Artificial Sequence: Synthetic oligonucleotide
  Antisense strand to SEQ ID NO: 1822197
ugauacaccugcaacucuc

SEQ ID NO: 1822199 - RNA, 19 nt, Artificial Sequence
  Description of Artificial Sequence: Synthetic oligonucleotide
  Sense strand starting at position 1471 of SEQ ID NO: 1563594
ugacuugcucgugcaggua

SEQ ID NO: 1822200 - RNA, 19 nt, Artificial Sequence
  Description of Artificial Sequence: Synthetic oligonucleotide
  Antisense strand to SEQ ID NO: 1822199
uaccugcacgagcaaguca

SEQ ID NO: 1822201 - RNA, 19 nt, Artificial Sequence
  Description of Artificial Sequence: Synthetic oligonucleotide
  Sense strand starting at position 1570 of SEQ ID NO: 1563594
cguucuucuccagguggaa

SEQ ID NO: 1822202 - RNA, 19 nt, Artificial Sequence
  Description of Artificial Sequence: Synthetic oligonucleotide
  Antisense strand to SEQ ID NO: 1822201
uuccaccuggagaagaacg

SEQ ID NO: 1822203 - RNA, 19 nt, Artificial Sequence
  Description of Artificial Sequence: Synthetic oligonucleotide
  Sense strand starting at position 1639 of SEQ ID NO: 1563594
uccugauaucgugaaggca

SEQ ID NO: 1822204 - RNA, 19 nt, Artificial Sequence
  Description of Artificial Sequence: Synthetic oligonucleotide
  Antisense strand to SEQ ID NO: 1822203
ugccuucacgauaucagga

SEQ ID NO: 1822205 - RNA, 19 nt, Artificial Sequence
  Description of Artificial Sequence: Synthetic oligonucleotide
  Sense strand starting at position 1642 of SEQ ID NO: 1563594
ugauaucgugaaggcagau

SEQ ID NO: 1822206 - RNA, 19 nt, Artificial Sequence
  Description of Artificial Sequence: Synthetic oligonucleotide
  Antisense strand to SEQ ID NO: 1822205
aucugccuucacgauauca

SEQ ID NO: 1822207 - RNA, 19 nt, Artificial Sequence
  Description of Artificial Sequence: Synthetic oligonucleotide
  Sense strand starting at position 2128 of SEQ ID NO: 1563594
cugacuuccgucggaaauc

SEQ ID NO: 1822208 - RNA, 19 nt, Artificial Sequence
  Description of Artificial Sequence: Synthetic oligonucleotide
  Antisense strand to SEQ ID NO: 1822207
gauuuccgacggaagucag

SEQ ID NO: 1822209 - RNA, 19 nt, Artificial Sequence
  Description of Artificial Sequence: Synthetic oligonucleotide
  Sense strand starting at position 2544 of SEQ ID NO: 1563594
cugaaacauuuccaugguu

SEQ ID NO: 1822210 - RNA, 19 nt, Artificial Sequence
  Description of Artificial Sequence: Synthetic oligonucleotide
  Antisense strand to SEQ ID NO: 1822209
aaccauggaaauguuucag

SEQ ID NO: 1822211 - RNA, 19 nt, Artificial Sequence
  Description of Artificial Sequence: Synthetic oligonucleotide
  Sense strand starting at position 2573 of SEQ ID NO: 1563594
ucaugaaguuguguaacua

SEQ ID NO: 1822212 - RNA, 19 nt, Artificial Sequence
  Description of Artificial Sequence: Synthetic oligonucleotide
  Antisense strand to SEQ ID NO: 1822211
uaguuacacaacuucauga

SEQ ID NO: 1822213 - RNA, 19 nt, Artificial Sequence
  Description of Artificial Sequence: Synthetic oligonucleotide
  Sense strand starting at position 2574 of SEQ ID NO: 1563594
caugaaguuguguaacuau

SEQ ID NO: 1822214 - RNA, 19 nt, Artificial Sequence
  Description of Artificial Sequence: Synthetic oligonucleotide
  Antisense strand to SEQ ID NO: 1822213
auaguuacacaacuucaug

SEQ ID NO: 1822215 - RNA, 19 nt, Artificial Sequence
  Description of Artificial Sequence: Synthetic oligonucleotide
  Sense strand starting at position 2577 of SEQ ID NO: 1563594
gaaguuguguaacuaucac

SEQ ID NO: 1822216 - RNA, 19 nt, Artificial Sequence
  Description of Artificial Sequence: Synthetic oligonucleotide
  Antisense strand to SEQ ID NO: 1822215
gugauaguuacacaacuuc

SEQ ID NO: 1822217 - RNA, 19 nt, Artificial Sequence
  Description of Artificial Sequence: Synthetic oligonucleotide
  Sense strand starting at position 2708 of SEQ ID NO: 1563594
ugaaaucucuguuucuaga

SEQ ID NO: 1822218 - RNA, 19 nt, Artificial Sequence
  Description of Artificial Sequence: Synthetic oligonucleotide
  Antisense strand to SEQ ID NO: 1822217
ucuagaaacagagauuuca

SEQ ID NO: 1822219 - RNA, 19 nt, Artificial Sequence
  Description of Artificial Sequence: Synthetic oligonucleotide
  Sense strand starting at position 2976 of SEQ ID NO: 1563594
ggguauauaccugggacua

SEQ ID NO: 1822220 - RNA, 19 nt, Artificial Sequence
  Description of Artificial Sequence: Synthetic oligonucleotide
  Antisense strand to SEQ ID NO: 1822219
uagucccagguauauaccc

SEQ ID NO: 1822221 - RNA, 19 nt, Artificial Sequence
  Description of Artificial Sequence: Synthetic oligonucleotide
  Sense strand starting at position 2977 of SEQ ID NO: 1563594
gguauauaccugggacuag

SEQ ID NO: 1822222 - RNA, 19 nt, Artificial Sequence
  Description of Artificial Sequence: Synthetic oligonucleotide
  Antisense strand to SEQ ID NO: 1822221
cuagucccagguauauacc

SEQ ID NO: 1822223 - RNA, 19 nt, Artificial Sequence
  Description of Artificial Sequence: Synthetic oligonucleotide
  Sense strand starting at position 3010 of SEQ ID NO: 1563594
auguuaagacucuguuuaa

SEQ ID NO: 1822224 - RNA, 19 nt, Artificial Sequence
  Description of Artificial Sequence: Synthetic oligonucleotide
  Antisense strand to SEQ ID NO: 1822223
uuaaacagagucuuaacau

SEQ ID NO: 1822225 - RNA, 19 nt, Artificial Sequence
  Description of Artificial Sequence: Synthetic oligonucleotide
  Sense strand starting at position 3011 of SEQ ID NO: 1563594
uguuaagacucuguuuaac

SEQ ID NO: 1822226 - RNA, 19 nt, Artificial Sequence
  Description of Artificial Sequence: Synthetic oligonucleotide
  Antisense strand to SEQ ID NO: 1822225
guuaaacagagucuuaaca

SEQ ID NO: 1822227 - RNA, 19 nt, Artificial Sequence
  Description of Artificial Sequence: Synthetic oligonucleotide
  Sense strand starting at position 3105 of SEQ ID NO: 1563594
ccaacacugucauugucuu

SEQ ID NO: 1822228 - RNA, 19 nt, Artificial Sequence
  Description of Artificial Sequence: Synthetic oligonucleotide
  Antisense strand to SEQ ID NO: 1822227
aagacaaugacaguguugg

SEQ ID NO: 1822229 - RNA, 19 nt, Artificial Sequence
  Description of Artificial Sequence: Synthetic oligonucleotide
  Sense strand starting at position 3178 of SEQ ID NO: 1563594
uuccauaauggcuauugau

SEQ ID NO: 1822230 - RNA, 19 nt, Artificial Sequence
  Description of Artificial Sequence: Synthetic oligonucleotide
  Antisense strand to SEQ ID NO: 1822229
aucaauagccauuauggaa

SEQ ID NO: 1822231 - RNA, 19 nt, Artificial Sequence
  Description of Artificial Sequence: Synthetic oligonucleotide
  Sense strand starting at position 3214 of SEQ ID NO: 1563594
agucauuuguaucuucuuu

SEQ ID NO: 1822232 - RNA, 19 nt, Artificial Sequence
  Description of Artificial Sequence: Synthetic oligonucleotide
  Antisense strand to SEQ ID NO: 1822231
aaagaagauacaaaugacu

SEQ ID NO: 1822233 - RNA, 19 nt, Artificial Sequence
  Description of Artificial Sequence: Synthetic oligonucleotide
  Sense strand starting at position 3319 of SEQ ID NO: 1563594
uuaugugugccaguccuuu

SEQ ID NO: 1822234 - RNA, 19 nt, Artificial Sequence
  Description of Artificial Sequence: Synthetic oligonucleotide
  Antisense strand to SEQ ID NO: 1822233
aaaggacuggcacacauaa

SEQ ID NO: 1822235 - RNA, 19 nt, Artificial Sequence
  Description of Artificial Sequence: Synthetic oligonucleotide
  Sense strand starting at position 3602 of SEQ ID NO: 1563594
auaugaggucauuguccaa

SEQ ID NO: 1822236 - RNA, 19 nt, Artificial Sequence
  Description of Artificial Sequence: Synthetic oligonucleotide
  Antisense strand to SEQ ID NO: 1822235
uuggacaaugaccucauau

SEQ ID NO: 1822237 - RNA, 19 nt, Artificial Sequence
  Description of Artificial Sequence: Synthetic oligonucleotide
  Sense strand starting at position 3755 of SEQ ID NO: 1563594
ucccaauucuguucuguca

SEQ ID NO: 1822238 - RNA, 19 nt, Artificial Sequence
  Description of Artificial Sequence: Synthetic oligonucleotide
  Antisense strand to SEQ ID NO: 1822237
ugacagaacagaauuggga

SEQ ID NO: 1822239 - RNA, 19 nt, Artificial Sequence
  Description of Artificial Sequence: Synthetic oligonucleotide
  Sense strand starting at position 3770 of SEQ ID NO: 1563594
gucaaucuaugugucuaaa

SEQ ID NO: 1822240 - RNA, 19 nt, Artificial Sequence
  Description of Artificial Sequence: Synthetic oligonucleotide
  Antisense strand to SEQ ID NO: 1822239
uuuagacacauagauugac

SEQ ID NO: 1822241 - RNA, 19 nt, Artificial Sequence
  Description of Artificial Sequence: Synthetic oligonucleotide
  Sense strand starting at position 3798 of SEQ ID NO: 1563594
gcacaacacuggcuugauu

SEQ ID NO: 1822242 - RNA, 19 nt, Artificial Sequence
  Description of Artificial Sequence: Synthetic oligonucleotide
  Antisense strand to SEQ ID NO: 1822241
aaucaagccaguguugugc

SEQ ID NO: 1822243 - RNA, 19 nt, Artificial Sequence
  Description of Artificial Sequence: Synthetic oligonucleotide
  Sense strand starting at position 3809 of SEQ ID NO: 1563594
gcuugauuacuauagcuuu

SEQ ID NO: 1822244 - RNA, 19 nt, Artificial Sequence
  Description of Artificial Sequence: Synthetic oligonucleotide
  Antisense strand to SEQ ID NO: 1822243
aaagcuauaguaaucaagc

SEQ ID NO: 1822245 - RNA, 19 nt, Artificial Sequence
  Description of Artificial Sequence: Synthetic oligonucleotide
  Sense strand starting at position 3845 of SEQ ID NO: 1563594
ugggaaguauagucaucca

SEQ ID NO: 1822246 - RNA, 19 nt, Artificial Sequence
  Description of Artificial Sequence: Synthetic oligonucleotide
  Antisense strand to SEQ ID NO: 1822245
uggaugacuauacuuccca

SEQ ID NO: 1822247 - RNA, 19 nt, Artificial Sequence
  Description of Artificial Sequence: Synthetic oligonucleotide
  Sense strand starting at position 3866 of SEQ ID NO: 1563594
ucugcucuucugcagagau

SEQ ID NO: 1822248 - RNA, 19 nt, Artificial Sequence
  Description of Artificial Sequence: Synthetic oligonucleotide
  Antisense strand to SEQ ID NO: 1822247
aucucugcagaagagcaga

SEQ ID NO: 1822249 - RNA, 19 nt, Artificial Sequence
  Description of Artificial Sequence: Synthetic oligonucleotide
  Sense strand starting at position 3878 of SEQ ID NO: 1563594
cagagauugcuuuggcuau

SEQ ID NO: 1822250 - RNA, 19 nt, Artificial Sequence
  Description of Artificial Sequence: Synthetic oligonucleotide
  Antisense strand to SEQ ID NO: 1822249
auagccaaagcaaucucug

SEQ ID NO: 1822251 - RNA, 19 nt, Artificial Sequence
  Description of Artificial Sequence: Synthetic oligonucleotide
  Sense strand starting at position 3925 of SEQ ID NO: 1563594
uuaggauaugcuugucaau

SEQ ID NO: 1822252 - RNA, 19 nt, Artificial Sequence
  Description of Artificial Sequence: Synthetic oligonucleotide
  Antisense strand to SEQ ID NO: 1822251
auugacaagcauauccuaa

SEQ ID NO: 1822253 - RNA, 19 nt, Artificial Sequence
  Description of Artificial Sequence: Synthetic oligonucleotide
  Sense strand starting at position 95 of SEQ ID NO: 1563595
gggcucaucugacccacau

SEQ ID NO: 1822254 - RNA, 19 nt, Artificial Sequence
  Description of Artificial Sequence: Synthetic oligonucleotide
  Antisense strand to SEQ ID NO: 1822253
augugggucagaugagccc

SEQ ID NO: 1822255 - RNA, 19 nt, Artificial Sequence
  Description of Artificial Sequence: Synthetic oligonucleotide
  Sense strand starting at position 167 of SEQ ID NO: 1563595
ccuuauagggccugaagga

SEQ ID NO: 1822256 - RNA, 19 nt, Artificial Sequence
  Description of Artificial Sequence: Synthetic oligonucleotide
  Antisense strand to SEQ ID NO: 1822255
uccuucaggcccuauaagg

SEQ ID NO: 1822257 - RNA, 19 nt, Artificial Sequence
  Description of Artificial Sequence: Synthetic oligonucleotide
  Sense strand starting at position 205 of SEQ ID NO: 1563595
ggcuccacugcuuaucaca

SEQ ID NO: 1822258 - RNA, 19 nt, Artificial Sequence
  Description of Artificial Sequence: Synthetic oligonucleotide
  Antisense strand to SEQ ID NO: 1822257
ugugauaagcaguggagcc

SEQ ID NO: 1822259 - RNA, 19 nt, Artificial Sequence
  Description of Artificial Sequence: Synthetic oligonucleotide
  Sense strand starting at position 558 of SEQ ID NO: 1563595
cgccauuaaucccuuagau

SEQ ID NO: 1822260 - RNA, 19 nt, Artificial Sequence
  Description of Artificial Sequence: Synthetic oligonucleotide
  Antisense strand to SEQ ID NO: 1822259
aucuaagggauuaauggcg

SEQ ID NO: 1822261 - RNA, 19 nt, Artificial Sequence
  Description of Artificial Sequence: Synthetic oligonucleotide
  Sense strand starting at position 612 of SEQ ID NO: 1563595
ucuaacaaugccuggagaa

SEQ ID NO: 1822262 - RNA, 19 nt, Artificial Sequence
  Description of Artificial Sequence: Synthetic oligonucleotide
  Antisense strand to SEQ ID NO: 1822261
uucuccaggcauuguuaga

SEQ ID NO: 1822263 - RNA, 19 nt, Artificial Sequence
  Description of Artificial Sequence: Synthetic oligonucleotide
  Sense strand starting at position 613 of SEQ ID NO: 1563595
cuaacaaugccuggagaau

SEQ ID NO: 1822264 - RNA, 19 nt, Artificial Sequence
  Description of Artificial Sequence: Synthetic oligonucleotide
  Antisense strand to SEQ ID NO: 1822263
auucuccaggcauuguuag

SEQ ID NO: 1822265 - RNA, 19 nt, Artificial Sequence
  Description of Artificial Sequence: Synthetic oligonucleotide
  Sense strand starting at position 625 of SEQ ID NO: 1563595
ggagaaucauggucuauua

SEQ ID NO: 1822266 - RNA, 19 nt, Artificial Sequence
  Description of Artificial Sequence: Synthetic oligonucleotide
  Antisense strand to SEQ ID NO: 1822265
uaauagaccaugauucucc

SEQ ID NO: 1822267 - RNA, 19 nt, Artificial Sequence
  Description of Artificial Sequence: Synthetic oligonucleotide
  Sense strand starting at position 763 of SEQ ID NO: 1563595
acguuaacugaucacacau

SEQ ID NO: 1822268 - RNA, 19 nt, Artificial Sequence
  Description of Artificial Sequence: Synthetic oligonucleotide
  Antisense strand to SEQ ID NO: 1822267
augugugaucaguuaacgu

SEQ ID NO: 1822269 - RNA, 19 nt, Artificial Sequence
  Description of Artificial Sequence: Synthetic oligonucleotide
  Sense strand starting at position 940 of SEQ ID NO: 1563595
cuaauuccucgacggucau

SEQ ID NO: 1822270 - RNA, 19 nt, Artificial Sequence
  Description of Artificial Sequence: Synthetic oligonucleotide
  Antisense strand to SEQ ID NO: 1822269
augaccgucgaggaauuag

SEQ ID NO: 1822271 - RNA, 19 nt, Artificial Sequence
  Description of Artificial Sequence: Synthetic oligonucleotide
  Sense strand starting at position 1113 of SEQ ID NO: 1563595
ccauuaacccguugaauau

SEQ ID NO: 1822272 - RNA, 19 nt, Artificial Sequence
  Description of Artificial Sequence: Synthetic oligonucleotide
  Antisense strand to SEQ ID NO: 1822271
auauucaacggguuaaugg

SEQ ID NO: 1822273 - RNA, 19 nt, Artificial Sequence
  Description of Artificial Sequence: Synthetic oligonucleotide
  Sense strand starting at position 1167 of SEQ ID NO: 1563595
auccaucacucguuauauu

SEQ ID NO: 1822274 - RNA, 19 nt, Artificial Sequence
  Description of Artificial Sequence: Synthetic oligonucleotide
  Antisense strand to SEQ ID NO: 1822273
aauauaacgagugauggau

SEQ ID NO: 1822275 - RNA, 19 nt, Artificial Sequence
  Description of Artificial Sequence: Synthetic oligonucleotide
  Sense strand starting at position 1178 of SEQ ID NO: 1563595
guuauauucuaguugcuua

SEQ ID NO: 1822276 - RNA, 19 nt, Artificial Sequence
  Description of Artificial Sequence: Synthetic oligonucleotide
  Antisense strand to SEQ ID NO: 1822275
uaagcaacuagaauauaac

SEQ ID NO: 1822277 - RNA, 19 nt, Artificial Sequence
  Description of Artificial Sequence: Synthetic oligonucleotide
  Sense strand starting at position 1225 of SEQ ID NO: 1563595
ugaacaacaguucgacuaa

SEQ ID NO: 1822278 - RNA, 19 nt, Artificial Sequence
  Description of Artificial Sequence: Synthetic oligonucleotide
  Antisense strand to SEQ ID NO: 1822277
uuagucgaacuguuguuca

SEQ ID NO: 1822279 - RNA, 19 nt, Artificial Sequence
  Description of Artificial Sequence: Synthetic oligonucleotide
  Sense strand starting at position 1463 of SEQ ID NO: 1563595
cagacaaaccuugggucua

SEQ ID NO: 1822280 - RNA, 19 nt, Artificial Sequence
  Description of Artificial Sequence: Synthetic oligonucleotide
  Antisense strand to SEQ ID NO: 1822279
uagacccaagguuugucug

SEQ ID NO: 1822281 - RNA, 19 nt, Artificial Sequence
  Description of Artificial Sequence: Synthetic oligonucleotide
  Sense strand starting at position 2034 of SEQ ID NO: 1563595
uguuauugagccuguaaac

SEQ ID NO: 1822282 - RNA, 19 nt, Artificial Sequence
  Description of Artificial Sequence: Synthetic oligonucleotide
  Antisense strand to SEQ ID NO: 1822281
guuuacaggcucaauaaca

SEQ ID NO: 1822283 - RNA, 19 nt, Artificial Sequence
  Description of Artificial Sequence: Synthetic oligonucleotide
  Sense strand starting at position 2128 of SEQ ID NO: 1563595
gggcauaaacgugacagua

SEQ ID NO: 1822284 - RNA, 19 nt, Artificial Sequence
  Description of Artificial Sequence: Synthetic oligonucleotide
  Antisense strand to SEQ ID NO: 1822283
uacugucacguuuaugccc

SEQ ID NO: 1822285 - RNA, 19 nt, Artificial Sequence
  Description of Artificial Sequence: Synthetic oligonucleotide
  Sense strand starting at position 2307 of SEQ ID NO: 1563595
gcauuauugggaggguuaa

SEQ ID NO: 1822286 - RNA, 19 nt, Artificial Sequence
  Description of Artificial Sequence: Synthetic oligonucleotide
  Antisense strand to SEQ ID NO: 1822285
uuaacccucccaauaaugc

SEQ ID NO: 1822287 - RNA, 19 nt, Artificial Sequence
  Description of Artificial Sequence: Synthetic oligonucleotide
  Sense strand starting at position 2319 of SEQ ID NO: 1563595
ggguuaaauagguguagcu

SEQ ID NO: 1822288 - RNA, 19 nt, Artificial Sequence
  Description of Artificial Sequence: Synthetic oligonucleotide
  Antisense strand to SEQ ID NO: 1822287
agcuacaccuauuuaaccc

SEQ ID NO: 1822289 - RNA, 19 nt, Artificial Sequence
  Description of Artificial Sequence: Synthetic oligonucleotide
  Sense strand starting at position 2321 of SEQ ID NO: 1563595
guuaaauagguguagcuua

SEQ ID NO: 1822290 - RNA, 19 nt, Artificial Sequence
  Description of Artificial Sequence: Synthetic oligonucleotide
  Antisense strand to SEQ ID NO: 1822289
uaagcuacaccuauuuaac

SEQ ID NO: 1822291 - RNA, 19 nt, Artificial Sequence
  Description of Artificial Sequence: Synthetic oligonucleotide
  Sense strand starting at position 2355 of SEQ ID NO: 1563595
uuuguaauucugugaucuu

SEQ ID NO: 1822292 - RNA, 19 nt, Artificial Sequence
  Description of Artificial Sequence: Synthetic oligonucleotide
  Antisense strand to SEQ ID NO: 1822291
aagaucacagaauuacaaa

SEQ ID NO: 1822293 - RNA, 19 nt, Artificial Sequence
  Description of Artificial Sequence: Synthetic oligonucleotide
  Sense strand starting at position 2457 of SEQ ID NO: 1563595
uuaucauaguguuuaccau

SEQ ID NO: 1822294 - RNA, 19 nt, Artificial Sequence
  Description of Artificial Sequence: Synthetic oligonucleotide
  Antisense strand to SEQ ID NO: 1822293
augguaaacacuaugauaa

SEQ ID NO: 1822295 - RNA, 19 nt, Artificial Sequence
  Description of Artificial Sequence: Synthetic oligonucleotide
  Sense strand starting at position 2463 of SEQ ID NO: 1563595
uaguguuuaccaugugcua

SEQ ID NO: 1822296 - RNA, 19 nt, Artificial Sequence
  Description of Artificial Sequence: Synthetic oligonucleotide
  Antisense strand to SEQ ID NO: 1822295
uagcacaugguaaacacua

SEQ ID NO: 1822297 - RNA, 19 nt, Artificial Sequence
  Description of Artificial Sequence: Synthetic oligonucleotide
  Sense strand starting at position 2502 of SEQ ID NO: 1563595
gugugcugguaaaugguua

SEQ ID NO: 1822298 - RNA, 19 nt, Artificial Sequence
  Description of Artificial Sequence: Synthetic oligonucleotide
  Antisense strand to SEQ ID NO: 1822297
uaaccauuuaccagcacac

SEQ ID NO: 1822299 - RNA, 19 nt, Artificial Sequence
  Description of Artificial Sequence: Synthetic oligonucleotide
  Sense strand starting at position 2567 of SEQ ID NO: 1563595
ggaggcugguuucuagcau

SEQ ID NO: 1822300 - RNA, 19 nt, Artificial Sequence
  Description of Artificial Sequence: Synthetic oligonucleotide
  Antisense strand to SEQ ID NO: 1822299
augcuagaaaccagccucc

SEQ ID NO: 1822301 - RNA, 19 nt, Artificial Sequence
  Description of Artificial Sequence: Synthetic oligonucleotide
  Sense strand starting at position 2606 of SEQ ID NO: 1563595
gguacaaucuucuuguuag

SEQ ID NO: 1822302 - RNA, 19 nt, Artificial Sequence
  Description of Artificial Sequence: Synthetic oligonucleotide
  Antisense strand to SEQ ID NO: 1822301
cuaacaagaagauuguacc

SEQ ID NO: 1822303 - RNA, 19 nt, Artificial Sequence
  Description of Artificial Sequence: Synthetic oligonucleotide
  Sense strand starting at position 2674 of SEQ ID NO: 1563595
gcaguagugcacuaucaug

SEQ ID NO: 1822304 - RNA, 19 nt, Artificial Sequence
  Description of Artificial Sequence: Synthetic oligonucleotide
  Antisense strand to SEQ ID NO: 1822303
caugauagugcacuacugc

SEQ ID NO: 1822305 - RNA, 19 nt, Artificial Sequence
  Description of Artificial Sequence: Synthetic oligonucleotide
  Sense strand starting at position 2745 of SEQ ID NO: 1563595
agaauaguggaauguggua

SEQ ID NO: 1822306 - RNA, 19 nt, Artificial Sequence
  Description of Artificial Sequence: Synthetic oligonucleotide
  Antisense strand to SEQ ID NO: 1822305
uaccacauuccacuauucu

SEQ ID NO: 1822307 - RNA, 19 nt, Artificial Sequence
  Description of Artificial Sequence: Synthetic oligonucleotide
  Sense strand starting at position 2747 of SEQ ID NO: 1563595
aauaguggaaugugguaaa

SEQ ID NO: 1822308 - RNA, 19 nt, Artificial Sequence
  Description of Artificial Sequence: Synthetic oligonucleotide
  Antisense strand to SEQ ID NO: 1822307
uuuaccacauuccacuauu

SEQ ID NO: 1822309 - RNA, 19 nt, Artificial Sequence
  Description of Artificial Sequence: Synthetic oligonucleotide
  Sense strand starting at position 2943 of SEQ ID NO: 1563595
gugcgaguaguuccagcua

SEQ ID NO: 1822310 - RNA, 19 nt, Artificial Sequence
  Description of Artificial Sequence: Synthetic oligonucleotide
  Antisense strand to SEQ ID NO: 1822309
uagcuggaacuacucgcac

SEQ ID NO: 1822311 - RNA, 19 nt, Artificial Sequence
  Description of Artificial Sequence: Synthetic oligonucleotide
  Sense strand starting at position 3208 of SEQ ID NO: 1563595
uggcaacaugcauaugagu

SEQ ID NO: 1822312 - RNA, 19 nt, Artificial Sequence
  Description of Artificial Sequence: Synthetic oligonucleotide
  Antisense strand to SEQ ID NO: 1822311
acucauaugcauguugcca

SEQ ID NO: 1822313 - RNA, 19 nt, Artificial Sequence
  Description of Artificial Sequence: Synthetic oligonucleotide
  Sense strand starting at position 3310 of SEQ ID NO: 1563595
gaaucuagucugggcaaca

SEQ ID NO: 1822314 - RNA, 19 nt, Artificial Sequence
  Description of Artificial Sequence: Synthetic oligonucleotide
  Antisense strand to SEQ ID NO: 1822313
uguugcccagacuagauuc

SEQ ID NO: 1822315 - RNA, 19 nt, Artificial Sequence
  Description of Artificial Sequence: Synthetic oligonucleotide
  Sense strand starting at position 3311 of SEQ ID NO: 1563595
aaucuagucugggcaacau

SEQ ID NO: 1822316 - RNA, 19 nt, Artificial Sequence
  Description of Artificial Sequence: Synthetic oligonucleotide
  Antisense strand to SEQ ID NO: 1822315
auguugcccagacuagauu

SEQ ID NO: 1822317 - RNA, 19 nt, Artificial Sequence
  Description of Artificial Sequence: Synthetic oligonucleotide
  Sense strand starting at position 3666 of SEQ ID NO: 1563595
augauugauuccuuagcac

SEQ ID NO: 1822318 - RNA, 19 nt, Artificial Sequence
  Description of Artificial Sequence: Synthetic oligonucleotide
  Antisense strand to SEQ ID NO: 1822317
gugcuaaggaaucaaucau

SEQ ID NO: 1822319 - RNA, 19 nt, Artificial Sequence
  Description of Artificial Sequence: Synthetic oligonucleotide
  Sense strand starting at position 3701 of SEQ ID NO: 1563595
agggauuccuguucuguca

SEQ ID NO: 1822320 - RNA, 19 nt, Artificial Sequence
  Description of Artificial Sequence: Synthetic oligonucleotide
  Antisense strand to SEQ ID NO: 1822319
ugacagaacaggaaucccu

SEQ ID NO: 1822321 - RNA, 19 nt, Artificial Sequence
  Description of Artificial Sequence: Synthetic oligonucleotide
  Sense strand starting at position 3775 of SEQ ID NO: 1563595
auaaauguugguugaauuc

SEQ ID NO: 1822322 - RNA, 19 nt, Artificial Sequence
  Description of Artificial Sequence: Synthetic oligonucleotide
  Antisense strand to SEQ ID NO: 1822321
gaauucaaccaacauuuau

SEQ ID NO: 1822323 - RNA, 19 nt, Artificial Sequence
  Description of Artificial Sequence: Synthetic oligonucleotide
  Sense strand starting at position 3801 of SEQ ID NO: 1563595
uguugcuucguuccuuaau

SEQ ID NO: 1822324 - RNA, 19 nt, Artificial Sequence
  Description of Artificial Sequence: Synthetic oligonucleotide
  Antisense strand to SEQ ID NO: 1822323
auuaaggaacgaagcaaca

SEQ ID NO: 1822325 - RNA, 19 nt, Artificial Sequence
  Description of Artificial Sequence: Synthetic oligonucleotide
  Sense strand starting at position 3803 of SEQ ID NO: 1563595
uugcuucguuccuuaauuu

SEQ ID NO: 1822326 - RNA, 19 nt, Artificial Sequence
  Description of Artificial Sequence: Synthetic oligonucleotide
  Antisense strand to SEQ ID NO: 1822325
aaauuaaggaacgaagcaa

SEQ ID NO: 1822327 - RNA, 19 nt, Artificial Sequence
  Description of Artificial Sequence: Synthetic oligonucleotide
  Sense strand starting at position 3900 of SEQ ID NO: 1563595
agagcuuugucagcagaac

SEQ ID NO: 1822328 - RNA, 19 nt, Artificial Sequence
  Description of Artificial Sequence: Synthetic oligonucleotide
  Antisense strand to SEQ ID NO: 1822327
guucugcugacaaagcucu

SEQ ID NO: 1822329 - RNA, 19 nt, Artificial Sequence
  Description of Artificial Sequence: Synthetic oligonucleotide
  Sense strand starting at position 3901 of SEQ ID NO: 1563595
gagcuuugucagcagaacu

SEQ ID NO: 1822330 - RNA, 19 nt, Artificial Sequence
  Description of Artificial Sequence: Synthetic oligonucleotide
  Antisense strand to SEQ ID NO: 1822329
aguucugcugacaaagcuc

SEQ ID NO: 1822331 - RNA, 19 nt, Artificial Sequence
  Description of Artificial Sequence: Synthetic oligonucleotide
  Sense strand starting at position 3911 of SEQ ID NO: 1563595
agcagaacucaagggcauu

SEQ ID NO: 1822332 - RNA, 19 nt, Artificial Sequence
  Description of Artificial Sequence: Synthetic oligonucleotide
  Antisense strand to SEQ ID NO: 1822331
aaugcccuugaguucugcu

SEQ ID NO: 1822333 - RNA, 19 nt, Artificial Sequence
  Description of Artificial Sequence: Synthetic oligonucleotide
  Sense strand starting at position 37 of SEQ ID NO: 1563596
cauagaagagugggucauu

SEQ ID NO: 1822334 - RNA, 19 nt, Artificial Sequence
  Description of Artificial Sequence: Synthetic oligonucleotide
  Antisense strand to SEQ ID NO: 1822333
aaugacccacucuucuaug

SEQ ID NO: 1822335 - RNA, 19 nt, Artificial Sequence
  Description of Artificial Sequence: Synthetic oligonucleotide
  Sense strand starting at position 38 of SEQ ID NO: 1563596
auagaagagugggucauua

SEQ ID NO: 1822336 - RNA, 19 nt, Artificial Sequence
  Description of Artificial Sequence: Synthetic oligonucleotide
  Antisense strand to SEQ ID NO: 1822335
uaaugacccacucuucuau

SEQ ID NO: 1822337 - RNA, 19 nt, Artificial Sequence
  Description of Artificial Sequence: Synthetic oligonucleotide
  Sense strand starting at position 51 of SEQ ID NO: 1563596
ucauuauuccaaggugcau

SEQ ID NO: 1822338 - RNA, 19 nt, Artificial Sequence
  Description of Artificial Sequence: Synthetic oligonucleotide
  Antisense strand to SEQ ID NO: 1822337
augcaccuuggaauaauga

SEQ ID NO: 1822339 - RNA, 19 nt, Artificial Sequence
  Description of Artificial Sequence: Synthetic oligonucleotide
  Sense strand starting at position 94 of SEQ ID NO: 1563596
ucguuauacuuaucaagug

SEQ ID NO: 1822340 - RNA, 19 nt, Artificial Sequence
  Description of Artificial Sequence: Synthetic oligonucleotide
  Antisense strand to SEQ ID NO: 1822339
cacuugauaaguauaacga

SEQ ID NO: 1822341 - RNA, 19 nt, Artificial Sequence
  Description of Artificial Sequence: Synthetic oligonucleotide
  Sense strand starting at position 175 of SEQ ID NO: 1563596
aacgcuuaugcacaaguua

SEQ ID NO: 1822342 - RNA, 19 nt, Artificial Sequence
  Description of Artificial Sequence: Synthetic oligonucleotide
  Antisense strand to SEQ ID NO: 1822341
uaacuugugcauaagcguu

SEQ ID NO: 1822343 - RNA, 19 nt, Artificial Sequence
  Description of Artificial Sequence: Synthetic oligonucleotide
  Sense strand starting at position 219 of SEQ ID NO: 1563596
cucuacagucacgaacauu

SEQ ID NO: 1822344 - RNA, 19 nt, Artificial Sequence
  Description of Artificial Sequence: Synthetic oligonucleotide
  Antisense strand to SEQ ID NO: 1822343
aauguucgugacuguagag

SEQ ID NO: 1822345 - RNA, 19 nt, Artificial Sequence
  Description of Artificial Sequence: Synthetic oligonucleotide
  Sense strand starting at position 322 of SEQ ID NO: 1563596
uuguguuaucacguggucu

SEQ ID NO: 1822346 - RNA, 19 nt, Artificial Sequence
  Description of Artificial Sequence: Synthetic oligonucleotide
  Antisense strand to SEQ ID NO: 1822345
agaccacgugauaacacaa

SEQ ID NO: 1822347 - RNA, 19 nt, Artificial Sequence
  Description of Artificial Sequence: Synthetic oligonucleotide
  Sense strand starting at position 328 of SEQ ID NO: 1563596
uaucacguggucugaaaug

SEQ ID NO: 1822348 - RNA, 19 nt, Artificial Sequence
  Description of Artificial Sequence: Synthetic oligonucleotide
  Antisense strand to SEQ ID NO: 1822347
cauuucagaccacgugaua

SEQ ID NO: 1822349 - RNA, 19 nt, Artificial Sequence
  Description of Artificial Sequence: Synthetic oligonucleotide
  Sense strand starting at position 355 of SEQ ID NO: 1563596
ucaggcugaugguuauuaa

SEQ ID NO: 1822350 - RNA, 19 nt, Artificial Sequence
  Description of Artificial Sequence: Synthetic oligonucleotide
  Antisense strand to SEQ ID NO: 1822349
uuaauaaccaucagccuga

SEQ ID NO: 1822351 - RNA, 19 nt, Artificial Sequence
  Description of Artificial Sequence: Synthetic oligonucleotide
  Sense strand starting at position 358 of SEQ ID NO: 1563596
ggcugaugguuauuaacua

SEQ ID NO: 1822352 - RNA, 19 nt, Artificial Sequence
  Description of Artificial Sequence: Synthetic oligonucleotide
  Antisense strand to SEQ ID NO: 1822351
uaguuaauaaccaucagcc

SEQ ID NO: 1822353 - RNA, 19 nt, Artificial Sequence
  Description of Artificial Sequence: Synthetic oligonucleotide
  Sense strand starting at position 605 of SEQ ID NO: 1563596
agcaguuagcacugaauga

SEQ ID NO: 1822354 - RNA, 19 nt, Artificial Sequence
  Description of Artificial Sequence: Synthetic oligonucleotide
  Antisense strand to SEQ ID NO: 1822353
ucauucagugcuaacugcu

SEQ ID NO: 1822355 - RNA, 19 nt, Artificial Sequence
  Description of Artificial Sequence: Synthetic oligonucleotide
  Sense strand starting at position 606 of SEQ ID NO: 1563596
gcaguuagcacugaaugaa

SEQ ID NO: 1822356 - RNA, 19 nt, Artificial Sequence
  Description of Artificial Sequence: Synthetic oligonucleotide
  Antisense strand to SEQ ID NO: 1822355
uucauucagugcuaacugc

SEQ ID NO: 1822357 - RNA, 19 nt, Artificial Sequence
  Description of Artificial Sequence: Synthetic oligonucleotide
  Sense strand starting at position 857 of SEQ ID NO: 1563596
uggaauuaacaguguagac

SEQ ID NO: 1822358 - RNA, 19 nt, Artificial Sequence
  Description of Artificial Sequence: Synthetic oligonucleotide
  Antisense strand to SEQ ID NO: 1822357
gucuacacuguuaauucca

SEQ ID NO: 1822359 - RNA, 19 nt, Artificial Sequence
  Description of Artificial Sequence: Synthetic oligonucleotide
  Sense strand starting at position 892 of SEQ ID NO: 1563596
gugauucuugcccauguau

SEQ ID NO: 1822360 - RNA, 19 nt, Artificial Sequence
  Description of Artificial Sequence: Synthetic oligonucleotide
  Antisense strand to SEQ ID NO: 1822359
auacaugggcaagaaucac

SEQ ID NO: 1822361 - RNA, 19 nt, Artificial Sequence
  Description of Artificial Sequence: Synthetic oligonucleotide
  Sense strand starting at position 894 of SEQ ID NO: 1563596
gauucuugcccauguauga

SEQ ID NO: 1822362 - RNA, 19 nt, Artificial Sequence
  Description of Artificial Sequence: Synthetic oligonucleotide
  Antisense strand to SEQ ID NO: 1822361
ucauacaugggcaagaauc

SEQ ID NO: 1822363 - RNA, 19 nt, Artificial Sequence
  Description of Artificial Sequence: Synthetic oligonucleotide
  Sense strand starting at position 997 of SEQ ID NO: 1563596
uggguagcuacugaguauu

SEQ ID NO: 1822364 - RNA, 19 nt, Artificial Sequence
  Description of Artificial Sequence: Synthetic oligonucleotide
  Antisense strand to SEQ ID NO: 1822363
aauacucaguagcuaccca

SEQ ID NO: 1822365 - RNA, 19 nt, Artificial Sequence
  Description of Artificial Sequence: Synthetic oligonucleotide
  Sense strand starting at position 1069 of SEQ ID NO: 1563596
cuucuugcauacucaguua

SEQ ID NO: 1822366 - RNA, 19 nt, Artificial Sequence
  Description of Artificial Sequence: Synthetic oligonucleotide
  Antisense strand to SEQ ID NO: 1822365
uaacugaguaugcaagaag

SEQ ID NO: 1822367 - RNA, 19 nt, Artificial Sequence
  Description of Artificial Sequence: Synthetic oligonucleotide
  Sense strand starting at position 1099 of SEQ ID NO: 1563596
ucauaagagucgucaucac

SEQ ID NO: 1822368 - RNA, 19 nt, Artificial Sequence
  Description of Artificial Sequence: Synthetic oligonucleotide
  Antisense strand to SEQ ID NO: 1822367
gugaugacgacucuuauga

SEQ ID NO: 1822369 - RNA, 19 nt, Artificial Sequence
  Description of Artificial Sequence: Synthetic oligonucleotide
  Sense strand starting at position 1207 of SEQ ID NO: 1563596
guuacaacucauuaguucu

SEQ ID NO: 1822370 - RNA, 19 nt, Artificial Sequence
  Description of Artificial Sequence: Synthetic oligonucleotide
  Antisense strand to SEQ ID NO: 1822369
agaacuaaugaguuguaac

SEQ ID NO: 1822371 - RNA, 19 nt, Artificial Sequence
  Description of Artificial Sequence: Synthetic oligonucleotide
  Sense strand starting at position 1501 of SEQ ID NO: 1563596
agaacuagucuggagcuca

SEQ ID NO: 1822372 - RNA, 19 nt, Artificial Sequence
  Description of Artificial Sequence: Synthetic oligonucleotide
  Antisense strand to SEQ ID NO: 1822371
ugagcuccagacuaguucu

SEQ ID NO: 1822373 - RNA, 19 nt, Artificial Sequence
  Description of Artificial Sequence: Synthetic oligonucleotide
  Sense strand starting at position 1520 of SEQ ID NO: 1563596
gcgaaaucacuugagucca

SEQ ID NO: 1822374 - RNA, 19 nt, Artificial Sequence
  Description of Artificial Sequence: Synthetic oligonucleotide
  Antisense strand to SEQ ID NO: 1822373
uggacucaagugauuucgc

SEQ ID NO: 1822375 - RNA, 19 nt, Artificial Sequence
  Description of Artificial Sequence: Synthetic oligonucleotide
  Sense strand starting at position 1522 of SEQ ID NO: 1563596
gaaaucacuugaguccaga

SEQ ID NO: 1822376 - RNA, 19 nt, Artificial Sequence
  Description of Artificial Sequence: Synthetic oligonucleotide
  Antisense strand to SEQ ID NO: 1822375
ucuggacucaagugauuuc

SEQ ID NO: 1822377 - RNA, 19 nt, Artificial Sequence
  Description of Artificial Sequence: Synthetic oligonucleotide
  Sense strand starting at position 1638 of SEQ ID NO: 1563596
guggcucuccgcuugaguu

SEQ ID NO: 1822378 - RNA, 19 nt, Artificial Sequence
  Description of Artificial Sequence: Synthetic oligonucleotide
  Antisense strand to SEQ ID NO: 1822377
aacucaagcggagagccac

SEQ ID NO: 1822379 - RNA, 19 nt, Artificial Sequence
  Description of Artificial Sequence: Synthetic oligonucleotide
  Sense strand starting at position 1648 of SEQ ID NO: 1563596
gcuugaguuccgcagagag

SEQ ID NO: 1822380 - RNA, 19 nt, Artificial Sequence
  Description of Artificial Sequence: Synthetic oligonucleotide
  Antisense strand to SEQ ID NO: 1822379
cucucugcggaacucaagc

SEQ ID NO: 1822381 - RNA, 19 nt, Artificial Sequence
  Description of Artificial Sequence: Synthetic oligonucleotide
  Sense strand starting at position 1940 of SEQ ID NO: 1563596
ggaagucuauggucucuuu

SEQ ID NO: 1822382 - RNA, 19 nt, Artificial Sequence
  Description of Artificial Sequence: Synthetic oligonucleotide
  Antisense strand to SEQ ID NO: 1822381
aaagagaccauagacuucc

SEQ ID NO: 1822383 - RNA, 19 nt, Artificial Sequence
  Description of Artificial Sequence: Synthetic oligonucleotide
  Sense strand starting at position 2246 of SEQ ID NO: 1563596
gggagaaccagcuggguau

SEQ ID NO: 1822384 - RNA, 19 nt, Artificial Sequence
  Description of Artificial Sequence: Synthetic oligonucleotide
  Antisense strand to SEQ ID NO: 1822383
auacccagcugguucuccc

SEQ ID NO: 1822385 - RNA, 19 nt, Artificial Sequence
  Description of Artificial Sequence: Synthetic oligonucleotide
  Sense strand starting at position 2247 of SEQ ID NO: 1563596
ggagaaccagcuggguauu

SEQ ID NO: 1822386 - RNA, 19 nt, Artificial Sequence
  Description of Artificial Sequence: Synthetic oligonucleotide
  Antisense strand to SEQ ID NO: 1822385
aauacccagcugguucucc

SEQ ID NO: 1822387 - RNA, 19 nt, Artificial Sequence
  Description of Artificial Sequence: Synthetic oligonucleotide
  Sense strand starting at position 2357 of SEQ ID NO: 1563596
ccuaguccauuugugguaa

SEQ ID NO: 1822388 - RNA, 19 nt, Artificial Sequence
  Description of Artificial Sequence: Synthetic oligonucleotide
  Antisense strand to SEQ ID NO: 1822387
uuaccacaaauggacuagg

SEQ ID NO: 1822389 - RNA, 19 nt, Artificial Sequence
  Description of Artificial Sequence: Synthetic oligonucleotide
  Sense strand starting at position 2369 of SEQ ID NO: 1563596
gugguaagaaugcaguuaa

SEQ ID NO: 1822390 - RNA, 19 nt, Artificial Sequence
  Description of Artificial Sequence: Synthetic oligonucleotide
  Antisense strand to SEQ ID NO: 1822389
uuaacugcauucuuaccac

SEQ ID NO: 1822391 - RNA, 19 nt, Artificial Sequence
  Description of Artificial Sequence: Synthetic oligonucleotide
  Sense strand starting at position 2432 of SEQ ID NO: 1563596
ucaauauccgaucgaauuc

SEQ ID NO: 1822392 - RNA, 19 nt, Artificial Sequence
  Description of Artificial Sequence: Synthetic oligonucleotide
  Antisense strand to SEQ ID NO: 1822391
gaauucgaucggauauuga

SEQ ID NO: 1822393 - RNA, 19 nt, Artificial Sequence
  Description of Artificial Sequence: Synthetic oligonucleotide
  Sense strand starting at position 2536 of SEQ ID NO: 1563596
augucuacucuugguaauc

SEQ ID NO: 1822394 - RNA, 19 nt, Artificial Sequence
  Description of Artificial Sequence: Synthetic oligonucleotide
  Antisense strand to SEQ ID NO: 1822393
gauuaccaagaguagacau

SEQ ID NO: 1822395 - RNA, 19 nt, Artificial Sequence
  Description of Artificial Sequence: Synthetic oligonucleotide
  Sense strand starting at position 2537 of SEQ ID NO: 1563596
ugucuacucuugguaaucu

SEQ ID NO: 1822396 - RNA, 19 nt, Artificial Sequence
  Description of Artificial Sequence: Synthetic oligonucleotide
  Antisense strand to SEQ ID NO: 1822395
agauuaccaagaguagaca

SEQ ID NO: 1822397 - RNA, 19 nt, Artificial Sequence
  Description of Artificial Sequence: Synthetic oligonucleotide
  Sense strand starting at position 2967 of SEQ ID NO: 1563596
ugcaguagucaugaacaaa

SEQ ID NO: 1822398 - RNA, 19 nt, Artificial Sequence
  Description of Artificial Sequence: Synthetic oligonucleotide
  Antisense strand to SEQ ID NO: 1822397
uuuguucaugacuacugca

SEQ ID NO: 1822399 - RNA, 19 nt, Artificial Sequence
  Description of Artificial Sequence: Synthetic oligonucleotide
  Sense strand starting at position 3212 of SEQ ID NO: 1563596
guuggaaucuguuuaccug

SEQ ID NO: 1822400 - RNA, 19 nt, Artificial Sequence
  Description of Artificial Sequence: Synthetic oligonucleotide
  Antisense strand to SEQ ID NO: 1822399
cagguaaacagauuccaac

SEQ ID NO: 1822401 - RNA, 19 nt, Artificial Sequence
  Description of Artificial Sequence: Synthetic oligonucleotide
  Sense strand starting at position 3283 of SEQ ID NO: 1563596
gaaaccucguaauuccuga

SEQ ID NO: 1822402 - RNA, 19 nt, Artificial Sequence
  Description of Artificial Sequence: Synthetic oligonucleotide
  Antisense strand to SEQ ID NO: 1822401
ucaggaauuacgagguuuc

SEQ ID NO: 1822403 - RNA, 19 nt, Artificial Sequence
  Description of Artificial Sequence: Synthetic oligonucleotide
  Sense strand starting at position 3654 of SEQ ID NO: 1563596
uuauuuaaaucugacagag

SEQ ID NO: 1822404 - RNA, 19 nt, Artificial Sequence
  Description of Artificial Sequence: Synthetic oligonucleotide
  Antisense strand to SEQ ID NO: 1822403
cucugucagauuuaaauaa

SEQ ID NO: 1822405 - RNA, 19 nt, Artificial Sequence
  Description of Artificial Sequence: Synthetic oligonucleotide
  Sense strand starting at position 3705 of SEQ ID NO: 1563596
augggauucuaugaauaca

SEQ ID NO: 1822406 - RNA, 19 nt, Artificial Sequence
  Description of Artificial Sequence: Synthetic oligonucleotide
  Antisense strand to SEQ ID NO: 1822405
uguauucauagaaucccau

SEQ ID NO: 1822407 - RNA, 19 nt, Artificial Sequence
  Description of Artificial Sequence: Synthetic oligonucleotide
  Sense strand starting at position 3771 of SEQ ID NO: 1563596
cccagaaacuugucuugaa

SEQ ID NO: 1822408 - RNA, 19 nt, Artificial Sequence
  Description of Artificial Sequence: Synthetic oligonucleotide
  Antisense strand to SEQ ID NO: 1822407
uucaagacaaguuucuggg

SEQ ID NO: 1822409 - RNA, 19 nt, Artificial Sequence
  Description of Artificial Sequence: Synthetic oligonucleotide
  Sense strand starting at position 3772 of SEQ ID NO: 1563596
ccagaaacuugucuugaac

SEQ ID NO: 1822410 - RNA, 19 nt, Artificial Sequence
  Description of Artificial Sequence: Synthetic oligonucleotide
  Antisense strand to SEQ ID NO: 1822409
guucaagacaaguuucugg

SEQ ID NO: 1822411 - RNA, 19 nt, Artificial Sequence
  Description of Artificial Sequence: Synthetic oligonucleotide
  Sense strand starting at position 3804 of SEQ ID NO: 1563596
gcaucugcuguacaauuaa

SEQ ID NO: 1822412 - RNA, 19 nt, Artificial Sequence
  Description of Artificial Sequence: Synthetic oligonucleotide
  Antisense strand to SEQ ID NO: 1822411
uuaauuguacagcagaugc

SEQ ID NO: 1822413 - RNA, 19 nt, Artificial Sequence
  Description of Artificial Sequence: Synthetic oligonucleotide
  Sense strand starting at position 244 of SEQ ID NO: 1563597
aaauauggaugucugagua

SEQ ID NO: 1822414 - RNA, 19 nt, Artificial Sequence
  Description of Artificial Sequence: Synthetic oligonucleotide
  Antisense strand to SEQ ID NO: 1822413
uacucagacauccauauuu

SEQ ID NO: 1822415 - RNA, 19 nt, Artificial Sequence
  Description of Artificial Sequence: Synthetic oligonucleotide
  Sense strand starting at position 279 of SEQ ID NO: 1563597
ccucucaaguaguuaaaua

SEQ ID NO: 1822416 - RNA, 19 nt, Artificial Sequence
  Description of Artificial Sequence: Synthetic oligonucleotide
  Antisense strand to SEQ ID NO: 1822415
uauuuaacuacuugagagg

SEQ ID NO: 1822417 - RNA, 19 nt, Artificial Sequence
  Description of Artificial Sequence: Synthetic oligonucleotide
  Sense strand starting at position 465 of SEQ ID NO: 1563597
guagauuaaaugcgagaua

SEQ ID NO: 1822418 - RNA, 19 nt, Artificial Sequence
  Description of Artificial Sequence: Synthetic oligonucleotide
  Antisense strand to SEQ ID NO: 1822417
uaucucgcauuuaaucuac

SEQ ID NO: 1822419 - RNA, 19 nt, Artificial Sequence
  Description of Artificial Sequence: Synthetic oligonucleotide
  Sense strand starting at position 476 of SEQ ID NO: 1563597
gcgagauauuuggucaguc

SEQ ID NO: 1822420 - RNA, 19 nt, Artificial Sequence
  Description of Artificial Sequence: Synthetic oligonucleotide
  Antisense strand to SEQ ID NO: 1822419
gacugaccaaauaucucgc

SEQ ID NO: 1822421 - RNA, 19 nt, Artificial Sequence
  Description of Artificial Sequence: Synthetic oligonucleotide
  Sense strand starting at position 486 of SEQ ID NO: 1563597
uggucagucauuggucaaa

SEQ ID NO: 1822422 - RNA, 19 nt, Artificial Sequence
  Description of Artificial Sequence: Synthetic oligonucleotide
  Antisense strand to SEQ ID NO: 1822421
uuugaccaaugacugacca

SEQ ID NO: 1822423 - RNA, 19 nt, Artificial Sequence
  Description of Artificial Sequence: Synthetic oligonucleotide
  Sense strand starting at position 488 of SEQ ID NO: 1563597
gucagucauuggucaaaca

SEQ ID NO: 1822424 - RNA, 19 nt, Artificial Sequence
  Description of Artificial Sequence: Synthetic oligonucleotide
  Antisense strand to SEQ ID NO: 1822423
uguuugaccaaugacugac

SEQ ID NO: 1822425 - RNA, 19 nt, Artificial Sequence
  Description of Artificial Sequence: Synthetic oligonucleotide
  Sense strand starting at position 506 of SEQ ID NO: 1563597
acugcuaagcacuaugaca

SEQ ID NO: 1822426 - RNA, 19 nt, Artificial Sequence
  Description of Artificial Sequence: Synthetic oligonucleotide
  Antisense strand to SEQ ID NO: 1822425
ugucauagugcuuagcagu

SEQ ID NO: 1822427 - RNA, 19 nt, Artificial Sequence
  Description of Artificial Sequence: Synthetic oligonucleotide
  Sense strand starting at position 578 of SEQ ID NO: 1563597
guuauuaugugaucaucac

SEQ ID NO: 1822428 - RNA, 19 nt, Artificial Sequence
  Description of Artificial Sequence: Synthetic oligonucleotide
  Antisense strand to SEQ ID NO: 1822427
gugaugaucacauaauaac

SEQ ID NO: 1822429 - RNA, 19 nt, Artificial Sequence
  Description of Artificial Sequence: Synthetic oligonucleotide
  Sense strand starting at position 579 of SEQ ID NO: 1563597
uuauuaugugaucaucacu

SEQ ID NO: 1822430 - RNA, 19 nt, Artificial Sequence
  Description of Artificial Sequence: Synthetic oligonucleotide
  Antisense strand to SEQ ID NO: 1822429
agugaugaucacauaauaa

SEQ ID NO: 1822431 - RNA, 19 nt, Artificial Sequence
  Description of Artificial Sequence: Synthetic oligonucleotide
  Sense strand starting at position 584 of SEQ ID NO: 1563597
augugaucaucacugugau

SEQ ID NO: 1822432 - RNA, 19 nt, Artificial Sequence
  Description of Artificial Sequence: Synthetic oligonucleotide
  Antisense strand to SEQ ID NO: 1822431
aucacagugaugaucacau

SEQ ID NO: 1822433 - RNA, 19 nt, Artificial Sequence
  Description of Artificial Sequence: Synthetic oligonucleotide
  Sense strand starting at position 587 of SEQ ID NO: 1563597
ugaucaucacugugauaac

SEQ ID NO: 1822434 - RNA, 19 nt, Artificial Sequence
  Description of Artificial Sequence: Synthetic oligonucleotide
  Antisense strand to SEQ ID NO: 1822433
guuaucacagugaugauca

SEQ ID NO: 1822435 - RNA, 19 nt, Artificial Sequence
  Description of Artificial Sequence: Synthetic oligonucleotide
  Sense strand starting at position 653 of SEQ ID NO: 1563597
gugcaaauaccugaucaac

SEQ ID NO: 1822436 - RNA, 19 nt, Artificial Sequence
  Description of Artificial Sequence: Synthetic oligonucleotide
  Antisense strand to SEQ ID NO: 1822435
guugaucagguauuugcac

SEQ ID NO: 1822437 - RNA, 19 nt, Artificial Sequence
  Description of Artificial Sequence: Synthetic oligonucleotide
  Sense strand starting at position 739 of SEQ ID NO: 1563597
cagucugcucugcaggaaa

SEQ ID NO: 1822438 - RNA, 19 nt, Artificial Sequence
  Description of Artificial Sequence: Synthetic oligonucleotide
  Antisense strand to SEQ ID NO: 1822437
uuuccugcagagcagacug

SEQ ID NO: 1822439 - RNA, 19 nt, Artificial Sequence
  Description of Artificial Sequence: Synthetic oligonucleotide
  Sense strand starting at position 782 of SEQ ID NO: 1563597
uccaccuucccagagucau

SEQ ID NO: 1822440 - RNA, 19 nt, Artificial Sequence
  Description of Artificial Sequence: Synthetic oligonucleotide
  Antisense strand to SEQ ID NO: 1822439
augacucugggaaggugga

SEQ ID NO: 1822441 - RNA, 19 nt, Artificial Sequence
  Description of Artificial Sequence: Synthetic oligonucleotide
  Sense strand starting at position 820 of SEQ ID NO: 1563597
uggugaaaugcuuaacagu

SEQ ID NO: 1822442 - RNA, 19 nt, Artificial Sequence
  Description of Artificial Sequence: Synthetic oligonucleotide
  Antisense strand to SEQ ID NO: 1822441
acuguuaagcauuucacca

SEQ ID NO: 1822443 - RNA, 19 nt, Artificial Sequence
  Description of Artificial Sequence: Synthetic oligonucleotide
  Sense strand starting at position 870 of SEQ ID NO: 1563597
gccaauuuccauugcguau

SEQ ID NO: 1822444 - RNA, 19 nt, Artificial Sequence
  Description of Artificial Sequence: Synthetic oligonucleotide
  Antisense strand to SEQ ID NO: 1822443
auacgcaauggaaauuggc

SEQ ID NO: 1822445 - RNA, 19 nt, Artificial Sequence
  Description of Artificial Sequence: Synthetic oligonucleotide
  Sense strand starting at position 894 of SEQ ID NO: 1563597
caucgugagcaugacauua

SEQ ID NO: 1822446 - RNA, 19 nt, Artificial Sequence
  Description of Artificial Sequence: Synthetic oligonucleotide
  Antisense strand to SEQ ID NO: 1822445
uaaugucaugcucacgaug

SEQ ID NO: 1822447 - RNA, 19 nt, Artificial Sequence
  Description of Artificial Sequence: Synthetic oligonucleotide
  Sense strand starting at position 957 of SEQ ID NO: 1563597
aguagagcaccauaguaua

SEQ ID NO: 1822448 - RNA, 19 nt, Artificial Sequence
  Description of Artificial Sequence: Synthetic oligonucleotide
  Antisense strand to SEQ ID NO: 1822447
uauacuauggugcucuacu

SEQ ID NO: 1822449 - RNA, 19 nt, Artificial Sequence
  Description of Artificial Sequence: Synthetic oligonucleotide
  Sense strand starting at position 1134 of SEQ ID NO: 1563597
caaugauggcucuguuuag

SEQ ID NO: 1822450 - RNA, 19 nt, Artificial Sequence
  Description of Artificial Sequence: Synthetic oligonucleotide
  Antisense strand to SEQ ID NO: 1822449
cuaaacagagccaucauug

SEQ ID NO: 1822451 - RNA, 19 nt, Artificial Sequence
  Description of Artificial Sequence: Synthetic oligonucleotide
  Sense strand starting at position 1138 of SEQ ID NO: 1563597
gauggcucuguuuagcaau

SEQ ID NO: 1822452 - RNA, 19 nt, Artificial Sequence
  Description of Artificial Sequence: Synthetic oligonucleotide
  Antisense strand to SEQ ID NO: 1822451
auugcuaaacagagccauc

SEQ ID NO: 1822453 - RNA, 19 nt, Artificial Sequence
  Description of Artificial Sequence: Synthetic oligonucleotide
  Sense strand starting at position 1144 of SEQ ID NO: 1563597
ucuguuuagcaaugggauc

SEQ ID NO: 1822454 - RNA, 19 nt, Artificial Sequence
  Description of Artificial Sequence: Synthetic oligonucleotide
  Antisense strand to SEQ ID NO: 1822453
gaucccauugcuaaacaga

SEQ ID NO: 1822455 - RNA, 19 nt, Artificial Sequence
  Description of Artificial Sequence: Synthetic oligonucleotide
  Sense strand starting at position 1208 of SEQ ID NO: 1563597
ggguaagacgcauaacuua

SEQ ID NO: 1822456 - RNA, 19 nt, Artificial Sequence
  Description of Artificial Sequence: Synthetic oligonucleotide
  Antisense strand to SEQ ID NO: 1822455
uaaguuaugcgucuuaccc

SEQ ID NO: 1822457 - RNA, 19 nt, Artificial Sequence
  Description of Artificial Sequence: Synthetic oligonucleotide
  Sense strand starting at position 1230 of SEQ ID NO: 1563597
acgugcuccacugcgaauu

SEQ ID NO: 1822458 - RNA, 19 nt, Artificial Sequence
  Description of Artificial Sequence: Synthetic oligonucleotide
  Antisense strand to SEQ ID NO: 1822457
aauucgcaguggagcacgu

SEQ ID NO: 1822459 - RNA, 19 nt, Artificial Sequence
  Description of Artificial Sequence: Synthetic oligonucleotide
  Sense strand starting at position 1242 of SEQ ID NO: 1563597
gcgaauuacacggaaucuu

SEQ ID NO: 1822460 - RNA, 19 nt, Artificial Sequence
  Description of Artificial Sequence: Synthetic oligonucleotide
  Antisense strand to SEQ ID NO: 1822459
aagauuccguguaauucgc

SEQ ID NO: 1822461 - RNA, 19 nt, Artificial Sequence
  Description of Artificial Sequence: Synthetic oligonucleotide
  Sense strand starting at position 1259 of SEQ ID NO: 1563597
uuugacuaugccgacuaaa

SEQ ID NO: 1822462 - RNA, 19 nt, Artificial Sequence
  Description of Artificial Sequence: Synthetic oligonucleotide
  Antisense strand to SEQ ID NO: 1822461
uuuagucggcauagucaaa

SEQ ID NO: 1822463 - RNA, 19 nt, Artificial Sequence
  Description of Artificial Sequence: Synthetic oligonucleotide
  Sense strand starting at position 1283 of SEQ ID NO: 1563597
ggcuauuccuaaguaccau

SEQ ID NO: 1822464 - RNA, 19 nt, Artificial Sequence
  Description of Artificial Sequence: Synthetic oligonucleotide
  Antisense strand to SEQ ID NO: 1822463
augguacuuaggaauagcc

SEQ ID NO: 1822465 - RNA, 19 nt, Artificial Sequence
  Description of Artificial Sequence: Synthetic oligonucleotide
  Sense strand starting at position 2147 of SEQ ID NO: 1563597
ucgccuggugaagaauauu

SEQ ID NO: 1822466 - RNA, 19 nt, Artificial Sequence
  Description of Artificial Sequence: Synthetic oligonucleotide
  Antisense strand to SEQ ID NO: 1822465
aauauucuucaccaggcga

SEQ ID NO: 1822467 - RNA, 19 nt, Artificial Sequence
  Description of Artificial Sequence: Synthetic oligonucleotide
  Sense strand starting at position 2196 of SEQ ID NO: 1563597
cugagugaccguguuuguu

SEQ ID NO: 1822468 - RNA, 19 nt, Artificial Sequence
  Description of Artificial Sequence: Synthetic oligonucleotide
  Antisense strand to SEQ ID NO: 1822467
aacaaacacggucacucag

SEQ ID NO: 1822469 - RNA, 19 nt, Artificial Sequence
  Description of Artificial Sequence: Synthetic oligonucleotide
  Sense strand starting at position 2247 of SEQ ID NO: 1563597
cugcgauguguccuacucu

SEQ ID NO: 1822470 - RNA, 19 nt, Artificial Sequence
  Description of Artificial Sequence: Synthetic oligonucleotide
  Antisense strand to SEQ ID NO: 1822469
agaguaggacacaucgcag

SEQ ID NO: 1822471 - RNA, 19 nt, Artificial Sequence
  Description of Artificial Sequence: Synthetic oligonucleotide
  Sense strand starting at position 2480 of SEQ ID NO: 1563597
gauccacugcuuuaggagu

SEQ ID NO: 1822472 - RNA, 19 nt, Artificial Sequence
  Description of Artificial Sequence: Synthetic oligonucleotide
  Antisense strand to SEQ ID NO: 1822471
acuccuaaagcaguggauc

SEQ ID NO: 1822473 - RNA, 19 nt, Artificial Sequence
  Description of Artificial Sequence: Synthetic oligonucleotide
  Sense strand starting at position 2486 of SEQ ID NO: 1563597
cugcuuuaggagugacaca

SEQ ID NO: 1822474 - RNA, 19 nt, Artificial Sequence
  Description of Artificial Sequence: Synthetic oligonucleotide
  Antisense strand to SEQ ID NO: 1822473
ugugucacuccuaaagcag

SEQ ID NO: 1822475 - RNA, 19 nt, Artificial Sequence
  Description of Artificial Sequence: Synthetic oligonucleotide
  Sense strand starting at position 2487 of SEQ ID NO: 1563597
ugcuuuaggagugacacaa

SEQ ID NO: 1822476 - RNA, 19 nt, Artificial Sequence
  Description of Artificial Sequence: Synthetic oligonucleotide
  Antisense strand to SEQ ID NO: 1822475
uugugucacuccuaaagca

SEQ ID NO: 1822477 - RNA, 19 nt, Artificial Sequence
  Description of Artificial Sequence: Synthetic oligonucleotide
  Sense strand starting at position 2944 of SEQ ID NO: 1563597
auacguuaucuaugaagau

SEQ ID NO: 1822478 - RNA, 19 nt, Artificial Sequence
  Description of Artificial Sequence: Synthetic oligonucleotide
  Antisense strand to SEQ ID NO: 1822477
aucuucauagauaacguau

SEQ ID NO: 1822479 - RNA, 19 nt, Artificial Sequence
  Description of Artificial Sequence: Synthetic oligonucleotide
  Sense strand starting at position 3330 of SEQ ID NO: 1563597
ggaggaguuucaucuuguu

SEQ ID NO: 1822480 - RNA, 19 nt, Artificial Sequence
  Description of Artificial Sequence: Synthetic oligonucleotide
  Antisense strand to SEQ ID NO: 1822479
aacaagaugaaacuccucc

SEQ ID NO: 1822481 - RNA, 19 nt, Artificial Sequence
  Description of Artificial Sequence: Synthetic oligonucleotide
  Sense strand starting at position 3547 of SEQ ID NO: 1563597
cugacucauuacuuuguua

SEQ ID NO: 1822482 - RNA, 19 nt, Artificial Sequence
  Description of Artificial Sequence: Synthetic oligonucleotide
  Antisense strand to SEQ ID NO: 1822481
uaacaaaguaaugagucag

SEQ ID NO: 1822483 - RNA, 19 nt, Artificial Sequence
  Description of Artificial Sequence: Synthetic oligonucleotide
  Sense strand starting at position 3621 of SEQ ID NO: 1563597
acaaucuguuaacuguaga

SEQ ID NO: 1822484 - RNA, 19 nt, Artificial Sequence
  Description of Artificial Sequence: Synthetic oligonucleotide
  Antisense strand to SEQ ID NO: 1822483
ucuacaguuaacagauugu

SEQ ID NO: 1822485 - RNA, 19 nt, Artificial Sequence
  Description of Artificial Sequence: Synthetic oligonucleotide
  Sense strand starting at position 3693 of SEQ ID NO: 1563597
cauuguaaucgcuauaaga

SEQ ID NO: 1822486 - RNA, 19 nt, Artificial Sequence
  Description of Artificial Sequence: Synthetic oligonucleotide
  Antisense strand to SEQ ID NO: 1822485
ucuuauagcgauuacaaug

SEQ ID NO: 1822487 - RNA, 19 nt, Artificial Sequence
  Description of Artificial Sequence: Synthetic oligonucleotide
  Sense strand starting at position 3695 of SEQ ID NO: 1563597
uuguaaucgcuauaagaga

SEQ ID NO: 1822488 - RNA, 19 nt, Artificial Sequence
  Description of Artificial Sequence: Synthetic oligonucleotide
  Antisense strand to SEQ ID NO: 1822487
ucucuuauagcgauuacaa

SEQ ID NO: 1822489 - RNA, 19 nt, Artificial Sequence
  Description of Artificial Sequence: Synthetic oligonucleotide
  Sense strand starting at position 3753 of SEQ ID NO: 1563597
ugaggagcccuuuaacagu

SEQ ID NO: 1822490 - RNA, 19 nt, Artificial Sequence
  Description of Artificial Sequence: Synthetic oligonucleotide
  Antisense strand to SEQ ID NO: 1822489
acuguuaaagggcuccuca

SEQ ID NO: 1822491 - RNA, 19 nt, Artificial Sequence
  Description of Artificial Sequence: Synthetic oligonucleotide
  Sense strand starting at position 3814 of SEQ ID NO: 1563597
guuagucaacuuuauucca

SEQ ID NO: 1822492 - RNA, 19 nt, Artificial Sequence
  Description of Artificial Sequence: Synthetic oligonucleotide
  Antisense strand to SEQ ID NO: 1822491
uggaauaaaguugacuaac

SEQ ID NO: 1822493 - RNA, 19 nt, Artificial Sequence
  Description of Artificial Sequence: Synthetic oligonucleotide
  Sense strand starting at position 22 of SEQ ID NO: 1563598
cguguaauuugagaugaag

SEQ ID NO: 1822494 - RNA, 19 nt, Artificial Sequence
  Description of Artificial Sequence: Synthetic oligonucleotide
  Antisense strand to SEQ ID NO: 1822493
cuucaucucaaauuacacg

SEQ ID NO: 1822495 - RNA, 19 nt, Artificial Sequence
  Description of Artificial Sequence: Synthetic oligonucleotide
  Sense strand starting at position 33 of SEQ ID NO: 1563598
agaugaagcccuuguucca

SEQ ID NO: 1822496 - RNA, 19 nt, Artificial Sequence
  Description of Artificial Sequence: Synthetic oligonucleotide
  Antisense strand to SEQ ID NO: 1822495
uggaacaagggcuucaucu

SEQ ID NO: 1822497 - RNA, 19 nt, Artificial Sequence
  Description of Artificial Sequence: Synthetic oligonucleotide
  Sense strand starting at position 181 of SEQ ID NO: 1563598
cuuuccuaugagugcagaa

SEQ ID NO: 1822498 - RNA, 19 nt, Artificial Sequence
  Description of Artificial Sequence: Synthetic oligonucleotide
  Antisense strand to SEQ ID NO: 1822497
uucugcacucauaggaaag

SEQ ID NO: 1822499 - RNA, 19 nt, Artificial Sequence
  Description of Artificial Sequence: Synthetic oligonucleotide
  Sense strand starting at position 183 of SEQ ID NO: 1563598
uuccuaugagugcagaaug

SEQ ID NO: 1822500 - RNA, 19 nt, Artificial Sequence
  Description of Artificial Sequence: Synthetic oligonucleotide
  Antisense strand to SEQ ID NO: 1822499
cauucugcacucauaggaa

SEQ ID NO: 1822501 - RNA, 19 nt, Artificial Sequence
  Description of Artificial Sequence: Synthetic oligonucleotide
  Sense strand starting at position 205 of SEQ ID NO: 1563598
guucuacaagcuggacaau

SEQ ID NO: 1822502 - RNA, 19 nt, Artificial Sequence
  Description of Artificial Sequence: Synthetic oligonucleotide
  Antisense strand to SEQ ID NO: 1822501
auuguccagcuuguagaac

SEQ ID NO: 1822503 - RNA, 19 nt, Artificial Sequence
  Description of Artificial Sequence: Synthetic oligonucleotide
  Sense strand starting at position 304 of SEQ ID NO: 1563598
aguguuuguaucgacggaa

SEQ ID NO: 1822504 - RNA, 19 nt, Artificial Sequence
  Description of Artificial Sequence: Synthetic oligonucleotide
  Antisense strand to SEQ ID NO: 1822503
uuccgucgauacaaacacu

SEQ ID NO: 1822505 - RNA, 19 nt, Artificial Sequence
  Description of Artificial Sequence: Synthetic oligonucleotide
  Sense strand starting at position 305 of SEQ ID NO: 1563598
guguuuguaucgacggaac

SEQ ID NO: 1822506 - RNA, 19 nt, Artificial Sequence
  Description of Artificial Sequence: Synthetic oligonucleotide
  Antisense strand to SEQ ID NO: 1822505
guuccgucgauacaaacac

SEQ ID NO: 1822507 - RNA, 19 nt, Artificial Sequence
  Description of Artificial Sequence: Synthetic oligonucleotide
  Sense strand starting at position 323 of SEQ ID NO: 1563598
cuugaaguguuagugaaga

SEQ ID NO: 1822508 - RNA, 19 nt, Artificial Sequence
  Description of Artificial Sequence: Synthetic oligonucleotide
  Antisense strand to SEQ ID NO: 1822507
ucuucacuaacacuucaag

SEQ ID NO: 1822509 - RNA, 19 nt, Artificial Sequence
  Description of Artificial Sequence: Synthetic oligonucleotide
  Sense strand starting at position 373 of SEQ ID NO: 1563598
gaacucauuuguuaaggca

SEQ ID NO: 1822510 - RNA, 19 nt, Artificial Sequence
  Description of Artificial Sequence: Synthetic oligonucleotide
  Antisense strand to SEQ ID NO: 1822509
ugccuuaacaaaugaguuc

SEQ ID NO: 1822511 - RNA, 19 nt, Artificial Sequence
  Description of Artificial Sequence: Synthetic oligonucleotide
  Sense strand starting at position 418 of SEQ ID NO: 1563598
ugaauagcauucccuguuu

SEQ ID NO: 1822512 - RNA, 19 nt, Artificial Sequence
  Description of Artificial Sequence: Synthetic oligonucleotide
  Antisense strand to SEQ ID NO: 1822511
aaacagggaaugcuauuca

SEQ ID NO: 1822513 - RNA, 19 nt, Artificial Sequence
  Description of Artificial Sequence: Synthetic oligonucleotide
  Sense strand starting at position 452 of SEQ ID NO: 1563598
ucuagacagucccuaaaga

SEQ ID NO: 1822514 - RNA, 19 nt, Artificial Sequence
  Description of Artificial Sequence: Synthetic oligonucleotide
  Antisense strand to SEQ ID NO: 1822513
ucuuuagggacugucuaga

SEQ ID NO: 1822515 - RNA, 19 nt, Artificial Sequence
  Description of Artificial Sequence: Synthetic oligonucleotide
  Sense strand starting at position 472 of SEQ ID NO: 1563598
ccugcaacuccaggauuaa

SEQ ID NO: 1822516 - RNA, 19 nt, Artificial Sequence
  Description of Artificial Sequence: Synthetic oligonucleotide
  Antisense strand to SEQ ID NO: 1822515
uuaauccuggaguugcagg

SEQ ID NO: 1822517 - RNA, 19 nt, Artificial Sequence
  Description of Artificial Sequence: Synthetic oligonucleotide
  Sense strand starting at position 862 of SEQ ID NO: 1563598
cagguagagccgggaugau

SEQ ID NO: 1822518 - RNA, 19 nt, Artificial Sequence
  Description of Artificial Sequence: Synthetic oligonucleotide
  Antisense strand to SEQ ID NO: 1822517
aucaucccggcucuaccug

SEQ ID NO: 1822519 - RNA, 19 nt, Artificial Sequence
  Description of Artificial Sequence: Synthetic oligonucleotide
  Sense strand starting at position 939 of SEQ ID NO: 1563598
ugcaacaauuaguuggaaa

SEQ ID NO: 1822520 - RNA, 19 nt, Artificial Sequence
  Description of Artificial Sequence: Synthetic oligonucleotide
  Antisense strand to SEQ ID NO: 1822519
uuuccaacuaauuguugca

SEQ ID NO: 1822521 - RNA, 19 nt, Artificial Sequence
  Description of Artificial Sequence: Synthetic oligonucleotide
  Sense strand starting at position 1006 of SEQ ID NO: 1563598
ggagauacucaccgaugca

SEQ ID NO: 1822522 - RNA, 19 nt, Artificial Sequence
  Description of Artificial Sequence: Synthetic oligonucleotide
  Antisense strand to SEQ ID NO: 1822521
ugcaucggugaguaucucc

SEQ ID NO: 1822523 - RNA, 19 nt, Artificial Sequence
  Description of Artificial Sequence: Synthetic oligonucleotide
  Sense strand starting at position 1029 of SEQ ID NO: 1563598
ugaugaugaauaugugugu

SEQ ID NO: 1822524 - RNA, 19 nt, Artificial Sequence
  Description of Artificial Sequence: Synthetic oligonucleotide
  Antisense strand to SEQ ID NO: 1822523
acacacauauucaucauca

SEQ ID NO: 1822525 - RNA, 19 nt, Artificial Sequence
  Description of Artificial Sequence: Synthetic oligonucleotide
  Sense strand starting at position 1030 of SEQ ID NO: 1563598
gaugaugaauaugugugua

SEQ ID NO: 1822526 - RNA, 19 nt, Artificial Sequence
  Description of Artificial Sequence: Synthetic oligonucleotide
  Antisense strand to SEQ ID NO: 1822525
uacacacauauucaucauc

SEQ ID NO: 1822527 - RNA, 19 nt, Artificial Sequence
  Description of Artificial Sequence: Synthetic oligonucleotide
  Sense strand starting at position 1032 of SEQ ID NO: 1563598
ugaugaauauguguguauc

SEQ ID NO: 1822528 - RNA, 19 nt, Artificial Sequence
  Description of Artificial Sequence: Synthetic oligonucleotide
  Antisense strand to SEQ ID NO: 1822527
gauacacacauauucauca

SEQ ID NO: 1822529 - RNA, 19 nt, Artificial Sequence
  Description of Artificial Sequence: Synthetic oligonucleotide
  Sense strand starting at position 1035 of SEQ ID NO: 1563598
ugaauauguguguauccga

SEQ ID NO: 1822530 - RNA, 19 nt, Artificial Sequence
  Description of Artificial Sequence: Synthetic oligonucleotide
  Antisense strand to SEQ ID NO: 1822529
ucggauacacacauauuca

SEQ ID NO: 1822531 - RNA, 19 nt, Artificial Sequence
  Description of Artificial Sequence: Synthetic oligonucleotide
  Sense strand starting at position 1043 of SEQ ID NO: 1563598
uguguauccgacugaugga

SEQ ID NO: 1822532 - RNA, 19 nt, Artificial Sequence
  Description of Artificial Sequence: Synthetic oligonucleotide
  Antisense strand to SEQ ID NO: 1822531
uccaucagucggauacaca

SEQ ID NO: 1822533 - RNA, 19 nt, Artificial Sequence
  Description of Artificial Sequence: Synthetic oligonucleotide
  Sense strand starting at position 1044 of SEQ ID NO: 1563598
guguauccgacugauggaa

SEQ ID NO: 1822534 - RNA, 19 nt, Artificial Sequence
  Description of Artificial Sequence: Synthetic oligonucleotide
  Antisense strand to SEQ ID NO: 1822533
uuccaucagucggauacac

SEQ ID NO: 1822535 - RNA, 19 nt, Artificial Sequence
  Description of Artificial Sequence: Synthetic oligonucleotide
  Sense strand starting at position 1140 of SEQ ID NO: 1563598
cgcugucugguggaagaaa

SEQ ID NO: 1822536 - RNA, 19 nt, Artificial Sequence
  Description of Artificial Sequence: Synthetic oligonucleotide
  Antisense strand to SEQ ID NO: 1822535
uuucuuccaccagacagcg

SEQ ID NO: 1822537 - RNA, 19 nt, Artificial Sequence
  Description of Artificial Sequence: Synthetic oligonucleotide
  Sense strand starting at position 1151 of SEQ ID NO: 1563598
ggaagaaaggcucguuaac

SEQ ID NO: 1822538 - RNA, 19 nt, Artificial Sequence
  Description of Artificial Sequence: Synthetic oligonucleotide
  Antisense strand to SEQ ID NO: 1822537
guuaacgagccuuucuucc

SEQ ID NO: 1822539 - RNA, 19 nt, Artificial Sequence
  Description of Artificial Sequence: Synthetic oligonucleotide
  Sense strand starting at position 1153 of SEQ ID NO: 1563598
aagaaaggcucguuaacaa

SEQ ID NO: 1822540 - RNA, 19 nt, Artificial Sequence
  Description of Artificial Sequence: Synthetic oligonucleotide
  Antisense strand to SEQ ID NO: 1822539
uuguuaacgagccuuucuu

SEQ ID NO: 1822541 - RNA, 19 nt, Artificial Sequence
  Description of Artificial Sequence: Synthetic oligonucleotide
  Sense strand starting at position 1292 of SEQ ID NO: 1563598
agugguugauggguuagaa

SEQ ID NO: 1822542 - RNA, 19 nt, Artificial Sequence
  Description of Artificial Sequence: Synthetic oligonucleotide
  Antisense strand to SEQ ID NO: 1822541
uucuaacccaucaaccacu

SEQ ID NO: 1822543 - RNA, 19 nt, Artificial Sequence
  Description of Artificial Sequence: Synthetic oligonucleotide
  Sense strand starting at position 1378 of SEQ ID NO: 1563598
uacucaaagcauuggugua

SEQ ID NO: 1822544 - RNA, 19 nt, Artificial Sequence
  Description of Artificial Sequence: Synthetic oligonucleotide
  Antisense strand to SEQ ID NO: 1822543
uacaccaaugcuuugagua

SEQ ID NO: 1822545 - RNA, 19 nt, Artificial Sequence
  Description of Artificial Sequence: Synthetic oligonucleotide
  Sense strand starting at position 1392 of SEQ ID NO: 1563598
guguauuccgacuacagca

SEQ ID NO: 1822546 - RNA, 19 nt, Artificial Sequence
  Description of Artificial Sequence: Synthetic oligonucleotide
  Antisense strand to SEQ ID NO: 1822545
ugcuguagucggaauacac

SEQ ID NO: 1822547 - RNA, 19 nt, Artificial Sequence
  Description of Artificial Sequence: Synthetic oligonucleotide
  Sense strand starting at position 1496 of SEQ ID NO: 1563598
ccacaaugaccuggagcau

SEQ ID NO: 1822548 - RNA, 19 nt, Artificial Sequence
  Description of Artificial Sequence: Synthetic oligonucleotide
  Antisense strand to SEQ ID NO: 1822547
augcuccaggucauugugg

SEQ ID NO: 1822549 - RNA, 19 nt, Artificial Sequence
  Description of Artificial Sequence: Synthetic oligonucleotide
  Sense strand starting at position 1634 of SEQ ID NO: 1563598
guauaaagggauugguuaa

SEQ ID NO: 1822550 - RNA, 19 nt, Artificial Sequence
  Description of Artificial Sequence: Synthetic oligonucleotide
  Antisense strand to SEQ ID NO: 1822549
uuaaccaaucccuuuauac

SEQ ID NO: 1822551 - RNA, 19 nt, Artificial Sequence
  Description of Artificial Sequence: Synthetic oligonucleotide
  Sense strand starting at position 1684 of SEQ ID NO: 1563598
caacaaacagcguguauuu

SEQ ID NO: 1822552 - RNA, 19 nt, Artificial Sequence
  Description of Artificial Sequence: Synthetic oligonucleotide
  Antisense strand to SEQ ID NO: 1822551
aaauacacgcuguuuguug

SEQ ID NO: 1822553 - RNA, 19 nt, Artificial Sequence
  Description of Artificial Sequence: Synthetic oligonucleotide
  Sense strand starting at position 3057 of SEQ ID NO: 1563598
uaguuuggcagcuagguau

SEQ ID NO: 1822554 - RNA, 19 nt, Artificial Sequence
  Description of Artificial Sequence: Synthetic oligonucleotide
  Antisense strand to SEQ ID NO: 1822553
auaccuagcugccaaacua

SEQ ID NO: 1822555 - RNA, 19 nt, Artificial Sequence
  Description of Artificial Sequence: Synthetic oligonucleotide
  Sense strand starting at position 3064 of SEQ ID NO: 1563598
gcagcuagguaucugauuu

SEQ ID NO: 1822556 - RNA, 19 nt, Artificial Sequence
  Description of Artificial Sequence: Synthetic oligonucleotide
  Antisense strand to SEQ ID NO: 1822555
aaaucagauaccuagcugc

SEQ ID NO: 1822557 - RNA, 19 nt, Artificial Sequence
  Description of Artificial Sequence: Synthetic oligonucleotide
  Sense strand starting at position 3132 of SEQ ID NO: 1563598
cuguuucugugaucugaga

SEQ ID NO: 1822558 - RNA, 19 nt, Artificial Sequence
  Description of Artificial Sequence: Synthetic oligonucleotide
  Antisense strand to SEQ ID NO: 1822557
ucucagaucacagaaacag

SEQ ID NO: 1822559 - RNA, 19 nt, Artificial Sequence
  Description of Artificial Sequence: Synthetic oligonucleotide
  Sense strand starting at position 3134 of SEQ ID NO: 1563598
guuucugugaucugagaau

SEQ ID NO: 1822560 - RNA, 19 nt, Artificial Sequence
  Description of Artificial Sequence: Synthetic oligonucleotide
  Antisense strand to SEQ ID NO: 1822559
auucucagaucacagaaac

SEQ ID NO: 1822561 - RNA, 19 nt, Artificial Sequence
  Description of Artificial Sequence: Synthetic oligonucleotide
  Sense strand starting at position 3193 of SEQ ID NO: 1563598
ucacuauagcuggagcaga

SEQ ID NO: 1822562 - RNA, 19 nt, Artificial Sequence
  Description of Artificial Sequence: Synthetic oligonucleotide
  Antisense strand to SEQ ID NO: 1822561
ucugcuccagcuauaguga

SEQ ID NO: 1822563 - RNA, 19 nt, Artificial Sequence
  Description of Artificial Sequence: Synthetic oligonucleotide
  Sense strand starting at position 3342 of SEQ ID NO: 1563598
ggaggaaugugaucggaau

SEQ ID NO: 1822564 - RNA, 19 nt, Artificial Sequence
  Description of Artificial Sequence: Synthetic oligonucleotide
  Antisense strand to SEQ ID NO: 1822563
auuccgaucacauuccucc

SEQ ID NO: 1822565 - RNA, 19 nt, Artificial Sequence
  Description of Artificial Sequence: Synthetic oligonucleotide
  Sense strand starting at position 3343 of SEQ ID NO: 1563598
gaggaaugugaucggaauu

SEQ ID NO: 1822566 - RNA, 19 nt, Artificial Sequence
  Description of Artificial Sequence: Synthetic oligonucleotide
  Antisense strand to SEQ ID NO: 1822565
aauuccgaucacauuccuc

SEQ ID NO: 1822567 - RNA, 19 nt, Artificial Sequence
  Description of Artificial Sequence: Synthetic oligonucleotide
  Sense strand starting at position 3344 of SEQ ID NO: 1563598
aggaaugugaucggaauua

SEQ ID NO: 1822568 - RNA, 19 nt, Artificial Sequence
  Description of Artificial Sequence: Synthetic oligonucleotide
  Antisense strand to SEQ ID NO: 1822567
uaauuccgaucacauuccu

SEQ ID NO: 1822569 - RNA, 19 nt, Artificial Sequence
  Description of Artificial Sequence: Synthetic oligonucleotide
  Sense strand starting at position 3438 of SEQ ID NO: 1563598
guaagagguaauugcagua

SEQ ID NO: 1822570 - RNA, 19 nt, Artificial Sequence
  Description of Artificial Sequence: Synthetic oligonucleotide
  Antisense strand to SEQ ID NO: 1822569
uacugcaauuaccucuuac

SEQ ID NO: 1822571 - RNA, 19 nt, Artificial Sequence
  Description of Artificial Sequence: Synthetic oligonucleotide
  Sense strand starting at position 3467 of SEQ ID NO: 1563598
gagacagugcuuugagcau

SEQ ID NO: 1822572 - RNA, 19 nt, Artificial Sequence
  Description of Artificial Sequence: Synthetic oligonucleotide
  Antisense strand to SEQ ID NO: 1822571
augcucaaagcacugucuc

SEQ ID NO: 1822573 - RNA, 19 nt, Artificial Sequence
  Description of Artificial Sequence: Synthetic oligonucleotide
  Sense strand starting at position 294 of SEQ ID NO: 1563599
cagguagagccgggaugau

SEQ ID NO: 1822574 - RNA, 19 nt, Artificial Sequence
  Description of Artificial Sequence: Synthetic oligonucleotide
  Antisense strand to SEQ ID NO: 1822573
aucaucccggcucuaccug

SEQ ID NO: 1822575 - RNA, 19 nt, Artificial Sequence
  Description of Artificial Sequence: Synthetic oligonucleotide
  Sense strand starting at position 371 of SEQ ID NO: 1563599
ugcaacaauuaguuggaaa

SEQ ID NO: 1822576 - RNA, 19 nt, Artificial Sequence
  Description of Artificial Sequence: Synthetic oligonucleotide
  Antisense strand to SEQ ID NO: 1822575
uuuccaacuaauuguugca

SEQ ID NO: 1822577 - RNA, 19 nt, Artificial Sequence
  Description of Artificial Sequence: Synthetic oligonucleotide
  Sense strand starting at position 438 of SEQ ID NO: 1563599
ggagauacucaccgaugca

SEQ ID NO: 1822578 - RNA, 19 nt, Artificial Sequence
  Description of Artificial Sequence: Synthetic oligonucleotide
  Antisense strand to SEQ ID NO: 1822577
ugcaucggugaguaucucc

SEQ ID NO: 1822579 - RNA, 19 nt, Artificial Sequence
  Description of Artificial Sequence: Synthetic oligonucleotide
  Sense strand starting at position 461 of SEQ ID NO: 1563599
ugaugaugaauaugugugu

SEQ ID NO: 1822580 - RNA, 19 nt, Artificial Sequence
  Description of Artificial Sequence: Synthetic oligonucleotide
  Antisense strand to SEQ ID NO: 1822579
acacacauauucaucauca

SEQ ID NO: 1822581 - RNA, 19 nt, Artificial Sequence
  Description of Artificial Sequence: Synthetic oligonucleotide
  Sense strand starting at position 462 of SEQ ID NO: 1563599
gaugaugaauaugugugua

SEQ ID NO: 1822582 - RNA, 19 nt, Artificial Sequence
  Description of Artificial Sequence: Synthetic oligonucleotide
  Antisense strand to SEQ ID NO: 1822581
uacacacauauucaucauc

SEQ ID NO: 1822583 - RNA, 19 nt, Artificial Sequence
  Description of Artificial Sequence: Synthetic oligonucleotide
  Sense strand starting at position 464 of SEQ ID NO: 1563599
ugaugaauauguguguauc

SEQ ID NO: 1822584 - RNA, 19 nt, Artificial Sequence
  Description of Artificial Sequence: Synthetic oligonucleotide
  Antisense strand to SEQ ID NO: 1822583
gauacacacauauucauca

SEQ ID NO: 1822585 - RNA, 19 nt, Artificial Sequence
  Description of Artificial Sequence: Synthetic oligonucleotide
  Sense strand starting at position 467 of SEQ ID NO: 1563599
ugaauauguguguauccga

SEQ ID NO: 1822586 - RNA, 19 nt, Artificial Sequence
  Description of Artificial Sequence: Synthetic oligonucleotide
  Antisense strand to SEQ ID NO: 1822585
ucggauacacacauauuca

SEQ ID NO: 1822587 - RNA, 19 nt, Artificial Sequence
  Description of Artificial Sequence: Synthetic oligonucleotide
  Sense strand starting at position 475 of SEQ ID NO: 1563599
uguguauccgacugaugga

SEQ ID NO: 1822588 - RNA, 19 nt, Artificial Sequence
  Description of Artificial Sequence: Synthetic oligonucleotide
  Antisense strand to SEQ ID NO: 1822587
uccaucagucggauacaca

SEQ ID NO: 1822589 - RNA, 19 nt, Artificial Sequence
  Description of Artificial Sequence: Synthetic oligonucleotide
  Sense strand starting at position 476 of SEQ ID NO: 1563599
guguauccgacugauggaa

SEQ ID NO: 1822590 - RNA, 19 nt, Artificial Sequence
  Description of Artificial Sequence: Synthetic oligonucleotide
  Antisense strand to SEQ ID NO: 1822589
uuccaucagucggauacac

SEQ ID NO: 1822591 - RNA, 19 nt, Artificial Sequence
  Description of Artificial Sequence: Synthetic oligonucleotide
  Sense strand starting at position 572 of SEQ ID NO: 1563599
cgcugucugguggaagaaa

SEQ ID NO: 1822592 - RNA, 19 nt, Artificial Sequence
  Description of Artificial Sequence: Synthetic oligonucleotide
  Antisense strand to SEQ ID NO: 1822591
uuucuuccaccagacagcg

SEQ ID NO: 1822593 - RNA, 19 nt, Artificial Sequence
  Description of Artificial Sequence: Synthetic oligonucleotide
  Sense strand starting at position 583 of SEQ ID NO: 1563599
ggaagaaaggcucguuaac

SEQ ID NO: 1822594 - RNA, 19 nt, Artificial Sequence
  Description of Artificial Sequence: Synthetic oligonucleotide
  Antisense strand to SEQ ID NO: 1822593
guuaacgagccuuucuucc

SEQ ID NO: 1822595 - RNA, 19 nt, Artificial Sequence
  Description of Artificial Sequence: Synthetic oligonucleotide
  Sense strand starting at position 585 of SEQ ID NO: 1563599
aagaaaggcucguuaacaa

SEQ ID NO: 1822596 - RNA, 19 nt, Artificial Sequence
  Description of Artificial Sequence: Synthetic oligonucleotide
  Antisense strand to SEQ ID NO: 1822595
uuguuaacgagccuuucuu

SEQ ID NO: 1822597 - RNA, 19 nt, Artificial Sequence
  Description of Artificial Sequence: Synthetic oligonucleotide
  Sense strand starting at position 592 of SEQ ID NO: 1563599
gcucguuaacaaggcagaa

SEQ ID NO: 1822598 - RNA, 19 nt, Artificial Sequence
  Description of Artificial Sequence: Synthetic oligonucleotide
  Antisense strand to SEQ ID NO: 1822597
uucugccuuguuaacgagc

SEQ ID NO: 1822599 - RNA, 19 nt, Artificial Sequence
  Description of Artificial Sequence: Synthetic oligonucleotide
  Sense strand starting at position 724 of SEQ ID NO: 1563599
agugguugauggguuagaa

SEQ ID NO: 1822600 - RNA, 19 nt, Artificial Sequence
  Description of Artificial Sequence: Synthetic oligonucleotide
  Antisense strand to SEQ ID NO: 1822599
uucuaacccaucaaccacu

SEQ ID NO: 1822601 - RNA, 19 nt, Artificial Sequence
  Description of Artificial Sequence: Synthetic oligonucleotide
  Sense strand starting at position 810 of SEQ ID NO: 1563599
uacucaaagcauuggugua

SEQ ID NO: 1822602 - RNA, 19 nt, Artificial Sequence
  Description of Artificial Sequence: Synthetic oligonucleotide
  Antisense strand to SEQ ID NO: 1822601
uacaccaaugcuuugagua

SEQ ID NO: 1822603 - RNA, 19 nt, Artificial Sequence
  Description of Artificial Sequence: Synthetic oligonucleotide
  Sense strand starting at position 812 of SEQ ID NO: 1563599
cucaaagcauugguguauu

SEQ ID NO: 1822604 - RNA, 19 nt, Artificial Sequence
  Description of Artificial Sequence: Synthetic oligonucleotide
  Antisense strand to SEQ ID NO: 1822603
aauacaccaaugcuuugag

SEQ ID NO: 1822605 - RNA, 19 nt, Artificial Sequence
  Description of Artificial Sequence: Synthetic oligonucleotide
  Sense strand starting at position 824 of SEQ ID NO: 1563599
guguauuccgacuacagca

SEQ ID NO: 1822606 - RNA, 19 nt, Artificial Sequence
  Description of Artificial Sequence: Synthetic oligonucleotide
  Antisense strand to SEQ ID NO: 1822605
ugcuguagucggaauacac

SEQ ID NO: 1822607 - RNA, 19 nt, Artificial Sequence
  Description of Artificial Sequence: Synthetic oligonucleotide
  Sense strand starting at position 928 of SEQ ID NO: 1563599
ccacaaugaccuggagcau

SEQ ID NO: 1822608 - RNA, 19 nt, Artificial Sequence
  Description of Artificial Sequence: Synthetic oligonucleotide
  Antisense strand to SEQ ID NO: 1822607
augcuccaggucauugugg

SEQ ID NO: 1822609 - RNA, 19 nt, Artificial Sequence
  Description of Artificial Sequence: Synthetic oligonucleotide
  Sense strand starting at position 1066 of SEQ ID NO: 1563599
guauaaagggauugguuaa

SEQ ID NO: 1822610 - RNA, 19 nt, Artificial Sequence
  Description of Artificial Sequence: Synthetic oligonucleotide
  Antisense strand to SEQ ID NO: 1822609
uuaaccaaucccuuuauac

SEQ ID NO: 1822611 - RNA, 19 nt, Artificial Sequence
  Description of Artificial Sequence: Synthetic oligonucleotide
  Sense strand starting at position 1093 of SEQ ID NO: 1563599
cgauucugcucgguucuca

SEQ ID NO: 1822612 - RNA, 19 nt, Artificial Sequence
  Description of Artificial Sequence: Synthetic oligonucleotide
  Antisense strand to SEQ ID NO: 1822611
ugagaaccgagcagaaucg

SEQ ID NO: 1822613 - RNA, 19 nt, Artificial Sequence
  Description of Artificial Sequence: Synthetic oligonucleotide
  Sense strand starting at position 1116 of SEQ ID NO: 1563599
caacaaacagcguguauuu

SEQ ID NO: 1822614 - RNA, 19 nt, Artificial Sequence
  Description of Artificial Sequence: Synthetic oligonucleotide
  Antisense strand to SEQ ID NO: 1822613
aaauacacgcuguuuguug

SEQ ID NO: 1822615 - RNA, 19 nt, Artificial Sequence
  Description of Artificial Sequence: Synthetic oligonucleotide
  Sense strand starting at position 1745 of SEQ ID NO: 1563599
ugggcagucucuucuugau

SEQ ID NO: 1822616 - RNA, 19 nt, Artificial Sequence
  Description of Artificial Sequence: Synthetic oligonucleotide
  Antisense strand to SEQ ID NO: 1822615
aucaagaagagacugccca

SEQ ID NO: 1822617 - RNA, 19 nt, Artificial Sequence
  Description of Artificial Sequence: Synthetic oligonucleotide
  Sense strand starting at position 1747 of SEQ ID NO: 1563599
ggcagucucuucuugauuc

SEQ ID NO: 1822618 - RNA, 19 nt, Artificial Sequence
  Description of Artificial Sequence: Synthetic oligonucleotide
  Antisense strand to SEQ ID NO: 1822617
gaaucaagaagagacugcc

SEQ ID NO: 1822619 - RNA, 19 nt, Artificial Sequence
  Description of Artificial Sequence: Synthetic oligonucleotide
  Sense strand starting at position 2489 of SEQ ID NO: 1563599
uaguuuggcagcuagguau

SEQ ID NO: 1822620 - RNA, 19 nt, Artificial Sequence
  Description of Artificial Sequence: Synthetic oligonucleotide
  Antisense strand to SEQ ID NO: 1822619
auaccuagcugccaaacua

SEQ ID NO: 1822621 - RNA, 19 nt, Artificial Sequence
  Description of Artificial Sequence: Synthetic oligonucleotide
  Sense strand starting at position 2496 of SEQ ID NO: 1563599
gcagcuagguaucugauuu

SEQ ID NO: 1822622 - RNA, 19 nt, Artificial Sequence
  Description of Artificial Sequence: Synthetic oligonucleotide
  Antisense strand to SEQ ID NO: 1822621
aaaucagauaccuagcugc

SEQ ID NO: 1822623 - RNA, 19 nt, Artificial Sequence
  Description of Artificial Sequence: Synthetic oligonucleotide
  Sense strand starting at position 2558 of SEQ ID NO: 1563599
gucauacuguuucugugau

SEQ ID NO: 1822624 - RNA, 19 nt, Artificial Sequence
  Description of Artificial Sequence: Synthetic oligonucleotide
  Antisense strand to SEQ ID NO: 1822623
aucacagaaacaguaugac

SEQ ID NO: 1822625 - RNA, 19 nt, Artificial Sequence
  Description of Artificial Sequence: Synthetic oligonucleotide
  Sense strand starting at position 2564 of SEQ ID NO: 1563599
cuguuucugugaucugaga

SEQ ID NO: 1822626 - RNA, 19 nt, Artificial Sequence
  Description of Artificial Sequence: Synthetic oligonucleotide
  Antisense strand to SEQ ID NO: 1822625
ucucagaucacagaaacag

SEQ ID NO: 1822627 - RNA, 19 nt, Artificial Sequence
  Description of Artificial Sequence: Synthetic oligonucleotide
  Sense strand starting at position 2566 of SEQ ID NO: 1563599
guuucugugaucugagaau

SEQ ID NO: 1822628 - RNA, 19 nt, Artificial Sequence
  Description of Artificial Sequence: Synthetic oligonucleotide
  Antisense strand to SEQ ID NO: 1822627
auucucagaucacagaaac

SEQ ID NO: 1822629 - RNA, 19 nt, Artificial Sequence
  Description of Artificial Sequence: Synthetic oligonucleotide
  Sense strand starting at position 2625 of SEQ ID NO: 1563599
ucacuauagcuggagcaga

SEQ ID NO: 1822630 - RNA, 19 nt, Artificial Sequence
  Description of Artificial Sequence: Synthetic oligonucleotide
  Antisense strand to SEQ ID NO: 1822629
ucugcuccagcuauaguga

SEQ ID NO: 1822631 - RNA, 19 nt, Artificial Sequence
  Description of Artificial Sequence: Synthetic oligonucleotide
  Sense strand starting at position 2774 of SEQ ID NO: 1563599
ggaggaaugugaucggaau

SEQ ID NO: 1822632 - RNA, 19 nt, Artificial Sequence
  Description of Artificial Sequence: Synthetic oligonucleotide
  Antisense strand to SEQ ID NO: 1822631
auuccgaucacauuccucc

SEQ ID NO: 1822633 - RNA, 19 nt, Artificial Sequence
  Description of Artificial Sequence: Synthetic oligonucleotide
  Sense strand starting at position 2775 of SEQ ID NO: 1563599
gaggaaugugaucggaauu

SEQ ID NO: 1822634 - RNA, 19 nt, Artificial Sequence
  Description of Artificial Sequence: Synthetic oligonucleotide
  Antisense strand to SEQ ID NO: 1822633
aauuccgaucacauuccuc

SEQ ID NO: 1822635 - RNA, 19 nt, Artificial Sequence
  Description of Artificial Sequence: Synthetic oligonucleotide
  Sense strand starting at position 2776 of SEQ ID NO: 1563599
aggaaugugaucggaauua

SEQ ID NO: 1822636 - RNA, 19 nt, Artificial Sequence
  Description of Artificial Sequence: Synthetic oligonucleotide
  Antisense strand to SEQ ID NO: 1822635
uaauuccgaucacauuccu

SEQ ID NO: 1822637 - RNA, 19 nt, Artificial Sequence
  Description of Artificial Sequence: Synthetic oligonucleotide
  Sense strand starting at position 2788 of SEQ ID NO: 1563599
ggaauuacgucuuacacug

SEQ ID NO: 1822638 - RNA, 19 nt, Artificial Sequence
  Description of Artificial Sequence: Synthetic oligonucleotide
  Antisense strand to SEQ ID NO: 1822637
caguguaagacguaauucc

SEQ ID NO: 1822639 - RNA, 19 nt, Artificial Sequence
  Description of Artificial Sequence: Synthetic oligonucleotide
  Sense strand starting at position 2794 of SEQ ID NO: 1563599
acgucuuacacugaucguu

SEQ ID NO: 1822640 - RNA, 19 nt, Artificial Sequence
  Description of Artificial Sequence: Synthetic oligonucleotide
  Antisense strand to SEQ ID NO: 1822639
aacgaucaguguaagacgu

SEQ ID NO: 1822641 - RNA, 19 nt, Artificial Sequence
  Description of Artificial Sequence: Synthetic oligonucleotide
  Sense strand starting at position 2857 of SEQ ID NO: 1563599
gaaggguggcgugguaaga

SEQ ID NO: 1822642 - RNA, 19 nt, Artificial Sequence
  Description of Artificial Sequence: Synthetic oligonucleotide
  Antisense strand to SEQ ID NO: 1822641
ucuuaccacgccacccuuc

SEQ ID NO: 1822643 - RNA, 19 nt, Artificial Sequence
  Description of Artificial Sequence: Synthetic oligonucleotide
  Sense strand starting at position 2870 of SEQ ID NO: 1563599
guaagagguaauugcagua

SEQ ID NO: 1822644 - RNA, 19 nt, Artificial Sequence
  Description of Artificial Sequence: Synthetic oligonucleotide
  Antisense strand to SEQ ID NO: 1822643
uacugcaauuaccucuuac

SEQ ID NO: 1822645 - RNA, 19 nt, Artificial Sequence
  Description of Artificial Sequence: Synthetic oligonucleotide
  Sense strand starting at position 2899 of SEQ ID NO: 1563599
gagacagugcuuugagcau

SEQ ID NO: 1822646 - RNA, 19 nt, Artificial Sequence
  Description of Artificial Sequence: Synthetic oligonucleotide
  Antisense strand to SEQ ID NO: 1822645
augcucaaagcacugucuc

SEQ ID NO: 1822647 - RNA, 19 nt, Artificial Sequence
  Description of Artificial Sequence: Synthetic oligonucleotide
  Sense strand starting at position 3270 of SEQ ID NO: 1563599
gcgcucggccaguauagua

SEQ ID NO: 1822648 - RNA, 19 nt, Artificial Sequence
  Description of Artificial Sequence: Synthetic oligonucleotide
  Antisense strand to SEQ ID NO: 1822647
uacuauacuggccgagcgc

SEQ ID NO: 1822649 - RNA, 19 nt, Artificial Sequence
  Description of Artificial Sequence: Synthetic oligonucleotide
  Sense strand starting at position 3347 of SEQ ID NO: 1563599
uuguuuauaucccucgcaa

SEQ ID NO: 1822650 - RNA, 19 nt, Artificial Sequence
  Description of Artificial Sequence: Synthetic oligonucleotide
  Antisense strand to SEQ ID NO: 1822649
uugcgagggauauaaacaa

SEQ ID NO: 1822651 - RNA, 19 nt, Artificial Sequence
  Description of Artificial Sequence: Synthetic oligonucleotide
  Sense strand starting at position 3349 of SEQ ID NO: 1563599
guuuauaucccucgcaauc

SEQ ID NO: 1822652 - RNA, 19 nt, Artificial Sequence
  Description of Artificial Sequence: Synthetic oligonucleotide
  Antisense strand to SEQ ID NO: 1822651
gauugcgagggauauaaac

SEQ ID NO: 1822653 - RNA, 19 nt, Artificial Sequence
  Description of Artificial Sequence: Synthetic oligonucleotide
  Sense strand starting at position 116 of SEQ ID NO: 1563600
gugugauaauaggcacaca

SEQ ID NO: 1822654 - RNA, 19 nt, Artificial Sequence
  Description of Artificial Sequence: Synthetic oligonucleotide
  Antisense strand to SEQ ID NO: 1822653
ugugugccuauuaucacac

SEQ ID NO: 1822655 - RNA, 19 nt, Artificial Sequence
  Description of Artificial Sequence: Synthetic oligonucleotide
  Sense strand starting at position 248 of SEQ ID NO: 1563600
ggcaucuuucuguaucauc

SEQ ID NO: 1822656 - RNA, 19 nt, Artificial Sequence
  Description of Artificial Sequence: Synthetic oligonucleotide
  Antisense strand to SEQ ID NO: 1822655
gaugauacagaaagaugcc

SEQ ID NO: 1822657 - RNA, 19 nt, Artificial Sequence
  Description of Artificial Sequence: Synthetic oligonucleotide
  Sense strand starting at position 347 of SEQ ID NO: 1563600
aagcacuacugugugacaa

SEQ ID NO: 1822658 - RNA, 19 nt, Artificial Sequence
  Description of Artificial Sequence: Synthetic oligonucleotide
  Antisense strand to SEQ ID NO: 1822657
uugucacacaguagugcuu

SEQ ID NO: 1822659 - RNA, 19 nt, Artificial Sequence
  Description of Artificial Sequence: Synthetic oligonucleotide
  Sense strand starting at position 348 of SEQ ID NO: 1563600
agcacuacugugugacaaa

SEQ ID NO: 1822660 - RNA, 19 nt, Artificial Sequence
  Description of Artificial Sequence: Synthetic oligonucleotide
  Antisense strand to SEQ ID NO: 1822659
uuugucacacaguagugcu

SEQ ID NO: 1822661 - RNA, 19 nt, Artificial Sequence
  Description of Artificial Sequence: Synthetic oligonucleotide
  Sense strand starting at position 602 of SEQ ID NO: 1563600
aguucuguucugcagaaca

SEQ ID NO: 1822662 - RNA, 19 nt, Artificial Sequence
  Description of Artificial Sequence: Synthetic oligonucleotide
  Antisense strand to SEQ ID NO: 1822661
uguucugcagaacagaacu

SEQ ID NO: 1822663 - RNA, 19 nt, Artificial Sequence
  Description of Artificial Sequence: Synthetic oligonucleotide
  Sense strand starting at position 604 of SEQ ID NO: 1563600
uucuguucugcagaacaaa

SEQ ID NO: 1822664 - RNA, 19 nt, Artificial Sequence
  Description of Artificial Sequence: Synthetic oligonucleotide
  Antisense strand to SEQ ID NO: 1822663
uuuguucugcagaacagaa

SEQ ID NO: 1822665 - RNA, 19 nt, Artificial Sequence
  Description of Artificial Sequence: Synthetic oligonucleotide
  Sense strand starting at position 805 of SEQ ID NO: 1563600
ugccucaucuaugugggaa

SEQ ID NO: 1822666 - RNA, 19 nt, Artificial Sequence
  Description of Artificial Sequence: Synthetic oligonucleotide
  Antisense strand to SEQ ID NO: 1822665
uucccacauagaugaggca

SEQ ID NO: 1822667 - RNA, 19 nt, Artificial Sequence
  Description of Artificial Sequence: Synthetic oligonucleotide
  Sense strand starting at position 806 of SEQ ID NO: 1563600
gccucaucuaugugggaac

SEQ ID NO: 1822668 - RNA, 19 nt, Artificial Sequence
  Description of Artificial Sequence: Synthetic oligonucleotide
  Antisense strand to SEQ ID NO: 1822667
guucccacauagaugaggc

SEQ ID NO: 1822669 - RNA, 19 nt, Artificial Sequence
  Description of Artificial Sequence: Synthetic oligonucleotide
  Sense strand starting at position 808 of SEQ ID NO: 1563600
cucaucuaugugggaacaa

SEQ ID NO: 1822670 - RNA, 19 nt, Artificial Sequence
  Description of Artificial Sequence: Synthetic oligonucleotide
  Antisense strand to SEQ ID NO: 1822669
uuguucccacauagaugag

SEQ ID NO: 1822671 - RNA, 19 nt, Artificial Sequence
  Description of Artificial Sequence: Synthetic oligonucleotide
  Sense strand starting at position 859 of SEQ ID NO: 1563600
gcaguuugagagcacugua

SEQ ID NO: 1822672 - RNA, 19 nt, Artificial Sequence
  Description of Artificial Sequence: Synthetic oligonucleotide
  Antisense strand to SEQ ID NO: 1822671
uacagugcucucaaacugc

SEQ ID NO: 1822673 - RNA, 19 nt, Artificial Sequence
  Description of Artificial Sequence: Synthetic oligonucleotide
  Sense strand starting at position 920 of SEQ ID NO: 1563600
uuuggaugagcgcagacau

SEQ ID NO: 1822674 - RNA, 19 nt, Artificial Sequence
  Description of Artificial Sequence: Synthetic oligonucleotide
  Antisense strand to SEQ ID NO: 1822673
augucugcgcucauccaaa

SEQ ID NO: 1822675 - RNA, 19 nt, Artificial Sequence
  Description of Artificial Sequence: Synthetic oligonucleotide
  Sense strand starting at position 933 of SEQ ID NO: 1563600
agacaugcgcgaguuuguu

SEQ ID NO: 1822676 - RNA, 19 nt, Artificial Sequence
  Description of Artificial Sequence: Synthetic oligonucleotide
  Antisense strand to SEQ ID NO: 1822675
aacaaacucgcgcaugucu

SEQ ID NO: 1822677 - RNA, 19 nt, Artificial Sequence
  Description of Artificial Sequence: Synthetic oligonucleotide
  Sense strand starting at position 1120 of SEQ ID NO: 1563600
ucaggucuuuaagcagaau

SEQ ID NO: 1822678 - RNA, 19 nt, Artificial Sequence
  Description of Artificial Sequence: Synthetic oligonucleotide
  Antisense strand to SEQ ID NO: 1822677
auucugcuuaaagaccuga

SEQ ID NO: 1822679 - RNA, 19 nt, Artificial Sequence
  Description of Artificial Sequence: Synthetic oligonucleotide
  Sense strand starting at position 1123 of SEQ ID NO: 1563600
ggucuuuaagcagaauguu

SEQ ID NO: 1822680 - RNA, 19 nt, Artificial Sequence
  Description of Artificial Sequence: Synthetic oligonucleotide
  Antisense strand to SEQ ID NO: 1822679
aacauucugcuuaaagacc

SEQ ID NO: 1822681 - RNA, 19 nt, Artificial Sequence
  Description of Artificial Sequence: Synthetic oligonucleotide
  Sense strand starting at position 1170 of SEQ ID NO: 1563600
ggagauaaugaacguuuga

SEQ ID NO: 1822682 - RNA, 19 nt, Artificial Sequence
  Description of Artificial Sequence: Synthetic oligonucleotide
  Antisense strand to SEQ ID NO: 1822681
ucaaacguucauuaucucc

SEQ ID NO: 1822683 - RNA, 19 nt, Artificial Sequence
  Description of Artificial Sequence: Synthetic oligonucleotide
  Sense strand starting at position 1274 of SEQ ID NO: 1563600
gucaguuguccagcuggca

SEQ ID NO: 1822684 - RNA, 19 nt, Artificial Sequence
  Description of Artificial Sequence: Synthetic oligonucleotide
  Antisense strand to SEQ ID NO: 1822683
ugccagcuggacaacugac

SEQ ID NO: 1822685 - RNA, 19 nt, Artificial Sequence
  Description of Artificial Sequence: Synthetic oligonucleotide
  Sense strand starting at position 1304 of SEQ ID NO: 1563600
cggugucagcauuaagaag

SEQ ID NO: 1822686 - RNA, 19 nt, Artificial Sequence
  Description of Artificial Sequence: Synthetic oligonucleotide
  Antisense strand to SEQ ID NO: 1822685
cuucuuaaugcugacaccg

SEQ ID NO: 1822687 - RNA, 19 nt, Artificial Sequence
  Description of Artificial Sequence: Synthetic oligonucleotide
  Sense strand starting at position 1339 of SEQ ID NO: 1563600
cacgaugagaaacgaguua

SEQ ID NO: 1822688 - RNA, 19 nt, Artificial Sequence
  Description of Artificial Sequence: Synthetic oligonucleotide
  Antisense strand to SEQ ID NO: 1822687
uaacucguuucucaucgug

SEQ ID NO: 1822689 - RNA, 19 nt, Artificial Sequence
  Description of Artificial Sequence: Synthetic oligonucleotide
  Sense strand starting at position 1385 of SEQ ID NO: 1563600
uccgaugacagcuacaaga

SEQ ID NO: 1822690 - RNA, 19 nt, Artificial Sequence
  Description of Artificial Sequence: Synthetic oligonucleotide
  Antisense strand to SEQ ID NO: 1822689
ucuuguagcugucaucgga

SEQ ID NO: 1822691 - RNA, 19 nt, Artificial Sequence
  Description of Artificial Sequence: Synthetic oligonucleotide
  Sense strand starting at position 2423 of SEQ ID NO: 1563600
ugcauaguucacggagaaa

SEQ ID NO: 1822692 - RNA, 19 nt, Artificial Sequence
  Description of Artificial Sequence: Synthetic oligonucleotide
  Antisense strand to SEQ ID NO: 1822691
uuucuccgugaacuaugca

SEQ ID NO: 1822693 - RNA, 19 nt, Artificial Sequence
  Description of Artificial Sequence: Synthetic oligonucleotide
  Sense strand starting at position 2552 of SEQ ID NO: 1563600
ggcuaaacggucuaaaugu

SEQ ID NO: 1822694 - RNA, 19 nt, Artificial Sequence
  Description of Artificial Sequence: Synthetic oligonucleotide
  Antisense strand to SEQ ID NO: 1822693
acauuuagaccguuuagcc

SEQ ID NO: 1822695 - RNA, 19 nt, Artificial Sequence
  Description of Artificial Sequence: Synthetic oligonucleotide
  Sense strand starting at position 2618 of SEQ ID NO: 1563600
aucucuuugacucgaaggu

SEQ ID NO: 1822696 - RNA, 19 nt, Artificial Sequence
  Description of Artificial Sequence: Synthetic oligonucleotide
  Antisense strand to SEQ ID NO: 1822695
accuucgagucaaagagau

SEQ ID NO: 1822697 - RNA, 19 nt, Artificial Sequence
  Description of Artificial Sequence: Synthetic oligonucleotide
  Sense strand starting at position 2619 of SEQ ID NO: 1563600
ucucuuugacucgaagguu

SEQ ID NO: 1822698 - RNA, 19 nt, Artificial Sequence
  Description of Artificial Sequence: Synthetic oligonucleotide
  Antisense strand to SEQ ID NO: 1822697
aaccuucgagucaaagaga

SEQ ID NO: 1822699 - RNA, 19 nt, Artificial Sequence
  Description of Artificial Sequence: Synthetic oligonucleotide
  Sense strand starting at position 2969 of SEQ ID NO: 1563600
guggguaucaucuauguga

SEQ ID NO: 1822700 - RNA, 19 nt, Artificial Sequence
  Description of Artificial Sequence: Synthetic oligonucleotide
  Antisense strand to SEQ ID NO: 1822699
ucacauagaugauacccac

SEQ ID NO: 1822701 - RNA, 19 nt, Artificial Sequence
  Description of Artificial Sequence: Synthetic oligonucleotide
  Sense strand starting at position 2985 of SEQ ID NO: 1563600
ugacguuugcuagcaucuu

SEQ ID NO: 1822702 - RNA, 19 nt, Artificial Sequence
  Description of Artificial Sequence: Synthetic oligonucleotide
  Antisense strand to SEQ ID NO: 1822701
aagaugcuagcaaacguca

SEQ ID NO: 1822703 - RNA, 19 nt, Artificial Sequence
  Description of Artificial Sequence: Synthetic oligonucleotide
  Sense strand starting at position 3053 of SEQ ID NO: 1563600
augagcuaacaugguaaca

SEQ ID NO: 1822704 - RNA, 19 nt, Artificial Sequence
  Description of Artificial Sequence: Synthetic oligonucleotide
  Antisense strand to SEQ ID NO: 1822703
uguuaccauguuagcucau

SEQ ID NO: 1822705 - RNA, 19 nt, Artificial Sequence
  Description of Artificial Sequence: Synthetic oligonucleotide
  Sense strand starting at position 3116 of SEQ ID NO: 1563600
ucuugugugagauaauguc

SEQ ID NO: 1822706 - RNA, 19 nt, Artificial Sequence
  Description of Artificial Sequence: Synthetic oligonucleotide
  Antisense strand to SEQ ID NO: 1822705
gacauuaucucacacaaga

SEQ ID NO: 1822707 - RNA, 19 nt, Artificial Sequence
  Description of Artificial Sequence: Synthetic oligonucleotide
  Sense strand starting at position 3124 of SEQ ID NO: 1563600
gagauaaugucagugugaa

SEQ ID NO: 1822708 - RNA, 19 nt, Artificial Sequence
  Description of Artificial Sequence: Synthetic oligonucleotide
  Antisense strand to SEQ ID NO: 1822707
uucacacugacauuaucuc

SEQ ID NO: 1822709 - RNA, 19 nt, Artificial Sequence
  Description of Artificial Sequence: Synthetic oligonucleotide
  Sense strand starting at position 3125 of SEQ ID NO: 1563600
agauaaugucagugugaau

SEQ ID NO: 1822710 - RNA, 19 nt, Artificial Sequence
  Description of Artificial Sequence: Synthetic oligonucleotide
  Antisense strand to SEQ ID NO: 1822709
auucacacugacauuaucu

SEQ ID NO: 1822711 - RNA, 19 nt, Artificial Sequence
  Description of Artificial Sequence: Synthetic oligonucleotide
  Sense strand starting at position 3137 of SEQ ID NO: 1563600
ugugaauaauggguucagu

SEQ ID NO: 1822712 - RNA, 19 nt, Artificial Sequence
  Description of Artificial Sequence: Synthetic oligonucleotide
  Antisense strand to SEQ ID NO: 1822711
acugaacccauuauucaca

SEQ ID NO: 1822713 - RNA, 19 nt, Artificial Sequence
  Description of Artificial Sequence: Synthetic oligonucleotide
  Sense strand starting at position 3508 of SEQ ID NO: 1563600
ugaaaccuugaccgauaga

SEQ ID NO: 1822714 - RNA, 19 nt, Artificial Sequence
  Description of Artificial Sequence: Synthetic oligonucleotide
  Antisense strand to SEQ ID NO: 1822713
ucuaucggucaagguuuca

SEQ ID NO: 1822715 - RNA, 19 nt, Artificial Sequence
  Description of Artificial Sequence: Synthetic oligonucleotide
  Sense strand starting at position 3537 of SEQ ID NO: 1563600
aggaacucccuacgacauu

SEQ ID NO: 1822716 - RNA, 19 nt, Artificial Sequence
  Description of Artificial Sequence: Synthetic oligonucleotide
  Antisense strand to SEQ ID NO: 1822715
aaugucguagggaguuccu

SEQ ID NO: 1822717 - RNA, 19 nt, Artificial Sequence
  Description of Artificial Sequence: Synthetic oligonucleotide
  Sense strand starting at position 3547 of SEQ ID NO: 1563600
uacgacauucuggguguaa

SEQ ID NO: 1822718 - RNA, 19 nt, Artificial Sequence
  Description of Artificial Sequence: Synthetic oligonucleotide
  Antisense strand to SEQ ID NO: 1822717
uuacacccagaaugucgua

SEQ ID NO: 1822719 - RNA, 19 nt, Artificial Sequence
  Description of Artificial Sequence: Synthetic oligonucleotide
  Sense strand starting at position 3548 of SEQ ID NO: 1563600
acgacauucuggguguaag

SEQ ID NO: 1822720 - RNA, 19 nt, Artificial Sequence
  Description of Artificial Sequence: Synthetic oligonucleotide
  Antisense strand to SEQ ID NO: 1822719
cuuacacccagaaugucgu

SEQ ID NO: 1822721 - RNA, 19 nt, Artificial Sequence
  Description of Artificial Sequence: Synthetic oligonucleotide
  Sense strand starting at position 3559 of SEQ ID NO: 1563600
gguguaaguccagggaaug

SEQ ID NO: 1822722 - RNA, 19 nt, Artificial Sequence
  Description of Artificial Sequence: Synthetic oligonucleotide
  Antisense strand to SEQ ID NO: 1822721
cauucccuggacuuacacc

SEQ ID NO: 1822723 - RNA, 19 nt, Artificial Sequence
  Description of Artificial Sequence: Synthetic oligonucleotide
  Sense strand starting at position 3570 of SEQ ID NO: 1563600
agggaauggugaucaugca

SEQ ID NO: 1822724 - RNA, 19 nt, Artificial Sequence
  Description of Artificial Sequence: Synthetic oligonucleotide
  Antisense strand to SEQ ID NO: 1822723
ugcaugaucaccauucccu

SEQ ID NO: 1822725 - RNA, 19 nt, Artificial Sequence
  Description of Artificial Sequence: Synthetic oligonucleotide
  Sense strand starting at position 3789 of SEQ ID NO: 1563600
cuggaagcuguuggucaaa

SEQ ID NO: 1822726 - RNA, 19 nt, Artificial Sequence
  Description of Artificial Sequence: Synthetic oligonucleotide
  Antisense strand to SEQ ID NO: 1822725
uuugaccaacagcuuccag

SEQ ID NO: 1822727 - RNA, 19 nt, Artificial Sequence
  Description of Artificial Sequence: Synthetic oligonucleotide
  Sense strand starting at position 3929 of SEQ ID NO: 1563600
ccuguaccuguugaaucua

SEQ ID NO: 1822728 - RNA, 19 nt, Artificial Sequence
  Description of Artificial Sequence: Synthetic oligonucleotide
  Antisense strand to SEQ ID NO: 1822727
uagauucaacagguacagg

SEQ ID NO: 1822729 - RNA, 19 nt, Artificial Sequence
  Description of Artificial Sequence: Synthetic oligonucleotide
  Sense strand starting at position 3939 of SEQ ID NO: 1563600
uugaaucuacauggucaua

SEQ ID NO: 1822730 - RNA, 19 nt, Artificial Sequence
  Description of Artificial Sequence: Synthetic oligonucleotide
  Antisense strand to SEQ ID NO: 1822729
uaugaccauguagauucaa

SEQ ID NO: 1822731 - RNA, 19 nt, Artificial Sequence
  Description of Artificial Sequence: Synthetic oligonucleotide
  Sense strand starting at position 3941 of SEQ ID NO: 1563600
gaaucuacauggucauaag

SEQ ID NO: 1822732 - RNA, 19 nt, Artificial Sequence
  Description of Artificial Sequence: Synthetic oligonucleotide
  Antisense strand to SEQ ID NO: 1822731
cuuaugaccauguagauuc

SEQ ID NO: 1822733 - RNA, 19 nt, Artificial Sequence
  Description of Artificial Sequence: Synthetic oligonucleotide
  Sense strand starting at position 133 of SEQ ID NO: 1563601
gagcauguuggguggauga

SEQ ID NO: 1822734 - RNA, 19 nt, Artificial Sequence
  Description of Artificial Sequence: Synthetic oligonucleotide
  Antisense strand to SEQ ID NO: 1822733
ucauccacccaacaugcuc

SEQ ID NO: 1822735 - RNA, 19 nt, Artificial Sequence
  Description of Artificial Sequence: Synthetic oligonucleotide
  Sense strand starting at position 259 of SEQ ID NO: 1563601
gcuguuacucuacacgaaa

SEQ ID NO: 1822736 - RNA, 19 nt, Artificial Sequence
  Description of Artificial Sequence: Synthetic oligonucleotide
  Antisense strand to SEQ ID NO: 1822735
uuucguguagaguaacagc

SEQ ID NO: 1822737 - RNA, 19 nt, Artificial Sequence
  Description of Artificial Sequence: Synthetic oligonucleotide
  Sense strand starting at position 455 of SEQ ID NO: 1563601
cucuguaaucuuggauaag

SEQ ID NO: 1822738 - RNA, 19 nt, Artificial Sequence
  Description of Artificial Sequence: Synthetic oligonucleotide
  Antisense strand to SEQ ID NO: 1822737
cuuauccaagauuacagag

SEQ ID NO: 1822739 - RNA, 19 nt, Artificial Sequence
  Description of Artificial Sequence: Synthetic oligonucleotide
  Sense strand starting at position 636 of SEQ ID NO: 1563601
uaguauuagggaugucaga

SEQ ID NO: 1822740 - RNA, 19 nt, Artificial Sequence
  Description of Artificial Sequence: Synthetic oligonucleotide
  Antisense strand to SEQ ID NO: 1822739
ucugacaucccuaauacua

SEQ ID NO: 1822741 - RNA, 19 nt, Artificial Sequence
  Description of Artificial Sequence: Synthetic oligonucleotide
  Sense strand starting at position 676 of SEQ ID NO: 1563601
gcgucacucacuuagaaag

SEQ ID NO: 1822742 - RNA, 19 nt, Artificial Sequence
  Description of Artificial Sequence: Synthetic oligonucleotide
  Antisense strand to SEQ ID NO: 1822741
cuuucuaagugagugacgc

SEQ ID NO: 1822743 - RNA, 19 nt, Artificial Sequence
  Description of Artificial Sequence: Synthetic oligonucleotide
  Sense strand starting at position 725 of SEQ ID NO: 1563601
accaguucugaagggcuau

SEQ ID NO: 1822744 - RNA, 19 nt, Artificial Sequence
  Description of Artificial Sequence: Synthetic oligonucleotide
  Antisense strand to SEQ ID NO: 1822743
auagcccuucagaacuggu

SEQ ID NO: 1822745 - RNA, 19 nt, Artificial Sequence
  Description of Artificial Sequence: Synthetic oligonucleotide
  Sense strand starting at position 726 of SEQ ID NO: 1563601
ccaguucugaagggcuaua

SEQ ID NO: 1822746 - RNA, 19 nt, Artificial Sequence
  Description of Artificial Sequence: Synthetic oligonucleotide
  Antisense strand to SEQ ID NO: 1822745
uauagcccuucagaacugg

SEQ ID NO: 1822747 - RNA, 19 nt, Artificial Sequence
  Description of Artificial Sequence: Synthetic oligonucleotide
  Sense strand starting at position 787 of SEQ ID NO: 1563601
agaacuugcugacucucaa

SEQ ID NO: 1822748 - RNA, 19 nt, Artificial Sequence
  Description of Artificial Sequence: Synthetic oligonucleotide
  Antisense strand to SEQ ID NO: 1822747
uugagagucagcaaguucu

SEQ ID NO: 1822749 - RNA, 19 nt, Artificial Sequence
  Description of Artificial Sequence: Synthetic oligonucleotide
  Sense strand starting at position 1004 of SEQ ID NO: 1563601
uaacaugaugccuaugagu

SEQ ID NO: 1822750 - RNA, 19 nt, Artificial Sequence
  Description of Artificial Sequence: Synthetic oligonucleotide
  Antisense strand to SEQ ID NO: 1822749
acucauaggcaucauguua

SEQ ID NO: 1822751 - RNA, 19 nt, Artificial Sequence
  Description of Artificial Sequence: Synthetic oligonucleotide
  Sense strand starting at position 1006 of SEQ ID NO: 1563601
acaugaugccuaugaguga

SEQ ID NO: 1822752 - RNA, 19 nt, Artificial Sequence
  Description of Artificial Sequence: Synthetic oligonucleotide
  Antisense strand to SEQ ID NO: 1822751
ucacucauaggcaucaugu

SEQ ID NO: 1822753 - RNA, 19 nt, Artificial Sequence
  Description of Artificial Sequence: Synthetic oligonucleotide
  Sense strand starting at position 1009 of SEQ ID NO: 1563601
ugaugccuaugagugagau

SEQ ID NO: 1822754 - RNA, 19 nt, Artificial Sequence
  Description of Artificial Sequence: Synthetic oligonucleotide
  Antisense strand to SEQ ID NO: 1822753
aucucacucauaggcauca

SEQ ID NO: 1822755 - RNA, 19 nt, Artificial Sequence
  Description of Artificial Sequence: Synthetic oligonucleotide
  Sense strand starting at position 1010 of SEQ ID NO: 1563601
gaugccuaugagugagaug

SEQ ID NO: 1822756 - RNA, 19 nt, Artificial Sequence
  Description of Artificial Sequence: Synthetic oligonucleotide
  Antisense strand to SEQ ID NO: 1822755
caucucacucauaggcauc

SEQ ID NO: 1822757 - RNA, 19 nt, Artificial Sequence
  Description of Artificial Sequence: Synthetic oligonucleotide
  Sense strand starting at position 1040 of SEQ ID NO: 1563601
cucaaucucugaucuagga

SEQ ID NO: 1822758 - RNA, 19 nt, Artificial Sequence
  Description of Artificial Sequence: Synthetic oligonucleotide
  Antisense strand to SEQ ID NO: 1822757
uccuagaucagagauugag

SEQ ID NO: 1822759 - RNA, 19 nt, Artificial Sequence
  Description of Artificial Sequence: Synthetic oligonucleotide
  Sense strand starting at position 1194 of SEQ ID NO: 1563601
cucaaucugcuuuaaagga

SEQ ID NO: 1822760 - RNA, 19 nt, Artificial Sequence
  Description of Artificial Sequence: Synthetic oligonucleotide
  Antisense strand to SEQ ID NO: 1822759
uccuuuaaagcagauugag

SEQ ID NO: 1822761 - RNA, 19 nt, Artificial Sequence
  Description of Artificial Sequence: Synthetic oligonucleotide
  Sense strand starting at position 1347 of SEQ ID NO: 1563601
gggagaaagcuccagccau

SEQ ID NO: 1822762 - RNA, 19 nt, Artificial Sequence
  Description of Artificial Sequence: Synthetic oligonucleotide
  Antisense strand to SEQ ID NO: 1822761
auggcuggagcuuucuccc

SEQ ID NO: 1822763 - RNA, 19 nt, Artificial Sequence
  Description of Artificial Sequence: Synthetic oligonucleotide
  Sense strand starting at position 1472 of SEQ ID NO: 1563601
agcaauuugcaaggucagu

SEQ ID NO: 1822764 - RNA, 19 nt, Artificial Sequence
  Description of Artificial Sequence: Synthetic oligonucleotide
  Antisense strand to SEQ ID NO: 1822763
acugaccuugcaaauugcu

SEQ ID NO: 1822765 - RNA, 19 nt, Artificial Sequence
  Description of Artificial Sequence: Synthetic oligonucleotide
  Sense strand starting at position 1537 of SEQ ID NO: 1563601
gcaaaucacgcauauacca

SEQ ID NO: 1822766 - RNA, 19 nt, Artificial Sequence
  Description of Artificial Sequence: Synthetic oligonucleotide
  Antisense strand to SEQ ID NO: 1822765
ugguauaugcgugauuugc

SEQ ID NO: 1822767 - RNA, 19 nt, Artificial Sequence
  Description of Artificial Sequence: Synthetic oligonucleotide
  Sense strand starting at position 1721 of SEQ ID NO: 1563601
agaugcuaucgcuaaagga

SEQ ID NO: 1822768 - RNA, 19 nt, Artificial Sequence
  Description of Artificial Sequence: Synthetic oligonucleotide
  Antisense strand to SEQ ID NO: 1822767
uccuuuagcgauagcaucu

SEQ ID NO: 1822769 - RNA, 19 nt, Artificial Sequence
  Description of Artificial Sequence: Synthetic oligonucleotide
  Sense strand starting at position 1792 of SEQ ID NO: 1563601
ucuacagucugagcggaaa

SEQ ID NO: 1822770 - RNA, 19 nt, Artificial Sequence
  Description of Artificial Sequence: Synthetic oligonucleotide
  Antisense strand to SEQ ID NO: 1822769
uuuccgcucagacuguaga

SEQ ID NO: 1822771 - RNA, 19 nt, Artificial Sequence
  Description of Artificial Sequence: Synthetic oligonucleotide
  Sense strand starting at position 1843 of SEQ ID NO: 1563601
gagguugagcccugacaga

SEQ ID NO: 1822772 - RNA, 19 nt, Artificial Sequence
  Description of Artificial Sequence: Synthetic oligonucleotide
  Antisense strand to SEQ ID NO: 1822771
ucugucagggcucaaccuc

SEQ ID NO: 1822773 - RNA, 19 nt, Artificial Sequence
  Description of Artificial Sequence: Synthetic oligonucleotide
  Sense strand starting at position 2303 of SEQ ID NO: 1563601
ggaaguauggguuacugua

SEQ ID NO: 1822774 - RNA, 19 nt, Artificial Sequence
  Description of Artificial Sequence: Synthetic oligonucleotide
  Antisense strand to SEQ ID NO: 1822773
uacaguaacccauacuucc

SEQ ID NO: 1822775 - RNA, 19 nt, Artificial Sequence
  Description of Artificial Sequence: Synthetic oligonucleotide
  Sense strand starting at position 2538 of SEQ ID NO: 1563601
agaguuccgccacauugau

SEQ ID NO: 1822776 - RNA, 19 nt, Artificial Sequence
  Description of Artificial Sequence: Synthetic oligonucleotide
  Antisense strand to SEQ ID NO: 1822775
aucaauguggcggaacucu

SEQ ID NO: 1822777 - RNA, 19 nt, Artificial Sequence
  Description of Artificial Sequence: Synthetic oligonucleotide
  Sense strand starting at position 2629 of SEQ ID NO: 1563601
cuagcuucccuguagguaa

SEQ ID NO: 1822778 - RNA, 19 nt, Artificial Sequence
  Description of Artificial Sequence: Synthetic oligonucleotide
  Antisense strand to SEQ ID NO: 1822777
uuaccuacagggaagcuag

SEQ ID NO: 1822779 - RNA, 19 nt, Artificial Sequence
  Description of Artificial Sequence: Synthetic oligonucleotide
  Sense strand starting at position 2695 of SEQ ID NO: 1563601
agggaauauagauguaugu

SEQ ID NO: 1822780 - RNA, 19 nt, Artificial Sequence
  Description of Artificial Sequence: Synthetic oligonucleotide
  Antisense strand to SEQ ID NO: 1822779
acauacaucuauauucccu

SEQ ID NO: 1822781 - RNA, 19 nt, Artificial Sequence
  Description of Artificial Sequence: Synthetic oligonucleotide
  Sense strand starting at position 2793 of SEQ ID NO: 1563601
cuauauucccauuggguca

SEQ ID NO: 1822782 - RNA, 19 nt, Artificial Sequence
  Description of Artificial Sequence: Synthetic oligonucleotide
  Antisense strand to SEQ ID NO: 1822781
ugacccaaugggaauauag

SEQ ID NO: 1822783 - RNA, 19 nt, Artificial Sequence
  Description of Artificial Sequence: Synthetic oligonucleotide
  Sense strand starting at position 2831 of SEQ ID NO: 1563601
ggcaaagcacaguaacaau

SEQ ID NO: 1822784 - RNA, 19 nt, Artificial Sequence
  Description of Artificial Sequence: Synthetic oligonucleotide
  Antisense strand to SEQ ID NO: 1822783
auuguuacugugcuuugcc

SEQ ID NO: 1822785 - RNA, 19 nt, Artificial Sequence
  Description of Artificial Sequence: Synthetic oligonucleotide
  Sense strand starting at position 3198 of SEQ ID NO: 1563601
ccaauauaagcacgugaau

SEQ ID NO: 1822786 - RNA, 19 nt, Artificial Sequence
  Description of Artificial Sequence: Synthetic oligonucleotide
  Antisense strand to SEQ ID NO: 1822785
auucacgugcuuauauugg

SEQ ID NO: 1822787 - RNA, 19 nt, Artificial Sequence
  Description of Artificial Sequence: Synthetic oligonucleotide
  Sense strand starting at position 3301 of SEQ ID NO: 1563601
ugugauuucuaguccuguu

SEQ ID NO: 1822788 - RNA, 19 nt, Artificial Sequence
  Description of Artificial Sequence: Synthetic oligonucleotide
  Antisense strand to SEQ ID NO: 1822787
aacaggacuagaaaucaca

SEQ ID NO: 1822789 - RNA, 19 nt, Artificial Sequence
  Description of Artificial Sequence: Synthetic oligonucleotide
  Sense strand starting at position 3332 of SEQ ID NO: 1563601
agggcaucuaauugaaagu

SEQ ID NO: 1822790 - RNA, 19 nt, Artificial Sequence
  Description of Artificial Sequence: Synthetic oligonucleotide
  Antisense strand to SEQ ID NO: 1822789
acuuucaauuagaugcccu

SEQ ID NO: 1822791 - RNA, 19 nt, Artificial Sequence
  Description of Artificial Sequence: Synthetic oligonucleotide
  Sense strand starting at position 3362 of SEQ ID NO: 1563601
uguguuuaaguauacuagu

SEQ ID NO: 1822792 - RNA, 19 nt, Artificial Sequence
  Description of Artificial Sequence: Synthetic oligonucleotide
  Antisense strand to SEQ ID NO: 1822791
acuaguauacuuaaacaca

SEQ ID NO: 1822793 - RNA, 19 nt, Artificial Sequence
  Description of Artificial Sequence: Synthetic oligonucleotide
  Sense strand starting at position 3435 of SEQ ID NO: 1563601
gugugccauuucucuuuaa

SEQ ID NO: 1822794 - RNA, 19 nt, Artificial Sequence
  Description of Artificial Sequence: Synthetic oligonucleotide
  Antisense strand to SEQ ID NO: 1822793
uuaaagagaaauggcacac

SEQ ID NO: 1822795 - RNA, 19 nt, Artificial Sequence
  Description of Artificial Sequence: Synthetic oligonucleotide
  Sense strand starting at position 3575 of SEQ ID NO: 1563601
auagauagguacucguaag

SEQ ID NO: 1822796 - RNA, 19 nt, Artificial Sequence
  Description of Artificial Sequence: Synthetic oligonucleotide
  Antisense strand to SEQ ID NO: 1822795
cuuacgaguaccuaucuau

SEQ ID NO: 1822797 - RNA, 19 nt, Artificial Sequence
  Description of Artificial Sequence: Synthetic oligonucleotide
  Sense strand starting at position 3627 of SEQ ID NO: 1563601
auaaccaugucauuguaca

SEQ ID NO: 1822798 - RNA, 19 nt, Artificial Sequence
  Description of Artificial Sequence: Synthetic oligonucleotide
  Antisense strand to SEQ ID NO: 1822797
uguacaaugacaugguuau

SEQ ID NO: 1822799 - RNA, 19 nt, Artificial Sequence
  Description of Artificial Sequence: Synthetic oligonucleotide
  Sense strand starting at position 3696 of SEQ ID NO: 1563601
gagucaguggcagaaucaa

SEQ ID NO: 1822800 - RNA, 19 nt, Artificial Sequence
  Description of Artificial Sequence: Synthetic oligonucleotide
  Antisense strand to SEQ ID NO: 1822799
uugauucugccacugacuc

SEQ ID NO: 1822801 - RNA, 19 nt, Artificial Sequence
  Description of Artificial Sequence: Synthetic oligonucleotide
  Sense strand starting at position 3793 of SEQ ID NO: 1563601
uguguaugugagcauaaag

SEQ ID NO: 1822802 - RNA, 19 nt, Artificial Sequence
  Description of Artificial Sequence: Synthetic oligonucleotide
  Antisense strand to SEQ ID NO: 1822801
cuuuaugcucacauacaca

SEQ ID NO: 1822803 - RNA, 19 nt, Artificial Sequence
  Description of Artificial Sequence: Synthetic oligonucleotide
  Sense strand starting at position 3848 of SEQ ID NO: 1563601
auguguagauuuguuugca

SEQ ID NO: 1822804 - RNA, 19 nt, Artificial Sequence
  Description of Artificial Sequence: Synthetic oligonucleotide
  Antisense strand to SEQ ID NO: 1822803
ugcaaacaaaucuacacau

SEQ ID NO: 1822805 - RNA, 19 nt, Artificial Sequence
  Description of Artificial Sequence: Synthetic oligonucleotide
  Sense strand starting at position 3849 of SEQ ID NO: 1563601
uguguagauuuguuugcau

SEQ ID NO: 1822806 - RNA, 19 nt, Artificial Sequence
  Description of Artificial Sequence: Synthetic oligonucleotide
  Antisense strand to SEQ ID NO: 1822805
augcaaacaaaucuacaca

SEQ ID NO: 1822807 - RNA, 19 nt, Artificial Sequence
  Description of Artificial Sequence: Synthetic oligonucleotide
  Sense strand starting at position 3851 of SEQ ID NO: 1563601
uguagauuuguuugcauaa

SEQ ID NO: 1822808 - RNA, 19 nt, Artificial Sequence
  Description of Artificial Sequence: Synthetic oligonucleotide
  Antisense strand to SEQ ID NO: 1822807
uuaugcaaacaaaucuaca

SEQ ID NO: 1822809 - RNA, 19 nt, Artificial Sequence
  Description of Artificial Sequence: Synthetic oligonucleotide
  Sense strand starting at position 3863 of SEQ ID NO: 1563601
ugcauaaauguccauugga

SEQ ID NO: 1822810 - RNA, 19 nt, Artificial Sequence
  Description of Artificial Sequence: Synthetic oligonucleotide
  Antisense strand to SEQ ID NO: 1822809
uccaauggacauuuaugca

SEQ ID NO: 1822811 - RNA, 19 nt, Artificial Sequence
  Description of Artificial Sequence: Synthetic oligonucleotide
  Sense strand starting at position 3910 of SEQ ID NO: 1563601
aaauauuaagguugcugua

SEQ ID NO: 1822812 - RNA, 19 nt, Artificial Sequence
  Description of Artificial Sequence: Synthetic oligonucleotide
  Antisense strand to SEQ ID NO: 1822811
uacagcaaccuuaauauuu

SEQ ID NO: 1822813 - RNA, 19 nt, Artificial Sequence
  Description of Artificial Sequence: Synthetic oligonucleotide
  Sense strand starting at position 265 of SEQ ID NO: 1563602
aguugaaucucugcacuac

SEQ ID NO: 1822814 - RNA, 19 nt, Artificial Sequence
  Description of Artificial Sequence: Synthetic oligonucleotide
  Antisense strand to SEQ ID NO: 1822813
guagugcagagauucaacu

SEQ ID NO: 1822815 - RNA, 19 nt, Artificial Sequence
  Description of Artificial Sequence: Synthetic oligonucleotide
  Sense strand starting at position 721 of SEQ ID NO: 1563602
auugcuagcacgcauagaa

SEQ ID NO: 1822816 - RNA, 19 nt, Artificial Sequence
  Description of Artificial Sequence: Synthetic oligonucleotide
  Antisense strand to SEQ ID NO: 1822815
uucuaugcgugcuagcaau

SEQ ID NO: 1822817 - RNA, 19 nt, Artificial Sequence
  Description of Artificial Sequence: Synthetic oligonucleotide
  Sense strand starting at position 813 of SEQ ID NO: 1563602
cccuucucugaugagcuaa

SEQ ID NO: 1822818 - RNA, 19 nt, Artificial Sequence
  Description of Artificial Sequence: Synthetic oligonucleotide
  Antisense strand to SEQ ID NO: 1822817
uuagcucaucagagaaggg

SEQ ID NO: 1822819 - RNA, 19 nt, Artificial Sequence
  Description of Artificial Sequence: Synthetic oligonucleotide
  Sense strand starting at position 904 of SEQ ID NO: 1563602
uggaaucuucgagaaagcu

SEQ ID NO: 1822820 - RNA, 19 nt, Artificial Sequence
  Description of Artificial Sequence: Synthetic oligonucleotide
  Antisense strand to SEQ ID NO: 1822819
agcuuucucgaagauucca

SEQ ID NO: 1822821 - RNA, 19 nt, Artificial Sequence
  Description of Artificial Sequence: Synthetic oligonucleotide
  Sense strand starting at position 912 of SEQ ID NO: 1563602
ucgagaaagcuccacagau

SEQ ID NO: 1822822 - RNA, 19 nt, Artificial Sequence
  Description of Artificial Sequence: Synthetic oligonucleotide
  Antisense strand to SEQ ID NO: 1822821
aucuguggagcuuucucga

SEQ ID NO: 1822823 - RNA, 19 nt, Artificial Sequence
  Description of Artificial Sequence: Synthetic oligonucleotide
  Sense strand starting at position 1081 of SEQ ID NO: 1563602
gagggaagaugguuguuca

SEQ ID NO: 1822824 - RNA, 19 nt, Artificial Sequence
  Description of Artificial Sequence: Synthetic oligonucleotide
  Antisense strand to SEQ ID NO: 1822823
ugaacaaccaucuucccuc

SEQ ID NO: 1822825 - RNA, 19 nt, Artificial Sequence
  Description of Artificial Sequence: Synthetic oligonucleotide
  Sense strand starting at position 1082 of SEQ ID NO: 1563602
agggaagaugguuguucaa

SEQ ID NO: 1822826 - RNA, 19 nt, Artificial Sequence
  Description of Artificial Sequence: Synthetic oligonucleotide
  Antisense strand to SEQ ID NO: 1822825
uugaacaaccaucuucccu

SEQ ID NO: 1822827 - RNA, 19 nt, Artificial Sequence
  Description of Artificial Sequence: Synthetic oligonucleotide
  Sense strand starting at position 1089 of SEQ ID NO: 1563602
augguuguucaagggaaac

SEQ ID NO: 1822828 - RNA, 19 nt, Artificial Sequence
  Description of Artificial Sequence: Synthetic oligonucleotide
  Antisense strand to SEQ ID NO: 1822827
guuucccuugaacaaccau

SEQ ID NO: 1822829 - RNA, 19 nt, Artificial Sequence
  Description of Artificial Sequence: Synthetic oligonucleotide
  Sense strand starting at position 1125 of SEQ ID NO: 1563602
gauugaaaucuacggccca

SEQ ID NO: 1822830 - RNA, 19 nt, Artificial Sequence
  Description of Artificial Sequence: Synthetic oligonucleotide
  Antisense strand to SEQ ID NO: 1822829
ugggccguagauuucaauc

SEQ ID NO: 1822831 - RNA, 19 nt, Artificial Sequence
  Description of Artificial Sequence: Synthetic oligonucleotide
  Sense strand starting at position 1206 of SEQ ID NO: 1563602
gcagggugucuagggauga

SEQ ID NO: 1822832 - RNA, 19 nt, Artificial Sequence
  Description of Artificial Sequence: Synthetic oligonucleotide
  Antisense strand to SEQ ID NO: 1822831
ucaucccuagacacccugc

SEQ ID NO: 1822833 - RNA, 19 nt, Artificial Sequence
  Description of Artificial Sequence: Synthetic oligonucleotide
  Sense strand starting at position 1210 of SEQ ID NO: 1563602
ggugucuagggaugaguua

SEQ ID NO: 1822834 - RNA, 19 nt, Artificial Sequence
  Description of Artificial Sequence: Synthetic oligonucleotide
  Antisense strand to SEQ ID NO: 1822833
uaacucaucccuagacacc

SEQ ID NO: 1822835 - RNA, 19 nt, Artificial Sequence
  Description of Artificial Sequence: Synthetic oligonucleotide
  Sense strand starting at position 1211 of SEQ ID NO: 1563602
gugucuagggaugaguuaa

SEQ ID NO: 1822836 - RNA, 19 nt, Artificial Sequence
  Description of Artificial Sequence: Synthetic oligonucleotide
  Antisense strand to SEQ ID NO: 1822835
uuaacucaucccuagacac

SEQ ID NO: 1822837 - RNA, 19 nt, Artificial Sequence
  Description of Artificial Sequence: Synthetic oligonucleotide
  Sense strand starting at position 1217 of SEQ ID NO: 1563602
agggaugaguuaaggaagu

SEQ ID NO: 1822838 - RNA, 19 nt, Artificial Sequence
  Description of Artificial Sequence: Synthetic oligonucleotide
  Antisense strand to SEQ ID NO: 1822837
acuuccuuaacucaucccu

SEQ ID NO: 1822839 - RNA, 19 nt, Artificial Sequence
  Description of Artificial Sequence: Synthetic oligonucleotide
  Sense strand starting at position 1927 of SEQ ID NO: 1563602
ggaagaacuuuggacaaca

SEQ ID NO: 1822840 - RNA, 19 nt, Artificial Sequence
  Description of Artificial Sequence: Synthetic oligonucleotide
  Antisense strand to SEQ ID NO: 1822839
uguuguccaaaguucuucc

SEQ ID NO: 1822841 - RNA, 19 nt, Artificial Sequence
  Description of Artificial Sequence: Synthetic oligonucleotide
  Sense strand starting at position 2098 of SEQ ID NO: 1563602
gauggaaaucuccgacgac

SEQ ID NO: 1822842 - RNA, 19 nt, Artificial Sequence
  Description of Artificial Sequence: Synthetic oligonucleotide
  Antisense strand to SEQ ID NO: 1822841
gucgucggagauuuccauc

SEQ ID NO: 1822843 - RNA, 19 nt, Artificial Sequence
  Description of Artificial Sequence: Synthetic oligonucleotide
  Sense strand starting at position 2528 of SEQ ID NO: 1563602
aguccuucggaauacaagu

SEQ ID NO: 1822844 - RNA, 19 nt, Artificial Sequence
  Description of Artificial Sequence: Synthetic oligonucleotide
  Antisense strand to SEQ ID NO: 1822843
acuuguauuccgaaggacu

SEQ ID NO: 1822845 - RNA, 19 nt, Artificial Sequence
  Description of Artificial Sequence: Synthetic oligonucleotide
  Sense strand starting at position 2544 of SEQ ID NO: 1563602
agucuugucguaugaagga

SEQ ID NO: 1822846 - RNA, 19 nt, Artificial Sequence
  Description of Artificial Sequence: Synthetic oligonucleotide
  Antisense strand to SEQ ID NO: 1822845
uccuucauacgacaagacu

SEQ ID NO: 1822847 - RNA, 19 nt, Artificial Sequence
  Description of Artificial Sequence: Synthetic oligonucleotide
  Sense strand starting at position 2623 of SEQ ID NO: 1563602
caagcucugaugugaggua

SEQ ID NO: 1822848 - RNA, 19 nt, Artificial Sequence
  Description of Artificial Sequence: Synthetic oligonucleotide
  Antisense strand to SEQ ID NO: 1822847
uaccucacaucagagcuug

SEQ ID NO: 1822849 - RNA, 19 nt, Artificial Sequence
  Description of Artificial Sequence: Synthetic oligonucleotide
  Sense strand starting at position 2628 of SEQ ID NO: 1563602
ucugaugugagguauucca

SEQ ID NO: 1822850 - RNA, 19 nt, Artificial Sequence
  Description of Artificial Sequence: Synthetic oligonucleotide
  Antisense strand to SEQ ID NO: 1822849
uggaauaccucacaucaga

SEQ ID NO: 1822851 - RNA, 19 nt, Artificial Sequence
  Description of Artificial Sequence: Synthetic oligonucleotide
  Sense strand starting at position 2635 of SEQ ID NO: 1563602
ugagguauuccacagggca

SEQ ID NO: 1822852 - RNA, 19 nt, Artificial Sequence
  Description of Artificial Sequence: Synthetic oligonucleotide
  Antisense strand to SEQ ID NO: 1822851
ugcccuguggaauaccuca

SEQ ID NO: 1822853 - RNA, 19 nt, Artificial Sequence
  Description of Artificial Sequence: Synthetic oligonucleotide
  Sense strand starting at position 2637 of SEQ ID NO: 1563602
agguauuccacagggcaaa

SEQ ID NO: 1822854 - RNA, 19 nt, Artificial Sequence
  Description of Artificial Sequence: Synthetic oligonucleotide
  Antisense strand to SEQ ID NO: 1822853
uuugcccuguggaauaccu

SEQ ID NO: 1822855 - RNA, 19 nt, Artificial Sequence
  Description of Artificial Sequence: Synthetic oligonucleotide
  Sense strand starting at position 2638 of SEQ ID NO: 1563602
gguauuccacagggcaaau

SEQ ID NO: 1822856 - RNA, 19 nt, Artificial Sequence
  Description of Artificial Sequence: Synthetic oligonucleotide
  Antisense strand to SEQ ID NO: 1822855
auuugcccuguggaauacc

SEQ ID NO: 1822857 - RNA, 19 nt, Artificial Sequence
  Description of Artificial Sequence: Synthetic oligonucleotide
  Sense strand starting at position 2819 of SEQ ID NO: 1563602
uuggaaaccuccuugagac

SEQ ID NO: 1822858 - RNA, 19 nt, Artificial Sequence
  Description of Artificial Sequence: Synthetic oligonucleotide
  Antisense strand to SEQ ID NO: 1822857
gucucaaggagguuuccaa

SEQ ID NO: 1822859 - RNA, 19 nt, Artificial Sequence
  Description of Artificial Sequence: Synthetic oligonucleotide
  Sense strand starting at position 2820 of SEQ ID NO: 1563602
uggaaaccuccuugagacu

SEQ ID NO: 1822860 - RNA, 19 nt, Artificial Sequence
  Description of Artificial Sequence: Synthetic oligonucleotide
  Antisense strand to SEQ ID NO: 1822859
agucucaaggagguuucca

SEQ ID NO: 1822861 - RNA, 19 nt, Artificial Sequence
  Description of Artificial Sequence: Synthetic oligonucleotide
  Sense strand starting at position 2843 of SEQ ID NO: 1563602
ggccgaaucuuucuggaga

SEQ ID NO: 1822862 - RNA, 19 nt, Artificial Sequence
  Description of Artificial Sequence: Synthetic oligonucleotide
  Antisense strand to SEQ ID NO: 1822861
ucuccagaaagauucggcc

SEQ ID NO: 1822863 - RNA, 19 nt, Artificial Sequence
  Description of Artificial Sequence: Synthetic oligonucleotide
  Sense strand starting at position 2846 of SEQ ID NO: 1563602
cgaaucuuucuggagacuu

SEQ ID NO: 1822864 - RNA, 19 nt, Artificial Sequence
  Description of Artificial Sequence: Synthetic oligonucleotide
  Antisense strand to SEQ ID NO: 1822863
aagucuccagaaagauucg

SEQ ID NO: 1822865 - RNA, 19 nt, Artificial Sequence
  Description of Artificial Sequence: Synthetic oligonucleotide
  Sense strand starting at position 3110 of SEQ ID NO: 1563602
gaggcuuagcucuaccaca

SEQ ID NO: 1822866 - RNA, 19 nt, Artificial Sequence
  Description of Artificial Sequence: Synthetic oligonucleotide
  Antisense strand to SEQ ID NO: 1822865
ugugguagagcuaagccuc

SEQ ID NO: 1822867 - RNA, 19 nt, Artificial Sequence
  Description of Artificial Sequence: Synthetic oligonucleotide
  Sense strand starting at position 3212 of SEQ ID NO: 1563602
gaugauuaucuugggcauu

SEQ ID NO: 1822868 - RNA, 19 nt, Artificial Sequence
  Description of Artificial Sequence: Synthetic oligonucleotide
  Antisense strand to SEQ ID NO: 1822867
aaugcccaagauaaucauc

SEQ ID NO: 1822869 - RNA, 19 nt, Artificial Sequence
  Description of Artificial Sequence: Synthetic oligonucleotide
  Sense strand starting at position 3267 of SEQ ID NO: 1563602
aaguaagcucagggacaaa

SEQ ID NO: 1822870 - RNA, 19 nt, Artificial Sequence
  Description of Artificial Sequence: Synthetic oligonucleotide
  Antisense strand to SEQ ID NO: 1822869
uuugucccugagcuuacuu

SEQ ID NO: 1822871 - RNA, 19 nt, Artificial Sequence
  Description of Artificial Sequence: Synthetic oligonucleotide
  Sense strand starting at position 3350 of SEQ ID NO: 1563602
gagcucuggguacacaaua

SEQ ID NO: 1822872 - RNA, 19 nt, Artificial Sequence
  Description of Artificial Sequence: Synthetic oligonucleotide
  Antisense strand to SEQ ID NO: 1822871
uauuguguacccagagcuc

SEQ ID NO: 1822873 - RNA, 19 nt, Artificial Sequence
  Description of Artificial Sequence: Synthetic oligonucleotide
  Sense strand starting at position 3388 of SEQ ID NO: 1563602
cacugauuugugugcagcu

SEQ ID NO: 1822874 - RNA, 19 nt, Artificial Sequence
  Description of Artificial Sequence: Synthetic oligonucleotide
  Antisense strand to SEQ ID NO: 1822873
agcugcacacaaaucagug

SEQ ID NO: 1822875 - RNA, 19 nt, Artificial Sequence
  Description of Artificial Sequence: Synthetic oligonucleotide
  Sense strand starting at position 3414 of SEQ ID NO: 1563602
uccuacuaccacugaguua

SEQ ID NO: 1822876 - RNA, 19 nt, Artificial Sequence
  Description of Artificial Sequence: Synthetic oligonucleotide
  Antisense strand to SEQ ID NO: 1822875
uaacucagugguaguagga

SEQ ID NO: 1822877 - RNA, 19 nt, Artificial Sequence
  Description of Artificial Sequence: Synthetic oligonucleotide
  Sense strand starting at position 3486 of SEQ ID NO: 1563602
gcaggacauguuuaggcuu

SEQ ID NO: 1822878 - RNA, 19 nt, Artificial Sequence
  Description of Artificial Sequence: Synthetic oligonucleotide
  Antisense strand to SEQ ID NO: 1822877
aagccuaaacauguccugc

SEQ ID NO: 1822879 - RNA, 19 nt, Artificial Sequence
  Description of Artificial Sequence: Synthetic oligonucleotide
  Sense strand starting at position 3763 of SEQ ID NO: 1563602
accagacugcuauggaaag

SEQ ID NO: 1822880 - RNA, 19 nt, Artificial Sequence
  Description of Artificial Sequence: Synthetic oligonucleotide
  Antisense strand to SEQ ID NO: 1822879
cuuuccauagcagucuggu

SEQ ID NO: 1822881 - RNA, 19 nt, Artificial Sequence
  Description of Artificial Sequence: Synthetic oligonucleotide
  Sense strand starting at position 3818 of SEQ ID NO: 1563602
ugaaguguccuguaugcau

SEQ ID NO: 1822882 - RNA, 19 nt, Artificial Sequence
  Description of Artificial Sequence: Synthetic oligonucleotide
  Antisense strand to SEQ ID NO: 1822881
augcauacaggacacuuca

SEQ ID NO: 1822883 - RNA, 19 nt, Artificial Sequence
  Description of Artificial Sequence: Synthetic oligonucleotide
  Sense strand starting at position 3869 of SEQ ID NO: 1563602
aaaugaagguuugucugau

SEQ ID NO: 1822884 - RNA, 19 nt, Artificial Sequence
  Description of Artificial Sequence: Synthetic oligonucleotide
  Antisense strand to SEQ ID NO: 1822883
aucagacaaaccuucauuu

SEQ ID NO: 1822885 - RNA, 19 nt, Artificial Sequence
  Description of Artificial Sequence: Synthetic oligonucleotide
  Sense strand starting at position 3870 of SEQ ID NO: 1563602
aaugaagguuugucugauu

SEQ ID NO: 1822886 - RNA, 19 nt, Artificial Sequence
  Description of Artificial Sequence: Synthetic oligonucleotide
  Antisense strand to SEQ ID NO: 1822885
aaucagacaaaccuucauu

SEQ ID NO: 1822887 - RNA, 19 nt, Artificial Sequence
  Description of Artificial Sequence: Synthetic oligonucleotide
  Sense strand starting at position 3873 of SEQ ID NO: 1563602
gaagguuugucugauuuac

SEQ ID NO: 1822888 - RNA, 19 nt, Artificial Sequence
  Description of Artificial Sequence: Synthetic oligonucleotide
  Antisense strand to SEQ ID NO: 1822887
guaaaucagacaaaccuuc

SEQ ID NO: 1822889 - RNA, 19 nt, Artificial Sequence
  Description of Artificial Sequence: Synthetic oligonucleotide
  Sense strand starting at position 3879 of SEQ ID NO: 1563602
uugucugauuuaccuguau

SEQ ID NO: 1822890 - RNA, 19 nt, Artificial Sequence
  Description of Artificial Sequence: Synthetic oligonucleotide
  Antisense strand to SEQ ID NO: 1822889
auacagguaaaucagacaa

SEQ ID NO: 1822891 - RNA, 19 nt, Artificial Sequence
  Description of Artificial Sequence: Synthetic oligonucleotide
  Sense strand starting at position 3936 of SEQ ID NO: 1563602
auuaauuacguuugcugaa

SEQ ID NO: 1822892 - RNA, 19 nt, Artificial Sequence
  Description of Artificial Sequence: Synthetic oligonucleotide
  Antisense strand to SEQ ID NO: 1822891
uucagcaaacguaauuaau

SEQ ID NO: 1822893 - RNA, 19 nt, Artificial Sequence
  Description of Artificial Sequence: Synthetic oligonucleotide
  Sense strand starting at position 22 of SEQ ID NO: 1563603
agcuuuaauccagagggug

SEQ ID NO: 1822894 - RNA, 19 nt, Artificial Sequence
  Description of Artificial Sequence: Synthetic oligonucleotide
  Antisense strand to SEQ ID NO: 1822893
cacccucuggauuaaagcu

SEQ ID NO: 1822895 - RNA, 19 nt, Artificial Sequence
  Description of Artificial Sequence: Synthetic oligonucleotide
  Sense strand starting at position 284 of SEQ ID NO: 1563603
cuaguaagaugagcucaaa

SEQ ID NO: 1822896 - RNA, 19 nt, Artificial Sequence
  Description of Artificial Sequence: Synthetic oligonucleotide
  Antisense strand to SEQ ID NO: 1822895
uuugagcucaucuuacuag

SEQ ID NO: 1822897 - RNA, 19 nt, Artificial Sequence
  Description of Artificial Sequence: Synthetic oligonucleotide
  Sense strand starting at position 287 of SEQ ID NO: 1563603
guaagaugagcucaaaguu

SEQ ID NO: 1822898 - RNA, 19 nt, Artificial Sequence
  Description of Artificial Sequence: Synthetic oligonucleotide
  Antisense strand to SEQ ID NO: 1822897
aacuuugagcucaucuuac

SEQ ID NO: 1822899 - RNA, 19 nt, Artificial Sequence
  Description of Artificial Sequence: Synthetic oligonucleotide
  Sense strand starting at position 388 of SEQ ID NO: 1563603
agacuuggcauauggcaua

SEQ ID NO: 1822900 - RNA, 19 nt, Artificial Sequence
  Description of Artificial Sequence: Synthetic oligonucleotide
  Antisense strand to SEQ ID NO: 1822899
uaugccauaugccaagucu

SEQ ID NO: 1822901 - RNA, 19 nt, Artificial Sequence
  Description of Artificial Sequence: Synthetic oligonucleotide
  Sense strand starting at position 393 of SEQ ID NO: 1563603
uggcauauggcauaagaca

SEQ ID NO: 1822902 - RNA, 19 nt, Artificial Sequence
  Description of Artificial Sequence: Synthetic oligonucleotide
  Antisense strand to SEQ ID NO: 1822901
ugucuuaugccauaugcca

SEQ ID NO: 1822903 - RNA, 19 nt, Artificial Sequence
  Description of Artificial Sequence: Synthetic oligonucleotide
  Sense strand starting at position 427 of SEQ ID NO: 1563603
gcugguguagcugagauuu

SEQ ID NO: 1822904 - RNA, 19 nt, Artificial Sequence
  Description of Artificial Sequence: Synthetic oligonucleotide
  Antisense strand to SEQ ID NO: 1822903
aaaucucagcuacaccagc

SEQ ID NO: 1822905 - RNA, 19 nt, Artificial Sequence
  Description of Artificial Sequence: Synthetic oligonucleotide
  Sense strand starting at position 487 of SEQ ID NO: 1563603
cagagcucucaucggaaag

SEQ ID NO: 1822906 - RNA, 19 nt, Artificial Sequence
  Description of Artificial Sequence: Synthetic oligonucleotide
  Antisense strand to SEQ ID NO: 1822905
cuuuccgaugagagcucug

SEQ ID NO: 1822907 - RNA, 19 nt, Artificial Sequence
  Description of Artificial Sequence: Synthetic oligonucleotide
  Sense strand starting at position 488 of SEQ ID NO: 1563603
agagcucucaucggaaaga

SEQ ID NO: 1822908 - RNA, 19 nt, Artificial Sequence
  Description of Artificial Sequence: Synthetic oligonucleotide
  Antisense strand to SEQ ID NO: 1822907
ucuuuccgaugagagcucu

SEQ ID NO: 1822909 - RNA, 19 nt, Artificial Sequence
  Description of Artificial Sequence: Synthetic oligonucleotide
  Sense strand starting at position 560 of SEQ ID NO: 1563603
aggugucuugggugagcau

SEQ ID NO: 1822910 - RNA, 19 nt, Artificial Sequence
  Description of Artificial Sequence: Synthetic oligonucleotide
  Antisense strand to SEQ ID NO: 1822909
augcucacccaagacaccu

SEQ ID NO: 1822911 - RNA, 19 nt, Artificial Sequence
  Description of Artificial Sequence: Synthetic oligonucleotide
  Sense strand starting at position 561 of SEQ ID NO: 1563603
ggugucuugggugagcaua

SEQ ID NO: 1822912 - RNA, 19 nt, Artificial Sequence
  Description of Artificial Sequence: Synthetic oligonucleotide
  Antisense strand to SEQ ID NO: 1822911
uaugcucacccaagacacc

SEQ ID NO: 1822913 - RNA, 19 nt, Artificial Sequence
  Description of Artificial Sequence: Synthetic oligonucleotide
  Sense strand starting at position 684 of SEQ ID NO: 1563603
gggcuugcgaaucagaaca

SEQ ID NO: 1822914 - RNA, 19 nt, Artificial Sequence
  Description of Artificial Sequence: Synthetic oligonucleotide
  Antisense strand to SEQ ID NO: 1822913
uguucugauucgcaagccc

SEQ ID NO: 1822915 - RNA, 19 nt, Artificial Sequence
  Description of Artificial Sequence: Synthetic oligonucleotide
  Sense strand starting at position 735 of SEQ ID NO: 1563603
ugacgcauugcccagggaa

SEQ ID NO: 1822916 - RNA, 19 nt, Artificial Sequence
  Description of Artificial Sequence: Synthetic oligonucleotide
  Antisense strand to SEQ ID NO: 1822915
uucccugggcaaugcguca

SEQ ID NO: 1822917 - RNA, 19 nt, Artificial Sequence
  Description of Artificial Sequence: Synthetic oligonucleotide
  Sense strand starting at position 813 of SEQ ID NO: 1563603
gcaugugugcauguucagu

SEQ ID NO: 1822918 - RNA, 19 nt, Artificial Sequence
  Description of Artificial Sequence: Synthetic oligonucleotide
  Antisense strand to SEQ ID NO: 1822917
acugaacaugcacacaugc

SEQ ID NO: 1822919 - RNA, 19 nt, Artificial Sequence
  Description of Artificial Sequence: Synthetic oligonucleotide
  Sense strand starting at position 876 of SEQ ID NO: 1563603
gcuggaaccuugccaaaca

SEQ ID NO: 1822920 - RNA, 19 nt, Artificial Sequence
  Description of Artificial Sequence: Synthetic oligonucleotide
  Antisense strand to SEQ ID NO: 1822919
uguuuggcaagguuccagc

SEQ ID NO: 1822921 - RNA, 19 nt, Artificial Sequence
  Description of Artificial Sequence: Synthetic oligonucleotide
  Sense strand starting at position 904 of SEQ ID NO: 1563603
ccuuuaugaguacauguua

SEQ ID NO: 1822922 - RNA, 19 nt, Artificial Sequence
  Description of Artificial Sequence: Synthetic oligonucleotide
  Antisense strand to SEQ ID NO: 1822921
uaacauguacucauaaagg

SEQ ID NO: 1822923 - RNA, 19 nt, Artificial Sequence
  Description of Artificial Sequence: Synthetic oligonucleotide
  Sense strand starting at position 919 of SEQ ID NO: 1563603
guuaauuucuggcuugcca

SEQ ID NO: 1822924 - RNA, 19 nt, Artificial Sequence
  Description of Artificial Sequence: Synthetic oligonucleotide
  Antisense strand to SEQ ID NO: 1822923
uggcaagccagaaauuaac

SEQ ID NO: 1822925 - RNA, 19 nt, Artificial Sequence
  Description of Artificial Sequence: Synthetic oligonucleotide
  Sense strand starting at position 1110 of SEQ ID NO: 1563603
acauuucugugugauuuac

SEQ ID NO: 1822926 - RNA, 19 nt, Artificial Sequence
  Description of Artificial Sequence: Synthetic oligonucleotide
  Antisense strand to SEQ ID NO: 1822925
guaaaucacacagaaaugu

SEQ ID NO: 1822927 - RNA, 19 nt, Artificial Sequence
  Description of Artificial Sequence: Synthetic oligonucleotide
  Sense strand starting at position 1116 of SEQ ID NO: 1563603
cugugugauuuacauguaa

SEQ ID NO: 1822928 - RNA, 19 nt, Artificial Sequence
  Description of Artificial Sequence: Synthetic oligonucleotide
  Antisense strand to SEQ ID NO: 1822927
uuacauguaaaucacacag

SEQ ID NO: 1822929 - RNA, 19 nt, Artificial Sequence
  Description of Artificial Sequence: Synthetic oligonucleotide
  Sense strand starting at position 1287 of SEQ ID NO: 1563603
cuccgauggguuugaguua

SEQ ID NO: 1822930 - RNA, 19 nt, Artificial Sequence
  Description of Artificial Sequence: Synthetic oligonucleotide
  Antisense strand to SEQ ID NO: 1822929
uaacucaaacccaucggag

SEQ ID NO: 1822931 - RNA, 19 nt, Artificial Sequence
  Description of Artificial Sequence: Synthetic oligonucleotide
  Sense strand starting at position 1292 of SEQ ID NO: 1563603
auggguuugaguuaaucau

SEQ ID NO: 1822932 - RNA, 19 nt, Artificial Sequence
  Description of Artificial Sequence: Synthetic oligonucleotide
  Antisense strand to SEQ ID NO: 1822931
augauuaacucaaacccau

SEQ ID NO: 1822933 - RNA, 19 nt, Artificial Sequence
  Description of Artificial Sequence: Synthetic oligonucleotide
  Sense strand starting at position 1825 of SEQ ID NO: 1563603
ccgcuuaccaguugaagag

SEQ ID NO: 1822934 - RNA, 19 nt, Artificial Sequence
  Description of Artificial Sequence: Synthetic oligonucleotide
  Antisense strand to SEQ ID NO: 1822933
cucuucaacugguaagcgg

SEQ ID NO: 1822935 - RNA, 19 nt, Artificial Sequence
  Description of Artificial Sequence: Synthetic oligonucleotide
  Sense strand starting at position 2099 of SEQ ID NO: 1563603
cccaaagagucgccucuaa

SEQ ID NO: 1822936 - RNA, 19 nt, Artificial Sequence
  Description of Artificial Sequence: Synthetic oligonucleotide
  Antisense strand to SEQ ID NO: 1822935
uuagaggcgacucuuuggg

SEQ ID NO: 1822937 - RNA, 19 nt, Artificial Sequence
  Description of Artificial Sequence: Synthetic oligonucleotide
  Sense strand starting at position 2616 of SEQ ID NO: 1563603
gugcccgagaguuguauuu

SEQ ID NO: 1822938 - RNA, 19 nt, Artificial Sequence
  Description of Artificial Sequence: Synthetic oligonucleotide
  Antisense strand to SEQ ID NO: 1822937
aaauacaacucucgggcac

SEQ ID NO: 1822939 - RNA, 19 nt, Artificial Sequence
  Description of Artificial Sequence: Synthetic oligonucleotide
  Sense strand starting at position 2650 of SEQ ID NO: 1563603
gugguaauuugaccgccau

SEQ ID NO: 1822940 - RNA, 19 nt, Artificial Sequence
  Description of Artificial Sequence: Synthetic oligonucleotide
  Antisense strand to SEQ ID NO: 1822939
auggcggucaaauuaccac

SEQ ID NO: 1822941 - RNA, 19 nt, Artificial Sequence
  Description of Artificial Sequence: Synthetic oligonucleotide
  Sense strand starting at position 2766 of SEQ ID NO: 1563603
gugccuugucucuggauaa

SEQ ID NO: 1822942 - RNA, 19 nt, Artificial Sequence
  Description of Artificial Sequence: Synthetic oligonucleotide
  Antisense strand to SEQ ID NO: 1822941
uuauccagagacaaggcac

SEQ ID NO: 1822943 - RNA, 19 nt, Artificial Sequence
  Description of Artificial Sequence: Synthetic oligonucleotide
  Sense strand starting at position 2873 of SEQ ID NO: 1563603
gcccaagaguugcuuaaga

SEQ ID NO: 1822944 - RNA, 19 nt, Artificial Sequence
  Description of Artificial Sequence: Synthetic oligonucleotide
  Antisense strand to SEQ ID NO: 1822943
ucuuaagcaacucuugggc

SEQ ID NO: 1822945 - RNA, 19 nt, Artificial Sequence
  Description of Artificial Sequence: Synthetic oligonucleotide
  Sense strand starting at position 2875 of SEQ ID NO: 1563603
ccaagaguugcuuaagacu

SEQ ID NO: 1822946 - RNA, 19 nt, Artificial Sequence
  Description of Artificial Sequence: Synthetic oligonucleotide
  Antisense strand to SEQ ID NO: 1822945
agucuuaagcaacucuugg

SEQ ID NO: 1822947 - RNA, 19 nt, Artificial Sequence
  Description of Artificial Sequence: Synthetic oligonucleotide
  Sense strand starting at position 2891 of SEQ ID NO: 1563603
acuuaaauuuccuagagug

SEQ ID NO: 1822948 - RNA, 19 nt, Artificial Sequence
  Description of Artificial Sequence: Synthetic oligonucleotide
  Antisense strand to SEQ ID NO: 1822947
cacucuaggaaauuuaagu

SEQ ID NO: 1822949 - RNA, 19 nt, Artificial Sequence
  Description of Artificial Sequence: Synthetic oligonucleotide
  Sense strand starting at position 2921 of SEQ ID NO: 1563603
aacuuuggguacucaggaa

SEQ ID NO: 1822950 - RNA, 19 nt, Artificial Sequence
  Description of Artificial Sequence: Synthetic oligonucleotide
  Antisense strand to SEQ ID NO: 1822949
uuccugaguacccaaaguu

SEQ ID NO: 1822951 - RNA, 19 nt, Artificial Sequence
  Description of Artificial Sequence: Synthetic oligonucleotide
  Sense strand starting at position 2976 of SEQ ID NO: 1563603
gucucucugagaugugguu

SEQ ID NO: 1822952 - RNA, 19 nt, Artificial Sequence
  Description of Artificial Sequence: Synthetic oligonucleotide
  Antisense strand to SEQ ID NO: 1822951
aaccacaucucagagagac

SEQ ID NO: 1822953 - RNA, 19 nt, Artificial Sequence
  Description of Artificial Sequence: Synthetic oligonucleotide
  Sense strand starting at position 3118 of SEQ ID NO: 1563603
caauguuccuggguucuga

SEQ ID NO: 1822954 - RNA, 19 nt, Artificial Sequence
  Description of Artificial Sequence: Synthetic oligonucleotide
  Antisense strand to SEQ ID NO: 1822953
ucagaacccaggaacauug

SEQ ID NO: 1822955 - RNA, 19 nt, Artificial Sequence
  Description of Artificial Sequence: Synthetic oligonucleotide
  Sense strand starting at position 3154 of SEQ ID NO: 1563603
gccugacaucuugacuaga

SEQ ID NO: 1822956 - RNA, 19 nt, Artificial Sequence
  Description of Artificial Sequence: Synthetic oligonucleotide
  Antisense strand to SEQ ID NO: 1822955
ucuagucaagaugucaggc

SEQ ID NO: 1822957 - RNA, 19 nt, Artificial Sequence
  Description of Artificial Sequence: Synthetic oligonucleotide
  Sense strand starting at position 3330 of SEQ ID NO: 1563603
gcaaauggguaaucaacaa

SEQ ID NO: 1822958 - RNA, 19 nt, Artificial Sequence
  Description of Artificial Sequence: Synthetic oligonucleotide
  Antisense strand to SEQ ID NO: 1822957
uuguugauuacccauuugc

SEQ ID NO: 1822959 - RNA, 19 nt, Artificial Sequence
  Description of Artificial Sequence: Synthetic oligonucleotide
  Sense strand starting at position 3434 of SEQ ID NO: 1563603
uuugguuaccuagaacauu

SEQ ID NO: 1822960 - RNA, 19 nt, Artificial Sequence
  Description of Artificial Sequence: Synthetic oligonucleotide
  Antisense strand to SEQ ID NO: 1822959
aauguucuagguaaccaaa

SEQ ID NO: 1822961 - RNA, 19 nt, Artificial Sequence
  Description of Artificial Sequence: Synthetic oligonucleotide
  Sense strand starting at position 3486 of SEQ ID NO: 1563603
cccucaguauuugaugaaa

SEQ ID NO: 1822962 - RNA, 19 nt, Artificial Sequence
  Description of Artificial Sequence: Synthetic oligonucleotide
  Antisense strand to SEQ ID NO: 1822961
uuucaucaaauacugaggg

SEQ ID NO: 1822963 - RNA, 19 nt, Artificial Sequence
  Description of Artificial Sequence: Synthetic oligonucleotide
  Sense strand starting at position 3488 of SEQ ID NO: 1563603
cucaguauuugaugaaaug

SEQ ID NO: 1822964 - RNA, 19 nt, Artificial Sequence
  Description of Artificial Sequence: Synthetic oligonucleotide
  Antisense strand to SEQ ID NO: 1822963
cauuucaucaaauacugag

SEQ ID NO: 1822965 - RNA, 19 nt, Artificial Sequence
  Description of Artificial Sequence: Synthetic oligonucleotide
  Sense strand starting at position 3713 of SEQ ID NO: 1563603
uggccauugcaguaagaaa

SEQ ID NO: 1822966 - RNA, 19 nt, Artificial Sequence
  Description of Artificial Sequence: Synthetic oligonucleotide
  Antisense strand to SEQ ID NO: 1822965
uuucuuacugcaauggcca

SEQ ID NO: 1822967 - RNA, 19 nt, Artificial Sequence
  Description of Artificial Sequence: Synthetic oligonucleotide
  Sense strand starting at position 3745 of SEQ ID NO: 1563603
acccauuugucaggaucac

SEQ ID NO: 1822968 - RNA, 19 nt, Artificial Sequence
  Description of Artificial Sequence: Synthetic oligonucleotide
  Antisense strand to SEQ ID NO: 1822967
gugauccugacaaaugggu

SEQ ID NO: 1822969 - RNA, 19 nt, Artificial Sequence
  Description of Artificial Sequence: Synthetic oligonucleotide
  Sense strand starting at position 3901 of SEQ ID NO: 1563603
ucgguuguaauguagggaa

SEQ ID NO: 1822970 - RNA, 19 nt, Artificial Sequence
  Description of Artificial Sequence: Synthetic oligonucleotide
  Antisense strand to SEQ ID NO: 1822969
uucccuacauuacaaccga

SEQ ID NO: 1822971 - RNA, 19 nt, Artificial Sequence
  Description of Artificial Sequence: Synthetic oligonucleotide
  Sense strand starting at position 3903 of SEQ ID NO: 1563603
gguuguaauguagggaaac

SEQ ID NO: 1822972 - RNA, 19 nt, Artificial Sequence
  Description of Artificial Sequence: Synthetic oligonucleotide
  Antisense strand to SEQ ID NO: 1822971
guuucccuacauuacaacc

SEQ ID NO: 1822973 - RNA, 19 nt, Artificial Sequence
  Description of Artificial Sequence: Synthetic oligonucleotide
  Sense strand starting at position 403 of SEQ ID NO: 1563605
caggaagguuacuaugaga

SEQ ID NO: 1822974 - RNA, 19 nt, Artificial Sequence
  Description of Artificial Sequence: Synthetic oligonucleotide
  Antisense strand to SEQ ID NO: 1822973
ucucauaguaaccuuccug

SEQ ID NO: 1822975 - RNA, 19 nt, Artificial Sequence
  Description of Artificial Sequence: Synthetic oligonucleotide
  Sense strand starting at position 445 of SEQ ID NO: 1563605
aggcuauuauacucagugu

SEQ ID NO: 1822976 - RNA, 19 nt, Artificial Sequence
  Description of Artificial Sequence: Synthetic oligonucleotide
  Antisense strand to SEQ ID NO: 1822975
acacugaguauaauagccu

SEQ ID NO: 1822977 - RNA, 19 nt, Artificial Sequence
  Description of Artificial Sequence: Synthetic oligonucleotide
  Sense strand starting at position 449 of SEQ ID NO: 1563605
uauuauacucaguguugga

SEQ ID NO: 1822978 - RNA, 19 nt, Artificial Sequence
  Description of Artificial Sequence: Synthetic oligonucleotide
  Antisense strand to SEQ ID NO: 1822977
uccaacacugaguauaaua

SEQ ID NO: 1822979 - RNA, 19 nt, Artificial Sequence
  Description of Artificial Sequence: Synthetic oligonucleotide
  Sense strand starting at position 452 of SEQ ID NO: 1563605
uauacucaguguuggaaua

SEQ ID NO: 1822980 - RNA, 19 nt, Artificial Sequence
  Description of Artificial Sequence: Synthetic oligonucleotide
  Antisense strand to SEQ ID NO: 1822979
uauuccaacacugaguaua

SEQ ID NO: 1822981 - RNA, 19 nt, Artificial Sequence
  Description of Artificial Sequence: Synthetic oligonucleotide
  Sense strand starting at position 454 of SEQ ID NO: 1563605
uacucaguguuggaauaca

SEQ ID NO: 1822982 - RNA, 19 nt, Artificial Sequence
  Description of Artificial Sequence: Synthetic oligonucleotide
  Antisense strand to SEQ ID NO: 1822981
uguauuccaacacugagua

SEQ ID NO: 1822983 - RNA, 19 nt, Artificial Sequence
  Description of Artificial Sequence: Synthetic oligonucleotide
  Sense strand starting at position 577 of SEQ ID NO: 1563605
augagacgccaucaucauu

SEQ ID NO: 1822984 - RNA, 19 nt, Artificial Sequence
  Description of Artificial Sequence: Synthetic oligonucleotide
  Antisense strand to SEQ ID NO: 1822983
aaugaugauggcgucucau

SEQ ID NO: 1822985 - RNA, 19 nt, Artificial Sequence
  Description of Artificial Sequence: Synthetic oligonucleotide
  Sense strand starting at position 849 of SEQ ID NO: 1563605
cgaucaccuccauggauaa

SEQ ID NO: 1822986 - RNA, 19 nt, Artificial Sequence
  Description of Artificial Sequence: Synthetic oligonucleotide
  Antisense strand to SEQ ID NO: 1822985
uuauccauggaggugaucg

SEQ ID NO: 1822987 - RNA, 19 nt, Artificial Sequence
  Description of Artificial Sequence: Synthetic oligonucleotide
  Sense strand starting at position 915 of SEQ ID NO: 1563605
cagaguuaagcauaugugu

SEQ ID NO: 1822988 - RNA, 19 nt, Artificial Sequence
  Description of Artificial Sequence: Synthetic oligonucleotide
  Antisense strand to SEQ ID NO: 1822987
acacauaugcuuaacucug

SEQ ID NO: 1822989 - RNA, 19 nt, Artificial Sequence
  Description of Artificial Sequence: Synthetic oligonucleotide
  Sense strand starting at position 917 of SEQ ID NO: 1563605
gaguuaagcauaugugugu

SEQ ID NO: 1822990 - RNA, 19 nt, Artificial Sequence
  Description of Artificial Sequence: Synthetic oligonucleotide
  Antisense strand to SEQ ID NO: 1822989
acacacauaugcuuaacuc

SEQ ID NO: 1822991 - RNA, 19 nt, Artificial Sequence
  Description of Artificial Sequence: Synthetic oligonucleotide
  Sense strand starting at position 923 of SEQ ID NO: 1563605
agcauauguguguaccuuu

SEQ ID NO: 1822992 - RNA, 19 nt, Artificial Sequence
  Description of Artificial Sequence: Synthetic oligonucleotide
  Antisense strand to SEQ ID NO: 1822991
aaagguacacacauaugcu

SEQ ID NO: 1822993 - RNA, 19 nt, Artificial Sequence
  Description of Artificial Sequence: Synthetic oligonucleotide
  Sense strand starting at position 990 of SEQ ID NO: 1563605
caucuuaaggcgugugaca

SEQ ID NO: 1822994 - RNA, 19 nt, Artificial Sequence
  Description of Artificial Sequence: Synthetic oligonucleotide
  Antisense strand to SEQ ID NO: 1822993
ugucacacgccuuaagaug

SEQ ID NO: 1822995 - RNA, 19 nt, Artificial Sequence
  Description of Artificial Sequence: Synthetic oligonucleotide
  Sense strand starting at position 992 of SEQ ID NO: 1563605
ucuuaaggcgugugacaaa

SEQ ID NO: 1822996 - RNA, 19 nt, Artificial Sequence
  Description of Artificial Sequence: Synthetic oligonucleotide
  Antisense strand to SEQ ID NO: 1822995
uuugucacacgccuuaaga

SEQ ID NO: 1822997 - RNA, 19 nt, Artificial Sequence
  Description of Artificial Sequence: Synthetic oligonucleotide
  Sense strand starting at position 1060 of SEQ ID NO: 1563605
uguguugcucuggcagagu

SEQ ID NO: 1822998 - RNA, 19 nt, Artificial Sequence
  Description of Artificial Sequence: Synthetic oligonucleotide
  Antisense strand to SEQ ID NO: 1822997
acucugccagagcaacaca

SEQ ID NO: 1822999 - RNA, 19 nt, Artificial Sequence
  Description of Artificial Sequence: Synthetic oligonucleotide
  Sense strand starting at position 1250 of SEQ ID NO: 1563605
gaaucauaauucucgugau

SEQ ID NO: 1823000 - RNA, 19 nt, Artificial Sequence
  Description of Artificial Sequence: Synthetic oligonucleotide
  Antisense strand to SEQ ID NO: 1822999
aucacgagaauuaugauuc

SEQ ID NO: 1823001 - RNA, 19 nt, Artificial Sequence
  Description of Artificial Sequence: Synthetic oligonucleotide
  Sense strand starting at position 1254 of SEQ ID NO: 1563605
cauaauucucgugauugcu

SEQ ID NO: 1823002 - RNA, 19 nt, Artificial Sequence
  Description of Artificial Sequence: Synthetic oligonucleotide
  Antisense strand to SEQ ID NO: 1823001
agcaaucacgagaauuaug

SEQ ID NO: 1823003 - RNA, 19 nt, Artificial Sequence
  Description of Artificial Sequence: Synthetic oligonucleotide
  Sense strand starting at position 1685 of SEQ ID NO: 1563605
ccucacagccuuugagaga

SEQ ID NO: 1823004 - RNA, 19 nt, Artificial Sequence
  Description of Artificial Sequence: Synthetic oligonucleotide
  Antisense strand to SEQ ID NO: 1823003
ucucucaaaggcugugagg

SEQ ID NO: 1823005 - RNA, 19 nt, Artificial Sequence
  Description of Artificial Sequence: Synthetic oligonucleotide
  Sense strand starting at position 2262 of SEQ ID NO: 1563605
cacggugacugccugagaa

SEQ ID NO: 1823006 - RNA, 19 nt, Artificial Sequence
  Description of Artificial Sequence: Synthetic oligonucleotide
  Antisense strand to SEQ ID NO: 1823005
uucucaggcagucaccgug

SEQ ID NO: 1823007 - RNA, 19 nt, Artificial Sequence
  Description of Artificial Sequence: Synthetic oligonucleotide
  Sense strand starting at position 2264 of SEQ ID NO: 1563605
cggugacugccugagaaga

SEQ ID NO: 1823008 - RNA, 19 nt, Artificial Sequence
  Description of Artificial Sequence: Synthetic oligonucleotide
  Antisense strand to SEQ ID NO: 1823007
ucuucucaggcagucaccg

SEQ ID NO: 1823009 - RNA, 19 nt, Artificial Sequence
  Description of Artificial Sequence: Synthetic oligonucleotide
  Sense strand starting at position 2266 of SEQ ID NO: 1563605
gugacugccugagaagaca

SEQ ID NO: 1823010 - RNA, 19 nt, Artificial Sequence
  Description of Artificial Sequence: Synthetic oligonucleotide
  Antisense strand to SEQ ID NO: 1823009
ugucuucucaggcagucac

SEQ ID NO: 1823011 - RNA, 19 nt, Artificial Sequence
  Description of Artificial Sequence: Synthetic oligonucleotide
  Sense strand starting at position 2335 of SEQ ID NO: 1563605
guuaaaugugaacaaguca

SEQ ID NO: 1823012 - RNA, 19 nt, Artificial Sequence
  Description of Artificial Sequence: Synthetic oligonucleotide
  Antisense strand to SEQ ID NO: 1823011
ugacuuguucacauuuaac

SEQ ID NO: 1823013 - RNA, 19 nt, Artificial Sequence
  Description of Artificial Sequence: Synthetic oligonucleotide
  Sense strand starting at position 2453 of SEQ ID NO: 1563605
aagugccaguauuagagaa

SEQ ID NO: 1823014 - RNA, 19 nt, Artificial Sequence
  Description of Artificial Sequence: Synthetic oligonucleotide
  Antisense strand to SEQ ID NO: 1823013
uucucuaauacuggcacuu

SEQ ID NO: 1823015 - RNA, 19 nt, Artificial Sequence
  Description of Artificial Sequence: Synthetic oligonucleotide
  Sense strand starting at position 2455 of SEQ ID NO: 1563605
gugccaguauuagagaaac

SEQ ID NO: 1823016 - RNA, 19 nt, Artificial Sequence
  Description of Artificial Sequence: Synthetic oligonucleotide
  Antisense strand to SEQ ID NO: 1823015
guuucucuaauacuggcac

SEQ ID NO: 1823017 - RNA, 19 nt, Artificial Sequence
  Description of Artificial Sequence: Synthetic oligonucleotide
  Sense strand starting at position 2512 of SEQ ID NO: 1563605
ucuugaaacucgcaagaca

SEQ ID NO: 1823018 - RNA, 19 nt, Artificial Sequence
  Description of Artificial Sequence: Synthetic oligonucleotide
  Antisense strand to SEQ ID NO: 1823017
ugucuugcgaguuucaaga

SEQ ID NO: 1823019 - RNA, 19 nt, Artificial Sequence
  Description of Artificial Sequence: Synthetic oligonucleotide
  Sense strand starting at position 2696 of SEQ ID NO: 1563605
cuggaaagucaaggauagu

SEQ ID NO: 1823020 - RNA, 19 nt, Artificial Sequence
  Description of Artificial Sequence: Synthetic oligonucleotide
  Antisense strand to SEQ ID NO: 1823019
acuauccuugacuuuccag

SEQ ID NO: 1823021 - RNA, 19 nt, Artificial Sequence
  Description of Artificial Sequence: Synthetic oligonucleotide
  Sense strand starting at position 2777 of SEQ ID NO: 1563605
agauaaguuuagucuuuac

SEQ ID NO: 1823022 - RNA, 19 nt, Artificial Sequence
  Description of Artificial Sequence: Synthetic oligonucleotide
  Antisense strand to SEQ ID NO: 1823021
guaaagacuaaacuuaucu

SEQ ID NO: 1823023 - RNA, 19 nt, Artificial Sequence
  Description of Artificial Sequence: Synthetic oligonucleotide
  Sense strand starting at position 2800 of SEQ ID NO: 1563605
agaagacccuuguauaaga

SEQ ID NO: 1823024 - RNA, 19 nt, Artificial Sequence
  Description of Artificial Sequence: Synthetic oligonucleotide
  Antisense strand to SEQ ID NO: 1823023
ucuuauacaagggucuucu

SEQ ID NO: 1823025 - RNA, 19 nt, Artificial Sequence
  Description of Artificial Sequence: Synthetic oligonucleotide
  Sense strand starting at position 2834 of SEQ ID NO: 1563605
aagacucaugccuguagua

SEQ ID NO: 1823026 - RNA, 19 nt, Artificial Sequence
  Description of Artificial Sequence: Synthetic oligonucleotide
  Antisense strand to SEQ ID NO: 1823025
uacuacaggcaugagucuu

SEQ ID NO: 1823027 - RNA, 19 nt, Artificial Sequence
  Description of Artificial Sequence: Synthetic oligonucleotide
  Sense strand starting at position 2836 of SEQ ID NO: 1563605
gacucaugccuguaguacu

SEQ ID NO: 1823028 - RNA, 19 nt, Artificial Sequence
  Description of Artificial Sequence: Synthetic oligonucleotide
  Antisense strand to SEQ ID NO: 1823027
aguacuacaggcaugaguc

SEQ ID NO: 1823029 - RNA, 19 nt, Artificial Sequence
  Description of Artificial Sequence: Synthetic oligonucleotide
  Sense strand starting at position 2981 of SEQ ID NO: 1563605
gguuacauguaccuauagu

SEQ ID NO: 1823030 - RNA, 19 nt, Artificial Sequence
  Description of Artificial Sequence: Synthetic oligonucleotide
  Antisense strand to SEQ ID NO: 1823029
acuauagguacauguaacc

SEQ ID NO: 1823031 - RNA, 19 nt, Artificial Sequence
  Description of Artificial Sequence: Synthetic oligonucleotide
  Sense strand starting at position 3103 of SEQ ID NO: 1563605
augagacccugucucgauu

SEQ ID NO: 1823032 - RNA, 19 nt, Artificial Sequence
  Description of Artificial Sequence: Synthetic oligonucleotide
  Antisense strand to SEQ ID NO: 1823031
aaucgagacagggucucau

SEQ ID NO: 1823033 - RNA, 19 nt, Artificial Sequence
  Description of Artificial Sequence: Synthetic oligonucleotide
  Sense strand starting at position 3143 of SEQ ID NO: 1563605
uguacaaaguuaucaaucu

SEQ ID NO: 1823034 - RNA, 19 nt, Artificial Sequence
  Description of Artificial Sequence: Synthetic oligonucleotide
  Antisense strand to SEQ ID NO: 1823033
agauugauaacuuuguaca

SEQ ID NO: 1823035 - RNA, 19 nt, Artificial Sequence
  Description of Artificial Sequence: Synthetic oligonucleotide
  Sense strand starting at position 3144 of SEQ ID NO: 1563605
guacaaaguuaucaaucua

SEQ ID NO: 1823036 - RNA, 19 nt, Artificial Sequence
  Description of Artificial Sequence: Synthetic oligonucleotide
  Antisense strand to SEQ ID NO: 1823035
uagauugauaacuuuguac

SEQ ID NO: 1823037 - RNA, 19 nt, Artificial Sequence
  Description of Artificial Sequence: Synthetic oligonucleotide
  Sense strand starting at position 3276 of SEQ ID NO: 1563605
uggaaugacuuacucugau

SEQ ID NO: 1823038 - RNA, 19 nt, Artificial Sequence
  Description of Artificial Sequence: Synthetic oligonucleotide
  Antisense strand to SEQ ID NO: 1823037
aucagaguaagucauucca

SEQ ID NO: 1823039 - RNA, 19 nt, Artificial Sequence
  Description of Artificial Sequence: Synthetic oligonucleotide
  Sense strand starting at position 3280 of SEQ ID NO: 1563605
augacuuacucugauaaag

SEQ ID NO: 1823040 - RNA, 19 nt, Artificial Sequence
  Description of Artificial Sequence: Synthetic oligonucleotide
  Antisense strand to SEQ ID NO: 1823039
cuuuaucagaguaagucau

SEQ ID NO: 1823041 - RNA, 19 nt, Artificial Sequence
  Description of Artificial Sequence: Synthetic oligonucleotide
  Sense strand starting at position 3321 of SEQ ID NO: 1563605
uaaauaggauggugaaaug

SEQ ID NO: 1823042 - RNA, 19 nt, Artificial Sequence
  Description of Artificial Sequence: Synthetic oligonucleotide
  Antisense strand to SEQ ID NO: 1823041
cauuucaccauccuauuua

SEQ ID NO: 1823043 - RNA, 19 nt, Artificial Sequence
  Description of Artificial Sequence: Synthetic oligonucleotide
  Sense strand starting at position 3399 of SEQ ID NO: 1563605
acaggugggucugcacaau

SEQ ID NO: 1823044 - RNA, 19 nt, Artificial Sequence
  Description of Artificial Sequence: Synthetic oligonucleotide
  Antisense strand to SEQ ID NO: 1823043
auugugcagacccaccugu

SEQ ID NO: 1823045 - RNA, 19 nt, Artificial Sequence
  Description of Artificial Sequence: Synthetic oligonucleotide
  Sense strand starting at position 3487 of SEQ ID NO: 1563605
ucaguaaucucagcacugu

SEQ ID NO: 1823046 - RNA, 19 nt, Artificial Sequence
  Description of Artificial Sequence: Synthetic oligonucleotide
  Antisense strand to SEQ ID NO: 1823045
acagugcugagauuacuga

SEQ ID NO: 1823047 - RNA, 19 nt, Artificial Sequence
  Description of Artificial Sequence: Synthetic oligonucleotide
  Sense strand starting at position 3646 of SEQ ID NO: 1563605
ugguaugauucuguauguu

SEQ ID NO: 1823048 - RNA, 19 nt, Artificial Sequence
  Description of Artificial Sequence: Synthetic oligonucleotide
  Antisense strand to SEQ ID NO: 1823047
aacauacagaaucauacca

SEQ ID NO: 1823049 - RNA, 19 nt, Artificial Sequence
  Description of Artificial Sequence: Synthetic oligonucleotide
  Sense strand starting at position 3652 of SEQ ID NO: 1563605
gauucuguauguugaagac

SEQ ID NO: 1823050 - RNA, 19 nt, Artificial Sequence
  Description of Artificial Sequence: Synthetic oligonucleotide
  Antisense strand to SEQ ID NO: 1823049
gucuucaacauacagaauc

SEQ ID NO: 1823051 - RNA, 19 nt, Artificial Sequence
  Description of Artificial Sequence: Synthetic oligonucleotide
  Sense strand starting at position 3943 of SEQ ID NO: 1563605
ggcagaaauugcuugcauc

SEQ ID NO: 1823052 - RNA, 19 nt, Artificial Sequence
  Description of Artificial Sequence: Synthetic oligonucleotide
  Antisense strand to SEQ ID NO: 1823051
gaugcaagcaauuucugcc

SEQ ID NO: 1823053 - RNA, 19 nt, Artificial Sequence
  Description of Artificial Sequence: Synthetic oligonucleotide
  Sense strand starting at position 3444 of SEQ ID NO: 1563606
acgggugagucugcacaau

SEQ ID NO: 1823054 - RNA, 19 nt, Artificial Sequence
  Description of Artificial Sequence: Synthetic oligonucleotide
  Antisense strand to SEQ ID NO: 1823053
auugugcagacucacccgu

SEQ ID NO: 1823055 - RNA, 19 nt, Artificial Sequence
  Description of Artificial Sequence: Synthetic oligonucleotide
  Sense strand starting at position 3450 of SEQ ID NO: 1563606
gagucugcacaaugccaua

SEQ ID NO: 1823056 - RNA, 19 nt, Artificial Sequence
  Description of Artificial Sequence: Synthetic oligonucleotide
  Antisense strand to SEQ ID NO: 1823055
uauggcauugugcagacuc

SEQ ID NO: 1823057 - RNA, 19 nt, Artificial Sequence
  Description of Artificial Sequence: Synthetic oligonucleotide
  Sense strand starting at position 3409 of SEQ ID NO: 1563609
acgggugagucugcacaau

SEQ ID NO: 1823058 - RNA, 19 nt, Artificial Sequence
  Description of Artificial Sequence: Synthetic oligonucleotide
  Antisense strand to SEQ ID NO: 1823057
auugugcagacucacccgu

SEQ ID NO: 1823059 - RNA, 19 nt, Artificial Sequence
  Description of Artificial Sequence: Synthetic oligonucleotide
  Sense strand starting at position 3415 of SEQ ID NO: 1563609
gagucugcacaaugccaua

SEQ ID NO: 1823060 - RNA, 19 nt, Artificial Sequence
  Description of Artificial Sequence: Synthetic oligonucleotide
  Antisense strand to SEQ ID NO: 1823059
uauggcauugugcagacuc

SEQ ID NO: 1823061 - RNA, 19 nt, Artificial Sequence
  Description of Artificial Sequence: Synthetic oligonucleotide
  Sense strand starting at position 478 of SEQ ID NO: 1563615
gacuuuggaggcuauugua

SEQ ID NO: 1823062 - RNA, 19 nt, Artificial Sequence
  Description of Artificial Sequence: Synthetic oligonucleotide
  Antisense strand to SEQ ID NO: 1823061
uacaauagccuccaaaguc

SEQ ID NO: 1823063 - RNA, 19 nt, Artificial Sequence
  Description of Artificial Sequence: Synthetic oligonucleotide
  Sense strand starting at position 490 of SEQ ID NO: 1563615
uauuguacucuguguugga

SEQ ID NO: 1823064 - RNA, 19 nt, Artificial Sequence
  Description of Artificial Sequence: Synthetic oligonucleotide
  Antisense strand to SEQ ID NO: 1823063
uccaacacagaguacaaua

SEQ ID NO: 1823065 - RNA, 19 nt, Artificial Sequence
  Description of Artificial Sequence: Synthetic oligonucleotide
  Sense strand starting at position 491 of SEQ ID NO: 1563615
auuguacucuguguuggaa

SEQ ID NO: 1823066 - RNA, 19 nt, Artificial Sequence
  Description of Artificial Sequence: Synthetic oligonucleotide
  Antisense strand to SEQ ID NO: 1823065
uuccaacacagaguacaau

SEQ ID NO: 1823067 - RNA, 19 nt, Artificial Sequence
  Description of Artificial Sequence: Synthetic oligonucleotide
  Sense strand starting at position 493 of SEQ ID NO: 1563615
uguacucuguguuggaaua

SEQ ID NO: 1823068 - RNA, 19 nt, Artificial Sequence
  Description of Artificial Sequence: Synthetic oligonucleotide
  Antisense strand to SEQ ID NO: 1823067
uauuccaacacagaguaca

SEQ ID NO: 1823069 - RNA, 19 nt, Artificial Sequence
  Description of Artificial Sequence: Synthetic oligonucleotide
  Sense strand starting at position 1038 of SEQ ID NO: 1563615
ucuuaaggcauguggcaaa

SEQ ID NO: 1823070 - RNA, 19 nt, Artificial Sequence
  Description of Artificial Sequence: Synthetic oligonucleotide
  Antisense strand to SEQ ID NO: 1823069
uuugccacaugccuuaaga

SEQ ID NO: 1823071 - RNA, 19 nt, Artificial Sequence
  Description of Artificial Sequence: Synthetic oligonucleotide
  Sense strand starting at position 2689 of SEQ ID NO: 1563615
cugguaagucaaggauagu

SEQ ID NO: 1823072 - RNA, 19 nt, Artificial Sequence
  Description of Artificial Sequence: Synthetic oligonucleotide
  Antisense strand to SEQ ID NO: 1823071
acuauccuugacuuaccag

SEQ ID NO: 1823073 - RNA, 19 nt, Artificial Sequence
  Description of Artificial Sequence: Synthetic oligonucleotide
  Sense strand starting at position 2690 of SEQ ID NO: 1563615
ugguaagucaaggauaguu

SEQ ID NO: 1823074 - RNA, 19 nt, Artificial Sequence
  Description of Artificial Sequence: Synthetic oligonucleotide
  Antisense strand to SEQ ID NO: 1823073
aacuauccuugacuuacca

SEQ ID NO: 1823075 - RNA, 19 nt, Artificial Sequence
  Description of Artificial Sequence: Synthetic oligonucleotide
  Sense strand starting at position 3275 of SEQ ID NO: 1563615
uggaaugacucacucugau

SEQ ID NO: 1823076 - RNA, 19 nt, Artificial Sequence
  Description of Artificial Sequence: Synthetic oligonucleotide
  Antisense strand to SEQ ID NO: 1823075
aucagagugagucauucca

SEQ ID NO: 1823077 - RNA, 19 nt, Artificial Sequence
  Description of Artificial Sequence: Synthetic oligonucleotide
  Sense strand starting at position 3398 of SEQ ID NO: 1563616
acgggugagucugcacaau

SEQ ID NO: 1823078 - RNA, 19 nt, Artificial Sequence
  Description of Artificial Sequence: Synthetic oligonucleotide
  Antisense strand to SEQ ID NO: 1823077
auugugcagacucacccgu

SEQ ID NO: 1823079 - RNA, 19 nt, Artificial Sequence
  Description of Artificial Sequence: Synthetic oligonucleotide
  Sense strand starting at position 3404 of SEQ ID NO: 1563616
gagucugcacaaugccaua

SEQ ID NO: 1823080 - RNA, 19 nt, Artificial Sequence
  Description of Artificial Sequence: Synthetic oligonucleotide
  Antisense strand to SEQ ID NO: 1823079
uauggcauugugcagacuc

SEQ ID NO: 1823081 - RNA, 19 nt, Artificial Sequence
  Description of Artificial Sequence: Synthetic oligonucleotide
  Sense strand starting at position 3409 of SEQ ID NO: 1563622
acgggugagucugcacaau

SEQ ID NO: 1823082 - RNA, 19 nt, Artificial Sequence
  Description of Artificial Sequence: Synthetic oligonucleotide
  Antisense strand to SEQ ID NO: 1823081
auugugcagacucacccgu

SEQ ID NO: 1823083 - RNA, 19 nt, Artificial Sequence
  Description of Artificial Sequence: Synthetic oligonucleotide
  Sense strand starting at position 3415 of SEQ ID NO: 1563622
gagucugcacaaugccaua

SEQ ID NO: 1823084 - RNA, 19 nt, Artificial Sequence
  Description of Artificial Sequence: Synthetic oligonucleotide
  Antisense strand to SEQ ID NO: 1823083
uauggcauugugcagacuc

SEQ ID NO: 1823085 - RNA, 19 nt, Artificial Sequence
  Description of Artificial Sequence: Synthetic oligonucleotide
  Sense strand starting at position 2742 of SEQ ID NO: 1563628
ggaacagauuaacuuuagu

SEQ ID NO: 1823086 - RNA, 19 nt, Artificial Sequence
  Description of Artificial Sequence: Synthetic oligonucleotide
  Antisense strand to SEQ ID NO: 1823085
acuaaaguuaaucuguucc

SEQ ID NO: 1823087 - RNA, 19 nt, Artificial Sequence
  Description of Artificial Sequence: Synthetic oligonucleotide
  Sense strand starting at position 3267 of SEQ ID NO: 1563628
cuagauaaagucugucuac

SEQ ID NO: 1823088 - RNA, 19 nt, Artificial Sequence
  Description of Artificial Sequence: Synthetic oligonucleotide
  Antisense strand to SEQ ID NO: 1823087
guagacagacuuuaucuag

SEQ ID NO: 1823089 - RNA, 19 nt, Artificial Sequence
  Description of Artificial Sequence: Synthetic oligonucleotide
  Sense strand starting at position 3375 of SEQ ID NO: 1563629
acgggugagucugcacaau

SEQ ID NO: 1823090 - RNA, 19 nt, Artificial Sequence
  Description of Artificial Sequence: Synthetic oligonucleotide
  Antisense strand to SEQ ID NO: 1823089
auugugcagacucacccgu

SEQ ID NO: 1823091 - RNA, 19 nt, Artificial Sequence
  Description of Artificial Sequence: Synthetic oligonucleotide
  Sense strand starting at position 3381 of SEQ ID NO: 1563629
gagucugcacaaugccaua

SEQ ID NO: 1823092 - RNA, 19 nt, Artificial Sequence
  Description of Artificial Sequence: Synthetic oligonucleotide
  Antisense strand to SEQ ID NO: 1823091
uauggcauugugcagacuc

SEQ ID NO: 1823093 - RNA, 19 nt, Artificial Sequence
  Description of Artificial Sequence: Synthetic oligonucleotide
  Sense strand starting at position 2778 of SEQ ID NO: 1563634
ggaacagauuaacuuuagu

SEQ ID NO: 1823094 - RNA, 19 nt, Artificial Sequence
  Description of Artificial Sequence: Synthetic oligonucleotide
  Antisense strand to SEQ ID NO: 1823093
acuaaaguuaaucuguucc

SEQ ID NO: 1823095 - RNA, 19 nt, Artificial Sequence
  Description of Artificial Sequence: Synthetic oligonucleotide
  Sense strand starting at position 3303 of SEQ ID NO: 1563634
cuagauaaagucugucuac

SEQ ID NO: 1823096 - RNA, 19 nt, Artificial Sequence
  Description of Artificial Sequence: Synthetic oligonucleotide
  Antisense strand to SEQ ID NO: 1823095
guagacagacuuuaucuag

SEQ ID NO: 1823097 - RNA, 19 nt, Artificial Sequence
  Description of Artificial Sequence: Synthetic oligonucleotide
  Sense strand starting at position 3409 of SEQ ID NO: 1563635
acgggugagucugcacaau

SEQ ID NO: 1823098 - RNA, 19 nt, Artificial Sequence
  Description of Artificial Sequence: Synthetic oligonucleotide
  Antisense strand to SEQ ID NO: 1823097
auugugcagacucacccgu

SEQ ID NO: 1823099 - RNA, 19 nt, Artificial Sequence
  Description of Artificial Sequence: Synthetic oligonucleotide
  Sense strand starting at position 3415 of SEQ ID NO: 1563635
gagucugcacaaugccaua

SEQ ID NO: 1823100 - RNA, 19 nt, Artificial Sequence
  Description of Artificial Sequence: Synthetic oligonucleotide
  Antisense strand to SEQ ID NO: 1823099
uauggcauugugcagacuc

SEQ ID NO: 1823101 - RNA, 19 nt, Artificial Sequence
  Description of Artificial Sequence: Synthetic oligonucleotide
  Sense strand starting at position 3409 of SEQ ID NO: 1563640
acgggugagucugcacaau

SEQ ID NO: 1823102 - RNA, 19 nt, Artificial Sequence
  Description of Artificial Sequence: Synthetic oligonucleotide
  Antisense strand to SEQ ID NO: 1823101
auugugcagacucacccgu

SEQ ID NO: 1823103 - RNA, 19 nt, Artificial Sequence
  Description of Artificial Sequence: Synthetic oligonucleotide
  Sense strand starting at position 3415 of SEQ ID NO: 1563640
gagucugcacaaugccaua

SEQ ID NO: 1823104 - RNA, 19 nt, Artificial Sequence
  Description of Artificial Sequence: Synthetic oligonucleotide
  Antisense strand to SEQ ID NO: 1823103
uauggcauugugcagacuc

SEQ ID NO: 1823105 - RNA, 19 nt, Artificial Sequence
  Description of Artificial Sequence: Synthetic oligonucleotide
  Sense strand starting at position 2838 of SEQ ID NO: 1563644
ggaacagauuaacuuuagu

SEQ ID NO: 1823106 - RNA, 19 nt, Artificial Sequence
  Description of Artificial Sequence: Synthetic oligonucleotide
  Antisense strand to SEQ ID NO: 1823105
acuaaaguuaaucuguucc

SEQ ID NO: 1823107 - RNA, 19 nt, Artificial Sequence
  Description of Artificial Sequence: Synthetic oligonucleotide
  Sense strand starting at position 3363 of SEQ ID NO: 1563644
cuagauaaagucugucuac

SEQ ID NO: 1823108 - RNA, 19 nt, Artificial Sequence
  Description of Artificial Sequence: Synthetic oligonucleotide
  Antisense strand to SEQ ID NO: 1823107
guagacagacuuuaucuag

SEQ ID NO: 1823109 - RNA, 19 nt, Artificial Sequence
  Description of Artificial Sequence: Synthetic oligonucleotide
  Sense strand starting at position 1042 of SEQ ID NO: 1563647
ucuuaaggcauguggcaaa

SEQ ID NO: 1823110 - RNA, 19 nt, Artificial Sequence
  Description of Artificial Sequence: Synthetic oligonucleotide
  Antisense strand to SEQ ID NO: 1823109
uuugccacaugccuuaaga

SEQ ID NO: 1823111 - RNA, 19 nt, Artificial Sequence
  Description of Artificial Sequence: Synthetic oligonucleotide
  Sense strand starting at position 2693 of SEQ ID NO: 1563647
cugguaagucaaggauagu

SEQ ID NO: 1823112 - RNA, 19 nt, Artificial Sequence
  Description of Artificial Sequence: Synthetic oligonucleotide
  Antisense strand to SEQ ID NO: 1823111
acuauccuugacuuaccag

SEQ ID NO: 1823113 - RNA, 19 nt, Artificial Sequence
  Description of Artificial Sequence: Synthetic oligonucleotide
  Sense strand starting at position 2694 of SEQ ID NO: 1563647
ugguaagucaaggauaguu

SEQ ID NO: 1823114 - RNA, 19 nt, Artificial Sequence
  Description of Artificial Sequence: Synthetic oligonucleotide
  Antisense strand to SEQ ID NO: 1823113
aacuauccuugacuuacca

SEQ ID NO: 1823115 - RNA, 19 nt, Artificial Sequence
  Description of Artificial Sequence: Synthetic oligonucleotide
  Sense strand starting at position 2810 of SEQ ID NO: 1563654
ggaacagauuaacuuuagu

SEQ ID NO: 1823116 - RNA, 19 nt, Artificial Sequence
  Description of Artificial Sequence: Synthetic oligonucleotide
  Antisense strand to SEQ ID NO: 1823115
acuaaaguuaaucuguucc

SEQ ID NO: 1823117 - RNA, 19 nt, Artificial Sequence
  Description of Artificial Sequence: Synthetic oligonucleotide
  Sense strand starting at position 3335 of SEQ ID NO: 1563654
cuagauaaagucugucuac

SEQ ID NO: 1823118 - RNA, 19 nt, Artificial Sequence
  Description of Artificial Sequence: Synthetic oligonucleotide
  Antisense strand to SEQ ID NO: 1823117
guagacagacuuuaucuag

SEQ ID NO: 1823119 - RNA, 19 nt, Artificial Sequence
  Description of Artificial Sequence: Synthetic oligonucleotide
  Sense strand starting at position 2818 of SEQ ID NO: 1563657
ggaacagauuaacuuuagu

SEQ ID NO: 1823120 - RNA, 19 nt, Artificial Sequence
  Description of Artificial Sequence: Synthetic oligonucleotide
  Antisense strand to SEQ ID NO: 1823119
acuaaaguuaaucuguucc

SEQ ID NO: 1823121 - RNA, 19 nt, Artificial Sequence
  Description of Artificial Sequence: Synthetic oligonucleotide
  Sense strand starting at position 3343 of SEQ ID NO: 1563657
cuagauaaagucugucuac

SEQ ID NO: 1823122 - RNA, 19 nt, Artificial Sequence
  Description of Artificial Sequence: Synthetic oligonucleotide
  Antisense strand to SEQ ID NO: 1823121
guagacagacuuuaucuag

SEQ ID NO: 1823123 - RNA, 19 nt, Artificial Sequence
  Description of Artificial Sequence: Synthetic oligonucleotide
  Sense strand starting at position 2811 of SEQ ID NO: 1563660
ggaacagauuaacuuuagu

SEQ ID NO: 1823124 - RNA, 19 nt, Artificial Sequence
  Description of Artificial Sequence: Synthetic oligonucleotide
  Antisense strand to SEQ ID NO: 1823123
acuaaaguuaaucuguucc

SEQ ID NO: 1823125 - RNA, 19 nt, Artificial Sequence
  Description of Artificial Sequence: Synthetic oligonucleotide
  Sense strand starting at position 3336 of SEQ ID NO: 1563660
cuagauaaagucugucuac

SEQ ID NO: 1823126 - RNA, 19 nt, Artificial Sequence
  Description of Artificial Sequence: Synthetic oligonucleotide
  Antisense strand to SEQ ID NO: 1823125
guagacagacuuuaucuag

SEQ ID NO: 1823127 - RNA, 19 nt, Artificial Sequence
  Description of Artificial Sequence: Synthetic oligonucleotide
  Sense strand starting at position 2839 of SEQ ID NO: 1563663
ggaacagauuaacuuuagu

SEQ ID NO: 1823128 - RNA, 19 nt, Artificial Sequence
  Description of Artificial Sequence: Synthetic oligonucleotide
  Antisense strand to SEQ ID NO: 1823127
acuaaaguuaaucuguucc

SEQ ID NO: 1823129 - RNA, 19 nt, Artificial Sequence
  Description of Artificial Sequence: Synthetic oligonucleotide
  Sense strand starting at position 3364 of SEQ ID NO: 1563663
cuagauaaagucugucuac

SEQ ID NO: 1823130 - RNA, 19 nt, Artificial Sequence
  Description of Artificial Sequence: Synthetic oligonucleotide
  Antisense strand to SEQ ID NO: 1823129
guagacagacuuuaucuag

SEQ ID NO: 1823131 - RNA, 19 nt, Artificial Sequence
  Description of Artificial Sequence: Synthetic oligonucleotide
  Sense strand starting at position 160 of SEQ ID NO: 1563667
cguguaucucugcauuucu

SEQ ID NO: 1823132 - RNA, 19 nt, Artificial Sequence
  Description of Artificial Sequence: Synthetic oligonucleotide
  Antisense strand to SEQ ID NO: 1823131
agaaaugcagagauacacg

SEQ ID NO: 1823133 - RNA, 19 nt, Artificial Sequence
  Description of Artificial Sequence: Synthetic oligonucleotide
  Sense strand starting at position 542 of SEQ ID NO: 1563667
aguuaucacucuccggaca

SEQ ID NO: 1823134 - RNA, 19 nt, Artificial Sequence
  Description of Artificial Sequence: Synthetic oligonucleotide
  Antisense strand to SEQ ID NO: 1823133
uguccggagagugauaacu

SEQ ID NO: 1823135 - RNA, 19 nt, Artificial Sequence
  Description of Artificial Sequence: Synthetic oligonucleotide
  Sense strand starting at position 562 of SEQ ID NO: 1563667
agauaaaguuuaucucgag

SEQ ID NO: 1823136 - RNA, 19 nt, Artificial Sequence
  Description of Artificial Sequence: Synthetic oligonucleotide
  Antisense strand to SEQ ID NO: 1823135
cucgagauaaacuuuaucu

SEQ ID NO: 1823137 - RNA, 19 nt, Artificial Sequence
  Description of Artificial Sequence: Synthetic oligonucleotide
  Sense strand starting at position 591 of SEQ ID NO: 1563667
augaaagcuccuuaucagc

SEQ ID NO: 1823138 - RNA, 19 nt, Artificial Sequence
  Description of Artificial Sequence: Synthetic oligonucleotide
  Antisense strand to SEQ ID NO: 1823137
gcugauaaggagcuuucau

SEQ ID NO: 1823139 - RNA, 19 nt, Artificial Sequence
  Description of Artificial Sequence: Synthetic oligonucleotide
  Sense strand starting at position 824 of SEQ ID NO: 1563667
gguuaagucagagagguuu

SEQ ID NO: 1823140 - RNA, 19 nt, Artificial Sequence
  Description of Artificial Sequence: Synthetic oligonucleotide
  Antisense strand to SEQ ID NO: 1823139
aaaccucucugacuuaacc

SEQ ID NO: 1823141 - RNA, 19 nt, Artificial Sequence
  Description of Artificial Sequence: Synthetic oligonucleotide
  Sense strand starting at position 933 of SEQ ID NO: 1563667
ucaggaauagguugugaaa

SEQ ID NO: 1823142 - RNA, 19 nt, Artificial Sequence
  Description of Artificial Sequence: Synthetic oligonucleotide
  Antisense strand to SEQ ID NO: 1823141
uuucacaaccuauuccuga

SEQ ID NO: 1823143 - RNA, 19 nt, Artificial Sequence
  Description of Artificial Sequence: Synthetic oligonucleotide
  Sense strand starting at position 1002 of SEQ ID NO: 1563667
ugagaaguagugugggagu

SEQ ID NO: 1823144 - RNA, 19 nt, Artificial Sequence
  Description of Artificial Sequence: Synthetic oligonucleotide
  Antisense strand to SEQ ID NO: 1823143
acucccacacuacuucuca

SEQ ID NO: 1823145 - RNA, 19 nt, Artificial Sequence
  Description of Artificial Sequence: Synthetic oligonucleotide
  Sense strand starting at position 1004 of SEQ ID NO: 1563667
agaaguagugugggaguca

SEQ ID NO: 1823146 - RNA, 19 nt, Artificial Sequence
  Description of Artificial Sequence: Synthetic oligonucleotide
  Antisense strand to SEQ ID NO: 1823145
ugacucccacacuacuucu

SEQ ID NO: 1823147 - RNA, 19 nt, Artificial Sequence
  Description of Artificial Sequence: Synthetic oligonucleotide
  Sense strand starting at position 1020 of SEQ ID NO: 1563667
ucagauucugagggucaua

SEQ ID NO: 1823148 - RNA, 19 nt, Artificial Sequence
  Description of Artificial Sequence: Synthetic oligonucleotide
  Antisense strand to SEQ ID NO: 1823147
uaugacccucagaaucuga

SEQ ID NO: 1823149 - RNA, 19 nt, Artificial Sequence
  Description of Artificial Sequence: Synthetic oligonucleotide
  Sense strand starting at position 1096 of SEQ ID NO: 1563667
agaucuguuugggcagaca

SEQ ID NO: 1823150 - RNA, 19 nt, Artificial Sequence
  Description of Artificial Sequence: Synthetic oligonucleotide
  Antisense strand to SEQ ID NO: 1823149
ugucugcccaaacagaucu

SEQ ID NO: 1823151 - RNA, 19 nt, Artificial Sequence
  Description of Artificial Sequence: Synthetic oligonucleotide
  Sense strand starting at position 1099 of SEQ ID NO: 1563667
ucuguuugggcagacagaa

SEQ ID NO: 1823152 - RNA, 19 nt, Artificial Sequence
  Description of Artificial Sequence: Synthetic oligonucleotide
  Antisense strand to SEQ ID NO: 1823151
uucugucugcccaaacaga

SEQ ID NO: 1823153 - RNA, 19 nt, Artificial Sequence
  Description of Artificial Sequence: Synthetic oligonucleotide
  Sense strand starting at position 1111 of SEQ ID NO: 1563667
gacagaauguggcuaguaa

SEQ ID NO: 1823154 - RNA, 19 nt, Artificial Sequence
  Description of Artificial Sequence: Synthetic oligonucleotide
  Antisense strand to SEQ ID NO: 1823153
uuacuagccacauucuguc

SEQ ID NO: 1823155 - RNA, 19 nt, Artificial Sequence
  Description of Artificial Sequence: Synthetic oligonucleotide
  Sense strand starting at position 1112 of SEQ ID NO: 1563667
acagaauguggcuaguaaa

SEQ ID NO: 1823156 - RNA, 19 nt, Artificial Sequence
  Description of Artificial Sequence: Synthetic oligonucleotide
  Antisense strand to SEQ ID NO: 1823155
uuuacuagccacauucugu

SEQ ID NO: 1823157 - RNA, 19 nt, Artificial Sequence
  Description of Artificial Sequence: Synthetic oligonucleotide
  Sense strand starting at position 1148 of SEQ ID NO: 1563667
aagauagaauuggaguaga

SEQ ID NO: 1823158 - RNA, 19 nt, Artificial Sequence
  Description of Artificial Sequence: Synthetic oligonucleotide
  Antisense strand to SEQ ID NO: 1823157
ucuacuccaauucuaucuu

SEQ ID NO: 1823159 - RNA, 19 nt, Artificial Sequence
  Description of Artificial Sequence: Synthetic oligonucleotide
  Sense strand starting at position 1195 of SEQ ID NO: 1563667
gagacaaugagauguguuu

SEQ ID NO: 1823160 - RNA, 19 nt, Artificial Sequence
  Description of Artificial Sequence: Synthetic oligonucleotide
  Antisense strand to SEQ ID NO: 1823159
aaacacaucucauugucuc

SEQ ID NO: 1823161 - RNA, 19 nt, Artificial Sequence
  Description of Artificial Sequence: Synthetic oligonucleotide
  Sense strand starting at position 1239 of SEQ ID NO: 1563667
ggcagacaugaggguucau

SEQ ID NO: 1823162 - RNA, 19 nt, Artificial Sequence
  Description of Artificial Sequence: Synthetic oligonucleotide
  Antisense strand to SEQ ID NO: 1823161
augaacccucaugucugcc

SEQ ID NO: 1823163 - RNA, 19 nt, Artificial Sequence
  Description of Artificial Sequence: Synthetic oligonucleotide
  Sense strand starting at position 1250 of SEQ ID NO: 1563667
ggguucaugcggcagaaca

SEQ ID NO: 1823164 - RNA, 19 nt, Artificial Sequence
  Description of Artificial Sequence: Synthetic oligonucleotide
  Antisense strand to SEQ ID NO: 1823163
uguucugccgcaugaaccc

SEQ ID NO: 1823165 - RNA, 19 nt, Artificial Sequence
  Description of Artificial Sequence: Synthetic oligonucleotide
  Sense strand starting at position 1339 of SEQ ID NO: 1563667
gauaaaugguuugcggaga

SEQ ID NO: 1823166 - RNA, 19 nt, Artificial Sequence
  Description of Artificial Sequence: Synthetic oligonucleotide
  Antisense strand to SEQ ID NO: 1823165
ucuccgcaaaccauuuauc

SEQ ID NO: 1823167 - RNA, 19 nt, Artificial Sequence
  Description of Artificial Sequence: Synthetic oligonucleotide
  Sense strand starting at position 1344 of SEQ ID NO: 1563667
augguuugcggagaucaga

SEQ ID NO: 1823168 - RNA, 19 nt, Artificial Sequence
  Description of Artificial Sequence: Synthetic oligonucleotide
  Antisense strand to SEQ ID NO: 1823167
ucugaucuccgcaaaccau

SEQ ID NO: 1823169 - RNA, 19 nt, Artificial Sequence
  Description of Artificial Sequence: Synthetic oligonucleotide
  Sense strand starting at position 1364 of SEQ ID NO: 1563667
agaagucauugggaacaaa

SEQ ID NO: 1823170 - RNA, 19 nt, Artificial Sequence
  Description of Artificial Sequence: Synthetic oligonucleotide
  Antisense strand to SEQ ID NO: 1823169
uuuguucccaaugacuucu

SEQ ID NO: 1823171 - RNA, 19 nt, Artificial Sequence
  Description of Artificial Sequence: Synthetic oligonucleotide
  Sense strand starting at position 1397 of SEQ ID NO: 1563667
ggcagagauggugguaaga

SEQ ID NO: 1823172 - RNA, 19 nt, Artificial Sequence
  Description of Artificial Sequence: Synthetic oligonucleotide
  Antisense strand to SEQ ID NO: 1823171
ucuuaccaccaucucugcc

SEQ ID NO: 1823173 - RNA, 19 nt, Artificial Sequence
  Description of Artificial Sequence: Synthetic oligonucleotide
  Sense strand starting at position 1425 of SEQ ID NO: 1563667
uaggguuuggcagaucaga

SEQ ID NO: 1823174 - RNA, 19 nt, Artificial Sequence
  Description of Artificial Sequence: Synthetic oligonucleotide
  Antisense strand to SEQ ID NO: 1823173
ucugaucugccaaacccua

SEQ ID NO: 1823175 - RNA, 19 nt, Artificial Sequence
  Description of Artificial Sequence: Synthetic oligonucleotide
  Sense strand starting at position 1483 of SEQ ID NO: 1563667
ggcguuguagagcagauaa

SEQ ID NO: 1823176 - RNA, 19 nt, Artificial Sequence
  Description of Artificial Sequence: Synthetic oligonucleotide
  Antisense strand to SEQ ID NO: 1823175
uuaucugcucuacaacgcc

SEQ ID NO: 1823177 - RNA, 19 nt, Artificial Sequence
  Description of Artificial Sequence: Synthetic oligonucleotide
  Sense strand starting at position 1556 of SEQ ID NO: 1563667
aaguuugggugaguggaaa

SEQ ID NO: 1823178 - RNA, 19 nt, Artificial Sequence
  Description of Artificial Sequence: Synthetic oligonucleotide
  Antisense strand to SEQ ID NO: 1823177
uuuccacucacccaaacuu

SEQ ID NO: 1823179 - RNA, 19 nt, Artificial Sequence
  Description of Artificial Sequence: Synthetic oligonucleotide
  Sense strand starting at position 1622 of SEQ ID NO: 1563667
gggagacagaguuaguguu

SEQ ID NO: 1823180 - RNA, 19 nt, Artificial Sequence
  Description of Artificial Sequence: Synthetic oligonucleotide
  Antisense strand to SEQ ID NO: 1823179
aacacuaacucugucuccc

SEQ ID NO: 1823181 - RNA, 19 nt, Artificial Sequence
  Description of Artificial Sequence: Synthetic oligonucleotide
  Sense strand starting at position 1693 of SEQ ID NO: 1563667
uauagauaucuuggacgga

SEQ ID NO: 1823182 - RNA, 19 nt, Artificial Sequence
  Description of Artificial Sequence: Synthetic oligonucleotide
  Antisense strand to SEQ ID NO: 1823181
uccguccaagauaucuaua

SEQ ID NO: 1823183 - RNA, 19 nt, Artificial Sequence
  Description of Artificial Sequence: Synthetic oligonucleotide
  Sense strand starting at position 2227 of SEQ ID NO: 1563667
gacuguaguguccagacaa

SEQ ID NO: 1823184 - RNA, 19 nt, Artificial Sequence
  Description of Artificial Sequence: Synthetic oligonucleotide
  Antisense strand to SEQ ID NO: 1823183
uugucuggacacuacaguc

SEQ ID NO: 1823185 - RNA, 19 nt, Artificial Sequence
  Description of Artificial Sequence: Synthetic oligonucleotide
  Sense strand starting at position 2440 of SEQ ID NO: 1563667
cagagagguucugcuggau

SEQ ID NO: 1823186 - RNA, 19 nt, Artificial Sequence
  Description of Artificial Sequence: Synthetic oligonucleotide
  Antisense strand to SEQ ID NO: 1823185
auccagcagaaccucucug

SEQ ID NO: 1823187 - RNA, 19 nt, Artificial Sequence
  Description of Artificial Sequence: Synthetic oligonucleotide
  Sense strand starting at position 2595 of SEQ ID NO: 1563667
agauaagucuuaucagaug

SEQ ID NO: 1823188 - RNA, 19 nt, Artificial Sequence
  Description of Artificial Sequence: Synthetic oligonucleotide
  Antisense strand to SEQ ID NO: 1823187
caucugauaagacuuaucu

SEQ ID NO: 1823189 - RNA, 19 nt, Artificial Sequence
  Description of Artificial Sequence: Synthetic oligonucleotide
  Sense strand starting at position 2753 of SEQ ID NO: 1563667
ggaugauuccucgaggagu

SEQ ID NO: 1823190 - RNA, 19 nt, Artificial Sequence
  Description of Artificial Sequence: Synthetic oligonucleotide
  Antisense strand to SEQ ID NO: 1823189
acuccucgaggaaucaucc

SEQ ID NO: 1823191 - RNA, 19 nt, Artificial Sequence
  Description of Artificial Sequence: Synthetic oligonucleotide
  Sense strand starting at position 2759 of SEQ ID NO: 1563667
uuccucgaggagugguaua

SEQ ID NO: 1823192 - RNA, 19 nt, Artificial Sequence
  Description of Artificial Sequence: Synthetic oligonucleotide
  Antisense strand to SEQ ID NO: 1823191
uauaccacuccucgaggaa

SEQ ID NO: 1823193 - RNA, 19 nt, Artificial Sequence
  Description of Artificial Sequence: Synthetic oligonucleotide
  Sense strand starting at position 2764 of SEQ ID NO: 1563667
cgaggagugguauagggua

SEQ ID NO: 1823194 - RNA, 19 nt, Artificial Sequence
  Description of Artificial Sequence: Synthetic oligonucleotide
  Antisense strand to SEQ ID NO: 1823193
uacccuauaccacuccucg

SEQ ID NO: 1823195 - RNA, 19 nt, Artificial Sequence
  Description of Artificial Sequence: Synthetic oligonucleotide
  Sense strand starting at position 2867 of SEQ ID NO: 1563667
gaaagagagugacagagau

SEQ ID NO: 1823196 - RNA, 19 nt, Artificial Sequence
  Description of Artificial Sequence: Synthetic oligonucleotide
  Antisense strand to SEQ ID NO: 1823195
aucucugucacucucuuuc

SEQ ID NO: 1823197 - RNA, 19 nt, Artificial Sequence
  Description of Artificial Sequence: Synthetic oligonucleotide
  Sense strand starting at position 3195 of SEQ ID NO: 1563667
gaggauguggauugaugua

SEQ ID NO: 1823198 - RNA, 19 nt, Artificial Sequence
  Description of Artificial Sequence: Synthetic oligonucleotide
  Antisense strand to SEQ ID NO: 1823197
uacaucaauccacauccuc

SEQ ID NO: 1823199 - RNA, 19 nt, Artificial Sequence
  Description of Artificial Sequence: Synthetic oligonucleotide
  Sense strand starting at position 3581 of SEQ ID NO: 1563667
ccucauaugcaaugggaga

SEQ ID NO: 1823200 - RNA, 19 nt, Artificial Sequence
  Description of Artificial Sequence: Synthetic oligonucleotide
  Antisense strand to SEQ ID NO: 1823199
ucucccauugcauaugagg

SEQ ID NO: 1823201 - RNA, 19 nt, Artificial Sequence
  Description of Artificial Sequence: Synthetic oligonucleotide
  Sense strand starting at position 3582 of SEQ ID NO: 1563667
cucauaugcaaugggagau

SEQ ID NO: 1823202 - RNA, 19 nt, Artificial Sequence
  Description of Artificial Sequence: Synthetic oligonucleotide
  Antisense strand to SEQ ID NO: 1823201
aucucccauugcauaugag

SEQ ID NO: 1823203 - RNA, 19 nt, Artificial Sequence
  Description of Artificial Sequence: Synthetic oligonucleotide
  Sense strand starting at position 3583 of SEQ ID NO: 1563667
ucauaugcaaugggagauu

SEQ ID NO: 1823204 - RNA, 19 nt, Artificial Sequence
  Description of Artificial Sequence: Synthetic oligonucleotide
  Antisense strand to SEQ ID NO: 1823203
aaucucccauugcauauga

SEQ ID NO: 1823205 - RNA, 19 nt, Artificial Sequence
  Description of Artificial Sequence: Synthetic oligonucleotide
  Sense strand starting at position 3614 of SEQ ID NO: 1563667
agagcaagcccaugaauuc

SEQ ID NO: 1823206 - RNA, 19 nt, Artificial Sequence
  Description of Artificial Sequence: Synthetic oligonucleotide
  Antisense strand to SEQ ID NO: 1823205
gaauucaugggcuugcucu

SEQ ID NO: 1823207 - RNA, 19 nt, Artificial Sequence
  Description of Artificial Sequence: Synthetic oligonucleotide
  Sense strand starting at position 3670 of SEQ ID NO: 1563667
gcugaacccucaucaguaa

SEQ ID NO: 1823208 - RNA, 19 nt, Artificial Sequence
  Description of Artificial Sequence: Synthetic oligonucleotide
  Antisense strand to SEQ ID NO: 1823207
uuacugaugaggguucagc

SEQ ID NO: 1823209 - RNA, 19 nt, Artificial Sequence
  Description of Artificial Sequence: Synthetic oligonucleotide
  Sense strand starting at position 3707 of SEQ ID NO: 1563667
agacaccucugacuuaagu

SEQ ID NO: 1823210 - RNA, 19 nt, Artificial Sequence
  Description of Artificial Sequence: Synthetic oligonucleotide
  Antisense strand to SEQ ID NO: 1823209
acuuaagucagaggugucu

SEQ ID NO: 1823211 - RNA, 19 nt, Artificial Sequence
  Description of Artificial Sequence: Synthetic oligonucleotide
  Sense strand starting at position 47 of SEQ ID NO: 1563668
caccguuagccaugaggaa

SEQ ID NO: 1823212 - RNA, 19 nt, Artificial Sequence
  Description of Artificial Sequence: Synthetic oligonucleotide
  Antisense strand to SEQ ID NO: 1823211
uuccucauggcuaacggug

SEQ ID NO: 1823213 - RNA, 19 nt, Artificial Sequence
  Description of Artificial Sequence: Synthetic oligonucleotide
  Sense strand starting at position 233 of SEQ ID NO: 1563668
gccgcuaugugggagguua

SEQ ID NO: 1823214 - RNA, 19 nt, Artificial Sequence
  Description of Artificial Sequence: Synthetic oligonucleotide
  Antisense strand to SEQ ID NO: 1823213
uaaccucccacauagcggc

SEQ ID NO: 1823215 - RNA, 19 nt, Artificial Sequence
  Description of Artificial Sequence: Synthetic oligonucleotide
  Sense strand starting at position 514 of SEQ ID NO: 1563668
gcuaguugccucgccuaaa

SEQ ID NO: 1823216 - RNA, 19 nt, Artificial Sequence
  Description of Artificial Sequence: Synthetic oligonucleotide
  Antisense strand to SEQ ID NO: 1823215
uuuaggcgaggcaacuagc

SEQ ID NO: 1823217 - RNA, 19 nt, Artificial Sequence
  Description of Artificial Sequence: Synthetic oligonucleotide
  Sense strand starting at position 616 of SEQ ID NO: 1563668
agugaaauaacggaggcuu

SEQ ID NO: 1823218 - RNA, 19 nt, Artificial Sequence
  Description of Artificial Sequence: Synthetic oligonucleotide
  Antisense strand to SEQ ID NO: 1823217
aagccuccguuauuucacu

SEQ ID NO: 1823219 - RNA, 19 nt, Artificial Sequence
  Description of Artificial Sequence: Synthetic oligonucleotide
  Sense strand starting at position 802 of SEQ ID NO: 1563668
uuagcacaguccuugaaau

SEQ ID NO: 1823220 - RNA, 19 nt, Artificial Sequence
  Description of Artificial Sequence: Synthetic oligonucleotide
  Antisense strand to SEQ ID NO: 1823219
auuucaaggacugugcuaa

SEQ ID NO: 1823221 - RNA, 19 nt, Artificial Sequence
  Description of Artificial Sequence: Synthetic oligonucleotide
  Sense strand starting at position 804 of SEQ ID NO: 1563668
agcacaguccuugaaauug

SEQ ID NO: 1823222 - RNA, 19 nt, Artificial Sequence
  Description of Artificial Sequence: Synthetic oligonucleotide
  Antisense strand to SEQ ID NO: 1823221
caauuucaaggacugugcu

SEQ ID NO: 1823223 - RNA, 19 nt, Artificial Sequence
  Description of Artificial Sequence: Synthetic oligonucleotide
  Sense strand starting at position 1077 of SEQ ID NO: 1563668
ugcuguuccuucuggaaca

SEQ ID NO: 1823224 - RNA, 19 nt, Artificial Sequence
  Description of Artificial Sequence: Synthetic oligonucleotide
  Antisense strand to SEQ ID NO: 1823223
uguuccagaaggaacagca

SEQ ID NO: 1823225 - RNA, 19 nt, Artificial Sequence
  Description of Artificial Sequence: Synthetic oligonucleotide
  Sense strand starting at position 1078 of SEQ ID NO: 1563668
gcuguuccuucuggaacau

SEQ ID NO: 1823226 - RNA, 19 nt, Artificial Sequence
  Description of Artificial Sequence: Synthetic oligonucleotide
  Antisense strand to SEQ ID NO: 1823225
auguuccagaaggaacagc

SEQ ID NO: 1823227 - RNA, 19 nt, Artificial Sequence
  Description of Artificial Sequence: Synthetic oligonucleotide
  Sense strand starting at position 1079 of SEQ ID NO: 1563668
cuguuccuucuggaacauu

SEQ ID NO: 1823228 - RNA, 19 nt, Artificial Sequence
  Description of Artificial Sequence: Synthetic oligonucleotide
  Antisense strand to SEQ ID NO: 1823227
aauguuccagaaggaacag

SEQ ID NO: 1823229 - RNA, 19 nt, Artificial Sequence
  Description of Artificial Sequence: Synthetic oligonucleotide
  Sense strand starting at position 1087 of SEQ ID NO: 1563668
ucuggaacauucccuggau

SEQ ID NO: 1823230 - RNA, 19 nt, Artificial Sequence
  Description of Artificial Sequence: Synthetic oligonucleotide
  Antisense strand to SEQ ID NO: 1823229
auccagggaauguuccaga

SEQ ID NO: 1823231 - RNA, 19 nt, Artificial Sequence
  Description of Artificial Sequence: Synthetic oligonucleotide
  Sense strand starting at position 1194 of SEQ ID NO: 1563668
ccgggauuagcgcaagaug

SEQ ID NO: 1823232 - RNA, 19 nt, Artificial Sequence
  Description of Artificial Sequence: Synthetic oligonucleotide
  Antisense strand to SEQ ID NO: 1823231
caucuugcgcuaaucccgg

SEQ ID NO: 1823233 - RNA, 19 nt, Artificial Sequence
  Description of Artificial Sequence: Synthetic oligonucleotide
  Sense strand starting at position 277 of SEQ ID NO: 1563669
uaaucuuguuaccuggaga

SEQ ID NO: 1823234 - RNA, 19 nt, Artificial Sequence
  Description of Artificial Sequence: Synthetic oligonucleotide
  Antisense strand to SEQ ID NO: 1823233
ucuccagguaacaagauua

SEQ ID NO: 1823235 - RNA, 19 nt, Artificial Sequence
  Description of Artificial Sequence: Synthetic oligonucleotide
  Sense strand starting at position 280 of SEQ ID NO: 1563669
ucuuguuaccuggagaguc

SEQ ID NO: 1823236 - RNA, 19 nt, Artificial Sequence
  Description of Artificial Sequence: Synthetic oligonucleotide
  Antisense strand to SEQ ID NO: 1823235
gacucuccagguaacaaga

SEQ ID NO: 1823237 - RNA, 19 nt, Artificial Sequence
  Description of Artificial Sequence: Synthetic oligonucleotide
  Sense strand starting at position 580 of SEQ ID NO: 1563669
gcuaguuggccaguugcua

SEQ ID NO: 1823238 - RNA, 19 nt, Artificial Sequence
  Description of Artificial Sequence: Synthetic oligonucleotide
  Antisense strand to SEQ ID NO: 1823237
uagcaacuggccaacuagc

SEQ ID NO: 1823239 - RNA, 19 nt, Artificial Sequence
  Description of Artificial Sequence: Synthetic oligonucleotide
  Sense strand starting at position 629 of SEQ ID NO: 1563669
ccugaaagauucucugugu

SEQ ID NO: 1823240 - RNA, 19 nt, Artificial Sequence
  Description of Artificial Sequence: Synthetic oligonucleotide
  Antisense strand to SEQ ID NO: 1823239
acacagagaaucuuucagg

SEQ ID NO: 1823241 - RNA, 19 nt, Artificial Sequence
  Description of Artificial Sequence: Synthetic oligonucleotide
  Sense strand starting at position 630 of SEQ ID NO: 1563669
cugaaagauucucuguguc

SEQ ID NO: 1823242 - RNA, 19 nt, Artificial Sequence
  Description of Artificial Sequence: Synthetic oligonucleotide
  Antisense strand to SEQ ID NO: 1823241
gacacagagaaucuuucag

SEQ ID NO: 1823243 - RNA, 19 nt, Artificial Sequence
  Description of Artificial Sequence: Synthetic oligonucleotide
  Sense strand starting at position 848 of SEQ ID NO: 1563669
aaguuagcuuuggugaaag

SEQ ID NO: 1823244 - RNA, 19 nt, Artificial Sequence
  Description of Artificial Sequence: Synthetic oligonucleotide
  Antisense strand to SEQ ID NO: 1823243
cuuucaccaaagcuaacuu

SEQ ID NO: 1823245 - RNA, 19 nt, Artificial Sequence
  Description of Artificial Sequence: Synthetic oligonucleotide
  Sense strand starting at position 850 of SEQ ID NO: 1563669
guuagcuuuggugaaagua

SEQ ID NO: 1823246 - RNA, 19 nt, Artificial Sequence
  Description of Artificial Sequence: Synthetic oligonucleotide
  Antisense strand to SEQ ID NO: 1823245
uacuuucaccaaagcuaac

SEQ ID NO: 1823247 - RNA, 19 nt, Artificial Sequence
  Description of Artificial Sequence: Synthetic oligonucleotide
  Sense strand starting at position 981 of SEQ ID NO: 1563669
ggguacgugacugauucua

SEQ ID NO: 1823248 - RNA, 19 nt, Artificial Sequence
  Description of Artificial Sequence: Synthetic oligonucleotide
  Antisense strand to SEQ ID NO: 1823247
uagaaucagucacguaccc

SEQ ID NO: 1823249 - RNA, 19 nt, Artificial Sequence
  Description of Artificial Sequence: Synthetic oligonucleotide
  Sense strand starting at position 989 of SEQ ID NO: 1563669
gacugauucuacgcgagac

SEQ ID NO: 1823250 - RNA, 19 nt, Artificial Sequence
  Description of Artificial Sequence: Synthetic oligonucleotide
  Antisense strand to SEQ ID NO: 1823249
gucucgcguagaaucaguc

SEQ ID NO: 1823251 - RNA, 19 nt, Artificial Sequence
  Description of Artificial Sequence: Synthetic oligonucleotide
  Sense strand starting at position 1001 of SEQ ID NO: 1563669
gcgagacgguaugugauuu

SEQ ID NO: 1823252 - RNA, 19 nt, Artificial Sequence
  Description of Artificial Sequence: Synthetic oligonucleotide
  Antisense strand to SEQ ID NO: 1823251
aaaucacauaccgucucgc

SEQ ID NO: 1823253 - RNA, 19 nt, Artificial Sequence
  Description of Artificial Sequence: Synthetic oligonucleotide
  Sense strand starting at position 1005 of SEQ ID NO: 1563669
gacgguaugugauuugugu

SEQ ID NO: 1823254 - RNA, 19 nt, Artificial Sequence
  Description of Artificial Sequence: Synthetic oligonucleotide
  Antisense strand to SEQ ID NO: 1823253
acacaaaucacauaccguc

SEQ ID NO: 1823255 - RNA, 19 nt, Artificial Sequence
  Description of Artificial Sequence: Synthetic oligonucleotide
  Sense strand starting at position 1007 of SEQ ID NO: 1563669
cgguaugugauuuguguca

SEQ ID NO: 1823256 - RNA, 19 nt, Artificial Sequence
  Description of Artificial Sequence: Synthetic oligonucleotide
  Antisense strand to SEQ ID NO: 1823255
ugacacaaaucacauaccg

SEQ ID NO: 1823257 - RNA, 19 nt, Artificial Sequence
  Description of Artificial Sequence: Synthetic oligonucleotide
  Sense strand starting at position 1023 of SEQ ID NO: 1563669
ucagcauuugcacgcgaca

SEQ ID NO: 1823258 - RNA, 19 nt, Artificial Sequence
  Description of Artificial Sequence: Synthetic oligonucleotide
  Antisense strand to SEQ ID NO: 1823257
ugucgcgugcaaaugcuga

SEQ ID NO: 1823259 - RNA, 19 nt, Artificial Sequence
  Description of Artificial Sequence: Synthetic oligonucleotide
  Sense strand starting at position 1047 of SEQ ID NO: 1563669
acuggcugucgguacaaua

SEQ ID NO: 1823260 - RNA, 19 nt, Artificial Sequence
  Description of Artificial Sequence: Synthetic oligonucleotide
  Antisense strand to SEQ ID NO: 1823259
uauuguaccgacagccagu

SEQ ID NO: 1823261 - RNA, 19 nt, Artificial Sequence
  Description of Artificial Sequence: Synthetic oligonucleotide
  Sense strand starting at position 1073 of SEQ ID NO: 1563669
aggugacuuugaguaugua

SEQ ID NO: 1823262 - RNA, 19 nt, Artificial Sequence
  Description of Artificial Sequence: Synthetic oligonucleotide
  Antisense strand to SEQ ID NO: 1823261
uacauacucaaagucaccu

SEQ ID NO: 1823263 - RNA, 19 nt, Artificial Sequence
  Description of Artificial Sequence: Synthetic oligonucleotide
  Sense strand starting at position 1074 of SEQ ID NO: 1563669
ggugacuuugaguauguaa

SEQ ID NO: 1823264 - RNA, 19 nt, Artificial Sequence
  Description of Artificial Sequence: Synthetic oligonucleotide
  Antisense strand to SEQ ID NO: 1823263
uuacauacucaaagucacc

SEQ ID NO: 1823265 - RNA, 19 nt, Artificial Sequence
  Description of Artificial Sequence: Synthetic oligonucleotide
  Sense strand starting at position 1076 of SEQ ID NO: 1563669
ugacuuugaguauguaaag

SEQ ID NO: 1823266 - RNA, 19 nt, Artificial Sequence
  Description of Artificial Sequence: Synthetic oligonucleotide
  Antisense strand to SEQ ID NO: 1823265
cuuuacauacucaaaguca

SEQ ID NO: 1823267 - RNA, 19 nt, Artificial Sequence
  Description of Artificial Sequence: Synthetic oligonucleotide
  Sense strand starting at position 1165 of SEQ ID NO: 1563669
cagagcucucccgaggcua

SEQ ID NO: 1823268 - RNA, 19 nt, Artificial Sequence
  Description of Artificial Sequence: Synthetic oligonucleotide
  Antisense strand to SEQ ID NO: 1823267
uagccucgggagagcucug

SEQ ID NO: 1823269 - RNA, 19 nt, Artificial Sequence
  Description of Artificial Sequence: Synthetic oligonucleotide
  Sense strand starting at position 1570 of SEQ ID NO: 1563669
gcccaaucccagugggaug

SEQ ID NO: 1823270 - RNA, 19 nt, Artificial Sequence
  Description of Artificial Sequence: Synthetic oligonucleotide
  Antisense strand to SEQ ID NO: 1823269
caucccacugggauugggc

SEQ ID NO: 1823271 - RNA, 19 nt, Artificial Sequence
  Description of Artificial Sequence: Synthetic oligonucleotide
  Sense strand starting at position 2179 of SEQ ID NO: 1563669
gucucaagcucccuggaaa

SEQ ID NO: 1823272 - RNA, 19 nt, Artificial Sequence
  Description of Artificial Sequence: Synthetic oligonucleotide
  Antisense strand to SEQ ID NO: 1823271
uuuccagggagcuugagac

SEQ ID NO: 1823273 - RNA, 19 nt, Artificial Sequence
  Description of Artificial Sequence: Synthetic oligonucleotide
  Sense strand starting at position 2180 of SEQ ID NO: 1563669
ucucaagcucccuggaaau

SEQ ID NO: 1823274 - RNA, 19 nt, Artificial Sequence
  Description of Artificial Sequence: Synthetic oligonucleotide
  Antisense strand to SEQ ID NO: 1823273
auuuccagggagcuugaga

SEQ ID NO: 1823275 - RNA, 19 nt, Artificial Sequence
  Description of Artificial Sequence: Synthetic oligonucleotide
  Sense strand starting at position 2487 of SEQ ID NO: 1563669
aaagacaagccuuggucau

SEQ ID NO: 1823276 - RNA, 19 nt, Artificial Sequence
  Description of Artificial Sequence: Synthetic oligonucleotide
  Antisense strand to SEQ ID NO: 1823275
augaccaaggcuugucuuu

SEQ ID NO: 1823277 - RNA, 19 nt, Artificial Sequence
  Description of Artificial Sequence: Synthetic oligonucleotide
  Sense strand starting at position 2488 of SEQ ID NO: 1563669
aagacaagccuuggucauu

SEQ ID NO: 1823278 - RNA, 19 nt, Artificial Sequence
  Description of Artificial Sequence: Synthetic oligonucleotide
  Antisense strand to SEQ ID NO: 1823277
aaugaccaaggcuugucuu

SEQ ID NO: 1823279 - RNA, 19 nt, Artificial Sequence
  Description of Artificial Sequence: Synthetic oligonucleotide
  Sense strand starting at position 2617 of SEQ ID NO: 1563669
gcaagcuacuuccugaacu

SEQ ID NO: 1823280 - RNA, 19 nt, Artificial Sequence
  Description of Artificial Sequence: Synthetic oligonucleotide
  Antisense strand to SEQ ID NO: 1823279
aguucaggaaguagcuugc

SEQ ID NO: 1823281 - RNA, 19 nt, Artificial Sequence
  Description of Artificial Sequence: Synthetic oligonucleotide
  Sense strand starting at position 2627 of SEQ ID NO: 1563669
uccugaacucuggauagca

SEQ ID NO: 1823282 - RNA, 19 nt, Artificial Sequence
  Description of Artificial Sequence: Synthetic oligonucleotide
  Antisense strand to SEQ ID NO: 1823281
ugcuauccagaguucagga

SEQ ID NO: 1823283 - RNA, 19 nt, Artificial Sequence
  Description of Artificial Sequence: Synthetic oligonucleotide
  Sense strand starting at position 2643 of SEQ ID NO: 1563669
gcaaguugccguuucugga

SEQ ID NO: 1823284 - RNA, 19 nt, Artificial Sequence
  Description of Artificial Sequence: Synthetic oligonucleotide
  Antisense strand to SEQ ID NO: 1823283
uccagaaacggcaacuugc

SEQ ID NO: 1823285 - RNA, 19 nt, Artificial Sequence
  Description of Artificial Sequence: Synthetic oligonucleotide
  Sense strand starting at position 2777 of SEQ ID NO: 1563669
gucccuaaggcauaugagu

SEQ ID NO: 1823286 - RNA, 19 nt, Artificial Sequence
  Description of Artificial Sequence: Synthetic oligonucleotide
  Antisense strand to SEQ ID NO: 1823285
acucauaugccuuagggac

SEQ ID NO: 1823287 - RNA, 19 nt, Artificial Sequence
  Description of Artificial Sequence: Synthetic oligonucleotide
  Sense strand starting at position 2788 of SEQ ID NO: 1563669
auaugagucucuuuccaag

SEQ ID NO: 1823288 - RNA, 19 nt, Artificial Sequence
  Description of Artificial Sequence: Synthetic oligonucleotide
  Antisense strand to SEQ ID NO: 1823287
cuuggaaagagacucauau

SEQ ID NO: 1823289 - RNA, 19 nt, Artificial Sequence
  Description of Artificial Sequence: Synthetic oligonucleotide
  Sense strand starting at position 2790 of SEQ ID NO: 1563669
augagucucuuuccaagaa

SEQ ID NO: 1823290 - RNA, 19 nt, Artificial Sequence
  Description of Artificial Sequence: Synthetic oligonucleotide
  Antisense strand to SEQ ID NO: 1823289
uucuuggaaagagacucau

SEQ ID NO: 1823291 - RNA, 19 nt, Artificial Sequence
  Description of Artificial Sequence: Synthetic oligonucleotide
  Sense strand starting at position 3319 of SEQ ID NO: 1563669
ucauucuaggcagauuguu

SEQ ID NO: 1823292 - RNA, 19 nt, Artificial Sequence
  Description of Artificial Sequence: Synthetic oligonucleotide
  Antisense strand to SEQ ID NO: 1823291
aacaaucugccuagaauga

SEQ ID NO: 1823293 - RNA, 19 nt, Artificial Sequence
  Description of Artificial Sequence: Synthetic oligonucleotide
  Sense strand starting at position 3328 of SEQ ID NO: 1563669
gcagauuguugcucaauuu

SEQ ID NO: 1823294 - RNA, 19 nt, Artificial Sequence
  Description of Artificial Sequence: Synthetic oligonucleotide
  Antisense strand to SEQ ID NO: 1823293
aaauugagcaacaaucugc

SEQ ID NO: 1823295 - RNA, 19 nt, Artificial Sequence
  Description of Artificial Sequence: Synthetic oligonucleotide
  Sense strand starting at position 3363 of SEQ ID NO: 1563669
gguggauucuagaggaguc

SEQ ID NO: 1823296 - RNA, 19 nt, Artificial Sequence
  Description of Artificial Sequence: Synthetic oligonucleotide
  Antisense strand to SEQ ID NO: 1823295
gacuccucuagaauccacc

SEQ ID NO: 1823297 - RNA, 19 nt, Artificial Sequence
  Description of Artificial Sequence: Synthetic oligonucleotide
  Sense strand starting at position 3364 of SEQ ID NO: 1563669
guggauucuagaggagucu

SEQ ID NO: 1823298 - RNA, 19 nt, Artificial Sequence
  Description of Artificial Sequence: Synthetic oligonucleotide
  Antisense strand to SEQ ID NO: 1823297
agacuccucuagaauccac

SEQ ID NO: 1823299 - RNA, 19 nt, Artificial Sequence
  Description of Artificial Sequence: Synthetic oligonucleotide
  Sense strand starting at position 3473 of SEQ ID NO: 1563669
gugagcaucuaccucagaa

SEQ ID NO: 1823300 - RNA, 19 nt, Artificial Sequence
  Description of Artificial Sequence: Synthetic oligonucleotide
  Antisense strand to SEQ ID NO: 1823299
uucugagguagaugcucac

SEQ ID NO: 1823301 - RNA, 19 nt, Artificial Sequence
  Description of Artificial Sequence: Synthetic oligonucleotide
  Sense strand starting at position 3546 of SEQ ID NO: 1563669
uagcuuuaagcagagauag

SEQ ID NO: 1823302 - RNA, 19 nt, Artificial Sequence
  Description of Artificial Sequence: Synthetic oligonucleotide
  Antisense strand to SEQ ID NO: 1823301
cuaucucugcuuaaagcua

SEQ ID NO: 1823303 - RNA, 19 nt, Artificial Sequence
  Description of Artificial Sequence: Synthetic oligonucleotide
  Sense strand starting at position 3713 of SEQ ID NO: 1563669
gcuggcacucuagagaguu

SEQ ID NO: 1823304 - RNA, 19 nt, Artificial Sequence
  Description of Artificial Sequence: Synthetic oligonucleotide
  Antisense strand to SEQ ID NO: 1823303
aacucucuagagugccagc

SEQ ID NO: 1823305 - RNA, 19 nt, Artificial Sequence
  Description of Artificial Sequence: Synthetic oligonucleotide
  Sense strand starting at position 3725 of SEQ ID NO: 1563669
gagaguuggcuagagugaa

SEQ ID NO: 1823306 - RNA, 19 nt, Artificial Sequence
  Description of Artificial Sequence: Synthetic oligonucleotide
  Antisense strand to SEQ ID NO: 1823305
uucacucuagccaacucuc

SEQ ID NO: 1823307 - RNA, 19 nt, Artificial Sequence
  Description of Artificial Sequence: Synthetic oligonucleotide
  Sense strand starting at position 3803 of SEQ ID NO: 1563669
uggguaaguuacuucuuua

SEQ ID NO: 1823308 - RNA, 19 nt, Artificial Sequence
  Description of Artificial Sequence: Synthetic oligonucleotide
  Antisense strand to SEQ ID NO: 1823307
uaaagaaguaacuuaccca

SEQ ID NO: 1823309 - RNA, 19 nt, Artificial Sequence
  Description of Artificial Sequence: Synthetic oligonucleotide
  Sense strand starting at position 3806 of SEQ ID NO: 1563669
guaaguuacuucuuuauac

SEQ ID NO: 1823310 - RNA, 19 nt, Artificial Sequence
  Description of Artificial Sequence: Synthetic oligonucleotide
  Antisense strand to SEQ ID NO: 1823309
guauaaagaaguaacuuac

SEQ ID NO: 1823311 - RNA, 19 nt, Artificial Sequence
  Description of Artificial Sequence: Synthetic oligonucleotide
  Sense strand starting at position 3915 of SEQ ID NO: 1563669
uggagaugguuaguaaaug

SEQ ID NO: 1823312 - RNA, 19 nt, Artificial Sequence
  Description of Artificial Sequence: Synthetic oligonucleotide
  Antisense strand to SEQ ID NO: 1823311
cauuuacuaaccaucucca

SEQ ID NO: 1823313 - RNA, 19 nt, Artificial Sequence
  Description of Artificial Sequence: Synthetic oligonucleotide
  Sense strand starting at position 40 of SEQ ID NO: 1563670
gguaauaaggguugaauag

SEQ ID NO: 1823314 - RNA, 19 nt, Artificial Sequence
  Description of Artificial Sequence: Synthetic oligonucleotide
  Antisense strand to SEQ ID NO: 1823313
cuauucaacccuuauuacc

SEQ ID NO: 1823315 - RNA, 19 nt, Artificial Sequence
  Description of Artificial Sequence: Synthetic oligonucleotide
  Sense strand starting at position 258 of SEQ ID NO: 1563670
ccuguaggcauggauucua

SEQ ID NO: 1823316 - RNA, 19 nt, Artificial Sequence
  Description of Artificial Sequence: Synthetic oligonucleotide
  Antisense strand to SEQ ID NO: 1823315
uagaauccaugccuacagg

SEQ ID NO: 1823317 - RNA, 19 nt, Artificial Sequence
  Description of Artificial Sequence: Synthetic oligonucleotide
  Sense strand starting at position 563 of SEQ ID NO: 1563670
agcuguuccguggcugaau

SEQ ID NO: 1823318 - RNA, 19 nt, Artificial Sequence
  Description of Artificial Sequence: Synthetic oligonucleotide
  Antisense strand to SEQ ID NO: 1823317
auucagccacggaacagcu

SEQ ID NO: 1823319 - RNA, 19 nt, Artificial Sequence
  Description of Artificial Sequence: Synthetic oligonucleotide
  Sense strand starting at position 574 of SEQ ID NO: 1563670
ggcugaauuuccucuugua

SEQ ID NO: 1823320 - RNA, 19 nt, Artificial Sequence
  Description of Artificial Sequence: Synthetic oligonucleotide
  Antisense strand to SEQ ID NO: 1823319
uacaagaggaaauucagcc

SEQ ID NO: 1823321 - RNA, 19 nt, Artificial Sequence
  Description of Artificial Sequence: Synthetic oligonucleotide
  Sense strand starting at position 581 of SEQ ID NO: 1563670
uuuccucuuguagagaagu

SEQ ID NO: 1823322 - RNA, 19 nt, Artificial Sequence
  Description of Artificial Sequence: Synthetic oligonucleotide
  Antisense strand to SEQ ID NO: 1823321
acuucucuacaagaggaaa

SEQ ID NO: 1823323 - RNA, 19 nt, Artificial Sequence
  Description of Artificial Sequence: Synthetic oligonucleotide
  Sense strand starting at position 912 of SEQ ID NO: 1563670
uuacaaagagacuguuauu

SEQ ID NO: 1823324 - RNA, 19 nt, Artificial Sequence
  Description of Artificial Sequence: Synthetic oligonucleotide
  Antisense strand to SEQ ID NO: 1823323
aauaacagucucuuuguaa

SEQ ID NO: 1823325 - RNA, 19 nt, Artificial Sequence
  Description of Artificial Sequence: Synthetic oligonucleotide
  Sense strand starting at position 917 of SEQ ID NO: 1563670
aagagacuguuauuccgau

SEQ ID NO: 1823326 - RNA, 19 nt, Artificial Sequence
  Description of Artificial Sequence: Synthetic oligonucleotide
  Antisense strand to SEQ ID NO: 1823325
aucggaauaacagucucuu

SEQ ID NO: 1823327 - RNA, 19 nt, Artificial Sequence
  Description of Artificial Sequence: Synthetic oligonucleotide
  Sense strand starting at position 918 of SEQ ID NO: 1563670
agagacuguuauuccgaua

SEQ ID NO: 1823328 - RNA, 19 nt, Artificial Sequence
  Description of Artificial Sequence: Synthetic oligonucleotide
  Antisense strand to SEQ ID NO: 1823327
uaucggaauaacagucucu

SEQ ID NO: 1823329 - RNA, 19 nt, Artificial Sequence
  Description of Artificial Sequence: Synthetic oligonucleotide
  Sense strand starting at position 923 of SEQ ID NO: 1563670
cuguuauuccgauaaauua

SEQ ID NO: 1823330 - RNA, 19 nt, Artificial Sequence
  Description of Artificial Sequence: Synthetic oligonucleotide
  Antisense strand to SEQ ID NO: 1823329
uaauuuaucggaauaacag

SEQ ID NO: 1823331 - RNA, 19 nt, Artificial Sequence
  Description of Artificial Sequence: Synthetic oligonucleotide
  Sense strand starting at position 1028 of SEQ ID NO: 1563670
guuacuaaucuuuagucua

SEQ ID NO: 1823332 - RNA, 19 nt, Artificial Sequence
  Description of Artificial Sequence: Synthetic oligonucleotide
  Antisense strand to SEQ ID NO: 1823331
uagacuaaagauuaguaac

SEQ ID NO: 1823333 - RNA, 19 nt, Artificial Sequence
  Description of Artificial Sequence: Synthetic oligonucleotide
  Sense strand starting at position 1160 of SEQ ID NO: 1563670
ccaucugaucuguacuaag

SEQ ID NO: 1823334 - RNA, 19 nt, Artificial Sequence
  Description of Artificial Sequence: Synthetic oligonucleotide
  Antisense strand to SEQ ID NO: 1823333
cuuaguacagaucagaugg

SEQ ID NO: 1823335 - RNA, 19 nt, Artificial Sequence
  Description of Artificial Sequence: Synthetic oligonucleotide
  Sense strand starting at position 1242 of SEQ ID NO: 1563670
acugauaagugggcagaga

SEQ ID NO: 1823336 - RNA, 19 nt, Artificial Sequence
  Description of Artificial Sequence: Synthetic oligonucleotide
  Antisense strand to SEQ ID NO: 1823335
ucucugcccacuuaucagu

SEQ ID NO: 1823337 - RNA, 19 nt, Artificial Sequence
  Description of Artificial Sequence: Synthetic oligonucleotide
  Sense strand starting at position 1605 of SEQ ID NO: 1563670
uaaagagucguccagugau

SEQ ID NO: 1823338 - RNA, 19 nt, Artificial Sequence
  Description of Artificial Sequence: Synthetic oligonucleotide
  Antisense strand to SEQ ID NO: 1823337
aucacuggacgacucuuua

SEQ ID NO: 1823339 - RNA, 19 nt, Artificial Sequence
  Description of Artificial Sequence: Synthetic oligonucleotide
  Sense strand starting at position 2462 of SEQ ID NO: 1563670
gcgaguccagugcuaaguu

SEQ ID NO: 1823340 - RNA, 19 nt, Artificial Sequence
  Description of Artificial Sequence: Synthetic oligonucleotide
  Antisense strand to SEQ ID NO: 1823339
aacuuagcacuggacucgc

SEQ ID NO: 1823341 - RNA, 19 nt, Artificial Sequence
  Description of Artificial Sequence: Synthetic oligonucleotide
  Sense strand starting at position 2500 of SEQ ID NO: 1563670
gugugucucaucuauaaga

SEQ ID NO: 1823342 - RNA, 19 nt, Artificial Sequence
  Description of Artificial Sequence: Synthetic oligonucleotide
  Antisense strand to SEQ ID NO: 1823341
ucuuauagaugagacacac

SEQ ID NO: 1823343 - RNA, 19 nt, Artificial Sequence
  Description of Artificial Sequence: Synthetic oligonucleotide
  Sense strand starting at position 2502 of SEQ ID NO: 1563670
gugucucaucuauaagaua

SEQ ID NO: 1823344 - RNA, 19 nt, Artificial Sequence
  Description of Artificial Sequence: Synthetic oligonucleotide
  Antisense strand to SEQ ID NO: 1823343
uaucuuauagaugagacac

SEQ ID NO: 1823345 - RNA, 19 nt, Artificial Sequence
  Description of Artificial Sequence: Synthetic oligonucleotide
  Sense strand starting at position 2663 of SEQ ID NO: 1563670
gaagucuuacgugacauau

SEQ ID NO: 1823346 - RNA, 19 nt, Artificial Sequence
  Description of Artificial Sequence: Synthetic oligonucleotide
  Antisense strand to SEQ ID NO: 1823345
auaugucacguaagacuuc

SEQ ID NO: 1823347 - RNA, 19 nt, Artificial Sequence
  Description of Artificial Sequence: Synthetic oligonucleotide
  Sense strand starting at position 2742 of SEQ ID NO: 1563670
guacgaaccagauagaugu

SEQ ID NO: 1823348 - RNA, 19 nt, Artificial Sequence
  Description of Artificial Sequence: Synthetic oligonucleotide
  Antisense strand to SEQ ID NO: 1823347
acaucuaucugguucguac

SEQ ID NO: 1823349 - RNA, 19 nt, Artificial Sequence
  Description of Artificial Sequence: Synthetic oligonucleotide
  Sense strand starting at position 2749 of SEQ ID NO: 1563670
ccagauagauguuuauuac

SEQ ID NO: 1823350 - RNA, 19 nt, Artificial Sequence
  Description of Artificial Sequence: Synthetic oligonucleotide
  Antisense strand to SEQ ID NO: 1823349
guaauaaacaucuaucugg

SEQ ID NO: 1823351 - RNA, 19 nt, Artificial Sequence
  Description of Artificial Sequence: Synthetic oligonucleotide
  Sense strand starting at position 2752 of SEQ ID NO: 1563670
gauagauguuuauuacaga

SEQ ID NO: 1823352 - RNA, 19 nt, Artificial Sequence
  Description of Artificial Sequence: Synthetic oligonucleotide
  Antisense strand to SEQ ID NO: 1823351
ucuguaauaaacaucuauc

SEQ ID NO: 1823353 - RNA, 19 nt, Artificial Sequence
  Description of Artificial Sequence: Synthetic oligonucleotide
  Sense strand starting at position 2817 of SEQ ID NO: 1563670
ggaaauggcuaagucaauu

SEQ ID NO: 1823354 - RNA, 19 nt, Artificial Sequence
  Description of Artificial Sequence: Synthetic oligonucleotide
  Antisense strand to SEQ ID NO: 1823353
aauugacuuagccauuucc

SEQ ID NO: 1823355 - RNA, 19 nt, Artificial Sequence
  Description of Artificial Sequence: Synthetic oligonucleotide
  Sense strand starting at position 2837 of SEQ ID NO: 1563670
ggugguauuaaugacguga

SEQ ID NO: 1823356 - RNA, 19 nt, Artificial Sequence
  Description of Artificial Sequence: Synthetic oligonucleotide
  Antisense strand to SEQ ID NO: 1823355
ucacgucauuaauaccacc

SEQ ID NO: 1823357 - RNA, 19 nt, Artificial Sequence
  Description of Artificial Sequence: Synthetic oligonucleotide
  Sense strand starting at position 2842 of SEQ ID NO: 1563670
uauuaaugacgugacauua

SEQ ID NO: 1823358 - RNA, 19 nt, Artificial Sequence
  Description of Artificial Sequence: Synthetic oligonucleotide
  Antisense strand to SEQ ID NO: 1823357
uaaugucacgucauuaaua

SEQ ID NO: 1823359 - RNA, 19 nt, Artificial Sequence
  Description of Artificial Sequence: Synthetic oligonucleotide
  Sense strand starting at position 2852 of SEQ ID NO: 1563670
gugacauuacuguauuauu

SEQ ID NO: 1823360 - RNA, 19 nt, Artificial Sequence
  Description of Artificial Sequence: Synthetic oligonucleotide
  Antisense strand to SEQ ID NO: 1823359
aauaauacaguaaugucac

SEQ ID NO: 1823361 - RNA, 19 nt, Artificial Sequence
  Description of Artificial Sequence: Synthetic oligonucleotide
  Sense strand starting at position 2860 of SEQ ID NO: 1563670
acuguauuauuccuggacu

SEQ ID NO: 1823362 - RNA, 19 nt, Artificial Sequence
  Description of Artificial Sequence: Synthetic oligonucleotide
  Antisense strand to SEQ ID NO: 1823361
aguccaggaauaauacagu

SEQ ID NO: 1823363 - RNA, 19 nt, Artificial Sequence
  Description of Artificial Sequence: Synthetic oligonucleotide
  Sense strand starting at position 2862 of SEQ ID NO: 1563670
uguauuauuccuggacuac

SEQ ID NO: 1823364 - RNA, 19 nt, Artificial Sequence
  Description of Artificial Sequence: Synthetic oligonucleotide
  Antisense strand to SEQ ID NO: 1823363
guaguccaggaauaauaca

SEQ ID NO: 1823365 - RNA, 19 nt, Artificial Sequence
  Description of Artificial Sequence: Synthetic oligonucleotide
  Sense strand starting at position 2863 of SEQ ID NO: 1563670
guauuauuccuggacuaca

SEQ ID NO: 1823366 - RNA, 19 nt, Artificial Sequence
  Description of Artificial Sequence: Synthetic oligonucleotide
  Antisense strand to SEQ ID NO: 1823365
uguaguccaggaauaauac

SEQ ID NO: 1823367 - RNA, 19 nt, Artificial Sequence
  Description of Artificial Sequence: Synthetic oligonucleotide
  Sense strand starting at position 2957 of SEQ ID NO: 1563670
uauguuagcgcuguccauu

SEQ ID NO: 1823368 - RNA, 19 nt, Artificial Sequence
  Description of Artificial Sequence: Synthetic oligonucleotide
  Antisense strand to SEQ ID NO: 1823367
aauggacagcgcuaacaua

SEQ ID NO: 1823369 - RNA, 19 nt, Artificial Sequence
  Description of Artificial Sequence: Synthetic oligonucleotide
  Sense strand starting at position 3012 of SEQ ID NO: 1563670
aguagucugaacugagaua

SEQ ID NO: 1823370 - RNA, 19 nt, Artificial Sequence
  Description of Artificial Sequence: Synthetic oligonucleotide
  Antisense strand to SEQ ID NO: 1823369
uaucucaguucagacuacu

SEQ ID NO: 1823371 - RNA, 19 nt, Artificial Sequence
  Description of Artificial Sequence: Synthetic oligonucleotide
  Sense strand starting at position 3254 of SEQ ID NO: 1563670
ccggauacacaguaguaaa

SEQ ID NO: 1823372 - RNA, 19 nt, Artificial Sequence
  Description of Artificial Sequence: Synthetic oligonucleotide
  Antisense strand to SEQ ID NO: 1823371
uuuacuacuguguauccgg

SEQ ID NO: 1823373 - RNA, 19 nt, Artificial Sequence
  Description of Artificial Sequence: Synthetic oligonucleotide
  Sense strand starting at position 3264 of SEQ ID NO: 1563670
aguaguaaacaauacaguu

SEQ ID NO: 1823374 - RNA, 19 nt, Artificial Sequence
  Description of Artificial Sequence: Synthetic oligonucleotide
  Antisense strand to SEQ ID NO: 1823373
aacuguauuguuuacuacu

SEQ ID NO: 1823375 - RNA, 19 nt, Artificial Sequence
  Description of Artificial Sequence: Synthetic oligonucleotide
  Sense strand starting at position 3353 of SEQ ID NO: 1563670
uggugaguuauaugaagac

SEQ ID NO: 1823376 - RNA, 19 nt, Artificial Sequence
  Description of Artificial Sequence: Synthetic oligonucleotide
  Antisense strand to SEQ ID NO: 1823375
gucuucauauaacucacca

SEQ ID NO: 1823377 - RNA, 19 nt, Artificial Sequence
  Description of Artificial Sequence: Synthetic oligonucleotide
  Sense strand starting at position 3390 of SEQ ID NO: 1563670
ccagaaaguauguguauau

SEQ ID NO: 1823378 - RNA, 19 nt, Artificial Sequence
  Description of Artificial Sequence: Synthetic oligonucleotide
  Antisense strand to SEQ ID NO: 1823377
auauacacauacuuucugg

SEQ ID NO: 1823379 - RNA, 19 nt, Artificial Sequence
  Description of Artificial Sequence: Synthetic oligonucleotide
  Sense strand starting at position 3391 of SEQ ID NO: 1563670
cagaaaguauguguauaua

SEQ ID NO: 1823380 - RNA, 19 nt, Artificial Sequence
  Description of Artificial Sequence: Synthetic oligonucleotide
  Antisense strand to SEQ ID NO: 1823379
uauauacacauacuuucug

SEQ ID NO: 1823381 - RNA, 19 nt, Artificial Sequence
  Description of Artificial Sequence: Synthetic oligonucleotide
  Sense strand starting at position 3528 of SEQ ID NO: 1563670
ucagguguggauugagaca

SEQ ID NO: 1823382 - RNA, 19 nt, Artificial Sequence
  Description of Artificial Sequence: Synthetic oligonucleotide
  Antisense strand to SEQ ID NO: 1823381
ugucucaauccacaccuga

SEQ ID NO: 1823383 - RNA, 19 nt, Artificial Sequence
  Description of Artificial Sequence: Synthetic oligonucleotide
  Sense strand starting at position 3530 of SEQ ID NO: 1563670
agguguggauugagacaga

SEQ ID NO: 1823384 - RNA, 19 nt, Artificial Sequence
  Description of Artificial Sequence: Synthetic oligonucleotide
  Antisense strand to SEQ ID NO: 1823383
ucugucucaauccacaccu

SEQ ID NO: 1823385 - RNA, 19 nt, Artificial Sequence
  Description of Artificial Sequence: Synthetic oligonucleotide
  Sense strand starting at position 3565 of SEQ ID NO: 1563670
uggugcaaucucuaccuca

SEQ ID NO: 1823386 - RNA, 19 nt, Artificial Sequence
  Description of Artificial Sequence: Synthetic oligonucleotide
  Antisense strand to SEQ ID NO: 1823385
ugagguagagauugcacca

SEQ ID NO: 1823387 - RNA, 19 nt, Artificial Sequence
  Description of Artificial Sequence: Synthetic oligonucleotide
  Sense strand starting at position 3698 of SEQ ID NO: 1563670
auaguucagguagagugau

SEQ ID NO: 1823388 - RNA, 19 nt, Artificial Sequence
  Description of Artificial Sequence: Synthetic oligonucleotide
  Antisense strand to SEQ ID NO: 1823387
aucacucuaccugaacuau

SEQ ID NO: 1823389 - RNA, 19 nt, Artificial Sequence
  Description of Artificial Sequence: Synthetic oligonucleotide
  Sense strand starting at position 3816 of SEQ ID NO: 1563670
gcucaaacuguugagaagu

SEQ ID NO: 1823390 - RNA, 19 nt, Artificial Sequence
  Description of Artificial Sequence: Synthetic oligonucleotide
  Antisense strand to SEQ ID NO: 1823389
acuucucaacaguuugagc

SEQ ID NO: 1823391 - RNA, 19 nt, Artificial Sequence
  Description of Artificial Sequence: Synthetic oligonucleotide
  Sense strand starting at position 3860 of SEQ ID NO: 1563670
guguaaggaguccagagua

SEQ ID NO: 1823392 - RNA, 19 nt, Artificial Sequence
  Description of Artificial Sequence: Synthetic oligonucleotide
  Antisense strand to SEQ ID NO: 1823391
uacucuggacuccuuacac

SEQ ID NO: 1823393 - RNA, 19 nt, Artificial Sequence
  Description of Artificial Sequence: Synthetic oligonucleotide
  Sense strand starting at position 1534 of SEQ ID NO: 1563671
gaagcaagcugucagaaag

SEQ ID NO: 1823394 - RNA, 19 nt, Artificial Sequence
  Description of Artificial Sequence: Synthetic oligonucleotide
  Antisense strand to SEQ ID NO: 1823393
cuuucugacagcuugcuuc

SEQ ID NO: 1823395 - RNA, 19 nt, Artificial Sequence
  Description of Artificial Sequence: Synthetic oligonucleotide
  Sense strand starting at position 1559 of SEQ ID NO: 1563671
uggaaagucgggcgccaua

SEQ ID NO: 1823396 - RNA, 19 nt, Artificial Sequence
  Description of Artificial Sequence: Synthetic oligonucleotide
  Antisense strand to SEQ ID NO: 1823395
uauggcgcccgacuuucca

SEQ ID NO: 1823397 - RNA, 19 nt, Artificial Sequence
  Description of Artificial Sequence: Synthetic oligonucleotide
  Sense strand starting at position 1630 of SEQ ID NO: 1563671
gaaggauggucaugucuuu

SEQ ID NO: 1823398 - RNA, 19 nt, Artificial Sequence
  Description of Artificial Sequence: Synthetic oligonucleotide
  Antisense strand to SEQ ID NO: 1823397
aaagacaugaccauccuuc

SEQ ID NO: 1823399 - RNA, 19 nt, Artificial Sequence
  Description of Artificial Sequence: Synthetic oligonucleotide
  Sense strand starting at position 1776 of SEQ ID NO: 1563671
agcccaucuuguuccgaua

SEQ ID NO: 1823400 - RNA, 19 nt, Artificial Sequence
  Description of Artificial Sequence: Synthetic oligonucleotide
  Antisense strand to SEQ ID NO: 1823399
uaucggaacaagaugggcu

SEQ ID NO: 1823401 - RNA, 19 nt, Artificial Sequence
  Description of Artificial Sequence: Synthetic oligonucleotide
  Sense strand starting at position 1779 of SEQ ID NO: 1563671
ccaucuuguuccgauauca

SEQ ID NO: 1823402 - RNA, 19 nt, Artificial Sequence
  Description of Artificial Sequence: Synthetic oligonucleotide
  Antisense strand to SEQ ID NO: 1823401
ugauaucggaacaagaugg

SEQ ID NO: 1823403 - RNA, 19 nt, Artificial Sequence
  Description of Artificial Sequence: Synthetic oligonucleotide
  Sense strand starting at position 1995 of SEQ ID NO: 1563671
gucauaugcugcuuuauac

SEQ ID NO: 1823404 - RNA, 19 nt, Artificial Sequence
  Description of Artificial Sequence: Synthetic oligonucleotide
  Antisense strand to SEQ ID NO: 1823403
guauaaagcagcauaugac

SEQ ID NO: 1823405 - RNA, 19 nt, Artificial Sequence
  Description of Artificial Sequence: Synthetic oligonucleotide
  Sense strand starting at position 2320 of SEQ ID NO: 1563671
agcuuaaggucaccaggau

SEQ ID NO: 1823406 - RNA, 19 nt, Artificial Sequence
  Description of Artificial Sequence: Synthetic oligonucleotide
  Antisense strand to SEQ ID NO: 1823405
auccuggugaccuuaagcu

SEQ ID NO: 1823407 - RNA, 19 nt, Artificial Sequence
  Description of Artificial Sequence: Synthetic oligonucleotide
  Sense strand starting at position 2321 of SEQ ID NO: 1563671
gcuuaaggucaccaggauu

SEQ ID NO: 1823408 - RNA, 19 nt, Artificial Sequence
  Description of Artificial Sequence: Synthetic oligonucleotide
  Antisense strand to SEQ ID NO: 1823407
aauccuggugaccuuaagc

SEQ ID NO: 1823409 - RNA, 19 nt, Artificial Sequence
  Description of Artificial Sequence: Synthetic oligonucleotide
  Sense strand starting at position 2350 of SEQ ID NO: 1563671
cuuagauccucuccggaau

SEQ ID NO: 1823410 - RNA, 19 nt, Artificial Sequence
  Description of Artificial Sequence: Synthetic oligonucleotide
  Antisense strand to SEQ ID NO: 1823409
auuccggagaggaucuaag

SEQ ID NO: 1823411 - RNA, 19 nt, Artificial Sequence
  Description of Artificial Sequence: Synthetic oligonucleotide
  Sense strand starting at position 2351 of SEQ ID NO: 1563671
uuagauccucuccggaaua

SEQ ID NO: 1823412 - RNA, 19 nt, Artificial Sequence
  Description of Artificial Sequence: Synthetic oligonucleotide
  Antisense strand to SEQ ID NO: 1823411
uauuccggagaggaucuaa

SEQ ID NO: 1823413 - RNA, 19 nt, Artificial Sequence
  Description of Artificial Sequence: Synthetic oligonucleotide
  Sense strand starting at position 2421 of SEQ ID NO: 1563671
ugcugagcguuguuccaua

SEQ ID NO: 1823414 - RNA, 19 nt, Artificial Sequence
  Description of Artificial Sequence: Synthetic oligonucleotide
  Antisense strand to SEQ ID NO: 1823413
uauggaacaacgcucagca

SEQ ID NO: 1823415 - RNA, 19 nt, Artificial Sequence
  Description of Artificial Sequence: Synthetic oligonucleotide
  Sense strand starting at position 2426 of SEQ ID NO: 1563671
agcguuguuccauacauuu

SEQ ID NO: 1823416 - RNA, 19 nt, Artificial Sequence
  Description of Artificial Sequence: Synthetic oligonucleotide
  Antisense strand to SEQ ID NO: 1823415
aaauguauggaacaacgcu

SEQ ID NO: 1823417 - RNA, 19 nt, Artificial Sequence
  Description of Artificial Sequence: Synthetic oligonucleotide
  Sense strand starting at position 2463 of SEQ ID NO: 1563671
ggaagccuguuaucccauu

SEQ ID NO: 1823418 - RNA, 19 nt, Artificial Sequence
  Description of Artificial Sequence: Synthetic oligonucleotide
  Antisense strand to SEQ ID NO: 1823417
aaugggauaacaggcuucc

SEQ ID NO: 1823419 - RNA, 19 nt, Artificial Sequence
  Description of Artificial Sequence: Synthetic oligonucleotide
  Sense strand starting at position 2495 of SEQ ID NO: 1563671
agcugaagcucagauaagu

SEQ ID NO: 1823420 - RNA, 19 nt, Artificial Sequence
  Description of Artificial Sequence: Synthetic oligonucleotide
  Antisense strand to SEQ ID NO: 1823419
acuuaucugagcuucagcu

SEQ ID NO: 1823421 - RNA, 19 nt, Artificial Sequence
  Description of Artificial Sequence: Synthetic oligonucleotide
  Sense strand starting at position 2508 of SEQ ID NO: 1563671
auaaguaacuccucaaggu

SEQ ID NO: 1823422 - RNA, 19 nt, Artificial Sequence
  Description of Artificial Sequence: Synthetic oligonucleotide
  Antisense strand to SEQ ID NO: 1823421
accuugaggaguuacuuau

SEQ ID NO: 1823423 - RNA, 19 nt, Artificial Sequence
  Description of Artificial Sequence: Synthetic oligonucleotide
  Sense strand starting at position 2533 of SEQ ID NO: 1563671
guuccaaagcgguaggaua

SEQ ID NO: 1823424 - RNA, 19 nt, Artificial Sequence
  Description of Artificial Sequence: Synthetic oligonucleotide
  Antisense strand to SEQ ID NO: 1823423
uauccuaccgcuuuggaac

SEQ ID NO: 1823425 - RNA, 19 nt, Artificial Sequence
  Description of Artificial Sequence: Synthetic oligonucleotide
  Sense strand starting at position 2545 of SEQ ID NO: 1563671
uaggauagguaggaugaaa

SEQ ID NO: 1823426 - RNA, 19 nt, Artificial Sequence
  Description of Artificial Sequence: Synthetic oligonucleotide
  Antisense strand to SEQ ID NO: 1823425
uuucauccuaccuauccua

SEQ ID NO: 1823427 - RNA, 19 nt, Artificial Sequence
  Description of Artificial Sequence: Synthetic oligonucleotide
  Sense strand starting at position 2564 of SEQ ID NO: 1563671
caauguaucugagacagaa

SEQ ID NO: 1823428 - RNA, 19 nt, Artificial Sequence
  Description of Artificial Sequence: Synthetic oligonucleotide
  Antisense strand to SEQ ID NO: 1823427
uucugucucagauacauug

SEQ ID NO: 1823429 - RNA, 19 nt, Artificial Sequence
  Description of Artificial Sequence: Synthetic oligonucleotide
  Sense strand starting at position 2601 of SEQ ID NO: 1563671
cccugugcuucugcagaua

SEQ ID NO: 1823430 - RNA, 19 nt, Artificial Sequence
  Description of Artificial Sequence: Synthetic oligonucleotide
  Antisense strand to SEQ ID NO: 1823429
uaucugcagaagcacaggg

SEQ ID NO: 1823431 - RNA, 19 nt, Artificial Sequence
  Description of Artificial Sequence: Synthetic oligonucleotide
  Sense strand starting at position 2612 of SEQ ID NO: 1563671
ugcagauagugucuguaga

SEQ ID NO: 1823432 - RNA, 19 nt, Artificial Sequence
  Description of Artificial Sequence: Synthetic oligonucleotide
  Antisense strand to SEQ ID NO: 1823431
ucuacagacacuaucugca

SEQ ID NO: 1823433 - RNA, 19 nt, Artificial Sequence
  Description of Artificial Sequence: Synthetic oligonucleotide
  Sense strand starting at position 2613 of SEQ ID NO: 1563671
gcagauagugucuguagaa

SEQ ID NO: 1823434 - RNA, 19 nt, Artificial Sequence
  Description of Artificial Sequence: Synthetic oligonucleotide
  Antisense strand to SEQ ID NO: 1823433
uucuacagacacuaucugc

SEQ ID NO: 1823435 - RNA, 19 nt, Artificial Sequence
  Description of Artificial Sequence: Synthetic oligonucleotide
  Sense strand starting at position 2614 of SEQ ID NO: 1563671
cagauagugucuguagaaa

SEQ ID NO: 1823436 - RNA, 19 nt, Artificial Sequence
  Description of Artificial Sequence: Synthetic oligonucleotide
  Antisense strand to SEQ ID NO: 1823435
uuucuacagacacuaucug

SEQ ID NO: 1823437 - RNA, 19 nt, Artificial Sequence
  Description of Artificial Sequence: Synthetic oligonucleotide
  Sense strand starting at position 2989 of SEQ ID NO: 1563671
gggaauaaauggucuguca

SEQ ID NO: 1823438 - RNA, 19 nt, Artificial Sequence
  Description of Artificial Sequence: Synthetic oligonucleotide
  Antisense strand to SEQ ID NO: 1823437
ugacagaccauuuauuccc

SEQ ID NO: 1823439 - RNA, 19 nt, Artificial Sequence
  Description of Artificial Sequence: Synthetic oligonucleotide
  Sense strand starting at position 2991 of SEQ ID NO: 1563671
gaauaaauggucugucaaa

SEQ ID NO: 1823440 - RNA, 19 nt, Artificial Sequence
  Description of Artificial Sequence: Synthetic oligonucleotide
  Antisense strand to SEQ ID NO: 1823439
uuugacagaccauuuauuc

SEQ ID NO: 1823441 - RNA, 19 nt, Artificial Sequence
  Description of Artificial Sequence: Synthetic oligonucleotide
  Sense strand starting at position 3066 of SEQ ID NO: 1563671
gggacaaggucuggcuaua

SEQ ID NO: 1823442 - RNA, 19 nt, Artificial Sequence
  Description of Artificial Sequence: Synthetic oligonucleotide
  Antisense strand to SEQ ID NO: 1823441
uauagccagaccuuguccc

SEQ ID NO: 1823443 - RNA, 19 nt, Artificial Sequence
  Description of Artificial Sequence: Synthetic oligonucleotide
  Sense strand starting at position 3077 of SEQ ID NO: 1563671
uggcuauaucacuaaggcu

SEQ ID NO: 1823444 - RNA, 19 nt, Artificial Sequence
  Description of Artificial Sequence: Synthetic oligonucleotide
  Antisense strand to SEQ ID NO: 1823443
agccuuagugauauagcca

SEQ ID NO: 1823445 - RNA, 19 nt, Artificial Sequence
  Description of Artificial Sequence: Synthetic oligonucleotide
  Sense strand starting at position 3080 of SEQ ID NO: 1563671
cuauaucacuaaggcuaga

SEQ ID NO: 1823446 - RNA, 19 nt, Artificial Sequence
  Description of Artificial Sequence: Synthetic oligonucleotide
  Antisense strand to SEQ ID NO: 1823445
ucuagccuuagugauauag

SEQ ID NO: 1823447 - RNA, 19 nt, Artificial Sequence
  Description of Artificial Sequence: Synthetic oligonucleotide
  Sense strand starting at position 3459 of SEQ ID NO: 1563671
uugcucuagggaggaaauu

SEQ ID NO: 1823448 - RNA, 19 nt, Artificial Sequence
  Description of Artificial Sequence: Synthetic oligonucleotide
  Antisense strand to SEQ ID NO: 1823447
aauuuccucccuagagcaa

SEQ ID NO: 1823449 - RNA, 19 nt, Artificial Sequence
  Description of Artificial Sequence: Synthetic oligonucleotide
  Sense strand starting at position 3468 of SEQ ID NO: 1563671
ggaggaaauucuccucuau

SEQ ID NO: 1823450 - RNA, 19 nt, Artificial Sequence
  Description of Artificial Sequence: Synthetic oligonucleotide
  Antisense strand to SEQ ID NO: 1823449
auagaggagaauuuccucc

SEQ ID NO: 1823451 - RNA, 19 nt, Artificial Sequence
  Description of Artificial Sequence: Synthetic oligonucleotide
  Sense strand starting at position 3611 of SEQ ID NO: 1563671
ugcagugaucccuggaguc

SEQ ID NO: 1823452 - RNA, 19 nt, Artificial Sequence
  Description of Artificial Sequence: Synthetic oligonucleotide
  Antisense strand to SEQ ID NO: 1823451
gacuccagggaucacugca

SEQ ID NO: 1823453 - RNA, 19 nt, Artificial Sequence
  Description of Artificial Sequence: Synthetic oligonucleotide
  Sense strand starting at position 3613 of SEQ ID NO: 1563671
cagugaucccuggagucau

SEQ ID NO: 1823454 - RNA, 19 nt, Artificial Sequence
  Description of Artificial Sequence: Synthetic oligonucleotide
  Antisense strand to SEQ ID NO: 1823453
augacuccagggaucacug

SEQ ID NO: 1823455 - RNA, 19 nt, Artificial Sequence
  Description of Artificial Sequence: Synthetic oligonucleotide
  Sense strand starting at position 3644 of SEQ ID NO: 1563671
gugcaugcuccacagcaga

SEQ ID NO: 1823456 - RNA, 19 nt, Artificial Sequence
  Description of Artificial Sequence: Synthetic oligonucleotide
  Antisense strand to SEQ ID NO: 1823455
ucugcuguggagcaugcac

SEQ ID NO: 1823457 - RNA, 19 nt, Artificial Sequence
  Description of Artificial Sequence: Synthetic oligonucleotide
  Sense strand starting at position 3660 of SEQ ID NO: 1563671
agagcaacugguuguggaa

SEQ ID NO: 1823458 - RNA, 19 nt, Artificial Sequence
  Description of Artificial Sequence: Synthetic oligonucleotide
  Antisense strand to SEQ ID NO: 1823457
uuccacaaccaguugcucu

SEQ ID NO: 1823459 - RNA, 19 nt, Artificial Sequence
  Description of Artificial Sequence: Synthetic oligonucleotide
  Sense strand starting at position 3700 of SEQ ID NO: 1563671
ggugguccucuaugcugua

SEQ ID NO: 1823460 - RNA, 19 nt, Artificial Sequence
  Description of Artificial Sequence: Synthetic oligonucleotide
  Antisense strand to SEQ ID NO: 1823459
uacagcauagaggaccacc

SEQ ID NO: 1823461 - RNA, 19 nt, Artificial Sequence
  Description of Artificial Sequence: Synthetic oligonucleotide
  Sense strand starting at position 3705 of SEQ ID NO: 1563671
uccucuaugcuguagagga

SEQ ID NO: 1823462 - RNA, 19 nt, Artificial Sequence
  Description of Artificial Sequence: Synthetic oligonucleotide
  Antisense strand to SEQ ID NO: 1823461
uccucuacagcauagagga

SEQ ID NO: 1823463 - RNA, 19 nt, Artificial Sequence
  Description of Artificial Sequence: Synthetic oligonucleotide
  Sense strand starting at position 3707 of SEQ ID NO: 1563671
cucuaugcuguagaggaaa

SEQ ID NO: 1823464 - RNA, 19 nt, Artificial Sequence
  Description of Artificial Sequence: Synthetic oligonucleotide
  Antisense strand to SEQ ID NO: 1823463
uuuccucuacagcauagag

SEQ ID NO: 1823465 - RNA, 19 nt, Artificial Sequence
  Description of Artificial Sequence: Synthetic oligonucleotide
  Sense strand starting at position 3799 of SEQ ID NO: 1563671
ggacauagguuacuucuca

SEQ ID NO: 1823466 - RNA, 19 nt, Artificial Sequence
  Description of Artificial Sequence: Synthetic oligonucleotide
  Antisense strand to SEQ ID NO: 1823465
ugagaaguaaccuaugucc

SEQ ID NO: 1823467 - RNA, 19 nt, Artificial Sequence
  Description of Artificial Sequence: Synthetic oligonucleotide
  Sense strand starting at position 3803 of SEQ ID NO: 1563671
auagguuacuucucagaac

SEQ ID NO: 1823468 - RNA, 19 nt, Artificial Sequence
  Description of Artificial Sequence: Synthetic oligonucleotide
  Antisense strand to SEQ ID NO: 1823467
guucugagaaguaaccuau

SEQ ID NO: 1823469 - RNA, 19 nt, Artificial Sequence
  Description of Artificial Sequence: Synthetic oligonucleotide
  Sense strand starting at position 3806 of SEQ ID NO: 1563671
gguuacuucucagaacaag

SEQ ID NO: 1823470 - RNA, 19 nt, Artificial Sequence
  Description of Artificial Sequence: Synthetic oligonucleotide
  Antisense strand to SEQ ID NO: 1823469
cuuguucugagaaguaacc

SEQ ID NO: 1823471 - RNA, 19 nt, Artificial Sequence
  Description of Artificial Sequence: Synthetic oligonucleotide
  Sense strand starting at position 3958 of SEQ ID NO: 1563671
ugggauucuauaugcaaag

SEQ ID NO: 1823472 - RNA, 19 nt, Artificial Sequence
  Description of Artificial Sequence: Synthetic oligonucleotide
  Antisense strand to SEQ ID NO: 1823471
cuuugcauauagaauccca

SEQ ID NO: 1823473 - RNA, 19 nt, Artificial Sequence
  Description of Artificial Sequence: Synthetic oligonucleotide
  Sense strand starting at position 323 of SEQ ID NO: 1563672
aggaauuucuggcugccuu

SEQ ID NO: 1823474 - RNA, 19 nt, Artificial Sequence
  Description of Artificial Sequence: Synthetic oligonucleotide
  Antisense strand to SEQ ID NO: 1823473
aaggcagccagaaauuccu

SEQ ID NO: 1823475 - RNA, 19 nt, Artificial Sequence
  Description of Artificial Sequence: Synthetic oligonucleotide
  Sense strand starting at position 417 of SEQ ID NO: 1563672
ccugcaguucugcaauauc

SEQ ID NO: 1823476 - RNA, 19 nt, Artificial Sequence
  Description of Artificial Sequence: Synthetic oligonucleotide
  Antisense strand to SEQ ID NO: 1823475
gauauugcagaacugcagg

SEQ ID NO: 1823477 - RNA, 19 nt, Artificial Sequence
  Description of Artificial Sequence: Synthetic oligonucleotide
  Sense strand starting at position 420 of SEQ ID NO: 1563672
gcaguucugcaauaucuca

SEQ ID NO: 1823478 - RNA, 19 nt, Artificial Sequence
  Description of Artificial Sequence: Synthetic oligonucleotide
  Antisense strand to SEQ ID NO: 1823477
ugagauauugcagaacugc

SEQ ID NO: 1823479 - RNA, 19 nt, Artificial Sequence
  Description of Artificial Sequence: Synthetic oligonucleotide
  Sense strand starting at position 427 of SEQ ID NO: 1563672
ugcaauaucucagucacug

SEQ ID NO: 1823480 - RNA, 19 nt, Artificial Sequence
  Description of Artificial Sequence: Synthetic oligonucleotide
  Antisense strand to SEQ ID NO: 1823479
cagugacugagauauugca

SEQ ID NO: 1823481 - RNA, 19 nt, Artificial Sequence
  Description of Artificial Sequence: Synthetic oligonucleotide
  Sense strand starting at position 552 of SEQ ID NO: 1563672
cagagagcuucugcuuaug

SEQ ID NO: 1823482 - RNA, 19 nt, Artificial Sequence
  Description of Artificial Sequence: Synthetic oligonucleotide
  Antisense strand to SEQ ID NO: 1823481
cauaagcagaagcucucug

SEQ ID NO: 1823483 - RNA, 19 nt, Artificial Sequence
  Description of Artificial Sequence: Synthetic oligonucleotide
  Sense strand starting at position 639 of SEQ ID NO: 1563672
cucucugcuuggguuauua

SEQ ID NO: 1823484 - RNA, 19 nt, Artificial Sequence
  Description of Artificial Sequence: Synthetic oligonucleotide
  Antisense strand to SEQ ID NO: 1823483
uaauaacccaagcagagag

SEQ ID NO: 1823485 - RNA, 19 nt, Artificial Sequence
  Description of Artificial Sequence: Synthetic oligonucleotide
  Sense strand starting at position 641 of SEQ ID NO: 1563672
cucugcuuggguuauuaua

SEQ ID NO: 1823486 - RNA, 19 nt, Artificial Sequence
  Description of Artificial Sequence: Synthetic oligonucleotide
  Antisense strand to SEQ ID NO: 1823485
uauaauaacccaagcagag

SEQ ID NO: 1823487 - RNA, 19 nt, Artificial Sequence
  Description of Artificial Sequence: Synthetic oligonucleotide
  Sense strand starting at position 643 of SEQ ID NO: 1563672
cugcuuggguuauuauaac

SEQ ID NO: 1823488 - RNA, 19 nt, Artificial Sequence
  Description of Artificial Sequence: Synthetic oligonucleotide
  Antisense strand to SEQ ID NO: 1823487
guuauaauaacccaagcag

SEQ ID NO: 1823489 - RNA, 19 nt, Artificial Sequence
  Description of Artificial Sequence: Synthetic oligonucleotide
  Sense strand starting at position 779 of SEQ ID NO: 1563672
gaagcugaguaacuuacua

SEQ ID NO: 1823490 - RNA, 19 nt, Artificial Sequence
  Description of Artificial Sequence: Synthetic oligonucleotide
  Antisense strand to SEQ ID NO: 1823489
uaguaaguuacucagcuuc

SEQ ID NO: 1823491 - RNA, 19 nt, Artificial Sequence
  Description of Artificial Sequence: Synthetic oligonucleotide
  Sense strand starting at position 1506 of SEQ ID NO: 1563672
cuugccuuguaaucaagga

SEQ ID NO: 1823492 - RNA, 19 nt, Artificial Sequence
  Description of Artificial Sequence: Synthetic oligonucleotide
  Antisense strand to SEQ ID NO: 1823491
uccuugauuacaaggcaag

SEQ ID NO: 1823493 - RNA, 19 nt, Artificial Sequence
  Description of Artificial Sequence: Synthetic oligonucleotide
  Sense strand starting at position 1581 of SEQ ID NO: 1563672
caggaaaugucucagagag

SEQ ID NO: 1823494 - RNA, 19 nt, Artificial Sequence
  Description of Artificial Sequence: Synthetic oligonucleotide
  Antisense strand to SEQ ID NO: 1823493
cucucugagacauuuccug

SEQ ID NO: 1823495 - RNA, 19 nt, Artificial Sequence
  Description of Artificial Sequence: Synthetic oligonucleotide
  Sense strand starting at position 1583 of SEQ ID NO: 1563672
ggaaaugucucagagagac

SEQ ID NO: 1823496 - RNA, 19 nt, Artificial Sequence
  Description of Artificial Sequence: Synthetic oligonucleotide
  Antisense strand to SEQ ID NO: 1823495
gucucucugagacauuucc

SEQ ID NO: 1823497 - RNA, 19 nt, Artificial Sequence
  Description of Artificial Sequence: Synthetic oligonucleotide
  Sense strand starting at position 1631 of SEQ ID NO: 1563672
ccucaagucuuccugagaa

SEQ ID NO: 1823498 - RNA, 19 nt, Artificial Sequence
  Description of Artificial Sequence: Synthetic oligonucleotide
  Antisense strand to SEQ ID NO: 1823497
uucucaggaagacuugagg

SEQ ID NO: 1823499 - RNA, 19 nt, Artificial Sequence
  Description of Artificial Sequence: Synthetic oligonucleotide
  Sense strand starting at position 1633 of SEQ ID NO: 1563672
ucaagucuuccugagaauc

SEQ ID NO: 1823500 - RNA, 19 nt, Artificial Sequence
  Description of Artificial Sequence: Synthetic oligonucleotide
  Antisense strand to SEQ ID NO: 1823499
gauucucaggaagacuuga

SEQ ID NO: 1823501 - RNA, 19 nt, Artificial Sequence
  Description of Artificial Sequence: Synthetic oligonucleotide
  Sense strand starting at position 1643 of SEQ ID NO: 1563672
cugagaaucuggcccuaug

SEQ ID NO: 1823502 - RNA, 19 nt, Artificial Sequence
  Description of Artificial Sequence: Synthetic oligonucleotide
  Antisense strand to SEQ ID NO: 1823501
cauagggccagauucucag

SEQ ID NO: 1823503 - RNA, 19 nt, Artificial Sequence
  Description of Artificial Sequence: Synthetic oligonucleotide
  Sense strand starting at position 2189 of SEQ ID NO: 1563672
ugccuugucccagaggaag

SEQ ID NO: 1823504 - RNA, 19 nt, Artificial Sequence
  Description of Artificial Sequence: Synthetic oligonucleotide
  Antisense strand to SEQ ID NO: 1823503
cuuccucugggacaaggca

SEQ ID NO: 1823505 - RNA, 19 nt, Artificial Sequence
  Description of Artificial Sequence: Synthetic oligonucleotide
  Sense strand starting at position 2209 of SEQ ID NO: 1563672
gaggcaucauugucaccca

SEQ ID NO: 1823506 - RNA, 19 nt, Artificial Sequence
  Description of Artificial Sequence: Synthetic oligonucleotide
  Antisense strand to SEQ ID NO: 1823505
ugggugacaaugaugccuc

SEQ ID NO: 1823507 - RNA, 19 nt, Artificial Sequence
  Description of Artificial Sequence: Synthetic oligonucleotide
  Sense strand starting at position 2232 of SEQ ID NO: 1563672
uguuuagucucucugggag

SEQ ID NO: 1823508 - RNA, 19 nt, Artificial Sequence
  Description of Artificial Sequence: Synthetic oligonucleotide
  Antisense strand to SEQ ID NO: 1823507
cucccagagagacuaaaca

SEQ ID NO: 1823509 - RNA, 19 nt, Artificial Sequence
  Description of Artificial Sequence: Synthetic oligonucleotide
  Sense strand starting at position 2235 of SEQ ID NO: 1563672
uuagucucucugggagacu

SEQ ID NO: 1823510 - RNA, 19 nt, Artificial Sequence
  Description of Artificial Sequence: Synthetic oligonucleotide
  Antisense strand to SEQ ID NO: 1823509
agucucccagagagacuaa

SEQ ID NO: 1823511 - RNA, 19 nt, Artificial Sequence
  Description of Artificial Sequence: Synthetic oligonucleotide
  Sense strand starting at position 2808 of SEQ ID NO: 1563672
cuuggcaaucauuaaggua

SEQ ID NO: 1823512 - RNA, 19 nt, Artificial Sequence
  Description of Artificial Sequence: Synthetic oligonucleotide
  Antisense strand to SEQ ID NO: 1823511
uaccuuaaugauugccaag

SEQ ID NO: 1823513 - RNA, 19 nt, Artificial Sequence
  Description of Artificial Sequence: Synthetic oligonucleotide
  Sense strand starting at position 2851 of SEQ ID NO: 1563672
gagggaucagucuaguuuc

SEQ ID NO: 1823514 - RNA, 19 nt, Artificial Sequence
  Description of Artificial Sequence: Synthetic oligonucleotide
  Antisense strand to SEQ ID NO: 1823513
gaaacuagacugaucccuc

SEQ ID NO: 1823515 - RNA, 19 nt, Artificial Sequence
  Description of Artificial Sequence: Synthetic oligonucleotide
  Sense strand starting at position 2920 of SEQ ID NO: 1563672
ccugaauggcaguggagaa

SEQ ID NO: 1823516 - RNA, 19 nt, Artificial Sequence
  Description of Artificial Sequence: Synthetic oligonucleotide
  Antisense strand to SEQ ID NO: 1823515
uucuccacugccauucagg

SEQ ID NO: 1823517 - RNA, 19 nt, Artificial Sequence
  Description of Artificial Sequence: Synthetic oligonucleotide
  Sense strand starting at position 2921 of SEQ ID NO: 1563672
cugaauggcaguggagaaa

SEQ ID NO: 1823518 - RNA, 19 nt, Artificial Sequence
  Description of Artificial Sequence: Synthetic oligonucleotide
  Antisense strand to SEQ ID NO: 1823517
uuucuccacugccauucag

SEQ ID NO: 1823519 - RNA, 19 nt, Artificial Sequence
  Description of Artificial Sequence: Synthetic oligonucleotide
  Sense strand starting at position 2941 of SEQ ID NO: 1563672
aagggaaguuagcagagaa

SEQ ID NO: 1823520 - RNA, 19 nt, Artificial Sequence
  Description of Artificial Sequence: Synthetic oligonucleotide
  Antisense strand to SEQ ID NO: 1823519
uucucugcuaacuucccuu

SEQ ID NO: 1823521 - RNA, 19 nt, Artificial Sequence
  Description of Artificial Sequence: Synthetic oligonucleotide
  Sense strand starting at position 3451 of SEQ ID NO: 1563672
gccgaacuucuggaggaga

SEQ ID NO: 1823522 - RNA, 19 nt, Artificial Sequence
  Description of Artificial Sequence: Synthetic oligonucleotide
  Antisense strand to SEQ ID NO: 1823521
ucuccuccagaaguucggc

SEQ ID NO: 1823523 - RNA, 19 nt, Artificial Sequence
  Description of Artificial Sequence: Synthetic oligonucleotide
  Sense strand starting at position 3481 of SEQ ID NO: 1563672
cccaauaaauuguugugaa

SEQ ID NO: 1823524 - RNA, 19 nt, Artificial Sequence
  Description of Artificial Sequence: Synthetic oligonucleotide
  Antisense strand to SEQ ID NO: 1823523
uucacaacaauuuauuggg

SEQ ID NO: 1823525 - RNA, 19 nt, Artificial Sequence
  Description of Artificial Sequence: Synthetic oligonucleotide
  Sense strand starting at position 3549 of SEQ ID NO: 1563672
agggaaugaugagaauaaa

SEQ ID NO: 1823526 - RNA, 19 nt, Artificial Sequence
  Description of Artificial Sequence: Synthetic oligonucleotide
  Antisense strand to SEQ ID NO: 1823525
uuuauucucaucauucccu

SEQ ID NO: 1823527 - RNA, 19 nt, Artificial Sequence
  Description of Artificial Sequence: Synthetic oligonucleotide
  Sense strand starting at position 3600 of SEQ ID NO: 1563672
gugagguuugaguggagaa

SEQ ID NO: 1823528 - RNA, 19 nt, Artificial Sequence
  Description of Artificial Sequence: Synthetic oligonucleotide
  Antisense strand to SEQ ID NO: 1823527
uucuccacucaaaccucac

SEQ ID NO: 1823529 - RNA, 19 nt, Artificial Sequence
  Description of Artificial Sequence: Synthetic oligonucleotide
  Sense strand starting at position 3601 of SEQ ID NO: 1563672
ugagguuugaguggagaag

SEQ ID NO: 1823530 - RNA, 19 nt, Artificial Sequence
  Description of Artificial Sequence: Synthetic oligonucleotide
  Antisense strand to SEQ ID NO: 1823529
cuucuccacucaaaccuca

SEQ ID NO: 1823531 - RNA, 19 nt, Artificial Sequence
  Description of Artificial Sequence: Synthetic oligonucleotide
  Sense strand starting at position 3602 of SEQ ID NO: 1563672
gagguuugaguggagaagu

SEQ ID NO: 1823532 - RNA, 19 nt, Artificial Sequence
  Description of Artificial Sequence: Synthetic oligonucleotide
  Antisense strand to SEQ ID NO: 1823531
acuucuccacucaaaccuc

SEQ ID NO: 1823533 - RNA, 19 nt, Artificial Sequence
  Description of Artificial Sequence: Synthetic oligonucleotide
  Sense strand starting at position 3603 of SEQ ID NO: 1563672
agguuugaguggagaagua

SEQ ID NO: 1823534 - RNA, 19 nt, Artificial Sequence
  Description of Artificial Sequence: Synthetic oligonucleotide
  Antisense strand to SEQ ID NO: 1823533
uacuucuccacucaaaccu

SEQ ID NO: 1823535 - RNA, 19 nt, Artificial Sequence
  Description of Artificial Sequence: Synthetic oligonucleotide
  Sense strand starting at position 3656 of SEQ ID NO: 1563672
guuagcauuccagggagga

SEQ ID NO: 1823536 - RNA, 19 nt, Artificial Sequence
  Description of Artificial Sequence: Synthetic oligonucleotide
  Antisense strand to SEQ ID NO: 1823535
uccucccuggaaugcuaac

SEQ ID NO: 1823537 - RNA, 19 nt, Artificial Sequence
  Description of Artificial Sequence: Synthetic oligonucleotide
  Sense strand starting at position 3764 of SEQ ID NO: 1563672
aggaaacugucagucaguu

SEQ ID NO: 1823538 - RNA, 19 nt, Artificial Sequence
  Description of Artificial Sequence: Synthetic oligonucleotide
  Antisense strand to SEQ ID NO: 1823537
aacugacugacaguuuccu

SEQ ID NO: 1823539 - RNA, 19 nt, Artificial Sequence
  Description of Artificial Sequence: Synthetic oligonucleotide
  Sense strand starting at position 3768 of SEQ ID NO: 1563672
aacugucagucaguuaaga

SEQ ID NO: 1823540 - RNA, 19 nt, Artificial Sequence
  Description of Artificial Sequence: Synthetic oligonucleotide
  Antisense strand to SEQ ID NO: 1823539
ucuuaacugacugacaguu

SEQ ID NO: 1823541 - RNA, 19 nt, Artificial Sequence
  Description of Artificial Sequence: Synthetic oligonucleotide
  Sense strand starting at position 3779 of SEQ ID NO: 1563672
aguuaagaggcuuagagua

SEQ ID NO: 1823542 - RNA, 19 nt, Artificial Sequence
  Description of Artificial Sequence: Synthetic oligonucleotide
  Antisense strand to SEQ ID NO: 1823541
uacucuaagccucuuaacu

SEQ ID NO: 1823543 - RNA, 19 nt, Artificial Sequence
  Description of Artificial Sequence: Synthetic oligonucleotide
  Sense strand starting at position 3819 of SEQ ID NO: 1563672
uagggaauccuuuaguugu

SEQ ID NO: 1823544 - RNA, 19 nt, Artificial Sequence
  Description of Artificial Sequence: Synthetic oligonucleotide
  Antisense strand to SEQ ID NO: 1823543
acaacuaaaggauucccua

SEQ ID NO: 1823545 - RNA, 19 nt, Artificial Sequence
  Description of Artificial Sequence: Synthetic oligonucleotide
  Sense strand starting at position 3907 of SEQ ID NO: 1563672
auucuucccgcugagagua

SEQ ID NO: 1823546 - RNA, 19 nt, Artificial Sequence
  Description of Artificial Sequence: Synthetic oligonucleotide
  Antisense strand to SEQ ID NO: 1823545
uacucucagcgggaagaau

SEQ ID NO: 1823547 - RNA, 19 nt, Artificial Sequence
  Description of Artificial Sequence: Synthetic oligonucleotide
  Sense strand starting at position 3919 of SEQ ID NO: 1563672
gagaguacaaguuguaaug

SEQ ID NO: 1823548 - RNA, 19 nt, Artificial Sequence
  Description of Artificial Sequence: Synthetic oligonucleotide
  Antisense strand to SEQ ID NO: 1823547
cauuacaacuuguacucuc

SEQ ID NO: 1823549 - RNA, 19 nt, Artificial Sequence
  Description of Artificial Sequence: Synthetic oligonucleotide
  Sense strand starting at position 3925 of SEQ ID NO: 1563672
acaaguuguaauggauaga

SEQ ID NO: 1823550 - RNA, 19 nt, Artificial Sequence
  Description of Artificial Sequence: Synthetic oligonucleotide
  Antisense strand to SEQ ID NO: 1823549
ucuauccauuacaacuugu

SEQ ID NO: 1823551 - RNA, 19 nt, Artificial Sequence
  Description of Artificial Sequence: Synthetic oligonucleotide
  Sense strand starting at position 3951 of SEQ ID NO: 1563672
accguuucccguguacuua

SEQ ID NO: 1823552 - RNA, 19 nt, Artificial Sequence
  Description of Artificial Sequence: Synthetic oligonucleotide
  Antisense strand to SEQ ID NO: 1823551
uaaguacacgggaaacggu

SEQ ID NO: 1823553 - RNA, 19 nt, Artificial Sequence
  Description of Artificial Sequence: Synthetic oligonucleotide
  Sense strand starting at position 53 of SEQ ID NO: 1563673
ggucuuucuuaaguuggga

SEQ ID NO: 1823554 - RNA, 19 nt, Artificial Sequence
  Description of Artificial Sequence: Synthetic oligonucleotide
  Antisense strand to SEQ ID NO: 1823553
ucccaacuuaagaaagacc

SEQ ID NO: 1823555 - RNA, 19 nt, Artificial Sequence
  Description of Artificial Sequence: Synthetic oligonucleotide
  Sense strand starting at position 56 of SEQ ID NO: 1563673
cuuucuuaaguugggaaga

SEQ ID NO: 1823556 - RNA, 19 nt, Artificial Sequence
  Description of Artificial Sequence: Synthetic oligonucleotide
  Antisense strand to SEQ ID NO: 1823555
ucuucccaacuuaagaaag

SEQ ID NO: 1823557 - RNA, 19 nt, Artificial Sequence
  Description of Artificial Sequence: Synthetic oligonucleotide
  Sense strand starting at position 69 of SEQ ID NO: 1563673
ggaagaugaugaucgugua

SEQ ID NO: 1823558 - RNA, 19 nt, Artificial Sequence
  Description of Artificial Sequence: Synthetic oligonucleotide
  Antisense strand to SEQ ID NO: 1823557
uacacgaucaucaucuucc

SEQ ID NO: 1823559 - RNA, 19 nt, Artificial Sequence
  Description of Artificial Sequence: Synthetic oligonucleotide
  Sense strand starting at position 70 of SEQ ID NO: 1563673
gaagaugaugaucguguau

SEQ ID NO: 1823560 - RNA, 19 nt, Artificial Sequence
  Description of Artificial Sequence: Synthetic oligonucleotide
  Antisense strand to SEQ ID NO: 1823559
auacacgaucaucaucuuc

SEQ ID NO: 1823561 - RNA, 19 nt, Artificial Sequence
  Description of Artificial Sequence: Synthetic oligonucleotide
  Sense strand starting at position 76 of SEQ ID NO: 1563673
gaugaucguguauauuaug

SEQ ID NO: 1823562 - RNA, 19 nt, Artificial Sequence
  Description of Artificial Sequence: Synthetic oligonucleotide
  Antisense strand to SEQ ID NO: 1823561
cauaauauacacgaucauc

SEQ ID NO: 1823563 - RNA, 19 nt, Artificial Sequence
  Description of Artificial Sequence: Synthetic oligonucleotide
  Sense strand starting at position 245 of SEQ ID NO: 1563673
caggguaagucauuaaaua

SEQ ID NO: 1823564 - RNA, 19 nt, Artificial Sequence
  Description of Artificial Sequence: Synthetic oligonucleotide
  Antisense strand to SEQ ID NO: 1823563
uauuuaaugacuuacccug

SEQ ID NO: 1823565 - RNA, 19 nt, Artificial Sequence
  Description of Artificial Sequence: Synthetic oligonucleotide
  Sense strand starting at position 394 of SEQ ID NO: 1563673
auguauaaugccuauguau

SEQ ID NO: 1823566 - RNA, 19 nt, Artificial Sequence
  Description of Artificial Sequence: Synthetic oligonucleotide
  Antisense strand to SEQ ID NO: 1823565
auacauaggcauuauacau

SEQ ID NO: 1823567 - RNA, 19 nt, Artificial Sequence
  Description of Artificial Sequence: Synthetic oligonucleotide
  Sense strand starting at position 525 of SEQ ID NO: 1563673
uugccaaguuagucaaaua

SEQ ID NO: 1823568 - RNA, 19 nt, Artificial Sequence
  Description of Artificial Sequence: Synthetic oligonucleotide
  Antisense strand to SEQ ID NO: 1823567
uauuugacuaacuuggcaa

SEQ ID NO: 1823569 - RNA, 19 nt, Artificial Sequence
  Description of Artificial Sequence: Synthetic oligonucleotide
  Sense strand starting at position 546 of SEQ ID NO: 1563673
cauugaaagcaugggcuuu

SEQ ID NO: 1823570 - RNA, 19 nt, Artificial Sequence
  Description of Artificial Sequence: Synthetic oligonucleotide
  Antisense strand to SEQ ID NO: 1823569
aaagcccaugcuuucaaug

SEQ ID NO: 1823571 - RNA, 19 nt, Artificial Sequence
  Description of Artificial Sequence: Synthetic oligonucleotide
  Sense strand starting at position 940 of SEQ ID NO: 1563673
ucacuuuaagagcaaguuu

SEQ ID NO: 1823572 - RNA, 19 nt, Artificial Sequence
  Description of Artificial Sequence: Synthetic oligonucleotide
  Antisense strand to SEQ ID NO: 1823571
aaacuugcucuuaaaguga

SEQ ID NO: 1823573 - RNA, 19 nt, Artificial Sequence
  Description of Artificial Sequence: Synthetic oligonucleotide
  Sense strand starting at position 1049 of SEQ ID NO: 1563673
acagaauuuccgugucgca

SEQ ID NO: 1823574 - RNA, 19 nt, Artificial Sequence
  Description of Artificial Sequence: Synthetic oligonucleotide
  Antisense strand to SEQ ID NO: 1823573
ugcgacacggaaauucugu

SEQ ID NO: 1823575 - RNA, 19 nt, Artificial Sequence
  Description of Artificial Sequence: Synthetic oligonucleotide
  Sense strand starting at position 1061 of SEQ ID NO: 1563673
ugucgcauuaugcugugaa

SEQ ID NO: 1823576 - RNA, 19 nt, Artificial Sequence
  Description of Artificial Sequence: Synthetic oligonucleotide
  Antisense strand to SEQ ID NO: 1823575
uucacagcauaaugcgaca

SEQ ID NO: 1823577 - RNA, 19 nt, Artificial Sequence
  Description of Artificial Sequence: Synthetic oligonucleotide
  Sense strand starting at position 1131 of SEQ ID NO: 1563673
auuugcgagucuucggaau

SEQ ID NO: 1823578 - RNA, 19 nt, Artificial Sequence
  Description of Artificial Sequence: Synthetic oligonucleotide
  Antisense strand to SEQ ID NO: 1823577
auuccgaagacucgcaaau

SEQ ID NO: 1823579 - RNA, 19 nt, Artificial Sequence
  Description of Artificial Sequence: Synthetic oligonucleotide
  Sense strand starting at position 1180 of SEQ ID NO: 1563673
ugugacuguuuccuaauuu

SEQ ID NO: 1823580 - RNA, 19 nt, Artificial Sequence
  Description of Artificial Sequence: Synthetic oligonucleotide
  Antisense strand to SEQ ID NO: 1823579
aaauuaggaaacagucaca

SEQ ID NO: 1823581 - RNA, 19 nt, Artificial Sequence
  Description of Artificial Sequence: Synthetic oligonucleotide
  Sense strand starting at position 2337 of SEQ ID NO: 1563673
ucucaaaguguguagaacu

SEQ ID NO: 1823582 - RNA, 19 nt, Artificial Sequence
  Description of Artificial Sequence: Synthetic oligonucleotide
  Antisense strand to SEQ ID NO: 1823581
aguucuacacacuuugaga

SEQ ID NO: 1823583 - RNA, 19 nt, Artificial Sequence
  Description of Artificial Sequence: Synthetic oligonucleotide
  Sense strand starting at position 2490 of SEQ ID NO: 1563673
uuccuuuggcugggauuga

SEQ ID NO: 1823584 - RNA, 19 nt, Artificial Sequence
  Description of Artificial Sequence: Synthetic oligonucleotide
  Antisense strand to SEQ ID NO: 1823583
ucaaucccagccaaaggaa

SEQ ID NO: 1823585 - RNA, 19 nt, Artificial Sequence
  Description of Artificial Sequence: Synthetic oligonucleotide
  Sense strand starting at position 2579 of SEQ ID NO: 1563673
gcggaaguucuuucgguuu

SEQ ID NO: 1823586 - RNA, 19 nt, Artificial Sequence
  Description of Artificial Sequence: Synthetic oligonucleotide
  Antisense strand to SEQ ID NO: 1823585
aaaccgaaagaacuuccgc

SEQ ID NO: 1823587 - RNA, 19 nt, Artificial Sequence
  Description of Artificial Sequence: Synthetic oligonucleotide
  Sense strand starting at position 2752 of SEQ ID NO: 1563673
uccauuaacugcuuuggau

SEQ ID NO: 1823588 - RNA, 19 nt, Artificial Sequence
  Description of Artificial Sequence: Synthetic oligonucleotide
  Antisense strand to SEQ ID NO: 1823587
auccaaagcaguuaaugga

SEQ ID NO: 1823589 - RNA, 19 nt, Artificial Sequence
  Description of Artificial Sequence: Synthetic oligonucleotide
  Sense strand starting at position 3188 of SEQ ID NO: 1563673
aaaucucuguguucuggaa

SEQ ID NO: 1823590 - RNA, 19 nt, Artificial Sequence
  Description of Artificial Sequence: Synthetic oligonucleotide
  Antisense strand to SEQ ID NO: 1823589
uuccagaacacagagauuu

SEQ ID NO: 1823591 - RNA, 19 nt, Artificial Sequence
  Description of Artificial Sequence: Synthetic oligonucleotide
  Sense strand starting at position 3192 of SEQ ID NO: 1563673
cucuguguucuggaacauc

SEQ ID NO: 1823592 - RNA, 19 nt, Artificial Sequence
  Description of Artificial Sequence: Synthetic oligonucleotide
  Antisense strand to SEQ ID NO: 1823591
gauguuccagaacacagag

SEQ ID NO: 1823593 - RNA, 19 nt, Artificial Sequence
  Description of Artificial Sequence: Synthetic oligonucleotide
  Sense strand starting at position 3195 of SEQ ID NO: 1563673
uguguucuggaacaucauu

SEQ ID NO: 1823594 - RNA, 19 nt, Artificial Sequence
  Description of Artificial Sequence: Synthetic oligonucleotide
  Antisense strand to SEQ ID NO: 1823593
aaugauguuccagaacaca

SEQ ID NO: 1823595 - RNA, 19 nt, Artificial Sequence
  Description of Artificial Sequence: Synthetic oligonucleotide
  Sense strand starting at position 3356 of SEQ ID NO: 1563673
gaugaagccugcuuaugga

SEQ ID NO: 1823596 - RNA, 19 nt, Artificial Sequence
  Description of Artificial Sequence: Synthetic oligonucleotide
  Antisense strand to SEQ ID NO: 1823595
uccauaagcaggcuucauc

SEQ ID NO: 1823597 - RNA, 19 nt, Artificial Sequence
  Description of Artificial Sequence: Synthetic oligonucleotide
  Sense strand starting at position 3402 of SEQ ID NO: 1563673
acuggcuugcuuuaauaua

SEQ ID NO: 1823598 - RNA, 19 nt, Artificial Sequence
  Description of Artificial Sequence: Synthetic oligonucleotide
  Antisense strand to SEQ ID NO: 1823597
uauauuaaagcaagccagu

SEQ ID NO: 1823599 - RNA, 19 nt, Artificial Sequence
  Description of Artificial Sequence: Synthetic oligonucleotide
  Sense strand starting at position 3422 of SEQ ID NO: 1563673
gagugaagaugagucagua

SEQ ID NO: 1823600 - RNA, 19 nt, Artificial Sequence
  Description of Artificial Sequence: Synthetic oligonucleotide
  Antisense strand to SEQ ID NO: 1823599
uacugacucaucuucacuc

SEQ ID NO: 1823601 - RNA, 19 nt, Artificial Sequence
  Description of Artificial Sequence: Synthetic oligonucleotide
  Sense strand starting at position 3426 of SEQ ID NO: 1563673
gaagaugagucaguaucuc

SEQ ID NO: 1823602 - RNA, 19 nt, Artificial Sequence
  Description of Artificial Sequence: Synthetic oligonucleotide
  Antisense strand to SEQ ID NO: 1823601
gagauacugacucaucuuc

SEQ ID NO: 1823603 - RNA, 19 nt, Artificial Sequence
  Description of Artificial Sequence: Synthetic oligonucleotide
  Sense strand starting at position 3430 of SEQ ID NO: 1563673
augagucaguaucucugaa

SEQ ID NO: 1823604 - RNA, 19 nt, Artificial Sequence
  Description of Artificial Sequence: Synthetic oligonucleotide
  Antisense strand to SEQ ID NO: 1823603
uucagagauacugacucau

SEQ ID NO: 1823605 - RNA, 19 nt, Artificial Sequence
  Description of Artificial Sequence: Synthetic oligonucleotide
  Sense strand starting at position 3432 of SEQ ID NO: 1563673
gagucaguaucucugaauu

SEQ ID NO: 1823606 - RNA, 19 nt, Artificial Sequence
  Description of Artificial Sequence: Synthetic oligonucleotide
  Antisense strand to SEQ ID NO: 1823605
aauucagagauacugacuc

SEQ ID NO: 1823607 - RNA, 19 nt, Artificial Sequence
  Description of Artificial Sequence: Synthetic oligonucleotide
  Sense strand starting at position 3442 of SEQ ID NO: 1563673
cucugaauuuccuggaaga

SEQ ID NO: 1823608 - RNA, 19 nt, Artificial Sequence
  Description of Artificial Sequence: Synthetic oligonucleotide
  Antisense strand to SEQ ID NO: 1823607
ucuuccaggaaauucagag

SEQ ID NO: 1823609 - RNA, 19 nt, Artificial Sequence
  Description of Artificial Sequence: Synthetic oligonucleotide
  Sense strand starting at position 3518 of SEQ ID NO: 1563673
agugaaaggcauuaguuga

SEQ ID NO: 1823610 - RNA, 19 nt, Artificial Sequence
  Description of Artificial Sequence: Synthetic oligonucleotide
  Antisense strand to SEQ ID NO: 1823609
ucaacuaaugccuuucacu

SEQ ID NO: 1823611 - RNA, 19 nt, Artificial Sequence
  Description of Artificial Sequence: Synthetic oligonucleotide
  Sense strand starting at position 3522 of SEQ ID NO: 1563673
aaaggcauuaguugaguga

SEQ ID NO: 1823612 - RNA, 19 nt, Artificial Sequence
  Description of Artificial Sequence: Synthetic oligonucleotide
  Antisense strand to SEQ ID NO: 1823611
ucacucaacuaaugccuuu

SEQ ID NO: 1823613 - RNA, 19 nt, Artificial Sequence
  Description of Artificial Sequence: Synthetic oligonucleotide
  Sense strand starting at position 3523 of SEQ ID NO: 1563673
aaggcauuaguugagugaa

SEQ ID NO: 1823614 - RNA, 19 nt, Artificial Sequence
  Description of Artificial Sequence: Synthetic oligonucleotide
  Antisense strand to SEQ ID NO: 1823613
uucacucaacuaaugccuu

SEQ ID NO: 1823615 - RNA, 19 nt, Artificial Sequence
  Description of Artificial Sequence: Synthetic oligonucleotide
  Sense strand starting at position 3525 of SEQ ID NO: 1563673
ggcauuaguugagugaaug

SEQ ID NO: 1823616 - RNA, 19 nt, Artificial Sequence
  Description of Artificial Sequence: Synthetic oligonucleotide
  Antisense strand to SEQ ID NO: 1823615
cauucacucaacuaaugcc

SEQ ID NO: 1823617 - RNA, 19 nt, Artificial Sequence
  Description of Artificial Sequence: Synthetic oligonucleotide
  Sense strand starting at position 3526 of SEQ ID NO: 1563673
gcauuaguugagugaauga

SEQ ID NO: 1823618 - RNA, 19 nt, Artificial Sequence
  Description of Artificial Sequence: Synthetic oligonucleotide
  Antisense strand to SEQ ID NO: 1823617
ucauucacucaacuaaugc

SEQ ID NO: 1823619 - RNA, 19 nt, Artificial Sequence
  Description of Artificial Sequence: Synthetic oligonucleotide
  Sense strand starting at position 3564 of SEQ ID NO: 1563673
gguucuagaaggcaguaaa

SEQ ID NO: 1823620 - RNA, 19 nt, Artificial Sequence
  Description of Artificial Sequence: Synthetic oligonucleotide
  Antisense strand to SEQ ID NO: 1823619
uuuacugccuucuagaacc

SEQ ID NO: 1823621 - RNA, 19 nt, Artificial Sequence
  Description of Artificial Sequence: Synthetic oligonucleotide
  Sense strand starting at position 3685 of SEQ ID NO: 1563673
gcaaauuauuuguuuggca

SEQ ID NO: 1823622 - RNA, 19 nt, Artificial Sequence
  Description of Artificial Sequence: Synthetic oligonucleotide
  Antisense strand to SEQ ID NO: 1823621
ugccaaacaaauaauuugc

SEQ ID NO: 1823623 - RNA, 19 nt, Artificial Sequence
  Description of Artificial Sequence: Synthetic oligonucleotide
  Sense strand starting at position 3733 of SEQ ID NO: 1563673
agaauaaguugggcuagau

SEQ ID NO: 1823624 - RNA, 19 nt, Artificial Sequence
  Description of Artificial Sequence: Synthetic oligonucleotide
  Antisense strand to SEQ ID NO: 1823623
aucuagcccaacuuauucu

SEQ ID NO: 1823625 - RNA, 19 nt, Artificial Sequence
  Description of Artificial Sequence: Synthetic oligonucleotide
  Sense strand starting at position 3883 of SEQ ID NO: 1563673
cccuguuagagaugaggua

SEQ ID NO: 1823626 - RNA, 19 nt, Artificial Sequence
  Description of Artificial Sequence: Synthetic oligonucleotide
  Antisense strand to SEQ ID NO: 1823625
uaccucaucucuaacaggg

SEQ ID NO: 1823627 - RNA, 19 nt, Artificial Sequence
  Description of Artificial Sequence: Synthetic oligonucleotide
  Sense strand starting at position 3916 of SEQ ID NO: 1563673
gguguuagauggaagaguu

SEQ ID NO: 1823628 - RNA, 19 nt, Artificial Sequence
  Description of Artificial Sequence: Synthetic oligonucleotide
  Antisense strand to SEQ ID NO: 1823627
aacucuuccaucuaacacc

SEQ ID NO: 1823629 - RNA, 19 nt, Artificial Sequence
  Description of Artificial Sequence: Synthetic oligonucleotide
  Sense strand starting at position 3928 of SEQ ID NO: 1563673
aagaguugagcucagccua

SEQ ID NO: 1823630 - RNA, 19 nt, Artificial Sequence
  Description of Artificial Sequence: Synthetic oligonucleotide
  Antisense strand to SEQ ID NO: 1823629
uaggcugagcucaacucuu

SEQ ID NO: 1823631 - RNA, 19 nt, Artificial Sequence
  Description of Artificial Sequence: Synthetic oligonucleotide
  Sense strand starting at position 3933 of SEQ ID NO: 1563673
uugagcucagccuaucuua

SEQ ID NO: 1823632 - RNA, 19 nt, Artificial Sequence
  Description of Artificial Sequence: Synthetic oligonucleotide
  Antisense strand to SEQ ID NO: 1823631
uaagauaggcugagcucaa

SEQ ID NO: 1823633 - RNA, 19 nt, Artificial Sequence
  Description of Artificial Sequence: Synthetic oligonucleotide
  Sense strand starting at position 603 of SEQ ID NO: 1563674
ccaauuucuucugugaugu

SEQ ID NO: 1823634 - RNA, 19 nt, Artificial Sequence
  Description of Artificial Sequence: Synthetic oligonucleotide
  Antisense strand to SEQ ID NO: 1823633
acaucacagaagaaauugg

SEQ ID NO: 1823635 - RNA, 19 nt, Artificial Sequence
  Description of Artificial Sequence: Synthetic oligonucleotide
  Sense strand starting at position 611 of SEQ ID NO: 1563674
uucugugaugucugaccaa

SEQ ID NO: 1823636 - RNA, 19 nt, Artificial Sequence
  Description of Artificial Sequence: Synthetic oligonucleotide
  Antisense strand to SEQ ID NO: 1823635
uuggucagacaucacagaa

SEQ ID NO: 1823637 - RNA, 19 nt, Artificial Sequence
  Description of Artificial Sequence: Synthetic oligonucleotide
  Sense strand starting at position 614 of SEQ ID NO: 1563674
ugugaugucugaccaacau

SEQ ID NO: 1823638 - RNA, 19 nt, Artificial Sequence
  Description of Artificial Sequence: Synthetic oligonucleotide
  Antisense strand to SEQ ID NO: 1823637
auguuggucagacaucaca

SEQ ID NO: 1823639 - RNA, 19 nt, Artificial Sequence
  Description of Artificial Sequence: Synthetic oligonucleotide
  Sense strand starting at position 842 of SEQ ID NO: 1563674
gaacauuugcucuguaagc

SEQ ID NO: 1823640 - RNA, 19 nt, Artificial Sequence
  Description of Artificial Sequence: Synthetic oligonucleotide
  Antisense strand to SEQ ID NO: 1823639
gcuuacagagcaaauguuc

SEQ ID NO: 1823641 - RNA, 19 nt, Artificial Sequence
  Description of Artificial Sequence: Synthetic oligonucleotide
  Sense strand starting at position 915 of SEQ ID NO: 1563674
aaacucaccugugugagau

SEQ ID NO: 1823642 - RNA, 19 nt, Artificial Sequence
  Description of Artificial Sequence: Synthetic oligonucleotide
  Antisense strand to SEQ ID NO: 1823641
aucucacacaggugaguuu

SEQ ID NO: 1823643 - RNA, 19 nt, Artificial Sequence
  Description of Artificial Sequence: Synthetic oligonucleotide
  Sense strand starting at position 916 of SEQ ID NO: 1563674
aacucaccugugugagaua

SEQ ID NO: 1823644 - RNA, 19 nt, Artificial Sequence
  Description of Artificial Sequence: Synthetic oligonucleotide
  Antisense strand to SEQ ID NO: 1823643
uaucucacacaggugaguu

SEQ ID NO: 1823645 - RNA, 19 nt, Artificial Sequence
  Description of Artificial Sequence: Synthetic oligonucleotide
  Sense strand starting at position 1003 of SEQ ID NO: 1563674
aaggauugugagggucaga

SEQ ID NO: 1823646 - RNA, 19 nt, Artificial Sequence
  Description of Artificial Sequence: Synthetic oligonucleotide
  Antisense strand to SEQ ID NO: 1823645
ucugacccucacaauccuu

SEQ ID NO: 1823647 - RNA, 19 nt, Artificial Sequence
  Description of Artificial Sequence: Synthetic oligonucleotide
  Sense strand starting at position 1065 of SEQ ID NO: 1563674
gguguaaauguauaaaguu

SEQ ID NO: 1823648 - RNA, 19 nt, Artificial Sequence
  Description of Artificial Sequence: Synthetic oligonucleotide
  Antisense strand to SEQ ID NO: 1823647
aacuuuauacauuuacacc

SEQ ID NO: 1823649 - RNA, 19 nt, Artificial Sequence
  Description of Artificial Sequence: Synthetic oligonucleotide
  Sense strand starting at position 1132 of SEQ ID NO: 1563674
gagagaucucagcgaccuu

SEQ ID NO: 1823650 - RNA, 19 nt, Artificial Sequence
  Description of Artificial Sequence: Synthetic oligonucleotide
  Antisense strand to SEQ ID NO: 1823649
aaggucgcugagaucucuc

SEQ ID NO: 1823651 - RNA, 19 nt, Artificial Sequence
  Description of Artificial Sequence: Synthetic oligonucleotide
  Sense strand starting at position 1133 of SEQ ID NO: 1563674
agagaucucagcgaccuua

SEQ ID NO: 1823652 - RNA, 19 nt, Artificial Sequence
  Description of Artificial Sequence: Synthetic oligonucleotide
  Antisense strand to SEQ ID NO: 1823651
uaaggucgcugagaucucu

SEQ ID NO: 1823653 - RNA, 19 nt, Artificial Sequence
  Description of Artificial Sequence: Synthetic oligonucleotide
  Sense strand starting at position 1158 of SEQ ID NO: 1563674
cucuaacucccucgagaua

SEQ ID NO: 1823654 - RNA, 19 nt, Artificial Sequence
  Description of Artificial Sequence: Synthetic oligonucleotide
  Antisense strand to SEQ ID NO: 1823653
uaucucgagggaguuagag

SEQ ID NO: 1823655 - RNA, 19 nt, Artificial Sequence
  Description of Artificial Sequence: Synthetic oligonucleotide
  Sense strand starting at position 1170 of SEQ ID NO: 1563674
cgagauacugccgagaaau

SEQ ID NO: 1823656 - RNA, 19 nt, Artificial Sequence
  Description of Artificial Sequence: Synthetic oligonucleotide
  Antisense strand to SEQ ID NO: 1823655
auuucucggcaguaucucg

SEQ ID NO: 1823657 - RNA, 19 nt, Artificial Sequence
  Description of Artificial Sequence: Synthetic oligonucleotide
  Sense strand starting at position 1909 of SEQ ID NO: 1563674
gcauaaauuuccgcgggua

SEQ ID NO: 1823658 - RNA, 19 nt, Artificial Sequence
  Description of Artificial Sequence: Synthetic oligonucleotide
  Antisense strand to SEQ ID NO: 1823657
uacccgcggaaauuuaugc

SEQ ID NO: 1823659 - RNA, 19 nt, Artificial Sequence
  Description of Artificial Sequence: Synthetic oligonucleotide
  Sense strand starting at position 1910 of SEQ ID NO: 1563674
cauaaauuuccgcggguaa

SEQ ID NO: 1823660 - RNA, 19 nt, Artificial Sequence
  Description of Artificial Sequence: Synthetic oligonucleotide
  Antisense strand to SEQ ID NO: 1823659
uuacccgcggaaauuuaug

SEQ ID NO: 1823661 - RNA, 19 nt, Artificial Sequence
  Description of Artificial Sequence: Synthetic oligonucleotide
  Sense strand starting at position 1911 of SEQ ID NO: 1563674
auaaauuuccgcggguaac

SEQ ID NO: 1823662 - RNA, 19 nt, Artificial Sequence
  Description of Artificial Sequence: Synthetic oligonucleotide
  Antisense strand to SEQ ID NO: 1823661
guuacccgcggaaauuuau

SEQ ID NO: 1823663 - RNA, 19 nt, Artificial Sequence
  Description of Artificial Sequence: Synthetic oligonucleotide
  Sense strand starting at position 1960 of SEQ ID NO: 1563674
accaaucaccgaugacuua

SEQ ID NO: 1823664 - RNA, 19 nt, Artificial Sequence
  Description of Artificial Sequence: Synthetic oligonucleotide
  Antisense strand to SEQ ID NO: 1823663
uaagucaucggugauuggu

SEQ ID NO: 1823665 - RNA, 19 nt, Artificial Sequence
  Description of Artificial Sequence: Synthetic oligonucleotide
  Sense strand starting at position 1967 of SEQ ID NO: 1563674
accgaugacuuauuaaaua

SEQ ID NO: 1823666 - RNA, 19 nt, Artificial Sequence
  Description of Artificial Sequence: Synthetic oligonucleotide
  Antisense strand to SEQ ID NO: 1823665
uauuuaauaagucaucggu

SEQ ID NO: 1823667 - RNA, 19 nt, Artificial Sequence
  Description of Artificial Sequence: Synthetic oligonucleotide
  Sense strand starting at position 2048 of SEQ ID NO: 1563674
cacguaagacguuccgcua

SEQ ID NO: 1823668 - RNA, 19 nt, Artificial Sequence
  Description of Artificial Sequence: Synthetic oligonucleotide
  Antisense strand to SEQ ID NO: 1823667
uagcggaacgucuuacgug

SEQ ID NO: 1823669 - RNA, 19 nt, Artificial Sequence
  Description of Artificial Sequence: Synthetic oligonucleotide
  Sense strand starting at position 2049 of SEQ ID NO: 1563674
acguaagacguuccgcuaa

SEQ ID NO: 1823670 - RNA, 19 nt, Artificial Sequence
  Description of Artificial Sequence: Synthetic oligonucleotide
  Antisense strand to SEQ ID NO: 1823669
uuagcggaacgucuuacgu

SEQ ID NO: 1823671 - RNA, 19 nt, Artificial Sequence
  Description of Artificial Sequence: Synthetic oligonucleotide
  Sense strand starting at position 2291 of SEQ ID NO: 1563674
cccgguaucguuagagguu

SEQ ID NO: 1823672 - RNA, 19 nt, Artificial Sequence
  Description of Artificial Sequence: Synthetic oligonucleotide
  Antisense strand to SEQ ID NO: 1823671
aaccucuaacgauaccggg

SEQ ID NO: 1823673 - RNA, 19 nt, Artificial Sequence
  Description of Artificial Sequence: Synthetic oligonucleotide
  Sense strand starting at position 2589 of SEQ ID NO: 1563674
acggcccugaguuaagaaa

SEQ ID NO: 1823674 - RNA, 19 nt, Artificial Sequence
  Description of Artificial Sequence: Synthetic oligonucleotide
  Antisense strand to SEQ ID NO: 1823673
uuucuuaacucagggccgu

SEQ ID NO: 1823675 - RNA, 19 nt, Artificial Sequence
  Description of Artificial Sequence: Synthetic oligonucleotide
  Sense strand starting at position 2715 of SEQ ID NO: 1563674
gagucacaucuaggcaaau

SEQ ID NO: 1823676 - RNA, 19 nt, Artificial Sequence
  Description of Artificial Sequence: Synthetic oligonucleotide
  Antisense strand to SEQ ID NO: 1823675
auuugccuagaugugacuc

SEQ ID NO: 1823677 - RNA, 19 nt, Artificial Sequence
  Description of Artificial Sequence: Synthetic oligonucleotide
  Sense strand starting at position 3097 of SEQ ID NO: 1563674
aauuaaaugggacggguua

SEQ ID NO: 1823678 - RNA, 19 nt, Artificial Sequence
  Description of Artificial Sequence: Synthetic oligonucleotide
  Antisense strand to SEQ ID NO: 1823677
uaacccgucccauuuaauu

SEQ ID NO: 1823679 - RNA, 19 nt, Artificial Sequence
  Description of Artificial Sequence: Synthetic oligonucleotide
  Sense strand starting at position 3098 of SEQ ID NO: 1563674
auuaaaugggacggguuau

SEQ ID NO: 1823680 - RNA, 19 nt, Artificial Sequence
  Description of Artificial Sequence: Synthetic oligonucleotide
  Antisense strand to SEQ ID NO: 1823679
auaacccgucccauuuaau

SEQ ID NO: 1823681 - RNA, 19 nt, Artificial Sequence
  Description of Artificial Sequence: Synthetic oligonucleotide
  Sense strand starting at position 3109 of SEQ ID NO: 1563674
cggguuaucccagggauaa

SEQ ID NO: 1823682 - RNA, 19 nt, Artificial Sequence
  Description of Artificial Sequence: Synthetic oligonucleotide
  Antisense strand to SEQ ID NO: 1823681
uuaucccugggauaacccg

SEQ ID NO: 1823683 - RNA, 19 nt, Artificial Sequence
  Description of Artificial Sequence: Synthetic oligonucleotide
  Sense strand starting at position 3110 of SEQ ID NO: 1563674
ggguuaucccagggauaag

SEQ ID NO: 1823684 - RNA, 19 nt, Artificial Sequence
  Description of Artificial Sequence: Synthetic oligonucleotide
  Antisense strand to SEQ ID NO: 1823683
cuuaucccugggauaaccc

SEQ ID NO: 1823685 - RNA, 19 nt, Artificial Sequence
  Description of Artificial Sequence: Synthetic oligonucleotide
  Sense strand starting at position 3181 of SEQ ID NO: 1563674
guaaaucugucacugagac

SEQ ID NO: 1823686 - RNA, 19 nt, Artificial Sequence
  Description of Artificial Sequence: Synthetic oligonucleotide
  Antisense strand to SEQ ID NO: 1823685
gucucagugacagauuuac

SEQ ID NO: 1823687 - RNA, 19 nt, Artificial Sequence
  Description of Artificial Sequence: Synthetic oligonucleotide
  Sense strand starting at position 3196 of SEQ ID NO: 1563674
agaccuuaggaugguuaau

SEQ ID NO: 1823688 - RNA, 19 nt, Artificial Sequence
  Description of Artificial Sequence: Synthetic oligonucleotide
  Antisense strand to SEQ ID NO: 1823687
auuaaccauccuaaggucu

SEQ ID NO: 1823689 - RNA, 19 nt, Artificial Sequence
  Description of Artificial Sequence: Synthetic oligonucleotide
  Sense strand starting at position 3258 of SEQ ID NO: 1563674
aucggcaaucaguaaaugu

SEQ ID NO: 1823690 - RNA, 19 nt, Artificial Sequence
  Description of Artificial Sequence: Synthetic oligonucleotide
  Antisense strand to SEQ ID NO: 1823689
acauuuacugauugccgau

SEQ ID NO: 1823691 - RNA, 19 nt, Artificial Sequence
  Description of Artificial Sequence: Synthetic oligonucleotide
  Sense strand starting at position 3286 of SEQ ID NO: 1563674
cguuuccucaguguaguuu

SEQ ID NO: 1823692 - RNA, 19 nt, Artificial Sequence
  Description of Artificial Sequence: Synthetic oligonucleotide
  Antisense strand to SEQ ID NO: 1823691
aaacuacacugaggaaacg

SEQ ID NO: 1823693 - RNA, 19 nt, Artificial Sequence
  Description of Artificial Sequence: Synthetic oligonucleotide
  Sense strand starting at position 3759 of SEQ ID NO: 1563674
uuacuauaaguaggaucau

SEQ ID NO: 1823694 - RNA, 19 nt, Artificial Sequence
  Description of Artificial Sequence: Synthetic oligonucleotide
  Antisense strand to SEQ ID NO: 1823693
augauccuacuuauaguaa

SEQ ID NO: 1823695 - RNA, 19 nt, Artificial Sequence
  Description of Artificial Sequence: Synthetic oligonucleotide
  Sense strand starting at position 3770 of SEQ ID NO: 1563674
aggaucauacuauguauau

SEQ ID NO: 1823696 - RNA, 19 nt, Artificial Sequence
  Description of Artificial Sequence: Synthetic oligonucleotide
  Antisense strand to SEQ ID NO: 1823695
auauacauaguaugauccu

SEQ ID NO: 1823697 - RNA, 19 nt, Artificial Sequence
  Description of Artificial Sequence: Synthetic oligonucleotide
  Sense strand starting at position 3771 of SEQ ID NO: 1563674
ggaucauacuauguauauu

SEQ ID NO: 1823698 - RNA, 19 nt, Artificial Sequence
  Description of Artificial Sequence: Synthetic oligonucleotide
  Antisense strand to SEQ ID NO: 1823697
aauauacauaguaugaucc

SEQ ID NO: 1823699 - RNA, 19 nt, Artificial Sequence
  Description of Artificial Sequence: Synthetic oligonucleotide
  Sense strand starting at position 3810 of SEQ ID NO: 1563674
gagaucuuucugggucaag

SEQ ID NO: 1823700 - RNA, 19 nt, Artificial Sequence
  Description of Artificial Sequence: Synthetic oligonucleotide
  Antisense strand to SEQ ID NO: 1823699
cuugacccagaaagaucuc

SEQ ID NO: 1823701 - RNA, 19 nt, Artificial Sequence
  Description of Artificial Sequence: Synthetic oligonucleotide
  Sense strand starting at position 3851 of SEQ ID NO: 1563674
gcugcauugcauuccaguu

SEQ ID NO: 1823702 - RNA, 19 nt, Artificial Sequence
  Description of Artificial Sequence: Synthetic oligonucleotide
  Antisense strand to SEQ ID NO: 1823701
aacuggaaugcaaugcagc

SEQ ID NO: 1823703 - RNA, 19 nt, Artificial Sequence
  Description of Artificial Sequence: Synthetic oligonucleotide
  Sense strand starting at position 3858 of SEQ ID NO: 1563674
ugcauuccaguuuaaggau

SEQ ID NO: 1823704 - RNA, 19 nt, Artificial Sequence
  Description of Artificial Sequence: Synthetic oligonucleotide
  Antisense strand to SEQ ID NO: 1823703
auccuuaaacuggaaugca

SEQ ID NO: 1823705 - RNA, 19 nt, Artificial Sequence
  Description of Artificial Sequence: Synthetic oligonucleotide
  Sense strand starting at position 3899 of SEQ ID NO: 1563674
uccucuaaugauggcuauu

SEQ ID NO: 1823706 - RNA, 19 nt, Artificial Sequence
  Description of Artificial Sequence: Synthetic oligonucleotide
  Antisense strand to SEQ ID NO: 1823705
aauagccaucauuagagga

SEQ ID NO: 1823707 - RNA, 19 nt, Artificial Sequence
  Description of Artificial Sequence: Synthetic oligonucleotide
  Sense strand starting at position 3955 of SEQ ID NO: 1563674
aaggaacauuuguaaguau

SEQ ID NO: 1823708 - RNA, 19 nt, Artificial Sequence
  Description of Artificial Sequence: Synthetic oligonucleotide
  Antisense strand to SEQ ID NO: 1823707
auacuuacaaauguuccuu

SEQ ID NO: 1823709 - RNA, 19 nt, Artificial Sequence
  Description of Artificial Sequence: Synthetic oligonucleotide
  Sense strand starting at position 3964 of SEQ ID NO: 1563674
uuguaaguauuucuguuga

SEQ ID NO: 1823710 - RNA, 19 nt, Artificial Sequence
  Description of Artificial Sequence: Synthetic oligonucleotide
  Antisense strand to SEQ ID NO: 1823709
ucaacagaaauacuuacaa

SEQ ID NO: 1823711 - RNA, 19 nt, Artificial Sequence
  Description of Artificial Sequence: Synthetic oligonucleotide
  Sense strand starting at position 3966 of SEQ ID NO: 1563674
guaaguauuucuguugacu

SEQ ID NO: 1823712 - RNA, 19 nt, Artificial Sequence
  Description of Artificial Sequence: Synthetic oligonucleotide
  Antisense strand to SEQ ID NO: 1823711
agucaacagaaauacuuac

SEQ ID NO: 1823713 - RNA, 19 nt, Artificial Sequence
  Description of Artificial Sequence: Synthetic oligonucleotide
  Sense strand starting at position 384 of SEQ ID NO: 1563675
gucacaauacccuguuuau

SEQ ID NO: 1823714 - RNA, 19 nt, Artificial Sequence
  Description of Artificial Sequence: Synthetic oligonucleotide
  Antisense strand to SEQ ID NO: 1823713
auaaacaggguauugugac

SEQ ID NO: 1823715 - RNA, 19 nt, Artificial Sequence
  Description of Artificial Sequence: Synthetic oligonucleotide
  Sense strand starting at position 393 of SEQ ID NO: 1563675
cccuguuuauauuccugau

SEQ ID NO: 1823716 - RNA, 19 nt, Artificial Sequence
  Description of Artificial Sequence: Synthetic oligonucleotide
  Antisense strand to SEQ ID NO: 1823715
aucaggaauauaaacaggg

SEQ ID NO: 1823717 - RNA, 19 nt, Artificial Sequence
  Description of Artificial Sequence: Synthetic oligonucleotide
  Sense strand starting at position 395 of SEQ ID NO: 1563675
cuguuuauauuccugauau

SEQ ID NO: 1823718 - RNA, 19 nt, Artificial Sequence
  Description of Artificial Sequence: Synthetic oligonucleotide
  Antisense strand to SEQ ID NO: 1823717
auaucaggaauauaaacag

SEQ ID NO: 1823719 - RNA, 19 nt, Artificial Sequence
  Description of Artificial Sequence: Synthetic oligonucleotide
  Sense strand starting at position 397 of SEQ ID NO: 1563675
guuuauauuccugauauug

SEQ ID NO: 1823720 - RNA, 19 nt, Artificial Sequence
  Description of Artificial Sequence: Synthetic oligonucleotide
  Antisense strand to SEQ ID NO: 1823719
caauaucaggaauauaaac

SEQ ID NO: 1823721 - RNA, 19 nt, Artificial Sequence
  Description of Artificial Sequence: Synthetic oligonucleotide
  Sense strand starting at position 496 of SEQ ID NO: 1563675
uuaacauuguuggcuuuau

SEQ ID NO: 1823722 - RNA, 19 nt, Artificial Sequence
  Description of Artificial Sequence: Synthetic oligonucleotide
  Antisense strand to SEQ ID NO: 1823721
auaaagccaacaauguuaa

SEQ ID NO: 1823723 - RNA, 19 nt, Artificial Sequence
  Description of Artificial Sequence: Synthetic oligonucleotide
  Sense strand starting at position 500 of SEQ ID NO: 1563675
cauuguuggcuuuauugua

SEQ ID NO: 1823724 - RNA, 19 nt, Artificial Sequence
  Description of Artificial Sequence: Synthetic oligonucleotide
  Antisense strand to SEQ ID NO: 1823723
uacaauaaagccaacaaug

SEQ ID NO: 1823725 - RNA, 19 nt, Artificial Sequence
  Description of Artificial Sequence: Synthetic oligonucleotide
  Sense strand starting at position 615 of SEQ ID NO: 1563675
ggaagcucaggucauugau

SEQ ID NO: 1823726 - RNA, 19 nt, Artificial Sequence
  Description of Artificial Sequence: Synthetic oligonucleotide
  Antisense strand to SEQ ID NO: 1823725
aucaaugaccugagcuucc

SEQ ID NO: 1823727 - RNA, 19 nt, Artificial Sequence
  Description of Artificial Sequence: Synthetic oligonucleotide
  Sense strand starting at position 698 of SEQ ID NO: 1563675
uggccacaucugcaucauu

SEQ ID NO: 1823728 - RNA, 19 nt, Artificial Sequence
  Description of Artificial Sequence: Synthetic oligonucleotide
  Antisense strand to SEQ ID NO: 1823727
aaugaugcagauguggcca

SEQ ID NO: 1823729 - RNA, 19 nt, Artificial Sequence
  Description of Artificial Sequence: Synthetic oligonucleotide
  Sense strand starting at position 815 of SEQ ID NO: 1563675
ggagcuccauccuugcaaa

SEQ ID NO: 1823730 - RNA, 19 nt, Artificial Sequence
  Description of Artificial Sequence: Synthetic oligonucleotide
  Antisense strand to SEQ ID NO: 1823729
uuugcaaggauggagcucc

SEQ ID NO: 1823731 - RNA, 19 nt, Artificial Sequence
  Description of Artificial Sequence: Synthetic oligonucleotide
  Sense strand starting at position 847 of SEQ ID NO: 1563675
agggauggcugucuucaau

SEQ ID NO: 1823732 - RNA, 19 nt, Artificial Sequence
  Description of Artificial Sequence: Synthetic oligonucleotide
  Antisense strand to SEQ ID NO: 1823731
auugaagacagccaucccu

SEQ ID NO: 1823733 - RNA, 19 nt, Artificial Sequence
  Description of Artificial Sequence: Synthetic oligonucleotide
  Sense strand starting at position 895 of SEQ ID NO: 1563675
aagagugagugagagauaa

SEQ ID NO: 1823734 - RNA, 19 nt, Artificial Sequence
  Description of Artificial Sequence: Synthetic oligonucleotide
  Antisense strand to SEQ ID NO: 1823733
uuaucucucacucacucuu

SEQ ID NO: 1823735 - RNA, 19 nt, Artificial Sequence
  Description of Artificial Sequence: Synthetic oligonucleotide
  Sense strand starting at position 946 of SEQ ID NO: 1563675
gacucuuggaggugaaguu

SEQ ID NO: 1823736 - RNA, 19 nt, Artificial Sequence
  Description of Artificial Sequence: Synthetic oligonucleotide
  Antisense strand to SEQ ID NO: 1823735
aacuucaccuccaagaguc

SEQ ID NO: 1823737 - RNA, 19 nt, Artificial Sequence
  Description of Artificial Sequence: Synthetic oligonucleotide
  Sense strand starting at position 947 of SEQ ID NO: 1563675
acucuuggaggugaaguua

SEQ ID NO: 1823738 - RNA, 19 nt, Artificial Sequence
  Description of Artificial Sequence: Synthetic oligonucleotide
  Antisense strand to SEQ ID NO: 1823737
uaacuucaccuccaagagu

SEQ ID NO: 1823739 - RNA, 19 nt, Artificial Sequence
  Description of Artificial Sequence: Synthetic oligonucleotide
  Sense strand starting at position 1279 of SEQ ID NO: 1563675
gagcaaaccucggucucaa

SEQ ID NO: 1823740 - RNA, 19 nt, Artificial Sequence
  Description of Artificial Sequence: Synthetic oligonucleotide
  Antisense strand to SEQ ID NO: 1823739
uugagaccgagguuugcuc

SEQ ID NO: 1823741 - RNA, 19 nt, Artificial Sequence
  Description of Artificial Sequence: Synthetic oligonucleotide
  Sense strand starting at position 1589 of SEQ ID NO: 1563675
ggccuuaaucaugacagcu

SEQ ID NO: 1823742 - RNA, 19 nt, Artificial Sequence
  Description of Artificial Sequence: Synthetic oligonucleotide
  Antisense strand to SEQ ID NO: 1823741
agcugucaugauuaaggcc

SEQ ID NO: 1823743 - RNA, 19 nt, Artificial Sequence
  Description of Artificial Sequence: Synthetic oligonucleotide
  Sense strand starting at position 1621 of SEQ ID NO: 1563675
gcgugagccaccuuuguau

SEQ ID NO: 1823744 - RNA, 19 nt, Artificial Sequence
  Description of Artificial Sequence: Synthetic oligonucleotide
  Antisense strand to SEQ ID NO: 1823743
auacaaagguggcucacgc

SEQ ID NO: 1823745 - RNA, 19 nt, Artificial Sequence
  Description of Artificial Sequence: Synthetic oligonucleotide
  Sense strand starting at position 1644 of SEQ ID NO: 1563675
ccaccugucccuggcuaaa

SEQ ID NO: 1823746 - RNA, 19 nt, Artificial Sequence
  Description of Artificial Sequence: Synthetic oligonucleotide
  Antisense strand to SEQ ID NO: 1823745
uuuagccagggacaggugg

SEQ ID NO: 1823747 - RNA, 19 nt, Artificial Sequence
  Description of Artificial Sequence: Synthetic oligonucleotide
  Sense strand starting at position 1894 of SEQ ID NO: 1563675
ucaccuguuucuccaaagu

SEQ ID NO: 1823748 - RNA, 19 nt, Artificial Sequence
  Description of Artificial Sequence: Synthetic oligonucleotide
  Antisense strand to SEQ ID NO: 1823747
acuuuggagaaacagguga

SEQ ID NO: 1823749 - RNA, 19 nt, Artificial Sequence
  Description of Artificial Sequence: Synthetic oligonucleotide
  Sense strand starting at position 1992 of SEQ ID NO: 1563675
ccgacaauccucuggcuca

SEQ ID NO: 1823750 - RNA, 19 nt, Artificial Sequence
  Description of Artificial Sequence: Synthetic oligonucleotide
  Antisense strand to SEQ ID NO: 1823749
ugagccagaggauugucgg

SEQ ID NO: 1823751 - RNA, 19 nt, Artificial Sequence
  Description of Artificial Sequence: Synthetic oligonucleotide
  Sense strand starting at position 2137 of SEQ ID NO: 1563675
aguggauguguguaaggga

SEQ ID NO: 1823752 - RNA, 19 nt, Artificial Sequence
  Description of Artificial Sequence: Synthetic oligonucleotide
  Antisense strand to SEQ ID NO: 1823751
ucccuuacacacauccacu

SEQ ID NO: 1823753 - RNA, 19 nt, Artificial Sequence
  Description of Artificial Sequence: Synthetic oligonucleotide
  Sense strand starting at position 2138 of SEQ ID NO: 1563675
guggauguguguaagggau

SEQ ID NO: 1823754 - RNA, 19 nt, Artificial Sequence
  Description of Artificial Sequence: Synthetic oligonucleotide
  Antisense strand to SEQ ID NO: 1823753
aucccuuacacacauccac

SEQ ID NO: 1823755 - RNA, 19 nt, Artificial Sequence
  Description of Artificial Sequence: Synthetic oligonucleotide
  Sense strand starting at position 2142 of SEQ ID NO: 1563675
auguguguaagggauuacu

SEQ ID NO: 1823756 - RNA, 19 nt, Artificial Sequence
  Description of Artificial Sequence: Synthetic oligonucleotide
  Antisense strand to SEQ ID NO: 1823755
aguaaucccuuacacacau

SEQ ID NO: 1823757 - RNA, 19 nt, Artificial Sequence
  Description of Artificial Sequence: Synthetic oligonucleotide
  Sense strand starting at position 2145 of SEQ ID NO: 1563675
uguguaagggauuacuucu

SEQ ID NO: 1823758 - RNA, 19 nt, Artificial Sequence
  Description of Artificial Sequence: Synthetic oligonucleotide
  Antisense strand to SEQ ID NO: 1823757
agaaguaaucccuuacaca

SEQ ID NO: 1823759 - RNA, 19 nt, Artificial Sequence
  Description of Artificial Sequence: Synthetic oligonucleotide
  Sense strand starting at position 2151 of SEQ ID NO: 1563675
agggauuacuucuuguuaa

SEQ ID NO: 1823760 - RNA, 19 nt, Artificial Sequence
  Description of Artificial Sequence: Synthetic oligonucleotide
  Antisense strand to SEQ ID NO: 1823759
uuaacaagaaguaaucccu

SEQ ID NO: 1823761 - RNA, 19 nt, Artificial Sequence
  Description of Artificial Sequence: Synthetic oligonucleotide
  Sense strand starting at position 2541 of SEQ ID NO: 1563675
augucuccaaagugugaga

SEQ ID NO: 1823762 - RNA, 19 nt, Artificial Sequence
  Description of Artificial Sequence: Synthetic oligonucleotide
  Antisense strand to SEQ ID NO: 1823761
ucucacacuuuggagacau

SEQ ID NO: 1823763 - RNA, 19 nt, Artificial Sequence
  Description of Artificial Sequence: Synthetic oligonucleotide
  Sense strand starting at position 2595 of SEQ ID NO: 1563675
gaaguugugagcuaucuga

SEQ ID NO: 1823764 - RNA, 19 nt, Artificial Sequence
  Description of Artificial Sequence: Synthetic oligonucleotide
  Antisense strand to SEQ ID NO: 1823763
ucagauagcucacaacuuc

SEQ ID NO: 1823765 - RNA, 19 nt, Artificial Sequence
  Description of Artificial Sequence: Synthetic oligonucleotide
  Sense strand starting at position 2599 of SEQ ID NO: 1563675
uugugagcuaucugaguua

SEQ ID NO: 1823766 - RNA, 19 nt, Artificial Sequence
  Description of Artificial Sequence: Synthetic oligonucleotide
  Antisense strand to SEQ ID NO: 1823765
uaacucagauagcucacaa

SEQ ID NO: 1823767 - RNA, 19 nt, Artificial Sequence
  Description of Artificial Sequence: Synthetic oligonucleotide
  Sense strand starting at position 2602 of SEQ ID NO: 1563675
ugagcuaucugaguuagag

SEQ ID NO: 1823768 - RNA, 19 nt, Artificial Sequence
  Description of Artificial Sequence: Synthetic oligonucleotide
  Antisense strand to SEQ ID NO: 1823767
cucuaacucagauagcuca

SEQ ID NO: 1823769 - RNA, 19 nt, Artificial Sequence
  Description of Artificial Sequence: Synthetic oligonucleotide
  Sense strand starting at position 2604 of SEQ ID NO: 1563675
agcuaucugaguuagagua

SEQ ID NO: 1823770 - RNA, 19 nt, Artificial Sequence
  Description of Artificial Sequence: Synthetic oligonucleotide
  Antisense strand to SEQ ID NO: 1823769
uacucuaacucagauagcu

SEQ ID NO: 1823771 - RNA, 19 nt, Artificial Sequence
  Description of Artificial Sequence: Synthetic oligonucleotide
  Sense strand starting at position 2620 of SEQ ID NO: 1563675
guaugacugcucugaccca

SEQ ID NO: 1823772 - RNA, 19 nt, Artificial Sequence
  Description of Artificial Sequence: Synthetic oligonucleotide
  Antisense strand to SEQ ID NO: 1823771
ugggucagagcagucauac

SEQ ID NO: 1823773 - RNA, 19 nt, Artificial Sequence
  Description of Artificial Sequence: Synthetic oligonucleotide
  Sense strand starting at position 2639 of SEQ ID NO: 1563675
uuaggugucuguuuccaag

SEQ ID NO: 1823774 - RNA, 19 nt, Artificial Sequence
  Description of Artificial Sequence: Synthetic oligonucleotide
  Antisense strand to SEQ ID NO: 1823773
cuuggaaacagacaccuaa

SEQ ID NO: 1823775 - RNA, 19 nt, Artificial Sequence
  Description of Artificial Sequence: Synthetic oligonucleotide
  Sense strand starting at position 3004 of SEQ ID NO: 1563675
ugugauguuccugaauuau

SEQ ID NO: 1823776 - RNA, 19 nt, Artificial Sequence
  Description of Artificial Sequence: Synthetic oligonucleotide
  Antisense strand to SEQ ID NO: 1823775
auaauucaggaacaucaca

SEQ ID NO: 1823777 - RNA, 19 nt, Artificial Sequence
  Description of Artificial Sequence: Synthetic oligonucleotide
  Sense strand starting at position 3043 of SEQ ID NO: 1563675
ggaugagauuugcagucuu

SEQ ID NO: 1823778 - RNA, 19 nt, Artificial Sequence
  Description of Artificial Sequence: Synthetic oligonucleotide
  Antisense strand to SEQ ID NO: 1823777
aagacugcaaaucucaucc

SEQ ID NO: 1823779 - RNA, 19 nt, Artificial Sequence
  Description of Artificial Sequence: Synthetic oligonucleotide
  Sense strand starting at position 3144 of SEQ ID NO: 1563675
ucacuuuacccugagcaga

SEQ ID NO: 1823780 - RNA, 19 nt, Artificial Sequence
  Description of Artificial Sequence: Synthetic oligonucleotide
  Antisense strand to SEQ ID NO: 1823779
ucugcucaggguaaaguga

SEQ ID NO: 1823781 - RNA, 19 nt, Artificial Sequence
  Description of Artificial Sequence: Synthetic oligonucleotide
  Sense strand starting at position 3254 of SEQ ID NO: 1563675
uuguguuguggauauuguu

SEQ ID NO: 1823782 - RNA, 19 nt, Artificial Sequence
  Description of Artificial Sequence: Synthetic oligonucleotide
  Antisense strand to SEQ ID NO: 1823781
aacaauauccacaacacaa

SEQ ID NO: 1823783 - RNA, 19 nt, Artificial Sequence
  Description of Artificial Sequence: Synthetic oligonucleotide
  Sense strand starting at position 3469 of SEQ ID NO: 1563675
ugcuauguugccuacaauu

SEQ ID NO: 1823784 - RNA, 19 nt, Artificial Sequence
  Description of Artificial Sequence: Synthetic oligonucleotide
  Antisense strand to SEQ ID NO: 1823783
aauuguaggcaacauagca

SEQ ID NO: 1823785 - RNA, 19 nt, Artificial Sequence
  Description of Artificial Sequence: Synthetic oligonucleotide
  Sense strand starting at position 3602 of SEQ ID NO: 1563675
ugaauacagguuuguauaa

SEQ ID NO: 1823786 - RNA, 19 nt, Artificial Sequence
  Description of Artificial Sequence: Synthetic oligonucleotide
  Antisense strand to SEQ ID NO: 1823785
uuauacaaaccuguauuca

SEQ ID NO: 1823787 - RNA, 19 nt, Artificial Sequence
  Description of Artificial Sequence: Synthetic oligonucleotide
  Sense strand starting at position 3603 of SEQ ID NO: 1563675
gaauacagguuuguauaaa

SEQ ID NO: 1823788 - RNA, 19 nt, Artificial Sequence
  Description of Artificial Sequence: Synthetic oligonucleotide
  Antisense strand to SEQ ID NO: 1823787
uuuauacaaaccuguauuc

SEQ ID NO: 1823789 - RNA, 19 nt, Artificial Sequence
  Description of Artificial Sequence: Synthetic oligonucleotide
  Sense strand starting at position 3903 of SEQ ID NO: 1563675
ggagacucuuucucucgaa

SEQ ID NO: 1823790 - RNA, 19 nt, Artificial Sequence
  Description of Artificial Sequence: Synthetic oligonucleotide
  Antisense strand to SEQ ID NO: 1823789
uucgagagaaagagucucc

SEQ ID NO: 1823791 - RNA, 19 nt, Artificial Sequence
  Description of Artificial Sequence: Synthetic oligonucleotide
  Sense strand starting at position 3958 of SEQ ID NO: 1563675
guacauggacucuagcaau

SEQ ID NO: 1823792 - RNA, 19 nt, Artificial Sequence
  Description of Artificial Sequence: Synthetic oligonucleotide
  Antisense strand to SEQ ID NO: 1823791
auugcuagaguccauguac

SEQ ID NO: 1823793 - RNA, 19 nt, Artificial Sequence
  Description of Artificial Sequence: Synthetic oligonucleotide
  Sense strand starting at position 94 of SEQ ID NO: 1563676
uugauaugagcaugcauaa

SEQ ID NO: 1823794 - RNA, 19 nt, Artificial Sequence
  Description of Artificial Sequence: Synthetic oligonucleotide
  Antisense strand to SEQ ID NO: 1823793
uuaugcaugcucauaucaa

SEQ ID NO: 1823795 - RNA, 19 nt, Artificial Sequence
  Description of Artificial Sequence: Synthetic oligonucleotide
  Sense strand starting at position 365 of SEQ ID NO: 1563676
uuuagaguccuauacuuug

SEQ ID NO: 1823796 - RNA, 19 nt, Artificial Sequence
  Description of Artificial Sequence: Synthetic oligonucleotide
  Antisense strand to SEQ ID NO: 1823795
caaaguauaggacucuaaa

SEQ ID NO: 1823797 - RNA, 19 nt, Artificial Sequence
  Description of Artificial Sequence: Synthetic oligonucleotide
  Sense strand starting at position 424 of SEQ ID NO: 1563676
cuguuauuagaugacuauu

SEQ ID NO: 1823798 - RNA, 19 nt, Artificial Sequence
  Description of Artificial Sequence: Synthetic oligonucleotide
  Antisense strand to SEQ ID NO: 1823797
aauagucaucuaauaacag

SEQ ID NO: 1823799 - RNA, 19 nt, Artificial Sequence
  Description of Artificial Sequence: Synthetic oligonucleotide
  Sense strand starting at position 485 of SEQ ID NO: 1563676
uuuggcaacuauucguaaa

SEQ ID NO: 1823800 - RNA, 19 nt, Artificial Sequence
  Description of Artificial Sequence: Synthetic oligonucleotide
  Antisense strand to SEQ ID NO: 1823799
uuuacgaauaguugccaaa

SEQ ID NO: 1823801 - RNA, 19 nt, Artificial Sequence
  Description of Artificial Sequence: Synthetic oligonucleotide
  Sense strand starting at position 495 of SEQ ID NO: 1563676
auucguaaaccauguagaa

SEQ ID NO: 1823802 - RNA, 19 nt, Artificial Sequence
  Description of Artificial Sequence: Synthetic oligonucleotide
  Antisense strand to SEQ ID NO: 1823801
uucuacaugguuuacgaau

SEQ ID NO: 1823803 - RNA, 19 nt, Artificial Sequence
  Description of Artificial Sequence: Synthetic oligonucleotide
  Sense strand starting at position 635 of SEQ ID NO: 1563676
cagauugaauaguagaaua

SEQ ID NO: 1823804 - RNA, 19 nt, Artificial Sequence
  Description of Artificial Sequence: Synthetic oligonucleotide
  Antisense strand to SEQ ID NO: 1823803
uauucuacuauucaaucug

SEQ ID NO: 1823805 - RNA, 19 nt, Artificial Sequence
  Description of Artificial Sequence: Synthetic oligonucleotide
  Sense strand starting at position 692 of SEQ ID NO: 1563676
ccugaauuguaguccucau

SEQ ID NO: 1823806 - RNA, 19 nt, Artificial Sequence
  Description of Artificial Sequence: Synthetic oligonucleotide
  Antisense strand to SEQ ID NO: 1823805
augaggacuacaauucagg

SEQ ID NO: 1823807 - RNA, 19 nt, Artificial Sequence
  Description of Artificial Sequence: Synthetic oligonucleotide
  Sense strand starting at position 715 of SEQ ID NO: 1563676
ugcuucuaguuucugaaau

SEQ ID NO: 1823808 - RNA, 19 nt, Artificial Sequence
  Description of Artificial Sequence: Synthetic oligonucleotide
  Antisense strand to SEQ ID NO: 1823807
auuucagaaacuagaagca

SEQ ID NO: 1823809 - RNA, 19 nt, Artificial Sequence
  Description of Artificial Sequence: Synthetic oligonucleotide
  Sense strand starting at position 744 of SEQ ID NO: 1563676
ucccaaguuggcugagaau

SEQ ID NO: 1823810 - RNA, 19 nt, Artificial Sequence
  Description of Artificial Sequence: Synthetic oligonucleotide
  Antisense strand to SEQ ID NO: 1823809
auucucagccaacuuggga

SEQ ID NO: 1823811 - RNA, 19 nt, Artificial Sequence
  Description of Artificial Sequence: Synthetic oligonucleotide
  Sense strand starting at position 903 of SEQ ID NO: 1563676
gcaugcaacucaucagacu

SEQ ID NO: 1823812 - RNA, 19 nt, Artificial Sequence
  Description of Artificial Sequence: Synthetic oligonucleotide
  Antisense strand to SEQ ID NO: 1823811
agucugaugaguugcaugc

SEQ ID NO: 1823813 - RNA, 19 nt, Artificial Sequence
  Description of Artificial Sequence: Synthetic oligonucleotide
  Sense strand starting at position 2005 of SEQ ID NO: 1563676
gucugagcuccuggaaaug

SEQ ID NO: 1823814 - RNA, 19 nt, Artificial Sequence
  Description of Artificial Sequence: Synthetic oligonucleotide
  Antisense strand to SEQ ID NO: 1823813
cauuuccaggagcucagac

SEQ ID NO: 1823815 - RNA, 19 nt, Artificial Sequence
  Description of Artificial Sequence: Synthetic oligonucleotide
  Sense strand starting at position 2074 of SEQ ID NO: 1563676
gggaauaagguuuaaucgu

SEQ ID NO: 1823816 - RNA, 19 nt, Artificial Sequence
  Description of Artificial Sequence: Synthetic oligonucleotide
  Antisense strand to SEQ ID NO: 1823815
acgauuaaaccuuauuccc

SEQ ID NO: 1823817 - RNA, 19 nt, Artificial Sequence
  Description of Artificial Sequence: Synthetic oligonucleotide
  Sense strand starting at position 2194 of SEQ ID NO: 1563676
agaggaguccugugccgaa

SEQ ID NO: 1823818 - RNA, 19 nt, Artificial Sequence
  Description of Artificial Sequence: Synthetic oligonucleotide
  Antisense strand to SEQ ID NO: 1823817
uucggcacaggacuccucu

SEQ ID NO: 1823819 - RNA, 19 nt, Artificial Sequence
  Description of Artificial Sequence: Synthetic oligonucleotide
  Sense strand starting at position 2198 of SEQ ID NO: 1563676
gaguccugugccgaagaga

SEQ ID NO: 1823820 - RNA, 19 nt, Artificial Sequence
  Description of Artificial Sequence: Synthetic oligonucleotide
  Antisense strand to SEQ ID NO: 1823819
ucucuucggcacaggacuc

SEQ ID NO: 1823821 - RNA, 19 nt, Artificial Sequence
  Description of Artificial Sequence: Synthetic oligonucleotide
  Sense strand starting at position 2285 of SEQ ID NO: 1563676
uuagaaguccuuuaugccu

SEQ ID NO: 1823822 - RNA, 19 nt, Artificial Sequence
  Description of Artificial Sequence: Synthetic oligonucleotide
  Antisense strand to SEQ ID NO: 1823821
aggcauaaaggacuucuaa

SEQ ID NO: 1823823 - RNA, 19 nt, Artificial Sequence
  Description of Artificial Sequence: Synthetic oligonucleotide
  Sense strand starting at position 2353 of SEQ ID NO: 1563676
ggaucucucuaccucugua

SEQ ID NO: 1823824 - RNA, 19 nt, Artificial Sequence
  Description of Artificial Sequence: Synthetic oligonucleotide
  Antisense strand to SEQ ID NO: 1823823
uacagagguagagagaucc

SEQ ID NO: 1823825 - RNA, 19 nt, Artificial Sequence
  Description of Artificial Sequence: Synthetic oligonucleotide
  Sense strand starting at position 2515 of SEQ ID NO: 1563676
agagcagggcuccauguua

SEQ ID NO: 1823826 - RNA, 19 nt, Artificial Sequence
  Description of Artificial Sequence: Synthetic oligonucleotide
  Antisense strand to SEQ ID NO: 1823825
uaacauggagcccugcucu

SEQ ID NO: 1823827 - RNA, 19 nt, Artificial Sequence
  Description of Artificial Sequence: Synthetic oligonucleotide
  Sense strand starting at position 2526 of SEQ ID NO: 1563676
ccauguuagaaauggagca

SEQ ID NO: 1823828 - RNA, 19 nt, Artificial Sequence
  Description of Artificial Sequence: Synthetic oligonucleotide
  Antisense strand to SEQ ID NO: 1823827
ugcuccauuucuaacaugg

SEQ ID NO: 1823829 - RNA, 19 nt, Artificial Sequence
  Description of Artificial Sequence: Synthetic oligonucleotide
  Sense strand starting at position 2575 of SEQ ID NO: 1563676
cugcccauuccagauguua

SEQ ID NO: 1823830 - RNA, 19 nt, Artificial Sequence
  Description of Artificial Sequence: Synthetic oligonucleotide
  Antisense strand to SEQ ID NO: 1823829
uaacaucuggaaugggcag

SEQ ID NO: 1823831 - RNA, 19 nt, Artificial Sequence
  Description of Artificial Sequence: Synthetic oligonucleotide
  Sense strand starting at position 2583 of SEQ ID NO: 1563676
uccagauguuaaucacuag

SEQ ID NO: 1823832 - RNA, 19 nt, Artificial Sequence
  Description of Artificial Sequence: Synthetic oligonucleotide
  Antisense strand to SEQ ID NO: 1823831
cuagugauuaacaucugga

SEQ ID NO: 1823833 - RNA, 19 nt, Artificial Sequence
  Description of Artificial Sequence: Synthetic oligonucleotide
  Sense strand starting at position 2759 of SEQ ID NO: 1563676
uagauaguccaaugcggau

SEQ ID NO: 1823834 - RNA, 19 nt, Artificial Sequence
  Description of Artificial Sequence: Synthetic oligonucleotide
  Antisense strand to SEQ ID NO: 1823833
auccgcauuggacuaucua

SEQ ID NO: 1823835 - RNA, 19 nt, Artificial Sequence
  Description of Artificial Sequence: Synthetic oligonucleotide
  Sense strand starting at position 2763 of SEQ ID NO: 1563676
uaguccaaugcggauaauu

SEQ ID NO: 1823836 - RNA, 19 nt, Artificial Sequence
  Description of Artificial Sequence: Synthetic oligonucleotide
  Antisense strand to SEQ ID NO: 1823835
aauuauccgcauuggacua

SEQ ID NO: 1823837 - RNA, 19 nt, Artificial Sequence
  Description of Artificial Sequence: Synthetic oligonucleotide
  Sense strand starting at position 2765 of SEQ ID NO: 1563676
guccaaugcggauaauuag

SEQ ID NO: 1823838 - RNA, 19 nt, Artificial Sequence
  Description of Artificial Sequence: Synthetic oligonucleotide
  Antisense strand to SEQ ID NO: 1823837
cuaauuauccgcauuggac

SEQ ID NO: 1823839 - RNA, 19 nt, Artificial Sequence
  Description of Artificial Sequence: Synthetic oligonucleotide
  Sense strand starting at position 2850 of SEQ ID NO: 1563676
uguggaauauuccuuguua

SEQ ID NO: 1823840 - RNA, 19 nt, Artificial Sequence
  Description of Artificial Sequence: Synthetic oligonucleotide
  Antisense strand to SEQ ID NO: 1823839
uaacaaggaauauuccaca

SEQ ID NO: 1823841 - RNA, 19 nt, Artificial Sequence
  Description of Artificial Sequence: Synthetic oligonucleotide
  Sense strand starting at position 2851 of SEQ ID NO: 1563676
guggaauauuccuuguuag

SEQ ID NO: 1823842 - RNA, 19 nt, Artificial Sequence
  Description of Artificial Sequence: Synthetic oligonucleotide
  Antisense strand to SEQ ID NO: 1823841
cuaacaaggaauauuccac

SEQ ID NO: 1823843 - RNA, 19 nt, Artificial Sequence
  Description of Artificial Sequence: Synthetic oligonucleotide
  Sense strand starting at position 2852 of SEQ ID NO: 1563676
uggaauauuccuuguuagu

SEQ ID NO: 1823844 - RNA, 19 nt, Artificial Sequence
  Description of Artificial Sequence: Synthetic oligonucleotide
  Antisense strand to SEQ ID NO: 1823843
acuaacaaggaauauucca

SEQ ID NO: 1823845 - RNA, 19 nt, Artificial Sequence
  Description of Artificial Sequence: Synthetic oligonucleotide
  Sense strand starting at position 2858 of SEQ ID NO: 1563676
auuccuuguuagucaccua

SEQ ID NO: 1823846 - RNA, 19 nt, Artificial Sequence
  Description of Artificial Sequence: Synthetic oligonucleotide
  Antisense strand to SEQ ID NO: 1823845
uaggugacuaacaaggaau

SEQ ID NO: 1823847 - RNA, 19 nt, Artificial Sequence
  Description of Artificial Sequence: Synthetic oligonucleotide
  Sense strand starting at position 2879 of SEQ ID NO: 1563676
ugcuuuacuggaggucuua

SEQ ID NO: 1823848 - RNA, 19 nt, Artificial Sequence
  Description of Artificial Sequence: Synthetic oligonucleotide
  Antisense strand to SEQ ID NO: 1823847
uaagaccuccaguaaagca

SEQ ID NO: 1823849 - RNA, 19 nt, Artificial Sequence
  Description of Artificial Sequence: Synthetic oligonucleotide
  Sense strand starting at position 2931 of SEQ ID NO: 1563676
uccguaaaugacuaacuuu

SEQ ID NO: 1823850 - RNA, 19 nt, Artificial Sequence
  Description of Artificial Sequence: Synthetic oligonucleotide
  Antisense strand to SEQ ID NO: 1823849
aaaguuagucauuuacgga

SEQ ID NO: 1823851 - RNA, 19 nt, Artificial Sequence
  Description of Artificial Sequence: Synthetic oligonucleotide
  Sense strand starting at position 2934 of SEQ ID NO: 1563676
guaaaugacuaacuuugga

SEQ ID NO: 1823852 - RNA, 19 nt, Artificial Sequence
  Description of Artificial Sequence: Synthetic oligonucleotide
  Antisense strand to SEQ ID NO: 1823851
uccaaaguuagucauuuac

SEQ ID NO: 1823853 - RNA, 19 nt, Artificial Sequence
  Description of Artificial Sequence: Synthetic oligonucleotide
  Sense strand starting at position 2942 of SEQ ID NO: 1563676
cuaacuuuggaucaguuua

SEQ ID NO: 1823854 - RNA, 19 nt, Artificial Sequence
  Description of Artificial Sequence: Synthetic oligonucleotide
  Antisense strand to SEQ ID NO: 1823853
uaaacugauccaaaguuag

SEQ ID NO: 1823855 - RNA, 19 nt, Artificial Sequence
  Description of Artificial Sequence: Synthetic oligonucleotide
  Sense strand starting at position 3061 of SEQ ID NO: 1563676
accagaggaucuuauugaa

SEQ ID NO: 1823856 - RNA, 19 nt, Artificial Sequence
  Description of Artificial Sequence: Synthetic oligonucleotide
  Antisense strand to SEQ ID NO: 1823855
uucaauaagauccucuggu

SEQ ID NO: 1823857 - RNA, 19 nt, Artificial Sequence
  Description of Artificial Sequence: Synthetic oligonucleotide
  Sense strand starting at position 3081 of SEQ ID NO: 1563676
ugcagauuaugauccagua

SEQ ID NO: 1823858 - RNA, 19 nt, Artificial Sequence
  Description of Artificial Sequence: Synthetic oligonucleotide
  Antisense strand to SEQ ID NO: 1823857
uacuggaucauaaucugca

SEQ ID NO: 1823859 - RNA, 19 nt, Artificial Sequence
  Description of Artificial Sequence: Synthetic oligonucleotide
  Sense strand starting at position 3134 of SEQ ID NO: 1563676
agaaguuccuagcugaagu

SEQ ID NO: 1823860 - RNA, 19 nt, Artificial Sequence
  Description of Artificial Sequence: Synthetic oligonucleotide
  Antisense strand to SEQ ID NO: 1823859
acuucagcuaggaacuucu

SEQ ID NO: 1823861 - RNA, 19 nt, Artificial Sequence
  Description of Artificial Sequence: Synthetic oligonucleotide
  Sense strand starting at position 3372 of SEQ ID NO: 1563676
uaugguguagugugagaca

SEQ ID NO: 1823862 - RNA, 19 nt, Artificial Sequence
  Description of Artificial Sequence: Synthetic oligonucleotide
  Antisense strand to SEQ ID NO: 1823861
ugucucacacuacaccaua

SEQ ID NO: 1823863 - RNA, 19 nt, Artificial Sequence
  Description of Artificial Sequence: Synthetic oligonucleotide
  Sense strand starting at position 3383 of SEQ ID NO: 1563676
gugagacaucccuggacug

SEQ ID NO: 1823864 - RNA, 19 nt, Artificial Sequence
  Description of Artificial Sequence: Synthetic oligonucleotide
  Antisense strand to SEQ ID NO: 1823863
caguccagggaugucucac

SEQ ID NO: 1823865 - RNA, 19 nt, Artificial Sequence
  Description of Artificial Sequence: Synthetic oligonucleotide
  Sense strand starting at position 3617 of SEQ ID NO: 1563676
aauuuaagguuguaacgau

SEQ ID NO: 1823866 - RNA, 19 nt, Artificial Sequence
  Description of Artificial Sequence: Synthetic oligonucleotide
  Antisense strand to SEQ ID NO: 1823865
aucguuacaaccuuaaauu

SEQ ID NO: 1823867 - RNA, 19 nt, Artificial Sequence
  Description of Artificial Sequence: Synthetic oligonucleotide
  Sense strand starting at position 3626 of SEQ ID NO: 1563676
uuguaacgaugcuuaaaua

SEQ ID NO: 1823868 - RNA, 19 nt, Artificial Sequence
  Description of Artificial Sequence: Synthetic oligonucleotide
  Antisense strand to SEQ ID NO: 1823867
uauuuaagcaucguuacaa

SEQ ID NO: 1823869 - RNA, 19 nt, Artificial Sequence
  Description of Artificial Sequence: Synthetic oligonucleotide
  Sense strand starting at position 3627 of SEQ ID NO: 1563676
uguaacgaugcuuaaauaa

SEQ ID NO: 1823870 - RNA, 19 nt, Artificial Sequence
  Description of Artificial Sequence: Synthetic oligonucleotide
  Antisense strand to SEQ ID NO: 1823869
uuauuuaagcaucguuaca

SEQ ID NO: 1823871 - RNA, 19 nt, Artificial Sequence
  Description of Artificial Sequence: Synthetic oligonucleotide
  Sense strand starting at position 3983 of SEQ ID NO: 1563676
agaguuguguuauuaacca

SEQ ID NO: 1823872 - RNA, 19 nt, Artificial Sequence
  Description of Artificial Sequence: Synthetic oligonucleotide
  Antisense strand to SEQ ID NO: 1823871
ugguuaauaacacaacucu

SEQ ID NO: 1823873 - RNA, 19 nt, Artificial Sequence
  Description of Artificial Sequence: Synthetic oligonucleotide
  Sense strand starting at position 219 of SEQ ID NO: 1563677
gggcuaacuugucugagga

SEQ ID NO: 1823874 - RNA, 19 nt, Artificial Sequence
  Description of Artificial Sequence: Synthetic oligonucleotide
  Antisense strand to SEQ ID NO: 1823873
uccucagacaaguuagccc

SEQ ID NO: 1823875 - RNA, 19 nt, Artificial Sequence
  Description of Artificial Sequence: Synthetic oligonucleotide
  Sense strand starting at position 220 of SEQ ID NO: 1563677
ggcuaacuugucugaggac

SEQ ID NO: 1823876 - RNA, 19 nt, Artificial Sequence
  Description of Artificial Sequence: Synthetic oligonucleotide
  Antisense strand to SEQ ID NO: 1823875
guccucagacaaguuagcc

SEQ ID NO: 1823877 - RNA, 19 nt, Artificial Sequence
  Description of Artificial Sequence: Synthetic oligonucleotide
  Sense strand starting at position 286 of SEQ ID NO: 1563677
ccuggaaaguccuaaacac

SEQ ID NO: 1823878 - RNA, 19 nt, Artificial Sequence
  Description of Artificial Sequence: Synthetic oligonucleotide
  Antisense strand to SEQ ID NO: 1823877
guguuuaggacuuuccagg

SEQ ID NO: 1823879 - RNA, 19 nt, Artificial Sequence
  Description of Artificial Sequence: Synthetic oligonucleotide
  Sense strand starting at position 328 of SEQ ID NO: 1563677
agcugacagucuuucucau

SEQ ID NO: 1823880 - RNA, 19 nt, Artificial Sequence
  Description of Artificial Sequence: Synthetic oligonucleotide
  Antisense strand to SEQ ID NO: 1823879
augagaaagacugucagcu

SEQ ID NO: 1823881 - RNA, 19 nt, Artificial Sequence
  Description of Artificial Sequence: Synthetic oligonucleotide
  Sense strand starting at position 371 of SEQ ID NO: 1563677
agagaagucuaacucuggu

SEQ ID NO: 1823882 - RNA, 19 nt, Artificial Sequence
  Description of Artificial Sequence: Synthetic oligonucleotide
  Antisense strand to SEQ ID NO: 1823881
accagaguuagacuucucu

SEQ ID NO: 1823883 - RNA, 19 nt, Artificial Sequence
  Description of Artificial Sequence: Synthetic oligonucleotide
  Sense strand starting at position 438 of SEQ ID NO: 1563677
ucaguuuccguauguacaa

SEQ ID NO: 1823884 - RNA, 19 nt, Artificial Sequence
  Description of Artificial Sequence: Synthetic oligonucleotide
  Antisense strand to SEQ ID NO: 1823883
uuguacauacggaaacuga

SEQ ID NO: 1823885 - RNA, 19 nt, Artificial Sequence
  Description of Artificial Sequence: Synthetic oligonucleotide
  Sense strand starting at position 544 of SEQ ID NO: 1563677
gagcuugagcuuugaggca

SEQ ID NO: 1823886 - RNA, 19 nt, Artificial Sequence
  Description of Artificial Sequence: Synthetic oligonucleotide
  Antisense strand to SEQ ID NO: 1823885
ugccucaaagcucaagcuc

SEQ ID NO: 1823887 - RNA, 19 nt, Artificial Sequence
  Description of Artificial Sequence: Synthetic oligonucleotide
  Sense strand starting at position 714 of SEQ ID NO: 1563677
cagccaaugugucugcaaa

SEQ ID NO: 1823888 - RNA, 19 nt, Artificial Sequence
  Description of Artificial Sequence: Synthetic oligonucleotide
  Antisense strand to SEQ ID NO: 1823887
uuugcagacacauuggcug

SEQ ID NO: 1823889 - RNA, 19 nt, Artificial Sequence
  Description of Artificial Sequence: Synthetic oligonucleotide
  Sense strand starting at position 715 of SEQ ID NO: 1563677
agccaaugugucugcaaac

SEQ ID NO: 1823890 - RNA, 19 nt, Artificial Sequence
  Description of Artificial Sequence: Synthetic oligonucleotide
  Antisense strand to SEQ ID NO: 1823889
guuugcagacacauuggcu

SEQ ID NO: 1823891 - RNA, 19 nt, Artificial Sequence
  Description of Artificial Sequence: Synthetic oligonucleotide
  Sense strand starting at position 716 of SEQ ID NO: 1563677
gccaaugugucugcaaaca

SEQ ID NO: 1823892 - RNA, 19 nt, Artificial Sequence
  Description of Artificial Sequence: Synthetic oligonucleotide
  Antisense strand to SEQ ID NO: 1823891
uguuugcagacacauuggc

SEQ ID NO: 1823893 - RNA, 19 nt, Artificial Sequence
  Description of Artificial Sequence: Synthetic oligonucleotide
  Sense strand starting at position 768 of SEQ ID NO: 1563677
cugcgauguuucuuggauu

SEQ ID NO: 1823894 - RNA, 19 nt, Artificial Sequence
  Description of Artificial Sequence: Synthetic oligonucleotide
  Antisense strand to SEQ ID NO: 1823893
aauccaagaaacaucgcag

SEQ ID NO: 1823895 - RNA, 19 nt, Artificial Sequence
  Description of Artificial Sequence: Synthetic oligonucleotide
  Sense strand starting at position 803 of SEQ ID NO: 1563677
ggaguaugccgcaguggua

SEQ ID NO: 1823896 - RNA, 19 nt, Artificial Sequence
  Description of Artificial Sequence: Synthetic oligonucleotide
  Antisense strand to SEQ ID NO: 1823895
uaccacugcggcauacucc

SEQ ID NO: 1823897 - RNA, 19 nt, Artificial Sequence
  Description of Artificial Sequence: Synthetic oligonucleotide
  Sense strand starting at position 1192 of SEQ ID NO: 1563677
guguguggcccagaugaua

SEQ ID NO: 1823898 - RNA, 19 nt, Artificial Sequence
  Description of Artificial Sequence: Synthetic oligonucleotide
  Antisense strand to SEQ ID NO: 1823897
uaucaucugggccacacac

SEQ ID NO: 1823899 - RNA, 19 nt, Artificial Sequence
  Description of Artificial Sequence: Synthetic oligonucleotide
  Sense strand starting at position 1289 of SEQ ID NO: 1563677
gcuuccaccugugcagaaa

SEQ ID NO: 1823900 - RNA, 19 nt, Artificial Sequence
  Description of Artificial Sequence: Synthetic oligonucleotide
  Antisense strand to SEQ ID NO: 1823899
uuucugcacagguggaagc

SEQ ID NO: 1823901 - RNA, 19 nt, Artificial Sequence
  Description of Artificial Sequence: Synthetic oligonucleotide
  Sense strand starting at position 1301 of SEQ ID NO: 1563677
gcagaaacauucccagcau

SEQ ID NO: 1823902 - RNA, 19 nt, Artificial Sequence
  Description of Artificial Sequence: Synthetic oligonucleotide
  Antisense strand to SEQ ID NO: 1823901
augcugggaauguuucugc

SEQ ID NO: 1823903 - RNA, 19 nt, Artificial Sequence
  Description of Artificial Sequence: Synthetic oligonucleotide
  Sense strand starting at position 1423 of SEQ ID NO: 1563677
agaggaaagugugccagau

SEQ ID NO: 1823904 - RNA, 19 nt, Artificial Sequence
  Description of Artificial Sequence: Synthetic oligonucleotide
  Antisense strand to SEQ ID NO: 1823903
aucuggcacacuuuccucu

SEQ ID NO: 1823905 - RNA, 19 nt, Artificial Sequence
  Description of Artificial Sequence: Synthetic oligonucleotide
  Sense strand starting at position 1562 of SEQ ID NO: 1563677
aggaacaagaguugucauu

SEQ ID NO: 1823906 - RNA, 19 nt, Artificial Sequence
  Description of Artificial Sequence: Synthetic oligonucleotide
  Antisense strand to SEQ ID NO: 1823905
aaugacaacucuuguuccu

SEQ ID NO: 1823907 - RNA, 19 nt, Artificial Sequence
  Description of Artificial Sequence: Synthetic oligonucleotide
  Sense strand starting at position 1564 of SEQ ID NO: 1563677
gaacaagaguugucauucu

SEQ ID NO: 1823908 - RNA, 19 nt, Artificial Sequence
  Description of Artificial Sequence: Synthetic oligonucleotide
  Antisense strand to SEQ ID NO: 1823907
agaaugacaacucuuguuc

SEQ ID NO: 1823909 - RNA, 19 nt, Artificial Sequence
  Description of Artificial Sequence: Synthetic oligonucleotide
  Sense strand starting at position 1767 of SEQ ID NO: 1563677
uggaaaugauccugacaca

SEQ ID NO: 1823910 - RNA, 19 nt, Artificial Sequence
  Description of Artificial Sequence: Synthetic oligonucleotide
  Antisense strand to SEQ ID NO: 1823909
ugugucaggaucauuucca

SEQ ID NO: 1823911 - RNA, 19 nt, Artificial Sequence
  Description of Artificial Sequence: Synthetic oligonucleotide
  Sense strand starting at position 2367 of SEQ ID NO: 1563677
acagaaggugcaugauaca

SEQ ID NO: 1823912 - RNA, 19 nt, Artificial Sequence
  Description of Artificial Sequence: Synthetic oligonucleotide
  Antisense strand to SEQ ID NO: 1823911
uguaucaugcaccuucugu

SEQ ID NO: 1823913 - RNA, 19 nt, Artificial Sequence
  Description of Artificial Sequence: Synthetic oligonucleotide
  Sense strand starting at position 2376 of SEQ ID NO: 1563677
gcaugauacagaggaacuu

SEQ ID NO: 1823914 - RNA, 19 nt, Artificial Sequence
  Description of Artificial Sequence: Synthetic oligonucleotide
  Antisense strand to SEQ ID NO: 1823913
aaguuccucuguaucaugc

SEQ ID NO: 1823915 - RNA, 19 nt, Artificial Sequence
  Description of Artificial Sequence: Synthetic oligonucleotide
  Sense strand starting at position 2412 of SEQ ID NO: 1563677
gcggucugccugcuugaca

SEQ ID NO: 1823916 - RNA, 19 nt, Artificial Sequence
  Description of Artificial Sequence: Synthetic oligonucleotide
  Antisense strand to SEQ ID NO: 1823915
ugucaagcaggcagaccgc

SEQ ID NO: 1823917 - RNA, 19 nt, Artificial Sequence
  Description of Artificial Sequence: Synthetic oligonucleotide
  Sense strand starting at position 2667 of SEQ ID NO: 1563677
ggucaagagcagugaccua

SEQ ID NO: 1823918 - RNA, 19 nt, Artificial Sequence
  Description of Artificial Sequence: Synthetic oligonucleotide
  Antisense strand to SEQ ID NO: 1823917
uaggucacugcucuugacc

SEQ ID NO: 1823919 - RNA, 19 nt, Artificial Sequence
  Description of Artificial Sequence: Synthetic oligonucleotide
  Sense strand starting at position 2800 of SEQ ID NO: 1563677
gccugacucuuccucaaag

SEQ ID NO: 1823920 - RNA, 19 nt, Artificial Sequence
  Description of Artificial Sequence: Synthetic oligonucleotide
  Antisense strand to SEQ ID NO: 1823919
cuuugaggaagagucaggc

SEQ ID NO: 1823921 - RNA, 19 nt, Artificial Sequence
  Description of Artificial Sequence: Synthetic oligonucleotide
  Sense strand starting at position 2802 of SEQ ID NO: 1563677
cugacucuuccucaaaggu

SEQ ID NO: 1823922 - RNA, 19 nt, Artificial Sequence
  Description of Artificial Sequence: Synthetic oligonucleotide
  Antisense strand to SEQ ID NO: 1823921
accuuugaggaagagucag

SEQ ID NO: 1823923 - RNA, 19 nt, Artificial Sequence
  Description of Artificial Sequence: Synthetic oligonucleotide
  Sense strand starting at position 2821 of SEQ ID NO: 1563677
uccaguguguuaucuaaac

SEQ ID NO: 1823924 - RNA, 19 nt, Artificial Sequence
  Description of Artificial Sequence: Synthetic oligonucleotide
  Antisense strand to SEQ ID NO: 1823923
guuuagauaacacacugga

SEQ ID NO: 1823925 - RNA, 19 nt, Artificial Sequence
  Description of Artificial Sequence: Synthetic oligonucleotide
  Sense strand starting at position 3216 of SEQ ID NO: 1563677
gguucaauccuggagcuga

SEQ ID NO: 1823926 - RNA, 19 nt, Artificial Sequence
  Description of Artificial Sequence: Synthetic oligonucleotide
  Antisense strand to SEQ ID NO: 1823925
ucagcuccaggauugaacc

SEQ ID NO: 1823927 - RNA, 19 nt, Artificial Sequence
  Description of Artificial Sequence: Synthetic oligonucleotide
  Sense strand starting at position 3274 of SEQ ID NO: 1563677
auuggaagcuccuccacau

SEQ ID NO: 1823928 - RNA, 19 nt, Artificial Sequence
  Description of Artificial Sequence: Synthetic oligonucleotide
  Antisense strand to SEQ ID NO: 1823927
auguggaggagcuuccaau

SEQ ID NO: 1823929 - RNA, 19 nt, Artificial Sequence
  Description of Artificial Sequence: Synthetic oligonucleotide
  Sense strand starting at position 3294 of SEQ ID NO: 1563677
gccuauuggcuauauggaa

SEQ ID NO: 1823930 - RNA, 19 nt, Artificial Sequence
  Description of Artificial Sequence: Synthetic oligonucleotide
  Antisense strand to SEQ ID NO: 1823929
uuccauauagccaauaggc

SEQ ID NO: 1823931 - RNA, 19 nt, Artificial Sequence
  Description of Artificial Sequence: Synthetic oligonucleotide
  Sense strand starting at position 3311 of SEQ ID NO: 1563677
aaggauuaauaaugaggua

SEQ ID NO: 1823932 - RNA, 19 nt, Artificial Sequence
  Description of Artificial Sequence: Synthetic oligonucleotide
  Antisense strand to SEQ ID NO: 1823931
uaccucauuauuaauccuu

SEQ ID NO: 1823933 - RNA, 19 nt, Artificial Sequence
  Description of Artificial Sequence: Synthetic oligonucleotide
  Sense strand starting at position 3362 of SEQ ID NO: 1563677
uuggcuguguuauuauuaa

SEQ ID NO: 1823934 - RNA, 19 nt, Artificial Sequence
  Description of Artificial Sequence: Synthetic oligonucleotide
  Antisense strand to SEQ ID NO: 1823933
uuaauaauaacacagccaa

SEQ ID NO: 1823935 - RNA, 19 nt, Artificial Sequence
  Description of Artificial Sequence: Synthetic oligonucleotide
  Sense strand starting at position 3503 of SEQ ID NO: 1563677
augccuauauggucaguaa

SEQ ID NO: 1823936 - RNA, 19 nt, Artificial Sequence
  Description of Artificial Sequence: Synthetic oligonucleotide
  Antisense strand to SEQ ID NO: 1823935
uuacugaccauauaggcau

SEQ ID NO: 1823937 - RNA, 19 nt, Artificial Sequence
  Description of Artificial Sequence: Synthetic oligonucleotide
  Sense strand starting at position 3504 of SEQ ID NO: 1563677
ugccuauauggucaguaaa

SEQ ID NO: 1823938 - RNA, 19 nt, Artificial Sequence
  Description of Artificial Sequence: Synthetic oligonucleotide
  Antisense strand to SEQ ID NO: 1823937
uuuacugaccauauaggca

SEQ ID NO: 1823939 - RNA, 19 nt, Artificial Sequence
  Description of Artificial Sequence: Synthetic oligonucleotide
  Sense strand starting at position 3506 of SEQ ID NO: 1563677
ccuauauggucaguaaaug

SEQ ID NO: 1823940 - RNA, 19 nt, Artificial Sequence
  Description of Artificial Sequence: Synthetic oligonucleotide
  Antisense strand to SEQ ID NO: 1823939
cauuuacugaccauauagg

SEQ ID NO: 1823941 - RNA, 19 nt, Artificial Sequence
  Description of Artificial Sequence: Synthetic oligonucleotide
  Sense strand starting at position 3690 of SEQ ID NO: 1563677
gucuccucuguguaacuca

SEQ ID NO: 1823942 - RNA, 19 nt, Artificial Sequence
  Description of Artificial Sequence: Synthetic oligonucleotide
  Antisense strand to SEQ ID NO: 1823941
ugaguuacacagaggagac

SEQ ID NO: 1823943 - RNA, 19 nt, Artificial Sequence
  Description of Artificial Sequence: Synthetic oligonucleotide
  Sense strand starting at position 3704 of SEQ ID NO: 1563677
acucacuuccuguggcaaa

SEQ ID NO: 1823944 - RNA, 19 nt, Artificial Sequence
  Description of Artificial Sequence: Synthetic oligonucleotide
  Antisense strand to SEQ ID NO: 1823943
uuugccacaggaagugagu

SEQ ID NO: 1823945 - RNA, 19 nt, Artificial Sequence
  Description of Artificial Sequence: Synthetic oligonucleotide
  Sense strand starting at position 3860 of SEQ ID NO: 1563677
uguuguucccuuuauccaa

SEQ ID NO: 1823946 - RNA, 19 nt, Artificial Sequence
  Description of Artificial Sequence: Synthetic oligonucleotide
  Antisense strand to SEQ ID NO: 1823945
uuggauaaagggaacaaca

SEQ ID NO: 1823947 - RNA, 19 nt, Artificial Sequence
  Description of Artificial Sequence: Synthetic oligonucleotide
  Sense strand starting at position 3909 of SEQ ID NO: 1563677
gacugagucucguugucau

SEQ ID NO: 1823948 - RNA, 19 nt, Artificial Sequence
  Description of Artificial Sequence: Synthetic oligonucleotide
  Antisense strand to SEQ ID NO: 1823947
augacaacgagacucaguc

SEQ ID NO: 1823949 - RNA, 19 nt, Artificial Sequence
  Description of Artificial Sequence: Synthetic oligonucleotide
  Sense strand starting at position 3960 of SEQ ID NO: 1563677
gucccuuggguauaggaua

SEQ ID NO: 1823950 - RNA, 19 nt, Artificial Sequence
  Description of Artificial Sequence: Synthetic oligonucleotide
  Antisense strand to SEQ ID NO: 1823949
uauccuauacccaagggac

SEQ ID NO: 1823951 - RNA, 19 nt, Artificial Sequence
  Description of Artificial Sequence: Synthetic oligonucleotide
  Sense strand starting at position 3980 of SEQ ID NO: 1563677
gagacuguccaauguguuc

SEQ ID NO: 1823952 - RNA, 19 nt, Artificial Sequence
  Description of Artificial Sequence: Synthetic oligonucleotide
  Antisense strand to SEQ ID NO: 1823951
gaacacauuggacagucuc

SEQ ID NO: 1823953 - RNA, 19 nt, Artificial Sequence
  Description of Artificial Sequence: Synthetic oligonucleotide
  Sense strand starting at position 2180 of SEQ ID NO: 1563678
cuggccuguuuguucuaua

SEQ ID NO: 1823954 - RNA, 19 nt, Artificial Sequence
  Description of Artificial Sequence: Synthetic oligonucleotide
  Antisense strand to SEQ ID NO: 1823953
uauagaacaaacaggccag

SEQ ID NO: 1823955 - RNA, 19 nt, Artificial Sequence
  Description of Artificial Sequence: Synthetic oligonucleotide
  Sense strand starting at position 2183 of SEQ ID NO: 1563678
gccuguuuguucuauacuu

SEQ ID NO: 1823956 - RNA, 19 nt, Artificial Sequence
  Description of Artificial Sequence: Synthetic oligonucleotide
  Antisense strand to SEQ ID NO: 1823955
aaguauagaacaaacaggc

SEQ ID NO: 1823957 - RNA, 19 nt, Artificial Sequence
  Description of Artificial Sequence: Synthetic oligonucleotide
  Sense strand starting at position 2191 of SEQ ID NO: 1563678
guucuauacuucuaauguu

SEQ ID NO: 1823958 - RNA, 19 nt, Artificial Sequence
  Description of Artificial Sequence: Synthetic oligonucleotide
  Antisense strand to SEQ ID NO: 1823957
aacauuagaaguauagaac

SEQ ID NO: 1823959 - RNA, 19 nt, Artificial Sequence
  Description of Artificial Sequence: Synthetic oligonucleotide
  Sense strand starting at position 2219 of SEQ ID NO: 1563678
cccagagcuuuggauauau

SEQ ID NO: 1823960 - RNA, 19 nt, Artificial Sequence
  Description of Artificial Sequence: Synthetic oligonucleotide
  Antisense strand to SEQ ID NO: 1823959
auauauccaaagcucuggg

SEQ ID NO: 1823961 - RNA, 19 nt, Artificial Sequence
  Description of Artificial Sequence: Synthetic oligonucleotide
  Sense strand starting at position 2289 of SEQ ID NO: 1563678
auagacccuuaguuagaau

SEQ ID NO: 1823962 - RNA, 19 nt, Artificial Sequence
  Description of Artificial Sequence: Synthetic oligonucleotide
  Antisense strand to SEQ ID NO: 1823961
auucuaacuaagggucuau

SEQ ID NO: 1823963 - RNA, 19 nt, Artificial Sequence
  Description of Artificial Sequence: Synthetic oligonucleotide
  Sense strand starting at position 2394 of SEQ ID NO: 1563678
uuagaagaauaggacuaua

SEQ ID NO: 1823964 - RNA, 19 nt, Artificial Sequence
  Description of Artificial Sequence: Synthetic oligonucleotide
  Antisense strand to SEQ ID NO: 1823963
uauaguccuauucuucuaa

SEQ ID NO: 1823965 - RNA, 19 nt, Artificial Sequence
  Description of Artificial Sequence: Synthetic oligonucleotide
  Sense strand starting at position 2465 of SEQ ID NO: 1563678
uacagaacuucuggaaagu

SEQ ID NO: 1823966 - RNA, 19 nt, Artificial Sequence
  Description of Artificial Sequence: Synthetic oligonucleotide
  Antisense strand to SEQ ID NO: 1823965
acuuuccagaaguucugua

SEQ ID NO: 1823967 - RNA, 19 nt, Artificial Sequence
  Description of Artificial Sequence: Synthetic oligonucleotide
  Sense strand starting at position 2544 of SEQ ID NO: 1563678
ggcaaagguaagugcaauu

SEQ ID NO: 1823968 - RNA, 19 nt, Artificial Sequence
  Description of Artificial Sequence: Synthetic oligonucleotide
  Antisense strand to SEQ ID NO: 1823967
aauugcacuuaccuuugcc

SEQ ID NO: 1823969 - RNA, 19 nt, Artificial Sequence
  Description of Artificial Sequence: Synthetic oligonucleotide
  Sense strand starting at position 2555 of SEQ ID NO: 1563678
gugcaauucuuccaaagag

SEQ ID NO: 1823970 - RNA, 19 nt, Artificial Sequence
  Description of Artificial Sequence: Synthetic oligonucleotide
  Antisense strand to SEQ ID NO: 1823969
cucuuuggaagaauugcac

SEQ ID NO: 1823971 - RNA, 19 nt, Artificial Sequence
  Description of Artificial Sequence: Synthetic oligonucleotide
  Sense strand starting at position 2567 of SEQ ID NO: 1563678
caaagagagcccugaguga

SEQ ID NO: 1823972 - RNA, 19 nt, Artificial Sequence
  Description of Artificial Sequence: Synthetic oligonucleotide
  Antisense strand to SEQ ID NO: 1823971
ucacucagggcucucuuug

SEQ ID NO: 1823973 - RNA, 19 nt, Artificial Sequence
  Description of Artificial Sequence: Synthetic oligonucleotide
  Sense strand starting at position 2571 of SEQ ID NO: 1563678
gagagcccugagugaaauu

SEQ ID NO: 1823974 - RNA, 19 nt, Artificial Sequence
  Description of Artificial Sequence: Synthetic oligonucleotide
  Antisense strand to SEQ ID NO: 1823973
aauuucacucagggcucuc

SEQ ID NO: 1823975 - RNA, 19 nt, Artificial Sequence
  Description of Artificial Sequence: Synthetic oligonucleotide
  Sense strand starting at position 2619 of SEQ ID NO: 1563678
gagauugggcccuagagua

SEQ ID NO: 1823976 - RNA, 19 nt, Artificial Sequence
  Description of Artificial Sequence: Synthetic oligonucleotide
  Antisense strand to SEQ ID NO: 1823975
uacucuagggcccaaucuc

SEQ ID NO: 1823977 - RNA, 19 nt, Artificial Sequence
  Description of Artificial Sequence: Synthetic oligonucleotide
  Sense strand starting at position 2631 of SEQ ID NO: 1563678
uagaguacucauggccuua

SEQ ID NO: 1823978 - RNA, 19 nt, Artificial Sequence
  Description of Artificial Sequence: Synthetic oligonucleotide
  Antisense strand to SEQ ID NO: 1823977
uaaggccaugaguacucua

SEQ ID NO: 1823979 - RNA, 19 nt, Artificial Sequence
  Description of Artificial Sequence: Synthetic oligonucleotide
  Sense strand starting at position 2633 of SEQ ID NO: 1563678
gaguacucauggccuuauu

SEQ ID NO: 1823980 - RNA, 19 nt, Artificial Sequence
  Description of Artificial Sequence: Synthetic oligonucleotide
  Antisense strand to SEQ ID NO: 1823979
aauaaggccaugaguacuc

SEQ ID NO: 1823981 - RNA, 19 nt, Artificial Sequence
  Description of Artificial Sequence: Synthetic oligonucleotide
  Sense strand starting at position 2766 of SEQ ID NO: 1563678
uugaguaugcaacagaauc

SEQ ID NO: 1823982 - RNA, 19 nt, Artificial Sequence
  Description of Artificial Sequence: Synthetic oligonucleotide
  Antisense strand to SEQ ID NO: 1823981
gauucuguugcauacucaa

SEQ ID NO: 1823983 - RNA, 19 nt, Artificial Sequence
  Description of Artificial Sequence: Synthetic oligonucleotide
  Sense strand starting at position 2832 of SEQ ID NO: 1563678
auuccuuauucggcaguca

SEQ ID NO: 1823984 - RNA, 19 nt, Artificial Sequence
  Description of Artificial Sequence: Synthetic oligonucleotide
  Antisense strand to SEQ ID NO: 1823983
ugacugccgaauaaggaau

SEQ ID NO: 1823985 - RNA, 19 nt, Artificial Sequence
  Description of Artificial Sequence: Synthetic oligonucleotide
  Sense strand starting at position 2833 of SEQ ID NO: 1563678
uuccuuauucggcagucau

SEQ ID NO: 1823986 - RNA, 19 nt, Artificial Sequence
  Description of Artificial Sequence: Synthetic oligonucleotide
  Antisense strand to SEQ ID NO: 1823985
augacugccgaauaaggaa

SEQ ID NO: 1823987 - RNA, 19 nt, Artificial Sequence
  Description of Artificial Sequence: Synthetic oligonucleotide
  Sense strand starting at position 2837 of SEQ ID NO: 1563678
uuauucggcagucauggaa

SEQ ID NO: 1823988 - RNA, 19 nt, Artificial Sequence
  Description of Artificial Sequence: Synthetic oligonucleotide
  Antisense strand to SEQ ID NO: 1823987
uuccaugacugccgaauaa

SEQ ID NO: 1823989 - RNA, 19 nt, Artificial Sequence
  Description of Artificial Sequence: Synthetic oligonucleotide
  Sense strand starting at position 2840 of SEQ ID NO: 1563678
uucggcagucauggaauga

SEQ ID NO: 1823990 - RNA, 19 nt, Artificial Sequence
  Description of Artificial Sequence: Synthetic oligonucleotide
  Antisense strand to SEQ ID NO: 1823989
ucauuccaugacugccgaa

SEQ ID NO: 1823991 - RNA, 19 nt, Artificial Sequence
  Description of Artificial Sequence: Synthetic oligonucleotide
  Sense strand starting at position 2841 of SEQ ID NO: 1563678
ucggcagucauggaaugau

SEQ ID NO: 1823992 - RNA, 19 nt, Artificial Sequence
  Description of Artificial Sequence: Synthetic oligonucleotide
  Antisense strand to SEQ ID NO: 1823991
aucauuccaugacugccga

SEQ ID NO: 1823993 - RNA, 19 nt, Artificial Sequence
  Description of Artificial Sequence: Synthetic oligonucleotide
  Sense strand starting at position 2882 of SEQ ID NO: 1563678
ccuagaagcuuugaguuaa

SEQ ID NO: 1823994 - RNA, 19 nt, Artificial Sequence
  Description of Artificial Sequence: Synthetic oligonucleotide
  Antisense strand to SEQ ID NO: 1823993
uuaacucaaagcuucuagg

SEQ ID NO: 1823995 - RNA, 19 nt, Artificial Sequence
  Description of Artificial Sequence: Synthetic oligonucleotide
  Sense strand starting at position 2967 of SEQ ID NO: 1563678
aucacaggaugucuuauua

SEQ ID NO: 1823996 - RNA, 19 nt, Artificial Sequence
  Description of Artificial Sequence: Synthetic oligonucleotide
  Antisense strand to SEQ ID NO: 1823995
uaauaagacauccugugau

SEQ ID NO: 1823997 - RNA, 19 nt, Artificial Sequence
  Description of Artificial Sequence: Synthetic oligonucleotide
  Sense strand starting at position 2971 of SEQ ID NO: 1563678
caggaugucuuauuaugaa

SEQ ID NO: 1823998 - RNA, 19 nt, Artificial Sequence
  Description of Artificial Sequence: Synthetic oligonucleotide
  Antisense strand to SEQ ID NO: 1823997
uucauaauaagacauccug

SEQ ID NO: 1823999 - RNA, 19 nt, Artificial Sequence
  Description of Artificial Sequence: Synthetic oligonucleotide
  Sense strand starting at position 2974 of SEQ ID NO: 1563678
gaugucuuauuaugaagaa

SEQ ID NO: 1824000 - RNA, 19 nt, Artificial Sequence
  Description of Artificial Sequence: Synthetic oligonucleotide
  Antisense strand to SEQ ID NO: 1823999
uucuucauaauaagacauc

SEQ ID NO: 1824001 - RNA, 19 nt, Artificial Sequence
  Description of Artificial Sequence: Synthetic oligonucleotide
  Sense strand starting at position 2975 of SEQ ID NO: 1563678
augucuuauuaugaagaac

SEQ ID NO: 1824002 - RNA, 19 nt, Artificial Sequence
  Description of Artificial Sequence: Synthetic oligonucleotide
  Antisense strand to SEQ ID NO: 1824001
guucuucauaauaagacau

SEQ ID NO: 1824003 - RNA, 19 nt, Artificial Sequence
  Description of Artificial Sequence: Synthetic oligonucleotide
  Sense strand starting at position 2995 of SEQ ID NO: 1563678
aggcaaagaugccuacauu

SEQ ID NO: 1824004 - RNA, 19 nt, Artificial Sequence
  Description of Artificial Sequence: Synthetic oligonucleotide
  Antisense strand to SEQ ID NO: 1824003
aauguaggcaucuuugccu

SEQ ID NO: 1824005 - RNA, 19 nt, Artificial Sequence
  Description of Artificial Sequence: Synthetic oligonucleotide
  Sense strand starting at position 3119 of SEQ ID NO: 1563678
ugaccuuauguguagcaaa

SEQ ID NO: 1824006 - RNA, 19 nt, Artificial Sequence
  Description of Artificial Sequence: Synthetic oligonucleotide
  Antisense strand to SEQ ID NO: 1824005
uuugcuacacauaagguca

SEQ ID NO: 1824007 - RNA, 19 nt, Artificial Sequence
  Description of Artificial Sequence: Synthetic oligonucleotide
  Sense strand starting at position 3202 of SEQ ID NO: 1563678
ucaacaaaguugcugaaua

SEQ ID NO: 1824008 - RNA, 19 nt, Artificial Sequence
  Description of Artificial Sequence: Synthetic oligonucleotide
  Antisense strand to SEQ ID NO: 1824007
uauucagcaacuuuguuga

SEQ ID NO: 1824009 - RNA, 19 nt, Artificial Sequence
  Description of Artificial Sequence: Synthetic oligonucleotide
  Sense strand starting at position 3248 of SEQ ID NO: 1563678
auuccuauaugcuaugaag

SEQ ID NO: 1824010 - RNA, 19 nt, Artificial Sequence
  Description of Artificial Sequence: Synthetic oligonucleotide
  Antisense strand to SEQ ID NO: 1824009
cuucauagcauauaggaau

SEQ ID NO: 1824011 - RNA, 19 nt, Artificial Sequence
  Description of Artificial Sequence: Synthetic oligonucleotide
  Sense strand starting at position 3250 of SEQ ID NO: 1563678
uccuauaugcuaugaagua

SEQ ID NO: 1824012 - RNA, 19 nt, Artificial Sequence
  Description of Artificial Sequence: Synthetic oligonucleotide
  Antisense strand to SEQ ID NO: 1824011
uacuucauagcauauagga

SEQ ID NO: 1824013 - RNA, 19 nt, Artificial Sequence
  Description of Artificial Sequence: Synthetic oligonucleotide
  Sense strand starting at position 3251 of SEQ ID NO: 1563678
ccuauaugcuaugaaguaa

SEQ ID NO: 1824014 - RNA, 19 nt, Artificial Sequence
  Description of Artificial Sequence: Synthetic oligonucleotide
  Antisense strand to SEQ ID NO: 1824013
uuacuucauagcauauagg

SEQ ID NO: 1824015 - RNA, 19 nt, Artificial Sequence
  Description of Artificial Sequence: Synthetic oligonucleotide
  Sense strand starting at position 3410 of SEQ ID NO: 1563678
aggcauaaguaaugagaag

SEQ ID NO: 1824016 - RNA, 19 nt, Artificial Sequence
  Description of Artificial Sequence: Synthetic oligonucleotide
  Antisense strand to SEQ ID NO: 1824015
cuucucauuacuuaugccu

SEQ ID NO: 1824017 - RNA, 19 nt, Artificial Sequence
  Description of Artificial Sequence: Synthetic oligonucleotide
  Sense strand starting at position 3515 of SEQ ID NO: 1563678
cgaucaggaucccaaugau

SEQ ID NO: 1824018 - RNA, 19 nt, Artificial Sequence
  Description of Artificial Sequence: Synthetic oligonucleotide
  Antisense strand to SEQ ID NO: 1824017
aucauugggauccugaucg

SEQ ID NO: 1824019 - RNA, 19 nt, Artificial Sequence
  Description of Artificial Sequence: Synthetic oligonucleotide
  Sense strand starting at position 3518 of SEQ ID NO: 1563678
ucaggaucccaaugauguu

SEQ ID NO: 1824020 - RNA, 19 nt, Artificial Sequence
  Description of Artificial Sequence: Synthetic oligonucleotide
  Antisense strand to SEQ ID NO: 1824019
aacaucauugggauccuga

SEQ ID NO: 1824021 - RNA, 19 nt, Artificial Sequence
  Description of Artificial Sequence: Synthetic oligonucleotide
  Sense strand starting at position 3617 of SEQ ID NO: 1563678
agaacaauguuggaugauu

SEQ ID NO: 1824022 - RNA, 19 nt, Artificial Sequence
  Description of Artificial Sequence: Synthetic oligonucleotide
  Antisense strand to SEQ ID NO: 1824021
aaucauccaacauuguucu

SEQ ID NO: 1824023 - RNA, 19 nt, Artificial Sequence
  Description of Artificial Sequence: Synthetic oligonucleotide
  Sense strand starting at position 3821 of SEQ ID NO: 1563678
guaaacucaugacacagaa

SEQ ID NO: 1824024 - RNA, 19 nt, Artificial Sequence
  Description of Artificial Sequence: Synthetic oligonucleotide
  Antisense strand to SEQ ID NO: 1824023
uucugugucaugaguuuac

SEQ ID NO: 1824025 - RNA, 19 nt, Artificial Sequence
  Description of Artificial Sequence: Synthetic oligonucleotide
  Sense strand starting at position 128 of SEQ ID NO: 1563679
gggauucuauaucucaucu

SEQ ID NO: 1824026 - RNA, 19 nt, Artificial Sequence
  Description of Artificial Sequence: Synthetic oligonucleotide
  Antisense strand to SEQ ID NO: 1824025
agaugagauauagaauccc

SEQ ID NO: 1824027 - RNA, 19 nt, Artificial Sequence
  Description of Artificial Sequence: Synthetic oligonucleotide
  Sense strand starting at position 220 of SEQ ID NO: 1563679
cagggauucuuaccugagu

SEQ ID NO: 1824028 - RNA, 19 nt, Artificial Sequence
  Description of Artificial Sequence: Synthetic oligonucleotide
  Antisense strand to SEQ ID NO: 1824027
acucagguaagaaucccug

SEQ ID NO: 1824029 - RNA, 19 nt, Artificial Sequence
  Description of Artificial Sequence: Synthetic oligonucleotide
  Sense strand starting at position 222 of SEQ ID NO: 1563679
gggauucuuaccugagugu

SEQ ID NO: 1824030 - RNA, 19 nt, Artificial Sequence
  Description of Artificial Sequence: Synthetic oligonucleotide
  Antisense strand to SEQ ID NO: 1824029
acacucagguaagaauccc

SEQ ID NO: 1824031 - RNA, 19 nt, Artificial Sequence
  Description of Artificial Sequence: Synthetic oligonucleotide
  Sense strand starting at position 239 of SEQ ID NO: 1563679
gucuauauggauugagaua

SEQ ID NO: 1824032 - RNA, 19 nt, Artificial Sequence
  Description of Artificial Sequence: Synthetic oligonucleotide
  Antisense strand to SEQ ID NO: 1824031
uaucucaauccauauagac

SEQ ID NO: 1824033 - RNA, 19 nt, Artificial Sequence
  Description of Artificial Sequence: Synthetic oligonucleotide
  Sense strand starting at position 308 of SEQ ID NO: 1563679
gggucuauaccuuggugau

SEQ ID NO: 1824034 - RNA, 19 nt, Artificial Sequence
  Description of Artificial Sequence: Synthetic oligonucleotide
  Antisense strand to SEQ ID NO: 1824033
aucaccaagguauagaccc

SEQ ID NO: 1824035 - RNA, 19 nt, Artificial Sequence
  Description of Artificial Sequence: Synthetic oligonucleotide
  Sense strand starting at position 433 of SEQ ID NO: 1563679
agaucuguuuaucucuaga

SEQ ID NO: 1824036 - RNA, 19 nt, Artificial Sequence
  Description of Artificial Sequence: Synthetic oligonucleotide
  Antisense strand to SEQ ID NO: 1824035
ucuagagauaaacagaucu

SEQ ID NO: 1824037 - RNA, 19 nt, Artificial Sequence
  Description of Artificial Sequence: Synthetic oligonucleotide
  Sense strand starting at position 435 of SEQ ID NO: 1563679
aucuguuuaucucuagauu

SEQ ID NO: 1824038 - RNA, 19 nt, Artificial Sequence
  Description of Artificial Sequence: Synthetic oligonucleotide
  Antisense strand to SEQ ID NO: 1824037
aaucuagagauaaacagau

SEQ ID NO: 1824039 - RNA, 19 nt, Artificial Sequence
  Description of Artificial Sequence: Synthetic oligonucleotide
  Sense strand starting at position 436 of SEQ ID NO: 1563679
ucuguuuaucucuagauug

SEQ ID NO: 1824040 - RNA, 19 nt, Artificial Sequence
  Description of Artificial Sequence: Synthetic oligonucleotide
  Antisense strand to SEQ ID NO: 1824039
caaucuagagauaaacaga

SEQ ID NO: 1824041 - RNA, 19 nt, Artificial Sequence
  Description of Artificial Sequence: Synthetic oligonucleotide
  Sense strand starting at position 438 of SEQ ID NO: 1563679
uguuuaucucuagauugug

SEQ ID NO: 1824042 - RNA, 19 nt, Artificial Sequence
  Description of Artificial Sequence: Synthetic oligonucleotide
  Antisense strand to SEQ ID NO: 1824041
cacaaucuagagauaaaca

SEQ ID NO: 1824043 - RNA, 19 nt, Artificial Sequence
  Description of Artificial Sequence: Synthetic oligonucleotide
  Sense strand starting at position 499 of SEQ ID NO: 1563679
acaggaucgauaugccuga

SEQ ID NO: 1824044 - RNA, 19 nt, Artificial Sequence
  Description of Artificial Sequence: Synthetic oligonucleotide
  Antisense strand to SEQ ID NO: 1824043
ucaggcauaucgauccugu

SEQ ID NO: 1824045 - RNA, 19 nt, Artificial Sequence
  Description of Artificial Sequence: Synthetic oligonucleotide
  Sense strand starting at position 504 of SEQ ID NO: 1563679
aucgauaugccugauucca

SEQ ID NO: 1824046 - RNA, 19 nt, Artificial Sequence
  Description of Artificial Sequence: Synthetic oligonucleotide
  Antisense strand to SEQ ID NO: 1824045
uggaaucaggcauaucgau

SEQ ID NO: 1824047 - RNA, 19 nt, Artificial Sequence
  Description of Artificial Sequence: Synthetic oligonucleotide
  Sense strand starting at position 567 of SEQ ID NO: 1563679
ugagcuauucuggacccuu

SEQ ID NO: 1824048 - RNA, 19 nt, Artificial Sequence
  Description of Artificial Sequence: Synthetic oligonucleotide
  Antisense strand to SEQ ID NO: 1824047
aaggguccagaauagcuca

SEQ ID NO: 1824049 - RNA, 19 nt, Artificial Sequence
  Description of Artificial Sequence: Synthetic oligonucleotide
  Sense strand starting at position 842 of SEQ ID NO: 1563679
cagguaaucagcgauguca

SEQ ID NO: 1824050 - RNA, 19 nt, Artificial Sequence
  Description of Artificial Sequence: Synthetic oligonucleotide
  Antisense strand to SEQ ID NO: 1824049
ugacaucgcugauuaccug

SEQ ID NO: 1824051 - RNA, 19 nt, Artificial Sequence
  Description of Artificial Sequence: Synthetic oligonucleotide
  Sense strand starting at position 1064 of SEQ ID NO: 1563679
ggauuaaggucuguuccug

SEQ ID NO: 1824052 - RNA, 19 nt, Artificial Sequence
  Description of Artificial Sequence: Synthetic oligonucleotide
  Antisense strand to SEQ ID NO: 1824051
caggaacagaccuuaaucc

SEQ ID NO: 1824053 - RNA, 19 nt, Artificial Sequence
  Description of Artificial Sequence: Synthetic oligonucleotide
  Sense strand starting at position 1082 of SEQ ID NO: 1563679
guuugcuucgaagcauguu

SEQ ID NO: 1824054 - RNA, 19 nt, Artificial Sequence
  Description of Artificial Sequence: Synthetic oligonucleotide
  Antisense strand to SEQ ID NO: 1824053
aacaugcuucgaagcaaac

SEQ ID NO: 1824055 - RNA, 19 nt, Artificial Sequence
  Description of Artificial Sequence: Synthetic oligonucleotide
  Sense strand starting at position 1156 of SEQ ID NO: 1563679
aggucugauucuccacaau

SEQ ID NO: 1824056 - RNA, 19 nt, Artificial Sequence
  Description of Artificial Sequence: Synthetic oligonucleotide
  Antisense strand to SEQ ID NO: 1824055
auuguggagaaucagaccu

SEQ ID NO: 1824057 - RNA, 19 nt, Artificial Sequence
  Description of Artificial Sequence: Synthetic oligonucleotide
  Sense strand starting at position 1442 of SEQ ID NO: 1563679
gccuuaagucgggagaagu

SEQ ID NO: 1824058 - RNA, 19 nt, Artificial Sequence
  Description of Artificial Sequence: Synthetic oligonucleotide
  Antisense strand to SEQ ID NO: 1824057
acuucucccgacuuaaggc

SEQ ID NO: 1824059 - RNA, 19 nt, Artificial Sequence
  Description of Artificial Sequence: Synthetic oligonucleotide
  Sense strand starting at position 1534 of SEQ ID NO: 1563679
ucgacuccugucuauacaa

SEQ ID NO: 1824060 - RNA, 19 nt, Artificial Sequence
  Description of Artificial Sequence: Synthetic oligonucleotide
  Antisense strand to SEQ ID NO: 1824059
uuguauagacaggagucga

SEQ ID NO: 1824061 - RNA, 19 nt, Artificial Sequence
  Description of Artificial Sequence: Synthetic oligonucleotide
  Sense strand starting at position 1541 of SEQ ID NO: 1563679
cugucuauacaaggugaau

SEQ ID NO: 1824062 - RNA, 19 nt, Artificial Sequence
  Description of Artificial Sequence: Synthetic oligonucleotide
  Antisense strand to SEQ ID NO: 1824061
auucaccuuguauagacag

SEQ ID NO: 1824063 - RNA, 19 nt, Artificial Sequence
  Description of Artificial Sequence: Synthetic oligonucleotide
  Sense strand starting at position 1576 of SEQ ID NO: 1563679
cuaucuugaggacgaucaa

SEQ ID NO: 1824064 - RNA, 19 nt, Artificial Sequence
  Description of Artificial Sequence: Synthetic oligonucleotide
  Antisense strand to SEQ ID NO: 1824063
uugaucguccucaagauag

SEQ ID NO: 1824065 - RNA, 19 nt, Artificial Sequence
  Description of Artificial Sequence: Synthetic oligonucleotide
  Sense strand starting at position 1649 of SEQ ID NO: 1563679
acaccuuucuaggugggau

SEQ ID NO: 1824066 - RNA, 19 nt, Artificial Sequence
  Description of Artificial Sequence: Synthetic oligonucleotide
  Antisense strand to SEQ ID NO: 1824065
aucccaccuagaaaggugu

SEQ ID NO: 1824067 - RNA, 19 nt, Artificial Sequence
  Description of Artificial Sequence: Synthetic oligonucleotide
  Sense strand starting at position 2403 of SEQ ID NO: 1563679
cgugucuggccgaguauuu

SEQ ID NO: 1824068 - RNA, 19 nt, Artificial Sequence
  Description of Artificial Sequence: Synthetic oligonucleotide
  Antisense strand to SEQ ID NO: 1824067
aaauacucggccagacacg

SEQ ID NO: 1824069 - RNA, 19 nt, Artificial Sequence
  Description of Artificial Sequence: Synthetic oligonucleotide
  Sense strand starting at position 2431 of SEQ ID NO: 1563679
aagugaauugguuagcuau

SEQ ID NO: 1824070 - RNA, 19 nt, Artificial Sequence
  Description of Artificial Sequence: Synthetic oligonucleotide
  Antisense strand to SEQ ID NO: 1824069
auagcuaaccaauucacuu

SEQ ID NO: 1824071 - RNA, 19 nt, Artificial Sequence
  Description of Artificial Sequence: Synthetic oligonucleotide
  Sense strand starting at position 2759 of SEQ ID NO: 1563679
aguaaauauuagucugcaa

SEQ ID NO: 1824072 - RNA, 19 nt, Artificial Sequence
  Description of Artificial Sequence: Synthetic oligonucleotide
  Antisense strand to SEQ ID NO: 1824071
uugcagacuaauauuuacu

SEQ ID NO: 1824073 - RNA, 19 nt, Artificial Sequence
  Description of Artificial Sequence: Synthetic oligonucleotide
  Sense strand starting at position 2782 of SEQ ID NO: 1563679
uuucuucuugaugguuuaa

SEQ ID NO: 1824074 - RNA, 19 nt, Artificial Sequence
  Description of Artificial Sequence: Synthetic oligonucleotide
  Antisense strand to SEQ ID NO: 1824073
uuaaaccaucaagaagaaa

SEQ ID NO: 1824075 - RNA, 19 nt, Artificial Sequence
  Description of Artificial Sequence: Synthetic oligonucleotide
  Sense strand starting at position 2784 of SEQ ID NO: 1563679
ucuucuugaugguuuaauu

SEQ ID NO: 1824076 - RNA, 19 nt, Artificial Sequence
  Description of Artificial Sequence: Synthetic oligonucleotide
  Antisense strand to SEQ ID NO: 1824075
aauuaaaccaucaagaaga

SEQ ID NO: 1824077 - RNA, 19 nt, Artificial Sequence
  Description of Artificial Sequence: Synthetic oligonucleotide
  Sense strand starting at position 3009 of SEQ ID NO: 1563679
augaaauuccucuggaccu

SEQ ID NO: 1824078 - RNA, 19 nt, Artificial Sequence
  Description of Artificial Sequence: Synthetic oligonucleotide
  Antisense strand to SEQ ID NO: 1824077
agguccagaggaauuucau

SEQ ID NO: 1824079 - RNA, 19 nt, Artificial Sequence
  Description of Artificial Sequence: Synthetic oligonucleotide
  Sense strand starting at position 3124 of SEQ ID NO: 1563679
cugacuuucgcagaugagu

SEQ ID NO: 1824080 - RNA, 19 nt, Artificial Sequence
  Description of Artificial Sequence: Synthetic oligonucleotide
  Antisense strand to SEQ ID NO: 1824079
acucaucugcgaaagucag

SEQ ID NO: 1824081 - RNA, 19 nt, Artificial Sequence
  Description of Artificial Sequence: Synthetic oligonucleotide
  Sense strand starting at position 3230 of SEQ ID NO: 1563679
ggugaacucccugagagca

SEQ ID NO: 1824082 - RNA, 19 nt, Artificial Sequence
  Description of Artificial Sequence: Synthetic oligonucleotide
  Antisense strand to SEQ ID NO: 1824081
ugcucucagggaguucacc

SEQ ID NO: 1824083 - RNA, 19 nt, Artificial Sequence
  Description of Artificial Sequence: Synthetic oligonucleotide
  Sense strand starting at position 3321 of SEQ ID NO: 1563679
uguuaaaugggugaguuua

SEQ ID NO: 1824084 - RNA, 19 nt, Artificial Sequence
  Description of Artificial Sequence: Synthetic oligonucleotide
  Antisense strand to SEQ ID NO: 1824083
uaaacucacccauuuaaca

SEQ ID NO: 1824085 - RNA, 19 nt, Artificial Sequence
  Description of Artificial Sequence: Synthetic oligonucleotide
  Sense strand starting at position 3323 of SEQ ID NO: 1563679
uuaaaugggugaguuuaca

SEQ ID NO: 1824086 - RNA, 19 nt, Artificial Sequence
  Description of Artificial Sequence: Synthetic oligonucleotide
  Antisense strand to SEQ ID NO: 1824085
uguaaacucacccauuuaa

SEQ ID NO: 1824087 - RNA, 19 nt, Artificial Sequence
  Description of Artificial Sequence: Synthetic oligonucleotide
  Sense strand starting at position 3360 of SEQ ID NO: 1563679
ugggaaaugggcuguuuag

SEQ ID NO: 1824088 - RNA, 19 nt, Artificial Sequence
  Description of Artificial Sequence: Synthetic oligonucleotide
  Antisense strand to SEQ ID NO: 1824087
cuaaacagcccauuuccca

SEQ ID NO: 1824089 - RNA, 19 nt, Artificial Sequence
  Description of Artificial Sequence: Synthetic oligonucleotide
  Sense strand starting at position 3377 of SEQ ID NO: 1563679
aguagauggcauugggaaa

SEQ ID NO: 1824090 - RNA, 19 nt, Artificial Sequence
  Description of Artificial Sequence: Synthetic oligonucleotide
  Antisense strand to SEQ ID NO: 1824089
uuucccaaugccaucuacu

SEQ ID NO: 1824091 - RNA, 19 nt, Artificial Sequence
  Description of Artificial Sequence: Synthetic oligonucleotide
  Sense strand starting at position 3378 of SEQ ID NO: 1563679
guagauggcauugggaaau

SEQ ID NO: 1824092 - RNA, 19 nt, Artificial Sequence
  Description of Artificial Sequence: Synthetic oligonucleotide
  Antisense strand to SEQ ID NO: 1824091
auuucccaaugccaucuac

SEQ ID NO: 1824093 - RNA, 19 nt, Artificial Sequence
  Description of Artificial Sequence: Synthetic oligonucleotide
  Sense strand starting at position 3450 of SEQ ID NO: 1563679
gaggguagacugugaaugu

SEQ ID NO: 1824094 - RNA, 19 nt, Artificial Sequence
  Description of Artificial Sequence: Synthetic oligonucleotide
  Antisense strand to SEQ ID NO: 1824093
acauucacagucuacccuc

SEQ ID NO: 1824095 - RNA, 19 nt, Artificial Sequence
  Description of Artificial Sequence: Synthetic oligonucleotide
  Sense strand starting at position 3488 of SEQ ID NO: 1563679
uuaauauaugcaggagaau

SEQ ID NO: 1824096 - RNA, 19 nt, Artificial Sequence
  Description of Artificial Sequence: Synthetic oligonucleotide
  Antisense strand to SEQ ID NO: 1824095
auucuccugcauauauuaa

SEQ ID NO: 1824097 - RNA, 19 nt, Artificial Sequence
  Description of Artificial Sequence: Synthetic oligonucleotide
  Sense strand starting at position 3592 of SEQ ID NO: 1563679
uguggaaacuaguuauuac

SEQ ID NO: 1824098 - RNA, 19 nt, Artificial Sequence
  Description of Artificial Sequence: Synthetic oligonucleotide
  Antisense strand to SEQ ID NO: 1824097
guaauaacuaguuuccaca

SEQ ID NO: 1824099 - RNA, 19 nt, Artificial Sequence
  Description of Artificial Sequence: Synthetic oligonucleotide
  Sense strand starting at position 3769 of SEQ ID NO: 1563679
gagcauguggaagaauguu

SEQ ID NO: 1824100 - RNA, 19 nt, Artificial Sequence
  Description of Artificial Sequence: Synthetic oligonucleotide
  Antisense strand to SEQ ID NO: 1824099
aacauucuuccacaugcuc

SEQ ID NO: 1824101 - RNA, 19 nt, Artificial Sequence
  Description of Artificial Sequence: Synthetic oligonucleotide
  Sense strand starting at position 3867 of SEQ ID NO: 1563679
augguauagccauaugaca

SEQ ID NO: 1824102 - RNA, 19 nt, Artificial Sequence
  Description of Artificial Sequence: Synthetic oligonucleotide
  Antisense strand to SEQ ID NO: 1824101
ugucauauggcuauaccau

SEQ ID NO: 1824103 - RNA, 19 nt, Artificial Sequence
  Description of Artificial Sequence: Synthetic oligonucleotide
  Sense strand starting at position 3869 of SEQ ID NO: 1563679
gguauagccauaugacaga

SEQ ID NO: 1824104 - RNA, 19 nt, Artificial Sequence
  Description of Artificial Sequence: Synthetic oligonucleotide
  Antisense strand to SEQ ID NO: 1824103
ucugucauauggcuauacc

SEQ ID NO: 1824105 - RNA, 19 nt, Artificial Sequence
  Description of Artificial Sequence: Synthetic oligonucleotide
  Sense strand starting at position 127 of SEQ ID NO: 1563680
ggaacugauucauagguug

SEQ ID NO: 1824106 - RNA, 19 nt, Artificial Sequence
  Description of Artificial Sequence: Synthetic oligonucleotide
  Antisense strand to SEQ ID NO: 1824105
caaccuaugaaucaguucc

SEQ ID NO: 1824107 - RNA, 19 nt, Artificial Sequence
  Description of Artificial Sequence: Synthetic oligonucleotide
  Sense strand starting at position 173 of SEQ ID NO: 1563680
gugguacauuauuaacacu

SEQ ID NO: 1824108 - RNA, 19 nt, Artificial Sequence
  Description of Artificial Sequence: Synthetic oligonucleotide
  Antisense strand to SEQ ID NO: 1824107
aguguuaauaauguaccac

SEQ ID NO: 1824109 - RNA, 19 nt, Artificial Sequence
  Description of Artificial Sequence: Synthetic oligonucleotide
  Sense strand starting at position 226 of SEQ ID NO: 1563680
agcgaaauccugcaaagca

SEQ ID NO: 1824110 - RNA, 19 nt, Artificial Sequence
  Description of Artificial Sequence: Synthetic oligonucleotide
  Antisense strand to SEQ ID NO: 1824109
ugcuuugcaggauuucgcu

SEQ ID NO: 1824111 - RNA, 19 nt, Artificial Sequence
  Description of Artificial Sequence: Synthetic oligonucleotide
  Sense strand starting at position 462 of SEQ ID NO: 1563680
cuccaugacuuguugagag

SEQ ID NO: 1824112 - RNA, 19 nt, Artificial Sequence
  Description of Artificial Sequence: Synthetic oligonucleotide
  Antisense strand to SEQ ID NO: 1824111
cucucaacaagucauggag

SEQ ID NO: 1824113 - RNA, 19 nt, Artificial Sequence
  Description of Artificial Sequence: Synthetic oligonucleotide
  Sense strand starting at position 545 of SEQ ID NO: 1563680
cuggaugccugaguugaga

SEQ ID NO: 1824114 - RNA, 19 nt, Artificial Sequence
  Description of Artificial Sequence: Synthetic oligonucleotide
  Antisense strand to SEQ ID NO: 1824113
ucucaacucaggcauccag

SEQ ID NO: 1824115 - RNA, 19 nt, Artificial Sequence
  Description of Artificial Sequence: Synthetic oligonucleotide
  Sense strand starting at position 547 of SEQ ID NO: 1563680
ggaugccugaguugagaag

SEQ ID NO: 1824116 - RNA, 19 nt, Artificial Sequence
  Description of Artificial Sequence: Synthetic oligonucleotide
  Antisense strand to SEQ ID NO: 1824115
cuucucaacucaggcaucc

SEQ ID NO: 1824117 - RNA, 19 nt, Artificial Sequence
  Description of Artificial Sequence: Synthetic oligonucleotide
  Sense strand starting at position 658 of SEQ ID NO: 1563680
gacucuucuuguccgcauu

SEQ ID NO: 1824118 - RNA, 19 nt, Artificial Sequence
  Description of Artificial Sequence: Synthetic oligonucleotide
  Antisense strand to SEQ ID NO: 1824117
aaugcggacaagaagaguc

SEQ ID NO: 1824119 - RNA, 19 nt, Artificial Sequence
  Description of Artificial Sequence: Synthetic oligonucleotide
  Sense strand starting at position 671 of SEQ ID NO: 1563680
cgcauugucaguguagcaa

SEQ ID NO: 1824120 - RNA, 19 nt, Artificial Sequence
  Description of Artificial Sequence: Synthetic oligonucleotide
  Antisense strand to SEQ ID NO: 1824119
uugcuacacugacaaugcg

SEQ ID NO: 1824121 - RNA, 19 nt, Artificial Sequence
  Description of Artificial Sequence: Synthetic oligonucleotide
  Sense strand starting at position 680 of SEQ ID NO: 1563680
aguguagcaauuuggucua

SEQ ID NO: 1824122 - RNA, 19 nt, Artificial Sequence
  Description of Artificial Sequence: Synthetic oligonucleotide
  Antisense strand to SEQ ID NO: 1824121
uagaccaaauugcuacacu

SEQ ID NO: 1824123 - RNA, 19 nt, Artificial Sequence
  Description of Artificial Sequence: Synthetic oligonucleotide
  Sense strand starting at position 682 of SEQ ID NO: 1563680
uguagcaauuuggucuaau

SEQ ID NO: 1824124 - RNA, 19 nt, Artificial Sequence
  Description of Artificial Sequence: Synthetic oligonucleotide
  Antisense strand to SEQ ID NO: 1824123
auuagaccaaauugcuaca

SEQ ID NO: 1824125 - RNA, 19 nt, Artificial Sequence
  Description of Artificial Sequence: Synthetic oligonucleotide
  Sense strand starting at position 683 of SEQ ID NO: 1563680
guagcaauuuggucuaauu

SEQ ID NO: 1824126 - RNA, 19 nt, Artificial Sequence
  Description of Artificial Sequence: Synthetic oligonucleotide
  Antisense strand to SEQ ID NO: 1824125
aauuagaccaaauugcuac

SEQ ID NO: 1824127 - RNA, 19 nt, Artificial Sequence
  Description of Artificial Sequence: Synthetic oligonucleotide
  Sense strand starting at position 932 of SEQ ID NO: 1563680
ggaguuaaauaucuuugga

SEQ ID NO: 1824128 - RNA, 19 nt, Artificial Sequence
  Description of Artificial Sequence: Synthetic oligonucleotide
  Antisense strand to SEQ ID NO: 1824127
uccaaagauauuuaacucc

SEQ ID NO: 1824129 - RNA, 19 nt, Artificial Sequence
  Description of Artificial Sequence: Synthetic oligonucleotide
  Sense strand starting at position 934 of SEQ ID NO: 1563680
aguuaaauaucuuuggacu

SEQ ID NO: 1824130 - RNA, 19 nt, Artificial Sequence
  Description of Artificial Sequence: Synthetic oligonucleotide
  Antisense strand to SEQ ID NO: 1824129
aguccaaagauauuuaacu

SEQ ID NO: 1824131 - RNA, 19 nt, Artificial Sequence
  Description of Artificial Sequence: Synthetic oligonucleotide
  Sense strand starting at position 935 of SEQ ID NO: 1563680
guuaaauaucuuuggacuc

SEQ ID NO: 1824132 - RNA, 19 nt, Artificial Sequence
  Description of Artificial Sequence: Synthetic oligonucleotide
  Antisense strand to SEQ ID NO: 1824131
gaguccaaagauauuuaac

SEQ ID NO: 1824133 - RNA, 19 nt, Artificial Sequence
  Description of Artificial Sequence: Synthetic oligonucleotide
  Sense strand starting at position 984 of SEQ ID NO: 1563680
aagcgauuucgcuaaccua

SEQ ID NO: 1824134 - RNA, 19 nt, Artificial Sequence
  Description of Artificial Sequence: Synthetic oligonucleotide
  Antisense strand to SEQ ID NO: 1824133
uagguuagcgaaaucgcuu

SEQ ID NO: 1824135 - RNA, 19 nt, Artificial Sequence
  Description of Artificial Sequence: Synthetic oligonucleotide
  Sense strand starting at position 987 of SEQ ID NO: 1563680
cgauuucgcuaaccuauau

SEQ ID NO: 1824136 - RNA, 19 nt, Artificial Sequence
  Description of Artificial Sequence: Synthetic oligonucleotide
  Antisense strand to SEQ ID NO: 1824135
auauagguuagcgaaaucg

SEQ ID NO: 1824137 - RNA, 19 nt, Artificial Sequence
  Description of Artificial Sequence: Synthetic oligonucleotide
  Sense strand starting at position 1000 of SEQ ID NO: 1563680
cuauauaagggaugcuguu

SEQ ID NO: 1824138 - RNA, 19 nt, Artificial Sequence
  Description of Artificial Sequence: Synthetic oligonucleotide
  Antisense strand to SEQ ID NO: 1824137
aacagcaucccuuauauag

SEQ ID NO: 1824139 - RNA, 19 nt, Artificial Sequence
  Description of Artificial Sequence: Synthetic oligonucleotide
  Sense strand starting at position 1096 of SEQ ID NO: 1563680
acugcagacucagaaaucu

SEQ ID NO: 1824140 - RNA, 19 nt, Artificial Sequence
  Description of Artificial Sequence: Synthetic oligonucleotide
  Antisense strand to SEQ ID NO: 1824139
agauuucugagucugcagu

SEQ ID NO: 1824141 - RNA, 19 nt, Artificial Sequence
  Description of Artificial Sequence: Synthetic oligonucleotide
  Sense strand starting at position 1211 of SEQ ID NO: 1563680
ggagcugugguccagcuaa

SEQ ID NO: 1824142 - RNA, 19 nt, Artificial Sequence
  Description of Artificial Sequence: Synthetic oligonucleotide
  Antisense strand to SEQ ID NO: 1824141
uuagcuggaccacagcucc

SEQ ID NO: 1824143 - RNA, 19 nt, Artificial Sequence
  Description of Artificial Sequence: Synthetic oligonucleotide
  Sense strand starting at position 1246 of SEQ ID NO: 1563680
cguaugugcgagcaaggau

SEQ ID NO: 1824144 - RNA, 19 nt, Artificial Sequence
  Description of Artificial Sequence: Synthetic oligonucleotide
  Antisense strand to SEQ ID NO: 1824143
auccuugcucgcacauacg

SEQ ID NO: 1824145 - RNA, 19 nt, Artificial Sequence
  Description of Artificial Sequence: Synthetic oligonucleotide
  Sense strand starting at position 2560 of SEQ ID NO: 1563680
ucauucuacucucugagga

SEQ ID NO: 1824146 - RNA, 19 nt, Artificial Sequence
  Description of Artificial Sequence: Synthetic oligonucleotide
  Antisense strand to SEQ ID NO: 1824145
uccucagagaguagaauga

SEQ ID NO: 1824147 - RNA, 19 nt, Artificial Sequence
  Description of Artificial Sequence: Synthetic oligonucleotide
  Sense strand starting at position 2724 of SEQ ID NO: 1563680
gccucuguggcuugcuaga

SEQ ID NO: 1824148 - RNA, 19 nt, Artificial Sequence
  Description of Artificial Sequence: Synthetic oligonucleotide
  Antisense strand to SEQ ID NO: 1824147
ucuagcaagccacagaggc

SEQ ID NO: 1824149 - RNA, 19 nt, Artificial Sequence
  Description of Artificial Sequence: Synthetic oligonucleotide
  Sense strand starting at position 2726 of SEQ ID NO: 1563680
cucuguggcuugcuagauu

SEQ ID NO: 1824150 - RNA, 19 nt, Artificial Sequence
  Description of Artificial Sequence: Synthetic oligonucleotide
  Antisense strand to SEQ ID NO: 1824149
aaucuagcaagccacagag

SEQ ID NO: 1824151 - RNA, 19 nt, Artificial Sequence
  Description of Artificial Sequence: Synthetic oligonucleotide
  Sense strand starting at position 3352 of SEQ ID NO: 1563680
gaaauccaguucuuugaga

SEQ ID NO: 1824152 - RNA, 19 nt, Artificial Sequence
  Description of Artificial Sequence: Synthetic oligonucleotide
  Antisense strand to SEQ ID NO: 1824151
ucucaaagaacuggauuuc

SEQ ID NO: 1824153 - RNA, 19 nt, Artificial Sequence
  Description of Artificial Sequence: Synthetic oligonucleotide
  Sense strand starting at position 3357 of SEQ ID NO: 1563680
ccaguucuuugagaaugaa

SEQ ID NO: 1824154 - RNA, 19 nt, Artificial Sequence
  Description of Artificial Sequence: Synthetic oligonucleotide
  Antisense strand to SEQ ID NO: 1824153
uucauucucaaagaacugg

SEQ ID NO: 1824155 - RNA, 19 nt, Artificial Sequence
  Description of Artificial Sequence: Synthetic oligonucleotide
  Sense strand starting at position 3360 of SEQ ID NO: 1563680
guucuuugagaaugaaaua

SEQ ID NO: 1824156 - RNA, 19 nt, Artificial Sequence
  Description of Artificial Sequence: Synthetic oligonucleotide
  Antisense strand to SEQ ID NO: 1824155
uauuucauucucaaagaac

SEQ ID NO: 1824157 - RNA, 19 nt, Artificial Sequence
  Description of Artificial Sequence: Synthetic oligonucleotide
  Sense strand starting at position 3399 of SEQ ID NO: 1563680
uuuagucauuaccuauaug

SEQ ID NO: 1824158 - RNA, 19 nt, Artificial Sequence
  Description of Artificial Sequence: Synthetic oligonucleotide
  Antisense strand to SEQ ID NO: 1824157
cauauagguaaugacuaaa

SEQ ID NO: 1824159 - RNA, 19 nt, Artificial Sequence
  Description of Artificial Sequence: Synthetic oligonucleotide
  Sense strand starting at position 3418 of SEQ ID NO: 1563680
cugcuaaguagggaucuuu

SEQ ID NO: 1824160 - RNA, 19 nt, Artificial Sequence
  Description of Artificial Sequence: Synthetic oligonucleotide
  Antisense strand to SEQ ID NO: 1824159
aaagaucccuacuuagcag

SEQ ID NO: 1824161 - RNA, 19 nt, Artificial Sequence
  Description of Artificial Sequence: Synthetic oligonucleotide
  Sense strand starting at position 3429 of SEQ ID NO: 1563680
ggaucuuuagcguggauua

SEQ ID NO: 1824162 - RNA, 19 nt, Artificial Sequence
  Description of Artificial Sequence: Synthetic oligonucleotide
  Antisense strand to SEQ ID NO: 1824161
uaauccacgcuaaagaucc

SEQ ID NO: 1824163 - RNA, 19 nt, Artificial Sequence
  Description of Artificial Sequence: Synthetic oligonucleotide
  Sense strand starting at position 3430 of SEQ ID NO: 1563680
gaucuuuagcguggauuau

SEQ ID NO: 1824164 - RNA, 19 nt, Artificial Sequence
  Description of Artificial Sequence: Synthetic oligonucleotide
  Antisense strand to SEQ ID NO: 1824163
auaauccacgcuaaagauc

SEQ ID NO: 1824165 - RNA, 19 nt, Artificial Sequence
  Description of Artificial Sequence: Synthetic oligonucleotide
  Sense strand starting at position 3431 of SEQ ID NO: 1563680
aucuuuagcguggauuauu

SEQ ID NO: 1824166 - RNA, 19 nt, Artificial Sequence
  Description of Artificial Sequence: Synthetic oligonucleotide
  Antisense strand to SEQ ID NO: 1824165
aauaauccacgcuaaagau

SEQ ID NO: 1824167 - RNA, 19 nt, Artificial Sequence
  Description of Artificial Sequence: Synthetic oligonucleotide
  Sense strand starting at position 3526 of SEQ ID NO: 1563680
augaauuaguuugucaucu

SEQ ID NO: 1824168 - RNA, 19 nt, Artificial Sequence
  Description of Artificial Sequence: Synthetic oligonucleotide
  Antisense strand to SEQ ID NO: 1824167
agaugacaaacuaauucau

SEQ ID NO: 1824169 - RNA, 19 nt, Artificial Sequence
  Description of Artificial Sequence: Synthetic oligonucleotide
  Sense strand starting at position 3527 of SEQ ID NO: 1563680
ugaauuaguuugucaucug

SEQ ID NO: 1824170 - RNA, 19 nt, Artificial Sequence
  Description of Artificial Sequence: Synthetic oligonucleotide
  Antisense strand to SEQ ID NO: 1824169
cagaugacaaacuaauuca

SEQ ID NO: 1824171 - RNA, 19 nt, Artificial Sequence
  Description of Artificial Sequence: Synthetic oligonucleotide
  Sense strand starting at position 3530 of SEQ ID NO: 1563680
auuaguuugucaucugaug

SEQ ID NO: 1824172 - RNA, 19 nt, Artificial Sequence
  Description of Artificial Sequence: Synthetic oligonucleotide
  Antisense strand to SEQ ID NO: 1824171
caucagaugacaaacuaau

SEQ ID NO: 1824173 - RNA, 19 nt, Artificial Sequence
  Description of Artificial Sequence: Synthetic oligonucleotide
  Sense strand starting at position 3554 of SEQ ID NO: 1563680
guuuccgaccuaggugaaa

SEQ ID NO: 1824174 - RNA, 19 nt, Artificial Sequence
  Description of Artificial Sequence: Synthetic oligonucleotide
  Antisense strand to SEQ ID NO: 1824173
uuucaccuaggucggaaac

SEQ ID NO: 1824175 - RNA, 19 nt, Artificial Sequence
  Description of Artificial Sequence: Synthetic oligonucleotide
  Sense strand starting at position 3808 of SEQ ID NO: 1563680
cgugguaccugaccucaaa

SEQ ID NO: 1824176 - RNA, 19 nt, Artificial Sequence
  Description of Artificial Sequence: Synthetic oligonucleotide
  Antisense strand to SEQ ID NO: 1824175
uuugaggucagguaccacg

SEQ ID NO: 1824177 - RNA, 19 nt, Artificial Sequence
  Description of Artificial Sequence: Synthetic oligonucleotide
  Sense strand starting at position 3855 of SEQ ID NO: 1563680
aaguuaacccacuguguga

SEQ ID NO: 1824178 - RNA, 19 nt, Artificial Sequence
  Description of Artificial Sequence: Synthetic oligonucleotide
  Antisense strand to SEQ ID NO: 1824177
ucacacaguggguuaacuu

SEQ ID NO: 1824179 - RNA, 19 nt, Artificial Sequence
  Description of Artificial Sequence: Synthetic oligonucleotide
  Sense strand starting at position 3857 of SEQ ID NO: 1563680
guuaacccacugugugaau

SEQ ID NO: 1824180 - RNA, 19 nt, Artificial Sequence
  Description of Artificial Sequence: Synthetic oligonucleotide
  Antisense strand to SEQ ID NO: 1824179
auucacacaguggguuaac

SEQ ID NO: 1824181 - RNA, 19 nt, Artificial Sequence
  Description of Artificial Sequence: Synthetic oligonucleotide
  Sense strand starting at position 3869 of SEQ ID NO: 1563680
ugugaaugcuaagaugaag

SEQ ID NO: 1824182 - RNA, 19 nt, Artificial Sequence
  Description of Artificial Sequence: Synthetic oligonucleotide
  Antisense strand to SEQ ID NO: 1824181
cuucaucuuagcauucaca

SEQ ID NO: 1824183 - RNA, 19 nt, Artificial Sequence
  Description of Artificial Sequence: Synthetic oligonucleotide
  Sense strand starting at position 3942 of SEQ ID NO: 1563680
guccuaaacucagaccagu

SEQ ID NO: 1824184 - RNA, 19 nt, Artificial Sequence
  Description of Artificial Sequence: Synthetic oligonucleotide
  Antisense strand to SEQ ID NO: 1824183
acuggucugaguuuaggac

SEQ ID NO: 1824185 - RNA, 19 nt, Artificial Sequence
  Description of Artificial Sequence: Synthetic oligonucleotide
  Sense strand starting at position 76 of SEQ ID NO: 1563681
ggcaaacagugucuaauca

SEQ ID NO: 1824186 - RNA, 19 nt, Artificial Sequence
  Description of Artificial Sequence: Synthetic oligonucleotide
  Antisense strand to SEQ ID NO: 1824185
ugauuagacacuguuugcc

SEQ ID NO: 1824187 - RNA, 19 nt, Artificial Sequence
  Description of Artificial Sequence: Synthetic oligonucleotide
  Sense strand starting at position 84 of SEQ ID NO: 1563681
gugucuaaucaguagugag

SEQ ID NO: 1824188 - RNA, 19 nt, Artificial Sequence
  Description of Artificial Sequence: Synthetic oligonucleotide
  Antisense strand to SEQ ID NO: 1824187
cucacuacugauuagacac

SEQ ID NO: 1824189 - RNA, 19 nt, Artificial Sequence
  Description of Artificial Sequence: Synthetic oligonucleotide
  Sense strand starting at position 91 of SEQ ID NO: 1563681
aucaguagugagcauguua

SEQ ID NO: 1824190 - RNA, 19 nt, Artificial Sequence
  Description of Artificial Sequence: Synthetic oligonucleotide
  Antisense strand to SEQ ID NO: 1824189
uaacaugcucacuacugau

SEQ ID NO: 1824191 - RNA, 19 nt, Artificial Sequence
  Description of Artificial Sequence: Synthetic oligonucleotide
  Sense strand starting at position 98 of SEQ ID NO: 1563681
gugagcauguuauuuggua

SEQ ID NO: 1824192 - RNA, 19 nt, Artificial Sequence
  Description of Artificial Sequence: Synthetic oligonucleotide
  Antisense strand to SEQ ID NO: 1824191
uaccaaauaacaugcucac

SEQ ID NO: 1824193 - RNA, 19 nt, Artificial Sequence
  Description of Artificial Sequence: Synthetic oligonucleotide
  Sense strand starting at position 102 of SEQ ID NO: 1563681
gcauguuauuugguaacug

SEQ ID NO: 1824194 - RNA, 19 nt, Artificial Sequence
  Description of Artificial Sequence: Synthetic oligonucleotide
  Antisense strand to SEQ ID NO: 1824193
caguuaccaaauaacaugc

SEQ ID NO: 1824195 - RNA, 19 nt, Artificial Sequence
  Description of Artificial Sequence: Synthetic oligonucleotide
  Sense strand starting at position 106 of SEQ ID NO: 1563681
guuauuugguaacugccaa

SEQ ID NO: 1824196 - RNA, 19 nt, Artificial Sequence
  Description of Artificial Sequence: Synthetic oligonucleotide
  Antisense strand to SEQ ID NO: 1824195
uuggcaguuaccaaauaac

SEQ ID NO: 1824197 - RNA, 19 nt, Artificial Sequence
  Description of Artificial Sequence: Synthetic oligonucleotide
  Sense strand starting at position 159 of SEQ ID NO: 1563681
cuucgcuucuauuucuaga

SEQ ID NO: 1824198 - RNA, 19 nt, Artificial Sequence
  Description of Artificial Sequence: Synthetic oligonucleotide
  Antisense strand to SEQ ID NO: 1824197
ucuagaaauagaagcgaag

SEQ ID NO: 1824199 - RNA, 19 nt, Artificial Sequence
  Description of Artificial Sequence: Synthetic oligonucleotide
  Sense strand starting at position 161 of SEQ ID NO: 1563681
ucgcuucuauuucuagaca

SEQ ID NO: 1824200 - RNA, 19 nt, Artificial Sequence
  Description of Artificial Sequence: Synthetic oligonucleotide
  Antisense strand to SEQ ID NO: 1824199
ugucuagaaauagaagcga

SEQ ID NO: 1824201 - RNA, 19 nt, Artificial Sequence
  Description of Artificial Sequence: Synthetic oligonucleotide
  Sense strand starting at position 241 of SEQ ID NO: 1563681
guaauugaugacugcacuu

SEQ ID NO: 1824202 - RNA, 19 nt, Artificial Sequence
  Description of Artificial Sequence: Synthetic oligonucleotide
  Antisense strand to SEQ ID NO: 1824201
aagugcagucaucaauuac

SEQ ID NO: 1824203 - RNA, 19 nt, Artificial Sequence
  Description of Artificial Sequence: Synthetic oligonucleotide
  Sense strand starting at position 254 of SEQ ID NO: 1563681
gcacuuaaucuccaagguu

SEQ ID NO: 1824204 - RNA, 19 nt, Artificial Sequence
  Description of Artificial Sequence: Synthetic oligonucleotide
  Antisense strand to SEQ ID NO: 1824203
aaccuuggagauuaagugc

SEQ ID NO: 1824205 - RNA, 19 nt, Artificial Sequence
  Description of Artificial Sequence: Synthetic oligonucleotide
  Sense strand starting at position 322 of SEQ ID NO: 1563681
aagcgccugguugaaauua

SEQ ID NO: 1824206 - RNA, 19 nt, Artificial Sequence
  Description of Artificial Sequence: Synthetic oligonucleotide
  Antisense strand to SEQ ID NO: 1824205
uaauuucaaccaggcgcuu

SEQ ID NO: 1824207 - RNA, 19 nt, Artificial Sequence
  Description of Artificial Sequence: Synthetic oligonucleotide
  Sense strand starting at position 477 of SEQ ID NO: 1563681
ucacuccuccguuagauua

SEQ ID NO: 1824208 - RNA, 19 nt, Artificial Sequence
  Description of Artificial Sequence: Synthetic oligonucleotide
  Antisense strand to SEQ ID NO: 1824207
uaaucuaacggaggaguga

SEQ ID NO: 1824209 - RNA, 19 nt, Artificial Sequence
  Description of Artificial Sequence: Synthetic oligonucleotide
  Sense strand starting at position 512 of SEQ ID NO: 1563681
gcuagauucguggugcuuu

SEQ ID NO: 1824210 - RNA, 19 nt, Artificial Sequence
  Description of Artificial Sequence: Synthetic oligonucleotide
  Antisense strand to SEQ ID NO: 1824209
aaagcaccacgaaucuagc

SEQ ID NO: 1824211 - RNA, 19 nt, Artificial Sequence
  Description of Artificial Sequence: Synthetic oligonucleotide
  Sense strand starting at position 783 of SEQ ID NO: 1563681
agccgucucuauuugcaua

SEQ ID NO: 1824212 - RNA, 19 nt, Artificial Sequence
  Description of Artificial Sequence: Synthetic oligonucleotide
  Antisense strand to SEQ ID NO: 1824211
uaugcaaauagagacggcu

SEQ ID NO: 1824213 - RNA, 19 nt, Artificial Sequence
  Description of Artificial Sequence: Synthetic oligonucleotide
  Sense strand starting at position 821 of SEQ ID NO: 1563681
ucagguuuccuguaaucag

SEQ ID NO: 1824214 - RNA, 19 nt, Artificial Sequence
  Description of Artificial Sequence: Synthetic oligonucleotide
  Antisense strand to SEQ ID NO: 1824213
cugauuacaggaaaccuga

SEQ ID NO: 1824215 - RNA, 19 nt, Artificial Sequence
  Description of Artificial Sequence: Synthetic oligonucleotide
  Sense strand starting at position 847 of SEQ ID NO: 1563681
aaaggucuguaauugaaag

SEQ ID NO: 1824216 - RNA, 19 nt, Artificial Sequence
  Description of Artificial Sequence: Synthetic oligonucleotide
  Antisense strand to SEQ ID NO: 1824215
cuuucaauuacagaccuuu

SEQ ID NO: 1824217 - RNA, 19 nt, Artificial Sequence
  Description of Artificial Sequence: Synthetic oligonucleotide
  Sense strand starting at position 913 of SEQ ID NO: 1563681
auacuccucuggucugaua

SEQ ID NO: 1824218 - RNA, 19 nt, Artificial Sequence
  Description of Artificial Sequence: Synthetic oligonucleotide
  Antisense strand to SEQ ID NO: 1824217
uaucagaccagaggaguau

SEQ ID NO: 1824219 - RNA, 19 nt, Artificial Sequence
  Description of Artificial Sequence: Synthetic oligonucleotide
  Sense strand starting at position 927 of SEQ ID NO: 1563681
ugauaccuuccggaaagua

SEQ ID NO: 1824220 - RNA, 19 nt, Artificial Sequence
  Description of Artificial Sequence: Synthetic oligonucleotide
  Antisense strand to SEQ ID NO: 1824219
uacuuuccggaagguauca

SEQ ID NO: 1824221 - RNA, 19 nt, Artificial Sequence
  Description of Artificial Sequence: Synthetic oligonucleotide
  Sense strand starting at position 1262 of SEQ ID NO: 1563681
ggagaaguagccggugaca

SEQ ID NO: 1824222 - RNA, 19 nt, Artificial Sequence
  Description of Artificial Sequence: Synthetic oligonucleotide
  Antisense strand to SEQ ID NO: 1824221
ugucaccggcuacuucucc

SEQ ID NO: 1824223 - RNA, 19 nt, Artificial Sequence
  Description of Artificial Sequence: Synthetic oligonucleotide
  Sense strand starting at position 1505 of SEQ ID NO: 1563681
gcccauuucucccucuagu

SEQ ID NO: 1824224 - RNA, 19 nt, Artificial Sequence
  Description of Artificial Sequence: Synthetic oligonucleotide
  Antisense strand to SEQ ID NO: 1824223
acuagagggagaaaugggc

SEQ ID NO: 1824225 - RNA, 19 nt, Artificial Sequence
  Description of Artificial Sequence: Synthetic oligonucleotide
  Sense strand starting at position 1665 of SEQ ID NO: 1563681
agccuuuggacacguaaag

SEQ ID NO: 1824226 - RNA, 19 nt, Artificial Sequence
  Description of Artificial Sequence: Synthetic oligonucleotide
  Antisense strand to SEQ ID NO: 1824225
cuuuacguguccaaaggcu

SEQ ID NO: 1824227 - RNA, 19 nt, Artificial Sequence
  Description of Artificial Sequence: Synthetic oligonucleotide
  Sense strand starting at position 2599 of SEQ ID NO: 1563681
ccaacuacuccgggcugaa

SEQ ID NO: 1824228 - RNA, 19 nt, Artificial Sequence
  Description of Artificial Sequence: Synthetic oligonucleotide
  Antisense strand to SEQ ID NO: 1824227
uucagcccggaguaguugg

SEQ ID NO: 1824229 - RNA, 19 nt, Artificial Sequence
  Description of Artificial Sequence: Synthetic oligonucleotide
  Sense strand starting at position 2921 of SEQ ID NO: 1563681
uaggacgguacucgugaaa

SEQ ID NO: 1824230 - RNA, 19 nt, Artificial Sequence
  Description of Artificial Sequence: Synthetic oligonucleotide
  Antisense strand to SEQ ID NO: 1824229
uuucacgaguaccguccua

SEQ ID NO: 1824231 - RNA, 19 nt, Artificial Sequence
  Description of Artificial Sequence: Synthetic oligonucleotide
  Sense strand starting at position 2924 of SEQ ID NO: 1563681
gacgguacucgugaaacac

SEQ ID NO: 1824232 - RNA, 19 nt, Artificial Sequence
  Description of Artificial Sequence: Synthetic oligonucleotide
  Antisense strand to SEQ ID NO: 1824231
guguuucacgaguaccguc

SEQ ID NO: 1824233 - RNA, 19 nt, Artificial Sequence
  Description of Artificial Sequence: Synthetic oligonucleotide
  Sense strand starting at position 3097 of SEQ ID NO: 1563681
caggguugaccgcagagau

SEQ ID NO: 1824234 - RNA, 19 nt, Artificial Sequence
  Description of Artificial Sequence: Synthetic oligonucleotide
  Antisense strand to SEQ ID NO: 1824233
aucucugcggucaacccug

SEQ ID NO: 1824235 - RNA, 19 nt, Artificial Sequence
  Description of Artificial Sequence: Synthetic oligonucleotide
  Sense strand starting at position 3172 of SEQ ID NO: 1563681
ugggaagcgacuugguaaa

SEQ ID NO: 1824236 - RNA, 19 nt, Artificial Sequence
  Description of Artificial Sequence: Synthetic oligonucleotide
  Antisense strand to SEQ ID NO: 1824235
uuuaccaagucgcuuccca

SEQ ID NO: 1824237 - RNA, 19 nt, Artificial Sequence
  Description of Artificial Sequence: Synthetic oligonucleotide
  Sense strand starting at position 3174 of SEQ ID NO: 1563681
ggaagcgacuugguaaaua

SEQ ID NO: 1824238 - RNA, 19 nt, Artificial Sequence
  Description of Artificial Sequence: Synthetic oligonucleotide
  Antisense strand to SEQ ID NO: 1824237
uauuuaccaagucgcuucc

SEQ ID NO: 1824239 - RNA, 19 nt, Artificial Sequence
  Description of Artificial Sequence: Synthetic oligonucleotide
  Sense strand starting at position 3359 of SEQ ID NO: 1563681
gggagagacuucccaucuu

SEQ ID NO: 1824240 - RNA, 19 nt, Artificial Sequence
  Description of Artificial Sequence: Synthetic oligonucleotide
  Antisense strand to SEQ ID NO: 1824239
aagaugggaagucucuccc

SEQ ID NO: 1824241 - RNA, 19 nt, Artificial Sequence
  Description of Artificial Sequence: Synthetic oligonucleotide
  Sense strand starting at position 3421 of SEQ ID NO: 1563681
cccagcgcuccuuaaauga

SEQ ID NO: 1824242 - RNA, 19 nt, Artificial Sequence
  Description of Artificial Sequence: Synthetic oligonucleotide
  Antisense strand to SEQ ID NO: 1824241
ucauuuaaggagcgcuggg

SEQ ID NO: 1824243 - RNA, 19 nt, Artificial Sequence
  Description of Artificial Sequence: Synthetic oligonucleotide
  Sense strand starting at position 3458 of SEQ ID NO: 1563681
ggaacuugucauuaccguu

SEQ ID NO: 1824244 - RNA, 19 nt, Artificial Sequence
  Description of Artificial Sequence: Synthetic oligonucleotide
  Antisense strand to SEQ ID NO: 1824243
aacgguaaugacaaguucc

SEQ ID NO: 1824245 - RNA, 19 nt, Artificial Sequence
  Description of Artificial Sequence: Synthetic oligonucleotide
  Sense strand starting at position 3483 of SEQ ID NO: 1563681
guuacaaucugcuuuaaga

SEQ ID NO: 1824246 - RNA, 19 nt, Artificial Sequence
  Description of Artificial Sequence: Synthetic oligonucleotide
  Antisense strand to SEQ ID NO: 1824245
ucuuaaagcagauuguaac

SEQ ID NO: 1824247 - RNA, 19 nt, Artificial Sequence
  Description of Artificial Sequence: Synthetic oligonucleotide
  Sense strand starting at position 3496 of SEQ ID NO: 1563681
uuaagagguuggguugaga

SEQ ID NO: 1824248 - RNA, 19 nt, Artificial Sequence
  Description of Artificial Sequence: Synthetic oligonucleotide
  Antisense strand to SEQ ID NO: 1824247
ucucaacccaaccucuuaa

SEQ ID NO: 1824249 - RNA, 19 nt, Artificial Sequence
  Description of Artificial Sequence: Synthetic oligonucleotide
  Sense strand starting at position 3499 of SEQ ID NO: 1563681
agagguuggguugagaagu

SEQ ID NO: 1824250 - RNA, 19 nt, Artificial Sequence
  Description of Artificial Sequence: Synthetic oligonucleotide
  Antisense strand to SEQ ID NO: 1824249
acuucucaacccaaccucu

SEQ ID NO: 1824251 - RNA, 19 nt, Artificial Sequence
  Description of Artificial Sequence: Synthetic oligonucleotide
  Sense strand starting at position 3510 of SEQ ID NO: 1563681
ugagaagugccucagacac

SEQ ID NO: 1824252 - RNA, 19 nt, Artificial Sequence
  Description of Artificial Sequence: Synthetic oligonucleotide
  Antisense strand to SEQ ID NO: 1824251
gugucugaggcacuucuca

SEQ ID NO: 1824253 - RNA, 19 nt, Artificial Sequence
  Description of Artificial Sequence: Synthetic oligonucleotide
  Sense strand starting at position 3649 of SEQ ID NO: 1563681
cucagaggguuuguugaga

SEQ ID NO: 1824254 - RNA, 19 nt, Artificial Sequence
  Description of Artificial Sequence: Synthetic oligonucleotide
  Antisense strand to SEQ ID NO: 1824253
ucucaacaaacccucugag

SEQ ID NO: 1824255 - RNA, 19 nt, Artificial Sequence
  Description of Artificial Sequence: Synthetic oligonucleotide
  Sense strand starting at position 3660 of SEQ ID NO: 1563681
uguugagacuuucuccacu

SEQ ID NO: 1824256 - RNA, 19 nt, Artificial Sequence
  Description of Artificial Sequence: Synthetic oligonucleotide
  Antisense strand to SEQ ID NO: 1824255
aguggagaaagucucaaca

SEQ ID NO: 1824257 - RNA, 19 nt, Artificial Sequence
  Description of Artificial Sequence: Synthetic oligonucleotide
  Sense strand starting at position 3662 of SEQ ID NO: 1563681
uugagacuuucuccacugu

SEQ ID NO: 1824258 - RNA, 19 nt, Artificial Sequence
  Description of Artificial Sequence: Synthetic oligonucleotide
  Antisense strand to SEQ ID NO: 1824257
acaguggagaaagucucaa

SEQ ID NO: 1824259 - RNA, 19 nt, Artificial Sequence
  Description of Artificial Sequence: Synthetic oligonucleotide
  Sense strand starting at position 3663 of SEQ ID NO: 1563681
ugagacuuucuccacuguu

SEQ ID NO: 1824260 - RNA, 19 nt, Artificial Sequence
  Description of Artificial Sequence: Synthetic oligonucleotide
  Antisense strand to SEQ ID NO: 1824259
aacaguggagaaagucuca

SEQ ID NO: 1824261 - RNA, 19 nt, Artificial Sequence
  Description of Artificial Sequence: Synthetic oligonucleotide
  Sense strand starting at position 3727 of SEQ ID NO: 1563681
uugaauaccugcuugcaga

SEQ ID NO: 1824262 - RNA, 19 nt, Artificial Sequence
  Description of Artificial Sequence: Synthetic oligonucleotide
  Antisense strand to SEQ ID NO: 1824261
ucugcaagcagguauucaa

SEQ ID NO: 1824263 - RNA, 19 nt, Artificial Sequence
  Description of Artificial Sequence: Synthetic oligonucleotide
  Sense strand starting at position 3786 of SEQ ID NO: 1563681
cugugacccgucuauaacu

SEQ ID NO: 1824264 - RNA, 19 nt, Artificial Sequence
  Description of Artificial Sequence: Synthetic oligonucleotide
  Antisense strand to SEQ ID NO: 1824263
aguuauagacgggucacag

SEQ ID NO: 1824265 - RNA, 19 nt, Artificial Sequence
  Description of Artificial Sequence: Synthetic oligonucleotide
  Sense strand starting at position 26 of SEQ ID NO: 1563682
agaccacucuggucuaagu

SEQ ID NO: 1824266 - RNA, 19 nt, Artificial Sequence
  Description of Artificial Sequence: Synthetic oligonucleotide
  Antisense strand to SEQ ID NO: 1824265
acuuagaccagaguggucu

SEQ ID NO: 1824267 - RNA, 19 nt, Artificial Sequence
  Description of Artificial Sequence: Synthetic oligonucleotide
  Sense strand starting at position 50 of SEQ ID NO: 1563682
gcaucucuagccuggacua

SEQ ID NO: 1824268 - RNA, 19 nt, Artificial Sequence
  Description of Artificial Sequence: Synthetic oligonucleotide
  Antisense strand to SEQ ID NO: 1824267
uaguccaggcuagagaugc

SEQ ID NO: 1824269 - RNA, 19 nt, Artificial Sequence
  Description of Artificial Sequence: Synthetic oligonucleotide
  Sense strand starting at position 118 of SEQ ID NO: 1563682
gagggauacugucaaauca

SEQ ID NO: 1824270 - RNA, 19 nt, Artificial Sequence
  Description of Artificial Sequence: Synthetic oligonucleotide
  Antisense strand to SEQ ID NO: 1824269
ugauuugacaguaucccuc

SEQ ID NO: 1824271 - RNA, 19 nt, Artificial Sequence
  Description of Artificial Sequence: Synthetic oligonucleotide
  Sense strand starting at position 703 of SEQ ID NO: 1563682
uccagagacuucuuggauu

SEQ ID NO: 1824272 - RNA, 19 nt, Artificial Sequence
  Description of Artificial Sequence: Synthetic oligonucleotide
  Antisense strand to SEQ ID NO: 1824271
aauccaagaagucucugga

SEQ ID NO: 1824273 - RNA, 19 nt, Artificial Sequence
  Description of Artificial Sequence: Synthetic oligonucleotide
  Sense strand starting at position 711 of SEQ ID NO: 1563682
cuucuuggauucuaaagga

SEQ ID NO: 1824274 - RNA, 19 nt, Artificial Sequence
  Description of Artificial Sequence: Synthetic oligonucleotide
  Antisense strand to SEQ ID NO: 1824273
uccuuuagaauccaagaag

SEQ ID NO: 1824275 - RNA, 19 nt, Artificial Sequence
  Description of Artificial Sequence: Synthetic oligonucleotide
  Sense strand starting at position 1004 of SEQ ID NO: 1563682
ggagaauggcagggucagu

SEQ ID NO: 1824276 - RNA, 19 nt, Artificial Sequence
  Description of Artificial Sequence: Synthetic oligonucleotide
  Antisense strand to SEQ ID NO: 1824275
acugacccugccauucucc

SEQ ID NO: 1824277 - RNA, 19 nt, Artificial Sequence
  Description of Artificial Sequence: Synthetic oligonucleotide
  Sense strand starting at position 1125 of SEQ ID NO: 1563682
gaucgugcauucucuggau

SEQ ID NO: 1824278 - RNA, 19 nt, Artificial Sequence
  Description of Artificial Sequence: Synthetic oligonucleotide
  Antisense strand to SEQ ID NO: 1824277
auccagagaaugcacgauc

SEQ ID NO: 1824279 - RNA, 19 nt, Artificial Sequence
  Description of Artificial Sequence: Synthetic oligonucleotide
  Sense strand starting at position 1127 of SEQ ID NO: 1563682
ucgugcauucucuggauua

SEQ ID NO: 1824280 - RNA, 19 nt, Artificial Sequence
  Description of Artificial Sequence: Synthetic oligonucleotide
  Antisense strand to SEQ ID NO: 1824279
uaauccagagaaugcacga

SEQ ID NO: 1824281 - RNA, 19 nt, Artificial Sequence
  Description of Artificial Sequence: Synthetic oligonucleotide
  Sense strand starting at position 1129 of SEQ ID NO: 1563682
gugcauucucuggauuauc

SEQ ID NO: 1824282 - RNA, 19 nt, Artificial Sequence
  Description of Artificial Sequence: Synthetic oligonucleotide
  Antisense strand to SEQ ID NO: 1824281
gauaauccagagaaugcac

SEQ ID NO: 1824283 - RNA, 19 nt, Artificial Sequence
  Description of Artificial Sequence: Synthetic oligonucleotide
  Sense strand starting at position 1165 of SEQ ID NO: 1563682
ucauaaaugucagugccuu

SEQ ID NO: 1824284 - RNA, 19 nt, Artificial Sequence
  Description of Artificial Sequence: Synthetic oligonucleotide
  Antisense strand to SEQ ID NO: 1824283
aaggcacugacauuuauga

SEQ ID NO: 1824285 - RNA, 19 nt, Artificial Sequence
  Description of Artificial Sequence: Synthetic oligonucleotide
  Sense strand starting at position 1175 of SEQ ID NO: 1563682
cagugccuucgagaaauaa

SEQ ID NO: 1824286 - RNA, 19 nt, Artificial Sequence
  Description of Artificial Sequence: Synthetic oligonucleotide
  Antisense strand to SEQ ID NO: 1824285
uuauuucucgaaggcacug

SEQ ID NO: 1824287 - RNA, 19 nt, Artificial Sequence
  Description of Artificial Sequence: Synthetic oligonucleotide
  Sense strand starting at position 1293 of SEQ ID NO: 1563682
uuccuagaugccugauucu

SEQ ID NO: 1824288 - RNA, 19 nt, Artificial Sequence
  Description of Artificial Sequence: Synthetic oligonucleotide
  Antisense strand to SEQ ID NO: 1824287
agaaucaggcaucuaggaa

SEQ ID NO: 1824289 - RNA, 19 nt, Artificial Sequence
  Description of Artificial Sequence: Synthetic oligonucleotide
  Sense strand starting at position 1302 of SEQ ID NO: 1563682
gccugauucucuucuggaa

SEQ ID NO: 1824290 - RNA, 19 nt, Artificial Sequence
  Description of Artificial Sequence: Synthetic oligonucleotide
  Antisense strand to SEQ ID NO: 1824289
uuccagaagagaaucaggc

SEQ ID NO: 1824291 - RNA, 19 nt, Artificial Sequence
  Description of Artificial Sequence: Synthetic oligonucleotide
  Sense strand starting at position 1550 of SEQ ID NO: 1563682
ucgcaauucccacagcuau

SEQ ID NO: 1824292 - RNA, 19 nt, Artificial Sequence
  Description of Artificial Sequence: Synthetic oligonucleotide
  Antisense strand to SEQ ID NO: 1824291
auagcugugggaauugcga

SEQ ID NO: 1824293 - RNA, 19 nt, Artificial Sequence
  Description of Artificial Sequence: Synthetic oligonucleotide
  Sense strand starting at position 1653 of SEQ ID NO: 1563682
ggucacugucaccaagaca

SEQ ID NO: 1824294 - RNA, 19 nt, Artificial Sequence
  Description of Artificial Sequence: Synthetic oligonucleotide
  Antisense strand to SEQ ID NO: 1824293
ugucuuggugacagugacc

SEQ ID NO: 1824295 - RNA, 19 nt, Artificial Sequence
  Description of Artificial Sequence: Synthetic oligonucleotide
  Sense strand starting at position 1781 of SEQ ID NO: 1563682
auccuucuccuccggagau

SEQ ID NO: 1824296 - RNA, 19 nt, Artificial Sequence
  Description of Artificial Sequence: Synthetic oligonucleotide
  Antisense strand to SEQ ID NO: 1824295
aucuccggaggagaaggau

SEQ ID NO: 1824297 - RNA, 19 nt, Artificial Sequence
  Description of Artificial Sequence: Synthetic oligonucleotide
  Sense strand starting at position 1847 of SEQ ID NO: 1563682
gcgagugaagccgaaugaa

SEQ ID NO: 1824298 - RNA, 19 nt, Artificial Sequence
  Description of Artificial Sequence: Synthetic oligonucleotide
  Antisense strand to SEQ ID NO: 1824297
uucauucggcuucacucgc

SEQ ID NO: 1824299 - RNA, 19 nt, Artificial Sequence
  Description of Artificial Sequence: Synthetic oligonucleotide
  Sense strand starting at position 1850 of SEQ ID NO: 1563682
agugaagccgaaugaaauu

SEQ ID NO: 1824300 - RNA, 19 nt, Artificial Sequence
  Description of Artificial Sequence: Synthetic oligonucleotide
  Antisense strand to SEQ ID NO: 1824299
aauuucauucggcuucacu

SEQ ID NO: 1824301 - RNA, 19 nt, Artificial Sequence
  Description of Artificial Sequence: Synthetic oligonucleotide
  Sense strand starting at position 1946 of SEQ ID NO: 1563682
cgcugcuugcugggaaauu

SEQ ID NO: 1824302 - RNA, 19 nt, Artificial Sequence
  Description of Artificial Sequence: Synthetic oligonucleotide
  Antisense strand to SEQ ID NO: 1824301
aauuucccagcaagcagcg

SEQ ID NO: 1824303 - RNA, 19 nt, Artificial Sequence
  Description of Artificial Sequence: Synthetic oligonucleotide
  Sense strand starting at position 1947 of SEQ ID NO: 1563682
gcugcuugcugggaaauuu

SEQ ID NO: 1824304 - RNA, 19 nt, Artificial Sequence
  Description of Artificial Sequence: Synthetic oligonucleotide
  Antisense strand to SEQ ID NO: 1824303
aaauuucccagcaagcagc

SEQ ID NO: 1824305 - RNA, 19 nt, Artificial Sequence
  Description of Artificial Sequence: Synthetic oligonucleotide
  Sense strand starting at position 2062 of SEQ ID NO: 1563682
gugggaaguaauugucgcu

SEQ ID NO: 1824306 - RNA, 19 nt, Artificial Sequence
  Description of Artificial Sequence: Synthetic oligonucleotide
  Antisense strand to SEQ ID NO: 1824305
agcgacaauuacuucccac

SEQ ID NO: 1824307 - RNA, 19 nt, Artificial Sequence
  Description of Artificial Sequence: Synthetic oligonucleotide
  Sense strand starting at position 2067 of SEQ ID NO: 1563682
aaguaauugucgcucuuuc

SEQ ID NO: 1824308 - RNA, 19 nt, Artificial Sequence
  Description of Artificial Sequence: Synthetic oligonucleotide
  Antisense strand to SEQ ID NO: 1824307
gaaagagcgacaauuacuu

SEQ ID NO: 1824309 - RNA, 19 nt, Artificial Sequence
  Description of Artificial Sequence: Synthetic oligonucleotide
  Sense strand starting at position 2512 of SEQ ID NO: 1563682
ucguguaggcguuugacaa

SEQ ID NO: 1824310 - RNA, 19 nt, Artificial Sequence
  Description of Artificial Sequence: Synthetic oligonucleotide
  Antisense strand to SEQ ID NO: 1824309
uugucaaacgccuacacga

SEQ ID NO: 1824311 - RNA, 19 nt, Artificial Sequence
  Description of Artificial Sequence: Synthetic oligonucleotide
  Sense strand starting at position 2513 of SEQ ID NO: 1563682
cguguaggcguuugacaag

SEQ ID NO: 1824312 - RNA, 19 nt, Artificial Sequence
  Description of Artificial Sequence: Synthetic oligonucleotide
  Antisense strand to SEQ ID NO: 1824311
cuugucaaacgccuacacg

SEQ ID NO: 1824313 - RNA, 19 nt, Artificial Sequence
  Description of Artificial Sequence: Synthetic oligonucleotide
  Sense strand starting at position 2531 of SEQ ID NO: 1563682
guauuuauggagcgccuaa

SEQ ID NO: 1824314 - RNA, 19 nt, Artificial Sequence
  Description of Artificial Sequence: Synthetic oligonucleotide
  Antisense strand to SEQ ID NO: 1824313
uuaggcgcuccauaaauac

SEQ ID NO: 1824315 - RNA, 19 nt, Artificial Sequence
  Description of Artificial Sequence: Synthetic oligonucleotide
  Sense strand starting at position 2544 of SEQ ID NO: 1563682
gccuaaugugugcccuacu

SEQ ID NO: 1824316 - RNA, 19 nt, Artificial Sequence
  Description of Artificial Sequence: Synthetic oligonucleotide
  Antisense strand to SEQ ID NO: 1824315
aguagggcacacauuaggc

SEQ ID NO: 1824317 - RNA, 19 nt, Artificial Sequence
  Description of Artificial Sequence: Synthetic oligonucleotide
  Sense strand starting at position 2554 of SEQ ID NO: 1563682
ugcccuacuuaugugggaa

SEQ ID NO: 1824318 - RNA, 19 nt, Artificial Sequence
  Description of Artificial Sequence: Synthetic oligonucleotide
  Antisense strand to SEQ ID NO: 1824317
uucccacauaaguagggca

SEQ ID NO: 1824319 - RNA, 19 nt, Artificial Sequence
  Description of Artificial Sequence: Synthetic oligonucleotide
  Sense strand starting at position 2555 of SEQ ID NO: 1563682
gcccuacuuaugugggaag

SEQ ID NO: 1824320 - RNA, 19 nt, Artificial Sequence
  Description of Artificial Sequence: Synthetic oligonucleotide
  Antisense strand to SEQ ID NO: 1824319
cuucccacauaaguagggc

SEQ ID NO: 1824321 - RNA, 19 nt, Artificial Sequence
  Description of Artificial Sequence: Synthetic oligonucleotide
  Sense strand starting at position 2562 of SEQ ID NO: 1563682
uuaugugggaaguguugau

SEQ ID NO: 1824322 - RNA, 19 nt, Artificial Sequence
  Description of Artificial Sequence: Synthetic oligonucleotide
  Antisense strand to SEQ ID NO: 1824321
aucaacacuucccacauaa

SEQ ID NO: 1824323 - RNA, 19 nt, Artificial Sequence
  Description of Artificial Sequence: Synthetic oligonucleotide
  Sense strand starting at position 2566 of SEQ ID NO: 1563682
gugggaaguguugaugaag

SEQ ID NO: 1824324 - RNA, 19 nt, Artificial Sequence
  Description of Artificial Sequence: Synthetic oligonucleotide
  Antisense strand to SEQ ID NO: 1824323
cuucaucaacacuucccac

SEQ ID NO: 1824325 - RNA, 19 nt, Artificial Sequence
  Description of Artificial Sequence: Synthetic oligonucleotide
  Sense strand starting at position 2665 of SEQ ID NO: 1563682
uggccugaggccugggaau

SEQ ID NO: 1824326 - RNA, 19 nt, Artificial Sequence
  Description of Artificial Sequence: Synthetic oligonucleotide
  Antisense strand to SEQ ID NO: 1824325
auucccaggccucaggcca

SEQ ID NO: 1824327 - RNA, 19 nt, Artificial Sequence
  Description of Artificial Sequence: Synthetic oligonucleotide
  Sense strand starting at position 2788 of SEQ ID NO: 1563682
gcgucaguuguguacaaua

SEQ ID NO: 1824328 - RNA, 19 nt, Artificial Sequence
  Description of Artificial Sequence: Synthetic oligonucleotide
  Antisense strand to SEQ ID NO: 1824327
uauuguacacaacugacgc

SEQ ID NO: 1824329 - RNA, 19 nt, Artificial Sequence
  Description of Artificial Sequence: Synthetic oligonucleotide
  Sense strand starting at position 2790 of SEQ ID NO: 1563682
gucaguuguguacaauaau

SEQ ID NO: 1824330 - RNA, 19 nt, Artificial Sequence
  Description of Artificial Sequence: Synthetic oligonucleotide
  Antisense strand to SEQ ID NO: 1824329
auuauuguacacaacugac

SEQ ID NO: 1824331 - RNA, 19 nt, Artificial Sequence
  Description of Artificial Sequence: Synthetic oligonucleotide
  Sense strand starting at position 2961 of SEQ ID NO: 1563682
gccugacucauauggugaa

SEQ ID NO: 1824332 - RNA, 19 nt, Artificial Sequence
  Description of Artificial Sequence: Synthetic oligonucleotide
  Antisense strand to SEQ ID NO: 1824331
uucaccauaugagucaggc

SEQ ID NO: 1824333 - RNA, 19 nt, Artificial Sequence
  Description of Artificial Sequence: Synthetic oligonucleotide
  Sense strand starting at position 3517 of SEQ ID NO: 1563682
aaagaauagugccuacuga

SEQ ID NO: 1824334 - RNA, 19 nt, Artificial Sequence
  Description of Artificial Sequence: Synthetic oligonucleotide
  Antisense strand to SEQ ID NO: 1824333
ucaguaggcacuauucuuu

SEQ ID NO: 1824335 - RNA, 19 nt, Artificial Sequence
  Description of Artificial Sequence: Synthetic oligonucleotide
  Sense strand starting at position 3518 of SEQ ID NO: 1563682
aagaauagugccuacugau

SEQ ID NO: 1824336 - RNA, 19 nt, Artificial Sequence
  Description of Artificial Sequence: Synthetic oligonucleotide
  Antisense strand to SEQ ID NO: 1824335
aucaguaggcacuauucuu

SEQ ID NO: 1824337 - RNA, 19 nt, Artificial Sequence
  Description of Artificial Sequence: Synthetic oligonucleotide
  Sense strand starting at position 3527 of SEQ ID NO: 1563682
gccuacugaugucagauuu

SEQ ID NO: 1824338 - RNA, 19 nt, Artificial Sequence
  Description of Artificial Sequence: Synthetic oligonucleotide
  Antisense strand to SEQ ID NO: 1824337
aaaucugacaucaguaggc

SEQ ID NO: 1824339 - RNA, 19 nt, Artificial Sequence
  Description of Artificial Sequence: Synthetic oligonucleotide
  Sense strand starting at position 3909 of SEQ ID NO: 1563682
agaaacuuguagucuagua

SEQ ID NO: 1824340 - RNA, 19 nt, Artificial Sequence
  Description of Artificial Sequence: Synthetic oligonucleotide
  Antisense strand to SEQ ID NO: 1824339
uacuagacuacaaguuucu

SEQ ID NO: 1824341 - RNA, 19 nt, Artificial Sequence
  Description of Artificial Sequence: Synthetic oligonucleotide
  Sense strand starting at position 3916 of SEQ ID NO: 1563682
uguagucuaguagggaaua

SEQ ID NO: 1824342 - RNA, 19 nt, Artificial Sequence
  Description of Artificial Sequence: Synthetic oligonucleotide
  Antisense strand to SEQ ID NO: 1824341
uauucccuacuagacuaca

SEQ ID NO: 1824343 - RNA, 19 nt, Artificial Sequence
  Description of Artificial Sequence: Synthetic oligonucleotide
  Sense strand starting at position 3966 of SEQ ID NO: 1563682
gcaacaugugccgagcuua

SEQ ID NO: 1824344 - RNA, 19 nt, Artificial Sequence
  Description of Artificial Sequence: Synthetic oligonucleotide
  Antisense strand to SEQ ID NO: 1824343
uaagcucggcacauguugc

SEQ ID NO: 1824345 - RNA, 19 nt, Artificial Sequence
  Description of Artificial Sequence: Synthetic oligonucleotide
  Sense strand starting at position 175 of SEQ ID NO: 1563683
gugauaauuccacguacaa

SEQ ID NO: 1824346 - RNA, 19 nt, Artificial Sequence
  Description of Artificial Sequence: Synthetic oligonucleotide
  Antisense strand to SEQ ID NO: 1824345
uuguacguggaauuaucac

SEQ ID NO: 1824347 - RNA, 19 nt, Artificial Sequence
  Description of Artificial Sequence: Synthetic oligonucleotide
  Sense strand starting at position 291 of SEQ ID NO: 1563683
uggcaauuaucaccaaagu

SEQ ID NO: 1824348 - RNA, 19 nt, Artificial Sequence
  Description of Artificial Sequence: Synthetic oligonucleotide
  Antisense strand to SEQ ID NO: 1824347
acuuuggugauaauugcca

SEQ ID NO: 1824349 - RNA, 19 nt, Artificial Sequence
  Description of Artificial Sequence: Synthetic oligonucleotide
  Sense strand starting at position 292 of SEQ ID NO: 1563683
ggcaauuaucaccaaagug

SEQ ID NO: 1824350 - RNA, 19 nt, Artificial Sequence
  Description of Artificial Sequence: Synthetic oligonucleotide
  Antisense strand to SEQ ID NO: 1824349
cacuuuggugauaauugcc

SEQ ID NO: 1824351 - RNA, 19 nt, Artificial Sequence
  Description of Artificial Sequence: Synthetic oligonucleotide
  Sense strand starting at position 374 of SEQ ID NO: 1563683
gagguugaaugguuugacu

SEQ ID NO: 1824352 - RNA, 19 nt, Artificial Sequence
  Description of Artificial Sequence: Synthetic oligonucleotide
  Antisense strand to SEQ ID NO: 1824351
agucaaaccauucaaccuc

SEQ ID NO: 1824353 - RNA, 19 nt, Artificial Sequence
  Description of Artificial Sequence: Synthetic oligonucleotide
  Sense strand starting at position 448 of SEQ ID NO: 1563683
cugcccuuucuagaaggau

SEQ ID NO: 1824354 - RNA, 19 nt, Artificial Sequence
  Description of Artificial Sequence: Synthetic oligonucleotide
  Antisense strand to SEQ ID NO: 1824353
auccuucuagaaagggcag

SEQ ID NO: 1824355 - RNA, 19 nt, Artificial Sequence
  Description of Artificial Sequence: Synthetic oligonucleotide
  Sense strand starting at position 451 of SEQ ID NO: 1563683
cccuuucuagaaggaucuu

SEQ ID NO: 1824356 - RNA, 19 nt, Artificial Sequence
  Description of Artificial Sequence: Synthetic oligonucleotide
  Antisense strand to SEQ ID NO: 1824355
aagauccuucuagaaaggg

SEQ ID NO: 1824357 - RNA, 19 nt, Artificial Sequence
  Description of Artificial Sequence: Synthetic oligonucleotide
  Sense strand starting at position 460 of SEQ ID NO: 1563683
gaaggaucuuaugcuaguu

SEQ ID NO: 1824358 - RNA, 19 nt, Artificial Sequence
  Description of Artificial Sequence: Synthetic oligonucleotide
  Antisense strand to SEQ ID NO: 1824357
aacuagcauaagauccuuc

SEQ ID NO: 1824359 - RNA, 19 nt, Artificial Sequence
  Description of Artificial Sequence: Synthetic oligonucleotide
  Sense strand starting at position 585 of SEQ ID NO: 1563683
uugagcuuccuuugaaaug

SEQ ID NO: 1824360 - RNA, 19 nt, Artificial Sequence
  Description of Artificial Sequence: Synthetic oligonucleotide
  Antisense strand to SEQ ID NO: 1824359
cauuucaaaggaagcucaa

SEQ ID NO: 1824361 - RNA, 19 nt, Artificial Sequence
  Description of Artificial Sequence: Synthetic oligonucleotide
  Sense strand starting at position 829 of SEQ ID NO: 1563683
uggagucugucacuagaga

SEQ ID NO: 1824362 - RNA, 19 nt, Artificial Sequence
  Description of Artificial Sequence: Synthetic oligonucleotide
  Antisense strand to SEQ ID NO: 1824361
ucucuagugacagacucca

SEQ ID NO: 1824363 - RNA, 19 nt, Artificial Sequence
  Description of Artificial Sequence: Synthetic oligonucleotide
  Sense strand starting at position 915 of SEQ ID NO: 1563683
gcggaaugaggcugauuuc

SEQ ID NO: 1824364 - RNA, 19 nt, Artificial Sequence
  Description of Artificial Sequence: Synthetic oligonucleotide
  Antisense strand to SEQ ID NO: 1824363
gaaaucagccucauuccgc

SEQ ID NO: 1824365 - RNA, 19 nt, Artificial Sequence
  Description of Artificial Sequence: Synthetic oligonucleotide
  Sense strand starting at position 998 of SEQ ID NO: 1563683
gcagcauuucaggguguua

SEQ ID NO: 1824366 - RNA, 19 nt, Artificial Sequence
  Description of Artificial Sequence: Synthetic oligonucleotide
  Antisense strand to SEQ ID NO: 1824365
uaacacccugaaaugcugc

SEQ ID NO: 1824367 - RNA, 19 nt, Artificial Sequence
  Description of Artificial Sequence: Synthetic oligonucleotide
  Sense strand starting at position 1010 of SEQ ID NO: 1563683
gguguuaggaagugacaaa

SEQ ID NO: 1824368 - RNA, 19 nt, Artificial Sequence
  Description of Artificial Sequence: Synthetic oligonucleotide
  Antisense strand to SEQ ID NO: 1824367
uuugucacuuccuaacacc

SEQ ID NO: 1824369 - RNA, 19 nt, Artificial Sequence
  Description of Artificial Sequence: Synthetic oligonucleotide
  Sense strand starting at position 1263 of SEQ ID NO: 1563683
gguuucaagggucaugguu

SEQ ID NO: 1824370 - RNA, 19 nt, Artificial Sequence
  Description of Artificial Sequence: Synthetic oligonucleotide
  Antisense strand to SEQ ID NO: 1824369
aaccaugacccuugaaacc

SEQ ID NO: 1824371 - RNA, 19 nt, Artificial Sequence
  Description of Artificial Sequence: Synthetic oligonucleotide
  Sense strand starting at position 1482 of SEQ ID NO: 1563683
ccgucuguucucucugcaa

SEQ ID NO: 1824372 - RNA, 19 nt, Artificial Sequence
  Description of Artificial Sequence: Synthetic oligonucleotide
  Antisense strand to SEQ ID NO: 1824371
uugcagagagaacagacgg

SEQ ID NO: 1824373 - RNA, 19 nt, Artificial Sequence
  Description of Artificial Sequence: Synthetic oligonucleotide
  Sense strand starting at position 2296 of SEQ ID NO: 1563683
acacccguuguauagauaa

SEQ ID NO: 1824374 - RNA, 19 nt, Artificial Sequence
  Description of Artificial Sequence: Synthetic oligonucleotide
  Antisense strand to SEQ ID NO: 1824373
uuaucuauacaacgggugu

SEQ ID NO: 1824375 - RNA, 19 nt, Artificial Sequence
  Description of Artificial Sequence: Synthetic oligonucleotide
  Sense strand starting at position 2353 of SEQ ID NO: 1563683
guacuuagcguugccucaa

SEQ ID NO: 1824376 - RNA, 19 nt, Artificial Sequence
  Description of Artificial Sequence: Synthetic oligonucleotide
  Antisense strand to SEQ ID NO: 1824375
uugaggcaacgcuaaguac

SEQ ID NO: 1824377 - RNA, 19 nt, Artificial Sequence
  Description of Artificial Sequence: Synthetic oligonucleotide
  Sense strand starting at position 2587 of SEQ ID NO: 1563683
gguggcuaaugacuuagaa

SEQ ID NO: 1824378 - RNA, 19 nt, Artificial Sequence
  Description of Artificial Sequence: Synthetic oligonucleotide
  Antisense strand to SEQ ID NO: 1824377
uucuaagucauuagccacc

SEQ ID NO: 1824379 - RNA, 19 nt, Artificial Sequence
  Description of Artificial Sequence: Synthetic oligonucleotide
  Sense strand starting at position 2757 of SEQ ID NO: 1563683
cgcgcuugagccuuuaagu

SEQ ID NO: 1824380 - RNA, 19 nt, Artificial Sequence
  Description of Artificial Sequence: Synthetic oligonucleotide
  Antisense strand to SEQ ID NO: 1824379
acuuaaaggcucaagcgcg

SEQ ID NO: 1824381 - RNA, 19 nt, Artificial Sequence
  Description of Artificial Sequence: Synthetic oligonucleotide
  Sense strand starting at position 2758 of SEQ ID NO: 1563683
gcgcuugagccuuuaagug

SEQ ID NO: 1824382 - RNA, 19 nt, Artificial Sequence
  Description of Artificial Sequence: Synthetic oligonucleotide
  Antisense strand to SEQ ID NO: 1824381
cacuuaaaggcucaagcgc

SEQ ID NO: 1824383 - RNA, 19 nt, Artificial Sequence
  Description of Artificial Sequence: Synthetic oligonucleotide
  Sense strand starting at position 2762 of SEQ ID NO: 1563683
uugagccuuuaagugaauu

SEQ ID NO: 1824384 - RNA, 19 nt, Artificial Sequence
  Description of Artificial Sequence: Synthetic oligonucleotide
  Antisense strand to SEQ ID NO: 1824383
aauucacuuaaaggcucaa

SEQ ID NO: 1824385 - RNA, 19 nt, Artificial Sequence
  Description of Artificial Sequence: Synthetic oligonucleotide
  Sense strand starting at position 2812 of SEQ ID NO: 1563683
ccuucugucuccuuagaga

SEQ ID NO: 1824386 - RNA, 19 nt, Artificial Sequence
  Description of Artificial Sequence: Synthetic oligonucleotide
  Antisense strand to SEQ ID NO: 1824385
ucucuaaggagacagaagg

SEQ ID NO: 1824387 - RNA, 19 nt, Artificial Sequence
  Description of Artificial Sequence: Synthetic oligonucleotide
  Sense strand starting at position 2905 of SEQ ID NO: 1563683
cauuucugagccugauguu

SEQ ID NO: 1824388 - RNA, 19 nt, Artificial Sequence
  Description of Artificial Sequence: Synthetic oligonucleotide
  Antisense strand to SEQ ID NO: 1824387
aacaucaggcucagaaaug

SEQ ID NO: 1824389 - RNA, 19 nt, Artificial Sequence
  Description of Artificial Sequence: Synthetic oligonucleotide
  Sense strand starting at position 3172 of SEQ ID NO: 1563683
agauuugugcuaggcggau

SEQ ID NO: 1824390 - RNA, 19 nt, Artificial Sequence
  Description of Artificial Sequence: Synthetic oligonucleotide
  Antisense strand to SEQ ID NO: 1824389
auccgccuagcacaaaucu

SEQ ID NO: 1824391 - RNA, 19 nt, Artificial Sequence
  Description of Artificial Sequence: Synthetic oligonucleotide
  Sense strand starting at position 3185 of SEQ ID NO: 1563683
gcggaucaguggcucauuu

SEQ ID NO: 1824392 - RNA, 19 nt, Artificial Sequence
  Description of Artificial Sequence: Synthetic oligonucleotide
  Antisense strand to SEQ ID NO: 1824391
aaaugagccacugauccgc

SEQ ID NO: 1824393 - RNA, 19 nt, Artificial Sequence
  Description of Artificial Sequence: Synthetic oligonucleotide
  Sense strand starting at position 3204 of SEQ ID NO: 1563683
ucacaaucccacgggaaua

SEQ ID NO: 1824394 - RNA, 19 nt, Artificial Sequence
  Description of Artificial Sequence: Synthetic oligonucleotide
  Antisense strand to SEQ ID NO: 1824393
uauucccgugggauuguga

SEQ ID NO: 1824395 - RNA, 19 nt, Artificial Sequence
  Description of Artificial Sequence: Synthetic oligonucleotide
  Sense strand starting at position 3263 of SEQ ID NO: 1563683
ggagcucauagguauaacu

SEQ ID NO: 1824396 - RNA, 19 nt, Artificial Sequence
  Description of Artificial Sequence: Synthetic oligonucleotide
  Antisense strand to SEQ ID NO: 1824395
aguuauaccuaugagcucc

SEQ ID NO: 1824397 - RNA, 19 nt, Artificial Sequence
  Description of Artificial Sequence: Synthetic oligonucleotide
  Sense strand starting at position 3424 of SEQ ID NO: 1563683
cuaaguccuaguugaggga

SEQ ID NO: 1824398 - RNA, 19 nt, Artificial Sequence
  Description of Artificial Sequence: Synthetic oligonucleotide
  Antisense strand to SEQ ID NO: 1824397
ucccucaacuaggacuuag

SEQ ID NO: 1824399 - RNA, 19 nt, Artificial Sequence
  Description of Artificial Sequence: Synthetic oligonucleotide
  Sense strand starting at position 3472 of SEQ ID NO: 1563683
gaggguuuccuaggagacc

SEQ ID NO: 1824400 - RNA, 19 nt, Artificial Sequence
  Description of Artificial Sequence: Synthetic oligonucleotide
  Antisense strand to SEQ ID NO: 1824399
ggucuccuaggaaacccuc

SEQ ID NO: 1824401 - RNA, 19 nt, Artificial Sequence
  Description of Artificial Sequence: Synthetic oligonucleotide
  Sense strand starting at position 3526 of SEQ ID NO: 1563683
cugaaauaguacuuuggca

SEQ ID NO: 1824402 - RNA, 19 nt, Artificial Sequence
  Description of Artificial Sequence: Synthetic oligonucleotide
  Antisense strand to SEQ ID NO: 1824401
ugccaaaguacuauuucag

SEQ ID NO: 1824403 - RNA, 19 nt, Artificial Sequence
  Description of Artificial Sequence: Synthetic oligonucleotide
  Sense strand starting at position 3528 of SEQ ID NO: 1563683
gaaauaguacuuuggcaag

SEQ ID NO: 1824404 - RNA, 19 nt, Artificial Sequence
  Description of Artificial Sequence: Synthetic oligonucleotide
  Antisense strand to SEQ ID NO: 1824403
cuugccaaaguacuauuuc

SEQ ID NO: 1824405 - RNA, 19 nt, Artificial Sequence
  Description of Artificial Sequence: Synthetic oligonucleotide
  Sense strand starting at position 3534 of SEQ ID NO: 1563683
guacuuuggcaagacauga

SEQ ID NO: 1824406 - RNA, 19 nt, Artificial Sequence
  Description of Artificial Sequence: Synthetic oligonucleotide
  Antisense strand to SEQ ID NO: 1824405
ucaugucuugccaaaguac

SEQ ID NO: 1824407 - RNA, 19 nt, Artificial Sequence
  Description of Artificial Sequence: Synthetic oligonucleotide
  Sense strand starting at position 3608 of SEQ ID NO: 1563683
aguaaacuccuuggucuac

SEQ ID NO: 1824408 - RNA, 19 nt, Artificial Sequence
  Description of Artificial Sequence: Synthetic oligonucleotide
  Antisense strand to SEQ ID NO: 1824407
guagaccaaggaguuuacu

SEQ ID NO: 1824409 - RNA, 19 nt, Artificial Sequence
  Description of Artificial Sequence: Synthetic oligonucleotide
  Sense strand starting at position 3628 of SEQ ID NO: 1563683
uucugucauucccuagaag

SEQ ID NO: 1824410 - RNA, 19 nt, Artificial Sequence
  Description of Artificial Sequence: Synthetic oligonucleotide
  Antisense strand to SEQ ID NO: 1824409
cuucuagggaaugacagaa

SEQ ID NO: 1824411 - RNA, 19 nt, Artificial Sequence
  Description of Artificial Sequence: Synthetic oligonucleotide
  Sense strand starting at position 3629 of SEQ ID NO: 1563683
ucugucauucccuagaagu

SEQ ID NO: 1824412 - RNA, 19 nt, Artificial Sequence
  Description of Artificial Sequence: Synthetic oligonucleotide
  Antisense strand to SEQ ID NO: 1824411
acuucuagggaaugacaga

SEQ ID NO: 1824413 - RNA, 19 nt, Artificial Sequence
  Description of Artificial Sequence: Synthetic oligonucleotide
  Sense strand starting at position 3631 of SEQ ID NO: 1563683
ugucauucccuagaagucu

SEQ ID NO: 1824414 - RNA, 19 nt, Artificial Sequence
  Description of Artificial Sequence: Synthetic oligonucleotide
  Antisense strand to SEQ ID NO: 1824413
agacuucuagggaaugaca

SEQ ID NO: 1824415 - RNA, 19 nt, Artificial Sequence
  Description of Artificial Sequence: Synthetic oligonucleotide
  Sense strand starting at position 3700 of SEQ ID NO: 1563683
agaacagcugucuaaauau

SEQ ID NO: 1824416 - RNA, 19 nt, Artificial Sequence
  Description of Artificial Sequence: Synthetic oligonucleotide
  Antisense strand to SEQ ID NO: 1824415
auauuuagacagcuguucu

SEQ ID NO: 1824417 - RNA, 19 nt, Artificial Sequence
  Description of Artificial Sequence: Synthetic oligonucleotide
  Sense strand starting at position 3758 of SEQ ID NO: 1563683
ucuaacaauuguguauaca

SEQ ID NO: 1824418 - RNA, 19 nt, Artificial Sequence
  Description of Artificial Sequence: Synthetic oligonucleotide
  Antisense strand to SEQ ID NO: 1824417
uguauacacaauuguuaga

SEQ ID NO: 1824419 - RNA, 19 nt, Artificial Sequence
  Description of Artificial Sequence: Synthetic oligonucleotide
  Sense strand starting at position 3813 of SEQ ID NO: 1563683
ucacuuugugaguaucaug

SEQ ID NO: 1824420 - RNA, 19 nt, Artificial Sequence
  Description of Artificial Sequence: Synthetic oligonucleotide
  Antisense strand to SEQ ID NO: 1824419
caugauacucacaaaguga

SEQ ID NO: 1824421 - RNA, 19 nt, Artificial Sequence
  Description of Artificial Sequence: Synthetic oligonucleotide
  Sense strand starting at position 3820 of SEQ ID NO: 1563683
gugaguaucauggauugau

SEQ ID NO: 1824422 - RNA, 19 nt, Artificial Sequence
  Description of Artificial Sequence: Synthetic oligonucleotide
  Antisense strand to SEQ ID NO: 1824421
aucaauccaugauacucac

SEQ ID NO: 1824423 - RNA, 19 nt, Artificial Sequence
  Description of Artificial Sequence: Synthetic oligonucleotide
  Sense strand starting at position 3918 of SEQ ID NO: 1563683
gcagaugauggcuaguaag

SEQ ID NO: 1824424 - RNA, 19 nt, Artificial Sequence
  Description of Artificial Sequence: Synthetic oligonucleotide
  Antisense strand to SEQ ID NO: 1824423
cuuacuagccaucaucugc

SEQ ID NO: 1824425 - RNA, 19 nt, Artificial Sequence
  Description of Artificial Sequence: Synthetic oligonucleotide
  Sense strand starting at position 165 of SEQ ID NO: 1563684
agucucuagucaucaugga

SEQ ID NO: 1824426 - RNA, 19 nt, Artificial Sequence
  Description of Artificial Sequence: Synthetic oligonucleotide
  Antisense strand to SEQ ID NO: 1824425
uccaugaugacuagagacu

SEQ ID NO: 1824427 - RNA, 19 nt, Artificial Sequence
  Description of Artificial Sequence: Synthetic oligonucleotide
  Sense strand starting at position 166 of SEQ ID NO: 1563684
gucucuagucaucauggaa

SEQ ID NO: 1824428 - RNA, 19 nt, Artificial Sequence
  Description of Artificial Sequence: Synthetic oligonucleotide
  Antisense strand to SEQ ID NO: 1824427
uuccaugaugacuagagac

SEQ ID NO: 1824429 - RNA, 19 nt, Artificial Sequence
  Description of Artificial Sequence: Synthetic oligonucleotide
  Sense strand starting at position 223 of SEQ ID NO: 1563684
ccaagagcuucucuuauag

SEQ ID NO: 1824430 - RNA, 19 nt, Artificial Sequence
  Description of Artificial Sequence: Synthetic oligonucleotide
  Antisense strand to SEQ ID NO: 1824429
cuauaagagaagcucuugg

SEQ ID NO: 1824431 - RNA, 19 nt, Artificial Sequence
  Description of Artificial Sequence: Synthetic oligonucleotide
  Sense strand starting at position 234 of SEQ ID NO: 1563684
ucuuauagcuauuugguca

SEQ ID NO: 1824432 - RNA, 19 nt, Artificial Sequence
  Description of Artificial Sequence: Synthetic oligonucleotide
  Antisense strand to SEQ ID NO: 1824431
ugaccaaauagcuauaaga

SEQ ID NO: 1824433 - RNA, 19 nt, Artificial Sequence
  Description of Artificial Sequence: Synthetic oligonucleotide
  Sense strand starting at position 320 of SEQ ID NO: 1563684
uagauuugguaagaggauu

SEQ ID NO: 1824434 - RNA, 19 nt, Artificial Sequence
  Description of Artificial Sequence: Synthetic oligonucleotide
  Antisense strand to SEQ ID NO: 1824433
aauccucuuaccaaaucua

SEQ ID NO: 1824435 - RNA, 19 nt, Artificial Sequence
  Description of Artificial Sequence: Synthetic oligonucleotide
  Sense strand starting at position 465 of SEQ ID NO: 1563684
aauugcucuguuuaggaua

SEQ ID NO: 1824436 - RNA, 19 nt, Artificial Sequence
  Description of Artificial Sequence: Synthetic oligonucleotide
  Antisense strand to SEQ ID NO: 1824435
uauccuaaacagagcaauu

SEQ ID NO: 1824437 - RNA, 19 nt, Artificial Sequence
  Description of Artificial Sequence: Synthetic oligonucleotide
  Sense strand starting at position 665 of SEQ ID NO: 1563684
cgaauuacucuuuagugac

SEQ ID NO: 1824438 - RNA, 19 nt, Artificial Sequence
  Description of Artificial Sequence: Synthetic oligonucleotide
  Antisense strand to SEQ ID NO: 1824437
gucacuaaagaguaauucg

SEQ ID NO: 1824439 - RNA, 19 nt, Artificial Sequence
  Description of Artificial Sequence: Synthetic oligonucleotide
  Sense strand starting at position 672 of SEQ ID NO: 1563684
cucuuuagugacuaucagu

SEQ ID NO: 1824440 - RNA, 19 nt, Artificial Sequence
  Description of Artificial Sequence: Synthetic oligonucleotide
  Antisense strand to SEQ ID NO: 1824439
acugauagucacuaaagag

SEQ ID NO: 1824441 - RNA, 19 nt, Artificial Sequence
  Description of Artificial Sequence: Synthetic oligonucleotide
  Sense strand starting at position 700 of SEQ ID NO: 1563684
ggcugugagaaauaaccuu

SEQ ID NO: 1824442 - RNA, 19 nt, Artificial Sequence
  Description of Artificial Sequence: Synthetic oligonucleotide
  Antisense strand to SEQ ID NO: 1824441
aagguuauuucucacagcc

SEQ ID NO: 1824443 - RNA, 19 nt, Artificial Sequence
  Description of Artificial Sequence: Synthetic oligonucleotide
  Sense strand starting at position 783 of SEQ ID NO: 1563684
agucuaugacuuugaguga

SEQ ID NO: 1824444 - RNA, 19 nt, Artificial Sequence
  Description of Artificial Sequence: Synthetic oligonucleotide
  Antisense strand to SEQ ID NO: 1824443
ucacucaaagucauagacu

SEQ ID NO: 1824445 - RNA, 19 nt, Artificial Sequence
  Description of Artificial Sequence: Synthetic oligonucleotide
  Sense strand starting at position 787 of SEQ ID NO: 1563684
uaugacuuugagugaggga

SEQ ID NO: 1824446 - RNA, 19 nt, Artificial Sequence
  Description of Artificial Sequence: Synthetic oligonucleotide
  Antisense strand to SEQ ID NO: 1824445
ucccucacucaaagucaua

SEQ ID NO: 1824447 - RNA, 19 nt, Artificial Sequence
  Description of Artificial Sequence: Synthetic oligonucleotide
  Sense strand starting at position 808 of SEQ ID NO: 1563684
auuacaaugcagugagauc

SEQ ID NO: 1824448 - RNA, 19 nt, Artificial Sequence
  Description of Artificial Sequence: Synthetic oligonucleotide
  Antisense strand to SEQ ID NO: 1824447
gaucucacugcauuguaau

SEQ ID NO: 1824449 - RNA, 19 nt, Artificial Sequence
  Description of Artificial Sequence: Synthetic oligonucleotide
  Sense strand starting at position 1154 of SEQ ID NO: 1563684
uagucagggccugauacaa

SEQ ID NO: 1824450 - RNA, 19 nt, Artificial Sequence
  Description of Artificial Sequence: Synthetic oligonucleotide
  Antisense strand to SEQ ID NO: 1824449
uuguaucaggcccugacua

SEQ ID NO: 1824451 - RNA, 19 nt, Artificial Sequence
  Description of Artificial Sequence: Synthetic oligonucleotide
  Sense strand starting at position 1274 of SEQ ID NO: 1563684
uccucagcauuagcagaaa

SEQ ID NO: 1824452 - RNA, 19 nt, Artificial Sequence
  Description of Artificial Sequence: Synthetic oligonucleotide
  Antisense strand to SEQ ID NO: 1824451
uuucugcuaaugcugagga

SEQ ID NO: 1824453 - RNA, 19 nt, Artificial Sequence
  Description of Artificial Sequence: Synthetic oligonucleotide
  Sense strand starting at position 1428 of SEQ ID NO: 1563684
auaucacgucgguagaaag

SEQ ID NO: 1824454 - RNA, 19 nt, Artificial Sequence
  Description of Artificial Sequence: Synthetic oligonucleotide
  Antisense strand to SEQ ID NO: 1824453
cuuucuaccgacgugauau

SEQ ID NO: 1824455 - RNA, 19 nt, Artificial Sequence
  Description of Artificial Sequence: Synthetic oligonucleotide
  Sense strand starting at position 1873 of SEQ ID NO: 1563684
agucuugucagcgucaauu

SEQ ID NO: 1824456 - RNA, 19 nt, Artificial Sequence
  Description of Artificial Sequence: Synthetic oligonucleotide
  Antisense strand to SEQ ID NO: 1824455
aauugacgcugacaagacu

SEQ ID NO: 1824457 - RNA, 19 nt, Artificial Sequence
  Description of Artificial Sequence: Synthetic oligonucleotide
  Sense strand starting at position 1898 of SEQ ID NO: 1563684
ugccuacugguccauaaag

SEQ ID NO: 1824458 - RNA, 19 nt, Artificial Sequence
  Description of Artificial Sequence: Synthetic oligonucleotide
  Antisense strand to SEQ ID NO: 1824457
cuuuauggaccaguaggca

SEQ ID NO: 1824459 - RNA, 19 nt, Artificial Sequence
  Description of Artificial Sequence: Synthetic oligonucleotide
  Sense strand starting at position 2193 of SEQ ID NO: 1563684
auagauuugugacaucaga

SEQ ID NO: 1824460 - RNA, 19 nt, Artificial Sequence
  Description of Artificial Sequence: Synthetic oligonucleotide
  Antisense strand to SEQ ID NO: 1824459
ucugaugucacaaaucuau

SEQ ID NO: 1824461 - RNA, 19 nt, Artificial Sequence
  Description of Artificial Sequence: Synthetic oligonucleotide
  Sense strand starting at position 2330 of SEQ ID NO: 1563684
uuuccugugugguccauuu

SEQ ID NO: 1824462 - RNA, 19 nt, Artificial Sequence
  Description of Artificial Sequence: Synthetic oligonucleotide
  Antisense strand to SEQ ID NO: 1824461
aaauggaccacacaggaaa

SEQ ID NO: 1824463 - RNA, 19 nt, Artificial Sequence
  Description of Artificial Sequence: Synthetic oligonucleotide
  Sense strand starting at position 2332 of SEQ ID NO: 1563684
uccugugugguccauuuau

SEQ ID NO: 1824464 - RNA, 19 nt, Artificial Sequence
  Description of Artificial Sequence: Synthetic oligonucleotide
  Antisense strand to SEQ ID NO: 1824463
auaaauggaccacacagga

SEQ ID NO: 1824465 - RNA, 19 nt, Artificial Sequence
  Description of Artificial Sequence: Synthetic oligonucleotide
  Sense strand starting at position 2408 of SEQ ID NO: 1563684
ugcccauagucucuauuua

SEQ ID NO: 1824466 - RNA, 19 nt, Artificial Sequence
  Description of Artificial Sequence: Synthetic oligonucleotide
  Antisense strand to SEQ ID NO: 1824465
uaaauagagacuaugggca

SEQ ID NO: 1824467 - RNA, 19 nt, Artificial Sequence
  Description of Artificial Sequence: Synthetic oligonucleotide
  Sense strand starting at position 2544 of SEQ ID NO: 1563684
acgauagcaauguagcaau

SEQ ID NO: 1824468 - RNA, 19 nt, Artificial Sequence
  Description of Artificial Sequence: Synthetic oligonucleotide
  Antisense strand to SEQ ID NO: 1824467
auugcuacauugcuaucgu

SEQ ID NO: 1824469 - RNA, 19 nt, Artificial Sequence
  Description of Artificial Sequence: Synthetic oligonucleotide
  Sense strand starting at position 2579 of SEQ ID NO: 1563684
cucccuugucuauaguuaa

SEQ ID NO: 1824470 - RNA, 19 nt, Artificial Sequence
  Description of Artificial Sequence: Synthetic oligonucleotide
  Antisense strand to SEQ ID NO: 1824469
uuaacuauagacaagggag

SEQ ID NO: 1824471 - RNA, 19 nt, Artificial Sequence
  Description of Artificial Sequence: Synthetic oligonucleotide
  Sense strand starting at position 2735 of SEQ ID NO: 1563684
uuuaaucggauaugguuau

SEQ ID NO: 1824472 - RNA, 19 nt, Artificial Sequence
  Description of Artificial Sequence: Synthetic oligonucleotide
  Antisense strand to SEQ ID NO: 1824471
auaaccauauccgauuaaa

SEQ ID NO: 1824473 - RNA, 19 nt, Artificial Sequence
  Description of Artificial Sequence: Synthetic oligonucleotide
  Sense strand starting at position 2855 of SEQ ID NO: 1563684
ugauuugccuucuugcaua

SEQ ID NO: 1824474 - RNA, 19 nt, Artificial Sequence
  Description of Artificial Sequence: Synthetic oligonucleotide
  Antisense strand to SEQ ID NO: 1824473
uaugcaagaaggcaaauca

SEQ ID NO: 1824475 - RNA, 19 nt, Artificial Sequence
  Description of Artificial Sequence: Synthetic oligonucleotide
  Sense strand starting at position 2919 of SEQ ID NO: 1563684
agccuuuaucaugauuaug

SEQ ID NO: 1824476 - RNA, 19 nt, Artificial Sequence
  Description of Artificial Sequence: Synthetic oligonucleotide
  Antisense strand to SEQ ID NO: 1824475
cauaaucaugauaaaggcu

SEQ ID NO: 1824477 - RNA, 19 nt, Artificial Sequence
  Description of Artificial Sequence: Synthetic oligonucleotide
  Sense strand starting at position 2921 of SEQ ID NO: 1563684
ccuuuaucaugauuaugag

SEQ ID NO: 1824478 - RNA, 19 nt, Artificial Sequence
  Description of Artificial Sequence: Synthetic oligonucleotide
  Antisense strand to SEQ ID NO: 1824477
cucauaaucaugauaaagg

SEQ ID NO: 1824479 - RNA, 19 nt, Artificial Sequence
  Description of Artificial Sequence: Synthetic oligonucleotide
  Sense strand starting at position 3057 of SEQ ID NO: 1563684
cugauaggauucccagauc

SEQ ID NO: 1824480 - RNA, 19 nt, Artificial Sequence
  Description of Artificial Sequence: Synthetic oligonucleotide
  Antisense strand to SEQ ID NO: 1824479
gaucugggaauccuaucag

SEQ ID NO: 1824481 - RNA, 19 nt, Artificial Sequence
  Description of Artificial Sequence: Synthetic oligonucleotide
  Sense strand starting at position 3072 of SEQ ID NO: 1563684
gaucaugaauagucugcua

SEQ ID NO: 1824482 - RNA, 19 nt, Artificial Sequence
  Description of Artificial Sequence: Synthetic oligonucleotide
  Antisense strand to SEQ ID NO: 1824481
uagcagacuauucaugauc

SEQ ID NO: 1824483 - RNA, 19 nt, Artificial Sequence
  Description of Artificial Sequence: Synthetic oligonucleotide
  Sense strand starting at position 3100 of SEQ ID NO: 1563684
gcuuaacacuuaucuugga

SEQ ID NO: 1824484 - RNA, 19 nt, Artificial Sequence
  Description of Artificial Sequence: Synthetic oligonucleotide
  Antisense strand to SEQ ID NO: 1824483
uccaagauaaguguuaagc

SEQ ID NO: 1824485 - RNA, 19 nt, Artificial Sequence
  Description of Artificial Sequence: Synthetic oligonucleotide
  Sense strand starting at position 3292 of SEQ ID NO: 1563684
uuagaacuucuagaugugu

SEQ ID NO: 1824486 - RNA, 19 nt, Artificial Sequence
  Description of Artificial Sequence: Synthetic oligonucleotide
  Antisense strand to SEQ ID NO: 1824485
acacaucuagaaguucuaa

SEQ ID NO: 1824487 - RNA, 19 nt, Artificial Sequence
  Description of Artificial Sequence: Synthetic oligonucleotide
  Sense strand starting at position 3306 of SEQ ID NO: 1563684
uguguuacagucgagaaga

SEQ ID NO: 1824488 - RNA, 19 nt, Artificial Sequence
  Description of Artificial Sequence: Synthetic oligonucleotide
  Antisense strand to SEQ ID NO: 1824487
ucuucucgacuguaacaca

SEQ ID NO: 1824489 - RNA, 19 nt, Artificial Sequence
  Description of Artificial Sequence: Synthetic oligonucleotide
  Sense strand starting at position 3308 of SEQ ID NO: 1563684
uguuacagucgagaagauu

SEQ ID NO: 1824490 - RNA, 19 nt, Artificial Sequence
  Description of Artificial Sequence: Synthetic oligonucleotide
  Antisense strand to SEQ ID NO: 1824489
aaucuucucgacuguaaca

SEQ ID NO: 1824491 - RNA, 19 nt, Artificial Sequence
  Description of Artificial Sequence: Synthetic oligonucleotide
  Sense strand starting at position 3554 of SEQ ID NO: 1563684
augguguguccggauagga

SEQ ID NO: 1824492 - RNA, 19 nt, Artificial Sequence
  Description of Artificial Sequence: Synthetic oligonucleotide
  Antisense strand to SEQ ID NO: 1824491
uccuauccggacacaccau

SEQ ID NO: 1824493 - RNA, 19 nt, Artificial Sequence
  Description of Artificial Sequence: Synthetic oligonucleotide
  Sense strand starting at position 3556 of SEQ ID NO: 1563684
gguguguccggauaggaca

SEQ ID NO: 1824494 - RNA, 19 nt, Artificial Sequence
  Description of Artificial Sequence: Synthetic oligonucleotide
  Antisense strand to SEQ ID NO: 1824493
uguccuauccggacacacc

SEQ ID NO: 1824495 - RNA, 19 nt, Artificial Sequence
  Description of Artificial Sequence: Synthetic oligonucleotide
  Sense strand starting at position 3569 of SEQ ID NO: 1563684
aggacagucuuagacauuu

SEQ ID NO: 1824496 - RNA, 19 nt, Artificial Sequence
  Description of Artificial Sequence: Synthetic oligonucleotide
  Antisense strand to SEQ ID NO: 1824495
aaaugucuaagacuguccu

SEQ ID NO: 1824497 - RNA, 19 nt, Artificial Sequence
  Description of Artificial Sequence: Synthetic oligonucleotide
  Sense strand starting at position 3825 of SEQ ID NO: 1563684
aauagugaugcuggugaaa

SEQ ID NO: 1824498 - RNA, 19 nt, Artificial Sequence
  Description of Artificial Sequence: Synthetic oligonucleotide
  Antisense strand to SEQ ID NO: 1824497
uuucaccagcaucacuauu

SEQ ID NO: 1824499 - RNA, 19 nt, Artificial Sequence
  Description of Artificial Sequence: Synthetic oligonucleotide
  Sense strand starting at position 3880 of SEQ ID NO: 1563684
acucuaguucuauaucgag

SEQ ID NO: 1824500 - RNA, 19 nt, Artificial Sequence
  Description of Artificial Sequence: Synthetic oligonucleotide
  Antisense strand to SEQ ID NO: 1824499
cucgauauagaacuagagu

SEQ ID NO: 1824501 - RNA, 19 nt, Artificial Sequence
  Description of Artificial Sequence: Synthetic oligonucleotide
  Sense strand starting at position 3886 of SEQ ID NO: 1563684
guucuauaucgagaucaaa

SEQ ID NO: 1824502 - RNA, 19 nt, Artificial Sequence
  Description of Artificial Sequence: Synthetic oligonucleotide
  Antisense strand to SEQ ID NO: 1824501
uuugaucucgauauagaac

SEQ ID NO: 1824503 - RNA, 19 nt, Artificial Sequence
  Description of Artificial Sequence: Synthetic oligonucleotide
  Sense strand starting at position 3935 of SEQ ID NO: 1563684
aguugauaccugcaucuac

SEQ ID NO: 1824504 - RNA, 19 nt, Artificial Sequence
  Description of Artificial Sequence: Synthetic oligonucleotide
  Antisense strand to SEQ ID NO: 1824503
guagaugcagguaucaacu

SEQ ID NO: 1824505 - RNA, 19 nt, Artificial Sequence
  Description of Artificial Sequence: Synthetic oligonucleotide
  Sense strand starting at position 7 of SEQ ID NO: 1563685
uuucuugggcuccaugaau

SEQ ID NO: 1824506 - RNA, 19 nt, Artificial Sequence
  Description of Artificial Sequence: Synthetic oligonucleotide
  Antisense strand to SEQ ID NO: 1824505
auucauggagcccaagaaa

SEQ ID NO: 1824507 - RNA, 19 nt, Artificial Sequence
  Description of Artificial Sequence: Synthetic oligonucleotide
  Sense strand starting at position 19 of SEQ ID NO: 1563685
caugaaugauuugguccau

SEQ ID NO: 1824508 - RNA, 19 nt, Artificial Sequence
  Description of Artificial Sequence: Synthetic oligonucleotide
  Antisense strand to SEQ ID NO: 1824507
auggaccaaaucauucaug

SEQ ID NO: 1824509 - RNA, 19 nt, Artificial Sequence
  Description of Artificial Sequence: Synthetic oligonucleotide
  Sense strand starting at position 217 of SEQ ID NO: 1563685
ugcuuuaagaaauguagag

SEQ ID NO: 1824510 - RNA, 19 nt, Artificial Sequence
  Description of Artificial Sequence: Synthetic oligonucleotide
  Antisense strand to SEQ ID NO: 1824509
cucuacauuucuuaaagca

SEQ ID NO: 1824511 - RNA, 19 nt, Artificial Sequence
  Description of Artificial Sequence: Synthetic oligonucleotide
  Sense strand starting at position 356 of SEQ ID NO: 1563685
gcaacaccuuugccugaaa

SEQ ID NO: 1824512 - RNA, 19 nt, Artificial Sequence
  Description of Artificial Sequence: Synthetic oligonucleotide
  Antisense strand to SEQ ID NO: 1824511
uuucaggcaaagguguugc

SEQ ID NO: 1824513 - RNA, 19 nt, Artificial Sequence
  Description of Artificial Sequence: Synthetic oligonucleotide
  Sense strand starting at position 373 of SEQ ID NO: 1563685
aaugguaugguuuggcauu

SEQ ID NO: 1824514 - RNA, 19 nt, Artificial Sequence
  Description of Artificial Sequence: Synthetic oligonucleotide
  Antisense strand to SEQ ID NO: 1824513
aaugccaaaccauaccauu

SEQ ID NO: 1824515 - RNA, 19 nt, Artificial Sequence
  Description of Artificial Sequence: Synthetic oligonucleotide
  Sense strand starting at position 375 of SEQ ID NO: 1563685
ugguaugguuuggcauuaa

SEQ ID NO: 1824516 - RNA, 19 nt, Artificial Sequence
  Description of Artificial Sequence: Synthetic oligonucleotide
  Antisense strand to SEQ ID NO: 1824515
uuaaugccaaaccauacca

SEQ ID NO: 1824517 - RNA, 19 nt, Artificial Sequence
  Description of Artificial Sequence: Synthetic oligonucleotide
  Sense strand starting at position 379 of SEQ ID NO: 1563685
augguuuggcauuaaugaa

SEQ ID NO: 1824518 - RNA, 19 nt, Artificial Sequence
  Description of Artificial Sequence: Synthetic oligonucleotide
  Antisense strand to SEQ ID NO: 1824517
uucauuaaugccaaaccau

SEQ ID NO: 1824519 - RNA, 19 nt, Artificial Sequence
  Description of Artificial Sequence: Synthetic oligonucleotide
  Sense strand starting at position 387 of SEQ ID NO: 1563685
gcauuaaugaauugugggu

SEQ ID NO: 1824520 - RNA, 19 nt, Artificial Sequence
  Description of Artificial Sequence: Synthetic oligonucleotide
  Antisense strand to SEQ ID NO: 1824519
acccacaauucauuaaugc

SEQ ID NO: 1824521 - RNA, 19 nt, Artificial Sequence
  Description of Artificial Sequence: Synthetic oligonucleotide
  Sense strand starting at position 391 of SEQ ID NO: 1563685
uaaugaauuguggguccau

SEQ ID NO: 1824522 - RNA, 19 nt, Artificial Sequence
  Description of Artificial Sequence: Synthetic oligonucleotide
  Antisense strand to SEQ ID NO: 1824521
auggacccacaauucauua

SEQ ID NO: 1824523 - RNA, 19 nt, Artificial Sequence
  Description of Artificial Sequence: Synthetic oligonucleotide
  Sense strand starting at position 392 of SEQ ID NO: 1563685
aaugaauuguggguccauu

SEQ ID NO: 1824524 - RNA, 19 nt, Artificial Sequence
  Description of Artificial Sequence: Synthetic oligonucleotide
  Antisense strand to SEQ ID NO: 1824523
aauggacccacaauucauu

SEQ ID NO: 1824525 - RNA, 19 nt, Artificial Sequence
  Description of Artificial Sequence: Synthetic oligonucleotide
  Sense strand starting at position 432 of SEQ ID NO: 1563685
ucucguguuauggacaguu

SEQ ID NO: 1824526 - RNA, 19 nt, Artificial Sequence
  Description of Artificial Sequence: Synthetic oligonucleotide
  Antisense strand to SEQ ID NO: 1824525
aacuguccauaacacgaga

SEQ ID NO: 1824527 - RNA, 19 nt, Artificial Sequence
  Description of Artificial Sequence: Synthetic oligonucleotide
  Sense strand starting at position 434 of SEQ ID NO: 1563685
ucguguuauggacaguuca

SEQ ID NO: 1824528 - RNA, 19 nt, Artificial Sequence
  Description of Artificial Sequence: Synthetic oligonucleotide
  Antisense strand to SEQ ID NO: 1824527
ugaacuguccauaacacga

SEQ ID NO: 1824529 - RNA, 19 nt, Artificial Sequence
  Description of Artificial Sequence: Synthetic oligonucleotide
  Sense strand starting at position 451 of SEQ ID NO: 1563685
caagguuugccuuagaacu

SEQ ID NO: 1824530 - RNA, 19 nt, Artificial Sequence
  Description of Artificial Sequence: Synthetic oligonucleotide
  Antisense strand to SEQ ID NO: 1824529
aguucuaaggcaaaccuug

SEQ ID NO: 1824531 - RNA, 19 nt, Artificial Sequence
  Description of Artificial Sequence: Synthetic oligonucleotide
  Sense strand starting at position 683 of SEQ ID NO: 1563685
ugauuauggugaucaccca

SEQ ID NO: 1824532 - RNA, 19 nt, Artificial Sequence
  Description of Artificial Sequence: Synthetic oligonucleotide
  Antisense strand to SEQ ID NO: 1824531
ugggugaucaccauaauca

SEQ ID NO: 1824533 - RNA, 19 nt, Artificial Sequence
  Description of Artificial Sequence: Synthetic oligonucleotide
  Sense strand starting at position 872 of SEQ ID NO: 1563685
ggaggcucuccgggauguu

SEQ ID NO: 1824534 - RNA, 19 nt, Artificial Sequence
  Description of Artificial Sequence: Synthetic oligonucleotide
  Antisense strand to SEQ ID NO: 1824533
aacaucccggagagccucc

SEQ ID NO: 1824535 - RNA, 19 nt, Artificial Sequence
  Description of Artificial Sequence: Synthetic oligonucleotide
  Sense strand starting at position 899 of SEQ ID NO: 1563685
cgacgucauccucacugaa

SEQ ID NO: 1824536 - RNA, 19 nt, Artificial Sequence
  Description of Artificial Sequence: Synthetic oligonucleotide
  Antisense strand to SEQ ID NO: 1824535
uucagugaggaugacgucg

SEQ ID NO: 1824537 - RNA, 19 nt, Artificial Sequence
  Description of Artificial Sequence: Synthetic oligonucleotide
  Sense strand starting at position 901 of SEQ ID NO: 1563685
acgucauccucacugaaau

SEQ ID NO: 1824538 - RNA, 19 nt, Artificial Sequence
  Description of Artificial Sequence: Synthetic oligonucleotide
  Antisense strand to SEQ ID NO: 1824537
auuucagugaggaugacgu

SEQ ID NO: 1824539 - RNA, 19 nt, Artificial Sequence
  Description of Artificial Sequence: Synthetic oligonucleotide
  Sense strand starting at position 902 of SEQ ID NO: 1563685
cgucauccucacugaaauu

SEQ ID NO: 1824540 - RNA, 19 nt, Artificial Sequence
  Description of Artificial Sequence: Synthetic oligonucleotide
  Antisense strand to SEQ ID NO: 1824539
aauuucagugaggaugacg

SEQ ID NO: 1824541 - RNA, 19 nt, Artificial Sequence
  Description of Artificial Sequence: Synthetic oligonucleotide
  Sense strand starting at position 1210 of SEQ ID NO: 1563685
cggcgaaacucacucucau

SEQ ID NO: 1824542 - RNA, 19 nt, Artificial Sequence
  Description of Artificial Sequence: Synthetic oligonucleotide
  Antisense strand to SEQ ID NO: 1824541
augagagugaguuucgccg

SEQ ID NO: 1824543 - RNA, 19 nt, Artificial Sequence
  Description of Artificial Sequence: Synthetic oligonucleotide
  Sense strand starting at position 1361 of SEQ ID NO: 1563685
cggaguagcaggcaaucau

SEQ ID NO: 1824544 - RNA, 19 nt, Artificial Sequence
  Description of Artificial Sequence: Synthetic oligonucleotide
  Antisense strand to SEQ ID NO: 1824543
augauugccugcuacuccg

SEQ ID NO: 1824545 - RNA, 19 nt, Artificial Sequence
  Description of Artificial Sequence: Synthetic oligonucleotide
  Sense strand starting at position 1376 of SEQ ID NO: 1563685
ucaugacaaucaguggaau

SEQ ID NO: 1824546 - RNA, 19 nt, Artificial Sequence
  Description of Artificial Sequence: Synthetic oligonucleotide
  Antisense strand to SEQ ID NO: 1824545
auuccacugauugucauga

SEQ ID NO: 1824547 - RNA, 19 nt, Artificial Sequence
  Description of Artificial Sequence: Synthetic oligonucleotide
  Sense strand starting at position 1382 of SEQ ID NO: 1563685
caaucaguggaaugacgau

SEQ ID NO: 1824548 - RNA, 19 nt, Artificial Sequence
  Description of Artificial Sequence: Synthetic oligonucleotide
  Antisense strand to SEQ ID NO: 1824547
aucgucauuccacugauug

SEQ ID NO: 1824549 - RNA, 19 nt, Artificial Sequence
  Description of Artificial Sequence: Synthetic oligonucleotide
  Sense strand starting at position 1460 of SEQ ID NO: 1563685
gagcauugcgcucaucaaa

SEQ ID NO: 1824550 - RNA, 19 nt, Artificial Sequence
  Description of Artificial Sequence: Synthetic oligonucleotide
  Antisense strand to SEQ ID NO: 1824549
uuugaugagcgcaaugcuc

SEQ ID NO: 1824551 - RNA, 19 nt, Artificial Sequence
  Description of Artificial Sequence: Synthetic oligonucleotide
  Sense strand starting at position 1504 of SEQ ID NO: 1563685
ggaggagugcucugcagga

SEQ ID NO: 1824552 - RNA, 19 nt, Artificial Sequence
  Description of Artificial Sequence: Synthetic oligonucleotide
  Antisense strand to SEQ ID NO: 1824551
uccugcagagcacuccucc

SEQ ID NO: 1824553 - RNA, 19 nt, Artificial Sequence
  Description of Artificial Sequence: Synthetic oligonucleotide
  Sense strand starting at position 1848 of SEQ ID NO: 1563685
cacuauguugccgacgaaa

SEQ ID NO: 1824554 - RNA, 19 nt, Artificial Sequence
  Description of Artificial Sequence: Synthetic oligonucleotide
  Antisense strand to SEQ ID NO: 1824553
uuucgucggcaacauagug

SEQ ID NO: 1824555 - RNA, 19 nt, Artificial Sequence
  Description of Artificial Sequence: Synthetic oligonucleotide
  Sense strand starting at position 1850 of SEQ ID NO: 1563685
cuauguugccgacgaaaga

SEQ ID NO: 1824556 - RNA, 19 nt, Artificial Sequence
  Description of Artificial Sequence: Synthetic oligonucleotide
  Antisense strand to SEQ ID NO: 1824555
ucuuucgucggcaacauag

SEQ ID NO: 1824557 - RNA, 19 nt, Artificial Sequence
  Description of Artificial Sequence: Synthetic oligonucleotide
  Sense strand starting at position 1947 of SEQ ID NO: 1563685
gcacguguggcugcuguua

SEQ ID NO: 1824558 - RNA, 19 nt, Artificial Sequence
  Description of Artificial Sequence: Synthetic oligonucleotide
  Antisense strand to SEQ ID NO: 1824557
uaacagcagccacacgugc

SEQ ID NO: 1824559 - RNA, 19 nt, Artificial Sequence
  Description of Artificial Sequence: Synthetic oligonucleotide
  Sense strand starting at position 2274 of SEQ ID NO: 1563685
ggcucugauuuccucucau

SEQ ID NO: 1824560 - RNA, 19 nt, Artificial Sequence
  Description of Artificial Sequence: Synthetic oligonucleotide
  Antisense strand to SEQ ID NO: 1824559
augagaggaaaucagagcc

SEQ ID NO: 1824561 - RNA, 19 nt, Artificial Sequence
  Description of Artificial Sequence: Synthetic oligonucleotide
  Sense strand starting at position 2415 of SEQ ID NO: 1563685
uguuuacgaccgucaguuu

SEQ ID NO: 1824562 - RNA, 19 nt, Artificial Sequence
  Description of Artificial Sequence: Synthetic oligonucleotide
  Antisense strand to SEQ ID NO: 1824561
aaacugacggucguaaaca

SEQ ID NO: 1824563 - RNA, 19 nt, Artificial Sequence
  Description of Artificial Sequence: Synthetic oligonucleotide
  Sense strand starting at position 2483 of SEQ ID NO: 1563685
ucggguugugugucuguau

SEQ ID NO: 1824564 - RNA, 19 nt, Artificial Sequence
  Description of Artificial Sequence: Synthetic oligonucleotide
  Antisense strand to SEQ ID NO: 1824563
auacagacacacaacccga

SEQ ID NO: 1824565 - RNA, 19 nt, Artificial Sequence
  Description of Artificial Sequence: Synthetic oligonucleotide
  Sense strand starting at position 2512 of SEQ ID NO: 1563685
guuuccugauucuuucuca

SEQ ID NO: 1824566 - RNA, 19 nt, Artificial Sequence
  Description of Artificial Sequence: Synthetic oligonucleotide
  Antisense strand to SEQ ID NO: 1824565
ugagaaagaaucaggaaac

SEQ ID NO: 1824567 - RNA, 19 nt, Artificial Sequence
  Description of Artificial Sequence: Synthetic oligonucleotide
  Sense strand starting at position 2732 of SEQ ID NO: 1563685
cccucagucucuuucugau

SEQ ID NO: 1824568 - RNA, 19 nt, Artificial Sequence
  Description of Artificial Sequence: Synthetic oligonucleotide
  Antisense strand to SEQ ID NO: 1824567
aucagaaagagacugaggg

SEQ ID NO: 1824569 - RNA, 19 nt, Artificial Sequence
  Description of Artificial Sequence: Synthetic oligonucleotide
  Sense strand starting at position 2738 of SEQ ID NO: 1563685
gucucuuucugauccauuc

SEQ ID NO: 1824570 - RNA, 19 nt, Artificial Sequence
  Description of Artificial Sequence: Synthetic oligonucleotide
  Antisense strand to SEQ ID NO: 1824569
gaauggaucagaaagagac

SEQ ID NO: 1824571 - RNA, 19 nt, Artificial Sequence
  Description of Artificial Sequence: Synthetic oligonucleotide
  Sense strand starting at position 3157 of SEQ ID NO: 1563685
aagcuaucucuuuagugug

SEQ ID NO: 1824572 - RNA, 19 nt, Artificial Sequence
  Description of Artificial Sequence: Synthetic oligonucleotide
  Antisense strand to SEQ ID NO: 1824571
cacacuaaagagauagcuu

SEQ ID NO: 1824573 - RNA, 19 nt, Artificial Sequence
  Description of Artificial Sequence: Synthetic oligonucleotide
  Sense strand starting at position 3220 of SEQ ID NO: 1563685
ccaggacucuggcuaaaca

SEQ ID NO: 1824574 - RNA, 19 nt, Artificial Sequence
  Description of Artificial Sequence: Synthetic oligonucleotide
  Antisense strand to SEQ ID NO: 1824573
uguuuagccagaguccugg

SEQ ID NO: 1824575 - RNA, 19 nt, Artificial Sequence
  Description of Artificial Sequence: Synthetic oligonucleotide
  Sense strand starting at position 3257 of SEQ ID NO: 1563685
gugugugcgcaucucuauu

SEQ ID NO: 1824576 - RNA, 19 nt, Artificial Sequence
  Description of Artificial Sequence: Synthetic oligonucleotide
  Antisense strand to SEQ ID NO: 1824575
aauagagaugcgcacacac

SEQ ID NO: 1824577 - RNA, 19 nt, Artificial Sequence
  Description of Artificial Sequence: Synthetic oligonucleotide
  Sense strand starting at position 3263 of SEQ ID NO: 1563685
gcgcaucucuauuucucua

SEQ ID NO: 1824578 - RNA, 19 nt, Artificial Sequence
  Description of Artificial Sequence: Synthetic oligonucleotide
  Antisense strand to SEQ ID NO: 1824577
uagagaaauagagaugcgc

SEQ ID NO: 1824579 - RNA, 19 nt, Artificial Sequence
  Description of Artificial Sequence: Synthetic oligonucleotide
  Sense strand starting at position 3324 of SEQ ID NO: 1563685
ggaucucugucucuuugga

SEQ ID NO: 1824580 - RNA, 19 nt, Artificial Sequence
  Description of Artificial Sequence: Synthetic oligonucleotide
  Antisense strand to SEQ ID NO: 1824579
uccaaagagacagagaucc

SEQ ID NO: 1824581 - RNA, 19 nt, Artificial Sequence
  Description of Artificial Sequence: Synthetic oligonucleotide
  Sense strand starting at position 3423 of SEQ ID NO: 1563685
uuaguuuaucagcagugca

SEQ ID NO: 1824582 - RNA, 19 nt, Artificial Sequence
  Description of Artificial Sequence: Synthetic oligonucleotide
  Antisense strand to SEQ ID NO: 1824581
ugcacugcugauaaacuaa

SEQ ID NO: 1824583 - RNA, 19 nt, Artificial Sequence
  Description of Artificial Sequence: Synthetic oligonucleotide
  Sense strand starting at position 3768 of SEQ ID NO: 1563685
aagaaaugggagcgugaga

SEQ ID NO: 1824584 - RNA, 19 nt, Artificial Sequence
  Description of Artificial Sequence: Synthetic oligonucleotide
  Antisense strand to SEQ ID NO: 1824583
ucucacgcucccauuucuu

SEQ ID NO: 1824585 - RNA, 19 nt, Artificial Sequence
  Description of Artificial Sequence: Synthetic oligonucleotide
  Sense strand starting at position 75 of SEQ ID NO: 1563686
ugaugaugaucaugaguua

SEQ ID NO: 1824586 - RNA, 19 nt, Artificial Sequence
  Description of Artificial Sequence: Synthetic oligonucleotide
  Antisense strand to SEQ ID NO: 1824585
uaacucaugaucaucauca

SEQ ID NO: 1824587 - RNA, 19 nt, Artificial Sequence
  Description of Artificial Sequence: Synthetic oligonucleotide
  Sense strand starting at position 84 of SEQ ID NO: 1563686
ucaugaguuaauggugaug

SEQ ID NO: 1824588 - RNA, 19 nt, Artificial Sequence
  Description of Artificial Sequence: Synthetic oligonucleotide
  Antisense strand to SEQ ID NO: 1824587
caucaccauuaacucauga

SEQ ID NO: 1824589 - RNA, 19 nt, Artificial Sequence
  Description of Artificial Sequence: Synthetic oligonucleotide
  Sense strand starting at position 86 of SEQ ID NO: 1563686
augaguuaauggugaugau

SEQ ID NO: 1824590 - RNA, 19 nt, Artificial Sequence
  Description of Artificial Sequence: Synthetic oligonucleotide
  Antisense strand to SEQ ID NO: 1824589
aucaucaccauuaacucau

SEQ ID NO: 1824591 - RNA, 19 nt, Artificial Sequence
  Description of Artificial Sequence: Synthetic oligonucleotide
  Sense strand starting at position 90 of SEQ ID NO: 1563686
guuaauggugaugauggua

SEQ ID NO: 1824592 - RNA, 19 nt, Artificial Sequence
  Description of Artificial Sequence: Synthetic oligonucleotide
  Antisense strand to SEQ ID NO: 1824591
uaccaucaucaccauuaac

SEQ ID NO: 1824593 - RNA, 19 nt, Artificial Sequence
  Description of Artificial Sequence: Synthetic oligonucleotide
  Sense strand starting at position 105 of SEQ ID NO: 1563686
gguauccaccucuauuauu

SEQ ID NO: 1824594 - RNA, 19 nt, Artificial Sequence
  Description of Artificial Sequence: Synthetic oligonucleotide
  Antisense strand to SEQ ID NO: 1824593
aauaauagagguggauacc

SEQ ID NO: 1824595 - RNA, 19 nt, Artificial Sequence
  Description of Artificial Sequence: Synthetic oligonucleotide
  Sense strand starting at position 252 of SEQ ID NO: 1563686
ucauauaguccgcaaucau

SEQ ID NO: 1824596 - RNA, 19 nt, Artificial Sequence
  Description of Artificial Sequence: Synthetic oligonucleotide
  Antisense strand to SEQ ID NO: 1824595
augauugcggacuauauga

SEQ ID NO: 1824597 - RNA, 19 nt, Artificial Sequence
  Description of Artificial Sequence: Synthetic oligonucleotide
  Sense strand starting at position 374 of SEQ ID NO: 1563686
uggaacaggucacauuaau

SEQ ID NO: 1824598 - RNA, 19 nt, Artificial Sequence
  Description of Artificial Sequence: Synthetic oligonucleotide
  Antisense strand to SEQ ID NO: 1824597
auuaaugugaccuguucca

SEQ ID NO: 1824599 - RNA, 19 nt, Artificial Sequence
  Description of Artificial Sequence: Synthetic oligonucleotide
  Sense strand starting at position 380 of SEQ ID NO: 1563686
aggucacauuaauagauau

SEQ ID NO: 1824600 - RNA, 19 nt, Artificial Sequence
  Description of Artificial Sequence: Synthetic oligonucleotide
  Antisense strand to SEQ ID NO: 1824599
auaucuauuaaugugaccu

SEQ ID NO: 1824601 - RNA, 19 nt, Artificial Sequence
  Description of Artificial Sequence: Synthetic oligonucleotide
  Sense strand starting at position 395 of SEQ ID NO: 1563686
auaugagcccaguaagcaa

SEQ ID NO: 1824602 - RNA, 19 nt, Artificial Sequence
  Description of Artificial Sequence: Synthetic oligonucleotide
  Antisense strand to SEQ ID NO: 1824601
uugcuuacugggcucauau

SEQ ID NO: 1824603 - RNA, 19 nt, Artificial Sequence
  Description of Artificial Sequence: Synthetic oligonucleotide
  Sense strand starting at position 461 of SEQ ID NO: 1563686
ggcguucacuuaugauuug

SEQ ID NO: 1824604 - RNA, 19 nt, Artificial Sequence
  Description of Artificial Sequence: Synthetic oligonucleotide
  Antisense strand to SEQ ID NO: 1824603
caaaucauaagugaacgcc

SEQ ID NO: 1824605 - RNA, 19 nt, Artificial Sequence
  Description of Artificial Sequence: Synthetic oligonucleotide
  Sense strand starting at position 587 of SEQ ID NO: 1563686
aggccaaauuaugagugaa

SEQ ID NO: 1824606 - RNA, 19 nt, Artificial Sequence
  Description of Artificial Sequence: Synthetic oligonucleotide
  Antisense strand to SEQ ID NO: 1824605
uucacucauaauuuggccu

SEQ ID NO: 1824607 - RNA, 19 nt, Artificial Sequence
  Description of Artificial Sequence: Synthetic oligonucleotide
  Sense strand starting at position 1770 of SEQ ID NO: 1563686
cuguaaacugguuaaacca

SEQ ID NO: 1824608 - RNA, 19 nt, Artificial Sequence
  Description of Artificial Sequence: Synthetic oligonucleotide
  Antisense strand to SEQ ID NO: 1824607
ugguuuaaccaguuuacag

SEQ ID NO: 1824609 - RNA, 19 nt, Artificial Sequence
  Description of Artificial Sequence: Synthetic oligonucleotide
  Sense strand starting at position 2100 of SEQ ID NO: 1563686
caaacuaucgcagggacau

SEQ ID NO: 1824610 - RNA, 19 nt, Artificial Sequence
  Description of Artificial Sequence: Synthetic oligonucleotide
  Antisense strand to SEQ ID NO: 1824609
augucccugcgauaguuug

SEQ ID NO: 1824611 - RNA, 19 nt, Artificial Sequence
  Description of Artificial Sequence: Synthetic oligonucleotide
  Sense strand starting at position 2101 of SEQ ID NO: 1563686
aaacuaucgcagggacaua

SEQ ID NO: 1824612 - RNA, 19 nt, Artificial Sequence
  Description of Artificial Sequence: Synthetic oligonucleotide
  Antisense strand to SEQ ID NO: 1824611
uaugucccugcgauaguuu

SEQ ID NO: 1824613 - RNA, 19 nt, Artificial Sequence
  Description of Artificial Sequence: Synthetic oligonucleotide
  Sense strand starting at position 2258 of SEQ ID NO: 1563686
uaauguaaauaacgaggua

SEQ ID NO: 1824614 - RNA, 19 nt, Artificial Sequence
  Description of Artificial Sequence: Synthetic oligonucleotide
  Antisense strand to SEQ ID NO: 1824613
uaccucguuauuuacauua

SEQ ID NO: 1824615 - RNA, 19 nt, Artificial Sequence
  Description of Artificial Sequence: Synthetic oligonucleotide
  Sense strand starting at position 2261 of SEQ ID NO: 1563686
uguaaauaacgagguaaug

SEQ ID NO: 1824616 - RNA, 19 nt, Artificial Sequence
  Description of Artificial Sequence: Synthetic oligonucleotide
  Antisense strand to SEQ ID NO: 1824615
cauuaccucguuauuuaca

SEQ ID NO: 1824617 - RNA, 19 nt, Artificial Sequence
  Description of Artificial Sequence: Synthetic oligonucleotide
  Sense strand starting at position 2804 of SEQ ID NO: 1563686
guaugcuugcagcugcaaa

SEQ ID NO: 1824618 - RNA, 19 nt, Artificial Sequence
  Description of Artificial Sequence: Synthetic oligonucleotide
  Antisense strand to SEQ ID NO: 1824617
uuugcagcugcaagcauac

SEQ ID NO: 1824619 - RNA, 19 nt, Artificial Sequence
  Description of Artificial Sequence: Synthetic oligonucleotide
  Sense strand starting at position 3057 of SEQ ID NO: 1563686
cuuuaauucuugcaguagu

SEQ ID NO: 1824620 - RNA, 19 nt, Artificial Sequence
  Description of Artificial Sequence: Synthetic oligonucleotide
  Antisense strand to SEQ ID NO: 1824619
acuacugcaagaauuaaag

SEQ ID NO: 1824621 - RNA, 19 nt, Artificial Sequence
  Description of Artificial Sequence: Synthetic oligonucleotide
  Sense strand starting at position 20 of SEQ ID NO: 1563687
uggauugggaccgguaaca

SEQ ID NO: 1824622 - RNA, 19 nt, Artificial Sequence
  Description of Artificial Sequence: Synthetic oligonucleotide
  Antisense strand to SEQ ID NO: 1824621
uguuaccggucccaaucca

SEQ ID NO: 1824623 - RNA, 19 nt, Artificial Sequence
  Description of Artificial Sequence: Synthetic oligonucleotide
  Sense strand starting at position 30 of SEQ ID NO: 1563687
ccgguaacagcagaaauaa

SEQ ID NO: 1824624 - RNA, 19 nt, Artificial Sequence
  Description of Artificial Sequence: Synthetic oligonucleotide
  Antisense strand to SEQ ID NO: 1824623
uuauuucugcuguuaccgg

SEQ ID NO: 1824625 - RNA, 19 nt, Artificial Sequence
  Description of Artificial Sequence: Synthetic oligonucleotide
  Sense strand starting at position 51 of SEQ ID NO: 1563687
acaagauaguguuucuuug

SEQ ID NO: 1824626 - RNA, 19 nt, Artificial Sequence
  Description of Artificial Sequence: Synthetic oligonucleotide
  Antisense strand to SEQ ID NO: 1824625
caaagaaacacuaucuugu

SEQ ID NO: 1824627 - RNA, 19 nt, Artificial Sequence
  Description of Artificial Sequence: Synthetic oligonucleotide
  Sense strand starting at position 55 of SEQ ID NO: 1563687
gauaguguuucuuugggaa

SEQ ID NO: 1824628 - RNA, 19 nt, Artificial Sequence
  Description of Artificial Sequence: Synthetic oligonucleotide
  Antisense strand to SEQ ID NO: 1824627
uucccaaagaaacacuauc

SEQ ID NO: 1824629 - RNA, 19 nt, Artificial Sequence
  Description of Artificial Sequence: Synthetic oligonucleotide
  Sense strand starting at position 218 of SEQ ID NO: 1563687
aagcaauuacuguaguaag

SEQ ID NO: 1824630 - RNA, 19 nt, Artificial Sequence
  Description of Artificial Sequence: Synthetic oligonucleotide
  Antisense strand to SEQ ID NO: 1824629
cuuacuacaguaauugcuu

SEQ ID NO: 1824631 - RNA, 19 nt, Artificial Sequence
  Description of Artificial Sequence: Synthetic oligonucleotide
  Sense strand starting at position 229 of SEQ ID NO: 1563687
guaguaagucacuauagua

SEQ ID NO: 1824632 - RNA, 19 nt, Artificial Sequence
  Description of Artificial Sequence: Synthetic oligonucleotide
  Antisense strand to SEQ ID NO: 1824631
uacuauagugacuuacuac

SEQ ID NO: 1824633 - RNA, 19 nt, Artificial Sequence
  Description of Artificial Sequence: Synthetic oligonucleotide
  Sense strand starting at position 280 of SEQ ID NO: 1563687
aguguuguucaguauggga

SEQ ID NO: 1824634 - RNA, 19 nt, Artificial Sequence
  Description of Artificial Sequence: Synthetic oligonucleotide
  Antisense strand to SEQ ID NO: 1824633
ucccauacugaacaacacu

SEQ ID NO: 1824635 - RNA, 19 nt, Artificial Sequence
  Description of Artificial Sequence: Synthetic oligonucleotide
  Sense strand starting at position 327 of SEQ ID NO: 1563687
uuugaaauauggcuaguuu

SEQ ID NO: 1824636 - RNA, 19 nt, Artificial Sequence
  Description of Artificial Sequence: Synthetic oligonucleotide
  Antisense strand to SEQ ID NO: 1824635
aaacuagccauauuucaaa

SEQ ID NO: 1824637 - RNA, 19 nt, Artificial Sequence
  Description of Artificial Sequence: Synthetic oligonucleotide
  Sense strand starting at position 328 of SEQ ID NO: 1563687
uugaaauauggcuaguuua

SEQ ID NO: 1824638 - RNA, 19 nt, Artificial Sequence
  Description of Artificial Sequence: Synthetic oligonucleotide
  Antisense strand to SEQ ID NO: 1824637
uaaacuagccauauuucaa

SEQ ID NO: 1824639 - RNA, 19 nt, Artificial Sequence
  Description of Artificial Sequence: Synthetic oligonucleotide
  Sense strand starting at position 338 of SEQ ID NO: 1563687
gcuaguuuaaauugagaug

SEQ ID NO: 1824640 - RNA, 19 nt, Artificial Sequence
  Description of Artificial Sequence: Synthetic oligonucleotide
  Antisense strand to SEQ ID NO: 1824639
caucucaauuuaaacuagc

SEQ ID NO: 1824641 - RNA, 19 nt, Artificial Sequence
  Description of Artificial Sequence: Synthetic oligonucleotide
  Sense strand starting at position 452 of SEQ ID NO: 1563687
auugguuacguugggauaa

SEQ ID NO: 1824642 - RNA, 19 nt, Artificial Sequence
  Description of Artificial Sequence: Synthetic oligonucleotide
  Antisense strand to SEQ ID NO: 1824641
uuaucccaacguaaccaau

SEQ ID NO: 1824643 - RNA, 19 nt, Artificial Sequence
  Description of Artificial Sequence: Synthetic oligonucleotide
  Sense strand starting at position 513 of SEQ ID NO: 1563687
cgguuacuggaacauguaa

SEQ ID NO: 1824644 - RNA, 19 nt, Artificial Sequence
  Description of Artificial Sequence: Synthetic oligonucleotide
  Antisense strand to SEQ ID NO: 1824643
uuacauguuccaguaaccg

SEQ ID NO: 1824645 - RNA, 19 nt, Artificial Sequence
  Description of Artificial Sequence: Synthetic oligonucleotide
  Sense strand starting at position 625 of SEQ ID NO: 1563687
guacauuucuugcuuuaag

SEQ ID NO: 1824646 - RNA, 19 nt, Artificial Sequence
  Description of Artificial Sequence: Synthetic oligonucleotide
  Antisense strand to SEQ ID NO: 1824645
cuuaaagcaagaaauguac

SEQ ID NO: 1824647 - RNA, 19 nt, Artificial Sequence
  Description of Artificial Sequence: Synthetic oligonucleotide
  Sense strand starting at position 716 of SEQ ID NO: 1563687
ggaaacugauuauagaaga

SEQ ID NO: 1824648 - RNA, 19 nt, Artificial Sequence
  Description of Artificial Sequence: Synthetic oligonucleotide
  Antisense strand to SEQ ID NO: 1824647
ucuucuauaaucaguuucc

SEQ ID NO: 1824649 - RNA, 19 nt, Artificial Sequence
  Description of Artificial Sequence: Synthetic oligonucleotide
  Sense strand starting at position 793 of SEQ ID NO: 1563687
ggucaauugccugaagcaa

SEQ ID NO: 1824650 - RNA, 19 nt, Artificial Sequence
  Description of Artificial Sequence: Synthetic oligonucleotide
  Antisense strand to SEQ ID NO: 1824649
uugcuucaggcaauugacc

SEQ ID NO: 1824651 - RNA, 19 nt, Artificial Sequence
  Description of Artificial Sequence: Synthetic oligonucleotide
  Sense strand starting at position 912 of SEQ ID NO: 1563687
aaacucugagcuggagaua

SEQ ID NO: 1824652 - RNA, 19 nt, Artificial Sequence
  Description of Artificial Sequence: Synthetic oligonucleotide
  Antisense strand to SEQ ID NO: 1824651
uaucuccagcucagaguuu

SEQ ID NO: 1824653 - RNA, 19 nt, Artificial Sequence
  Description of Artificial Sequence: Synthetic oligonucleotide
  Sense strand starting at position 933 of SEQ ID NO: 1563687
gacgaugugacaggaacuu

SEQ ID NO: 1824654 - RNA, 19 nt, Artificial Sequence
  Description of Artificial Sequence: Synthetic oligonucleotide
  Antisense strand to SEQ ID NO: 1824653
aaguuccugucacaucguc

SEQ ID NO: 1824655 - RNA, 19 nt, Artificial Sequence
  Description of Artificial Sequence: Synthetic oligonucleotide
  Sense strand starting at position 972 of SEQ ID NO: 1563687
acaauuccuggccgagaga

SEQ ID NO: 1824656 - RNA, 19 nt, Artificial Sequence
  Description of Artificial Sequence: Synthetic oligonucleotide
  Antisense strand to SEQ ID NO: 1824655
ucucucggccaggaauugu

SEQ ID NO: 1824657 - RNA, 19 nt, Artificial Sequence
  Description of Artificial Sequence: Synthetic oligonucleotide
  Sense strand starting at position 973 of SEQ ID NO: 1563687
caauuccuggccgagagaa

SEQ ID NO: 1824658 - RNA, 19 nt, Artificial Sequence
  Description of Artificial Sequence: Synthetic oligonucleotide
  Antisense strand to SEQ ID NO: 1824657
uucucucggccaggaauug

SEQ ID NO: 1824659 - RNA, 19 nt, Artificial Sequence
  Description of Artificial Sequence: Synthetic oligonucleotide
  Sense strand starting at position 1063 of SEQ ID NO: 1563687
ugccaauaggcauagauga

SEQ ID NO: 1824660 - RNA, 19 nt, Artificial Sequence
  Description of Artificial Sequence: Synthetic oligonucleotide
  Antisense strand to SEQ ID NO: 1824659
ucaucuaugccuauuggca

SEQ ID NO: 1824661 - RNA, 19 nt, Artificial Sequence
  Description of Artificial Sequence: Synthetic oligonucleotide
  Sense strand starting at position 1493 of SEQ ID NO: 1563687
ggaggaagccaaugaggua

SEQ ID NO: 1824662 - RNA, 19 nt, Artificial Sequence
  Description of Artificial Sequence: Synthetic oligonucleotide
  Antisense strand to SEQ ID NO: 1824661
uaccucauuggcuuccucc

SEQ ID NO: 1824663 - RNA, 19 nt, Artificial Sequence
  Description of Artificial Sequence: Synthetic oligonucleotide
  Sense strand starting at position 1721 of SEQ ID NO: 1563687
cugugaguaggccagagau

SEQ ID NO: 1824664 - RNA, 19 nt, Artificial Sequence
  Description of Artificial Sequence: Synthetic oligonucleotide
  Antisense strand to SEQ ID NO: 1824663
aucucuggccuacucacag

SEQ ID NO: 1824665 - RNA, 19 nt, Artificial Sequence
  Description of Artificial Sequence: Synthetic oligonucleotide
  Sense strand starting at position 1944 of SEQ ID NO: 1563687
augcuaucucuccagcuga

SEQ ID NO: 1824666 - RNA, 19 nt, Artificial Sequence
  Description of Artificial Sequence: Synthetic oligonucleotide
  Antisense strand to SEQ ID NO: 1824665
ucagcuggagagauagcau

SEQ ID NO: 1824667 - RNA, 19 nt, Artificial Sequence
  Description of Artificial Sequence: Synthetic oligonucleotide
  Sense strand starting at position 2394 of SEQ ID NO: 1563687
cgaguaccagcuuaaauaa

SEQ ID NO: 1824668 - RNA, 19 nt, Artificial Sequence
  Description of Artificial Sequence: Synthetic oligonucleotide
  Antisense strand to SEQ ID NO: 1824667
uuauuuaagcugguacucg

SEQ ID NO: 1824669 - RNA, 19 nt, Artificial Sequence
  Description of Artificial Sequence: Synthetic oligonucleotide
  Sense strand starting at position 2487 of SEQ ID NO: 1563687
ugcucauaaucaguugaag

SEQ ID NO: 1824670 - RNA, 19 nt, Artificial Sequence
  Description of Artificial Sequence: Synthetic oligonucleotide
  Antisense strand to SEQ ID NO: 1824669
cuucaacugauuaugagca

SEQ ID NO: 1824671 - RNA, 19 nt, Artificial Sequence
  Description of Artificial Sequence: Synthetic oligonucleotide
  Sense strand starting at position 2593 of SEQ ID NO: 1563687
gcuuccuagcgccucaaau

SEQ ID NO: 1824672 - RNA, 19 nt, Artificial Sequence
  Description of Artificial Sequence: Synthetic oligonucleotide
  Antisense strand to SEQ ID NO: 1824671
auuugaggcgcuaggaagc

SEQ ID NO: 1824673 - RNA, 19 nt, Artificial Sequence
  Description of Artificial Sequence: Synthetic oligonucleotide
  Sense strand starting at position 2646 of SEQ ID NO: 1563687
guuucucaucccuaggauc

SEQ ID NO: 1824674 - RNA, 19 nt, Artificial Sequence
  Description of Artificial Sequence: Synthetic oligonucleotide
  Antisense strand to SEQ ID NO: 1824673
gauccuagggaugagaaac

SEQ ID NO: 1824675 - RNA, 19 nt, Artificial Sequence
  Description of Artificial Sequence: Synthetic oligonucleotide
  Sense strand starting at position 2748 of SEQ ID NO: 1563687
cgcugcugucucucaagua

SEQ ID NO: 1824676 - RNA, 19 nt, Artificial Sequence
  Description of Artificial Sequence: Synthetic oligonucleotide
  Antisense strand to SEQ ID NO: 1824675
uacuugagagacagcagcg

SEQ ID NO: 1824677 - RNA, 19 nt, Artificial Sequence
  Description of Artificial Sequence: Synthetic oligonucleotide
  Sense strand starting at position 2755 of SEQ ID NO: 1563687
gucucucaaguauacuaau

SEQ ID NO: 1824678 - RNA, 19 nt, Artificial Sequence
  Description of Artificial Sequence: Synthetic oligonucleotide
  Antisense strand to SEQ ID NO: 1824677
auuaguauacuugagagac

SEQ ID NO: 1824679 - RNA, 19 nt, Artificial Sequence
  Description of Artificial Sequence: Synthetic oligonucleotide
  Sense strand starting at position 2801 of SEQ ID NO: 1563687
ccaggucuggucagugagu

SEQ ID NO: 1824680 - RNA, 19 nt, Artificial Sequence
  Description of Artificial Sequence: Synthetic oligonucleotide
  Antisense strand to SEQ ID NO: 1824679
acucacugaccagaccugg

SEQ ID NO: 1824681 - RNA, 19 nt, Artificial Sequence
  Description of Artificial Sequence: Synthetic oligonucleotide
  Sense strand starting at position 2862 of SEQ ID NO: 1563687
guaucucugcgggaggaga

SEQ ID NO: 1824682 - RNA, 19 nt, Artificial Sequence
  Description of Artificial Sequence: Synthetic oligonucleotide
  Antisense strand to SEQ ID NO: 1824681
ucuccucccgcagagauac

SEQ ID NO: 1824683 - RNA, 19 nt, Artificial Sequence
  Description of Artificial Sequence: Synthetic oligonucleotide
  Sense strand starting at position 2917 of SEQ ID NO: 1563687
gauguuuggcuauggaauu

SEQ ID NO: 1824684 - RNA, 19 nt, Artificial Sequence
  Description of Artificial Sequence: Synthetic oligonucleotide
  Antisense strand to SEQ ID NO: 1824683
aauuccauagccaaacauc

SEQ ID NO: 1824685 - RNA, 19 nt, Artificial Sequence
  Description of Artificial Sequence: Synthetic oligonucleotide
  Sense strand starting at position 3069 of SEQ ID NO: 1563687
guauccauuugcuugggua

SEQ ID NO: 1824686 - RNA, 19 nt, Artificial Sequence
  Description of Artificial Sequence: Synthetic oligonucleotide
  Antisense strand to SEQ ID NO: 1824685
uacccaagcaaauggauac

SEQ ID NO: 1824687 - RNA, 19 nt, Artificial Sequence
  Description of Artificial Sequence: Synthetic oligonucleotide
  Sense strand starting at position 3073 of SEQ ID NO: 1563687
ccauuugcuuggguacauu

SEQ ID NO: 1824688 - RNA, 19 nt, Artificial Sequence
  Description of Artificial Sequence: Synthetic oligonucleotide
  Antisense strand to SEQ ID NO: 1824687
aauguacccaagcaaaugg

SEQ ID NO: 1824689 - RNA, 19 nt, Artificial Sequence
  Description of Artificial Sequence: Synthetic oligonucleotide
  Sense strand starting at position 3207 of SEQ ID NO: 1563687
uaguguuugaagugaggga

SEQ ID NO: 1824690 - RNA, 19 nt, Artificial Sequence
  Description of Artificial Sequence: Synthetic oligonucleotide
  Antisense strand to SEQ ID NO: 1824689
ucccucacuucaaacacua

SEQ ID NO: 1824691 - RNA, 19 nt, Artificial Sequence
  Description of Artificial Sequence: Synthetic oligonucleotide
  Sense strand starting at position 3385 of SEQ ID NO: 1563687
ugguauguccauuaggaga

SEQ ID NO: 1824692 - RNA, 19 nt, Artificial Sequence
  Description of Artificial Sequence: Synthetic oligonucleotide
  Antisense strand to SEQ ID NO: 1824691
ucuccuaauggacauacca

SEQ ID NO: 1824693 - RNA, 19 nt, Artificial Sequence
  Description of Artificial Sequence: Synthetic oligonucleotide
  Sense strand starting at position 3396 of SEQ ID NO: 1563687
uuaggagauugauuccagu

SEQ ID NO: 1824694 - RNA, 19 nt, Artificial Sequence
  Description of Artificial Sequence: Synthetic oligonucleotide
  Antisense strand to SEQ ID NO: 1824693
acuggaaucaaucuccuaa

SEQ ID NO: 1824695 - RNA, 19 nt, Artificial Sequence
  Description of Artificial Sequence: Synthetic oligonucleotide
  Sense strand starting at position 3405 of SEQ ID NO: 1563687
ugauuccaguugcuuagaa

SEQ ID NO: 1824696 - RNA, 19 nt, Artificial Sequence
  Description of Artificial Sequence: Synthetic oligonucleotide
  Antisense strand to SEQ ID NO: 1824695
uucuaagcaacuggaauca

SEQ ID NO: 1824697 - RNA, 19 nt, Artificial Sequence
  Description of Artificial Sequence: Synthetic oligonucleotide
  Sense strand starting at position 3518 of SEQ ID NO: 1563687
caaacuugagaguguauca

SEQ ID NO: 1824698 - RNA, 19 nt, Artificial Sequence
  Description of Artificial Sequence: Synthetic oligonucleotide
  Antisense strand to SEQ ID NO: 1824697
ugauacacucucaaguuug

SEQ ID NO: 1824699 - RNA, 19 nt, Artificial Sequence
  Description of Artificial Sequence: Synthetic oligonucleotide
  Sense strand starting at position 3968 of SEQ ID NO: 1563687
ucgaacaaguucccagaua

SEQ ID NO: 1824700 - RNA, 19 nt, Artificial Sequence
  Description of Artificial Sequence: Synthetic oligonucleotide
  Antisense strand to SEQ ID NO: 1824699
uaucugggaacuuguucga

SEQ ID NO: 1824701 - RNA, 19 nt, Artificial Sequence
  Description of Artificial Sequence: Synthetic oligonucleotide
  Sense strand starting at position 4 of SEQ ID NO: 1563688
agucacaugccaggaaaua

SEQ ID NO: 1824702 - RNA, 19 nt, Artificial Sequence
  Description of Artificial Sequence: Synthetic oligonucleotide
  Antisense strand to SEQ ID NO: 1824701
uauuuccuggcaugugacu

SEQ ID NO: 1824703 - RNA, 19 nt, Artificial Sequence
  Description of Artificial Sequence: Synthetic oligonucleotide
  Sense strand starting at position 5 of SEQ ID NO: 1563688
gucacaugccaggaaauau

SEQ ID NO: 1824704 - RNA, 19 nt, Artificial Sequence
  Description of Artificial Sequence: Synthetic oligonucleotide
  Antisense strand to SEQ ID NO: 1824703
auauuuccuggcaugugac

SEQ ID NO: 1824705 - RNA, 19 nt, Artificial Sequence
  Description of Artificial Sequence: Synthetic oligonucleotide
  Sense strand starting at position 117 of SEQ ID NO: 1563688
uuuaauuaagcccaggagu

SEQ ID NO: 1824706 - RNA, 19 nt, Artificial Sequence
  Description of Artificial Sequence: Synthetic oligonucleotide
  Antisense strand to SEQ ID NO: 1824705
acuccugggcuuaauuaaa

SEQ ID NO: 1824707 - RNA, 19 nt, Artificial Sequence
  Description of Artificial Sequence: Synthetic oligonucleotide
  Sense strand starting at position 119 of SEQ ID NO: 1563688
uaauuaagcccaggaguug

SEQ ID NO: 1824708 - RNA, 19 nt, Artificial Sequence
  Description of Artificial Sequence: Synthetic oligonucleotide
  Antisense strand to SEQ ID NO: 1824707
caacuccugggcuuaauua

SEQ ID NO: 1824709 - RNA, 19 nt, Artificial Sequence
  Description of Artificial Sequence: Synthetic oligonucleotide
  Sense strand starting at position 499 of SEQ ID NO: 1563688
gagaauauauagugcacaa

SEQ ID NO: 1824710 - RNA, 19 nt, Artificial Sequence
  Description of Artificial Sequence: Synthetic oligonucleotide
  Antisense strand to SEQ ID NO: 1824709
uugugcacuauauauucuc

SEQ ID NO: 1824711 - RNA, 19 nt, Artificial Sequence
  Description of Artificial Sequence: Synthetic oligonucleotide
  Sense strand starting at position 590 of SEQ ID NO: 1563688
gagagaaguuaauuguuag

SEQ ID NO: 1824712 - RNA, 19 nt, Artificial Sequence
  Description of Artificial Sequence: Synthetic oligonucleotide
  Antisense strand to SEQ ID NO: 1824711
cuaacaauuaacuucucuc

SEQ ID NO: 1824713 - RNA, 19 nt, Artificial Sequence
  Description of Artificial Sequence: Synthetic oligonucleotide
  Sense strand starting at position 591 of SEQ ID NO: 1563688
agagaaguuaauuguuagu

SEQ ID NO: 1824714 - RNA, 19 nt, Artificial Sequence
  Description of Artificial Sequence: Synthetic oligonucleotide
  Antisense strand to SEQ ID NO: 1824713
acuaacaauuaacuucucu

SEQ ID NO: 1824715 - RNA, 19 nt, Artificial Sequence
  Description of Artificial Sequence: Synthetic oligonucleotide
  Sense strand starting at position 593 of SEQ ID NO: 1563688
agaaguuaauuguuagucu

SEQ ID NO: 1824716 - RNA, 19 nt, Artificial Sequence
  Description of Artificial Sequence: Synthetic oligonucleotide
  Antisense strand to SEQ ID NO: 1824715
agacuaacaauuaacuucu

SEQ ID NO: 1824717 - RNA, 19 nt, Artificial Sequence
  Description of Artificial Sequence: Synthetic oligonucleotide
  Sense strand starting at position 750 of SEQ ID NO: 1563688
ccgaccauguguuugcaaa

SEQ ID NO: 1824718 - RNA, 19 nt, Artificial Sequence
  Description of Artificial Sequence: Synthetic oligonucleotide
  Antisense strand to SEQ ID NO: 1824717
uuugcaaacacauggucgg

SEQ ID NO: 1824719 - RNA, 19 nt, Artificial Sequence
  Description of Artificial Sequence: Synthetic oligonucleotide
  Sense strand starting at position 2251 of SEQ ID NO: 1563688
uggacuagaucuuuccuau

SEQ ID NO: 1824720 - RNA, 19 nt, Artificial Sequence
  Description of Artificial Sequence: Synthetic oligonucleotide
  Antisense strand to SEQ ID NO: 1824719
auaggaaagaucuagucca

SEQ ID NO: 1824721 - RNA, 19 nt, Artificial Sequence
  Description of Artificial Sequence: Synthetic oligonucleotide
  Sense strand starting at position 2328 of SEQ ID NO: 1563688
ugugacugaucccuguaac

SEQ ID NO: 1824722 - RNA, 19 nt, Artificial Sequence
  Description of Artificial Sequence: Synthetic oligonucleotide
  Antisense strand to SEQ ID NO: 1824721
guuacagggaucagucaca

SEQ ID NO: 1824723 - RNA, 19 nt, Artificial Sequence
  Description of Artificial Sequence: Synthetic oligonucleotide
  Sense strand starting at position 2329 of SEQ ID NO: 1563688
gugacugaucccuguaacu

SEQ ID NO: 1824724 - RNA, 19 nt, Artificial Sequence
  Description of Artificial Sequence: Synthetic oligonucleotide
  Antisense strand to SEQ ID NO: 1824723
aguuacagggaucagucac

SEQ ID NO: 1824725 - RNA, 19 nt, Artificial Sequence
  Description of Artificial Sequence: Synthetic oligonucleotide
  Sense strand starting at position 2360 of SEQ ID NO: 1563688
aguagagaugguuguccaa

SEQ ID NO: 1824726 - RNA, 19 nt, Artificial Sequence
  Description of Artificial Sequence: Synthetic oligonucleotide
  Antisense strand to SEQ ID NO: 1824725
uuggacaaccaucucuacu

SEQ ID NO: 1824727 - RNA, 19 nt, Artificial Sequence
  Description of Artificial Sequence: Synthetic oligonucleotide
  Sense strand starting at position 2362 of SEQ ID NO: 1563688
uagagaugguuguccaauu

SEQ ID NO: 1824728 - RNA, 19 nt, Artificial Sequence
  Description of Artificial Sequence: Synthetic oligonucleotide
  Antisense strand to SEQ ID NO: 1824727
aauuggacaaccaucucua

SEQ ID NO: 1824729 - RNA, 19 nt, Artificial Sequence
  Description of Artificial Sequence: Synthetic oligonucleotide
  Sense strand starting at position 2363 of SEQ ID NO: 1563688
agagaugguuguccaauua

SEQ ID NO: 1824730 - RNA, 19 nt, Artificial Sequence
  Description of Artificial Sequence: Synthetic oligonucleotide
  Antisense strand to SEQ ID NO: 1824729
uaauuggacaaccaucucu

SEQ ID NO: 1824731 - RNA, 19 nt, Artificial Sequence
  Description of Artificial Sequence: Synthetic oligonucleotide
  Sense strand starting at position 2411 of SEQ ID NO: 1563688
uggauauaaucccacagag

SEQ ID NO: 1824732 - RNA, 19 nt, Artificial Sequence
  Description of Artificial Sequence: Synthetic oligonucleotide
  Antisense strand to SEQ ID NO: 1824731
cucugugggauuauaucca

SEQ ID NO: 1824733 - RNA, 19 nt, Artificial Sequence
  Description of Artificial Sequence: Synthetic oligonucleotide
  Sense strand starting at position 2465 of SEQ ID NO: 1563688
acagaucaauguuaaagaa

SEQ ID NO: 1824734 - RNA, 19 nt, Artificial Sequence
  Description of Artificial Sequence: Synthetic oligonucleotide
  Antisense strand to SEQ ID NO: 1824733
uucuuuaacauugaucugu

SEQ ID NO: 1824735 - RNA, 19 nt, Artificial Sequence
  Description of Artificial Sequence: Synthetic oligonucleotide
  Sense strand starting at position 2632 of SEQ ID NO: 1563688
aggccugugauccaagcua

SEQ ID NO: 1824736 - RNA, 19 nt, Artificial Sequence
  Description of Artificial Sequence: Synthetic oligonucleotide
  Antisense strand to SEQ ID NO: 1824735
uagcuuggaucacaggccu

SEQ ID NO: 1824737 - RNA, 19 nt, Artificial Sequence
  Description of Artificial Sequence: Synthetic oligonucleotide
  Sense strand starting at position 3093 of SEQ ID NO: 1563688
uuucuuaacugcguuaauu

SEQ ID NO: 1824738 - RNA, 19 nt, Artificial Sequence
  Description of Artificial Sequence: Synthetic oligonucleotide
  Antisense strand to SEQ ID NO: 1824737
aauuaacgcaguuaagaaa

SEQ ID NO: 1824739 - RNA, 19 nt, Artificial Sequence
  Description of Artificial Sequence: Synthetic oligonucleotide
  Sense strand starting at position 3155 of SEQ ID NO: 1563688
acauguaaguuuccaagua

SEQ ID NO: 1824740 - RNA, 19 nt, Artificial Sequence
  Description of Artificial Sequence: Synthetic oligonucleotide
  Antisense strand to SEQ ID NO: 1824739
uacuuggaaacuuacaugu

SEQ ID NO: 1824741 - RNA, 19 nt, Artificial Sequence
  Description of Artificial Sequence: Synthetic oligonucleotide
  Sense strand starting at position 3177 of SEQ ID NO: 1563688
uuguguuaaugauuacagu

SEQ ID NO: 1824742 - RNA, 19 nt, Artificial Sequence
  Description of Artificial Sequence: Synthetic oligonucleotide
  Antisense strand to SEQ ID NO: 1824741
acuguaaucauuaacacaa

SEQ ID NO: 1824743 - RNA, 19 nt, Artificial Sequence
  Description of Artificial Sequence: Synthetic oligonucleotide
  Sense strand starting at position 3178 of SEQ ID NO: 1563688
uguguuaaugauuacagua

SEQ ID NO: 1824744 - RNA, 19 nt, Artificial Sequence
  Description of Artificial Sequence: Synthetic oligonucleotide
  Antisense strand to SEQ ID NO: 1824743
uacuguaaucauuaacaca

SEQ ID NO: 1824745 - RNA, 19 nt, Artificial Sequence
  Description of Artificial Sequence: Synthetic oligonucleotide
  Sense strand starting at position 3245 of SEQ ID NO: 1563688
gugcuccuucuagauuaug

SEQ ID NO: 1824746 - RNA, 19 nt, Artificial Sequence
  Description of Artificial Sequence: Synthetic oligonucleotide
  Antisense strand to SEQ ID NO: 1824745
cauaaucuagaaggagcac

SEQ ID NO: 1824747 - RNA, 19 nt, Artificial Sequence
  Description of Artificial Sequence: Synthetic oligonucleotide
  Sense strand starting at position 3253 of SEQ ID NO: 1563688
ucuagauuauggccuuuau

SEQ ID NO: 1824748 - RNA, 19 nt, Artificial Sequence
  Description of Artificial Sequence: Synthetic oligonucleotide
  Antisense strand to SEQ ID NO: 1824747
auaaaggccauaaucuaga

SEQ ID NO: 1824749 - RNA, 19 nt, Artificial Sequence
  Description of Artificial Sequence: Synthetic oligonucleotide
  Sense strand starting at position 3337 of SEQ ID NO: 1563688
ggcucuuugugaccacaca

SEQ ID NO: 1824750 - RNA, 19 nt, Artificial Sequence
  Description of Artificial Sequence: Synthetic oligonucleotide
  Antisense strand to SEQ ID NO: 1824749
uguguggucacaaagagcc

SEQ ID NO: 1824751 - RNA, 19 nt, Artificial Sequence
  Description of Artificial Sequence: Synthetic oligonucleotide
  Sense strand starting at position 3338 of SEQ ID NO: 1563688
gcucuuugugaccacacaa

SEQ ID NO: 1824752 - RNA, 19 nt, Artificial Sequence
  Description of Artificial Sequence: Synthetic oligonucleotide
  Antisense strand to SEQ ID NO: 1824751
uuguguggucacaaagagc

SEQ ID NO: 1824753 - RNA, 19 nt, Artificial Sequence
  Description of Artificial Sequence: Synthetic oligonucleotide
  Sense strand starting at position 3496 of SEQ ID NO: 1563688
gcaugaucugugccgucuu

SEQ ID NO: 1824754 - RNA, 19 nt, Artificial Sequence
  Description of Artificial Sequence: Synthetic oligonucleotide
  Antisense strand to SEQ ID NO: 1824753
aagacggcacagaucaugc

SEQ ID NO: 1824755 - RNA, 19 nt, Artificial Sequence
  Description of Artificial Sequence: Synthetic oligonucleotide
  Sense strand starting at position 3507 of SEQ ID NO: 1563688
gccgucuuccucuagggau

SEQ ID NO: 1824756 - RNA, 19 nt, Artificial Sequence
  Description of Artificial Sequence: Synthetic oligonucleotide
  Antisense strand to SEQ ID NO: 1824755
aucccuagaggaagacggc

SEQ ID NO: 1824757 - RNA, 19 nt, Artificial Sequence
  Description of Artificial Sequence: Synthetic oligonucleotide
  Sense strand starting at position 3591 of SEQ ID NO: 1563688
agcggagccuuauuuaaca

SEQ ID NO: 1824758 - RNA, 19 nt, Artificial Sequence
  Description of Artificial Sequence: Synthetic oligonucleotide
  Antisense strand to SEQ ID NO: 1824757
uguuaaauaaggcuccgcu

SEQ ID NO: 1824759 - RNA, 19 nt, Artificial Sequence
  Description of Artificial Sequence: Synthetic oligonucleotide
  Sense strand starting at position 3645 of SEQ ID NO: 1563688
ccagaucuggcacgucuau

SEQ ID NO: 1824760 - RNA, 19 nt, Artificial Sequence
  Description of Artificial Sequence: Synthetic oligonucleotide
  Antisense strand to SEQ ID NO: 1824759
auagacgugccagaucugg

SEQ ID NO: 1824761 - RNA, 19 nt, Artificial Sequence
  Description of Artificial Sequence: Synthetic oligonucleotide
  Sense strand starting at position 3687 of SEQ ID NO: 1563688
gcugccuuccuagaaguca

SEQ ID NO: 1824762 - RNA, 19 nt, Artificial Sequence
  Description of Artificial Sequence: Synthetic oligonucleotide
  Antisense strand to SEQ ID NO: 1824761
ugacuucuaggaaggcagc

SEQ ID NO: 1824763 - RNA, 19 nt, Artificial Sequence
  Description of Artificial Sequence: Synthetic oligonucleotide
  Sense strand starting at position 3734 of SEQ ID NO: 1563688
acagcucugcuggauuaca

SEQ ID NO: 1824764 - RNA, 19 nt, Artificial Sequence
  Description of Artificial Sequence: Synthetic oligonucleotide
  Antisense strand to SEQ ID NO: 1824763
uguaauccagcagagcugu

SEQ ID NO: 1824765 - RNA, 19 nt, Artificial Sequence
  Description of Artificial Sequence: Synthetic oligonucleotide
  Sense strand starting at position 3883 of SEQ ID NO: 1563688
ucuggagguuaguguaaug

SEQ ID NO: 1824766 - RNA, 19 nt, Artificial Sequence
  Description of Artificial Sequence: Synthetic oligonucleotide
  Antisense strand to SEQ ID NO: 1824765
cauuacacuaaccuccaga

SEQ ID NO: 1824767 - RNA, 19 nt, Artificial Sequence
  Description of Artificial Sequence: Synthetic oligonucleotide
  Sense strand starting at position 3886 of SEQ ID NO: 1563688
ggagguuaguguaauggaa

SEQ ID NO: 1824768 - RNA, 19 nt, Artificial Sequence
  Description of Artificial Sequence: Synthetic oligonucleotide
  Antisense strand to SEQ ID NO: 1824767
uuccauuacacuaaccucc

SEQ ID NO: 1824769 - RNA, 19 nt, Artificial Sequence
  Description of Artificial Sequence: Synthetic oligonucleotide
  Sense strand starting at position 3888 of SEQ ID NO: 1563688
agguuaguguaauggaaag

SEQ ID NO: 1824770 - RNA, 19 nt, Artificial Sequence
  Description of Artificial Sequence: Synthetic oligonucleotide
  Antisense strand to SEQ ID NO: 1824769
cuuuccauuacacuaaccu

SEQ ID NO: 1824771 - RNA, 19 nt, Artificial Sequence
  Description of Artificial Sequence: Synthetic oligonucleotide
  Sense strand starting at position 3895 of SEQ ID NO: 1563688
uguaauggaaagugcuuua

SEQ ID NO: 1824772 - RNA, 19 nt, Artificial Sequence
  Description of Artificial Sequence: Synthetic oligonucleotide
  Antisense strand to SEQ ID NO: 1824771
uaaagcacuuuccauuaca

SEQ ID NO: 1824773 - RNA, 19 nt, Artificial Sequence
  Description of Artificial Sequence: Synthetic oligonucleotide
  Sense strand starting at position 3923 of SEQ ID NO: 1563688
aaugaagagugucuguaca

SEQ ID NO: 1824774 - RNA, 19 nt, Artificial Sequence
  Description of Artificial Sequence: Synthetic oligonucleotide
  Antisense strand to SEQ ID NO: 1824773
uguacagacacucuucauu

SEQ ID NO: 1824775 - RNA, 19 nt, Artificial Sequence
  Description of Artificial Sequence: Synthetic oligonucleotide
  Sense strand starting at position 3925 of SEQ ID NO: 1563688
ugaagagugucuguacauu

SEQ ID NO: 1824776 - RNA, 19 nt, Artificial Sequence
  Description of Artificial Sequence: Synthetic oligonucleotide
  Antisense strand to SEQ ID NO: 1824775
aauguacagacacucuuca

SEQ ID NO: 1824777 - RNA, 19 nt, Artificial Sequence
  Description of Artificial Sequence: Synthetic oligonucleotide
  Sense strand starting at position 3933 of SEQ ID NO: 1563688
gucuguacauuugccugaa

SEQ ID NO: 1824778 - RNA, 19 nt, Artificial Sequence
  Description of Artificial Sequence: Synthetic oligonucleotide
  Antisense strand to SEQ ID NO: 1824777
uucaggcaaauguacagac

SEQ ID NO: 1824779 - RNA, 19 nt, Artificial Sequence
  Description of Artificial Sequence: Synthetic oligonucleotide
  Sense strand starting at position 3936 of SEQ ID NO: 1563688
uguacauuugccugaaggu

SEQ ID NO: 1824780 - RNA, 19 nt, Artificial Sequence
  Description of Artificial Sequence: Synthetic oligonucleotide
  Antisense strand to SEQ ID NO: 1824779
accuucaggcaaauguaca

SEQ ID NO: 1824781 - RNA, 19 nt, Artificial Sequence
  Description of Artificial Sequence: Synthetic oligonucleotide
  Sense strand starting at position 608 of SEQ ID NO: 1563689
uccuccaaguaaucgauaa

SEQ ID NO: 1824782 - RNA, 19 nt, Artificial Sequence
  Description of Artificial Sequence: Synthetic oligonucleotide
  Antisense strand to SEQ ID NO: 1824781
uuaucgauuacuuggagga

SEQ ID NO: 1824783 - RNA, 19 nt, Artificial Sequence
  Description of Artificial Sequence: Synthetic oligonucleotide
  Sense strand starting at position 615 of SEQ ID NO: 1563689
aguaaucgauaacacuauu

SEQ ID NO: 1824784 - RNA, 19 nt, Artificial Sequence
  Description of Artificial Sequence: Synthetic oligonucleotide
  Antisense strand to SEQ ID NO: 1824783
aauaguguuaucgauuacu

SEQ ID NO: 1824785 - RNA, 19 nt, Artificial Sequence
  Description of Artificial Sequence: Synthetic oligonucleotide
  Sense strand starting at position 653 of SEQ ID NO: 1563689
caauauugacugugagcuu

SEQ ID NO: 1824786 - RNA, 19 nt, Artificial Sequence
  Description of Artificial Sequence: Synthetic oligonucleotide
  Antisense strand to SEQ ID NO: 1824785
aagcucacagucaauauug

SEQ ID NO: 1824787 - RNA, 19 nt, Artificial Sequence
  Description of Artificial Sequence: Synthetic oligonucleotide
  Sense strand starting at position 654 of SEQ ID NO: 1563689
aauauugacugugagcuuu

SEQ ID NO: 1824788 - RNA, 19 nt, Artificial Sequence
  Description of Artificial Sequence: Synthetic oligonucleotide
  Antisense strand to SEQ ID NO: 1824787
aaagcucacagucaauauu

SEQ ID NO: 1824789 - RNA, 19 nt, Artificial Sequence
  Description of Artificial Sequence: Synthetic oligonucleotide
  Sense strand starting at position 662 of SEQ ID NO: 1563689
cugugagcuuugcugacau

SEQ ID NO: 1824790 - RNA, 19 nt, Artificial Sequence
  Description of Artificial Sequence: Synthetic oligonucleotide
  Antisense strand to SEQ ID NO: 1824789
augucagcaaagcucacag

SEQ ID NO: 1824791 - RNA, 19 nt, Artificial Sequence
  Description of Artificial Sequence: Synthetic oligonucleotide
  Sense strand starting at position 805 of SEQ ID NO: 1563689
guggcaugcuuccacuaaa

SEQ ID NO: 1824792 - RNA, 19 nt, Artificial Sequence
  Description of Artificial Sequence: Synthetic oligonucleotide
  Antisense strand to SEQ ID NO: 1824791
uuuaguggaagcaugccac

SEQ ID NO: 1824793 - RNA, 19 nt, Artificial Sequence
  Description of Artificial Sequence: Synthetic oligonucleotide
  Sense strand starting at position 808 of SEQ ID NO: 1563689
gcaugcuuccacuaaaguu

SEQ ID NO: 1824794 - RNA, 19 nt, Artificial Sequence
  Description of Artificial Sequence: Synthetic oligonucleotide
  Antisense strand to SEQ ID NO: 1824793
aacuuuaguggaagcaugc

SEQ ID NO: 1824795 - RNA, 19 nt, Artificial Sequence
  Description of Artificial Sequence: Synthetic oligonucleotide
  Sense strand starting at position 845 of SEQ ID NO: 1563689
ggaagugucccugggagga

SEQ ID NO: 1824796 - RNA, 19 nt, Artificial Sequence
  Description of Artificial Sequence: Synthetic oligonucleotide
  Antisense strand to SEQ ID NO: 1824795
uccucccagggacacuucc

SEQ ID NO: 1824797 - RNA, 19 nt, Artificial Sequence
  Description of Artificial Sequence: Synthetic oligonucleotide
  Sense strand starting at position 859 of SEQ ID NO: 1563689
gaggauccauguucuccau

SEQ ID NO: 1824798 - RNA, 19 nt, Artificial Sequence
  Description of Artificial Sequence: Synthetic oligonucleotide
  Antisense strand to SEQ ID NO: 1824797
auggagaacauggauccuc

SEQ ID NO: 1824799 - RNA, 19 nt, Artificial Sequence
  Description of Artificial Sequence: Synthetic oligonucleotide
  Sense strand starting at position 865 of SEQ ID NO: 1563689
ccauguucuccauguacca

SEQ ID NO: 1824800 - RNA, 19 nt, Artificial Sequence
  Description of Artificial Sequence: Synthetic oligonucleotide
  Antisense strand to SEQ ID NO: 1824799
ugguacauggagaacaugg

SEQ ID NO: 1824801 - RNA, 19 nt, Artificial Sequence
  Description of Artificial Sequence: Synthetic oligonucleotide
  Sense strand starting at position 1020 of SEQ ID NO: 1563689
uagggacaaccauguuguu

SEQ ID NO: 1824802 - RNA, 19 nt, Artificial Sequence
  Description of Artificial Sequence: Synthetic oligonucleotide
  Antisense strand to SEQ ID NO: 1824801
aacaacaugguugucccua

SEQ ID NO: 1824803 - RNA, 19 nt, Artificial Sequence
  Description of Artificial Sequence: Synthetic oligonucleotide
  Sense strand starting at position 1049 of SEQ ID NO: 1563689
gcagguugucaugggauug

SEQ ID NO: 1824804 - RNA, 19 nt, Artificial Sequence
  Description of Artificial Sequence: Synthetic oligonucleotide
  Antisense strand to SEQ ID NO: 1824803
caaucccaugacaaccugc

SEQ ID NO: 1824805 - RNA, 19 nt, Artificial Sequence
  Description of Artificial Sequence: Synthetic oligonucleotide
  Sense strand starting at position 1054 of SEQ ID NO: 1563689
uugucaugggauuggucuu

SEQ ID NO: 1824806 - RNA, 19 nt, Artificial Sequence
  Description of Artificial Sequence: Synthetic oligonucleotide
  Antisense strand to SEQ ID NO: 1824805
aagaccaaucccaugacaa

SEQ ID NO: 1824807 - RNA, 19 nt, Artificial Sequence
  Description of Artificial Sequence: Synthetic oligonucleotide
  Sense strand starting at position 1186 of SEQ ID NO: 1563689
uucaguggugagugagcaa

SEQ ID NO: 1824808 - RNA, 19 nt, Artificial Sequence
  Description of Artificial Sequence: Synthetic oligonucleotide
  Antisense strand to SEQ ID NO: 1824807
uugcucacucaccacugaa

SEQ ID NO: 1824809 - RNA, 19 nt, Artificial Sequence
  Description of Artificial Sequence: Synthetic oligonucleotide
  Sense strand starting at position 1302 of SEQ ID NO: 1563689
ggagcagcuucucugucau

SEQ ID NO: 1824810 - RNA, 19 nt, Artificial Sequence
  Description of Artificial Sequence: Synthetic oligonucleotide
  Antisense strand to SEQ ID NO: 1824809
augacagagaagcugcucc

SEQ ID NO: 1824811 - RNA, 19 nt, Artificial Sequence
  Description of Artificial Sequence: Synthetic oligonucleotide
  Sense strand starting at position 1480 of SEQ ID NO: 1563689
aggcauugugaagggaaca

SEQ ID NO: 1824812 - RNA, 19 nt, Artificial Sequence
  Description of Artificial Sequence: Synthetic oligonucleotide
  Antisense strand to SEQ ID NO: 1824811
uguucccuucacaaugccu

SEQ ID NO: 1824813 - RNA, 19 nt, Artificial Sequence
  Description of Artificial Sequence: Synthetic oligonucleotide
  Sense strand starting at position 1571 of SEQ ID NO: 1563689
acgcaaccaugaugauaaa

SEQ ID NO: 1824814 - RNA, 19 nt, Artificial Sequence
  Description of Artificial Sequence: Synthetic oligonucleotide
  Antisense strand to SEQ ID NO: 1824813
uuuaucaucaugguugcgu

SEQ ID NO: 1824815 - RNA, 19 nt, Artificial Sequence
  Description of Artificial Sequence: Synthetic oligonucleotide
  Sense strand starting at position 1621 of SEQ ID NO: 1563689
uucccuuucucaugggaca

SEQ ID NO: 1824816 - RNA, 19 nt, Artificial Sequence
  Description of Artificial Sequence: Synthetic oligonucleotide
  Antisense strand to SEQ ID NO: 1824815
ugucccaugagaaagggaa

SEQ ID NO: 1824817 - RNA, 19 nt, Artificial Sequence
  Description of Artificial Sequence: Synthetic oligonucleotide
  Sense strand starting at position 1622 of SEQ ID NO: 1563689
ucccuuucucaugggacau

SEQ ID NO: 1824818 - RNA, 19 nt, Artificial Sequence
  Description of Artificial Sequence: Synthetic oligonucleotide
  Antisense strand to SEQ ID NO: 1824817
augucccaugagaaaggga

SEQ ID NO: 1824819 - RNA, 19 nt, Artificial Sequence
  Description of Artificial Sequence: Synthetic oligonucleotide
  Sense strand starting at position 1624 of SEQ ID NO: 1563689
ccuuucucaugggacauuu

SEQ ID NO: 1824820 - RNA, 19 nt, Artificial Sequence
  Description of Artificial Sequence: Synthetic oligonucleotide
  Antisense strand to SEQ ID NO: 1824819
aaaugucccaugagaaagg

SEQ ID NO: 1824821 - RNA, 19 nt, Artificial Sequence
  Description of Artificial Sequence: Synthetic oligonucleotide
  Sense strand starting at position 1758 of SEQ ID NO: 1563689
gauggagacucugaaguau

SEQ ID NO: 1824822 - RNA, 19 nt, Artificial Sequence
  Description of Artificial Sequence: Synthetic oligonucleotide
  Antisense strand to SEQ ID NO: 1824821
auacuucagagucuccauc

SEQ ID NO: 1824823 - RNA, 19 nt, Artificial Sequence
  Description of Artificial Sequence: Synthetic oligonucleotide
  Sense strand starting at position 1821 of SEQ ID NO: 1563689
gagggaugcugacugcuua

SEQ ID NO: 1824824 - RNA, 19 nt, Artificial Sequence
  Description of Artificial Sequence: Synthetic oligonucleotide
  Antisense strand to SEQ ID NO: 1824823
uaagcagucagcaucccuc

SEQ ID NO: 1824825 - RNA, 19 nt, Artificial Sequence
  Description of Artificial Sequence: Synthetic oligonucleotide
  Sense strand starting at position 1994 of SEQ ID NO: 1563689
gucuaaaucgcaggcauca

SEQ ID NO: 1824826 - RNA, 19 nt, Artificial Sequence
  Description of Artificial Sequence: Synthetic oligonucleotide
  Antisense strand to SEQ ID NO: 1824825
ugaugccugcgauuuagac

SEQ ID NO: 1824827 - RNA, 19 nt, Artificial Sequence
  Description of Artificial Sequence: Synthetic oligonucleotide
  Sense strand starting at position 2125 of SEQ ID NO: 1563689
gcaggugcuuccuccacua

SEQ ID NO: 1824828 - RNA, 19 nt, Artificial Sequence
  Description of Artificial Sequence: Synthetic oligonucleotide
  Antisense strand to SEQ ID NO: 1824827
uaguggaggaagcaccugc

SEQ ID NO: 1824829 - RNA, 19 nt, Artificial Sequence
  Description of Artificial Sequence: Synthetic oligonucleotide
  Sense strand starting at position 2127 of SEQ ID NO: 1563689
aggugcuuccuccacuaua

SEQ ID NO: 1824830 - RNA, 19 nt, Artificial Sequence
  Description of Artificial Sequence: Synthetic oligonucleotide
  Antisense strand to SEQ ID NO: 1824829
uauaguggaggaagcaccu

SEQ ID NO: 1824831 - RNA, 19 nt, Artificial Sequence
  Description of Artificial Sequence: Synthetic oligonucleotide
  Sense strand starting at position 2545 of SEQ ID NO: 1563689
gagagaggcuggccugaua

SEQ ID NO: 1824832 - RNA, 19 nt, Artificial Sequence
  Description of Artificial Sequence: Synthetic oligonucleotide
  Antisense strand to SEQ ID NO: 1824831
uaucaggccagccucucuc

SEQ ID NO: 1824833 - RNA, 19 nt, Artificial Sequence
  Description of Artificial Sequence: Synthetic oligonucleotide
  Sense strand starting at position 3019 of SEQ ID NO: 1563689
cugugcugccaggacaaua

SEQ ID NO: 1824834 - RNA, 19 nt, Artificial Sequence
  Description of Artificial Sequence: Synthetic oligonucleotide
  Antisense strand to SEQ ID NO: 1824833
uauuguccuggcagcacag

SEQ ID NO: 1824835 - RNA, 19 nt, Artificial Sequence
  Description of Artificial Sequence: Synthetic oligonucleotide
  Sense strand starting at position 3062 of SEQ ID NO: 1563689
gccuuucugagaugcucga

SEQ ID NO: 1824836 - RNA, 19 nt, Artificial Sequence
  Description of Artificial Sequence: Synthetic oligonucleotide
  Antisense strand to SEQ ID NO: 1824835
ucgagcaucucagaaaggc

SEQ ID NO: 1824837 - RNA, 19 nt, Artificial Sequence
  Description of Artificial Sequence: Synthetic oligonucleotide
  Sense strand starting at position 3066 of SEQ ID NO: 1563689
uucugagaugcucgagaga

SEQ ID NO: 1824838 - RNA, 19 nt, Artificial Sequence
  Description of Artificial Sequence: Synthetic oligonucleotide
  Antisense strand to SEQ ID NO: 1824837
ucucucgagcaucucagaa

SEQ ID NO: 1824839 - RNA, 19 nt, Artificial Sequence
  Description of Artificial Sequence: Synthetic oligonucleotide
  Sense strand starting at position 3182 of SEQ ID NO: 1563689
ggaucugggucgggacaaa

SEQ ID NO: 1824840 - RNA, 19 nt, Artificial Sequence
  Description of Artificial Sequence: Synthetic oligonucleotide
  Antisense strand to SEQ ID NO: 1824839
uuugucccgacccagaucc

SEQ ID NO: 1824841 - RNA, 19 nt, Artificial Sequence
  Description of Artificial Sequence: Synthetic oligonucleotide
  Sense strand starting at position 3194 of SEQ ID NO: 1563689
ggacaaagguccggcgaaa

SEQ ID NO: 1824842 - RNA, 19 nt, Artificial Sequence
  Description of Artificial Sequence: Synthetic oligonucleotide
  Antisense strand to SEQ ID NO: 1824841
uuucgccggaccuuugucc

SEQ ID NO: 1824843 - RNA, 19 nt, Artificial Sequence
  Description of Artificial Sequence: Synthetic oligonucleotide
  Sense strand starting at position 3381 of SEQ ID NO: 1563689
ggauaucuccugugccauc

SEQ ID NO: 1824844 - RNA, 19 nt, Artificial Sequence
  Description of Artificial Sequence: Synthetic oligonucleotide
  Antisense strand to SEQ ID NO: 1824843
gauggcacaggagauaucc

SEQ ID NO: 1824845 - RNA, 19 nt, Artificial Sequence
  Description of Artificial Sequence: Synthetic oligonucleotide
  Sense strand starting at position 3483 of SEQ ID NO: 1563689
acgcuugguaggcagagau

SEQ ID NO: 1824846 - RNA, 19 nt, Artificial Sequence
  Description of Artificial Sequence: Synthetic oligonucleotide
  Antisense strand to SEQ ID NO: 1824845
aucucugccuaccaagcgu

SEQ ID NO: 1824847 - RNA, 19 nt, Artificial Sequence
  Description of Artificial Sequence: Synthetic oligonucleotide
  Sense strand starting at position 3535 of SEQ ID NO: 1563689
augauuaaauugggaccaa

SEQ ID NO: 1824848 - RNA, 19 nt, Artificial Sequence
  Description of Artificial Sequence: Synthetic oligonucleotide
  Antisense strand to SEQ ID NO: 1824847
uuggucccaauuuaaucau

SEQ ID NO: 1824849 - RNA, 19 nt, Artificial Sequence
  Description of Artificial Sequence: Synthetic oligonucleotide
  Sense strand starting at position 3536 of SEQ ID NO: 1563689
ugauuaaauugggaccaaa

SEQ ID NO: 1824850 - RNA, 19 nt, Artificial Sequence
  Description of Artificial Sequence: Synthetic oligonucleotide
  Antisense strand to SEQ ID NO: 1824849
uuuggucccaauuuaauca

SEQ ID NO: 1824851 - RNA, 19 nt, Artificial Sequence
  Description of Artificial Sequence: Synthetic oligonucleotide
  Sense strand starting at position 3711 of SEQ ID NO: 1563689
ccgggugacucagaccuau

SEQ ID NO: 1824852 - RNA, 19 nt, Artificial Sequence
  Description of Artificial Sequence: Synthetic oligonucleotide
  Antisense strand to SEQ ID NO: 1824851
auaggucugagucacccgg

SEQ ID NO: 1824853 - RNA, 19 nt, Artificial Sequence
  Description of Artificial Sequence: Synthetic oligonucleotide
  Sense strand starting at position 3730 of SEQ ID NO: 1563689
gcucucugcccuuaggaaa

SEQ ID NO: 1824854 - RNA, 19 nt, Artificial Sequence
  Description of Artificial Sequence: Synthetic oligonucleotide
  Antisense strand to SEQ ID NO: 1824853
uuuccuaagggcagagagc

SEQ ID NO: 1824855 - RNA, 19 nt, Artificial Sequence
  Description of Artificial Sequence: Synthetic oligonucleotide
  Sense strand starting at position 3846 of SEQ ID NO: 1563689
aauacuaaucuaggagguu

SEQ ID NO: 1824856 - RNA, 19 nt, Artificial Sequence
  Description of Artificial Sequence: Synthetic oligonucleotide
  Antisense strand to SEQ ID NO: 1824855
aaccuccuagauuaguauu

SEQ ID NO: 1824857 - RNA, 19 nt, Artificial Sequence
  Description of Artificial Sequence: Synthetic oligonucleotide
  Sense strand starting at position 3847 of SEQ ID NO: 1563689
auacuaaucuaggagguuu

SEQ ID NO: 1824858 - RNA, 19 nt, Artificial Sequence
  Description of Artificial Sequence: Synthetic oligonucleotide
  Antisense strand to SEQ ID NO: 1824857
aaaccuccuagauuaguau

SEQ ID NO: 1824859 - RNA, 19 nt, Artificial Sequence
  Description of Artificial Sequence: Synthetic oligonucleotide
  Sense strand starting at position 3980 of SEQ ID NO: 1563689
ccggguguaguggaucaua

SEQ ID NO: 1824860 - RNA, 19 nt, Artificial Sequence
  Description of Artificial Sequence: Synthetic oligonucleotide
  Antisense strand to SEQ ID NO: 1824859
uaugauccacuacacccgg

SEQ ID NO: 1824861 - RNA, 19 nt, Artificial Sequence
  Description of Artificial Sequence: Synthetic oligonucleotide
  Sense strand starting at position 107 of SEQ ID NO: 1563690
guccauacaucuccagaag

SEQ ID NO: 1824862 - RNA, 19 nt, Artificial Sequence
  Description of Artificial Sequence: Synthetic oligonucleotide
  Antisense strand to SEQ ID NO: 1824861
cuucuggagauguauggac

SEQ ID NO: 1824863 - RNA, 19 nt, Artificial Sequence
  Description of Artificial Sequence: Synthetic oligonucleotide
  Sense strand starting at position 197 of SEQ ID NO: 1563690
ccaauugagucaccuugua

SEQ ID NO: 1824864 - RNA, 19 nt, Artificial Sequence
  Description of Artificial Sequence: Synthetic oligonucleotide
  Antisense strand to SEQ ID NO: 1824863
uacaaggugacucaauugg

SEQ ID NO: 1824865 - RNA, 19 nt, Artificial Sequence
  Description of Artificial Sequence: Synthetic oligonucleotide
  Sense strand starting at position 211 of SEQ ID NO: 1563690
uuguauggacuuugacaaa

SEQ ID NO: 1824866 - RNA, 19 nt, Artificial Sequence
  Description of Artificial Sequence: Synthetic oligonucleotide
  Antisense strand to SEQ ID NO: 1824865
uuugucaaaguccauacaa

SEQ ID NO: 1824867 - RNA, 19 nt, Artificial Sequence
  Description of Artificial Sequence: Synthetic oligonucleotide
  Sense strand starting at position 230 of SEQ ID NO: 1563690
cuaccuguccuagguagau

SEQ ID NO: 1824868 - RNA, 19 nt, Artificial Sequence
  Description of Artificial Sequence: Synthetic oligonucleotide
  Antisense strand to SEQ ID NO: 1824867
aucuaccuaggacagguag

SEQ ID NO: 1824869 - RNA, 19 nt, Artificial Sequence
  Description of Artificial Sequence: Synthetic oligonucleotide
  Sense strand starting at position 350 of SEQ ID NO: 1563690
ugugaacaggugugacaaa

SEQ ID NO: 1824870 - RNA, 19 nt, Artificial Sequence
  Description of Artificial Sequence: Synthetic oligonucleotide
  Antisense strand to SEQ ID NO: 1824869
uuugucacaccuguucaca

SEQ ID NO: 1824871 - RNA, 19 nt, Artificial Sequence
  Description of Artificial Sequence: Synthetic oligonucleotide
  Sense strand starting at position 357 of SEQ ID NO: 1563690
aggugugacaaaugauguu

SEQ ID NO: 1824872 - RNA, 19 nt, Artificial Sequence
  Description of Artificial Sequence: Synthetic oligonucleotide
  Antisense strand to SEQ ID NO: 1824871
aacaucauuugucacaccu

SEQ ID NO: 1824873 - RNA, 19 nt, Artificial Sequence
  Description of Artificial Sequence: Synthetic oligonucleotide
  Sense strand starting at position 423 of SEQ ID NO: 1563690
ucugaagaguaaucacacu

SEQ ID NO: 1824874 - RNA, 19 nt, Artificial Sequence
  Description of Artificial Sequence: Synthetic oligonucleotide
  Antisense strand to SEQ ID NO: 1824873
agugugauuacucuucaga

SEQ ID NO: 1824875 - RNA, 19 nt, Artificial Sequence
  Description of Artificial Sequence: Synthetic oligonucleotide
  Sense strand starting at position 473 of SEQ ID NO: 1563690
uucuuuacacaggguaaua

SEQ ID NO: 1824876 - RNA, 19 nt, Artificial Sequence
  Description of Artificial Sequence: Synthetic oligonucleotide
  Antisense strand to SEQ ID NO: 1824875
uauuacccuguguaaagaa

SEQ ID NO: 1824877 - RNA, 19 nt, Artificial Sequence
  Description of Artificial Sequence: Synthetic oligonucleotide
  Sense strand starting at position 537 of SEQ ID NO: 1563690
uguaaacugugauuacuaa

SEQ ID NO: 1824878 - RNA, 19 nt, Artificial Sequence
  Description of Artificial Sequence: Synthetic oligonucleotide
  Antisense strand to SEQ ID NO: 1824877
uuaguaaucacaguuuaca

SEQ ID NO: 1824879 - RNA, 19 nt, Artificial Sequence
  Description of Artificial Sequence: Synthetic oligonucleotide
  Sense strand starting at position 538 of SEQ ID NO: 1563690
guaaacugugauuacuaau

SEQ ID NO: 1824880 - RNA, 19 nt, Artificial Sequence
  Description of Artificial Sequence: Synthetic oligonucleotide
  Antisense strand to SEQ ID NO: 1824879
auuaguaaucacaguuuac

SEQ ID NO: 1824881 - RNA, 19 nt, Artificial Sequence
  Description of Artificial Sequence: Synthetic oligonucleotide
  Sense strand starting at position 681 of SEQ ID NO: 1563690
gacuacaguugagugcaua

SEQ ID NO: 1824882 - RNA, 19 nt, Artificial Sequence
  Description of Artificial Sequence: Synthetic oligonucleotide
  Antisense strand to SEQ ID NO: 1824881
uaugcacucaacuguaguc

SEQ ID NO: 1824883 - RNA, 19 nt, Artificial Sequence
  Description of Artificial Sequence: Synthetic oligonucleotide
  Sense strand starting at position 692 of SEQ ID NO: 1563690
agugcauauguuuauagga

SEQ ID NO: 1824884 - RNA, 19 nt, Artificial Sequence
  Description of Artificial Sequence: Synthetic oligonucleotide
  Antisense strand to SEQ ID NO: 1824883
uccuauaaacauaugcacu

SEQ ID NO: 1824885 - RNA, 19 nt, Artificial Sequence
  Description of Artificial Sequence: Synthetic oligonucleotide
  Sense strand starting at position 699 of SEQ ID NO: 1563690
auguuuauaggaugucaca

SEQ ID NO: 1824886 - RNA, 19 nt, Artificial Sequence
  Description of Artificial Sequence: Synthetic oligonucleotide
  Antisense strand to SEQ ID NO: 1824885
ugugacauccuauaaacau

SEQ ID NO: 1824887 - RNA, 19 nt, Artificial Sequence
  Description of Artificial Sequence: Synthetic oligonucleotide
  Sense strand starting at position 2101 of SEQ ID NO: 1563690
acaucugucugagucucua

SEQ ID NO: 1824888 - RNA, 19 nt, Artificial Sequence
  Description of Artificial Sequence: Synthetic oligonucleotide
  Antisense strand to SEQ ID NO: 1824887
uagagacucagacagaugu

SEQ ID NO: 1824889 - RNA, 19 nt, Artificial Sequence
  Description of Artificial Sequence: Synthetic oligonucleotide
  Sense strand starting at position 2110 of SEQ ID NO: 1563690
ugagucucuacguaugauu

SEQ ID NO: 1824890 - RNA, 19 nt, Artificial Sequence
  Description of Artificial Sequence: Synthetic oligonucleotide
  Antisense strand to SEQ ID NO: 1824889
aaucauacguagagacuca

SEQ ID NO: 1824891 - RNA, 19 nt, Artificial Sequence
  Description of Artificial Sequence: Synthetic oligonucleotide
  Sense strand starting at position 2176 of SEQ ID NO: 1563690
agaguaacuacauggaagu

SEQ ID NO: 1824892 - RNA, 19 nt, Artificial Sequence
  Description of Artificial Sequence: Synthetic oligonucleotide
  Antisense strand to SEQ ID NO: 1824891
acuuccauguaguuacucu

SEQ ID NO: 1824893 - RNA, 19 nt, Artificial Sequence
  Description of Artificial Sequence: Synthetic oligonucleotide
  Sense strand starting at position 2395 of SEQ ID NO: 1563690
aagaaaggauugcuuuagu

SEQ ID NO: 1824894 - RNA, 19 nt, Artificial Sequence
  Description of Artificial Sequence: Synthetic oligonucleotide
  Antisense strand to SEQ ID NO: 1824893
acuaaagcaauccuuucuu

SEQ ID NO: 1824895 - RNA, 19 nt, Artificial Sequence
  Description of Artificial Sequence: Synthetic oligonucleotide
  Sense strand starting at position 2398 of SEQ ID NO: 1563690
aaaggauugcuuuagugca

SEQ ID NO: 1824896 - RNA, 19 nt, Artificial Sequence
  Description of Artificial Sequence: Synthetic oligonucleotide
  Antisense strand to SEQ ID NO: 1824895
ugcacuaaagcaauccuuu

SEQ ID NO: 1824897 - RNA, 19 nt, Artificial Sequence
  Description of Artificial Sequence: Synthetic oligonucleotide
  Sense strand starting at position 2450 of SEQ ID NO: 1563690
uuggaaagaucagcuuucu

SEQ ID NO: 1824898 - RNA, 19 nt, Artificial Sequence
  Description of Artificial Sequence: Synthetic oligonucleotide
  Antisense strand to SEQ ID NO: 1824897
agaaagcugaucuuuccaa

SEQ ID NO: 1824899 - RNA, 19 nt, Artificial Sequence
  Description of Artificial Sequence: Synthetic oligonucleotide
  Sense strand starting at position 2458 of SEQ ID NO: 1563690
aucagcuuucugggacuuu

SEQ ID NO: 1824900 - RNA, 19 nt, Artificial Sequence
  Description of Artificial Sequence: Synthetic oligonucleotide
  Antisense strand to SEQ ID NO: 1824899
aaagucccagaaagcugau

SEQ ID NO: 1824901 - RNA, 19 nt, Artificial Sequence
  Description of Artificial Sequence: Synthetic oligonucleotide
  Sense strand starting at position 2661 of SEQ ID NO: 1563690
ggcacuuuauaaucacaga

SEQ ID NO: 1824902 - RNA, 19 nt, Artificial Sequence
  Description of Artificial Sequence: Synthetic oligonucleotide
  Antisense strand to SEQ ID NO: 1824901
ucugugauuauaaagugcc

SEQ ID NO: 1824903 - RNA, 19 nt, Artificial Sequence
  Description of Artificial Sequence: Synthetic oligonucleotide
  Sense strand starting at position 2692 of SEQ ID NO: 1563690
gaaagaacaugagaaguaa

SEQ ID NO: 1824904 - RNA, 19 nt, Artificial Sequence
  Description of Artificial Sequence: Synthetic oligonucleotide
  Antisense strand to SEQ ID NO: 1824903
uuacuucucauguucuuuc

SEQ ID NO: 1824905 - RNA, 19 nt, Artificial Sequence
  Description of Artificial Sequence: Synthetic oligonucleotide
  Sense strand starting at position 2948 of SEQ ID NO: 1563690
ggguguuuccuccagagau

SEQ ID NO: 1824906 - RNA, 19 nt, Artificial Sequence
  Description of Artificial Sequence: Synthetic oligonucleotide
  Antisense strand to SEQ ID NO: 1824905
aucucuggaggaaacaccc

SEQ ID NO: 1824907 - RNA, 19 nt, Artificial Sequence
  Description of Artificial Sequence: Synthetic oligonucleotide
  Sense strand starting at position 2950 of SEQ ID NO: 1563690
guguuuccuccagagauuc

SEQ ID NO: 1824908 - RNA, 19 nt, Artificial Sequence
  Description of Artificial Sequence: Synthetic oligonucleotide
  Antisense strand to SEQ ID NO: 1824907
gaaucucuggaggaaacac

SEQ ID NO: 1824909 - RNA, 19 nt, Artificial Sequence
  Description of Artificial Sequence: Synthetic oligonucleotide
  Sense strand starting at position 3044 of SEQ ID NO: 1563690
cccagcauuuguccuugaa

SEQ ID NO: 1824910 - RNA, 19 nt, Artificial Sequence
  Description of Artificial Sequence: Synthetic oligonucleotide
  Antisense strand to SEQ ID NO: 1824909
uucaaggacaaaugcuggg

SEQ ID NO: 1824911 - RNA, 19 nt, Artificial Sequence
  Description of Artificial Sequence: Synthetic oligonucleotide
  Sense strand starting at position 3156 of SEQ ID NO: 1563690
accucuuaguuaccugaga

SEQ ID NO: 1824912 - RNA, 19 nt, Artificial Sequence
  Description of Artificial Sequence: Synthetic oligonucleotide
  Antisense strand to SEQ ID NO: 1824911
ucucagguaacuaagaggu

SEQ ID NO: 1824913 - RNA, 19 nt, Artificial Sequence
  Description of Artificial Sequence: Synthetic oligonucleotide
  Sense strand starting at position 3276 of SEQ ID NO: 1563690
ccuggauaguugccucaag

SEQ ID NO: 1824914 - RNA, 19 nt, Artificial Sequence
  Description of Artificial Sequence: Synthetic oligonucleotide
  Antisense strand to SEQ ID NO: 1824913
cuugaggcaacuauccagg

SEQ ID NO: 1824915 - RNA, 19 nt, Artificial Sequence
  Description of Artificial Sequence: Synthetic oligonucleotide
  Sense strand starting at position 3325 of SEQ ID NO: 1563690
uuuaaagauauguguggga

SEQ ID NO: 1824916 - RNA, 19 nt, Artificial Sequence
  Description of Artificial Sequence: Synthetic oligonucleotide
  Antisense strand to SEQ ID NO: 1824915
ucccacacauaucuuuaaa

SEQ ID NO: 1824917 - RNA, 19 nt, Artificial Sequence
  Description of Artificial Sequence: Synthetic oligonucleotide
  Sense strand starting at position 3327 of SEQ ID NO: 1563690
uaaagauaugugugggaag

SEQ ID NO: 1824918 - RNA, 19 nt, Artificial Sequence
  Description of Artificial Sequence: Synthetic oligonucleotide
  Antisense strand to SEQ ID NO: 1824917
cuucccacacauaucuuua

SEQ ID NO: 1824919 - RNA, 19 nt, Artificial Sequence
  Description of Artificial Sequence: Synthetic oligonucleotide
  Sense strand starting at position 3375 of SEQ ID NO: 1563690
uccugcuuugaaugaucaa

SEQ ID NO: 1824920 - RNA, 19 nt, Artificial Sequence
  Description of Artificial Sequence: Synthetic oligonucleotide
  Antisense strand to SEQ ID NO: 1824919
uugaucauucaaagcagga

SEQ ID NO: 1824921 - RNA, 19 nt, Artificial Sequence
  Description of Artificial Sequence: Synthetic oligonucleotide
  Sense strand starting at position 3378 of SEQ ID NO: 1563690
ugcuuugaaugaucaaauc

SEQ ID NO: 1824922 - RNA, 19 nt, Artificial Sequence
  Description of Artificial Sequence: Synthetic oligonucleotide
  Antisense strand to SEQ ID NO: 1824921
gauuugaucauucaaagca

SEQ ID NO: 1824923 - RNA, 19 nt, Artificial Sequence
  Description of Artificial Sequence: Synthetic oligonucleotide
  Sense strand starting at position 3516 of SEQ ID NO: 1563690
aggcuugaugagugauuca

SEQ ID NO: 1824924 - RNA, 19 nt, Artificial Sequence
  Description of Artificial Sequence: Synthetic oligonucleotide
  Antisense strand to SEQ ID NO: 1824923
ugaaucacucaucaagccu

SEQ ID NO: 1824925 - RNA, 19 nt, Artificial Sequence
  Description of Artificial Sequence: Synthetic oligonucleotide
  Sense strand starting at position 3534 of SEQ ID NO: 1563690
auaauaugccuuuggauug

SEQ ID NO: 1824926 - RNA, 19 nt, Artificial Sequence
  Description of Artificial Sequence: Synthetic oligonucleotide
  Antisense strand to SEQ ID NO: 1824925
caauccaaaggcauauuau

SEQ ID NO: 1824927 - RNA, 19 nt, Artificial Sequence
  Description of Artificial Sequence: Synthetic oligonucleotide
  Sense strand starting at position 3721 of SEQ ID NO: 1563690
agacacuuauuggaaggaa

SEQ ID NO: 1824928 - RNA, 19 nt, Artificial Sequence
  Description of Artificial Sequence: Synthetic oligonucleotide
  Antisense strand to SEQ ID NO: 1824927
uuccuuccaauaagugucu

SEQ ID NO: 1824929 - RNA, 19 nt, Artificial Sequence
  Description of Artificial Sequence: Synthetic oligonucleotide
  Sense strand starting at position 3803 of SEQ ID NO: 1563690
acuuucuugguacgaggaa

SEQ ID NO: 1824930 - RNA, 19 nt, Artificial Sequence
  Description of Artificial Sequence: Synthetic oligonucleotide
  Antisense strand to SEQ ID NO: 1824929
uuccucguaccaagaaagu

SEQ ID NO: 1824931 - RNA, 19 nt, Artificial Sequence
  Description of Artificial Sequence: Synthetic oligonucleotide
  Sense strand starting at position 3835 of SEQ ID NO: 1563690
aagggaauugauugccuga

SEQ ID NO: 1824932 - RNA, 19 nt, Artificial Sequence
  Description of Artificial Sequence: Synthetic oligonucleotide
  Antisense strand to SEQ ID NO: 1824931
ucaggcaaucaauucccuu

SEQ ID NO: 1824933 - RNA, 19 nt, Artificial Sequence
  Description of Artificial Sequence: Synthetic oligonucleotide
  Sense strand starting at position 3838 of SEQ ID NO: 1563690
ggaauugauugccugaauu

SEQ ID NO: 1824934 - RNA, 19 nt, Artificial Sequence
  Description of Artificial Sequence: Synthetic oligonucleotide
  Antisense strand to SEQ ID NO: 1824933
aauucaggcaaucaauucc

SEQ ID NO: 1824935 - RNA, 19 nt, Artificial Sequence
  Description of Artificial Sequence: Synthetic oligonucleotide
  Sense strand starting at position 3874 of SEQ ID NO: 1563690
agccauauguaagugagaa

SEQ ID NO: 1824936 - RNA, 19 nt, Artificial Sequence
  Description of Artificial Sequence: Synthetic oligonucleotide
  Antisense strand to SEQ ID NO: 1824935
uucucacuuacauauggcu

SEQ ID NO: 1824937 - RNA, 19 nt, Artificial Sequence
  Description of Artificial Sequence: Synthetic oligonucleotide
  Sense strand starting at position 3875 of SEQ ID NO: 1563690
gccauauguaagugagaaa

SEQ ID NO: 1824938 - RNA, 19 nt, Artificial Sequence
  Description of Artificial Sequence: Synthetic oligonucleotide
  Antisense strand to SEQ ID NO: 1824937
uuucucacuuacauauggc

SEQ ID NO: 1824939 - RNA, 19 nt, Artificial Sequence
  Description of Artificial Sequence: Synthetic oligonucleotide
  Sense strand starting at position 3905 of SEQ ID NO: 1563690
ggaguucuuaugggaaguu

SEQ ID NO: 1824940 - RNA, 19 nt, Artificial Sequence
  Description of Artificial Sequence: Synthetic oligonucleotide
  Antisense strand to SEQ ID NO: 1824939
aacuucccauaagaacucc

SEQ ID NO: 1824941 - RNA, 19 nt, Artificial Sequence
  Description of Artificial Sequence: Synthetic oligonucleotide
  Sense strand starting at position 230 of SEQ ID NO: 1563691
ccuagaucacuccacugua

SEQ ID NO: 1824942 - RNA, 19 nt, Artificial Sequence
  Description of Artificial Sequence: Synthetic oligonucleotide
  Antisense strand to SEQ ID NO: 1824941
uacaguggagugaucuagg

SEQ ID NO: 1824943 - RNA, 19 nt, Artificial Sequence
  Description of Artificial Sequence: Synthetic oligonucleotide
  Sense strand starting at position 687 of SEQ ID NO: 1563691
ugaaguugguuaguacauu

SEQ ID NO: 1824944 - RNA, 19 nt, Artificial Sequence
  Description of Artificial Sequence: Synthetic oligonucleotide
  Antisense strand to SEQ ID NO: 1824943
aauguacuaaccaacuuca

SEQ ID NO: 1824945 - RNA, 19 nt, Artificial Sequence
  Description of Artificial Sequence: Synthetic oligonucleotide
  Sense strand starting at position 693 of SEQ ID NO: 1563691
ugguuaguacauuacaaug

SEQ ID NO: 1824946 - RNA, 19 nt, Artificial Sequence
  Description of Artificial Sequence: Synthetic oligonucleotide
  Antisense strand to SEQ ID NO: 1824945
cauuguaauguacuaacca

SEQ ID NO: 1824947 - RNA, 19 nt, Artificial Sequence
  Description of Artificial Sequence: Synthetic oligonucleotide
  Sense strand starting at position 698 of SEQ ID NO: 1563691
aguacauuacaaugucauu

SEQ ID NO: 1824948 - RNA, 19 nt, Artificial Sequence
  Description of Artificial Sequence: Synthetic oligonucleotide
  Antisense strand to SEQ ID NO: 1824947
aaugacauuguaauguacu

SEQ ID NO: 1824949 - RNA, 19 nt, Artificial Sequence
  Description of Artificial Sequence: Synthetic oligonucleotide
  Sense strand starting at position 754 of SEQ ID NO: 1563691
ccuguuugauauguuaaga

SEQ ID NO: 1824950 - RNA, 19 nt, Artificial Sequence
  Description of Artificial Sequence: Synthetic oligonucleotide
  Antisense strand to SEQ ID NO: 1824949
ucuuaacauaucaaacagg

SEQ ID NO: 1824951 - RNA, 19 nt, Artificial Sequence
  Description of Artificial Sequence: Synthetic oligonucleotide
  Sense strand starting at position 767 of SEQ ID NO: 1563691
uuaagaauugcuugugaag

SEQ ID NO: 1824952 - RNA, 19 nt, Artificial Sequence
  Description of Artificial Sequence: Synthetic oligonucleotide
  Antisense strand to SEQ ID NO: 1824951
cuucacaagcaauucuuaa

SEQ ID NO: 1824953 - RNA, 19 nt, Artificial Sequence
  Description of Artificial Sequence: Synthetic oligonucleotide
  Sense strand starting at position 846 of SEQ ID NO: 1563691
acccaugugcuauauugaa

SEQ ID NO: 1824954 - RNA, 19 nt, Artificial Sequence
  Description of Artificial Sequence: Synthetic oligonucleotide
  Antisense strand to SEQ ID NO: 1824953
uucaauauagcacaugggu

SEQ ID NO: 1824955 - RNA, 19 nt, Artificial Sequence
  Description of Artificial Sequence: Synthetic oligonucleotide
  Sense strand starting at position 904 of SEQ ID NO: 1563691
aaauguuguuacuuggcaa

SEQ ID NO: 1824956 - RNA, 19 nt, Artificial Sequence
  Description of Artificial Sequence: Synthetic oligonucleotide
  Antisense strand to SEQ ID NO: 1824955
uugccaaguaacaacauuu

SEQ ID NO: 1824957 - RNA, 19 nt, Artificial Sequence
  Description of Artificial Sequence: Synthetic oligonucleotide
  Sense strand starting at position 1112 of SEQ ID NO: 1563691
aucacauugcuauguugaa

SEQ ID NO: 1824958 - RNA, 19 nt, Artificial Sequence
  Description of Artificial Sequence: Synthetic oligonucleotide
  Antisense strand to SEQ ID NO: 1824957
uucaacauagcaaugugau

SEQ ID NO: 1824959 - RNA, 19 nt, Artificial Sequence
  Description of Artificial Sequence: Synthetic oligonucleotide
  Sense strand starting at position 1113 of SEQ ID NO: 1563691
ucacauugcuauguugaaa

SEQ ID NO: 1824960 - RNA, 19 nt, Artificial Sequence
  Description of Artificial Sequence: Synthetic oligonucleotide
  Antisense strand to SEQ ID NO: 1824959
uuucaacauagcaauguga

SEQ ID NO: 1824961 - RNA, 19 nt, Artificial Sequence
  Description of Artificial Sequence: Synthetic oligonucleotide
  Sense strand starting at position 1310 of SEQ ID NO: 1563691
uuaacugugucccuagaaa

SEQ ID NO: 1824962 - RNA, 19 nt, Artificial Sequence
  Description of Artificial Sequence: Synthetic oligonucleotide
  Antisense strand to SEQ ID NO: 1824961
uuucuagggacacaguuaa

SEQ ID NO: 1824963 - RNA, 19 nt, Artificial Sequence
  Description of Artificial Sequence: Synthetic oligonucleotide
  Sense strand starting at position 1422 of SEQ ID NO: 1563691
aauguuauauggucuggua

SEQ ID NO: 1824964 - RNA, 19 nt, Artificial Sequence
  Description of Artificial Sequence: Synthetic oligonucleotide
  Antisense strand to SEQ ID NO: 1824963
uaccagaccauauaacauu

SEQ ID NO: 1824965 - RNA, 19 nt, Artificial Sequence
  Description of Artificial Sequence: Synthetic oligonucleotide
  Sense strand starting at position 1600 of SEQ ID NO: 1563691
ucuugauggcaguauccaa

SEQ ID NO: 1824966 - RNA, 19 nt, Artificial Sequence
  Description of Artificial Sequence: Synthetic oligonucleotide
  Antisense strand to SEQ ID NO: 1824965
uuggauacugccaucaaga

SEQ ID NO: 1824967 - RNA, 19 nt, Artificial Sequence
  Description of Artificial Sequence: Synthetic oligonucleotide
  Sense strand starting at position 1656 of SEQ ID NO: 1563691
gcuuaaauaccuugaaugu

SEQ ID NO: 1824968 - RNA, 19 nt, Artificial Sequence
  Description of Artificial Sequence: Synthetic oligonucleotide
  Antisense strand to SEQ ID NO: 1824967
acauucaagguauuuaagc

SEQ ID NO: 1824969 - RNA, 19 nt, Artificial Sequence
  Description of Artificial Sequence: Synthetic oligonucleotide
  Sense strand starting at position 1673 of SEQ ID NO: 1563691
gucuuaaaguacuuaaagu

SEQ ID NO: 1824970 - RNA, 19 nt, Artificial Sequence
  Description of Artificial Sequence: Synthetic oligonucleotide
  Antisense strand to SEQ ID NO: 1824969
acuuuaaguacuuuaagac

SEQ ID NO: 1824971 - RNA, 19 nt, Artificial Sequence
  Description of Artificial Sequence: Synthetic oligonucleotide
  Sense strand starting at position 1740 of SEQ ID NO: 1563691
gcaauuuacucaguaguuc

SEQ ID NO: 1824972 - RNA, 19 nt, Artificial Sequence
  Description of Artificial Sequence: Synthetic oligonucleotide
  Antisense strand to SEQ ID NO: 1824971
gaacuacugaguaaauugc

SEQ ID NO: 1824973 - RNA, 19 nt, Artificial Sequence
  Description of Artificial Sequence: Synthetic oligonucleotide
  Sense strand starting at position 1744 of SEQ ID NO: 1563691
uuuacucaguaguucuaaa

SEQ ID NO: 1824974 - RNA, 19 nt, Artificial Sequence
  Description of Artificial Sequence: Synthetic oligonucleotide
  Antisense strand to SEQ ID NO: 1824973
uuuagaacuacugaguaaa

SEQ ID NO: 1824975 - RNA, 19 nt, Artificial Sequence
  Description of Artificial Sequence: Synthetic oligonucleotide
  Sense strand starting at position 1765 of SEQ ID NO: 1563691
cgaauaacugcugacauua

SEQ ID NO: 1824976 - RNA, 19 nt, Artificial Sequence
  Description of Artificial Sequence: Synthetic oligonucleotide
  Antisense strand to SEQ ID NO: 1824975
uaaugucagcaguuauucg

SEQ ID NO: 1824977 - RNA, 19 nt, Artificial Sequence
  Description of Artificial Sequence: Synthetic oligonucleotide
  Sense strand starting at position 1770 of SEQ ID NO: 1563691
aacugcugacauuagagua

SEQ ID NO: 1824978 - RNA, 19 nt, Artificial Sequence
  Description of Artificial Sequence: Synthetic oligonucleotide
  Antisense strand to SEQ ID NO: 1824977
uacucuaaugucagcaguu

SEQ ID NO: 1824979 - RNA, 19 nt, Artificial Sequence
  Description of Artificial Sequence: Synthetic oligonucleotide
  Sense strand starting at position 1778 of SEQ ID NO: 1563691
acauuagaguagccuuauc

SEQ ID NO: 1824980 - RNA, 19 nt, Artificial Sequence
  Description of Artificial Sequence: Synthetic oligonucleotide
  Antisense strand to SEQ ID NO: 1824979
gauaaggcuacucuaaugu

SEQ ID NO: 1824981 - RNA, 19 nt, Artificial Sequence
  Description of Artificial Sequence: Synthetic oligonucleotide
  Sense strand starting at position 1783 of SEQ ID NO: 1563691
agaguagccuuaucaccau

SEQ ID NO: 1824982 - RNA, 19 nt, Artificial Sequence
  Description of Artificial Sequence: Synthetic oligonucleotide
  Antisense strand to SEQ ID NO: 1824981
auggugauaaggcuacucu

SEQ ID NO: 1824983 - RNA, 19 nt, Artificial Sequence
  Description of Artificial Sequence: Synthetic oligonucleotide
  Sense strand starting at position 1786 of SEQ ID NO: 1563691
guagccuuaucaccaugaa

SEQ ID NO: 1824984 - RNA, 19 nt, Artificial Sequence
  Description of Artificial Sequence: Synthetic oligonucleotide
  Antisense strand to SEQ ID NO: 1824983
uucauggugauaaggcuac

SEQ ID NO: 1824985 - RNA, 19 nt, Artificial Sequence
  Description of Artificial Sequence: Synthetic oligonucleotide
  Sense strand starting at position 2204 of SEQ ID NO: 1563691
uugacaauuguggaauguu

SEQ ID NO: 1824986 - RNA, 19 nt, Artificial Sequence
  Description of Artificial Sequence: Synthetic oligonucleotide
  Antisense strand to SEQ ID NO: 1824985
aacauuccacaauugucaa

SEQ ID NO: 1824987 - RNA, 19 nt, Artificial Sequence
  Description of Artificial Sequence: Synthetic oligonucleotide
  Sense strand starting at position 2482 of SEQ ID NO: 1563691
auaaacucucccgagcaaa

SEQ ID NO: 1824988 - RNA, 19 nt, Artificial Sequence
  Description of Artificial Sequence: Synthetic oligonucleotide
  Antisense strand to SEQ ID NO: 1824987
uuugcucgggagaguuuau

SEQ ID NO: 1824989 - RNA, 19 nt, Artificial Sequence
  Description of Artificial Sequence: Synthetic oligonucleotide
  Sense strand starting at position 2697 of SEQ ID NO: 1563691
gcuuguuugcacuaaauau

SEQ ID NO: 1824990 - RNA, 19 nt, Artificial Sequence
  Description of Artificial Sequence: Synthetic oligonucleotide
  Antisense strand to SEQ ID NO: 1824989
auauuuagugcaaacaagc

SEQ ID NO: 1824991 - RNA, 19 nt, Artificial Sequence
  Description of Artificial Sequence: Synthetic oligonucleotide
  Sense strand starting at position 2720 of SEQ ID NO: 1563691
cucauugggcuguaucuaa

SEQ ID NO: 1824992 - RNA, 19 nt, Artificial Sequence
  Description of Artificial Sequence: Synthetic oligonucleotide
  Antisense strand to SEQ ID NO: 1824991
uuagauacagcccaaugag

SEQ ID NO: 1824993 - RNA, 19 nt, Artificial Sequence
  Description of Artificial Sequence: Synthetic oligonucleotide
  Sense strand starting at position 2754 of SEQ ID NO: 1563691
uggguacacucuucugaac

SEQ ID NO: 1824994 - RNA, 19 nt, Artificial Sequence
  Description of Artificial Sequence: Synthetic oligonucleotide
  Antisense strand to SEQ ID NO: 1824993
guucagaagaguguaccca

SEQ ID NO: 1824995 - RNA, 19 nt, Artificial Sequence
  Description of Artificial Sequence: Synthetic oligonucleotide
  Sense strand starting at position 2807 of SEQ ID NO: 1563691
uaugauuuaugggacagga

SEQ ID NO: 1824996 - RNA, 19 nt, Artificial Sequence
  Description of Artificial Sequence: Synthetic oligonucleotide
  Antisense strand to SEQ ID NO: 1824995
uccugucccauaaaucaua

SEQ ID NO: 1824997 - RNA, 19 nt, Artificial Sequence
  Description of Artificial Sequence: Synthetic oligonucleotide
  Sense strand starting at position 2894 of SEQ ID NO: 1563691
ggugguugcuguauuaguc

SEQ ID NO: 1824998 - RNA, 19 nt, Artificial Sequence
  Description of Artificial Sequence: Synthetic oligonucleotide
  Antisense strand to SEQ ID NO: 1824997
gacuaauacagcaaccacc

SEQ ID NO: 1824999 - RNA, 19 nt, Artificial Sequence
  Description of Artificial Sequence: Synthetic oligonucleotide
  Sense strand starting at position 2904 of SEQ ID NO: 1563691
guauuaguccugcaauauu

SEQ ID NO: 1825000 - RNA, 19 nt, Artificial Sequence
  Description of Artificial Sequence: Synthetic oligonucleotide
  Antisense strand to SEQ ID NO: 1824999
aauauugcaggacuaauac

SEQ ID NO: 1825001 - RNA, 19 nt, Artificial Sequence
  Description of Artificial Sequence: Synthetic oligonucleotide
  Sense strand starting at position 3037 of SEQ ID NO: 1563691
gcgacaagagauuguacaa

SEQ ID NO: 1825002 - RNA, 19 nt, Artificial Sequence
  Description of Artificial Sequence: Synthetic oligonucleotide
  Antisense strand to SEQ ID NO: 1825001
uuguacaaucucuugucgc

SEQ ID NO: 1825003 - RNA, 19 nt, Artificial Sequence
  Description of Artificial Sequence: Synthetic oligonucleotide
  Sense strand starting at position 3044 of SEQ ID NO: 1563691
gagauuguacaauggcaca

SEQ ID NO: 1825004 - RNA, 19 nt, Artificial Sequence
  Description of Artificial Sequence: Synthetic oligonucleotide
  Antisense strand to SEQ ID NO: 1825003
ugugccauuguacaaucuc

SEQ ID NO: 1825005 - RNA, 19 nt, Artificial Sequence
  Description of Artificial Sequence: Synthetic oligonucleotide
  Sense strand starting at position 3355 of SEQ ID NO: 1563691
gugcaacaguuucuagaag

SEQ ID NO: 1825006 - RNA, 19 nt, Artificial Sequence
  Description of Artificial Sequence: Synthetic oligonucleotide
  Antisense strand to SEQ ID NO: 1825005
cuucuagaaacuguugcac

SEQ ID NO: 1825007 - RNA, 19 nt, Artificial Sequence
  Description of Artificial Sequence: Synthetic oligonucleotide
  Sense strand starting at position 3545 of SEQ ID NO: 1563691
ugucauauccucgagguuc

SEQ ID NO: 1825008 - RNA, 19 nt, Artificial Sequence
  Description of Artificial Sequence: Synthetic oligonucleotide
  Antisense strand to SEQ ID NO: 1825007
gaaccucgaggauaugaca

SEQ ID NO: 1825009 - RNA, 19 nt, Artificial Sequence
  Description of Artificial Sequence: Synthetic oligonucleotide
  Sense strand starting at position 3711 of SEQ ID NO: 1563691
agugaacaugaguaugcau

SEQ ID NO: 1825010 - RNA, 19 nt, Artificial Sequence
  Description of Artificial Sequence: Synthetic oligonucleotide
  Antisense strand to SEQ ID NO: 1825009
augcauacucauguucacu

SEQ ID NO: 1825011 - RNA, 19 nt, Artificial Sequence
  Description of Artificial Sequence: Synthetic oligonucleotide
  Sense strand starting at position 3713 of SEQ ID NO: 1563691
ugaacaugaguaugcauau

SEQ ID NO: 1825012 - RNA, 19 nt, Artificial Sequence
  Description of Artificial Sequence: Synthetic oligonucleotide
  Antisense strand to SEQ ID NO: 1825011
auaugcauacucauguuca

SEQ ID NO: 1825013 - RNA, 19 nt, Artificial Sequence
  Description of Artificial Sequence: Synthetic oligonucleotide
  Sense strand starting at position 3714 of SEQ ID NO: 1563691
gaacaugaguaugcauaua

SEQ ID NO: 1825014 - RNA, 19 nt, Artificial Sequence
  Description of Artificial Sequence: Synthetic oligonucleotide
  Antisense strand to SEQ ID NO: 1825013
uauaugcauacucauguuc

SEQ ID NO: 1825015 - RNA, 19 nt, Artificial Sequence
  Description of Artificial Sequence: Synthetic oligonucleotide
  Sense strand starting at position 3774 of SEQ ID NO: 1563691
ggcauuuaacuacgugcau

SEQ ID NO: 1825016 - RNA, 19 nt, Artificial Sequence
  Description of Artificial Sequence: Synthetic oligonucleotide
  Antisense strand to SEQ ID NO: 1825015
augcacguaguuaaaugcc

SEQ ID NO: 1825017 - RNA, 19 nt, Artificial Sequence
  Description of Artificial Sequence: Synthetic oligonucleotide
  Sense strand starting at position 3775 of SEQ ID NO: 1563691
gcauuuaacuacgugcauu

SEQ ID NO: 1825018 - RNA, 19 nt, Artificial Sequence
  Description of Artificial Sequence: Synthetic oligonucleotide
  Antisense strand to SEQ ID NO: 1825017
aaugcacguaguuaaaugc

SEQ ID NO: 1825019 - RNA, 19 nt, Artificial Sequence
  Description of Artificial Sequence: Synthetic oligonucleotide
  Sense strand starting at position 3895 of SEQ ID NO: 1563691
cucauauugugaccacauu

SEQ ID NO: 1825020 - RNA, 19 nt, Artificial Sequence
  Description of Artificial Sequence: Synthetic oligonucleotide
  Antisense strand to SEQ ID NO: 1825019
aauguggucacaauaugag

SEQ ID NO: 1825021 - RNA, 19 nt, Artificial Sequence
  Description of Artificial Sequence: Synthetic oligonucleotide
  Sense strand starting at position 276 of SEQ ID NO: 1563692
cccaccagacuuuguaaga

SEQ ID NO: 1825022 - RNA, 19 nt, Artificial Sequence
  Description of Artificial Sequence: Synthetic oligonucleotide
  Antisense strand to SEQ ID NO: 1825021
ucuuacaaagucugguggg

SEQ ID NO: 1825023 - RNA, 19 nt, Artificial Sequence
  Description of Artificial Sequence: Synthetic oligonucleotide
  Sense strand starting at position 277 of SEQ ID NO: 1563692
ccaccagacuuuguaagaa

SEQ ID NO: 1825024 - RNA, 19 nt, Artificial Sequence
  Description of Artificial Sequence: Synthetic oligonucleotide
  Antisense strand to SEQ ID NO: 1825023
uucuuacaaagucuggugg

SEQ ID NO: 1825025 - RNA, 19 nt, Artificial Sequence
  Description of Artificial Sequence: Synthetic oligonucleotide
  Sense strand starting at position 336 of SEQ ID NO: 1563692
uuguucaguguucgugacu

SEQ ID NO: 1825026 - RNA, 19 nt, Artificial Sequence
  Description of Artificial Sequence: Synthetic oligonucleotide
  Antisense strand to SEQ ID NO: 1825025
agucacgaacacugaacaa

SEQ ID NO: 1825027 - RNA, 19 nt, Artificial Sequence
  Description of Artificial Sequence: Synthetic oligonucleotide
  Sense strand starting at position 484 of SEQ ID NO: 1563692
cgagaaucuggcgguggaa

SEQ ID NO: 1825028 - RNA, 19 nt, Artificial Sequence
  Description of Artificial Sequence: Synthetic oligonucleotide
  Antisense strand to SEQ ID NO: 1825027
uuccaccgccagauucucg

SEQ ID NO: 1825029 - RNA, 19 nt, Artificial Sequence
  Description of Artificial Sequence: Synthetic oligonucleotide
  Sense strand starting at position 486 of SEQ ID NO: 1563692
agaaucuggcgguggaaau

SEQ ID NO: 1825030 - RNA, 19 nt, Artificial Sequence
  Description of Artificial Sequence: Synthetic oligonucleotide
  Antisense strand to SEQ ID NO: 1825029
auuuccaccgccagauucu

SEQ ID NO: 1825031 - RNA, 19 nt, Artificial Sequence
  Description of Artificial Sequence: Synthetic oligonucleotide
  Sense strand starting at position 487 of SEQ ID NO: 1563692
gaaucuggcgguggaaauu

SEQ ID NO: 1825032 - RNA, 19 nt, Artificial Sequence
  Description of Artificial Sequence: Synthetic oligonucleotide
  Antisense strand to SEQ ID NO: 1825031
aauuuccaccgccagauuc

SEQ ID NO: 1825033 - RNA, 19 nt, Artificial Sequence
  Description of Artificial Sequence: Synthetic oligonucleotide
  Sense strand starting at position 1194 of SEQ ID NO: 1563692
cugcguugcgcucugguaa

SEQ ID NO: 1825034 - RNA, 19 nt, Artificial Sequence
  Description of Artificial Sequence: Synthetic oligonucleotide
  Antisense strand to SEQ ID NO: 1825033
uuaccagagcgcaacgcag

SEQ ID NO: 1825035 - RNA, 19 nt, Artificial Sequence
  Description of Artificial Sequence: Synthetic oligonucleotide
  Sense strand starting at position 1345 of SEQ ID NO: 1563692
gggcgaaucgccugacucu

SEQ ID NO: 1825036 - RNA, 19 nt, Artificial Sequence
  Description of Artificial Sequence: Synthetic oligonucleotide
  Antisense strand to SEQ ID NO: 1825035
agagucaggcgauucgccc

SEQ ID NO: 1825037 - RNA, 19 nt, Artificial Sequence
  Description of Artificial Sequence: Synthetic oligonucleotide
  Sense strand starting at position 1433 of SEQ ID NO: 1563692
acgggaacgcuuuguacuu

SEQ ID NO: 1825038 - RNA, 19 nt, Artificial Sequence
  Description of Artificial Sequence: Synthetic oligonucleotide
  Antisense strand to SEQ ID NO: 1825037
aaguacaaagcguucccgu

SEQ ID NO: 1825039 - RNA, 19 nt, Artificial Sequence
  Description of Artificial Sequence: Synthetic oligonucleotide
  Sense strand starting at position 1574 of SEQ ID NO: 1563692
gagggcacuguccauagau

SEQ ID NO: 1825040 - RNA, 19 nt, Artificial Sequence
  Description of Artificial Sequence: Synthetic oligonucleotide
  Antisense strand to SEQ ID NO: 1825039
aucuauggacagugcccuc

SEQ ID NO: 1825041 - RNA, 19 nt, Artificial Sequence
  Description of Artificial Sequence: Synthetic oligonucleotide
  Sense strand starting at position 1576 of SEQ ID NO: 1563692
gggcacuguccauagauuc

SEQ ID NO: 1825042 - RNA, 19 nt, Artificial Sequence
  Description of Artificial Sequence: Synthetic oligonucleotide
  Antisense strand to SEQ ID NO: 1825041
gaaucuauggacagugccc

SEQ ID NO: 1825043 - RNA, 19 nt, Artificial Sequence
  Description of Artificial Sequence: Synthetic oligonucleotide
  Sense strand starting at position 1583 of SEQ ID NO: 1563692
guccauagauucucuauuc

SEQ ID NO: 1825044 - RNA, 19 nt, Artificial Sequence
  Description of Artificial Sequence: Synthetic oligonucleotide
  Antisense strand to SEQ ID NO: 1825043
gaauagagaaucuauggac

SEQ ID NO: 1825045 - RNA, 19 nt, Artificial Sequence
  Description of Artificial Sequence: Synthetic oligonucleotide
  Sense strand starting at position 2139 of SEQ ID NO: 1563692
ggugucaucuugcuuccga

SEQ ID NO: 1825046 - RNA, 19 nt, Artificial Sequence
  Description of Artificial Sequence: Synthetic oligonucleotide
  Antisense strand to SEQ ID NO: 1825045
ucggaagcaagaugacacc

SEQ ID NO: 1825047 - RNA, 19 nt, Artificial Sequence
  Description of Artificial Sequence: Synthetic oligonucleotide
  Sense strand starting at position 2269 of SEQ ID NO: 1563692
cccugugcauucguuucua

SEQ ID NO: 1825048 - RNA, 19 nt, Artificial Sequence
  Description of Artificial Sequence: Synthetic oligonucleotide
  Antisense strand to SEQ ID NO: 1825047
uagaaacgaaugcacaggg

SEQ ID NO: 1825049 - RNA, 19 nt, Artificial Sequence
  Description of Artificial Sequence: Synthetic oligonucleotide
  Sense strand starting at position 2272 of SEQ ID NO: 1563692
ugugcauucguuucuagca

SEQ ID NO: 1825050 - RNA, 19 nt, Artificial Sequence
  Description of Artificial Sequence: Synthetic oligonucleotide
  Antisense strand to SEQ ID NO: 1825049
ugcuagaaacgaaugcaca

SEQ ID NO: 1825051 - RNA, 19 nt, Artificial Sequence
  Description of Artificial Sequence: Synthetic oligonucleotide
  Sense strand starting at position 2324 of SEQ ID NO: 1563692
cuggcaaagagauguagau

SEQ ID NO: 1825052 - RNA, 19 nt, Artificial Sequence
  Description of Artificial Sequence: Synthetic oligonucleotide
  Antisense strand to SEQ ID NO: 1825051
aucuacaucucuuugccag

SEQ ID NO: 1825053 - RNA, 19 nt, Artificial Sequence
  Description of Artificial Sequence: Synthetic oligonucleotide
  Sense strand starting at position 2436 of SEQ ID NO: 1563692
ccuugaacgcuagaugcuu

SEQ ID NO: 1825054 - RNA, 19 nt, Artificial Sequence
  Description of Artificial Sequence: Synthetic oligonucleotide
  Antisense strand to SEQ ID NO: 1825053
aagcaucuagcguucaagg

SEQ ID NO: 1825055 - RNA, 19 nt, Artificial Sequence
  Description of Artificial Sequence: Synthetic oligonucleotide
  Sense strand starting at position 2448 of SEQ ID NO: 1563692
gaugcuugccucugcaagu

SEQ ID NO: 1825056 - RNA, 19 nt, Artificial Sequence
  Description of Artificial Sequence: Synthetic oligonucleotide
  Antisense strand to SEQ ID NO: 1825055
acuugcagaggcaagcauc

SEQ ID NO: 1825057 - RNA, 19 nt, Artificial Sequence
  Description of Artificial Sequence: Synthetic oligonucleotide
  Sense strand starting at position 2449 of SEQ ID NO: 1563692
augcuugccucugcaagua

SEQ ID NO: 1825058 - RNA, 19 nt, Artificial Sequence
  Description of Artificial Sequence: Synthetic oligonucleotide
  Antisense strand to SEQ ID NO: 1825057
uacuugcagaggcaagcau

SEQ ID NO: 1825059 - RNA, 19 nt, Artificial Sequence
  Description of Artificial Sequence: Synthetic oligonucleotide
  Sense strand starting at position 2459 of SEQ ID NO: 1563692
cugcaaguauccuugugag

SEQ ID NO: 1825060 - RNA, 19 nt, Artificial Sequence
  Description of Artificial Sequence: Synthetic oligonucleotide
  Antisense strand to SEQ ID NO: 1825059
cucacaaggauacuugcag

SEQ ID NO: 1825061 - RNA, 19 nt, Artificial Sequence
  Description of Artificial Sequence: Synthetic oligonucleotide
  Sense strand starting at position 2575 of SEQ ID NO: 1563692
cccuaaucccuagggaacu

SEQ ID NO: 1825062 - RNA, 19 nt, Artificial Sequence
  Description of Artificial Sequence: Synthetic oligonucleotide
  Antisense strand to SEQ ID NO: 1825061
aguucccuagggauuaggg

SEQ ID NO: 1825063 - RNA, 19 nt, Artificial Sequence
  Description of Artificial Sequence: Synthetic oligonucleotide
  Sense strand starting at position 2899 of SEQ ID NO: 1563692
cccgcuucucaaggaaacu

SEQ ID NO: 1825064 - RNA, 19 nt, Artificial Sequence
  Description of Artificial Sequence: Synthetic oligonucleotide
  Antisense strand to SEQ ID NO: 1825063
aguuuccuugagaagcggg

SEQ ID NO: 1825065 - RNA, 19 nt, Artificial Sequence
  Description of Artificial Sequence: Synthetic oligonucleotide
  Sense strand starting at position 3032 of SEQ ID NO: 1563692
ggaggugucacgcggcuaa

SEQ ID NO: 1825066 - RNA, 19 nt, Artificial Sequence
  Description of Artificial Sequence: Synthetic oligonucleotide
  Antisense strand to SEQ ID NO: 1825065
uuagccgcgugacaccucc

SEQ ID NO: 1825067 - RNA, 19 nt, Artificial Sequence
  Description of Artificial Sequence: Synthetic oligonucleotide
  Sense strand starting at position 3052 of SEQ ID NO: 1563692
ccaagaagccucuggcuga

SEQ ID NO: 1825068 - RNA, 19 nt, Artificial Sequence
  Description of Artificial Sequence: Synthetic oligonucleotide
  Antisense strand to SEQ ID NO: 1825067
ucagccagaggcuucuugg

SEQ ID NO: 1825069 - RNA, 19 nt, Artificial Sequence
  Description of Artificial Sequence: Synthetic oligonucleotide
  Sense strand starting at position 3092 of SEQ ID NO: 1563692
aggauuccucucggucuuu

SEQ ID NO: 1825070 - RNA, 19 nt, Artificial Sequence
  Description of Artificial Sequence: Synthetic oligonucleotide
  Antisense strand to SEQ ID NO: 1825069
aaagaccgagaggaauccu

SEQ ID NO: 1825071 - RNA, 19 nt, Artificial Sequence
  Description of Artificial Sequence: Synthetic oligonucleotide
  Sense strand starting at position 3288 of SEQ ID NO: 1563692
gcgugauucggacacucgu

SEQ ID NO: 1825072 - RNA, 19 nt, Artificial Sequence
  Description of Artificial Sequence: Synthetic oligonucleotide
  Antisense strand to SEQ ID NO: 1825071
acgaguguccgaaucacgc

SEQ ID NO: 1825073 - RNA, 19 nt, Artificial Sequence
  Description of Artificial Sequence: Synthetic oligonucleotide
  Sense strand starting at position 3297 of SEQ ID NO: 1563692
ggacacucguucccucaau

SEQ ID NO: 1825074 - RNA, 19 nt, Artificial Sequence
  Description of Artificial Sequence: Synthetic oligonucleotide
  Antisense strand to SEQ ID NO: 1825073
auugagggaacgagugucc

SEQ ID NO: 1825075 - RNA, 19 nt, Artificial Sequence
  Description of Artificial Sequence: Synthetic oligonucleotide
  Sense strand starting at position 3333 of SEQ ID NO: 1563692
uggauuucugccggcuacu

SEQ ID NO: 1825076 - RNA, 19 nt, Artificial Sequence
  Description of Artificial Sequence: Synthetic oligonucleotide
  Antisense strand to SEQ ID NO: 1825075
aguagccggcagaaaucca

SEQ ID NO: 1825077 - RNA, 19 nt, Artificial Sequence
  Description of Artificial Sequence: Synthetic oligonucleotide
  Sense strand starting at position 3399 of SEQ ID NO: 1563692
ccuugaaacuuguuccaga

SEQ ID NO: 1825078 - RNA, 19 nt, Artificial Sequence
  Description of Artificial Sequence: Synthetic oligonucleotide
  Antisense strand to SEQ ID NO: 1825077
ucuggaacaaguuucaagg

SEQ ID NO: 1825079 - RNA, 19 nt, Artificial Sequence
  Description of Artificial Sequence: Synthetic oligonucleotide
  Sense strand starting at position 3400 of SEQ ID NO: 1563692
cuugaaacuuguuccagac

SEQ ID NO: 1825080 - RNA, 19 nt, Artificial Sequence
  Description of Artificial Sequence: Synthetic oligonucleotide
  Antisense strand to SEQ ID NO: 1825079
gucuggaacaaguuucaag

SEQ ID NO: 1825081 - RNA, 19 nt, Artificial Sequence
  Description of Artificial Sequence: Synthetic oligonucleotide
  Sense strand starting at position 3402 of SEQ ID NO: 1563692
ugaaacuuguuccagacua

SEQ ID NO: 1825082 - RNA, 19 nt, Artificial Sequence
  Description of Artificial Sequence: Synthetic oligonucleotide
  Antisense strand to SEQ ID NO: 1825081
uagucuggaacaaguuuca

SEQ ID NO: 1825083 - RNA, 19 nt, Artificial Sequence
  Description of Artificial Sequence: Synthetic oligonucleotide
  Sense strand starting at position 3410 of SEQ ID NO: 1563692
guuccagacuagucuucuu

SEQ ID NO: 1825084 - RNA, 19 nt, Artificial Sequence
  Description of Artificial Sequence: Synthetic oligonucleotide
  Antisense strand to SEQ ID NO: 1825083
aagaagacuagucuggaac

SEQ ID NO: 1825085 - RNA, 19 nt, Artificial Sequence
  Description of Artificial Sequence: Synthetic oligonucleotide
  Sense strand starting at position 3418 of SEQ ID NO: 1563692
cuagucuucuugccacagu

SEQ ID NO: 1825086 - RNA, 19 nt, Artificial Sequence
  Description of Artificial Sequence: Synthetic oligonucleotide
  Antisense strand to SEQ ID NO: 1825085
acuguggcaagaagacuag

SEQ ID NO: 1825087 - RNA, 19 nt, Artificial Sequence
  Description of Artificial Sequence: Synthetic oligonucleotide
  Sense strand starting at position 3647 of SEQ ID NO: 1563692
ggaaaugugucuccuuguu

SEQ ID NO: 1825088 - RNA, 19 nt, Artificial Sequence
  Description of Artificial Sequence: Synthetic oligonucleotide
  Antisense strand to SEQ ID NO: 1825087
aacaaggagacacauuucc

SEQ ID NO: 1825089 - RNA, 19 nt, Artificial Sequence
  Description of Artificial Sequence: Synthetic oligonucleotide
  Sense strand starting at position 3652 of SEQ ID NO: 1563692
ugugucuccuuguuugaaa

SEQ ID NO: 1825090 - RNA, 19 nt, Artificial Sequence
  Description of Artificial Sequence: Synthetic oligonucleotide
  Antisense strand to SEQ ID NO: 1825089
uuucaaacaaggagacaca

SEQ ID NO: 1825091 - RNA, 19 nt, Artificial Sequence
  Description of Artificial Sequence: Synthetic oligonucleotide
  Sense strand starting at position 3693 of SEQ ID NO: 1563692
gcggcuuucgcgucuguga

SEQ ID NO: 1825092 - RNA, 19 nt, Artificial Sequence
  Description of Artificial Sequence: Synthetic oligonucleotide
  Antisense strand to SEQ ID NO: 1825091
ucacagacgcgaaagccgc

SEQ ID NO: 1825093 - RNA, 19 nt, Artificial Sequence
  Description of Artificial Sequence: Synthetic oligonucleotide
  Sense strand starting at position 3694 of SEQ ID NO: 1563692
cggcuuucgcgucugugaa

SEQ ID NO: 1825094 - RNA, 19 nt, Artificial Sequence
  Description of Artificial Sequence: Synthetic oligonucleotide
  Antisense strand to SEQ ID NO: 1825093
uucacagacgcgaaagccg

SEQ ID NO: 1825095 - RNA, 19 nt, Artificial Sequence
  Description of Artificial Sequence: Synthetic oligonucleotide
  Sense strand starting at position 3711 of SEQ ID NO: 1563692
aacugaauccggcgcgaau

SEQ ID NO: 1825096 - RNA, 19 nt, Artificial Sequence
  Description of Artificial Sequence: Synthetic oligonucleotide
  Antisense strand to SEQ ID NO: 1825095
auucgcgccggauucaguu

SEQ ID NO: 1825097 - RNA, 19 nt, Artificial Sequence
  Description of Artificial Sequence: Synthetic oligonucleotide
  Sense strand starting at position 3713 of SEQ ID NO: 1563692
cugaauccggcgcgaauua

SEQ ID NO: 1825098 - RNA, 19 nt, Artificial Sequence
  Description of Artificial Sequence: Synthetic oligonucleotide
  Antisense strand to SEQ ID NO: 1825097
uaauucgcgccggauucag

SEQ ID NO: 1825099 - RNA, 19 nt, Artificial Sequence
  Description of Artificial Sequence: Synthetic oligonucleotide
  Sense strand starting at position 3875 of SEQ ID NO: 1563692
cuguaaagaggcugucagu

SEQ ID NO: 1825100 - RNA, 19 nt, Artificial Sequence
  Description of Artificial Sequence: Synthetic oligonucleotide
  Antisense strand to SEQ ID NO: 1825099
acugacagccucuuuacag

SEQ ID NO: 1825101 - RNA, 19 nt, Artificial Sequence
  Description of Artificial Sequence: Synthetic oligonucleotide
  Sense strand starting at position 9 of SEQ ID NO: 1563693
cuauuaggaucagcuacau

SEQ ID NO: 1825102 - RNA, 19 nt, Artificial Sequence
  Description of Artificial Sequence: Synthetic oligonucleotide
  Antisense strand to SEQ ID NO: 1825101
auguagcugauccuaauag

SEQ ID NO: 1825103 - RNA, 19 nt, Artificial Sequence
  Description of Artificial Sequence: Synthetic oligonucleotide
  Sense strand starting at position 106 of SEQ ID NO: 1563693
caggaugcauguccaugaa

SEQ ID NO: 1825104 - RNA, 19 nt, Artificial Sequence
  Description of Artificial Sequence: Synthetic oligonucleotide
  Antisense strand to SEQ ID NO: 1825103
uucauggacaugcauccug

SEQ ID NO: 1825105 - RNA, 19 nt, Artificial Sequence
  Description of Artificial Sequence: Synthetic oligonucleotide
  Sense strand starting at position 132 of SEQ ID NO: 1563693
cugcuaucagaucauguau

SEQ ID NO: 1825106 - RNA, 19 nt, Artificial Sequence
  Description of Artificial Sequence: Synthetic oligonucleotide
  Antisense strand to SEQ ID NO: 1825105
auacaugaucugauagcag

SEQ ID NO: 1825107 - RNA, 19 nt, Artificial Sequence
  Description of Artificial Sequence: Synthetic oligonucleotide
  Sense strand starting at position 154 of SEQ ID NO: 1563693
gcuagaaaguugguaagaa

SEQ ID NO: 1825108 - RNA, 19 nt, Artificial Sequence
  Description of Artificial Sequence: Synthetic oligonucleotide
  Antisense strand to SEQ ID NO: 1825107
uucuuaccaacuuucuagc

SEQ ID NO: 1825109 - RNA, 19 nt, Artificial Sequence
  Description of Artificial Sequence: Synthetic oligonucleotide
  Sense strand starting at position 185 of SEQ ID NO: 1563693
ucgcuauuaaaugaguagu

SEQ ID NO: 1825110 - RNA, 19 nt, Artificial Sequence
  Description of Artificial Sequence: Synthetic oligonucleotide
  Antisense strand to SEQ ID NO: 1825109
acuacucauuuaauagcga

SEQ ID NO: 1825111 - RNA, 19 nt, Artificial Sequence
  Description of Artificial Sequence: Synthetic oligonucleotide
  Sense strand starting at position 187 of SEQ ID NO: 1563693
gcuauuaaaugaguaguga

SEQ ID NO: 1825112 - RNA, 19 nt, Artificial Sequence
  Description of Artificial Sequence: Synthetic oligonucleotide
  Antisense strand to SEQ ID NO: 1825111
ucacuacucauuuaauagc

SEQ ID NO: 1825113 - RNA, 19 nt, Artificial Sequence
  Description of Artificial Sequence: Synthetic oligonucleotide
  Sense strand starting at position 331 of SEQ ID NO: 1563693
gcggaagauuugcauuugu

SEQ ID NO: 1825114 - RNA, 19 nt, Artificial Sequence
  Description of Artificial Sequence: Synthetic oligonucleotide
  Antisense strand to SEQ ID NO: 1825113
acaaaugcaaaucuuccgc

SEQ ID NO: 1825115 - RNA, 19 nt, Artificial Sequence
  Description of Artificial Sequence: Synthetic oligonucleotide
  Sense strand starting at position 350 of SEQ ID NO: 1563693
agagaaucugcacggaugu

SEQ ID NO: 1825116 - RNA, 19 nt, Artificial Sequence
  Description of Artificial Sequence: Synthetic oligonucleotide
  Antisense strand to SEQ ID NO: 1825115
acauccgugcagauucucu

SEQ ID NO: 1825117 - RNA, 19 nt, Artificial Sequence
  Description of Artificial Sequence: Synthetic oligonucleotide
  Sense strand starting at position 351 of SEQ ID NO: 1563693
gagaaucugcacggaugua

SEQ ID NO: 1825118 - RNA, 19 nt, Artificial Sequence
  Description of Artificial Sequence: Synthetic oligonucleotide
  Antisense strand to SEQ ID NO: 1825117
uacauccgugcagauucuc

SEQ ID NO: 1825119 - RNA, 19 nt, Artificial Sequence
  Description of Artificial Sequence: Synthetic oligonucleotide
  Sense strand starting at position 658 of SEQ ID NO: 1563693
ggguaaucacucuauuguu

SEQ ID NO: 1825120 - RNA, 19 nt, Artificial Sequence
  Description of Artificial Sequence: Synthetic oligonucleotide
  Antisense strand to SEQ ID NO: 1825119
aacaauagagugauuaccc

SEQ ID NO: 1825121 - RNA, 19 nt, Artificial Sequence
  Description of Artificial Sequence: Synthetic oligonucleotide
  Sense strand starting at position 781 of SEQ ID NO: 1563693
ucccuuggccuuuauagua

SEQ ID NO: 1825122 - RNA, 19 nt, Artificial Sequence
  Description of Artificial Sequence: Synthetic oligonucleotide
  Antisense strand to SEQ ID NO: 1825121
uacuauaaaggccaaggga

SEQ ID NO: 1825123 - RNA, 19 nt, Artificial Sequence
  Description of Artificial Sequence: Synthetic oligonucleotide
  Sense strand starting at position 1070 of SEQ ID NO: 1563693
gggauuaucgugcacagua

SEQ ID NO: 1825124 - RNA, 19 nt, Artificial Sequence
  Description of Artificial Sequence: Synthetic oligonucleotide
  Antisense strand to SEQ ID NO: 1825123
uacugugcacgauaauccc

SEQ ID NO: 1825125 - RNA, 19 nt, Artificial Sequence
  Description of Artificial Sequence: Synthetic oligonucleotide
  Sense strand starting at position 1072 of SEQ ID NO: 1563693
gauuaucgugcacaguaca

SEQ ID NO: 1825126 - RNA, 19 nt, Artificial Sequence
  Description of Artificial Sequence: Synthetic oligonucleotide
  Antisense strand to SEQ ID NO: 1825125
uguacugugcacgauaauc

SEQ ID NO: 1825127 - RNA, 19 nt, Artificial Sequence
  Description of Artificial Sequence: Synthetic oligonucleotide
  Sense strand starting at position 1088 of SEQ ID NO: 1563693
acagacugucacugucgaa

SEQ ID NO: 1825128 - RNA, 19 nt, Artificial Sequence
  Description of Artificial Sequence: Synthetic oligonucleotide
  Antisense strand to SEQ ID NO: 1825127
uucgacagugacagucugu

SEQ ID NO: 1825129 - RNA, 19 nt, Artificial Sequence
  Description of Artificial Sequence: Synthetic oligonucleotide
  Sense strand starting at position 1424 of SEQ ID NO: 1563693
cgggaguuggcgucuagca

SEQ ID NO: 1825130 - RNA, 19 nt, Artificial Sequence
  Description of Artificial Sequence: Synthetic oligonucleotide
  Antisense strand to SEQ ID NO: 1825129
ugcuagacgccaacucccg

SEQ ID NO: 1825131 - RNA, 19 nt, Artificial Sequence
  Description of Artificial Sequence: Synthetic oligonucleotide
  Sense strand starting at position 2301 of SEQ ID NO: 1563693
cagugucgcacgcuguaau

SEQ ID NO: 1825132 - RNA, 19 nt, Artificial Sequence
  Description of Artificial Sequence: Synthetic oligonucleotide
  Antisense strand to SEQ ID NO: 1825131
auuacagcgugcgacacug

SEQ ID NO: 1825133 - RNA, 19 nt, Artificial Sequence
  Description of Artificial Sequence: Synthetic oligonucleotide
  Sense strand starting at position 2406 of SEQ ID NO: 1563693
gagagcaguaaacgagaaa

SEQ ID NO: 1825134 - RNA, 19 nt, Artificial Sequence
  Description of Artificial Sequence: Synthetic oligonucleotide
  Antisense strand to SEQ ID NO: 1825133
uuucucguuuacugcucuc

SEQ ID NO: 1825135 - RNA, 19 nt, Artificial Sequence
  Description of Artificial Sequence: Synthetic oligonucleotide
  Sense strand starting at position 2409 of SEQ ID NO: 1563693
agcaguaaacgagaaaugu

SEQ ID NO: 1825136 - RNA, 19 nt, Artificial Sequence
  Description of Artificial Sequence: Synthetic oligonucleotide
  Antisense strand to SEQ ID NO: 1825135
acauuucucguuuacugcu

SEQ ID NO: 1825137 - RNA, 19 nt, Artificial Sequence
  Description of Artificial Sequence: Synthetic oligonucleotide
  Sense strand starting at position 2539 of SEQ ID NO: 1563693
gguauauaaagugaguugu

SEQ ID NO: 1825138 - RNA, 19 nt, Artificial Sequence
  Description of Artificial Sequence: Synthetic oligonucleotide
  Antisense strand to SEQ ID NO: 1825137
acaacucacuuuauauacc

SEQ ID NO: 1825139 - RNA, 19 nt, Artificial Sequence
  Description of Artificial Sequence: Synthetic oligonucleotide
  Sense strand starting at position 2697 of SEQ ID NO: 1563693
ucaguucuacaauacgaau

SEQ ID NO: 1825140 - RNA, 19 nt, Artificial Sequence
  Description of Artificial Sequence: Synthetic oligonucleotide
  Antisense strand to SEQ ID NO: 1825139
auucguauuguagaacuga

SEQ ID NO: 1825141 - RNA, 19 nt, Artificial Sequence
  Description of Artificial Sequence: Synthetic oligonucleotide
  Sense strand starting at position 2708 of SEQ ID NO: 1563693
auacgaauuaguuguagag

SEQ ID NO: 1825142 - RNA, 19 nt, Artificial Sequence
  Description of Artificial Sequence: Synthetic oligonucleotide
  Antisense strand to SEQ ID NO: 1825141
cucuacaacuaauucguau

SEQ ID NO: 1825143 - RNA, 19 nt, Artificial Sequence
  Description of Artificial Sequence: Synthetic oligonucleotide
  Sense strand starting at position 2789 of SEQ ID NO: 1563693
gccgccuuuauagucgaau

SEQ ID NO: 1825144 - RNA, 19 nt, Artificial Sequence
  Description of Artificial Sequence: Synthetic oligonucleotide
  Antisense strand to SEQ ID NO: 1825143
auucgacuauaaaggcggc

SEQ ID NO: 1825145 - RNA, 19 nt, Artificial Sequence
  Description of Artificial Sequence: Synthetic oligonucleotide
  Sense strand starting at position 2792 of SEQ ID NO: 1563693
gccuuuauagucgaauaac

SEQ ID NO: 1825146 - RNA, 19 nt, Artificial Sequence
  Description of Artificial Sequence: Synthetic oligonucleotide
  Antisense strand to SEQ ID NO: 1825145
guuauucgacuauaaaggc

SEQ ID NO: 1825147 - RNA, 19 nt, Artificial Sequence
  Description of Artificial Sequence: Synthetic oligonucleotide
  Sense strand starting at position 2860 of SEQ ID NO: 1563693
guuaaaccugcgggagaau

SEQ ID NO: 1825148 - RNA, 19 nt, Artificial Sequence
  Description of Artificial Sequence: Synthetic oligonucleotide
  Antisense strand to SEQ ID NO: 1825147
auucucccgcagguuuaac

SEQ ID NO: 1825149 - RNA, 19 nt, Artificial Sequence
  Description of Artificial Sequence: Synthetic oligonucleotide
  Sense strand starting at position 2949 of SEQ ID NO: 1563693
augguuaucaagugcagau

SEQ ID NO: 1825150 - RNA, 19 nt, Artificial Sequence
  Description of Artificial Sequence: Synthetic oligonucleotide
  Antisense strand to SEQ ID NO: 1825149
aucugcacuugauaaccau

SEQ ID NO: 1825151 - RNA, 19 nt, Artificial Sequence
  Description of Artificial Sequence: Synthetic oligonucleotide
  Sense strand starting at position 2959 of SEQ ID NO: 1563693
agugcagaucuuuaaggca

SEQ ID NO: 1825152 - RNA, 19 nt, Artificial Sequence
  Description of Artificial Sequence: Synthetic oligonucleotide
  Antisense strand to SEQ ID NO: 1825151
ugccuuaaagaucugcacu

SEQ ID NO: 1825153 - RNA, 19 nt, Artificial Sequence
  Description of Artificial Sequence: Synthetic oligonucleotide
  Sense strand starting at position 3003 of SEQ ID NO: 1563693
gacacaugaugggcgagau

SEQ ID NO: 1825154 - RNA, 19 nt, Artificial Sequence
  Description of Artificial Sequence: Synthetic oligonucleotide
  Antisense strand to SEQ ID NO: 1825153
aucucgcccaucauguguc

SEQ ID NO: 1825155 - RNA, 19 nt, Artificial Sequence
  Description of Artificial Sequence: Synthetic oligonucleotide
  Sense strand starting at position 3007 of SEQ ID NO: 1563693
caugaugggcgagauguau

SEQ ID NO: 1825156 - RNA, 19 nt, Artificial Sequence
  Description of Artificial Sequence: Synthetic oligonucleotide
  Antisense strand to SEQ ID NO: 1825155
auacaucucgcccaucaug

SEQ ID NO: 1825157 - RNA, 19 nt, Artificial Sequence
  Description of Artificial Sequence: Synthetic oligonucleotide
  Sense strand starting at position 3013 of SEQ ID NO: 1563693
gggcgagauguauauucug

SEQ ID NO: 1825158 - RNA, 19 nt, Artificial Sequence
  Description of Artificial Sequence: Synthetic oligonucleotide
  Antisense strand to SEQ ID NO: 1825157
cagaauauacaucucgccc

SEQ ID NO: 1825159 - RNA, 19 nt, Artificial Sequence
  Description of Artificial Sequence: Synthetic oligonucleotide
  Sense strand starting at position 3165 of SEQ ID NO: 1563693
gaagcucauccagguuaca

SEQ ID NO: 1825160 - RNA, 19 nt, Artificial Sequence
  Description of Artificial Sequence: Synthetic oligonucleotide
  Antisense strand to SEQ ID NO: 1825159
uguaaccuggaugagcuuc

SEQ ID NO: 1825161 - RNA, 19 nt, Artificial Sequence
  Description of Artificial Sequence: Synthetic oligonucleotide
  Sense strand starting at position 3168 of SEQ ID NO: 1563693
gcucauccagguuacauaa

SEQ ID NO: 1825162 - RNA, 19 nt, Artificial Sequence
  Description of Artificial Sequence: Synthetic oligonucleotide
  Antisense strand to SEQ ID NO: 1825161
uuauguaaccuggaugagc

SEQ ID NO: 1825163 - RNA, 19 nt, Artificial Sequence
  Description of Artificial Sequence: Synthetic oligonucleotide
  Sense strand starting at position 3425 of SEQ ID NO: 1563693
ucuauuaaagcugagagua

SEQ ID NO: 1825164 - RNA, 19 nt, Artificial Sequence
  Description of Artificial Sequence: Synthetic oligonucleotide
  Antisense strand to SEQ ID NO: 1825163
uacucucagcuuuaauaga

SEQ ID NO: 1825165 - RNA, 19 nt, Artificial Sequence
  Description of Artificial Sequence: Synthetic oligonucleotide
  Sense strand starting at position 3548 of SEQ ID NO: 1563693
ugcaauagcccagauugga

SEQ ID NO: 1825166 - RNA, 19 nt, Artificial Sequence
  Description of Artificial Sequence: Synthetic oligonucleotide
  Antisense strand to SEQ ID NO: 1825165
uccaaucugggcuauugca

SEQ ID NO: 1825167 - RNA, 19 nt, Artificial Sequence
  Description of Artificial Sequence: Synthetic oligonucleotide
  Sense strand starting at position 3601 of SEQ ID NO: 1563693
agacauugugaugguauag

SEQ ID NO: 1825168 - RNA, 19 nt, Artificial Sequence
  Description of Artificial Sequence: Synthetic oligonucleotide
  Antisense strand to SEQ ID NO: 1825167
cuauaccaucacaaugucu

SEQ ID NO: 1825169 - RNA, 19 nt, Artificial Sequence
  Description of Artificial Sequence: Synthetic oligonucleotide
  Sense strand starting at position 3640 of SEQ ID NO: 1563693
cagcaaugagacugcauga

SEQ ID NO: 1825170 - RNA, 19 nt, Artificial Sequence
  Description of Artificial Sequence: Synthetic oligonucleotide
  Antisense strand to SEQ ID NO: 1825169
ucaugcagucucauugcug

SEQ ID NO: 1825171 - RNA, 19 nt, Artificial Sequence
  Description of Artificial Sequence: Synthetic oligonucleotide
  Sense strand starting at position 3791 of SEQ ID NO: 1563693
gauagcggucacuggagaa

SEQ ID NO: 1825172 - RNA, 19 nt, Artificial Sequence
  Description of Artificial Sequence: Synthetic oligonucleotide
  Antisense strand to SEQ ID NO: 1825171
uucuccagugaccgcuauc

SEQ ID NO: 1825173 - RNA, 19 nt, Artificial Sequence
  Description of Artificial Sequence: Synthetic oligonucleotide
  Sense strand starting at position 3839 of SEQ ID NO: 1563693
ucuugaucuggguacaguu

SEQ ID NO: 1825174 - RNA, 19 nt, Artificial Sequence
  Description of Artificial Sequence: Synthetic oligonucleotide
  Antisense strand to SEQ ID NO: 1825173
aacuguacccagaucaaga

SEQ ID NO: 1825175 - RNA, 19 nt, Artificial Sequence
  Description of Artificial Sequence: Synthetic oligonucleotide
  Sense strand starting at position 3930 of SEQ ID NO: 1563693
auuaacaguugcuugaauu

SEQ ID NO: 1825176 - RNA, 19 nt, Artificial Sequence
  Description of Artificial Sequence: Synthetic oligonucleotide
  Antisense strand to SEQ ID NO: 1825175
aauucaagcaacuguuaau

SEQ ID NO: 1825177 - RNA, 19 nt, Artificial Sequence
  Description of Artificial Sequence: Synthetic oligonucleotide
  Sense strand starting at position 3952 of SEQ ID NO: 1563693
aaaguuaagcgugauacca

SEQ ID NO: 1825178 - RNA, 19 nt, Artificial Sequence
  Description of Artificial Sequence: Synthetic oligonucleotide
  Antisense strand to SEQ ID NO: 1825177
ugguaucacgcuuaacuuu

SEQ ID NO: 1825179 - RNA, 19 nt, Artificial Sequence
  Description of Artificial Sequence: Synthetic oligonucleotide
  Sense strand starting at position 3962 of SEQ ID NO: 1563693
gugauaccagaguaaguau

SEQ ID NO: 1825180 - RNA, 19 nt, Artificial Sequence
  Description of Artificial Sequence: Synthetic oligonucleotide
  Antisense strand to SEQ ID NO: 1825179
auacuuacucugguaucac

SEQ ID NO: 1825181 - RNA, 19 nt, Artificial Sequence
  Description of Artificial Sequence: Synthetic oligonucleotide
  Sense strand starting at position 337 of SEQ ID NO: 1563694
ccuuguguguaauuugcua

SEQ ID NO: 1825182 - RNA, 19 nt, Artificial Sequence
  Description of Artificial Sequence: Synthetic oligonucleotide
  Antisense strand to SEQ ID NO: 1825181
uagcaaauuacacacaagg

SEQ ID NO: 1825183 - RNA, 19 nt, Artificial Sequence
  Description of Artificial Sequence: Synthetic oligonucleotide
  Sense strand starting at position 345 of SEQ ID NO: 1563694
guaauuugcuaucugaguu

SEQ ID NO: 1825184 - RNA, 19 nt, Artificial Sequence
  Description of Artificial Sequence: Synthetic oligonucleotide
  Antisense strand to SEQ ID NO: 1825183
aacucagauagcaaauuac

SEQ ID NO: 1825185 - RNA, 19 nt, Artificial Sequence
  Description of Artificial Sequence: Synthetic oligonucleotide
  Sense strand starting at position 562 of SEQ ID NO: 1563694
acuggauucuggucaaaua

SEQ ID NO: 1825186 - RNA, 19 nt, Artificial Sequence
  Description of Artificial Sequence: Synthetic oligonucleotide
  Antisense strand to SEQ ID NO: 1825185
uauuugaccagaauccagu

SEQ ID NO: 1825187 - RNA, 19 nt, Artificial Sequence
  Description of Artificial Sequence: Synthetic oligonucleotide
  Sense strand starting at position 802 of SEQ ID NO: 1563694
ucagaauuaugguuugauu

SEQ ID NO: 1825188 - RNA, 19 nt, Artificial Sequence
  Description of Artificial Sequence: Synthetic oligonucleotide
  Antisense strand to SEQ ID NO: 1825187
aaucaaaccauaauucuga

SEQ ID NO: 1825189 - RNA, 19 nt, Artificial Sequence
  Description of Artificial Sequence: Synthetic oligonucleotide
  Sense strand starting at position 1067 of SEQ ID NO: 1563694
gugcaaccugaugaauuau

SEQ ID NO: 1825190 - RNA, 19 nt, Artificial Sequence
  Description of Artificial Sequence: Synthetic oligonucleotide
  Antisense strand to SEQ ID NO: 1825189
auaauucaucagguugcac

SEQ ID NO: 1825191 - RNA, 19 nt, Artificial Sequence
  Description of Artificial Sequence: Synthetic oligonucleotide
  Sense strand starting at position 1076 of SEQ ID NO: 1563694
gaugaauuauaaucugguu

SEQ ID NO: 1825192 - RNA, 19 nt, Artificial Sequence
  Description of Artificial Sequence: Synthetic oligonucleotide
  Antisense strand to SEQ ID NO: 1825191
aaccagauuauaauucauc

SEQ ID NO: 1825193 - RNA, 19 nt, Artificial Sequence
  Description of Artificial Sequence: Synthetic oligonucleotide
  Sense strand starting at position 1169 of SEQ ID NO: 1563694
agugaaaugagccaguuua

SEQ ID NO: 1825194 - RNA, 19 nt, Artificial Sequence
  Description of Artificial Sequence: Synthetic oligonucleotide
  Antisense strand to SEQ ID NO: 1825193
uaaacuggcucauuucacu

SEQ ID NO: 1825195 - RNA, 19 nt, Artificial Sequence
  Description of Artificial Sequence: Synthetic oligonucleotide
  Sense strand starting at position 1281 of SEQ ID NO: 1563694
cuaccuugugcagauaaug

SEQ ID NO: 1825196 - RNA, 19 nt, Artificial Sequence
  Description of Artificial Sequence: Synthetic oligonucleotide
  Antisense strand to SEQ ID NO: 1825195
cauuaucugcacaagguag

SEQ ID NO: 1825197 - RNA, 19 nt, Artificial Sequence
  Description of Artificial Sequence: Synthetic oligonucleotide
  Sense strand starting at position 1290 of SEQ ID NO: 1563694
gcagauaaugcauaguaua

SEQ ID NO: 1825198 - RNA, 19 nt, Artificial Sequence
  Description of Artificial Sequence: Synthetic oligonucleotide
  Antisense strand to SEQ ID NO: 1825197
uauacuaugcauuaucugc

SEQ ID NO: 1825199 - RNA, 19 nt, Artificial Sequence
  Description of Artificial Sequence: Synthetic oligonucleotide
  Sense strand starting at position 1373 of SEQ ID NO: 1563694
uagacuucugcagaggcua

SEQ ID NO: 1825200 - RNA, 19 nt, Artificial Sequence
  Description of Artificial Sequence: Synthetic oligonucleotide
  Antisense strand to SEQ ID NO: 1825199
uagccucugcagaagucua

SEQ ID NO: 1825201 - RNA, 19 nt, Artificial Sequence
  Description of Artificial Sequence: Synthetic oligonucleotide
  Sense strand starting at position 1384 of SEQ ID NO: 1563694
agaggcuagcuuuaucaga

SEQ ID NO: 1825202 - RNA, 19 nt, Artificial Sequence
  Description of Artificial Sequence: Synthetic oligonucleotide
  Antisense strand to SEQ ID NO: 1825201
ucugauaaagcuagccucu

SEQ ID NO: 1825203 - RNA, 19 nt, Artificial Sequence
  Description of Artificial Sequence: Synthetic oligonucleotide
  Sense strand starting at position 1636 of SEQ ID NO: 1563694
cccucaggagaaugucuau

SEQ ID NO: 1825204 - RNA, 19 nt, Artificial Sequence
  Description of Artificial Sequence: Synthetic oligonucleotide
  Antisense strand to SEQ ID NO: 1825203
auagacauucuccugaggg

SEQ ID NO: 1825205 - RNA, 19 nt, Artificial Sequence
  Description of Artificial Sequence: Synthetic oligonucleotide
  Sense strand starting at position 1643 of SEQ ID NO: 1563694
gagaaugucuaucucaagu

SEQ ID NO: 1825206 - RNA, 19 nt, Artificial Sequence
  Description of Artificial Sequence: Synthetic oligonucleotide
  Antisense strand to SEQ ID NO: 1825205
acuugagauagacauucuc

SEQ ID NO: 1825207 - RNA, 19 nt, Artificial Sequence
  Description of Artificial Sequence: Synthetic oligonucleotide
  Sense strand starting at position 1679 of SEQ ID NO: 1563694
ugucucugcuaauuugaca

SEQ ID NO: 1825208 - RNA, 19 nt, Artificial Sequence
  Description of Artificial Sequence: Synthetic oligonucleotide
  Antisense strand to SEQ ID NO: 1825207
ugucaaauuagcagagaca

SEQ ID NO: 1825209 - RNA, 19 nt, Artificial Sequence
  Description of Artificial Sequence: Synthetic oligonucleotide
  Sense strand starting at position 1684 of SEQ ID NO: 1563694
cugcuaauuugacaaauga

SEQ ID NO: 1825210 - RNA, 19 nt, Artificial Sequence
  Description of Artificial Sequence: Synthetic oligonucleotide
  Antisense strand to SEQ ID NO: 1825209
ucauuugucaaauuagcag

SEQ ID NO: 1825211 - RNA, 19 nt, Artificial Sequence
  Description of Artificial Sequence: Synthetic oligonucleotide
  Sense strand starting at position 2169 of SEQ ID NO: 1563694
guuacacuccaguaaccuu

SEQ ID NO: 1825212 - RNA, 19 nt, Artificial Sequence
  Description of Artificial Sequence: Synthetic oligonucleotide
  Antisense strand to SEQ ID NO: 1825211
aagguuacuggaguguaac

SEQ ID NO: 1825213 - RNA, 19 nt, Artificial Sequence
  Description of Artificial Sequence: Synthetic oligonucleotide
  Sense strand starting at position 2193 of SEQ ID NO: 1563694
gcacgauugacugaaguua

SEQ ID NO: 1825214 - RNA, 19 nt, Artificial Sequence
  Description of Artificial Sequence: Synthetic oligonucleotide
  Antisense strand to SEQ ID NO: 1825213
uaacuucagucaaucgugc

SEQ ID NO: 1825215 - RNA, 19 nt, Artificial Sequence
  Description of Artificial Sequence: Synthetic oligonucleotide
  Sense strand starting at position 2286 of SEQ ID NO: 1563694
auacaaauauuggugcaaa

SEQ ID NO: 1825216 - RNA, 19 nt, Artificial Sequence
  Description of Artificial Sequence: Synthetic oligonucleotide
  Antisense strand to SEQ ID NO: 1825215
uuugcaccaauauuuguau

SEQ ID NO: 1825217 - RNA, 19 nt, Artificial Sequence
  Description of Artificial Sequence: Synthetic oligonucleotide
  Sense strand starting at position 2324 of SEQ ID NO: 1563694
guggauggcuuauuugcaa

SEQ ID NO: 1825218 - RNA, 19 nt, Artificial Sequence
  Description of Artificial Sequence: Synthetic oligonucleotide
  Antisense strand to SEQ ID NO: 1825217
uugcaaauaagccauccac

SEQ ID NO: 1825219 - RNA, 19 nt, Artificial Sequence
  Description of Artificial Sequence: Synthetic oligonucleotide
  Sense strand starting at position 2427 of SEQ ID NO: 1563694
ucaugaucaucuguggacu

SEQ ID NO: 1825220 - RNA, 19 nt, Artificial Sequence
  Description of Artificial Sequence: Synthetic oligonucleotide
  Antisense strand to SEQ ID NO: 1825219
aguccacagaugaucauga

SEQ ID NO: 1825221 - RNA, 19 nt, Artificial Sequence
  Description of Artificial Sequence: Synthetic oligonucleotide
  Sense strand starting at position 2526 of SEQ ID NO: 1563694
ccaguuugguuacuaauga

SEQ ID NO: 1825222 - RNA, 19 nt, Artificial Sequence
  Description of Artificial Sequence: Synthetic oligonucleotide
  Antisense strand to SEQ ID NO: 1825221
ucauuaguaaccaaacugg

SEQ ID NO: 1825223 - RNA, 19 nt, Artificial Sequence
  Description of Artificial Sequence: Synthetic oligonucleotide
  Sense strand starting at position 2627 of SEQ ID NO: 1563694
uuggcaaauccugggaagu

SEQ ID NO: 1825224 - RNA, 19 nt, Artificial Sequence
  Description of Artificial Sequence: Synthetic oligonucleotide
  Antisense strand to SEQ ID NO: 1825223
acuucccaggauuugccaa

SEQ ID NO: 1825225 - RNA, 19 nt, Artificial Sequence
  Description of Artificial Sequence: Synthetic oligonucleotide
  Sense strand starting at position 2628 of SEQ ID NO: 1563694
uggcaaauccugggaagug

SEQ ID NO: 1825226 - RNA, 19 nt, Artificial Sequence
  Description of Artificial Sequence: Synthetic oligonucleotide
  Antisense strand to SEQ ID NO: 1825225
cacuucccaggauuugcca

SEQ ID NO: 1825227 - RNA, 19 nt, Artificial Sequence
  Description of Artificial Sequence: Synthetic oligonucleotide
  Sense strand starting at position 2647 of SEQ ID NO: 1563694
ccaaguaugccucagauca

SEQ ID NO: 1825228 - RNA, 19 nt, Artificial Sequence
  Description of Artificial Sequence: Synthetic oligonucleotide
  Antisense strand to SEQ ID NO: 1825227
ugaucugaggcauacuugg

SEQ ID NO: 1825229 - RNA, 19 nt, Artificial Sequence
  Description of Artificial Sequence: Synthetic oligonucleotide
  Sense strand starting at position 2685 of SEQ ID NO: 1563694
uugugaaaccaugacuagu

SEQ ID NO: 1825230 - RNA, 19 nt, Artificial Sequence
  Description of Artificial Sequence: Synthetic oligonucleotide
  Antisense strand to SEQ ID NO: 1825229
acuagucaugguuucacaa

SEQ ID NO: 1825231 - RNA, 19 nt, Artificial Sequence
  Description of Artificial Sequence: Synthetic oligonucleotide
  Sense strand starting at position 2848 of SEQ ID NO: 1563694
ccucucauccuugaguagu

SEQ ID NO: 1825232 - RNA, 19 nt, Artificial Sequence
  Description of Artificial Sequence: Synthetic oligonucleotide
  Antisense strand to SEQ ID NO: 1825231
acuacucaaggaugagagg

SEQ ID NO: 1825233 - RNA, 19 nt, Artificial Sequence
  Description of Artificial Sequence: Synthetic oligonucleotide
  Sense strand starting at position 2851 of SEQ ID NO: 1563694
cucauccuugaguaguuaa

SEQ ID NO: 1825234 - RNA, 19 nt, Artificial Sequence
  Description of Artificial Sequence: Synthetic oligonucleotide
  Antisense strand to SEQ ID NO: 1825233
uuaacuacucaaggaugag

SEQ ID NO: 1825235 - RNA, 19 nt, Artificial Sequence
  Description of Artificial Sequence: Synthetic oligonucleotide
  Sense strand starting at position 2863 of SEQ ID NO: 1563694
uaguuaaaccagugggagu

SEQ ID NO: 1825236 - RNA, 19 nt, Artificial Sequence
  Description of Artificial Sequence: Synthetic oligonucleotide
  Antisense strand to SEQ ID NO: 1825235
acucccacugguuuaacua

SEQ ID NO: 1825237 - RNA, 19 nt, Artificial Sequence
  Description of Artificial Sequence: Synthetic oligonucleotide
  Sense strand starting at position 2987 of SEQ ID NO: 1563694
cgcaaugcuuaccuuauuu

SEQ ID NO: 1825238 - RNA, 19 nt, Artificial Sequence
  Description of Artificial Sequence: Synthetic oligonucleotide
  Antisense strand to SEQ ID NO: 1825237
aaauaagguaagcauugcg

SEQ ID NO: 1825239 - RNA, 19 nt, Artificial Sequence
  Description of Artificial Sequence: Synthetic oligonucleotide
  Sense strand starting at position 3063 of SEQ ID NO: 1563694
gugagaacugccuaaagug

SEQ ID NO: 1825240 - RNA, 19 nt, Artificial Sequence
  Description of Artificial Sequence: Synthetic oligonucleotide
  Antisense strand to SEQ ID NO: 1825239
cacuuuaggcaguucucac

SEQ ID NO: 1825241 - RNA, 19 nt, Artificial Sequence
  Description of Artificial Sequence: Synthetic oligonucleotide
  Sense strand starting at position 3072 of SEQ ID NO: 1563694
gccuaaaguguccagauug

SEQ ID NO: 1825242 - RNA, 19 nt, Artificial Sequence
  Description of Artificial Sequence: Synthetic oligonucleotide
  Antisense strand to SEQ ID NO: 1825241
caaucuggacacuuuaggc

SEQ ID NO: 1825243 - RNA, 19 nt, Artificial Sequence
  Description of Artificial Sequence: Synthetic oligonucleotide
  Sense strand starting at position 3140 of SEQ ID NO: 1563694
ugacucauccaggguuaca

SEQ ID NO: 1825244 - RNA, 19 nt, Artificial Sequence
  Description of Artificial Sequence: Synthetic oligonucleotide
  Antisense strand to SEQ ID NO: 1825243
uguaacccuggaugaguca

SEQ ID NO: 1825245 - RNA, 19 nt, Artificial Sequence
  Description of Artificial Sequence: Synthetic oligonucleotide
  Sense strand starting at position 3216 of SEQ ID NO: 1563694
aauguaucauguuccagga

SEQ ID NO: 1825246 - RNA, 19 nt, Artificial Sequence
  Description of Artificial Sequence: Synthetic oligonucleotide
  Antisense strand to SEQ ID NO: 1825245
uccuggaacaugauacauu

SEQ ID NO: 1825247 - RNA, 19 nt, Artificial Sequence
  Description of Artificial Sequence: Synthetic oligonucleotide
  Sense strand starting at position 3220 of SEQ ID NO: 1563694
uaucauguuccaggaagga

SEQ ID NO: 1825248 - RNA, 19 nt, Artificial Sequence
  Description of Artificial Sequence: Synthetic oligonucleotide
  Antisense strand to SEQ ID NO: 1825247
uccuuccuggaacaugaua

SEQ ID NO: 1825249 - RNA, 19 nt, Artificial Sequence
  Description of Artificial Sequence: Synthetic oligonucleotide
  Sense strand starting at position 3281 of SEQ ID NO: 1563694
acagaaauggaaugcuauu

SEQ ID NO: 1825250 - RNA, 19 nt, Artificial Sequence
  Description of Artificial Sequence: Synthetic oligonucleotide
  Antisense strand to SEQ ID NO: 1825249
aauagcauuccauuucugu

SEQ ID NO: 1825251 - RNA, 19 nt, Artificial Sequence
  Description of Artificial Sequence: Synthetic oligonucleotide
  Sense strand starting at position 3305 of SEQ ID NO: 1563694
gugauugaaagauaguugu

SEQ ID NO: 1825252 - RNA, 19 nt, Artificial Sequence
  Description of Artificial Sequence: Synthetic oligonucleotide
  Antisense strand to SEQ ID NO: 1825251
acaacuaucuuucaaucac

SEQ ID NO: 1825253 - RNA, 19 nt, Artificial Sequence
  Description of Artificial Sequence: Synthetic oligonucleotide
  Sense strand starting at position 3574 of SEQ ID NO: 1563694
ucgcuaugugccuuacauc

SEQ ID NO: 1825254 - RNA, 19 nt, Artificial Sequence
  Description of Artificial Sequence: Synthetic oligonucleotide
  Antisense strand to SEQ ID NO: 1825253
gauguaaggcacauagcga

SEQ ID NO: 1825255 - RNA, 19 nt, Artificial Sequence
  Description of Artificial Sequence: Synthetic oligonucleotide
  Sense strand starting at position 3851 of SEQ ID NO: 1563694
gugugggacggguaaauau

SEQ ID NO: 1825256 - RNA, 19 nt, Artificial Sequence
  Description of Artificial Sequence: Synthetic oligonucleotide
  Antisense strand to SEQ ID NO: 1825255
auauuuacccgucccacac

SEQ ID NO: 1825257 - RNA, 19 nt, Artificial Sequence
  Description of Artificial Sequence: Synthetic oligonucleotide
  Sense strand starting at position 3888 of SEQ ID NO: 1563694
gggagccaucuuggaaacu

SEQ ID NO: 1825258 - RNA, 19 nt, Artificial Sequence
  Description of Artificial Sequence: Synthetic oligonucleotide
  Antisense strand to SEQ ID NO: 1825257
aguuuccaagauggcuccc

SEQ ID NO: 1825259 - RNA, 19 nt, Artificial Sequence
  Description of Artificial Sequence: Synthetic oligonucleotide
  Sense strand starting at position 3921 of SEQ ID NO: 1563694
ucaaucaaccguugaaaca

SEQ ID NO: 1825260 - RNA, 19 nt, Artificial Sequence
  Description of Artificial Sequence: Synthetic oligonucleotide
  Antisense strand to SEQ ID NO: 1825259
uguuucaacgguugauuga

SEQ ID NO: 1825261 - RNA, 19 nt, Artificial Sequence
  Description of Artificial Sequence: Synthetic oligonucleotide
  Sense strand starting at position 283 of SEQ ID NO: 1563695
aggucuuucugagucacaa

SEQ ID NO: 1825262 - RNA, 19 nt, Artificial Sequence
  Description of Artificial Sequence: Synthetic oligonucleotide
  Antisense strand to SEQ ID NO: 1825261
uugugacucagaaagaccu

SEQ ID NO: 1825263 - RNA, 19 nt, Artificial Sequence
  Description of Artificial Sequence: Synthetic oligonucleotide
  Sense strand starting at position 357 of SEQ ID NO: 1563695
gugcaaauccagcagagua

SEQ ID NO: 1825264 - RNA, 19 nt, Artificial Sequence
  Description of Artificial Sequence: Synthetic oligonucleotide
  Antisense strand to SEQ ID NO: 1825263
uacucugcuggauuugcac

SEQ ID NO: 1825265 - RNA, 19 nt, Artificial Sequence
  Description of Artificial Sequence: Synthetic oligonucleotide
  Sense strand starting at position 582 of SEQ ID NO: 1563695
caguaaagcccuugguaga

SEQ ID NO: 1825266 - RNA, 19 nt, Artificial Sequence
  Description of Artificial Sequence: Synthetic oligonucleotide
  Antisense strand to SEQ ID NO: 1825265
ucuaccaagggcuuuacug

SEQ ID NO: 1825267 - RNA, 19 nt, Artificial Sequence
  Description of Artificial Sequence: Synthetic oligonucleotide
  Sense strand starting at position 735 of SEQ ID NO: 1563695
acgucauacucuucucauu

SEQ ID NO: 1825268 - RNA, 19 nt, Artificial Sequence
  Description of Artificial Sequence: Synthetic oligonucleotide
  Antisense strand to SEQ ID NO: 1825267
aaugagaagaguaugacgu

SEQ ID NO: 1825269 - RNA, 19 nt, Artificial Sequence
  Description of Artificial Sequence: Synthetic oligonucleotide
  Sense strand starting at position 832 of SEQ ID NO: 1563695
ggcgccacauauucuagaa

SEQ ID NO: 1825270 - RNA, 19 nt, Artificial Sequence
  Description of Artificial Sequence: Synthetic oligonucleotide
  Antisense strand to SEQ ID NO: 1825269
uucuagaauauguggcgcc

SEQ ID NO: 1825271 - RNA, 19 nt, Artificial Sequence
  Description of Artificial Sequence: Synthetic oligonucleotide
  Sense strand starting at position 860 of SEQ ID NO: 1563695
ugaauugguacuugucagu

SEQ ID NO: 1825272 - RNA, 19 nt, Artificial Sequence
  Description of Artificial Sequence: Synthetic oligonucleotide
  Antisense strand to SEQ ID NO: 1825271
acugacaaguaccaauuca

SEQ ID NO: 1825273 - RNA, 19 nt, Artificial Sequence
  Description of Artificial Sequence: Synthetic oligonucleotide
  Sense strand starting at position 866 of SEQ ID NO: 1563695
gguacuugucaguaugucu

SEQ ID NO: 1825274 - RNA, 19 nt, Artificial Sequence
  Description of Artificial Sequence: Synthetic oligonucleotide
  Antisense strand to SEQ ID NO: 1825273
agacauacugacaaguacc

SEQ ID NO: 1825275 - RNA, 19 nt, Artificial Sequence
  Description of Artificial Sequence: Synthetic oligonucleotide
  Sense strand starting at position 2142 of SEQ ID NO: 1563695
cauuucuggcgcugcuaua

SEQ ID NO: 1825276 - RNA, 19 nt, Artificial Sequence
  Description of Artificial Sequence: Synthetic oligonucleotide
  Antisense strand to SEQ ID NO: 1825275
uauagcagcgccagaaaug

SEQ ID NO: 1825277 - RNA, 19 nt, Artificial Sequence
  Description of Artificial Sequence: Synthetic oligonucleotide
  Sense strand starting at position 2348 of SEQ ID NO: 1563695
cccuccuuccuggauguua

SEQ ID NO: 1825278 - RNA, 19 nt, Artificial Sequence
  Description of Artificial Sequence: Synthetic oligonucleotide
  Antisense strand to SEQ ID NO: 1825277
uaacauccaggaaggaggg

SEQ ID NO: 1825279 - RNA, 19 nt, Artificial Sequence
  Description of Artificial Sequence: Synthetic oligonucleotide
  Sense strand starting at position 2812 of SEQ ID NO: 1563695
agucuucucuugccaugau

SEQ ID NO: 1825280 - RNA, 19 nt, Artificial Sequence
  Description of Artificial Sequence: Synthetic oligonucleotide
  Antisense strand to SEQ ID NO: 1825279
aucauggcaagagaagacu

SEQ ID NO: 1825281 - RNA, 19 nt, Artificial Sequence
  Description of Artificial Sequence: Synthetic oligonucleotide
  Sense strand starting at position 2822 of SEQ ID NO: 1563695
ugccaugauauuuggcagu

SEQ ID NO: 1825282 - RNA, 19 nt, Artificial Sequence
  Description of Artificial Sequence: Synthetic oligonucleotide
  Antisense strand to SEQ ID NO: 1825281
acugccaaauaucauggca

SEQ ID NO: 1825283 - RNA, 19 nt, Artificial Sequence
  Description of Artificial Sequence: Synthetic oligonucleotide
  Sense strand starting at position 2824 of SEQ ID NO: 1563695
ccaugauauuuggcagugu

SEQ ID NO: 1825284 - RNA, 19 nt, Artificial Sequence
  Description of Artificial Sequence: Synthetic oligonucleotide
  Antisense strand to SEQ ID NO: 1825283
acacugccaaauaucaugg

SEQ ID NO: 1825285 - RNA, 19 nt, Artificial Sequence
  Description of Artificial Sequence: Synthetic oligonucleotide
  Sense strand starting at position 2842 of SEQ ID NO: 1563695
uggaaauguggcugguauc

SEQ ID NO: 1825286 - RNA, 19 nt, Artificial Sequence
  Description of Artificial Sequence: Synthetic oligonucleotide
  Antisense strand to SEQ ID NO: 1825285
gauaccagccacauuucca

SEQ ID NO: 1825287 - RNA, 19 nt, Artificial Sequence
  Description of Artificial Sequence: Synthetic oligonucleotide
  Sense strand starting at position 2843 of SEQ ID NO: 1563695
ggaaauguggcugguauca

SEQ ID NO: 1825288 - RNA, 19 nt, Artificial Sequence
  Description of Artificial Sequence: Synthetic oligonucleotide
  Antisense strand to SEQ ID NO: 1825287
ugauaccagccacauuucc

SEQ ID NO: 1825289 - RNA, 19 nt, Artificial Sequence
  Description of Artificial Sequence: Synthetic oligonucleotide
  Sense strand starting at position 3054 of SEQ ID NO: 1563695
gagcaaugugguuaaacac

SEQ ID NO: 1825290 - RNA, 19 nt, Artificial Sequence
  Description of Artificial Sequence: Synthetic oligonucleotide
  Antisense strand to SEQ ID NO: 1825289
guguuuaaccacauugcuc

SEQ ID NO: 1825291 - RNA, 19 nt, Artificial Sequence
  Description of Artificial Sequence: Synthetic oligonucleotide
  Sense strand starting at position 3083 of SEQ ID NO: 1563695
uuguuacuguuguccauuu

SEQ ID NO: 1825292 - RNA, 19 nt, Artificial Sequence
  Description of Artificial Sequence: Synthetic oligonucleotide
  Antisense strand to SEQ ID NO: 1825291
aaauggacaacaguaacaa

SEQ ID NO: 1825293 - RNA, 19 nt, Artificial Sequence
  Description of Artificial Sequence: Synthetic oligonucleotide
  Sense strand starting at position 3246 of SEQ ID NO: 1563695
aagauuauucuggguuauc

SEQ ID NO: 1825294 - RNA, 19 nt, Artificial Sequence
  Description of Artificial Sequence: Synthetic oligonucleotide
  Antisense strand to SEQ ID NO: 1825293
gauaacccagaauaaucuu

SEQ ID NO: 1825295 - RNA, 19 nt, Artificial Sequence
  Description of Artificial Sequence: Synthetic oligonucleotide
  Sense strand starting at position 3247 of SEQ ID NO: 1563695
agauuauucuggguuaucu

SEQ ID NO: 1825296 - RNA, 19 nt, Artificial Sequence
  Description of Artificial Sequence: Synthetic oligonucleotide
  Antisense strand to SEQ ID NO: 1825295
agauaacccagaauaaucu

SEQ ID NO: 1825297 - RNA, 19 nt, Artificial Sequence
  Description of Artificial Sequence: Synthetic oligonucleotide
  Sense strand starting at position 3255 of SEQ ID NO: 1563695
cuggguuaucuuggccaau

SEQ ID NO: 1825298 - RNA, 19 nt, Artificial Sequence
  Description of Artificial Sequence: Synthetic oligonucleotide
  Antisense strand to SEQ ID NO: 1825297
auuggccaagauaacccag

SEQ ID NO: 1825299 - RNA, 19 nt, Artificial Sequence
  Description of Artificial Sequence: Synthetic oligonucleotide
  Sense strand starting at position 3256 of SEQ ID NO: 1563695
uggguuaucuuggccaaug

SEQ ID NO: 1825300 - RNA, 19 nt, Artificial Sequence
  Description of Artificial Sequence: Synthetic oligonucleotide
  Antisense strand to SEQ ID NO: 1825299
cauuggccaagauaaccca

SEQ ID NO: 1825301 - RNA, 19 nt, Artificial Sequence
  Description of Artificial Sequence: Synthetic oligonucleotide
  Sense strand starting at position 3257 of SEQ ID NO: 1563695
ggguuaucuuggccaaugu

SEQ ID NO: 1825302 - RNA, 19 nt, Artificial Sequence
  Description of Artificial Sequence: Synthetic oligonucleotide
  Antisense strand to SEQ ID NO: 1825301
acauuggccaagauaaccc

SEQ ID NO: 1825303 - RNA, 19 nt, Artificial Sequence
  Description of Artificial Sequence: Synthetic oligonucleotide
  Sense strand starting at position 3258 of SEQ ID NO: 1563695
gguuaucuuggccaaugua

SEQ ID NO: 1825304 - RNA, 19 nt, Artificial Sequence
  Description of Artificial Sequence: Synthetic oligonucleotide
  Antisense strand to SEQ ID NO: 1825303
uacauuggccaagauaacc

SEQ ID NO: 1825305 - RNA, 19 nt, Artificial Sequence
  Description of Artificial Sequence: Synthetic oligonucleotide
  Sense strand starting at position 3278 of SEQ ID NO: 1563695
uugcaaggguacuuuagau

SEQ ID NO: 1825306 - RNA, 19 nt, Artificial Sequence
  Description of Artificial Sequence: Synthetic oligonucleotide
  Antisense strand to SEQ ID NO: 1825305
aucuaaaguacccuugcaa

SEQ ID NO: 1825307 - RNA, 19 nt, Artificial Sequence
  Description of Artificial Sequence: Synthetic oligonucleotide
  Sense strand starting at position 3284 of SEQ ID NO: 1563695
ggguacuuuagauguggaa

SEQ ID NO: 1825308 - RNA, 19 nt, Artificial Sequence
  Description of Artificial Sequence: Synthetic oligonucleotide
  Antisense strand to SEQ ID NO: 1825307
uuccacaucuaaaguaccc

SEQ ID NO: 1825309 - RNA, 19 nt, Artificial Sequence
  Description of Artificial Sequence: Synthetic oligonucleotide
  Sense strand starting at position 3317 of SEQ ID NO: 1563695
gucagauugaagcagcaua

SEQ ID NO: 1825310 - RNA, 19 nt, Artificial Sequence
  Description of Artificial Sequence: Synthetic oligonucleotide
  Antisense strand to SEQ ID NO: 1825309
uaugcugcuucaaucugac

SEQ ID NO: 1825311 - RNA, 19 nt, Artificial Sequence
  Description of Artificial Sequence: Synthetic oligonucleotide
  Sense strand starting at position 3336 of SEQ ID NO: 1563695
gaaagucuacacuggucau

SEQ ID NO: 1825312 - RNA, 19 nt, Artificial Sequence
  Description of Artificial Sequence: Synthetic oligonucleotide
  Antisense strand to SEQ ID NO: 1825311
augaccaguguagacuuuc

SEQ ID NO: 1825313 - RNA, 19 nt, Artificial Sequence
  Description of Artificial Sequence: Synthetic oligonucleotide
  Sense strand starting at position 3349 of SEQ ID NO: 1563695
ggucaucguuggcuuugaa

SEQ ID NO: 1825314 - RNA, 19 nt, Artificial Sequence
  Description of Artificial Sequence: Synthetic oligonucleotide
  Antisense strand to SEQ ID NO: 1825313
uucaaagccaacgaugacc

SEQ ID NO: 1825315 - RNA, 19 nt, Artificial Sequence
  Description of Artificial Sequence: Synthetic oligonucleotide
  Sense strand starting at position 3352 of SEQ ID NO: 1563695
caucguuggcuuugaagau

SEQ ID NO: 1825316 - RNA, 19 nt, Artificial Sequence
  Description of Artificial Sequence: Synthetic oligonucleotide
  Antisense strand to SEQ ID NO: 1825315
aucuucaaagccaacgaug

SEQ ID NO: 1825317 - RNA, 19 nt, Artificial Sequence
  Description of Artificial Sequence: Synthetic oligonucleotide
  Sense strand starting at position 3493 of SEQ ID NO: 1563695
ggugaagcccuuugaagau

SEQ ID NO: 1825318 - RNA, 19 nt, Artificial Sequence
  Description of Artificial Sequence: Synthetic oligonucleotide
  Antisense strand to SEQ ID NO: 1825317
aucuucaaagggcuucacc

SEQ ID NO: 1825319 - RNA, 19 nt, Artificial Sequence
  Description of Artificial Sequence: Synthetic oligonucleotide
  Sense strand starting at position 3568 of SEQ ID NO: 1563695
cauguaugguaacugguua

SEQ ID NO: 1825320 - RNA, 19 nt, Artificial Sequence
  Description of Artificial Sequence: Synthetic oligonucleotide
  Antisense strand to SEQ ID NO: 1825319
uaaccaguuaccauacaug

SEQ ID NO: 1825321 - RNA, 19 nt, Artificial Sequence
  Description of Artificial Sequence: Synthetic oligonucleotide
  Sense strand starting at position 3602 of SEQ ID NO: 1563695
agaccuaucugguuuaacu

SEQ ID NO: 1825322 - RNA, 19 nt, Artificial Sequence
  Description of Artificial Sequence: Synthetic oligonucleotide
  Antisense strand to SEQ ID NO: 1825321
aguuaaaccagauaggucu

SEQ ID NO: 1825323 - RNA, 19 nt, Artificial Sequence
  Description of Artificial Sequence: Synthetic oligonucleotide
  Sense strand starting at position 3668 of SEQ ID NO: 1563695
agaucauguuaccugagca

SEQ ID NO: 1825324 - RNA, 19 nt, Artificial Sequence
  Description of Artificial Sequence: Synthetic oligonucleotide
  Antisense strand to SEQ ID NO: 1825323
ugcucagguaacaugaucu

SEQ ID NO: 1825325 - RNA, 19 nt, Artificial Sequence
  Description of Artificial Sequence: Synthetic oligonucleotide
  Sense strand starting at position 3804 of SEQ ID NO: 1563695
gcaucaccucauuguaaga

SEQ ID NO: 1825326 - RNA, 19 nt, Artificial Sequence
  Description of Artificial Sequence: Synthetic oligonucleotide
  Antisense strand to SEQ ID NO: 1825325
ucuuacaaugaggugaugc

SEQ ID NO: 1825327 - RNA, 19 nt, Artificial Sequence
  Description of Artificial Sequence: Synthetic oligonucleotide
  Sense strand starting at position 3906 of SEQ ID NO: 1563695
ggaaguaucccuggugguc

SEQ ID NO: 1825328 - RNA, 19 nt, Artificial Sequence
  Description of Artificial Sequence: Synthetic oligonucleotide
  Antisense strand to SEQ ID NO: 1825327
gaccaccagggauacuucc

SEQ ID NO: 1825329 - RNA, 19 nt, Artificial Sequence
  Description of Artificial Sequence: Synthetic oligonucleotide
  Sense strand starting at position 3920 of SEQ ID NO: 1563695
uggucucauuacuucguua

SEQ ID NO: 1825330 - RNA, 19 nt, Artificial Sequence
  Description of Artificial Sequence: Synthetic oligonucleotide
  Antisense strand to SEQ ID NO: 1825329
uaacgaaguaaugagacca

SEQ ID NO: 1825331 - RNA, 19 nt, Artificial Sequence
  Description of Artificial Sequence: Synthetic oligonucleotide
  Sense strand starting at position 3922 of SEQ ID NO: 1563695
gucucauuacuucguuaca

SEQ ID NO: 1825332 - RNA, 19 nt, Artificial Sequence
  Description of Artificial Sequence: Synthetic oligonucleotide
  Antisense strand to SEQ ID NO: 1825331
uguaacgaaguaaugagac

SEQ ID NO: 1825333 - RNA, 19 nt, Artificial Sequence
  Description of Artificial Sequence: Synthetic oligonucleotide
  Sense strand starting at position 3924 of SEQ ID NO: 1563695
cucauuacuucguuacaag

SEQ ID NO: 1825334 - RNA, 19 nt, Artificial Sequence
  Description of Artificial Sequence: Synthetic oligonucleotide
  Antisense strand to SEQ ID NO: 1825333
cuuguaacgaaguaaugag

SEQ ID NO: 1825335 - RNA, 19 nt, Artificial Sequence
  Description of Artificial Sequence: Synthetic oligonucleotide
  Sense strand starting at position 3925 of SEQ ID NO: 1563695
ucauuacuucguuacaagu

SEQ ID NO: 1825336 - RNA, 19 nt, Artificial Sequence
  Description of Artificial Sequence: Synthetic oligonucleotide
  Antisense strand to SEQ ID NO: 1825335
acuuguaacgaaguaauga

SEQ ID NO: 1825337 - RNA, 19 nt, Artificial Sequence
  Description of Artificial Sequence: Synthetic oligonucleotide
  Sense strand starting at position 3957 of SEQ ID NO: 1563695
acuaaauccuugcugugau

SEQ ID NO: 1825338 - RNA, 19 nt, Artificial Sequence
  Description of Artificial Sequence: Synthetic oligonucleotide
  Antisense strand to SEQ ID NO: 1825337
aucacagcaaggauuuagu

SEQ ID NO: 1825339 - RNA, 19 nt, Artificial Sequence
  Description of Artificial Sequence: Synthetic oligonucleotide
  Sense strand starting at position 3982 of SEQ ID NO: 1563695
guugaugucaaacgacuga

SEQ ID NO: 1825340 - RNA, 19 nt, Artificial Sequence
  Description of Artificial Sequence: Synthetic oligonucleotide
  Antisense strand to SEQ ID NO: 1825339
ucagucguuugacaucaac

SEQ ID NO: 1825341 - RNA, 19 nt, Artificial Sequence
  Description of Artificial Sequence: Synthetic oligonucleotide
  Sense strand starting at position 318 of SEQ ID NO: 1563696
aggucuuucugagucacaa

SEQ ID NO: 1825342 - RNA, 19 nt, Artificial Sequence
  Description of Artificial Sequence: Synthetic oligonucleotide
  Antisense strand to SEQ ID NO: 1825341
uugugacucagaaagaccu

SEQ ID NO: 1825343 - RNA, 19 nt, Artificial Sequence
  Description of Artificial Sequence: Synthetic oligonucleotide
  Sense strand starting at position 392 of SEQ ID NO: 1563696
gugcaaauccagcagagua

SEQ ID NO: 1825344 - RNA, 19 nt, Artificial Sequence
  Description of Artificial Sequence: Synthetic oligonucleotide
  Antisense strand to SEQ ID NO: 1825343
uacucugcuggauuugcac

SEQ ID NO: 1825345 - RNA, 19 nt, Artificial Sequence
  Description of Artificial Sequence: Synthetic oligonucleotide
  Sense strand starting at position 617 of SEQ ID NO: 1563696
caguaaagcccuugguaga

SEQ ID NO: 1825346 - RNA, 19 nt, Artificial Sequence
  Description of Artificial Sequence: Synthetic oligonucleotide
  Antisense strand to SEQ ID NO: 1825345
ucuaccaagggcuuuacug

SEQ ID NO: 1825347 - RNA, 19 nt, Artificial Sequence
  Description of Artificial Sequence: Synthetic oligonucleotide
  Sense strand starting at position 770 of SEQ ID NO: 1563696
acgucauacucuucucauu

SEQ ID NO: 1825348 - RNA, 19 nt, Artificial Sequence
  Description of Artificial Sequence: Synthetic oligonucleotide
  Antisense strand to SEQ ID NO: 1825347
aaugagaagaguaugacgu

SEQ ID NO: 1825349 - RNA, 19 nt, Artificial Sequence
  Description of Artificial Sequence: Synthetic oligonucleotide
  Sense strand starting at position 867 of SEQ ID NO: 1563696
ggcgccacauauucuagaa

SEQ ID NO: 1825350 - RNA, 19 nt, Artificial Sequence
  Description of Artificial Sequence: Synthetic oligonucleotide
  Antisense strand to SEQ ID NO: 1825349
uucuagaauauguggcgcc

SEQ ID NO: 1825351 - RNA, 19 nt, Artificial Sequence
  Description of Artificial Sequence: Synthetic oligonucleotide
  Sense strand starting at position 895 of SEQ ID NO: 1563696
ugaauugguacuugucagu

SEQ ID NO: 1825352 - RNA, 19 nt, Artificial Sequence
  Description of Artificial Sequence: Synthetic oligonucleotide
  Antisense strand to SEQ ID NO: 1825351
acugacaaguaccaauuca

SEQ ID NO: 1825353 - RNA, 19 nt, Artificial Sequence
  Description of Artificial Sequence: Synthetic oligonucleotide
  Sense strand starting at position 901 of SEQ ID NO: 1563696
gguacuugucaguaugucu

SEQ ID NO: 1825354 - RNA, 19 nt, Artificial Sequence
  Description of Artificial Sequence: Synthetic oligonucleotide
  Antisense strand to SEQ ID NO: 1825353
agacauacugacaaguacc

SEQ ID NO: 1825355 - RNA, 19 nt, Artificial Sequence
  Description of Artificial Sequence: Synthetic oligonucleotide
  Sense strand starting at position 2177 of SEQ ID NO: 1563696
cauuucuggcgcugcuaua

SEQ ID NO: 1825356 - RNA, 19 nt, Artificial Sequence
  Description of Artificial Sequence: Synthetic oligonucleotide
  Antisense strand to SEQ ID NO: 1825355
uauagcagcgccagaaaug

SEQ ID NO: 1825357 - RNA, 19 nt, Artificial Sequence
  Description of Artificial Sequence: Synthetic oligonucleotide
  Sense strand starting at position 2383 of SEQ ID NO: 1563696
cccuccuuccuggauguua

SEQ ID NO: 1825358 - RNA, 19 nt, Artificial Sequence
  Description of Artificial Sequence: Synthetic oligonucleotide
  Antisense strand to SEQ ID NO: 1825357
uaacauccaggaaggaggg

SEQ ID NO: 1825359 - RNA, 19 nt, Artificial Sequence
  Description of Artificial Sequence: Synthetic oligonucleotide
  Sense strand starting at position 2391 of SEQ ID NO: 1563696
ccuggauguuaaugggaga

SEQ ID NO: 1825360 - RNA, 19 nt, Artificial Sequence
  Description of Artificial Sequence: Synthetic oligonucleotide
  Antisense strand to SEQ ID NO: 1825359
ucucccauuaacauccagg

SEQ ID NO: 1825361 - RNA, 19 nt, Artificial Sequence
  Description of Artificial Sequence: Synthetic oligonucleotide
  Sense strand starting at position 2847 of SEQ ID NO: 1563696
agucuucucuugccaugau

SEQ ID NO: 1825362 - RNA, 19 nt, Artificial Sequence
  Description of Artificial Sequence: Synthetic oligonucleotide
  Antisense strand to SEQ ID NO: 1825361
aucauggcaagagaagacu

SEQ ID NO: 1825363 - RNA, 19 nt, Artificial Sequence
  Description of Artificial Sequence: Synthetic oligonucleotide
  Sense strand starting at position 2857 of SEQ ID NO: 1563696
ugccaugauauuuggcagu

SEQ ID NO: 1825364 - RNA, 19 nt, Artificial Sequence
  Description of Artificial Sequence: Synthetic oligonucleotide
  Antisense strand to SEQ ID NO: 1825363
acugccaaauaucauggca

SEQ ID NO: 1825365 - RNA, 19 nt, Artificial Sequence
  Description of Artificial Sequence: Synthetic oligonucleotide
  Sense strand starting at position 2859 of SEQ ID NO: 1563696
ccaugauauuuggcagugu

SEQ ID NO: 1825366 - RNA, 19 nt, Artificial Sequence
  Description of Artificial Sequence: Synthetic oligonucleotide
  Antisense strand to SEQ ID NO: 1825365
acacugccaaauaucaugg

SEQ ID NO: 1825367 - RNA, 19 nt, Artificial Sequence
  Description of Artificial Sequence: Synthetic oligonucleotide
  Sense strand starting at position 2877 of SEQ ID NO: 1563696
uggaaauguggcugguauc

SEQ ID NO: 1825368 - RNA, 19 nt, Artificial Sequence
  Description of Artificial Sequence: Synthetic oligonucleotide
  Antisense strand to SEQ ID NO: 1825367
gauaccagccacauuucca

SEQ ID NO: 1825369 - RNA, 19 nt, Artificial Sequence
  Description of Artificial Sequence: Synthetic oligonucleotide
  Sense strand starting at position 2878 of SEQ ID NO: 1563696
ggaaauguggcugguauca

SEQ ID NO: 1825370 - RNA, 19 nt, Artificial Sequence
  Description of Artificial Sequence: Synthetic oligonucleotide
  Antisense strand to SEQ ID NO: 1825369
ugauaccagccacauuucc

SEQ ID NO: 1825371 - RNA, 19 nt, Artificial Sequence
  Description of Artificial Sequence: Synthetic oligonucleotide
  Sense strand starting at position 3089 of SEQ ID NO: 1563696
gagcaaugugguuaaacac

SEQ ID NO: 1825372 - RNA, 19 nt, Artificial Sequence
  Description of Artificial Sequence: Synthetic oligonucleotide
  Antisense strand to SEQ ID NO: 1825371
guguuuaaccacauugcuc

SEQ ID NO: 1825373 - RNA, 19 nt, Artificial Sequence
  Description of Artificial Sequence: Synthetic oligonucleotide
  Sense strand starting at position 3118 of SEQ ID NO: 1563696
uuguuacuguuguccauuu

SEQ ID NO: 1825374 - RNA, 19 nt, Artificial Sequence
  Description of Artificial Sequence: Synthetic oligonucleotide
  Antisense strand to SEQ ID NO: 1825373
aaauggacaacaguaacaa

SEQ ID NO: 1825375 - RNA, 19 nt, Artificial Sequence
  Description of Artificial Sequence: Synthetic oligonucleotide
  Sense strand starting at position 3281 of SEQ ID NO: 1563696
aagauuauucuggguuauc

SEQ ID NO: 1825376 - RNA, 19 nt, Artificial Sequence
  Description of Artificial Sequence: Synthetic oligonucleotide
  Antisense strand to SEQ ID NO: 1825375
gauaacccagaauaaucuu

SEQ ID NO: 1825377 - RNA, 19 nt, Artificial Sequence
  Description of Artificial Sequence: Synthetic oligonucleotide
  Sense strand starting at position 3282 of SEQ ID NO: 1563696
agauuauucuggguuaucu

SEQ ID NO: 1825378 - RNA, 19 nt, Artificial Sequence
  Description of Artificial Sequence: Synthetic oligonucleotide
  Antisense strand to SEQ ID NO: 1825377
agauaacccagaauaaucu

SEQ ID NO: 1825379 - RNA, 19 nt, Artificial Sequence
  Description of Artificial Sequence: Synthetic oligonucleotide
  Sense strand starting at position 3290 of SEQ ID NO: 1563696
cuggguuaucuuggccaau

SEQ ID NO: 1825380 - RNA, 19 nt, Artificial Sequence
  Description of Artificial Sequence: Synthetic oligonucleotide
  Antisense strand to SEQ ID NO: 1825379
auuggccaagauaacccag

SEQ ID NO: 1825381 - RNA, 19 nt, Artificial Sequence
  Description of Artificial Sequence: Synthetic oligonucleotide
  Sense strand starting at position 3291 of SEQ ID NO: 1563696
uggguuaucuuggccaaug

SEQ ID NO: 1825382 - RNA, 19 nt, Artificial Sequence
  Description of Artificial Sequence: Synthetic oligonucleotide
  Antisense strand to SEQ ID NO: 1825381
cauuggccaagauaaccca

SEQ ID NO: 1825383 - RNA, 19 nt, Artificial Sequence
  Description of Artificial Sequence: Synthetic oligonucleotide
  Sense strand starting at position 3292 of SEQ ID NO: 1563696
ggguuaucuuggccaaugu

SEQ ID NO: 1825384 - RNA, 19 nt, Artificial Sequence
  Description of Artificial Sequence: Synthetic oligonucleotide
  Antisense strand to SEQ ID NO: 1825383
acauuggccaagauaaccc

SEQ ID NO: 1825385 - RNA, 19 nt, Artificial Sequence
  Description of Artificial Sequence: Synthetic oligonucleotide
  Sense strand starting at position 3293 of SEQ ID NO: 1563696
gguuaucuuggccaaugua

SEQ ID NO: 1825386 - RNA, 19 nt, Artificial Sequence
  Description of Artificial Sequence: Synthetic oligonucleotide
  Antisense strand to SEQ ID NO: 1825385
uacauuggccaagauaacc

SEQ ID NO: 1825387 - RNA, 19 nt, Artificial Sequence
  Description of Artificial Sequence: Synthetic oligonucleotide
  Sense strand starting at position 3313 of SEQ ID NO: 1563696
uugcaaggguacuuuagau

SEQ ID NO: 1825388 - RNA, 19 nt, Artificial Sequence
  Description of Artificial Sequence: Synthetic oligonucleotide
  Antisense strand to SEQ ID NO: 1825387
aucuaaaguacccuugcaa

SEQ ID NO: 1825389 - RNA, 19 nt, Artificial Sequence
  Description of Artificial Sequence: Synthetic oligonucleotide
  Sense strand starting at position 3319 of SEQ ID NO: 1563696
ggguacuuuagauguggaa

SEQ ID NO: 1825390 - RNA, 19 nt, Artificial Sequence
  Description of Artificial Sequence: Synthetic oligonucleotide
  Antisense strand to SEQ ID NO: 1825389
uuccacaucuaaaguaccc

SEQ ID NO: 1825391 - RNA, 19 nt, Artificial Sequence
  Description of Artificial Sequence: Synthetic oligonucleotide
  Sense strand starting at position 3344 of SEQ ID NO: 1563696
gacuccaugucagauugaa

SEQ ID NO: 1825392 - RNA, 19 nt, Artificial Sequence
  Description of Artificial Sequence: Synthetic oligonucleotide
  Antisense strand to SEQ ID NO: 1825391
uucaaucugacauggaguc

SEQ ID NO: 1825393 - RNA, 19 nt, Artificial Sequence
  Description of Artificial Sequence: Synthetic oligonucleotide
  Sense strand starting at position 3352 of SEQ ID NO: 1563696
gucagauugaagcagcaua

SEQ ID NO: 1825394 - RNA, 19 nt, Artificial Sequence
  Description of Artificial Sequence: Synthetic oligonucleotide
  Antisense strand to SEQ ID NO: 1825393
uaugcugcuucaaucugac

SEQ ID NO: 1825395 - RNA, 19 nt, Artificial Sequence
  Description of Artificial Sequence: Synthetic oligonucleotide
  Sense strand starting at position 3371 of SEQ ID NO: 1563696
gaaagucuacacuggucau

SEQ ID NO: 1825396 - RNA, 19 nt, Artificial Sequence
  Description of Artificial Sequence: Synthetic oligonucleotide
  Antisense strand to SEQ ID NO: 1825395
augaccaguguagacuuuc

SEQ ID NO: 1825397 - RNA, 19 nt, Artificial Sequence
  Description of Artificial Sequence: Synthetic oligonucleotide
  Sense strand starting at position 3384 of SEQ ID NO: 1563696
ggucaucguuggcuuugaa

SEQ ID NO: 1825398 - RNA, 19 nt, Artificial Sequence
  Description of Artificial Sequence: Synthetic oligonucleotide
  Antisense strand to SEQ ID NO: 1825397
uucaaagccaacgaugacc

SEQ ID NO: 1825399 - RNA, 19 nt, Artificial Sequence
  Description of Artificial Sequence: Synthetic oligonucleotide
  Sense strand starting at position 3387 of SEQ ID NO: 1563696
caucguuggcuuugaagau

SEQ ID NO: 1825400 - RNA, 19 nt, Artificial Sequence
  Description of Artificial Sequence: Synthetic oligonucleotide
  Antisense strand to SEQ ID NO: 1825399
aucuucaaagccaacgaug

SEQ ID NO: 1825401 - RNA, 19 nt, Artificial Sequence
  Description of Artificial Sequence: Synthetic oligonucleotide
  Sense strand starting at position 3528 of SEQ ID NO: 1563696
ggugaagcccuuugaagau

SEQ ID NO: 1825402 - RNA, 19 nt, Artificial Sequence
  Description of Artificial Sequence: Synthetic oligonucleotide
  Antisense strand to SEQ ID NO: 1825401
aucuucaaagggcuucacc

SEQ ID NO: 1825403 - RNA, 19 nt, Artificial Sequence
  Description of Artificial Sequence: Synthetic oligonucleotide
  Sense strand starting at position 3603 of SEQ ID NO: 1563696
cauguaugguaacugguua

SEQ ID NO: 1825404 - RNA, 19 nt, Artificial Sequence
  Description of Artificial Sequence: Synthetic oligonucleotide
  Antisense strand to SEQ ID NO: 1825403
uaaccaguuaccauacaug

SEQ ID NO: 1825405 - RNA, 19 nt, Artificial Sequence
  Description of Artificial Sequence: Synthetic oligonucleotide
  Sense strand starting at position 3637 of SEQ ID NO: 1563696
agaccuaucugguuuaacu

SEQ ID NO: 1825406 - RNA, 19 nt, Artificial Sequence
  Description of Artificial Sequence: Synthetic oligonucleotide
  Antisense strand to SEQ ID NO: 1825405
aguuaaaccagauaggucu

SEQ ID NO: 1825407 - RNA, 19 nt, Artificial Sequence
  Description of Artificial Sequence: Synthetic oligonucleotide
  Sense strand starting at position 3703 of SEQ ID NO: 1563696
agaucauguuaccugagca

SEQ ID NO: 1825408 - RNA, 19 nt, Artificial Sequence
  Description of Artificial Sequence: Synthetic oligonucleotide
  Antisense strand to SEQ ID NO: 1825407
ugcucagguaacaugaucu

SEQ ID NO: 1825409 - RNA, 19 nt, Artificial Sequence
  Description of Artificial Sequence: Synthetic oligonucleotide
  Sense strand starting at position 3839 of SEQ ID NO: 1563696
gcaucaccucauuguaaga

SEQ ID NO: 1825410 - RNA, 19 nt, Artificial Sequence
  Description of Artificial Sequence: Synthetic oligonucleotide
  Antisense strand to SEQ ID NO: 1825409
ucuuacaaugaggugaugc

SEQ ID NO: 1825411 - RNA, 19 nt, Artificial Sequence
  Description of Artificial Sequence: Synthetic oligonucleotide
  Sense strand starting at position 3941 of SEQ ID NO: 1563696
ggaaguaucccuggugguc

SEQ ID NO: 1825412 - RNA, 19 nt, Artificial Sequence
  Description of Artificial Sequence: Synthetic oligonucleotide
  Antisense strand to SEQ ID NO: 1825411
gaccaccagggauacuucc

SEQ ID NO: 1825413 - RNA, 19 nt, Artificial Sequence
  Description of Artificial Sequence: Synthetic oligonucleotide
  Sense strand starting at position 3955 of SEQ ID NO: 1563696
uggucucauuacuucguua

SEQ ID NO: 1825414 - RNA, 19 nt, Artificial Sequence
  Description of Artificial Sequence: Synthetic oligonucleotide
  Antisense strand to SEQ ID NO: 1825413
uaacgaaguaaugagacca

SEQ ID NO: 1825415 - RNA, 19 nt, Artificial Sequence
  Description of Artificial Sequence: Synthetic oligonucleotide
  Sense strand starting at position 3957 of SEQ ID NO: 1563696
gucucauuacuucguuaca

SEQ ID NO: 1825416 - RNA, 19 nt, Artificial Sequence
  Description of Artificial Sequence: Synthetic oligonucleotide
  Antisense strand to SEQ ID NO: 1825415
uguaacgaaguaaugagac

SEQ ID NO: 1825417 - RNA, 19 nt, Artificial Sequence
  Description of Artificial Sequence: Synthetic oligonucleotide
  Sense strand starting at position 3959 of SEQ ID NO: 1563696
cucauuacuucguuacaag

SEQ ID NO: 1825418 - RNA, 19 nt, Artificial Sequence
  Description of Artificial Sequence: Synthetic oligonucleotide
  Antisense strand to SEQ ID NO: 1825417
cuuguaacgaaguaaugag

SEQ ID NO: 1825419 - RNA, 19 nt, Artificial Sequence
  Description of Artificial Sequence: Synthetic oligonucleotide
  Sense strand starting at position 3960 of SEQ ID NO: 1563696
ucauuacuucguuacaagu

SEQ ID NO: 1825420 - RNA, 19 nt, Artificial Sequence
  Description of Artificial Sequence: Synthetic oligonucleotide
  Antisense strand to SEQ ID NO: 1825419
acuuguaacgaaguaauga

SEQ ID NO: 1825421 - RNA, 19 nt, Artificial Sequence
  Description of Artificial Sequence: Synthetic oligonucleotide
  Sense strand starting at position 11 of SEQ ID NO: 1563697
gagagaauggagugugagu

SEQ ID NO: 1825422 - RNA, 19 nt, Artificial Sequence
  Description of Artificial Sequence: Synthetic oligonucleotide
  Antisense strand to SEQ ID NO: 1825421
acucacacuccauucucuc

SEQ ID NO: 1825423 - RNA, 19 nt, Artificial Sequence
  Description of Artificial Sequence: Synthetic oligonucleotide
  Sense strand starting at position 170 of SEQ ID NO: 1563697
ucgugucuccugcaagaaa

SEQ ID NO: 1825424 - RNA, 19 nt, Artificial Sequence
  Description of Artificial Sequence: Synthetic oligonucleotide
  Antisense strand to SEQ ID NO: 1825423
uuucuugcaggagacacga

SEQ ID NO: 1825425 - RNA, 19 nt, Artificial Sequence
  Description of Artificial Sequence: Synthetic oligonucleotide
  Sense strand starting at position 173 of SEQ ID NO: 1563697
ugucuccugcaagaaauaa

SEQ ID NO: 1825426 - RNA, 19 nt, Artificial Sequence
  Description of Artificial Sequence: Synthetic oligonucleotide
  Antisense strand to SEQ ID NO: 1825425
uuauuucuugcaggagaca

SEQ ID NO: 1825427 - RNA, 19 nt, Artificial Sequence
  Description of Artificial Sequence: Synthetic oligonucleotide
  Sense strand starting at position 208 of SEQ ID NO: 1563697
gugcaaauccggcagaaua

SEQ ID NO: 1825428 - RNA, 19 nt, Artificial Sequence
  Description of Artificial Sequence: Synthetic oligonucleotide
  Antisense strand to SEQ ID NO: 1825427
uauucugccggauuugcac

SEQ ID NO: 1825429 - RNA, 19 nt, Artificial Sequence
  Description of Artificial Sequence: Synthetic oligonucleotide
  Sense strand starting at position 210 of SEQ ID NO: 1563697
gcaaauccggcagaauaga

SEQ ID NO: 1825430 - RNA, 19 nt, Artificial Sequence
  Description of Artificial Sequence: Synthetic oligonucleotide
  Antisense strand to SEQ ID NO: 1825429
ucuauucugccggauuugc

SEQ ID NO: 1825431 - RNA, 19 nt, Artificial Sequence
  Description of Artificial Sequence: Synthetic oligonucleotide
  Sense strand starting at position 387 of SEQ ID NO: 1563697
aaaguaggccuauggacaa

SEQ ID NO: 1825432 - RNA, 19 nt, Artificial Sequence
  Description of Artificial Sequence: Synthetic oligonucleotide
  Antisense strand to SEQ ID NO: 1825431
uuguccauaggccuacuuu

SEQ ID NO: 1825433 - RNA, 19 nt, Artificial Sequence
  Description of Artificial Sequence: Synthetic oligonucleotide
  Sense strand starting at position 598 of SEQ ID NO: 1563697
acgucauauucuucccauu

SEQ ID NO: 1825434 - RNA, 19 nt, Artificial Sequence
  Description of Artificial Sequence: Synthetic oligonucleotide
  Antisense strand to SEQ ID NO: 1825433
aaugggaagaauaugacgu

SEQ ID NO: 1825435 - RNA, 19 nt, Artificial Sequence
  Description of Artificial Sequence: Synthetic oligonucleotide
  Sense strand starting at position 722 of SEQ ID NO: 1563697
gugaauuaguacuugucag

SEQ ID NO: 1825436 - RNA, 19 nt, Artificial Sequence
  Description of Artificial Sequence: Synthetic oligonucleotide
  Antisense strand to SEQ ID NO: 1825435
cugacaaguacuaauucac

SEQ ID NO: 1825437 - RNA, 19 nt, Artificial Sequence
  Description of Artificial Sequence: Synthetic oligonucleotide
  Sense strand starting at position 723 of SEQ ID NO: 1563697
ugaauuaguacuugucagu

SEQ ID NO: 1825438 - RNA, 19 nt, Artificial Sequence
  Description of Artificial Sequence: Synthetic oligonucleotide
  Antisense strand to SEQ ID NO: 1825437
acugacaaguacuaauuca

SEQ ID NO: 1825439 - RNA, 19 nt, Artificial Sequence
  Description of Artificial Sequence: Synthetic oligonucleotide
  Sense strand starting at position 729 of SEQ ID NO: 1563697
aguacuugucaguaugucu

SEQ ID NO: 1825440 - RNA, 19 nt, Artificial Sequence
  Description of Artificial Sequence: Synthetic oligonucleotide
  Antisense strand to SEQ ID NO: 1825439
agacauacugacaaguacu

SEQ ID NO: 1825441 - RNA, 19 nt, Artificial Sequence
  Description of Artificial Sequence: Synthetic oligonucleotide
  Sense strand starting at position 1374 of SEQ ID NO: 1563697
gcgguucuccuccaaacga

SEQ ID NO: 1825442 - RNA, 19 nt, Artificial Sequence
  Description of Artificial Sequence: Synthetic oligonucleotide
  Antisense strand to SEQ ID NO: 1825441
ucguuuggaggagaaccgc

SEQ ID NO: 1825443 - RNA, 19 nt, Artificial Sequence
  Description of Artificial Sequence: Synthetic oligonucleotide
  Sense strand starting at position 1990 of SEQ ID NO: 1563697
ucugucgcugcuguaauau

SEQ ID NO: 1825444 - RNA, 19 nt, Artificial Sequence
  Description of Artificial Sequence: Synthetic oligonucleotide
  Antisense strand to SEQ ID NO: 1825443
auauuacagcagcgacaga

SEQ ID NO: 1825445 - RNA, 19 nt, Artificial Sequence
  Description of Artificial Sequence: Synthetic oligonucleotide
  Sense strand starting at position 2451 of SEQ ID NO: 1563697
accacuggucugcaccaaa

SEQ ID NO: 1825446 - RNA, 19 nt, Artificial Sequence
  Description of Artificial Sequence: Synthetic oligonucleotide
  Antisense strand to SEQ ID NO: 1825445
uuuggugcagaccaguggu

SEQ ID NO: 1825447 - RNA, 19 nt, Artificial Sequence
  Description of Artificial Sequence: Synthetic oligonucleotide
  Sense strand starting at position 2687 of SEQ ID NO: 1563697
uggaaauguggcugguauu

SEQ ID NO: 1825448 - RNA, 19 nt, Artificial Sequence
  Description of Artificial Sequence: Synthetic oligonucleotide
  Antisense strand to SEQ ID NO: 1825447
aauaccagccacauuucca

SEQ ID NO: 1825449 - RNA, 19 nt, Artificial Sequence
  Description of Artificial Sequence: Synthetic oligonucleotide
  Sense strand starting at position 2688 of SEQ ID NO: 1563697
ggaaauguggcugguauuc

SEQ ID NO: 1825450 - RNA, 19 nt, Artificial Sequence
  Description of Artificial Sequence: Synthetic oligonucleotide
  Antisense strand to SEQ ID NO: 1825449
gaauaccagccacauuucc

SEQ ID NO: 1825451 - RNA, 19 nt, Artificial Sequence
  Description of Artificial Sequence: Synthetic oligonucleotide
  Sense strand starting at position 2900 of SEQ ID NO: 1563697
agagcaaugugguuaaaua

SEQ ID NO: 1825452 - RNA, 19 nt, Artificial Sequence
  Description of Artificial Sequence: Synthetic oligonucleotide
  Antisense strand to SEQ ID NO: 1825451
uauuuaaccacauugcucu

SEQ ID NO: 1825453 - RNA, 19 nt, Artificial Sequence
  Description of Artificial Sequence: Synthetic oligonucleotide
  Sense strand starting at position 2901 of SEQ ID NO: 1563697
gagcaaugugguuaaauac

SEQ ID NO: 1825454 - RNA, 19 nt, Artificial Sequence
  Description of Artificial Sequence: Synthetic oligonucleotide
  Antisense strand to SEQ ID NO: 1825453
guauuuaaccacauugcuc

SEQ ID NO: 1825455 - RNA, 19 nt, Artificial Sequence
  Description of Artificial Sequence: Synthetic oligonucleotide
  Sense strand starting at position 2907 of SEQ ID NO: 1563697
ugugguuaaauacgaaguu

SEQ ID NO: 1825456 - RNA, 19 nt, Artificial Sequence
  Description of Artificial Sequence: Synthetic oligonucleotide
  Antisense strand to SEQ ID NO: 1825455
aacuucguauuuaaccaca

SEQ ID NO: 1825457 - RNA, 19 nt, Artificial Sequence
  Description of Artificial Sequence: Synthetic oligonucleotide
  Sense strand starting at position 2932 of SEQ ID NO: 1563697
guuguuacugcuguccauu

SEQ ID NO: 1825458 - RNA, 19 nt, Artificial Sequence
  Description of Artificial Sequence: Synthetic oligonucleotide
  Antisense strand to SEQ ID NO: 1825457
aauggacagcaguaacaac

SEQ ID NO: 1825459 - RNA, 19 nt, Artificial Sequence
  Description of Artificial Sequence: Synthetic oligonucleotide
  Sense strand starting at position 2972 of SEQ ID NO: 1563697
cccuuauuguguuuggcaa

SEQ ID NO: 1825460 - RNA, 19 nt, Artificial Sequence
  Description of Artificial Sequence: Synthetic oligonucleotide
  Antisense strand to SEQ ID NO: 1825459
uugccaaacacaauaaggg

SEQ ID NO: 1825461 - RNA, 19 nt, Artificial Sequence
  Description of Artificial Sequence: Synthetic oligonucleotide
  Sense strand starting at position 2973 of SEQ ID NO: 1563697
ccuuauuguguuuggcaag

SEQ ID NO: 1825462 - RNA, 19 nt, Artificial Sequence
  Description of Artificial Sequence: Synthetic oligonucleotide
  Antisense strand to SEQ ID NO: 1825461
cuugccaaacacaauaagg

SEQ ID NO: 1825463 - RNA, 19 nt, Artificial Sequence
  Description of Artificial Sequence: Synthetic oligonucleotide
  Sense strand starting at position 3105 of SEQ ID NO: 1563697
cuggauuaucuuggccaau

SEQ ID NO: 1825464 - RNA, 19 nt, Artificial Sequence
  Description of Artificial Sequence: Synthetic oligonucleotide
  Antisense strand to SEQ ID NO: 1825463
auuggccaagauaauccag

SEQ ID NO: 1825465 - RNA, 19 nt, Artificial Sequence
  Description of Artificial Sequence: Synthetic oligonucleotide
  Sense strand starting at position 3106 of SEQ ID NO: 1563697
uggauuaucuuggccaaug

SEQ ID NO: 1825466 - RNA, 19 nt, Artificial Sequence
  Description of Artificial Sequence: Synthetic oligonucleotide
  Antisense strand to SEQ ID NO: 1825465
cauuggccaagauaaucca

SEQ ID NO: 1825467 - RNA, 19 nt, Artificial Sequence
  Description of Artificial Sequence: Synthetic oligonucleotide
  Sense strand starting at position 3107 of SEQ ID NO: 1563697
ggauuaucuuggccaaugu

SEQ ID NO: 1825468 - RNA, 19 nt, Artificial Sequence
  Description of Artificial Sequence: Synthetic oligonucleotide
  Antisense strand to SEQ ID NO: 1825467
acauuggccaagauaaucc

SEQ ID NO: 1825469 - RNA, 19 nt, Artificial Sequence
  Description of Artificial Sequence: Synthetic oligonucleotide
  Sense strand starting at position 3108 of SEQ ID NO: 1563697
gauuaucuuggccaaugua

SEQ ID NO: 1825470 - RNA, 19 nt, Artificial Sequence
  Description of Artificial Sequence: Synthetic oligonucleotide
  Antisense strand to SEQ ID NO: 1825469
uacauuggccaagauaauc

SEQ ID NO: 1825471 - RNA, 19 nt, Artificial Sequence
  Description of Artificial Sequence: Synthetic oligonucleotide
  Sense strand starting at position 3128 of SEQ ID NO: 1563697
uugcaaggguacuuuaaau

SEQ ID NO: 1825472 - RNA, 19 nt, Artificial Sequence
  Description of Artificial Sequence: Synthetic oligonucleotide
  Antisense strand to SEQ ID NO: 1825471
auuuaaaguacccuugcaa

SEQ ID NO: 1825473 - RNA, 19 nt, Artificial Sequence
  Description of Artificial Sequence: Synthetic oligonucleotide
  Sense strand starting at position 3168 of SEQ ID NO: 1563697
ucaauaucagauugaagca

SEQ ID NO: 1825474 - RNA, 19 nt, Artificial Sequence
  Description of Artificial Sequence: Synthetic oligonucleotide
  Antisense strand to SEQ ID NO: 1825473
ugcuucaaucugauauuga

SEQ ID NO: 1825475 - RNA, 19 nt, Artificial Sequence
  Description of Artificial Sequence: Synthetic oligonucleotide
  Sense strand starting at position 3178 of SEQ ID NO: 1563697
auugaagcaucaugagaag

SEQ ID NO: 1825476 - RNA, 19 nt, Artificial Sequence
  Description of Artificial Sequence: Synthetic oligonucleotide
  Antisense strand to SEQ ID NO: 1825475
cuucucaugaugcuucaau

SEQ ID NO: 1825477 - RNA, 19 nt, Artificial Sequence
  Description of Artificial Sequence: Synthetic oligonucleotide
  Sense strand starting at position 3351 of SEQ ID NO: 1563697
augaaacccuuugcagauu

SEQ ID NO: 1825478 - RNA, 19 nt, Artificial Sequence
  Description of Artificial Sequence: Synthetic oligonucleotide
  Antisense strand to SEQ ID NO: 1825477
aaucugcaaaggguuucau

SEQ ID NO: 1825479 - RNA, 19 nt, Artificial Sequence
  Description of Artificial Sequence: Synthetic oligonucleotide
  Sense strand starting at position 3378 of SEQ ID NO: 1563697
cuaggacuguaagauaaua

SEQ ID NO: 1825480 - RNA, 19 nt, Artificial Sequence
  Description of Artificial Sequence: Synthetic oligonucleotide
  Antisense strand to SEQ ID NO: 1825479
uauuaucuuacaguccuag

SEQ ID NO: 1825481 - RNA, 19 nt, Artificial Sequence
  Description of Artificial Sequence: Synthetic oligonucleotide
  Sense strand starting at position 3416 of SEQ ID NO: 1563697
agcccuucuauguguggua

SEQ ID NO: 1825482 - RNA, 19 nt, Artificial Sequence
  Description of Artificial Sequence: Synthetic oligonucleotide
  Antisense strand to SEQ ID NO: 1825481
uaccacacauagaagggcu

SEQ ID NO: 1825483 - RNA, 19 nt, Artificial Sequence
  Description of Artificial Sequence: Synthetic oligonucleotide
  Sense strand starting at position 3417 of SEQ ID NO: 1563697
gcccuucuaugugugguaa

SEQ ID NO: 1825484 - RNA, 19 nt, Artificial Sequence
  Description of Artificial Sequence: Synthetic oligonucleotide
  Antisense strand to SEQ ID NO: 1825483
uuaccacacauagaagggc

SEQ ID NO: 1825485 - RNA, 19 nt, Artificial Sequence
  Description of Artificial Sequence: Synthetic oligonucleotide
  Sense strand starting at position 3418 of SEQ ID NO: 1563697
cccuucuaugugugguaau

SEQ ID NO: 1825486 - RNA, 19 nt, Artificial Sequence
  Description of Artificial Sequence: Synthetic oligonucleotide
  Antisense strand to SEQ ID NO: 1825485
auuaccacacauagaaggg

SEQ ID NO: 1825487 - RNA, 19 nt, Artificial Sequence
  Description of Artificial Sequence: Synthetic oligonucleotide
  Sense strand starting at position 3425 of SEQ ID NO: 1563697
augugugguaauugguuaa

SEQ ID NO: 1825488 - RNA, 19 nt, Artificial Sequence
  Description of Artificial Sequence: Synthetic oligonucleotide
  Antisense strand to SEQ ID NO: 1825487
uuaaccaauuaccacacau

SEQ ID NO: 1825489 - RNA, 19 nt, Artificial Sequence
  Description of Artificial Sequence: Synthetic oligonucleotide
  Sense strand starting at position 3500 of SEQ ID NO: 1563697
uuucuuuacccguggauca

SEQ ID NO: 1825490 - RNA, 19 nt, Artificial Sequence
  Description of Artificial Sequence: Synthetic oligonucleotide
  Antisense strand to SEQ ID NO: 1825489
ugauccacggguaaagaaa

SEQ ID NO: 1825491 - RNA, 19 nt, Artificial Sequence
  Description of Artificial Sequence: Synthetic oligonucleotide
  Sense strand starting at position 3617 of SEQ ID NO: 1563697
ccuuauagguaaucuugga

SEQ ID NO: 1825492 - RNA, 19 nt, Artificial Sequence
  Description of Artificial Sequence: Synthetic oligonucleotide
  Antisense strand to SEQ ID NO: 1825491
uccaagauuaccuauaagg

SEQ ID NO: 1825493 - RNA, 19 nt, Artificial Sequence
  Description of Artificial Sequence: Synthetic oligonucleotide
  Sense strand starting at position 3622 of SEQ ID NO: 1563697
uagguaaucuuggagaaag

SEQ ID NO: 1825494 - RNA, 19 nt, Artificial Sequence
  Description of Artificial Sequence: Synthetic oligonucleotide
  Antisense strand to SEQ ID NO: 1825493
cuuucuccaagauuaccua

SEQ ID NO: 1825495 - RNA, 19 nt, Artificial Sequence
  Description of Artificial Sequence: Synthetic oligonucleotide
  Sense strand starting at position 3649 of SEQ ID NO: 1563697
ugcugaaaccacugauauu

SEQ ID NO: 1825496 - RNA, 19 nt, Artificial Sequence
  Description of Artificial Sequence: Synthetic oligonucleotide
  Antisense strand to SEQ ID NO: 1825495
aauaucagugguuucagca

SEQ ID NO: 1825497 - RNA, 19 nt, Artificial Sequence
  Description of Artificial Sequence: Synthetic oligonucleotide
  Sense strand starting at position 3659 of SEQ ID NO: 1563697
acugauauuucccagguac

SEQ ID NO: 1825498 - RNA, 19 nt, Artificial Sequence
  Description of Artificial Sequence: Synthetic oligonucleotide
  Antisense strand to SEQ ID NO: 1825497
guaccugggaaauaucagu

SEQ ID NO: 1825499 - RNA, 19 nt, Artificial Sequence
  Description of Artificial Sequence: Synthetic oligonucleotide
  Sense strand starting at position 3723 of SEQ ID NO: 1563697
agggacuaucgguguuguu

SEQ ID NO: 1825500 - RNA, 19 nt, Artificial Sequence
  Description of Artificial Sequence: Synthetic oligonucleotide
  Antisense strand to SEQ ID NO: 1825499
aacaacaccgauagucccu

SEQ ID NO: 1825501 - RNA, 19 nt, Artificial Sequence
  Description of Artificial Sequence: Synthetic oligonucleotide
  Sense strand starting at position 84 of SEQ ID NO: 1563698
gcaguaucauuuggaguug

SEQ ID NO: 1825502 - RNA, 19 nt, Artificial Sequence
  Description of Artificial Sequence: Synthetic oligonucleotide
  Antisense strand to SEQ ID NO: 1825501
caacuccaaaugauacugc

SEQ ID NO: 1825503 - RNA, 19 nt, Artificial Sequence
  Description of Artificial Sequence: Synthetic oligonucleotide
  Sense strand starting at position 85 of SEQ ID NO: 1563698
caguaucauuuggaguuga

SEQ ID NO: 1825504 - RNA, 19 nt, Artificial Sequence
  Description of Artificial Sequence: Synthetic oligonucleotide
  Antisense strand to SEQ ID NO: 1825503
ucaacuccaaaugauacug

SEQ ID NO: 1825505 - RNA, 19 nt, Artificial Sequence
  Description of Artificial Sequence: Synthetic oligonucleotide
  Sense strand starting at position 96 of SEQ ID NO: 1563698
ggaguugauuuaugcaaca

SEQ ID NO: 1825506 - RNA, 19 nt, Artificial Sequence
  Description of Artificial Sequence: Synthetic oligonucleotide
  Antisense strand to SEQ ID NO: 1825505
uguugcauaaaucaacucc

SEQ ID NO: 1825507 - RNA, 19 nt, Artificial Sequence
  Description of Artificial Sequence: Synthetic oligonucleotide
  Sense strand starting at position 182 of SEQ ID NO: 1563698
cccuaagugccacaagaaa

SEQ ID NO: 1825508 - RNA, 19 nt, Artificial Sequence
  Description of Artificial Sequence: Synthetic oligonucleotide
  Antisense strand to SEQ ID NO: 1825507
uuucuuguggcacuuaggg

SEQ ID NO: 1825509 - RNA, 19 nt, Artificial Sequence
  Description of Artificial Sequence: Synthetic oligonucleotide
  Sense strand starting at position 430 of SEQ ID NO: 1563698
ggagauuuggcuuguguuc

SEQ ID NO: 1825510 - RNA, 19 nt, Artificial Sequence
  Description of Artificial Sequence: Synthetic oligonucleotide
  Antisense strand to SEQ ID NO: 1825509
gaacacaagccaaaucucc

SEQ ID NO: 1825511 - RNA, 19 nt, Artificial Sequence
  Description of Artificial Sequence: Synthetic oligonucleotide
  Sense strand starting at position 492 of SEQ ID NO: 1563698
ccggauaccucucaaugau

SEQ ID NO: 1825512 - RNA, 19 nt, Artificial Sequence
  Description of Artificial Sequence: Synthetic oligonucleotide
  Antisense strand to SEQ ID NO: 1825511
aucauugagagguauccgg

SEQ ID NO: 1825513 - RNA, 19 nt, Artificial Sequence
  Description of Artificial Sequence: Synthetic oligonucleotide
  Sense strand starting at position 675 of SEQ ID NO: 1563698
aagagugagacuugguucu

SEQ ID NO: 1825514 - RNA, 19 nt, Artificial Sequence
  Description of Artificial Sequence: Synthetic oligonucleotide
  Antisense strand to SEQ ID NO: 1825513
agaaccaagucucacucuu

SEQ ID NO: 1825515 - RNA, 19 nt, Artificial Sequence
  Description of Artificial Sequence: Synthetic oligonucleotide
  Sense strand starting at position 677 of SEQ ID NO: 1563698
gagugagacuugguucuuu

SEQ ID NO: 1825516 - RNA, 19 nt, Artificial Sequence
  Description of Artificial Sequence: Synthetic oligonucleotide
  Antisense strand to SEQ ID NO: 1825515
aaagaaccaagucucacuc

SEQ ID NO: 1825517 - RNA, 19 nt, Artificial Sequence
  Description of Artificial Sequence: Synthetic oligonucleotide
  Sense strand starting at position 681 of SEQ ID NO: 1563698
gagacuugguucuuucuua

SEQ ID NO: 1825518 - RNA, 19 nt, Artificial Sequence
  Description of Artificial Sequence: Synthetic oligonucleotide
  Antisense strand to SEQ ID NO: 1825517
uaagaaagaaccaagucuc

SEQ ID NO: 1825519 - RNA, 19 nt, Artificial Sequence
  Description of Artificial Sequence: Synthetic oligonucleotide
  Sense strand starting at position 784 of SEQ ID NO: 1563698
gggaaagguugggaagaaa

SEQ ID NO: 1825520 - RNA, 19 nt, Artificial Sequence
  Description of Artificial Sequence: Synthetic oligonucleotide
  Antisense strand to SEQ ID NO: 1825519
uuucuucccaaccuuuccc

SEQ ID NO: 1825521 - RNA, 19 nt, Artificial Sequence
  Description of Artificial Sequence: Synthetic oligonucleotide
  Sense strand starting at position 907 of SEQ ID NO: 1563698
acuuguaaauacgacagaa

SEQ ID NO: 1825522 - RNA, 19 nt, Artificial Sequence
  Description of Artificial Sequence: Synthetic oligonucleotide
  Antisense strand to SEQ ID NO: 1825521
uucugucguauuuacaagu

SEQ ID NO: 1825523 - RNA, 19 nt, Artificial Sequence
  Description of Artificial Sequence: Synthetic oligonucleotide
  Sense strand starting at position 989 of SEQ ID NO: 1563698
gaauucguggucugcguga

SEQ ID NO: 1825524 - RNA, 19 nt, Artificial Sequence
  Description of Artificial Sequence: Synthetic oligonucleotide
  Antisense strand to SEQ ID NO: 1825523
ucacgcagaccacgaauuc

SEQ ID NO: 1825525 - RNA, 19 nt, Artificial Sequence
  Description of Artificial Sequence: Synthetic oligonucleotide
  Sense strand starting at position 2055 of SEQ ID NO: 1563698
gcggguucauuggcugcaa

SEQ ID NO: 1825526 - RNA, 19 nt, Artificial Sequence
  Description of Artificial Sequence: Synthetic oligonucleotide
  Antisense strand to SEQ ID NO: 1825525
uugcagccaaugaacccgc

SEQ ID NO: 1825527 - RNA, 19 nt, Artificial Sequence
  Description of Artificial Sequence: Synthetic oligonucleotide
  Sense strand starting at position 2088 of SEQ ID NO: 1563698
agcgauuucugucccuaug

SEQ ID NO: 1825528 - RNA, 19 nt, Artificial Sequence
  Description of Artificial Sequence: Synthetic oligonucleotide
  Antisense strand to SEQ ID NO: 1825527
cauagggacagaaaucgcu

SEQ ID NO: 1825529 - RNA, 19 nt, Artificial Sequence
  Description of Artificial Sequence: Synthetic oligonucleotide
  Sense strand starting at position 2090 of SEQ ID NO: 1563698
cgauuucugucccuaugau

SEQ ID NO: 1825530 - RNA, 19 nt, Artificial Sequence
  Description of Artificial Sequence: Synthetic oligonucleotide
  Antisense strand to SEQ ID NO: 1825529
aucauagggacagaaaucg

SEQ ID NO: 1825531 - RNA, 19 nt, Artificial Sequence
  Description of Artificial Sequence: Synthetic oligonucleotide
  Sense strand starting at position 2326 of SEQ ID NO: 1563698
aggcucagugccggugaau

SEQ ID NO: 1825532 - RNA, 19 nt, Artificial Sequence
  Description of Artificial Sequence: Synthetic oligonucleotide
  Antisense strand to SEQ ID NO: 1825531
auucaccggcacugagccu

SEQ ID NO: 1825533 - RNA, 19 nt, Artificial Sequence
  Description of Artificial Sequence: Synthetic oligonucleotide
  Sense strand starting at position 2386 of SEQ ID NO: 1563698
guugaucugacguggaauu

SEQ ID NO: 1825534 - RNA, 19 nt, Artificial Sequence
  Description of Artificial Sequence: Synthetic oligonucleotide
  Antisense strand to SEQ ID NO: 1825533
aauuccacgucagaucaac

SEQ ID NO: 1825535 - RNA, 19 nt, Artificial Sequence
  Description of Artificial Sequence: Synthetic oligonucleotide
  Sense strand starting at position 2387 of SEQ ID NO: 1563698
uugaucugacguggaauua

SEQ ID NO: 1825536 - RNA, 19 nt, Artificial Sequence
  Description of Artificial Sequence: Synthetic oligonucleotide
  Antisense strand to SEQ ID NO: 1825535
uaauuccacgucagaucaa

SEQ ID NO: 1825537 - RNA, 19 nt, Artificial Sequence
  Description of Artificial Sequence: Synthetic oligonucleotide
  Sense strand starting at position 2470 of SEQ ID NO: 1563698
guuugucaacaccggagau

SEQ ID NO: 1825538 - RNA, 19 nt, Artificial Sequence
  Description of Artificial Sequence: Synthetic oligonucleotide
  Antisense strand to SEQ ID NO: 1825537
aucuccgguguugacaaac

SEQ ID NO: 1825539 - RNA, 19 nt, Artificial Sequence
  Description of Artificial Sequence: Synthetic oligonucleotide
  Sense strand starting at position 2569 of SEQ ID NO: 1563698
gcugcauugccucuguguu

SEQ ID NO: 1825540 - RNA, 19 nt, Artificial Sequence
  Description of Artificial Sequence: Synthetic oligonucleotide
  Antisense strand to SEQ ID NO: 1825539
aacacagaggcaaugcagc

SEQ ID NO: 1825541 - RNA, 19 nt, Artificial Sequence
  Description of Artificial Sequence: Synthetic oligonucleotide
  Sense strand starting at position 2570 of SEQ ID NO: 1563698
cugcauugccucuguguuu

SEQ ID NO: 1825542 - RNA, 19 nt, Artificial Sequence
  Description of Artificial Sequence: Synthetic oligonucleotide
  Antisense strand to SEQ ID NO: 1825541
aaacacagaggcaaugcag

SEQ ID NO: 1825543 - RNA, 19 nt, Artificial Sequence
  Description of Artificial Sequence: Synthetic oligonucleotide
  Sense strand starting at position 2585 of SEQ ID NO: 1563698
guuugugugucugucuuaa

SEQ ID NO: 1825544 - RNA, 19 nt, Artificial Sequence
  Description of Artificial Sequence: Synthetic oligonucleotide
  Antisense strand to SEQ ID NO: 1825543
uuaagacagacacacaaac

SEQ ID NO: 1825545 - RNA, 19 nt, Artificial Sequence
  Description of Artificial Sequence: Synthetic oligonucleotide
  Sense strand starting at position 2587 of SEQ ID NO: 1563698
uugugugucugucuuaaag

SEQ ID NO: 1825546 - RNA, 19 nt, Artificial Sequence
  Description of Artificial Sequence: Synthetic oligonucleotide
  Antisense strand to SEQ ID NO: 1825545
cuuuaagacagacacacaa

SEQ ID NO: 1825547 - RNA, 19 nt, Artificial Sequence
  Description of Artificial Sequence: Synthetic oligonucleotide
  Sense strand starting at position 2631 of SEQ ID NO: 1563698
gugguuacuccggagucuu

SEQ ID NO: 1825548 - RNA, 19 nt, Artificial Sequence
  Description of Artificial Sequence: Synthetic oligonucleotide
  Antisense strand to SEQ ID NO: 1825547
aagacuccggaguaaccac

SEQ ID NO: 1825549 - RNA, 19 nt, Artificial Sequence
  Description of Artificial Sequence: Synthetic oligonucleotide
  Sense strand starting at position 2639 of SEQ ID NO: 1563698
uccggagucuuuguagaga

SEQ ID NO: 1825550 - RNA, 19 nt, Artificial Sequence
  Description of Artificial Sequence: Synthetic oligonucleotide
  Antisense strand to SEQ ID NO: 1825549
ucucuacaaagacuccgga

SEQ ID NO: 1825551 - RNA, 19 nt, Artificial Sequence
  Description of Artificial Sequence: Synthetic oligonucleotide
  Sense strand starting at position 2677 of SEQ ID NO: 1563698
ucacaaugcgcccgaagau

SEQ ID NO: 1825552 - RNA, 19 nt, Artificial Sequence
  Description of Artificial Sequence: Synthetic oligonucleotide
  Antisense strand to SEQ ID NO: 1825551
aucuucgggcgcauuguga

SEQ ID NO: 1825553 - RNA, 19 nt, Artificial Sequence
  Description of Artificial Sequence: Synthetic oligonucleotide
  Sense strand starting at position 2877 of SEQ ID NO: 1563698
gacuucuuuggagggcaua

SEQ ID NO: 1825554 - RNA, 19 nt, Artificial Sequence
  Description of Artificial Sequence: Synthetic oligonucleotide
  Antisense strand to SEQ ID NO: 1825553
uaugcccuccaaagaaguc

SEQ ID NO: 1825555 - RNA, 19 nt, Artificial Sequence
  Description of Artificial Sequence: Synthetic oligonucleotide
  Sense strand starting at position 2900 of SEQ ID NO: 1563698
aaaguaugugcguagaggu

SEQ ID NO: 1825556 - RNA, 19 nt, Artificial Sequence
  Description of Artificial Sequence: Synthetic oligonucleotide
  Antisense strand to SEQ ID NO: 1825555
accucuacgcacauacuuu

SEQ ID NO: 1825557 - RNA, 19 nt, Artificial Sequence
  Description of Artificial Sequence: Synthetic oligonucleotide
  Sense strand starting at position 2907 of SEQ ID NO: 1563698
gugcguagagguaguaacu

SEQ ID NO: 1825558 - RNA, 19 nt, Artificial Sequence
  Description of Artificial Sequence: Synthetic oligonucleotide
  Antisense strand to SEQ ID NO: 1825557
aguuacuaccucuacgcac

SEQ ID NO: 1825559 - RNA, 19 nt, Artificial Sequence
  Description of Artificial Sequence: Synthetic oligonucleotide
  Sense strand starting at position 3043 of SEQ ID NO: 1563698
cauugaucccuugguguug

SEQ ID NO: 1825560 - RNA, 19 nt, Artificial Sequence
  Description of Artificial Sequence: Synthetic oligonucleotide
  Antisense strand to SEQ ID NO: 1825559
caacaccaagggaucaaug

SEQ ID NO: 1825561 - RNA, 19 nt, Artificial Sequence
  Description of Artificial Sequence: Synthetic oligonucleotide
  Sense strand starting at position 3054 of SEQ ID NO: 1563698
ugguguugccucuggacuu

SEQ ID NO: 1825562 - RNA, 19 nt, Artificial Sequence
  Description of Artificial Sequence: Synthetic oligonucleotide
  Antisense strand to SEQ ID NO: 1825561
aaguccagaggcaacacca

SEQ ID NO: 1825563 - RNA, 19 nt, Artificial Sequence
  Description of Artificial Sequence: Synthetic oligonucleotide
  Sense strand starting at position 3099 of SEQ ID NO: 1563698
cucagagguuaucaauucu

SEQ ID NO: 1825564 - RNA, 19 nt, Artificial Sequence
  Description of Artificial Sequence: Synthetic oligonucleotide
  Antisense strand to SEQ ID NO: 1825563
agaauugauaaccucugag

SEQ ID NO: 1825565 - RNA, 19 nt, Artificial Sequence
  Description of Artificial Sequence: Synthetic oligonucleotide
  Sense strand starting at position 3105 of SEQ ID NO: 1563698
gguuaucaauucuuucuga

SEQ ID NO: 1825566 - RNA, 19 nt, Artificial Sequence
  Description of Artificial Sequence: Synthetic oligonucleotide
  Antisense strand to SEQ ID NO: 1825565
ucagaaagaauugauaacc

SEQ ID NO: 1825567 - RNA, 19 nt, Artificial Sequence
  Description of Artificial Sequence: Synthetic oligonucleotide
  Sense strand starting at position 3181 of SEQ ID NO: 1563698
accggauuucagugacggu

SEQ ID NO: 1825568 - RNA, 19 nt, Artificial Sequence
  Description of Artificial Sequence: Synthetic oligonucleotide
  Antisense strand to SEQ ID NO: 1825567
accgucacugaaauccggu

SEQ ID NO: 1825569 - RNA, 19 nt, Artificial Sequence
  Description of Artificial Sequence: Synthetic oligonucleotide
  Sense strand starting at position 3425 of SEQ ID NO: 1563698
uguaaagcgaacugauaua

SEQ ID NO: 1825570 - RNA, 19 nt, Artificial Sequence
  Description of Artificial Sequence: Synthetic oligonucleotide
  Antisense strand to SEQ ID NO: 1825569
uauaucaguucgcuuuaca

SEQ ID NO: 1825571 - RNA, 19 nt, Artificial Sequence
  Description of Artificial Sequence: Synthetic oligonucleotide
  Sense strand starting at position 3496 of SEQ ID NO: 1563698
gcuaguauaucaguugcua

SEQ ID NO: 1825572 - RNA, 19 nt, Artificial Sequence
  Description of Artificial Sequence: Synthetic oligonucleotide
  Antisense strand to SEQ ID NO: 1825571
uagcaacugauauacuagc

SEQ ID NO: 1825573 - RNA, 19 nt, Artificial Sequence
  Description of Artificial Sequence: Synthetic oligonucleotide
  Sense strand starting at position 3500 of SEQ ID NO: 1563698
guauaucaguugcuacaga

SEQ ID NO: 1825574 - RNA, 19 nt, Artificial Sequence
  Description of Artificial Sequence: Synthetic oligonucleotide
  Antisense strand to SEQ ID NO: 1825573
ucuguagcaacugauauac

SEQ ID NO: 1825575 - RNA, 19 nt, Artificial Sequence
  Description of Artificial Sequence: Synthetic oligonucleotide
  Sense strand starting at position 3590 of SEQ ID NO: 1563698
guccuaggcucuucccaaa

SEQ ID NO: 1825576 - RNA, 19 nt, Artificial Sequence
  Description of Artificial Sequence: Synthetic oligonucleotide
  Antisense strand to SEQ ID NO: 1825575
uuugggaagagccuaggac

SEQ ID NO: 1825577 - RNA, 19 nt, Artificial Sequence
  Description of Artificial Sequence: Synthetic oligonucleotide
  Sense strand starting at position 3708 of SEQ ID NO: 1563698
acaugagagucugaggaga

SEQ ID NO: 1825578 - RNA, 19 nt, Artificial Sequence
  Description of Artificial Sequence: Synthetic oligonucleotide
  Antisense strand to SEQ ID NO: 1825577
ucuccucagacucucaugu

SEQ ID NO: 1825579 - RNA, 19 nt, Artificial Sequence
  Description of Artificial Sequence: Synthetic oligonucleotide
  Sense strand starting at position 3814 of SEQ ID NO: 1563698
agcauuauucgggaacaug

SEQ ID NO: 1825580 - RNA, 19 nt, Artificial Sequence
  Description of Artificial Sequence: Synthetic oligonucleotide
  Antisense strand to SEQ ID NO: 1825579
cauguucccgaauaaugcu

SEQ ID NO: 1825581 - RNA, 19 nt, Artificial Sequence
  Description of Artificial Sequence: Synthetic oligonucleotide
  Sense strand starting at position 516 of SEQ ID NO: 1563699
guuccuucccauuaaggaa

SEQ ID NO: 1825582 - RNA, 19 nt, Artificial Sequence
  Description of Artificial Sequence: Synthetic oligonucleotide
  Antisense strand to SEQ ID NO: 1825581
uuccuuaaugggaaggaac

SEQ ID NO: 1825583 - RNA, 19 nt, Artificial Sequence
  Description of Artificial Sequence: Synthetic oligonucleotide
  Sense strand starting at position 607 of SEQ ID NO: 1563699
uagucugcucaaggucaga

SEQ ID NO: 1825584 - RNA, 19 nt, Artificial Sequence
  Description of Artificial Sequence: Synthetic oligonucleotide
  Antisense strand to SEQ ID NO: 1825583
ucugaccuugagcagacua

SEQ ID NO: 1825585 - RNA, 19 nt, Artificial Sequence
  Description of Artificial Sequence: Synthetic oligonucleotide
  Sense strand starting at position 675 of SEQ ID NO: 1563699
agugaucugucucuccaag

SEQ ID NO: 1825586 - RNA, 19 nt, Artificial Sequence
  Description of Artificial Sequence: Synthetic oligonucleotide
  Antisense strand to SEQ ID NO: 1825585
cuuggagagacagaucacu

SEQ ID NO: 1825587 - RNA, 19 nt, Artificial Sequence
  Description of Artificial Sequence: Synthetic oligonucleotide
  Sense strand starting at position 677 of SEQ ID NO: 1563699
ugaucugucucuccaagua

SEQ ID NO: 1825588 - RNA, 19 nt, Artificial Sequence
  Description of Artificial Sequence: Synthetic oligonucleotide
  Antisense strand to SEQ ID NO: 1825587
uacuuggagagacagauca

SEQ ID NO: 1825589 - RNA, 19 nt, Artificial Sequence
  Description of Artificial Sequence: Synthetic oligonucleotide
  Sense strand starting at position 704 of SEQ ID NO: 1563699
aguggaauauccuuuguac

SEQ ID NO: 1825590 - RNA, 19 nt, Artificial Sequence
  Description of Artificial Sequence: Synthetic oligonucleotide
  Antisense strand to SEQ ID NO: 1825589
guacaaaggauauuccacu

SEQ ID NO: 1825591 - RNA, 19 nt, Artificial Sequence
  Description of Artificial Sequence: Synthetic oligonucleotide
  Sense strand starting at position 749 of SEQ ID NO: 1563699
cccaguaguucucccucau

SEQ ID NO: 1825592 - RNA, 19 nt, Artificial Sequence
  Description of Artificial Sequence: Synthetic oligonucleotide
  Antisense strand to SEQ ID NO: 1825591
augagggagaacuacuggg

SEQ ID NO: 1825593 - RNA, 19 nt, Artificial Sequence
  Description of Artificial Sequence: Synthetic oligonucleotide
  Sense strand starting at position 779 of SEQ ID NO: 1563699
ugggaucaauguuccucau

SEQ ID NO: 1825594 - RNA, 19 nt, Artificial Sequence
  Description of Artificial Sequence: Synthetic oligonucleotide
  Antisense strand to SEQ ID NO: 1825593
augaggaacauugauccca

SEQ ID NO: 1825595 - RNA, 19 nt, Artificial Sequence
  Description of Artificial Sequence: Synthetic oligonucleotide
  Sense strand starting at position 781 of SEQ ID NO: 1563699
ggaucaauguuccucauuc

SEQ ID NO: 1825596 - RNA, 19 nt, Artificial Sequence
  Description of Artificial Sequence: Synthetic oligonucleotide
  Antisense strand to SEQ ID NO: 1825595
gaaugaggaacauugaucc

SEQ ID NO: 1825597 - RNA, 19 nt, Artificial Sequence
  Description of Artificial Sequence: Synthetic oligonucleotide
  Sense strand starting at position 903 of SEQ ID NO: 1563699
ggaugacucuuacucacuu

SEQ ID NO: 1825598 - RNA, 19 nt, Artificial Sequence
  Description of Artificial Sequence: Synthetic oligonucleotide
  Antisense strand to SEQ ID NO: 1825597
aagugaguaagagucaucc

SEQ ID NO: 1825599 - RNA, 19 nt, Artificial Sequence
  Description of Artificial Sequence: Synthetic oligonucleotide
  Sense strand starting at position 1043 of SEQ ID NO: 1563699
ccuguccucccucagaguu

SEQ ID NO: 1825600 - RNA, 19 nt, Artificial Sequence
  Description of Artificial Sequence: Synthetic oligonucleotide
  Antisense strand to SEQ ID NO: 1825599
aacucugagggaggacagg

SEQ ID NO: 1825601 - RNA, 19 nt, Artificial Sequence
  Description of Artificial Sequence: Synthetic oligonucleotide
  Sense strand starting at position 1202 of SEQ ID NO: 1563699
cccaaagcccagugaucuu

SEQ ID NO: 1825602 - RNA, 19 nt, Artificial Sequence
  Description of Artificial Sequence: Synthetic oligonucleotide
  Antisense strand to SEQ ID NO: 1825601
aagaucacugggcuuuggg

SEQ ID NO: 1825603 - RNA, 19 nt, Artificial Sequence
  Description of Artificial Sequence: Synthetic oligonucleotide
  Sense strand starting at position 1226 of SEQ ID NO: 1563699
cuuguaguccaagguauca

SEQ ID NO: 1825604 - RNA, 19 nt, Artificial Sequence
  Description of Artificial Sequence: Synthetic oligonucleotide
  Antisense strand to SEQ ID NO: 1825603
ugauaccuuggacuacaag

SEQ ID NO: 1825605 - RNA, 19 nt, Artificial Sequence
  Description of Artificial Sequence: Synthetic oligonucleotide
  Sense strand starting at position 1678 of SEQ ID NO: 1563699
uaagguaccgccuacuuaa

SEQ ID NO: 1825606 - RNA, 19 nt, Artificial Sequence
  Description of Artificial Sequence: Synthetic oligonucleotide
  Antisense strand to SEQ ID NO: 1825605
uuaaguaggcgguaccuua

SEQ ID NO: 1825607 - RNA, 19 nt, Artificial Sequence
  Description of Artificial Sequence: Synthetic oligonucleotide
  Sense strand starting at position 2024 of SEQ ID NO: 1563699
aguauuaaggucggaccaa

SEQ ID NO: 1825608 - RNA, 19 nt, Artificial Sequence
  Description of Artificial Sequence: Synthetic oligonucleotide
  Antisense strand to SEQ ID NO: 1825607
uugguccgaccuuaauacu

SEQ ID NO: 1825609 - RNA, 19 nt, Artificial Sequence
  Description of Artificial Sequence: Synthetic oligonucleotide
  Sense strand starting at position 2065 of SEQ ID NO: 1563699
gguagaaccuaauuccgaa

SEQ ID NO: 1825610 - RNA, 19 nt, Artificial Sequence
  Description of Artificial Sequence: Synthetic oligonucleotide
  Antisense strand to SEQ ID NO: 1825609
uucggaauuagguucuacc

SEQ ID NO: 1825611 - RNA, 19 nt, Artificial Sequence
  Description of Artificial Sequence: Synthetic oligonucleotide
  Sense strand starting at position 2136 of SEQ ID NO: 1563699
acuguaauacaacguucua

SEQ ID NO: 1825612 - RNA, 19 nt, Artificial Sequence
  Description of Artificial Sequence: Synthetic oligonucleotide
  Antisense strand to SEQ ID NO: 1825611
uagaacguuguauuacagu

SEQ ID NO: 1825613 - RNA, 19 nt, Artificial Sequence
  Description of Artificial Sequence: Synthetic oligonucleotide
  Sense strand starting at position 2146 of SEQ ID NO: 1563699
aacguucuacccgaaugua

SEQ ID NO: 1825614 - RNA, 19 nt, Artificial Sequence
  Description of Artificial Sequence: Synthetic oligonucleotide
  Antisense strand to SEQ ID NO: 1825613
uacauucggguagaacguu

SEQ ID NO: 1825615 - RNA, 19 nt, Artificial Sequence
  Description of Artificial Sequence: Synthetic oligonucleotide
  Sense strand starting at position 2149 of SEQ ID NO: 1563699
guucuacccgaauguaagu

SEQ ID NO: 1825616 - RNA, 19 nt, Artificial Sequence
  Description of Artificial Sequence: Synthetic oligonucleotide
  Antisense strand to SEQ ID NO: 1825615
acuuacauucggguagaac

SEQ ID NO: 1825617 - RNA, 19 nt, Artificial Sequence
  Description of Artificial Sequence: Synthetic oligonucleotide
  Sense strand starting at position 2163 of SEQ ID NO: 1563699
uaagucaucugauuggcuu

SEQ ID NO: 1825618 - RNA, 19 nt, Artificial Sequence
  Description of Artificial Sequence: Synthetic oligonucleotide
  Antisense strand to SEQ ID NO: 1825617
aagccaaucagaugacuua

SEQ ID NO: 1825619 - RNA, 19 nt, Artificial Sequence
  Description of Artificial Sequence: Synthetic oligonucleotide
  Sense strand starting at position 2164 of SEQ ID NO: 1563699
aagucaucugauuggcuuu

SEQ ID NO: 1825620 - RNA, 19 nt, Artificial Sequence
  Description of Artificial Sequence: Synthetic oligonucleotide
  Antisense strand to SEQ ID NO: 1825619
aaagccaaucagaugacuu

SEQ ID NO: 1825621 - RNA, 19 nt, Artificial Sequence
  Description of Artificial Sequence: Synthetic oligonucleotide
  Sense strand starting at position 2193 of SEQ ID NO: 1563699
uaggccacccauugugaua

SEQ ID NO: 1825622 - RNA, 19 nt, Artificial Sequence
  Description of Artificial Sequence: Synthetic oligonucleotide
  Antisense strand to SEQ ID NO: 1825621
uaucacaauggguggccua

SEQ ID NO: 1825623 - RNA, 19 nt, Artificial Sequence
  Description of Artificial Sequence: Synthetic oligonucleotide
  Sense strand starting at position 2206 of SEQ ID NO: 1563699
gugauacgacauuauuaca

SEQ ID NO: 1825624 - RNA, 19 nt, Artificial Sequence
  Description of Artificial Sequence: Synthetic oligonucleotide
  Antisense strand to SEQ ID NO: 1825623
uguaauaaugucguaucac

SEQ ID NO: 1825625 - RNA, 19 nt, Artificial Sequence
  Description of Artificial Sequence: Synthetic oligonucleotide
  Sense strand starting at position 2240 of SEQ ID NO: 1563699
uggacucgucgcuagggaa

SEQ ID NO: 1825626 - RNA, 19 nt, Artificial Sequence
  Description of Artificial Sequence: Synthetic oligonucleotide
  Antisense strand to SEQ ID NO: 1825625
uucccuagcgacgagucca

SEQ ID NO: 1825627 - RNA, 19 nt, Artificial Sequence
  Description of Artificial Sequence: Synthetic oligonucleotide
  Sense strand starting at position 2253 of SEQ ID NO: 1563699
agggaagucuuugccgaca

SEQ ID NO: 1825628 - RNA, 19 nt, Artificial Sequence
  Description of Artificial Sequence: Synthetic oligonucleotide
  Antisense strand to SEQ ID NO: 1825627
ugucggcaaagacuucccu

SEQ ID NO: 1825629 - RNA, 19 nt, Artificial Sequence
  Description of Artificial Sequence: Synthetic oligonucleotide
  Sense strand starting at position 2256 of SEQ ID NO: 1563699
gaagucuuugccgacagaa

SEQ ID NO: 1825630 - RNA, 19 nt, Artificial Sequence
  Description of Artificial Sequence: Synthetic oligonucleotide
  Antisense strand to SEQ ID NO: 1825629
uucugucggcaaagacuuc

SEQ ID NO: 1825631 - RNA, 19 nt, Artificial Sequence
  Description of Artificial Sequence: Synthetic oligonucleotide
  Sense strand starting at position 2287 of SEQ ID NO: 1563699
gcgguauuccuuuaaugag

SEQ ID NO: 1825632 - RNA, 19 nt, Artificial Sequence
  Description of Artificial Sequence: Synthetic oligonucleotide
  Antisense strand to SEQ ID NO: 1825631
cucauuaaaggaauaccgc

SEQ ID NO: 1825633 - RNA, 19 nt, Artificial Sequence
  Description of Artificial Sequence: Synthetic oligonucleotide
  Sense strand starting at position 2482 of SEQ ID NO: 1563699
acguuagguaaaggacuua

SEQ ID NO: 1825634 - RNA, 19 nt, Artificial Sequence
  Description of Artificial Sequence: Synthetic oligonucleotide
  Antisense strand to SEQ ID NO: 1825633
uaaguccuuuaccuaacgu

SEQ ID NO: 1825635 - RNA, 19 nt, Artificial Sequence
  Description of Artificial Sequence: Synthetic oligonucleotide
  Sense strand starting at position 2651 of SEQ ID NO: 1563699
agaguaagaaaugguaucu

SEQ ID NO: 1825636 - RNA, 19 nt, Artificial Sequence
  Description of Artificial Sequence: Synthetic oligonucleotide
  Antisense strand to SEQ ID NO: 1825635
agauaccauuucuuacucu

SEQ ID NO: 1825637 - RNA, 19 nt, Artificial Sequence
  Description of Artificial Sequence: Synthetic oligonucleotide
  Sense strand starting at position 3039 of SEQ ID NO: 1563699
cguagaauuuaaugauuuc

SEQ ID NO: 1825638 - RNA, 19 nt, Artificial Sequence
  Description of Artificial Sequence: Synthetic oligonucleotide
  Antisense strand to SEQ ID NO: 1825637
gaaaucauuaaauucuacg

SEQ ID NO: 1825639 - RNA, 19 nt, Artificial Sequence
  Description of Artificial Sequence: Synthetic oligonucleotide
  Sense strand starting at position 3048 of SEQ ID NO: 1563699
uaaugauuucccugcugug

SEQ ID NO: 1825640 - RNA, 19 nt, Artificial Sequence
  Description of Artificial Sequence: Synthetic oligonucleotide
  Antisense strand to SEQ ID NO: 1825639
cacagcagggaaaucauua

SEQ ID NO: 1825641 - RNA, 19 nt, Artificial Sequence
  Description of Artificial Sequence: Synthetic oligonucleotide
  Sense strand starting at position 3400 of SEQ ID NO: 1563699
ccaggacucuuugauuucu

SEQ ID NO: 1825642 - RNA, 19 nt, Artificial Sequence
  Description of Artificial Sequence: Synthetic oligonucleotide
  Antisense strand to SEQ ID NO: 1825641
agaaaucaaagaguccugg

SEQ ID NO: 1825643 - RNA, 19 nt, Artificial Sequence
  Description of Artificial Sequence: Synthetic oligonucleotide
  Sense strand starting at position 3451 of SEQ ID NO: 1563699
cgcuauugaucugucuaua

SEQ ID NO: 1825644 - RNA, 19 nt, Artificial Sequence
  Description of Artificial Sequence: Synthetic oligonucleotide
  Antisense strand to SEQ ID NO: 1825643
uauagacagaucaauagcg

SEQ ID NO: 1825645 - RNA, 19 nt, Artificial Sequence
  Description of Artificial Sequence: Synthetic oligonucleotide
  Sense strand starting at position 3456 of SEQ ID NO: 1563699
uugaucugucuauauacau

SEQ ID NO: 1825646 - RNA, 19 nt, Artificial Sequence
  Description of Artificial Sequence: Synthetic oligonucleotide
  Antisense strand to SEQ ID NO: 1825645
auguauauagacagaucaa

SEQ ID NO: 1825647 - RNA, 19 nt, Artificial Sequence
  Description of Artificial Sequence: Synthetic oligonucleotide
  Sense strand starting at position 3496 of SEQ ID NO: 1563699
acaauuuagugagcuuugu

SEQ ID NO: 1825648 - RNA, 19 nt, Artificial Sequence
  Description of Artificial Sequence: Synthetic oligonucleotide
  Antisense strand to SEQ ID NO: 1825647
acaaagcucacuaaauugu

SEQ ID NO: 1825649 - RNA, 19 nt, Artificial Sequence
  Description of Artificial Sequence: Synthetic oligonucleotide
  Sense strand starting at position 3500 of SEQ ID NO: 1563699
uuuagugagcuuugucuaa

SEQ ID NO: 1825650 - RNA, 19 nt, Artificial Sequence
  Description of Artificial Sequence: Synthetic oligonucleotide
  Antisense strand to SEQ ID NO: 1825649
uuagacaaagcucacuaaa

SEQ ID NO: 1825651 - RNA, 19 nt, Artificial Sequence
  Description of Artificial Sequence: Synthetic oligonucleotide
  Sense strand starting at position 3502 of SEQ ID NO: 1563699
uagugagcuuugucuaaug

SEQ ID NO: 1825652 - RNA, 19 nt, Artificial Sequence
  Description of Artificial Sequence: Synthetic oligonucleotide
  Antisense strand to SEQ ID NO: 1825651
cauuagacaaagcucacua

SEQ ID NO: 1825653 - RNA, 19 nt, Artificial Sequence
  Description of Artificial Sequence: Synthetic oligonucleotide
  Sense strand starting at position 3504 of SEQ ID NO: 1563699
gugagcuuugucuaaugua

SEQ ID NO: 1825654 - RNA, 19 nt, Artificial Sequence
  Description of Artificial Sequence: Synthetic oligonucleotide
  Antisense strand to SEQ ID NO: 1825653
uacauuagacaaagcucac

SEQ ID NO: 1825655 - RNA, 19 nt, Artificial Sequence
  Description of Artificial Sequence: Synthetic oligonucleotide
  Sense strand starting at position 3563 of SEQ ID NO: 1563699
uugauuucuuuguauccua

SEQ ID NO: 1825656 - RNA, 19 nt, Artificial Sequence
  Description of Artificial Sequence: Synthetic oligonucleotide
  Antisense strand to SEQ ID NO: 1825655
uaggauacaaagaaaucaa

SEQ ID NO: 1825657 - RNA, 19 nt, Artificial Sequence
  Description of Artificial Sequence: Synthetic oligonucleotide
  Sense strand starting at position 3741 of SEQ ID NO: 1563699
uuguuucguguauaaguau

SEQ ID NO: 1825658 - RNA, 19 nt, Artificial Sequence
  Description of Artificial Sequence: Synthetic oligonucleotide
  Antisense strand to SEQ ID NO: 1825657
auacuuauacacgaaacaa

SEQ ID NO: 1825659 - RNA, 19 nt, Artificial Sequence
  Description of Artificial Sequence: Synthetic oligonucleotide
  Sense strand starting at position 3937 of SEQ ID NO: 1563699
uaagcuaggagugauggua

SEQ ID NO: 1825660 - RNA, 19 nt, Artificial Sequence
  Description of Artificial Sequence: Synthetic oligonucleotide
  Antisense strand to SEQ ID NO: 1825659
uaccaucacuccuagcuua

SEQ ID NO: 1825661 - RNA, 19 nt, Artificial Sequence
  Description of Artificial Sequence: Synthetic oligonucleotide
  Sense strand starting at position 12 of SEQ ID NO: 1563700
aguaauuuaugugaacaac

SEQ ID NO: 1825662 - RNA, 19 nt, Artificial Sequence
  Description of Artificial Sequence: Synthetic oligonucleotide
  Antisense strand to SEQ ID NO: 1825661
guuguucacauaaauuacu

SEQ ID NO: 1825663 - RNA, 19 nt, Artificial Sequence
  Description of Artificial Sequence: Synthetic oligonucleotide
  Sense strand starting at position 32 of SEQ ID NO: 1563700
ugcagcuauuucuugacuu

SEQ ID NO: 1825664 - RNA, 19 nt, Artificial Sequence
  Description of Artificial Sequence: Synthetic oligonucleotide
  Antisense strand to SEQ ID NO: 1825663
aagucaagaaauagcugca

SEQ ID NO: 1825665 - RNA, 19 nt, Artificial Sequence
  Description of Artificial Sequence: Synthetic oligonucleotide
  Sense strand starting at position 36 of SEQ ID NO: 1563700
gcuauuucuugacuugcua

SEQ ID NO: 1825666 - RNA, 19 nt, Artificial Sequence
  Description of Artificial Sequence: Synthetic oligonucleotide
  Antisense strand to SEQ ID NO: 1825665
uagcaagucaagaaauagc

SEQ ID NO: 1825667 - RNA, 19 nt, Artificial Sequence
  Description of Artificial Sequence: Synthetic oligonucleotide
  Sense strand starting at position 145 of SEQ ID NO: 1563700
augcaaugugcucacacaa

SEQ ID NO: 1825668 - RNA, 19 nt, Artificial Sequence
  Description of Artificial Sequence: Synthetic oligonucleotide
  Antisense strand to SEQ ID NO: 1825667
uugugugagcacauugcau

SEQ ID NO: 1825669 - RNA, 19 nt, Artificial Sequence
  Description of Artificial Sequence: Synthetic oligonucleotide
  Sense strand starting at position 428 of SEQ ID NO: 1563700
aaguuaaacugucugagga

SEQ ID NO: 1825670 - RNA, 19 nt, Artificial Sequence
  Description of Artificial Sequence: Synthetic oligonucleotide
  Antisense strand to SEQ ID NO: 1825669
uccucagacaguuuaacuu

SEQ ID NO: 1825671 - RNA, 19 nt, Artificial Sequence
  Description of Artificial Sequence: Synthetic oligonucleotide
  Sense strand starting at position 429 of SEQ ID NO: 1563700
aguuaaacugucugaggaa

SEQ ID NO: 1825672 - RNA, 19 nt, Artificial Sequence
  Description of Artificial Sequence: Synthetic oligonucleotide
  Antisense strand to SEQ ID NO: 1825671
uuccucagacaguuuaacu

SEQ ID NO: 1825673 - RNA, 19 nt, Artificial Sequence
  Description of Artificial Sequence: Synthetic oligonucleotide
  Sense strand starting at position 484 of SEQ ID NO: 1563700
uugguuauuucugaaagaa

SEQ ID NO: 1825674 - RNA, 19 nt, Artificial Sequence
  Description of Artificial Sequence: Synthetic oligonucleotide
  Antisense strand to SEQ ID NO: 1825673
uucuuucagaaauaaccaa

SEQ ID NO: 1825675 - RNA, 19 nt, Artificial Sequence
  Description of Artificial Sequence: Synthetic oligonucleotide
  Sense strand starting at position 582 of SEQ ID NO: 1563700
aaacucuauugggugugau

SEQ ID NO: 1825676 - RNA, 19 nt, Artificial Sequence
  Description of Artificial Sequence: Synthetic oligonucleotide
  Antisense strand to SEQ ID NO: 1825675
aucacacccaauagaguuu

SEQ ID NO: 1825677 - RNA, 19 nt, Artificial Sequence
  Description of Artificial Sequence: Synthetic oligonucleotide
  Sense strand starting at position 583 of SEQ ID NO: 1563700
aacucuauugggugugauu

SEQ ID NO: 1825678 - RNA, 19 nt, Artificial Sequence
  Description of Artificial Sequence: Synthetic oligonucleotide
  Antisense strand to SEQ ID NO: 1825677
aaucacacccaauagaguu

SEQ ID NO: 1825679 - RNA, 19 nt, Artificial Sequence
  Description of Artificial Sequence: Synthetic oligonucleotide
  Sense strand starting at position 892 of SEQ ID NO: 1563700
gucuaucacccuuggagag

SEQ ID NO: 1825680 - RNA, 19 nt, Artificial Sequence
  Description of Artificial Sequence: Synthetic oligonucleotide
  Antisense strand to SEQ ID NO: 1825679
cucuccaagggugauagac

SEQ ID NO: 1825681 - RNA, 19 nt, Artificial Sequence
  Description of Artificial Sequence: Synthetic oligonucleotide
  Sense strand starting at position 2153 of SEQ ID NO: 1563700
augacaugucaauauugcu

SEQ ID NO: 1825682 - RNA, 19 nt, Artificial Sequence
  Description of Artificial Sequence: Synthetic oligonucleotide
  Antisense strand to SEQ ID NO: 1825681
agcaauauugacaugucau

SEQ ID NO: 1825683 - RNA, 19 nt, Artificial Sequence
  Description of Artificial Sequence: Synthetic oligonucleotide
  Sense strand starting at position 2179 of SEQ ID NO: 1563700
gaggucugucuuugaauua

SEQ ID NO: 1825684 - RNA, 19 nt, Artificial Sequence
  Description of Artificial Sequence: Synthetic oligonucleotide
  Antisense strand to SEQ ID NO: 1825683
uaauucaaagacagaccuc

SEQ ID NO: 1825685 - RNA, 19 nt, Artificial Sequence
  Description of Artificial Sequence: Synthetic oligonucleotide
  Sense strand starting at position 2222 of SEQ ID NO: 1563700
ccaugugugaguuauccca

SEQ ID NO: 1825686 - RNA, 19 nt, Artificial Sequence
  Description of Artificial Sequence: Synthetic oligonucleotide
  Antisense strand to SEQ ID NO: 1825685
ugggauaacucacacaugg

SEQ ID NO: 1825687 - RNA, 19 nt, Artificial Sequence
  Description of Artificial Sequence: Synthetic oligonucleotide
  Sense strand starting at position 2392 of SEQ ID NO: 1563700
uucuguuuaccagggagaa

SEQ ID NO: 1825688 - RNA, 19 nt, Artificial Sequence
  Description of Artificial Sequence: Synthetic oligonucleotide
  Antisense strand to SEQ ID NO: 1825687
uucucccugguaaacagaa

SEQ ID NO: 1825689 - RNA, 19 nt, Artificial Sequence
  Description of Artificial Sequence: Synthetic oligonucleotide
  Sense strand starting at position 2393 of SEQ ID NO: 1563700
ucuguuuaccagggagaaa

SEQ ID NO: 1825690 - RNA, 19 nt, Artificial Sequence
  Description of Artificial Sequence: Synthetic oligonucleotide
  Antisense strand to SEQ ID NO: 1825689
uuucucccugguaaacaga

SEQ ID NO: 1825691 - RNA, 19 nt, Artificial Sequence
  Description of Artificial Sequence: Synthetic oligonucleotide
  Sense strand starting at position 2419 of SEQ ID NO: 1563700
gggaaccagcuguauucuu

SEQ ID NO: 1825692 - RNA, 19 nt, Artificial Sequence
  Description of Artificial Sequence: Synthetic oligonucleotide
  Antisense strand to SEQ ID NO: 1825691
aagaauacagcugguuccc

SEQ ID NO: 1825693 - RNA, 19 nt, Artificial Sequence
  Description of Artificial Sequence: Synthetic oligonucleotide
  Sense strand starting at position 2612 of SEQ ID NO: 1563700
gcgugauagauacaauacu

SEQ ID NO: 1825694 - RNA, 19 nt, Artificial Sequence
  Description of Artificial Sequence: Synthetic oligonucleotide
  Antisense strand to SEQ ID NO: 1825693
aguauuguaucuaucacgc

SEQ ID NO: 1825695 - RNA, 19 nt, Artificial Sequence
  Description of Artificial Sequence: Synthetic oligonucleotide
  Sense strand starting at position 2632 of SEQ ID NO: 1563700
aggaauugaguggguggua

SEQ ID NO: 1825696 - RNA, 19 nt, Artificial Sequence
  Description of Artificial Sequence: Synthetic oligonucleotide
  Antisense strand to SEQ ID NO: 1825695
uaccacccacucaauuccu

SEQ ID NO: 1825697 - RNA, 19 nt, Artificial Sequence
  Description of Artificial Sequence: Synthetic oligonucleotide
  Sense strand starting at position 2633 of SEQ ID NO: 1563700
ggaauugagugggugguaa

SEQ ID NO: 1825698 - RNA, 19 nt, Artificial Sequence
  Description of Artificial Sequence: Synthetic oligonucleotide
  Antisense strand to SEQ ID NO: 1825697
uuaccacccacucaauucc

SEQ ID NO: 1825699 - RNA, 19 nt, Artificial Sequence
  Description of Artificial Sequence: Synthetic oligonucleotide
  Sense strand starting at position 2658 of SEQ ID NO: 1563700
uaaguuaucguugaaggag

SEQ ID NO: 1825700 - RNA, 19 nt, Artificial Sequence
  Description of Artificial Sequence: Synthetic oligonucleotide
  Antisense strand to SEQ ID NO: 1825699
cuccuucaacgauaacuua

SEQ ID NO: 1825701 - RNA, 19 nt, Artificial Sequence
  Description of Artificial Sequence: Synthetic oligonucleotide
  Sense strand starting at position 2717 of SEQ ID NO: 1563700
ggcuuagaccuuuagccaa

SEQ ID NO: 1825702 - RNA, 19 nt, Artificial Sequence
  Description of Artificial Sequence: Synthetic oligonucleotide
  Antisense strand to SEQ ID NO: 1825701
uuggcuaaaggucuaagcc

SEQ ID NO: 1825703 - RNA, 19 nt, Artificial Sequence
  Description of Artificial Sequence: Synthetic oligonucleotide
  Sense strand starting at position 2748 of SEQ ID NO: 1563700
acauuauuagagugcaucu

SEQ ID NO: 1825704 - RNA, 19 nt, Artificial Sequence
  Description of Artificial Sequence: Synthetic oligonucleotide
  Antisense strand to SEQ ID NO: 1825703
agaugcacucuaauaaugu

SEQ ID NO: 1825705 - RNA, 19 nt, Artificial Sequence
  Description of Artificial Sequence: Synthetic oligonucleotide
  Sense strand starting at position 2755 of SEQ ID NO: 1563700
uagagugcaucuuuaugac

SEQ ID NO: 1825706 - RNA, 19 nt, Artificial Sequence
  Description of Artificial Sequence: Synthetic oligonucleotide
  Antisense strand to SEQ ID NO: 1825705
gucauaaagaugcacucua

SEQ ID NO: 1825707 - RNA, 19 nt, Artificial Sequence
  Description of Artificial Sequence: Synthetic oligonucleotide
  Sense strand starting at position 2763 of SEQ ID NO: 1563700
aucuuuaugacguauguga

SEQ ID NO: 1825708 - RNA, 19 nt, Artificial Sequence
  Description of Artificial Sequence: Synthetic oligonucleotide
  Antisense strand to SEQ ID NO: 1825707
ucacauacgucauaaagau

SEQ ID NO: 1825709 - RNA, 19 nt, Artificial Sequence
  Description of Artificial Sequence: Synthetic oligonucleotide
  Sense strand starting at position 3042 of SEQ ID NO: 1563700
agagcuucucggcagagau

SEQ ID NO: 1825710 - RNA, 19 nt, Artificial Sequence
  Description of Artificial Sequence: Synthetic oligonucleotide
  Antisense strand to SEQ ID NO: 1825709
aucucugccgagaagcucu

SEQ ID NO: 1825711 - RNA, 19 nt, Artificial Sequence
  Description of Artificial Sequence: Synthetic oligonucleotide
  Sense strand starting at position 3044 of SEQ ID NO: 1563700
agcuucucggcagagauca

SEQ ID NO: 1825712 - RNA, 19 nt, Artificial Sequence
  Description of Artificial Sequence: Synthetic oligonucleotide
  Antisense strand to SEQ ID NO: 1825711
ugaucucugccgagaagcu

SEQ ID NO: 1825713 - RNA, 19 nt, Artificial Sequence
  Description of Artificial Sequence: Synthetic oligonucleotide
  Sense strand starting at position 3107 of SEQ ID NO: 1563700
auuaguugccagcaauaua

SEQ ID NO: 1825714 - RNA, 19 nt, Artificial Sequence
  Description of Artificial Sequence: Synthetic oligonucleotide
  Antisense strand to SEQ ID NO: 1825713
uauauugcuggcaacuaau

SEQ ID NO: 1825715 - RNA, 19 nt, Artificial Sequence
  Description of Artificial Sequence: Synthetic oligonucleotide
  Sense strand starting at position 3117 of SEQ ID NO: 1563700
agcaauauagcuuaaugau

SEQ ID NO: 1825716 - RNA, 19 nt, Artificial Sequence
  Description of Artificial Sequence: Synthetic oligonucleotide
  Antisense strand to SEQ ID NO: 1825715
aucauuaagcuauauugcu

SEQ ID NO: 1825717 - RNA, 19 nt, Artificial Sequence
  Description of Artificial Sequence: Synthetic oligonucleotide
  Sense strand starting at position 3348 of SEQ ID NO: 1563700
gggaaaggcuuacuuugga

SEQ ID NO: 1825718 - RNA, 19 nt, Artificial Sequence
  Description of Artificial Sequence: Synthetic oligonucleotide
  Antisense strand to SEQ ID NO: 1825717
uccaaaguaagccuuuccc

SEQ ID NO: 1825719 - RNA, 19 nt, Artificial Sequence
  Description of Artificial Sequence: Synthetic oligonucleotide
  Sense strand starting at position 3378 of SEQ ID NO: 1563700
aguucagaagagugauuga

SEQ ID NO: 1825720 - RNA, 19 nt, Artificial Sequence
  Description of Artificial Sequence: Synthetic oligonucleotide
  Antisense strand to SEQ ID NO: 1825719
ucaaucacucuucugaacu

SEQ ID NO: 1825721 - RNA, 19 nt, Artificial Sequence
  Description of Artificial Sequence: Synthetic oligonucleotide
  Sense strand starting at position 3416 of SEQ ID NO: 1563700
cacucauacgagugaauua

SEQ ID NO: 1825722 - RNA, 19 nt, Artificial Sequence
  Description of Artificial Sequence: Synthetic oligonucleotide
  Antisense strand to SEQ ID NO: 1825721
uaauucacucguaugagug

SEQ ID NO: 1825723 - RNA, 19 nt, Artificial Sequence
  Description of Artificial Sequence: Synthetic oligonucleotide
  Sense strand starting at position 3421 of SEQ ID NO: 1563700
auacgagugaauuagcaac

SEQ ID NO: 1825724 - RNA, 19 nt, Artificial Sequence
  Description of Artificial Sequence: Synthetic oligonucleotide
  Antisense strand to SEQ ID NO: 1825723
guugcuaauucacucguau

SEQ ID NO: 1825725 - RNA, 19 nt, Artificial Sequence
  Description of Artificial Sequence: Synthetic oligonucleotide
  Sense strand starting at position 3519 of SEQ ID NO: 1563700
gaagauguguacucucaca

SEQ ID NO: 1825726 - RNA, 19 nt, Artificial Sequence
  Description of Artificial Sequence: Synthetic oligonucleotide
  Antisense strand to SEQ ID NO: 1825725
ugugagaguacacaucuuc

SEQ ID NO: 1825727 - RNA, 19 nt, Artificial Sequence
  Description of Artificial Sequence: Synthetic oligonucleotide
  Sense strand starting at position 3643 of SEQ ID NO: 1563700
aaucauaugugccuaggau

SEQ ID NO: 1825728 - RNA, 19 nt, Artificial Sequence
  Description of Artificial Sequence: Synthetic oligonucleotide
  Antisense strand to SEQ ID NO: 1825727
auccuaggcacauaugauu

SEQ ID NO: 1825729 - RNA, 19 nt, Artificial Sequence
  Description of Artificial Sequence: Synthetic oligonucleotide
  Sense strand starting at position 3644 of SEQ ID NO: 1563700
aucauaugugccuaggauc

SEQ ID NO: 1825730 - RNA, 19 nt, Artificial Sequence
  Description of Artificial Sequence: Synthetic oligonucleotide
  Antisense strand to SEQ ID NO: 1825729
gauccuaggcacauaugau

SEQ ID NO: 1825731 - RNA, 19 nt, Artificial Sequence
  Description of Artificial Sequence: Synthetic oligonucleotide
  Sense strand starting at position 3775 of SEQ ID NO: 1563700
gcagguuugggugagauug

SEQ ID NO: 1825732 - RNA, 19 nt, Artificial Sequence
  Description of Artificial Sequence: Synthetic oligonucleotide
  Antisense strand to SEQ ID NO: 1825731
caaucucacccaaaccugc

SEQ ID NO: 1825733 - RNA, 19 nt, Artificial Sequence
  Description of Artificial Sequence: Synthetic oligonucleotide
  Sense strand starting at position 3786 of SEQ ID NO: 1563700
ugagauugugauggaucuu

SEQ ID NO: 1825734 - RNA, 19 nt, Artificial Sequence
  Description of Artificial Sequence: Synthetic oligonucleotide
  Antisense strand to SEQ ID NO: 1825733
aagauccaucacaaucuca

SEQ ID NO: 1825735 - RNA, 19 nt, Artificial Sequence
  Description of Artificial Sequence: Synthetic oligonucleotide
  Sense strand starting at position 3814 of SEQ ID NO: 1563700
cuaagaaguuuggucuaaa

SEQ ID NO: 1825736 - RNA, 19 nt, Artificial Sequence
  Description of Artificial Sequence: Synthetic oligonucleotide
  Antisense strand to SEQ ID NO: 1825735
uuuagaccaaacuucuuag

SEQ ID NO: 1825737 - RNA, 19 nt, Artificial Sequence
  Description of Artificial Sequence: Synthetic oligonucleotide
  Sense strand starting at position 3869 of SEQ ID NO: 1563700
guuguuucccuuuauuucu

SEQ ID NO: 1825738 - RNA, 19 nt, Artificial Sequence
  Description of Artificial Sequence: Synthetic oligonucleotide
  Antisense strand to SEQ ID NO: 1825737
agaaauaaagggaaacaac

SEQ ID NO: 1825739 - RNA, 19 nt, Artificial Sequence
  Description of Artificial Sequence: Synthetic oligonucleotide
  Sense strand starting at position 3925 of SEQ ID NO: 1563700
aaaucuaauugggugguua

SEQ ID NO: 1825740 - RNA, 19 nt, Artificial Sequence
  Description of Artificial Sequence: Synthetic oligonucleotide
  Antisense strand to SEQ ID NO: 1825739
uaaccacccaauuagauuu

SEQ ID NO: 1825741 - RNA, 19 nt, Artificial Sequence
  Description of Artificial Sequence: Synthetic oligonucleotide
  Sense strand starting at position 2155 of SEQ ID NO: 1563701
cacagucuggcagagcaau

SEQ ID NO: 1825742 - RNA, 19 nt, Artificial Sequence
  Description of Artificial Sequence: Synthetic oligonucleotide
  Antisense strand to SEQ ID NO: 1825741
auugcucugccagacugug

SEQ ID NO: 1825743 - RNA, 19 nt, Artificial Sequence
  Description of Artificial Sequence: Synthetic oligonucleotide
  Sense strand starting at position 2175 of SEQ ID NO: 1563701
ugaccacaaucugaugauu

SEQ ID NO: 1825744 - RNA, 19 nt, Artificial Sequence
  Description of Artificial Sequence: Synthetic oligonucleotide
  Antisense strand to SEQ ID NO: 1825743
aaucaucagauugugguca

SEQ ID NO: 1825745 - RNA, 19 nt, Artificial Sequence
  Description of Artificial Sequence: Synthetic oligonucleotide
  Sense strand starting at position 2246 of SEQ ID NO: 1563701
agugaucauuucuauugaa

SEQ ID NO: 1825746 - RNA, 19 nt, Artificial Sequence
  Description of Artificial Sequence: Synthetic oligonucleotide
  Antisense strand to SEQ ID NO: 1825745
uucaauagaaaugaucacu

SEQ ID NO: 1825747 - RNA, 19 nt, Artificial Sequence
  Description of Artificial Sequence: Synthetic oligonucleotide
  Sense strand starting at position 2356 of SEQ ID NO: 1563701
ugaaauauaugagucugua

SEQ ID NO: 1825748 - RNA, 19 nt, Artificial Sequence
  Description of Artificial Sequence: Synthetic oligonucleotide
  Antisense strand to SEQ ID NO: 1825747
uacagacucauauauuuca

SEQ ID NO: 1825749 - RNA, 19 nt, Artificial Sequence
  Description of Artificial Sequence: Synthetic oligonucleotide
  Sense strand starting at position 2366 of SEQ ID NO: 1563701
gagucuguagccgaacuua

SEQ ID NO: 1825750 - RNA, 19 nt, Artificial Sequence
  Description of Artificial Sequence: Synthetic oligonucleotide
  Antisense strand to SEQ ID NO: 1825749
uaaguucggcuacagacuc

SEQ ID NO: 1825751 - RNA, 19 nt, Artificial Sequence
  Description of Artificial Sequence: Synthetic oligonucleotide
  Sense strand starting at position 2483 of SEQ ID NO: 1563701
gcuucuauaguuuaaggau

SEQ ID NO: 1825752 - RNA, 19 nt, Artificial Sequence
  Description of Artificial Sequence: Synthetic oligonucleotide
  Antisense strand to SEQ ID NO: 1825751
auccuuaaacuauagaagc

SEQ ID NO: 1825753 - RNA, 19 nt, Artificial Sequence
  Description of Artificial Sequence: Synthetic oligonucleotide
  Sense strand starting at position 2559 of SEQ ID NO: 1563701
caaggagauccuuguucca

SEQ ID NO: 1825754 - RNA, 19 nt, Artificial Sequence
  Description of Artificial Sequence: Synthetic oligonucleotide
  Antisense strand to SEQ ID NO: 1825753
uggaacaaggaucuccuug

SEQ ID NO: 1825755 - RNA, 19 nt, Artificial Sequence
  Description of Artificial Sequence: Synthetic oligonucleotide
  Sense strand starting at position 2561 of SEQ ID NO: 1563701
aggagauccuuguuccagu

SEQ ID NO: 1825756 - RNA, 19 nt, Artificial Sequence
  Description of Artificial Sequence: Synthetic oligonucleotide
  Antisense strand to SEQ ID NO: 1825755
acuggaacaaggaucuccu

SEQ ID NO: 1825757 - RNA, 19 nt, Artificial Sequence
  Description of Artificial Sequence: Synthetic oligonucleotide
  Sense strand starting at position 2690 of SEQ ID NO: 1563701
aacugaauucuggguuuau

SEQ ID NO: 1825758 - RNA, 19 nt, Artificial Sequence
  Description of Artificial Sequence: Synthetic oligonucleotide
  Antisense strand to SEQ ID NO: 1825757
auaaacccagaauucaguu

SEQ ID NO: 1825759 - RNA, 19 nt, Artificial Sequence
  Description of Artificial Sequence: Synthetic oligonucleotide
  Sense strand starting at position 2691 of SEQ ID NO: 1563701
acugaauucuggguuuauc

SEQ ID NO: 1825760 - RNA, 19 nt, Artificial Sequence
  Description of Artificial Sequence: Synthetic oligonucleotide
  Antisense strand to SEQ ID NO: 1825759
gauaaacccagaauucagu

SEQ ID NO: 1825761 - RNA, 19 nt, Artificial Sequence
  Description of Artificial Sequence: Synthetic oligonucleotide
  Sense strand starting at position 2700 of SEQ ID NO: 1563701
uggguuuaucugcacuacu

SEQ ID NO: 1825762 - RNA, 19 nt, Artificial Sequence
  Description of Artificial Sequence: Synthetic oligonucleotide
  Antisense strand to SEQ ID NO: 1825761
aguagugcagauaaaccca

SEQ ID NO: 1825763 - RNA, 19 nt, Artificial Sequence
  Description of Artificial Sequence: Synthetic oligonucleotide
  Sense strand starting at position 2806 of SEQ ID NO: 1563701
cuggcuuugcucuaagaaa

SEQ ID NO: 1825764 - RNA, 19 nt, Artificial Sequence
  Description of Artificial Sequence: Synthetic oligonucleotide
  Antisense strand to SEQ ID NO: 1825763
uuucuuagagcaaagccag

SEQ ID NO: 1825765 - RNA, 19 nt, Artificial Sequence
  Description of Artificial Sequence: Synthetic oligonucleotide
  Sense strand starting at position 2964 of SEQ ID NO: 1563701
aguguuaacaguugaguca

SEQ ID NO: 1825766 - RNA, 19 nt, Artificial Sequence
  Description of Artificial Sequence: Synthetic oligonucleotide
  Antisense strand to SEQ ID NO: 1825765
ugacucaacuguuaacacu

SEQ ID NO: 1825767 - RNA, 19 nt, Artificial Sequence
  Description of Artificial Sequence: Synthetic oligonucleotide
  Sense strand starting at position 2965 of SEQ ID NO: 1563701
guguuaacaguugagucaa

SEQ ID NO: 1825768 - RNA, 19 nt, Artificial Sequence
  Description of Artificial Sequence: Synthetic oligonucleotide
  Antisense strand to SEQ ID NO: 1825767
uugacucaacuguuaacac

SEQ ID NO: 1825769 - RNA, 19 nt, Artificial Sequence
  Description of Artificial Sequence: Synthetic oligonucleotide
  Sense strand starting at position 2990 of SEQ ID NO: 1563701
agcgaccuuguuuguaaau

SEQ ID NO: 1825770 - RNA, 19 nt, Artificial Sequence
  Description of Artificial Sequence: Synthetic oligonucleotide
  Antisense strand to SEQ ID NO: 1825769
auuuacaaacaaggucgcu

SEQ ID NO: 1825771 - RNA, 19 nt, Artificial Sequence
  Description of Artificial Sequence: Synthetic oligonucleotide
  Sense strand starting at position 3167 of SEQ ID NO: 1563701
uggugucacauagauggau

SEQ ID NO: 1825772 - RNA, 19 nt, Artificial Sequence
  Description of Artificial Sequence: Synthetic oligonucleotide
  Antisense strand to SEQ ID NO: 1825771
auccaucuaugugacacca

SEQ ID NO: 1825773 - RNA, 19 nt, Artificial Sequence
  Description of Artificial Sequence: Synthetic oligonucleotide
  Sense strand starting at position 3486 of SEQ ID NO: 1563701
cuggccucauaguuggaua

SEQ ID NO: 1825774 - RNA, 19 nt, Artificial Sequence
  Description of Artificial Sequence: Synthetic oligonucleotide
  Antisense strand to SEQ ID NO: 1825773
uauccaacuaugaggccag

SEQ ID NO: 1825775 - RNA, 19 nt, Artificial Sequence
  Description of Artificial Sequence: Synthetic oligonucleotide
  Sense strand starting at position 3487 of SEQ ID NO: 1563701
uggccucauaguuggauau

SEQ ID NO: 1825776 - RNA, 19 nt, Artificial Sequence
  Description of Artificial Sequence: Synthetic oligonucleotide
  Antisense strand to SEQ ID NO: 1825775
auauccaacuaugaggcca

SEQ ID NO: 1825777 - RNA, 19 nt, Artificial Sequence
  Description of Artificial Sequence: Synthetic oligonucleotide
  Sense strand starting at position 3488 of SEQ ID NO: 1563701
ggccucauaguuggauauu

SEQ ID NO: 1825778 - RNA, 19 nt, Artificial Sequence
  Description of Artificial Sequence: Synthetic oligonucleotide
  Antisense strand to SEQ ID NO: 1825777
aauauccaacuaugaggcc

SEQ ID NO: 1825779 - RNA, 19 nt, Artificial Sequence
  Description of Artificial Sequence: Synthetic oligonucleotide
  Sense strand starting at position 3489 of SEQ ID NO: 1563701
gccucauaguuggauauuu

SEQ ID NO: 1825780 - RNA, 19 nt, Artificial Sequence
  Description of Artificial Sequence: Synthetic oligonucleotide
  Antisense strand to SEQ ID NO: 1825779
aaauauccaacuaugaggc

SEQ ID NO: 1825781 - RNA, 19 nt, Artificial Sequence
  Description of Artificial Sequence: Synthetic oligonucleotide
  Sense strand starting at position 3559 of SEQ ID NO: 1563701
ugagaauuguguucuccag

SEQ ID NO: 1825782 - RNA, 19 nt, Artificial Sequence
  Description of Artificial Sequence: Synthetic oligonucleotide
  Antisense strand to SEQ ID NO: 1825781
cuggagaacacaauucuca

SEQ ID NO: 1825783 - RNA, 19 nt, Artificial Sequence
  Description of Artificial Sequence: Synthetic oligonucleotide
  Sense strand starting at position 3561 of SEQ ID NO: 1563701
agaauuguguucuccagac

SEQ ID NO: 1825784 - RNA, 19 nt, Artificial Sequence
  Description of Artificial Sequence: Synthetic oligonucleotide
  Antisense strand to SEQ ID NO: 1825783
gucuggagaacacaauucu

SEQ ID NO: 1825785 - RNA, 19 nt, Artificial Sequence
  Description of Artificial Sequence: Synthetic oligonucleotide
  Sense strand starting at position 3565 of SEQ ID NO: 1563701
uuguguucuccagacuuua

SEQ ID NO: 1825786 - RNA, 19 nt, Artificial Sequence
  Description of Artificial Sequence: Synthetic oligonucleotide
  Antisense strand to SEQ ID NO: 1825785
uaaagucuggagaacacaa

SEQ ID NO: 1825787 - RNA, 19 nt, Artificial Sequence
  Description of Artificial Sequence: Synthetic oligonucleotide
  Sense strand starting at position 3639 of SEQ ID NO: 1563701
cuauuauacuagcucugua

SEQ ID NO: 1825788 - RNA, 19 nt, Artificial Sequence
  Description of Artificial Sequence: Synthetic oligonucleotide
  Antisense strand to SEQ ID NO: 1825787
uacagagcuaguauaauag

SEQ ID NO: 1825789 - RNA, 19 nt, Artificial Sequence
  Description of Artificial Sequence: Synthetic oligonucleotide
  Sense strand starting at position 3644 of SEQ ID NO: 1563701
auacuagcucuguacuguu

SEQ ID NO: 1825790 - RNA, 19 nt, Artificial Sequence
  Description of Artificial Sequence: Synthetic oligonucleotide
  Antisense strand to SEQ ID NO: 1825789
aacaguacagagcuaguau

SEQ ID NO: 1825791 - RNA, 19 nt, Artificial Sequence
  Description of Artificial Sequence: Synthetic oligonucleotide
  Sense strand starting at position 3687 of SEQ ID NO: 1563701
ccgguuauggauuaauuau

SEQ ID NO: 1825792 - RNA, 19 nt, Artificial Sequence
  Description of Artificial Sequence: Synthetic oligonucleotide
  Antisense strand to SEQ ID NO: 1825791
auaauuaauccauaaccgg

SEQ ID NO: 1825793 - RNA, 19 nt, Artificial Sequence
  Description of Artificial Sequence: Synthetic oligonucleotide
  Sense strand starting at position 3720 of SEQ ID NO: 1563701
agagaaugugcacaccuau

SEQ ID NO: 1825794 - RNA, 19 nt, Artificial Sequence
  Description of Artificial Sequence: Synthetic oligonucleotide
  Antisense strand to SEQ ID NO: 1825793
auaggugugcacauucucu

SEQ ID NO: 1825795 - RNA, 19 nt, Artificial Sequence
  Description of Artificial Sequence: Synthetic oligonucleotide
  Sense strand starting at position 3797 of SEQ ID NO: 1563701
gcuggagccuucuuggaca

SEQ ID NO: 1825796 - RNA, 19 nt, Artificial Sequence
  Description of Artificial Sequence: Synthetic oligonucleotide
  Antisense strand to SEQ ID NO: 1825795
uguccaagaaggcuccagc

SEQ ID NO: 1825797 - RNA, 19 nt, Artificial Sequence
  Description of Artificial Sequence: Synthetic oligonucleotide
  Sense strand starting at position 3799 of SEQ ID NO: 1563701
uggagccuucuuggacauu

SEQ ID NO: 1825798 - RNA, 19 nt, Artificial Sequence
  Description of Artificial Sequence: Synthetic oligonucleotide
  Antisense strand to SEQ ID NO: 1825797
aauguccaagaaggcucca

SEQ ID NO: 1825799 - RNA, 19 nt, Artificial Sequence
  Description of Artificial Sequence: Synthetic oligonucleotide
  Sense strand starting at position 3830 of SEQ ID NO: 1563701
aauggacauuucugggaga

SEQ ID NO: 1825800 - RNA, 19 nt, Artificial Sequence
  Description of Artificial Sequence: Synthetic oligonucleotide
  Antisense strand to SEQ ID NO: 1825799
ucucccagaaauguccauu

SEQ ID NO: 1825801 - RNA, 19 nt, Artificial Sequence
  Description of Artificial Sequence: Synthetic oligonucleotide
  Sense strand starting at position 3831 of SEQ ID NO: 1563701
auggacauuucugggagaa

SEQ ID NO: 1825802 - RNA, 19 nt, Artificial Sequence
  Description of Artificial Sequence: Synthetic oligonucleotide
  Antisense strand to SEQ ID NO: 1825801
uucucccagaaauguccau

SEQ ID NO: 1825803 - RNA, 19 nt, Artificial Sequence
  Description of Artificial Sequence: Synthetic oligonucleotide
  Sense strand starting at position 3833 of SEQ ID NO: 1563701
ggacauuucugggagaacc

SEQ ID NO: 1825804 - RNA, 19 nt, Artificial Sequence
  Description of Artificial Sequence: Synthetic oligonucleotide
  Antisense strand to SEQ ID NO: 1825803
gguucucccagaaaugucc

SEQ ID NO: 1825805 - RNA, 19 nt, Artificial Sequence
  Description of Artificial Sequence: Synthetic oligonucleotide
  Sense strand starting at position 3901 of SEQ ID NO: 1563701
gcaggagacaucugggauu

SEQ ID NO: 1825806 - RNA, 19 nt, Artificial Sequence
  Description of Artificial Sequence: Synthetic oligonucleotide
  Antisense strand to SEQ ID NO: 1825805
aaucccagaugucuccugc

SEQ ID NO: 1825807 - RNA, 19 nt, Artificial Sequence
  Description of Artificial Sequence: Synthetic oligonucleotide
  Sense strand starting at position 3933 of SEQ ID NO: 1563701
ggucgaaugcauuggucau

SEQ ID NO: 1825808 - RNA, 19 nt, Artificial Sequence
  Description of Artificial Sequence: Synthetic oligonucleotide
  Antisense strand to SEQ ID NO: 1825807
augaccaaugcauucgacc

SEQ ID NO: 1825809 - RNA, 19 nt, Artificial Sequence
  Description of Artificial Sequence: Synthetic oligonucleotide
  Sense strand starting at position 3934 of SEQ ID NO: 1563701
gucgaaugcauuggucaug

SEQ ID NO: 1825810 - RNA, 19 nt, Artificial Sequence
  Description of Artificial Sequence: Synthetic oligonucleotide
  Antisense strand to SEQ ID NO: 1825809
caugaccaaugcauucgac

SEQ ID NO: 1825811 - RNA, 19 nt, Artificial Sequence
  Description of Artificial Sequence: Synthetic oligonucleotide
  Sense strand starting at position 3937 of SEQ ID NO: 1563701
gaaugcauuggucaugaac

SEQ ID NO: 1825812 - RNA, 19 nt, Artificial Sequence
  Description of Artificial Sequence: Synthetic oligonucleotide
  Antisense strand to SEQ ID NO: 1825811
guucaugaccaaugcauuc

SEQ ID NO: 1825813 - RNA, 19 nt, Artificial Sequence
  Description of Artificial Sequence: Synthetic oligonucleotide
  Sense strand starting at position 3940 of SEQ ID NO: 1563701
ugcauuggucaugaacaua

SEQ ID NO: 1825814 - RNA, 19 nt, Artificial Sequence
  Description of Artificial Sequence: Synthetic oligonucleotide
  Antisense strand to SEQ ID NO: 1825813
uauguucaugaccaaugca

SEQ ID NO: 1825815 - RNA, 19 nt, Artificial Sequence
  Description of Artificial Sequence: Synthetic oligonucleotide
  Sense strand starting at position 3963 of SEQ ID NO: 1563701
uaugacugcuacuuaguga

SEQ ID NO: 1825816 - RNA, 19 nt, Artificial Sequence
  Description of Artificial Sequence: Synthetic oligonucleotide
  Antisense strand to SEQ ID NO: 1825815
ucacuaaguagcagucaua

SEQ ID NO: 1825817 - RNA, 19 nt, Artificial Sequence
  Description of Artificial Sequence: Synthetic oligonucleotide
  Sense strand starting at position 3966 of SEQ ID NO: 1563701
gacugcuacuuagugauau

SEQ ID NO: 1825818 - RNA, 19 nt, Artificial Sequence
  Description of Artificial Sequence: Synthetic oligonucleotide
  Antisense strand to SEQ ID NO: 1825817
auaucacuaaguagcaguc

SEQ ID NO: 1825819 - RNA, 19 nt, Artificial Sequence
  Description of Artificial Sequence: Synthetic oligonucleotide
  Sense strand starting at position 3977 of SEQ ID NO: 1563701
agugauaucucagagaaca

SEQ ID NO: 1825820 - RNA, 19 nt, Artificial Sequence
  Description of Artificial Sequence: Synthetic oligonucleotide
  Antisense strand to SEQ ID NO: 1825819
uguucucugagauaucacu

SEQ ID NO: 1825821 - RNA, 19 nt, Artificial Sequence
  Description of Artificial Sequence: Synthetic oligonucleotide
  Sense strand starting at position 459 of SEQ ID NO: 1563703
agguguaaggcuggcauuu

SEQ ID NO: 1825822 - RNA, 19 nt, Artificial Sequence
  Description of Artificial Sequence: Synthetic oligonucleotide
  Antisense strand to SEQ ID NO: 1825821
aaaugccagccuuacaccu

SEQ ID NO: 1825823 - RNA, 19 nt, Artificial Sequence
  Description of Artificial Sequence: Synthetic oligonucleotide
  Sense strand starting at position 481 of SEQ ID NO: 1563703
uguuauaauccagguaacu

SEQ ID NO: 1825824 - RNA, 19 nt, Artificial Sequence
  Description of Artificial Sequence: Synthetic oligonucleotide
  Antisense strand to SEQ ID NO: 1825823
aguuaccuggauuauaaca

SEQ ID NO: 1825825 - RNA, 19 nt, Artificial Sequence
  Description of Artificial Sequence: Synthetic oligonucleotide
  Sense strand starting at position 493 of SEQ ID NO: 1563703
gguaacuccuaagcacaau

SEQ ID NO: 1825826 - RNA, 19 nt, Artificial Sequence
  Description of Artificial Sequence: Synthetic oligonucleotide
  Antisense strand to SEQ ID NO: 1825825
auugugcuuaggaguuacc

SEQ ID NO: 1825827 - RNA, 19 nt, Artificial Sequence
  Description of Artificial Sequence: Synthetic oligonucleotide
  Sense strand starting at position 646 of SEQ ID NO: 1563703
uguuaacugcaagauaaac

SEQ ID NO: 1825828 - RNA, 19 nt, Artificial Sequence
  Description of Artificial Sequence: Synthetic oligonucleotide
  Antisense strand to SEQ ID NO: 1825827
guuuaucuugcaguuaaca

SEQ ID NO: 1825829 - RNA, 19 nt, Artificial Sequence
  Description of Artificial Sequence: Synthetic oligonucleotide
  Sense strand starting at position 709 of SEQ ID NO: 1563703
augugaugcauuuggugau

SEQ ID NO: 1825830 - RNA, 19 nt, Artificial Sequence
  Description of Artificial Sequence: Synthetic oligonucleotide
  Antisense strand to SEQ ID NO: 1825829
aucaccaaaugcaucacau

SEQ ID NO: 1825831 - RNA, 19 nt, Artificial Sequence
  Description of Artificial Sequence: Synthetic oligonucleotide
  Sense strand starting at position 770 of SEQ ID NO: 1563703
uauguugcuguaggauuua

SEQ ID NO: 1825832 - RNA, 19 nt, Artificial Sequence
  Description of Artificial Sequence: Synthetic oligonucleotide
  Antisense strand to SEQ ID NO: 1825831
uaaauccuacagcaacaua

SEQ ID NO: 1825833 - RNA, 19 nt, Artificial Sequence
  Description of Artificial Sequence: Synthetic oligonucleotide
  Sense strand starting at position 1160 of SEQ ID NO: 1563703
guuaaugggaaauguggau

SEQ ID NO: 1825834 - RNA, 19 nt, Artificial Sequence
  Description of Artificial Sequence: Synthetic oligonucleotide
  Antisense strand to SEQ ID NO: 1825833
auccacauuucccauuaac

SEQ ID NO: 1825835 - RNA, 19 nt, Artificial Sequence
  Description of Artificial Sequence: Synthetic oligonucleotide
  Sense strand starting at position 1313 of SEQ ID NO: 1563703
agagcauagggaugcauaa

SEQ ID NO: 1825836 - RNA, 19 nt, Artificial Sequence
  Description of Artificial Sequence: Synthetic oligonucleotide
  Antisense strand to SEQ ID NO: 1825835
uuaugcaucccuaugcucu

SEQ ID NO: 1825837 - RNA, 19 nt, Artificial Sequence
  Description of Artificial Sequence: Synthetic oligonucleotide
  Sense strand starting at position 1315 of SEQ ID NO: 1563703
agcauagggaugcauaauu

SEQ ID NO: 1825838 - RNA, 19 nt, Artificial Sequence
  Description of Artificial Sequence: Synthetic oligonucleotide
  Antisense strand to SEQ ID NO: 1825837
aauuaugcaucccuaugcu

SEQ ID NO: 1825839 - RNA, 19 nt, Artificial Sequence
  Description of Artificial Sequence: Synthetic oligonucleotide
  Sense strand starting at position 1597 of SEQ ID NO: 1563703
gagagccuuugagcucaaa

SEQ ID NO: 1825840 - RNA, 19 nt, Artificial Sequence
  Description of Artificial Sequence: Synthetic oligonucleotide
  Antisense strand to SEQ ID NO: 1825839
uuugagcucaaaggcucuc

SEQ ID NO: 1825841 - RNA, 19 nt, Artificial Sequence
  Description of Artificial Sequence: Synthetic oligonucleotide
  Sense strand starting at position 1600 of SEQ ID NO: 1563703
agccuuugagcucaaaucu

SEQ ID NO: 1825842 - RNA, 19 nt, Artificial Sequence
  Description of Artificial Sequence: Synthetic oligonucleotide
  Antisense strand to SEQ ID NO: 1825841
agauuugagcucaaaggcu

SEQ ID NO: 1825843 - RNA, 19 nt, Artificial Sequence
  Description of Artificial Sequence: Synthetic oligonucleotide
  Sense strand starting at position 1620 of SEQ ID NO: 1563703
gacuuaaaguaucucgaag

SEQ ID NO: 1825844 - RNA, 19 nt, Artificial Sequence
  Description of Artificial Sequence: Synthetic oligonucleotide
  Antisense strand to SEQ ID NO: 1825843
cuucgagauacuuuaaguc

SEQ ID NO: 1825845 - RNA, 19 nt, Artificial Sequence
  Description of Artificial Sequence: Synthetic oligonucleotide
  Sense strand starting at position 1797 of SEQ ID NO: 1563703
gucaacuacucaccaagua

SEQ ID NO: 1825846 - RNA, 19 nt, Artificial Sequence
  Description of Artificial Sequence: Synthetic oligonucleotide
  Antisense strand to SEQ ID NO: 1825845
uacuuggugaguaguugac

SEQ ID NO: 1825847 - RNA, 19 nt, Artificial Sequence
  Description of Artificial Sequence: Synthetic oligonucleotide
  Sense strand starting at position 1926 of SEQ ID NO: 1563703
ggacuccagucuguugaca

SEQ ID NO: 1825848 - RNA, 19 nt, Artificial Sequence
  Description of Artificial Sequence: Synthetic oligonucleotide
  Antisense strand to SEQ ID NO: 1825847
ugucaacagacuggagucc

SEQ ID NO: 1825849 - RNA, 19 nt, Artificial Sequence
  Description of Artificial Sequence: Synthetic oligonucleotide
  Sense strand starting at position 1966 of SEQ ID NO: 1563703
aauugaaagcguuaguaaa

SEQ ID NO: 1825850 - RNA, 19 nt, Artificial Sequence
  Description of Artificial Sequence: Synthetic oligonucleotide
  Antisense strand to SEQ ID NO: 1825849
uuuacuaacgcuuucaauu

SEQ ID NO: 1825851 - RNA, 19 nt, Artificial Sequence
  Description of Artificial Sequence: Synthetic oligonucleotide
  Sense strand starting at position 2020 of SEQ ID NO: 1563703
agacuuggauuaggauuua

SEQ ID NO: 1825852 - RNA, 19 nt, Artificial Sequence
  Description of Artificial Sequence: Synthetic oligonucleotide
  Antisense strand to SEQ ID NO: 1825851
uaaauccuaauccaagucu

SEQ ID NO: 1825853 - RNA, 19 nt, Artificial Sequence
  Description of Artificial Sequence: Synthetic oligonucleotide
  Sense strand starting at position 2033 of SEQ ID NO: 1563703
gauuuagagugacacuucu

SEQ ID NO: 1825854 - RNA, 19 nt, Artificial Sequence
  Description of Artificial Sequence: Synthetic oligonucleotide
  Antisense strand to SEQ ID NO: 1825853
agaagugucacucuaaauc

SEQ ID NO: 1825855 - RNA, 19 nt, Artificial Sequence
  Description of Artificial Sequence: Synthetic oligonucleotide
  Sense strand starting at position 2080 of SEQ ID NO: 1563703
agaguuagugcugaccuaa

SEQ ID NO: 1825856 - RNA, 19 nt, Artificial Sequence
  Description of Artificial Sequence: Synthetic oligonucleotide
  Antisense strand to SEQ ID NO: 1825855
uuaggucagcacuaacucu

SEQ ID NO: 1825857 - RNA, 19 nt, Artificial Sequence
  Description of Artificial Sequence: Synthetic oligonucleotide
  Sense strand starting at position 2124 of SEQ ID NO: 1563703
caaauagaguccucuggau

SEQ ID NO: 1825858 - RNA, 19 nt, Artificial Sequence
  Description of Artificial Sequence: Synthetic oligonucleotide
  Antisense strand to SEQ ID NO: 1825857
auccagaggacucuauuug

SEQ ID NO: 1825859 - RNA, 19 nt, Artificial Sequence
  Description of Artificial Sequence: Synthetic oligonucleotide
  Sense strand starting at position 2126 of SEQ ID NO: 1563703
aauagaguccucuggauaa

SEQ ID NO: 1825860 - RNA, 19 nt, Artificial Sequence
  Description of Artificial Sequence: Synthetic oligonucleotide
  Antisense strand to SEQ ID NO: 1825859
uuauccagaggacucuauu

SEQ ID NO: 1825861 - RNA, 19 nt, Artificial Sequence
  Description of Artificial Sequence: Synthetic oligonucleotide
  Sense strand starting at position 2145 of SEQ ID NO: 1563703
auacguccuccacagacua

SEQ ID NO: 1825862 - RNA, 19 nt, Artificial Sequence
  Description of Artificial Sequence: Synthetic oligonucleotide
  Antisense strand to SEQ ID NO: 1825861
uagucuguggaggacguau

SEQ ID NO: 1825863 - RNA, 19 nt, Artificial Sequence
  Description of Artificial Sequence: Synthetic oligonucleotide
  Sense strand starting at position 2257 of SEQ ID NO: 1563703
cccuuucuccaggacaguu

SEQ ID NO: 1825864 - RNA, 19 nt, Artificial Sequence
  Description of Artificial Sequence: Synthetic oligonucleotide
  Antisense strand to SEQ ID NO: 1825863
aacuguccuggagaaaggg

SEQ ID NO: 1825865 - RNA, 19 nt, Artificial Sequence
  Description of Artificial Sequence: Synthetic oligonucleotide
  Sense strand starting at position 2301 of SEQ ID NO: 1563703
gugauuccagcccagaaua

SEQ ID NO: 1825866 - RNA, 19 nt, Artificial Sequence
  Description of Artificial Sequence: Synthetic oligonucleotide
  Antisense strand to SEQ ID NO: 1825865
uauucugggcuggaaucac

SEQ ID NO: 1825867 - RNA, 19 nt, Artificial Sequence
  Description of Artificial Sequence: Synthetic oligonucleotide
  Sense strand starting at position 2543 of SEQ ID NO: 1563703
cuggauucccaacgugaga

SEQ ID NO: 1825868 - RNA, 19 nt, Artificial Sequence
  Description of Artificial Sequence: Synthetic oligonucleotide
  Antisense strand to SEQ ID NO: 1825867
ucucacguugggaauccag

SEQ ID NO: 1825869 - RNA, 19 nt, Artificial Sequence
  Description of Artificial Sequence: Synthetic oligonucleotide
  Sense strand starting at position 2557 of SEQ ID NO: 1563703
ugagaacugagguguuaag

SEQ ID NO: 1825870 - RNA, 19 nt, Artificial Sequence
  Description of Artificial Sequence: Synthetic oligonucleotide
  Antisense strand to SEQ ID NO: 1825869
cuuaacaccucaguucuca

SEQ ID NO: 1825871 - RNA, 19 nt, Artificial Sequence
  Description of Artificial Sequence: Synthetic oligonucleotide
  Sense strand starting at position 2564 of SEQ ID NO: 1563703
ugagguguuaagggcuaaa

SEQ ID NO: 1825872 - RNA, 19 nt, Artificial Sequence
  Description of Artificial Sequence: Synthetic oligonucleotide
  Antisense strand to SEQ ID NO: 1825871
uuuagcccuuaacaccuca

SEQ ID NO: 1825873 - RNA, 19 nt, Artificial Sequence
  Description of Artificial Sequence: Synthetic oligonucleotide
  Sense strand starting at position 3054 of SEQ ID NO: 1563703
ggguauaccacaugaucag

SEQ ID NO: 1825874 - RNA, 19 nt, Artificial Sequence
  Description of Artificial Sequence: Synthetic oligonucleotide
  Antisense strand to SEQ ID NO: 1825873
cugaucaugugguauaccc

SEQ ID NO: 1825875 - RNA, 19 nt, Artificial Sequence
  Description of Artificial Sequence: Synthetic oligonucleotide
  Sense strand starting at position 3055 of SEQ ID NO: 1563703
gguauaccacaugaucagu

SEQ ID NO: 1825876 - RNA, 19 nt, Artificial Sequence
  Description of Artificial Sequence: Synthetic oligonucleotide
  Antisense strand to SEQ ID NO: 1825875
acugaucaugugguauacc

SEQ ID NO: 1825877 - RNA, 19 nt, Artificial Sequence
  Description of Artificial Sequence: Synthetic oligonucleotide
  Sense strand starting at position 3066 of SEQ ID NO: 1563703
ugaucaguugauggaaauu

SEQ ID NO: 1825878 - RNA, 19 nt, Artificial Sequence
  Description of Artificial Sequence: Synthetic oligonucleotide
  Antisense strand to SEQ ID NO: 1825877
aauuuccaucaacugauca

SEQ ID NO: 1825879 - RNA, 19 nt, Artificial Sequence
  Description of Artificial Sequence: Synthetic oligonucleotide
  Sense strand starting at position 3177 of SEQ ID NO: 1563703
ggcauauacccagggaauu

SEQ ID NO: 1825880 - RNA, 19 nt, Artificial Sequence
  Description of Artificial Sequence: Synthetic oligonucleotide
  Antisense strand to SEQ ID NO: 1825879
aauucccuggguauaugcc

SEQ ID NO: 1825881 - RNA, 19 nt, Artificial Sequence
  Description of Artificial Sequence: Synthetic oligonucleotide
  Sense strand starting at position 3187 of SEQ ID NO: 1563703
cagggaauugcugggucau

SEQ ID NO: 1825882 - RNA, 19 nt, Artificial Sequence
  Description of Artificial Sequence: Synthetic oligonucleotide
  Antisense strand to SEQ ID NO: 1825881
augacccagcaauucccug

SEQ ID NO: 1825883 - RNA, 19 nt, Artificial Sequence
  Description of Artificial Sequence: Synthetic oligonucleotide
  Sense strand starting at position 3284 of SEQ ID NO: 1563703
gcaacauaugaggguucuu

SEQ ID NO: 1825884 - RNA, 19 nt, Artificial Sequence
  Description of Artificial Sequence: Synthetic oligonucleotide
  Antisense strand to SEQ ID NO: 1825883
aagaacccucauauguugc

SEQ ID NO: 1825885 - RNA, 19 nt, Artificial Sequence
  Description of Artificial Sequence: Synthetic oligonucleotide
  Sense strand starting at position 3423 of SEQ ID NO: 1563703
gguggauauuacccauucu

SEQ ID NO: 1825886 - RNA, 19 nt, Artificial Sequence
  Description of Artificial Sequence: Synthetic oligonucleotide
  Antisense strand to SEQ ID NO: 1825885
agaauggguaauauccacc

SEQ ID NO: 1825887 - RNA, 19 nt, Artificial Sequence
  Description of Artificial Sequence: Synthetic oligonucleotide
  Sense strand starting at position 3500 of SEQ ID NO: 1563703
cugagugccaaugauguga

SEQ ID NO: 1825888 - RNA, 19 nt, Artificial Sequence
  Description of Artificial Sequence: Synthetic oligonucleotide
  Antisense strand to SEQ ID NO: 1825887
ucacaucauuggcacucag

SEQ ID NO: 1825889 - RNA, 19 nt, Artificial Sequence
  Description of Artificial Sequence: Synthetic oligonucleotide
  Sense strand starting at position 3567 of SEQ ID NO: 1563703
cgagauagauacuauuuga

SEQ ID NO: 1825890 - RNA, 19 nt, Artificial Sequence
  Description of Artificial Sequence: Synthetic oligonucleotide
  Antisense strand to SEQ ID NO: 1825889
ucaaauaguaucuaucucg

SEQ ID NO: 1825891 - RNA, 19 nt, Artificial Sequence
  Description of Artificial Sequence: Synthetic oligonucleotide
  Sense strand starting at position 3633 of SEQ ID NO: 1563703
agccacuggucaguagaga

SEQ ID NO: 1825892 - RNA, 19 nt, Artificial Sequence
  Description of Artificial Sequence: Synthetic oligonucleotide
  Antisense strand to SEQ ID NO: 1825891
ucucuacugaccaguggcu

SEQ ID NO: 1825893 - RNA, 19 nt, Artificial Sequence
  Description of Artificial Sequence: Synthetic oligonucleotide
  Sense strand starting at position 3738 of SEQ ID NO: 1563703
acguuuauccuugauauau

SEQ ID NO: 1825894 - RNA, 19 nt, Artificial Sequence
  Description of Artificial Sequence: Synthetic oligonucleotide
  Antisense strand to SEQ ID NO: 1825893
auauaucaaggauaaacgu

SEQ ID NO: 1825895 - RNA, 19 nt, Artificial Sequence
  Description of Artificial Sequence: Synthetic oligonucleotide
  Sense strand starting at position 3774 of SEQ ID NO: 1563703
gugcuaucccuccaaagac

SEQ ID NO: 1825896 - RNA, 19 nt, Artificial Sequence
  Description of Artificial Sequence: Synthetic oligonucleotide
  Antisense strand to SEQ ID NO: 1825895
gucuuuggagggauagcac

SEQ ID NO: 1825897 - RNA, 19 nt, Artificial Sequence
  Description of Artificial Sequence: Synthetic oligonucleotide
  Sense strand starting at position 3792 of SEQ ID NO: 1563703
cugcuugcacucuaauaga

SEQ ID NO: 1825898 - RNA, 19 nt, Artificial Sequence
  Description of Artificial Sequence: Synthetic oligonucleotide
  Antisense strand to SEQ ID NO: 1825897
ucuauuagagugcaagcag

SEQ ID NO: 1825899 - RNA, 19 nt, Artificial Sequence
  Description of Artificial Sequence: Synthetic oligonucleotide
  Sense strand starting at position 3977 of SEQ ID NO: 1563703
ugaugaggacuaggauguu

SEQ ID NO: 1825900 - RNA, 19 nt, Artificial Sequence
  Description of Artificial Sequence: Synthetic oligonucleotide
  Antisense strand to SEQ ID NO: 1825899
aacauccuaguccucauca

SEQ ID NO: 1825901 - RNA, 19 nt, Artificial Sequence
  Description of Artificial Sequence: Synthetic oligonucleotide
  Sense strand starting at position 2268 of SEQ ID NO: 1563704
ucuugucgaaugcaugaaa

SEQ ID NO: 1825902 - RNA, 19 nt, Artificial Sequence
  Description of Artificial Sequence: Synthetic oligonucleotide
  Antisense strand to SEQ ID NO: 1825901
uuucaugcauucgacaaga

SEQ ID NO: 1825903 - RNA, 19 nt, Artificial Sequence
  Description of Artificial Sequence: Synthetic oligonucleotide
  Sense strand starting at position 2565 of SEQ ID NO: 1563704
gcaugaguugaaggcauga

SEQ ID NO: 1825904 - RNA, 19 nt, Artificial Sequence
  Description of Artificial Sequence: Synthetic oligonucleotide
  Antisense strand to SEQ ID NO: 1825903
ucaugccuucaacucaugc

SEQ ID NO: 1825905 - RNA, 19 nt, Artificial Sequence
  Description of Artificial Sequence: Synthetic oligonucleotide
  Sense strand starting at position 2611 of SEQ ID NO: 1563704
uagagauagaugcgugaau

SEQ ID NO: 1825906 - RNA, 19 nt, Artificial Sequence
  Description of Artificial Sequence: Synthetic oligonucleotide
  Antisense strand to SEQ ID NO: 1825905
auucacgcaucuaucucua

SEQ ID NO: 1825907 - RNA, 19 nt, Artificial Sequence
  Description of Artificial Sequence: Synthetic oligonucleotide
  Sense strand starting at position 2612 of SEQ ID NO: 1563704
agagauagaugcgugaaug

SEQ ID NO: 1825908 - RNA, 19 nt, Artificial Sequence
  Description of Artificial Sequence: Synthetic oligonucleotide
  Antisense strand to SEQ ID NO: 1825907
cauucacgcaucuaucucu

SEQ ID NO: 1825909 - RNA, 19 nt, Artificial Sequence
  Description of Artificial Sequence: Synthetic oligonucleotide
  Sense strand starting at position 2675 of SEQ ID NO: 1563704
gcgugaaggcaugaaucua

SEQ ID NO: 1825910 - RNA, 19 nt, Artificial Sequence
  Description of Artificial Sequence: Synthetic oligonucleotide
  Antisense strand to SEQ ID NO: 1825909
uagauucaugccuucacgc

SEQ ID NO: 1825911 - RNA, 19 nt, Artificial Sequence
  Description of Artificial Sequence: Synthetic oligonucleotide
  Sense strand starting at position 2760 of SEQ ID NO: 1563704
agugcaugaaugggugaaa

SEQ ID NO: 1825912 - RNA, 19 nt, Artificial Sequence
  Description of Artificial Sequence: Synthetic oligonucleotide
  Antisense strand to SEQ ID NO: 1825911
uuucacccauucaugcacu

SEQ ID NO: 1825913 - RNA, 19 nt, Artificial Sequence
  Description of Artificial Sequence: Synthetic oligonucleotide
  Sense strand starting at position 2763 of SEQ ID NO: 1563704
gcaugaaugggugaaaggu

SEQ ID NO: 1825914 - RNA, 19 nt, Artificial Sequence
  Description of Artificial Sequence: Synthetic oligonucleotide
  Antisense strand to SEQ ID NO: 1825913
accuuucacccauucaugc

SEQ ID NO: 1825915 - RNA, 19 nt, Artificial Sequence
  Description of Artificial Sequence: Synthetic oligonucleotide
  Sense strand starting at position 2798 of SEQ ID NO: 1563704
gagugagugcaugaauaag

SEQ ID NO: 1825916 - RNA, 19 nt, Artificial Sequence
  Description of Artificial Sequence: Synthetic oligonucleotide
  Antisense strand to SEQ ID NO: 1825915
cuuauucaugcacucacuc

SEQ ID NO: 1825917 - RNA, 19 nt, Artificial Sequence
  Description of Artificial Sequence: Synthetic oligonucleotide
  Sense strand starting at position 2804 of SEQ ID NO: 1563704
gugcaugaauaagugaaca

SEQ ID NO: 1825918 - RNA, 19 nt, Artificial Sequence
  Description of Artificial Sequence: Synthetic oligonucleotide
  Antisense strand to SEQ ID NO: 1825917
uguucacuuauucaugcac

SEQ ID NO: 1825919 - RNA, 19 nt, Artificial Sequence
  Description of Artificial Sequence: Synthetic oligonucleotide
  Sense strand starting at position 2842 of SEQ ID NO: 1563704
gagugacugcaugagugaa

SEQ ID NO: 1825920 - RNA, 19 nt, Artificial Sequence
  Description of Artificial Sequence: Synthetic oligonucleotide
  Antisense strand to SEQ ID NO: 1825919
uucacucaugcagucacuc

SEQ ID NO: 1825921 - RNA, 19 nt, Artificial Sequence
  Description of Artificial Sequence: Synthetic oligonucleotide
  Sense strand starting at position 2844 of SEQ ID NO: 1563704
gugacugcaugagugaaua

SEQ ID NO: 1825922 - RNA, 19 nt, Artificial Sequence
  Description of Artificial Sequence: Synthetic oligonucleotide
  Antisense strand to SEQ ID NO: 1825921
uauucacucaugcagucac

SEQ ID NO: 1825923 - RNA, 19 nt, Artificial Sequence
  Description of Artificial Sequence: Synthetic oligonucleotide
  Sense strand starting at position 2892 of SEQ ID NO: 1563704
gugcaugaaugagugaaca

SEQ ID NO: 1825924 - RNA, 19 nt, Artificial Sequence
  Description of Artificial Sequence: Synthetic oligonucleotide
  Antisense strand to SEQ ID NO: 1825923
uguucacucauucaugcac

SEQ ID NO: 1825925 - RNA, 19 nt, Artificial Sequence
  Description of Artificial Sequence: Synthetic oligonucleotide
  Sense strand starting at position 2932 of SEQ ID NO: 1563704
gugcaugaaugacuuaaga

SEQ ID NO: 1825926 - RNA, 19 nt, Artificial Sequence
  Description of Artificial Sequence: Synthetic oligonucleotide
  Antisense strand to SEQ ID NO: 1825925
ucuuaagucauucaugcac

SEQ ID NO: 1825927 - RNA, 19 nt, Artificial Sequence
  Description of Artificial Sequence: Synthetic oligonucleotide
  Sense strand starting at position 2974 of SEQ ID NO: 1563704
gcauguaugagugaguaaa

SEQ ID NO: 1825928 - RNA, 19 nt, Artificial Sequence
  Description of Artificial Sequence: Synthetic oligonucleotide
  Antisense strand to SEQ ID NO: 1825927
uuuacucacucauacaugc

SEQ ID NO: 1825929 - RNA, 19 nt, Artificial Sequence
  Description of Artificial Sequence: Synthetic oligonucleotide
  Sense strand starting at position 2976 of SEQ ID NO: 1563704
auguaugagugaguaaaca

SEQ ID NO: 1825930 - RNA, 19 nt, Artificial Sequence
  Description of Artificial Sequence: Synthetic oligonucleotide
  Antisense strand to SEQ ID NO: 1825929
uguuuacucacucauacau

SEQ ID NO: 1825931 - RNA, 19 nt, Artificial Sequence
  Description of Artificial Sequence: Synthetic oligonucleotide
  Sense strand starting at position 3047 of SEQ ID NO: 1563704
ccugcaugaguguaugaau

SEQ ID NO: 1825932 - RNA, 19 nt, Artificial Sequence
  Description of Artificial Sequence: Synthetic oligonucleotide
  Antisense strand to SEQ ID NO: 1825931
auucauacacucaugcagg

SEQ ID NO: 1825933 - RNA, 19 nt, Artificial Sequence
  Description of Artificial Sequence: Synthetic oligonucleotide
  Sense strand starting at position 3056 of SEQ ID NO: 1563704
guguaugaaugaguaaaua

SEQ ID NO: 1825934 - RNA, 19 nt, Artificial Sequence
  Description of Artificial Sequence: Synthetic oligonucleotide
  Antisense strand to SEQ ID NO: 1825933
uauuuacucauucauacac

SEQ ID NO: 1825935 - RNA, 19 nt, Artificial Sequence
  Description of Artificial Sequence: Synthetic oligonucleotide
  Sense strand starting at position 3064 of SEQ ID NO: 1563704
augaguaaauaagcgaauu

SEQ ID NO: 1825936 - RNA, 19 nt, Artificial Sequence
  Description of Artificial Sequence: Synthetic oligonucleotide
  Antisense strand to SEQ ID NO: 1825935
aauucgcuuauuuacucau

SEQ ID NO: 1825937 - RNA, 19 nt, Artificial Sequence
  Description of Artificial Sequence: Synthetic oligonucleotide
  Sense strand starting at position 3154 of SEQ ID NO: 1563704
ucaugcaugcaggauugau

SEQ ID NO: 1825938 - RNA, 19 nt, Artificial Sequence
  Description of Artificial Sequence: Synthetic oligonucleotide
  Antisense strand to SEQ ID NO: 1825937
aucaauccugcaugcauga

SEQ ID NO: 1825939 - RNA, 19 nt, Artificial Sequence
  Description of Artificial Sequence: Synthetic oligonucleotide
  Sense strand starting at position 3167 of SEQ ID NO: 1563704
auugauugagcacgugaag

SEQ ID NO: 1825940 - RNA, 19 nt, Artificial Sequence
  Description of Artificial Sequence: Synthetic oligonucleotide
  Antisense strand to SEQ ID NO: 1825939
cuucacgugcucaaucaau

SEQ ID NO: 1825941 - RNA, 19 nt, Artificial Sequence
  Description of Artificial Sequence: Synthetic oligonucleotide
  Sense strand starting at position 3254 of SEQ ID NO: 1563704
ggccgaaugacugagugaa

SEQ ID NO: 1825942 - RNA, 19 nt, Artificial Sequence
  Description of Artificial Sequence: Synthetic oligonucleotide
  Antisense strand to SEQ ID NO: 1825941
uucacucagucauucggcc

SEQ ID NO: 1825943 - RNA, 19 nt, Artificial Sequence
  Description of Artificial Sequence: Synthetic oligonucleotide
  Sense strand starting at position 3256 of SEQ ID NO: 1563704
ccgaaugacugagugaaua

SEQ ID NO: 1825944 - RNA, 19 nt, Artificial Sequence
  Description of Artificial Sequence: Synthetic oligonucleotide
  Antisense strand to SEQ ID NO: 1825943
uauucacucagucauucgg

SEQ ID NO: 1825945 - RNA, 19 nt, Artificial Sequence
  Description of Artificial Sequence: Synthetic oligonucleotide
  Sense strand starting at position 3333 of SEQ ID NO: 1563704
acgagugaaugagugaaga

SEQ ID NO: 1825946 - RNA, 19 nt, Artificial Sequence
  Description of Artificial Sequence: Synthetic oligonucleotide
  Antisense strand to SEQ ID NO: 1825945
ucuucacucauucacucgu

SEQ ID NO: 1825947 - RNA, 19 nt, Artificial Sequence
  Description of Artificial Sequence: Synthetic oligonucleotide
  Sense strand starting at position 3373 of SEQ ID NO: 1563704
auguauuauguaugaguga

SEQ ID NO: 1825948 - RNA, 19 nt, Artificial Sequence
  Description of Artificial Sequence: Synthetic oligonucleotide
  Antisense strand to SEQ ID NO: 1825947
ucacucauacauaauacau

SEQ ID NO: 1825949 - RNA, 19 nt, Artificial Sequence
  Description of Artificial Sequence: Synthetic oligonucleotide
  Sense strand starting at position 3376 of SEQ ID NO: 1563704
uauuauguaugagugaaug

SEQ ID NO: 1825950 - RNA, 19 nt, Artificial Sequence
  Description of Artificial Sequence: Synthetic oligonucleotide
  Antisense strand to SEQ ID NO: 1825949
cauucacucauacauaaua

SEQ ID NO: 1825951 - RNA, 19 nt, Artificial Sequence
  Description of Artificial Sequence: Synthetic oligonucleotide
  Sense strand starting at position 3414 of SEQ ID NO: 1563704
caaguuaauggaugcauga

SEQ ID NO: 1825952 - RNA, 19 nt, Artificial Sequence
  Description of Artificial Sequence: Synthetic oligonucleotide
  Antisense strand to SEQ ID NO: 1825951
ucaugcauccauuaacuug

SEQ ID NO: 1825953 - RNA, 19 nt, Artificial Sequence
  Description of Artificial Sequence: Synthetic oligonucleotide
  Sense strand starting at position 3463 of SEQ ID NO: 1563704
gcaugcaugagugaauuaa

SEQ ID NO: 1825954 - RNA, 19 nt, Artificial Sequence
  Description of Artificial Sequence: Synthetic oligonucleotide
  Antisense strand to SEQ ID NO: 1825953
uuaauucacucaugcaugc

SEQ ID NO: 1825955 - RNA, 19 nt, Artificial Sequence
  Description of Artificial Sequence: Synthetic oligonucleotide
  Sense strand starting at position 3467 of SEQ ID NO: 1563704
gcaugagugaauuaaguga

SEQ ID NO: 1825956 - RNA, 19 nt, Artificial Sequence
  Description of Artificial Sequence: Synthetic oligonucleotide
  Antisense strand to SEQ ID NO: 1825955
ucacuuaauucacucaugc

SEQ ID NO: 1825957 - RNA, 19 nt, Artificial Sequence
  Description of Artificial Sequence: Synthetic oligonucleotide
  Sense strand starting at position 3516 of SEQ ID NO: 1563704
guaugaguucaugaguuga

SEQ ID NO: 1825958 - RNA, 19 nt, Artificial Sequence
  Description of Artificial Sequence: Synthetic oligonucleotide
  Antisense strand to SEQ ID NO: 1825957
ucaacucaugaacucauac

SEQ ID NO: 1825959 - RNA, 19 nt, Artificial Sequence
  Description of Artificial Sequence: Synthetic oligonucleotide
  Sense strand starting at position 3524 of SEQ ID NO: 1563704
ucaugaguugaaugaguga

SEQ ID NO: 1825960 - RNA, 19 nt, Artificial Sequence
  Description of Artificial Sequence: Synthetic oligonucleotide
  Antisense strand to SEQ ID NO: 1825959
ucacucauucaacucauga

SEQ ID NO: 1825961 - RNA, 19 nt, Artificial Sequence
  Description of Artificial Sequence: Synthetic oligonucleotide
  Sense strand starting at position 3527 of SEQ ID NO: 1563704
ugaguugaaugagugauga

SEQ ID NO: 1825962 - RNA, 19 nt, Artificial Sequence
  Description of Artificial Sequence: Synthetic oligonucleotide
  Antisense strand to SEQ ID NO: 1825961
ucaucacucauucaacuca

SEQ ID NO: 1825963 - RNA, 19 nt, Artificial Sequence
  Description of Artificial Sequence: Synthetic oligonucleotide
  Sense strand starting at position 3535 of SEQ ID NO: 1563704
augagugaugacugugagu

SEQ ID NO: 1825964 - RNA, 19 nt, Artificial Sequence
  Description of Artificial Sequence: Synthetic oligonucleotide
  Antisense strand to SEQ ID NO: 1825963
acucacagucaucacucau

SEQ ID NO: 1825965 - RNA, 19 nt, Artificial Sequence
  Description of Artificial Sequence: Synthetic oligonucleotide
  Sense strand starting at position 3558 of SEQ ID NO: 1563704
gcauguaugaguugaauga

SEQ ID NO: 1825966 - RNA, 19 nt, Artificial Sequence
  Description of Artificial Sequence: Synthetic oligonucleotide
  Antisense strand to SEQ ID NO: 1825965
ucauucaacucauacaugc

SEQ ID NO: 1825967 - RNA, 19 nt, Artificial Sequence
  Description of Artificial Sequence: Synthetic oligonucleotide
  Sense strand starting at position 3573 of SEQ ID NO: 1563704
augagugaugacuguguga

SEQ ID NO: 1825968 - RNA, 19 nt, Artificial Sequence
  Description of Artificial Sequence: Synthetic oligonucleotide
  Antisense strand to SEQ ID NO: 1825967
ucacacagucaucacucau

SEQ ID NO: 1825969 - RNA, 19 nt, Artificial Sequence
  Description of Artificial Sequence: Synthetic oligonucleotide
  Sense strand starting at position 3615 of SEQ ID NO: 1563704
gagugaugacugugugagg

SEQ ID NO: 1825970 - RNA, 19 nt, Artificial Sequence
  Description of Artificial Sequence: Synthetic oligonucleotide
  Antisense strand to SEQ ID NO: 1825969
ccucacacagucaucacuc

SEQ ID NO: 1825971 - RNA, 19 nt, Artificial Sequence
  Description of Artificial Sequence: Synthetic oligonucleotide
  Sense strand starting at position 3733 of SEQ ID NO: 1563704
augagugaugaugguguga

SEQ ID NO: 1825972 - RNA, 19 nt, Artificial Sequence
  Description of Artificial Sequence: Synthetic oligonucleotide
  Antisense strand to SEQ ID NO: 1825971
ucacaccaucaucacucau

SEQ ID NO: 1825973 - RNA, 19 nt, Artificial Sequence
  Description of Artificial Sequence: Synthetic oligonucleotide
  Sense strand starting at position 3759 of SEQ ID NO: 1563704
cauguaugagugcaugagu

SEQ ID NO: 1825974 - RNA, 19 nt, Artificial Sequence
  Description of Artificial Sequence: Synthetic oligonucleotide
  Antisense strand to SEQ ID NO: 1825973
acucaugcacucauacaug

SEQ ID NO: 1825975 - RNA, 19 nt, Artificial Sequence
  Description of Artificial Sequence: Synthetic oligonucleotide
  Sense strand starting at position 3775 of SEQ ID NO: 1563704
agucgaaugagugaacuua

SEQ ID NO: 1825976 - RNA, 19 nt, Artificial Sequence
  Description of Artificial Sequence: Synthetic oligonucleotide
  Antisense strand to SEQ ID NO: 1825975
uaaguucacucauucgacu

SEQ ID NO: 1825977 - RNA, 19 nt, Artificial Sequence
  Description of Artificial Sequence: Synthetic oligonucleotide
  Sense strand starting at position 3844 of SEQ ID NO: 1563704
cagauucuugccgaaacug

SEQ ID NO: 1825978 - RNA, 19 nt, Artificial Sequence
  Description of Artificial Sequence: Synthetic oligonucleotide
  Antisense strand to SEQ ID NO: 1825977
caguuucggcaagaaucug

SEQ ID NO: 1825979 - RNA, 19 nt, Artificial Sequence
  Description of Artificial Sequence: Synthetic oligonucleotide
  Sense strand starting at position 3891 of SEQ ID NO: 1563704
aggccuuccugaucuagau

SEQ ID NO: 1825980 - RNA, 19 nt, Artificial Sequence
  Description of Artificial Sequence: Synthetic oligonucleotide
  Antisense strand to SEQ ID NO: 1825979
aucuagaucaggaaggccu

SEQ ID NO: 1825981 - RNA, 19 nt, Artificial Sequence
  Description of Artificial Sequence: Synthetic oligonucleotide
  Sense strand starting at position 1017 of SEQ ID NO: 1563705
cgaaacucgugacccuaau

SEQ ID NO: 1825982 - RNA, 19 nt, Artificial Sequence
  Description of Artificial Sequence: Synthetic oligonucleotide
  Antisense strand to SEQ ID NO: 1825981
auuagggucacgaguuucg

SEQ ID NO: 1825983 - RNA, 19 nt, Artificial Sequence
  Description of Artificial Sequence: Synthetic oligonucleotide
  Sense strand starting at position 1044 of SEQ ID NO: 1563705
ugcgcauuucuagacuguu

SEQ ID NO: 1825984 - RNA, 19 nt, Artificial Sequence
  Description of Artificial Sequence: Synthetic oligonucleotide
  Antisense strand to SEQ ID NO: 1825983
aacagucuagaaaugcgca

SEQ ID NO: 1825985 - RNA, 19 nt, Artificial Sequence
  Description of Artificial Sequence: Synthetic oligonucleotide
  Sense strand starting at position 1011 of SEQ ID NO: 1563706
aaaggaaacucgugacccu

SEQ ID NO: 1825986 - RNA, 19 nt, Artificial Sequence
  Description of Artificial Sequence: Synthetic oligonucleotide
  Antisense strand to SEQ ID NO: 1825985
agggucacgaguuuccuuu

SEQ ID NO: 1825987 - RNA, 19 nt, Artificial Sequence
  Description of Artificial Sequence: Synthetic oligonucleotide
  Sense strand starting at position 1014 of SEQ ID NO: 1563706
ggaaacucgugacccuaau

SEQ ID NO: 1825988 - RNA, 19 nt, Artificial Sequence
  Description of Artificial Sequence: Synthetic oligonucleotide
  Antisense strand to SEQ ID NO: 1825987
auuagggucacgaguuucc

SEQ ID NO: 1825989 - RNA, 19 nt, Artificial Sequence
  Description of Artificial Sequence: Synthetic oligonucleotide
  Sense strand starting at position 1041 of SEQ ID NO: 1563706
ugcgcauuucuggacuguu

SEQ ID NO: 1825990 - RNA, 19 nt, Artificial Sequence
  Description of Artificial Sequence: Synthetic oligonucleotide
  Antisense strand to SEQ ID NO: 1825989
aacaguccagaaaugcgca

SEQ ID NO: 1825991 - RNA, 19 nt, Artificial Sequence
  Description of Artificial Sequence: Synthetic oligonucleotide
  Sense strand starting at position 958 of SEQ ID NO: 1563707
aguggucuagguugcuaaa

SEQ ID NO: 1825992 - RNA, 19 nt, Artificial Sequence
  Description of Artificial Sequence: Synthetic oligonucleotide
  Antisense strand to SEQ ID NO: 1825991
uuuagcaaccuagaccacu

SEQ ID NO: 1825993 - RNA, 19 nt, Artificial Sequence
  Description of Artificial Sequence: Synthetic oligonucleotide
  Sense strand starting at position 1014 of SEQ ID NO: 1563707
ggaaacucgugacccuaau

SEQ ID NO: 1825994 - RNA, 19 nt, Artificial Sequence
  Description of Artificial Sequence: Synthetic oligonucleotide
  Antisense strand to SEQ ID NO: 1825993
auuagggucacgaguuucc

SEQ ID NO: 1825995 - RNA, 19 nt, Artificial Sequence
  Description of Artificial Sequence: Synthetic oligonucleotide
  Sense strand starting at position 1041 of SEQ ID NO: 1563707
ugcgcauuucuggacuguu

SEQ ID NO: 1825996 - RNA, 19 nt, Artificial Sequence
  Description of Artificial Sequence: Synthetic oligonucleotide
  Antisense strand to SEQ ID NO: 1825995
aacaguccagaaaugcgca

SEQ ID NO: 1825997 - RNA, 19 nt, Artificial Sequence
  Description of Artificial Sequence: Synthetic oligonucleotide
  Sense strand starting at position 1254 of SEQ ID NO: 1563707
ggcccugacuugcucagaa

SEQ ID NO: 1825998 - RNA, 19 nt, Artificial Sequence
  Description of Artificial Sequence: Synthetic oligonucleotide
  Antisense strand to SEQ ID NO: 1825997
uucugagcaagucagggcc

SEQ ID NO: 1825999 - RNA, 19 nt, Artificial Sequence
  Description of Artificial Sequence: Synthetic oligonucleotide
  Sense strand starting at position 1475 of SEQ ID NO: 1563707
gcagauggcuuccuugaaa

SEQ ID NO: 1826000 - RNA, 19 nt, Artificial Sequence
  Description of Artificial Sequence: Synthetic oligonucleotide
  Antisense strand to SEQ ID NO: 1825999
uuucaaggaagccaucugc

SEQ ID NO: 1826001 - RNA, 19 nt, Artificial Sequence
  Description of Artificial Sequence: Synthetic oligonucleotide
  Sense strand starting at position 1799 of SEQ ID NO: 1563707
gccgucagguacucaauaa

SEQ ID NO: 1826002 - RNA, 19 nt, Artificial Sequence
  Description of Artificial Sequence: Synthetic oligonucleotide
  Antisense strand to SEQ ID NO: 1826001
uuauugaguaccugacggc

SEQ ID NO: 1826003 - RNA, 19 nt, Artificial Sequence
  Description of Artificial Sequence: Synthetic oligonucleotide
  Sense strand starting at position 2003 of SEQ ID NO: 1563707
gagugugcuaucucggcuu

SEQ ID NO: 1826004 - RNA, 19 nt, Artificial Sequence
  Description of Artificial Sequence: Synthetic oligonucleotide
  Antisense strand to SEQ ID NO: 1826003
aagccgagauagcacacuc

SEQ ID NO: 1826005 - RNA, 19 nt, Artificial Sequence
  Description of Artificial Sequence: Synthetic oligonucleotide
  Sense strand starting at position 2052 of SEQ ID NO: 1563707
gacaguuaccgcguccagu

SEQ ID NO: 1826006 - RNA, 19 nt, Artificial Sequence
  Description of Artificial Sequence: Synthetic oligonucleotide
  Antisense strand to SEQ ID NO: 1826005
acuggacgcgguaacuguc

SEQ ID NO: 1826007 - RNA, 19 nt, Artificial Sequence
  Description of Artificial Sequence: Synthetic oligonucleotide
  Sense strand starting at position 2053 of SEQ ID NO: 1563707
acaguuaccgcguccagua

SEQ ID NO: 1826008 - RNA, 19 nt, Artificial Sequence
  Description of Artificial Sequence: Synthetic oligonucleotide
  Antisense strand to SEQ ID NO: 1826007
uacuggacgcgguaacugu

SEQ ID NO: 1826009 - RNA, 19 nt, Artificial Sequence
  Description of Artificial Sequence: Synthetic oligonucleotide
  Sense strand starting at position 2065 of SEQ ID NO: 1563707
uccaguacuguguauccua

SEQ ID NO: 1826010 - RNA, 19 nt, Artificial Sequence
  Description of Artificial Sequence: Synthetic oligonucleotide
  Antisense strand to SEQ ID NO: 1826009
uaggauacacaguacugga

SEQ ID NO: 1826011 - RNA, 19 nt, Artificial Sequence
  Description of Artificial Sequence: Synthetic oligonucleotide
  Sense strand starting at position 2309 of SEQ ID NO: 1563707
ucucuuugccagugggaac

SEQ ID NO: 1826012 - RNA, 19 nt, Artificial Sequence
  Description of Artificial Sequence: Synthetic oligonucleotide
  Antisense strand to SEQ ID NO: 1826011
guucccacuggcaaagaga

SEQ ID NO: 1826013 - RNA, 19 nt, Artificial Sequence
  Description of Artificial Sequence: Synthetic oligonucleotide
  Sense strand starting at position 2321 of SEQ ID NO: 1563707
ugggaacuuucccuuucua

SEQ ID NO: 1826014 - RNA, 19 nt, Artificial Sequence
  Description of Artificial Sequence: Synthetic oligonucleotide
  Antisense strand to SEQ ID NO: 1826013
uagaaagggaaaguuccca

SEQ ID NO: 1826015 - RNA, 19 nt, Artificial Sequence
  Description of Artificial Sequence: Synthetic oligonucleotide
  Sense strand starting at position 2579 of SEQ ID NO: 1563707
ucccgauagucccuggcaa

SEQ ID NO: 1826016 - RNA, 19 nt, Artificial Sequence
  Description of Artificial Sequence: Synthetic oligonucleotide
  Antisense strand to SEQ ID NO: 1826015
uugccagggacuaucggga

SEQ ID NO: 1826017 - RNA, 19 nt, Artificial Sequence
  Description of Artificial Sequence: Synthetic oligonucleotide
  Sense strand starting at position 2612 of SEQ ID NO: 1563707
gcuuucuguccauagaggu

SEQ ID NO: 1826018 - RNA, 19 nt, Artificial Sequence
  Description of Artificial Sequence: Synthetic oligonucleotide
  Antisense strand to SEQ ID NO: 1826017
accucuauggacagaaagc

SEQ ID NO: 1826019 - RNA, 19 nt, Artificial Sequence
  Description of Artificial Sequence: Synthetic oligonucleotide
  Sense strand starting at position 2647 of SEQ ID NO: 1563707
uuuccuauagauggaauua

SEQ ID NO: 1826020 - RNA, 19 nt, Artificial Sequence
  Description of Artificial Sequence: Synthetic oligonucleotide
  Antisense strand to SEQ ID NO: 1826019
uaauuccaucuauaggaaa

SEQ ID NO: 1826021 - RNA, 19 nt, Artificial Sequence
  Description of Artificial Sequence: Synthetic oligonucleotide
  Sense strand starting at position 2657 of SEQ ID NO: 1563707
auggaauuauacgaccaaa

SEQ ID NO: 1826022 - RNA, 19 nt, Artificial Sequence
  Description of Artificial Sequence: Synthetic oligonucleotide
  Antisense strand to SEQ ID NO: 1826021
uuuggucguauaauuccau

SEQ ID NO: 1826023 - RNA, 19 nt, Artificial Sequence
  Description of Artificial Sequence: Synthetic oligonucleotide
  Sense strand starting at position 2716 of SEQ ID NO: 1563707
ugguuucaucagggugcau

SEQ ID NO: 1826024 - RNA, 19 nt, Artificial Sequence
  Description of Artificial Sequence: Synthetic oligonucleotide
  Antisense strand to SEQ ID NO: 1826023
augcacccugaugaaacca

SEQ ID NO: 1826025 - RNA, 19 nt, Artificial Sequence
  Description of Artificial Sequence: Synthetic oligonucleotide
  Sense strand starting at position 2736 of SEQ ID NO: 1563707
cauguagaggcaugaauca

SEQ ID NO: 1826026 - RNA, 19 nt, Artificial Sequence
  Description of Artificial Sequence: Synthetic oligonucleotide
  Antisense strand to SEQ ID NO: 1826025
ugauucaugccucuacaug

SEQ ID NO: 1826027 - RNA, 19 nt, Artificial Sequence
  Description of Artificial Sequence: Synthetic oligonucleotide
  Sense strand starting at position 2761 of SEQ ID NO: 1563707
ccuuccuuugaaugacuga

SEQ ID NO: 1826028 - RNA, 19 nt, Artificial Sequence
  Description of Artificial Sequence: Synthetic oligonucleotide
  Antisense strand to SEQ ID NO: 1826027
ucagucauucaaaggaagg

SEQ ID NO: 1826029 - RNA, 19 nt, Artificial Sequence
  Description of Artificial Sequence: Synthetic oligonucleotide
  Sense strand starting at position 2764 of SEQ ID NO: 1563707
uccuuugaaugacugagua

SEQ ID NO: 1826030 - RNA, 19 nt, Artificial Sequence
  Description of Artificial Sequence: Synthetic oligonucleotide
  Antisense strand to SEQ ID NO: 1826029
uacucagucauucaaagga

SEQ ID NO: 1826031 - RNA, 19 nt, Artificial Sequence
  Description of Artificial Sequence: Synthetic oligonucleotide
  Sense strand starting at position 2768 of SEQ ID NO: 1563707
uugaaugacugaguacgau

SEQ ID NO: 1826032 - RNA, 19 nt, Artificial Sequence
  Description of Artificial Sequence: Synthetic oligonucleotide
  Antisense strand to SEQ ID NO: 1826031
aucguacucagucauucaa

SEQ ID NO: 1826033 - RNA, 19 nt, Artificial Sequence
  Description of Artificial Sequence: Synthetic oligonucleotide
  Sense strand starting at position 2778 of SEQ ID NO: 1563707
gaguacgauucuguuguau

SEQ ID NO: 1826034 - RNA, 19 nt, Artificial Sequence
  Description of Artificial Sequence: Synthetic oligonucleotide
  Antisense strand to SEQ ID NO: 1826033
auacaacagaaucguacuc

SEQ ID NO: 1826035 - RNA, 19 nt, Artificial Sequence
  Description of Artificial Sequence: Synthetic oligonucleotide
  Sense strand starting at position 2784 of SEQ ID NO: 1563707
gauucuguuguaugaauag

SEQ ID NO: 1826036 - RNA, 19 nt, Artificial Sequence
  Description of Artificial Sequence: Synthetic oligonucleotide
  Antisense strand to SEQ ID NO: 1826035
cuauucauacaacagaauc

SEQ ID NO: 1826037 - RNA, 19 nt, Artificial Sequence
  Description of Artificial Sequence: Synthetic oligonucleotide
  Sense strand starting at position 2822 of SEQ ID NO: 1563707
ccacucgucaguugaugga

SEQ ID NO: 1826038 - RNA, 19 nt, Artificial Sequence
  Description of Artificial Sequence: Synthetic oligonucleotide
  Antisense strand to SEQ ID NO: 1826037
uccaucaacugacgagugg

SEQ ID NO: 1826039 - RNA, 19 nt, Artificial Sequence
  Description of Artificial Sequence: Synthetic oligonucleotide
  Sense strand starting at position 2829 of SEQ ID NO: 1563707
ucaguugauggacagguua

SEQ ID NO: 1826040 - RNA, 19 nt, Artificial Sequence
  Description of Artificial Sequence: Synthetic oligonucleotide
  Antisense strand to SEQ ID NO: 1826039
uaaccuguccaucaacuga

SEQ ID NO: 1826041 - RNA, 19 nt, Artificial Sequence
  Description of Artificial Sequence: Synthetic oligonucleotide
  Sense strand starting at position 2831 of SEQ ID NO: 1563707
aguugauggacagguuauu

SEQ ID NO: 1826042 - RNA, 19 nt, Artificial Sequence
  Description of Artificial Sequence: Synthetic oligonucleotide
  Antisense strand to SEQ ID NO: 1826041
aauaaccuguccaucaacu

SEQ ID NO: 1826043 - RNA, 19 nt, Artificial Sequence
  Description of Artificial Sequence: Synthetic oligonucleotide
  Sense strand starting at position 2963 of SEQ ID NO: 1563707
ucgugugguaauucuguuu

SEQ ID NO: 1826044 - RNA, 19 nt, Artificial Sequence
  Description of Artificial Sequence: Synthetic oligonucleotide
  Antisense strand to SEQ ID NO: 1826043
aaacagaauuaccacacga

SEQ ID NO: 1826045 - RNA, 19 nt, Artificial Sequence
  Description of Artificial Sequence: Synthetic oligonucleotide
  Sense strand starting at position 3016 of SEQ ID NO: 1563707
gcagcuguaaucuuucgca

SEQ ID NO: 1826046 - RNA, 19 nt, Artificial Sequence
  Description of Artificial Sequence: Synthetic oligonucleotide
  Antisense strand to SEQ ID NO: 1826045
ugcgaaagauuacagcugc

SEQ ID NO: 1826047 - RNA, 19 nt, Artificial Sequence
  Description of Artificial Sequence: Synthetic oligonucleotide
  Sense strand starting at position 3030 of SEQ ID NO: 1563707
ucgcauucccaacaguagu

SEQ ID NO: 1826048 - RNA, 19 nt, Artificial Sequence
  Description of Artificial Sequence: Synthetic oligonucleotide
  Antisense strand to SEQ ID NO: 1826047
acuacuguugggaaugcga

SEQ ID NO: 1826049 - RNA, 19 nt, Artificial Sequence
  Description of Artificial Sequence: Synthetic oligonucleotide
  Sense strand starting at position 3040 of SEQ ID NO: 1563707
aacaguagugcaugagagu

SEQ ID NO: 1826050 - RNA, 19 nt, Artificial Sequence
  Description of Artificial Sequence: Synthetic oligonucleotide
  Antisense strand to SEQ ID NO: 1826049
acucucaugcacuacuguu

SEQ ID NO: 1826051 - RNA, 19 nt, Artificial Sequence
  Description of Artificial Sequence: Synthetic oligonucleotide
  Sense strand starting at position 3049 of SEQ ID NO: 1563707
gcaugagagucccaauuuc

SEQ ID NO: 1826052 - RNA, 19 nt, Artificial Sequence
  Description of Artificial Sequence: Synthetic oligonucleotide
  Antisense strand to SEQ ID NO: 1826051
gaaauugggacucucaugc

SEQ ID NO: 1826053 - RNA, 19 nt, Artificial Sequence
  Description of Artificial Sequence: Synthetic oligonucleotide
  Sense strand starting at position 3219 of SEQ ID NO: 1563707
caaauugugugucuuggaa

SEQ ID NO: 1826054 - RNA, 19 nt, Artificial Sequence
  Description of Artificial Sequence: Synthetic oligonucleotide
  Antisense strand to SEQ ID NO: 1826053
uuccaagacacacaauuug

SEQ ID NO: 1826055 - RNA, 19 nt, Artificial Sequence
  Description of Artificial Sequence: Synthetic oligonucleotide
  Sense strand starting at position 3274 of SEQ ID NO: 1563707
agccucugagacgguaauu

SEQ ID NO: 1826056 - RNA, 19 nt, Artificial Sequence
  Description of Artificial Sequence: Synthetic oligonucleotide
  Antisense strand to SEQ ID NO: 1826055
aauuaccgucucagaggcu

SEQ ID NO: 1826057 - RNA, 19 nt, Artificial Sequence
  Description of Artificial Sequence: Synthetic oligonucleotide
  Sense strand starting at position 3489 of SEQ ID NO: 1563707
agugucggguauucaauua

SEQ ID NO: 1826058 - RNA, 19 nt, Artificial Sequence
  Description of Artificial Sequence: Synthetic oligonucleotide
  Antisense strand to SEQ ID NO: 1826057
uaauugaauacccgacacu

SEQ ID NO: 1826059 - RNA, 19 nt, Artificial Sequence
  Description of Artificial Sequence: Synthetic oligonucleotide
  Sense strand starting at position 3559 of SEQ ID NO: 1563707
guaccucugcuuuggagga

SEQ ID NO: 1826060 - RNA, 19 nt, Artificial Sequence
  Description of Artificial Sequence: Synthetic oligonucleotide
  Antisense strand to SEQ ID NO: 1826059
uccuccaaagcagagguac

SEQ ID NO: 1826061 - RNA, 19 nt, Artificial Sequence
  Description of Artificial Sequence: Synthetic oligonucleotide
  Sense strand starting at position 3563 of SEQ ID NO: 1563707
cucugcuuuggaggaaugu

SEQ ID NO: 1826062 - RNA, 19 nt, Artificial Sequence
  Description of Artificial Sequence: Synthetic oligonucleotide
  Antisense strand to SEQ ID NO: 1826061
acauuccuccaaagcagag

SEQ ID NO: 1826063 - RNA, 19 nt, Artificial Sequence
  Description of Artificial Sequence: Synthetic oligonucleotide
  Sense strand starting at position 3605 of SEQ ID NO: 1563707
uuuaauucgguugauugua

SEQ ID NO: 1826064 - RNA, 19 nt, Artificial Sequence
  Description of Artificial Sequence: Synthetic oligonucleotide
  Antisense strand to SEQ ID NO: 1826063
uacaaucaaccgaauuaaa

SEQ ID NO: 1826065 - RNA, 19 nt, Artificial Sequence
  Description of Artificial Sequence: Synthetic oligonucleotide
  Sense strand starting at position 3607 of SEQ ID NO: 1563707
uaauucgguugauuguauu

SEQ ID NO: 1826066 - RNA, 19 nt, Artificial Sequence
  Description of Artificial Sequence: Synthetic oligonucleotide
  Antisense strand to SEQ ID NO: 1826065
aauacaaucaaccgaauua

SEQ ID NO: 1826067 - RNA, 19 nt, Artificial Sequence
  Description of Artificial Sequence: Synthetic oligonucleotide
  Sense strand starting at position 3818 of SEQ ID NO: 1563707
ggagcuguugccuaaucca

SEQ ID NO: 1826068 - RNA, 19 nt, Artificial Sequence
  Description of Artificial Sequence: Synthetic oligonucleotide
  Antisense strand to SEQ ID NO: 1826067
uggauuaggcaacagcucc

SEQ ID NO: 1826069 - RNA, 19 nt, Artificial Sequence
  Description of Artificial Sequence: Synthetic oligonucleotide
  Sense strand starting at position 3927 of SEQ ID NO: 1563707
cuuuacaugaugugaggua

SEQ ID NO: 1826070 - RNA, 19 nt, Artificial Sequence
  Description of Artificial Sequence: Synthetic oligonucleotide
  Antisense strand to SEQ ID NO: 1826069
uaccucacaucauguaaag

SEQ ID NO: 1826071 - RNA, 19 nt, Artificial Sequence
  Description of Artificial Sequence: Synthetic oligonucleotide
  Sense strand starting at position 944 of SEQ ID NO: 1563708
cgaaacucgugacccuaau

SEQ ID NO: 1826072 - RNA, 19 nt, Artificial Sequence
  Description of Artificial Sequence: Synthetic oligonucleotide
  Antisense strand to SEQ ID NO: 1826071
auuagggucacgaguuucg

SEQ ID NO: 1826073 - RNA, 19 nt, Artificial Sequence
  Description of Artificial Sequence: Synthetic oligonucleotide
  Sense strand starting at position 971 of SEQ ID NO: 1563708
ugcgcauuucuagacuguu

SEQ ID NO: 1826074 - RNA, 19 nt, Artificial Sequence
  Description of Artificial Sequence: Synthetic oligonucleotide
  Antisense strand to SEQ ID NO: 1826073
aacagucuagaaaugcgca

SEQ ID NO: 1826075 - RNA, 19 nt, Artificial Sequence
  Description of Artificial Sequence: Synthetic oligonucleotide
  Sense strand starting at position 938 of SEQ ID NO: 1563709
aaaggaaacucgugacccu

SEQ ID NO: 1826076 - RNA, 19 nt, Artificial Sequence
  Description of Artificial Sequence: Synthetic oligonucleotide
  Antisense strand to SEQ ID NO: 1826075
agggucacgaguuuccuuu

SEQ ID NO: 1826077 - RNA, 19 nt, Artificial Sequence
  Description of Artificial Sequence: Synthetic oligonucleotide
  Sense strand starting at position 941 of SEQ ID NO: 1563709
ggaaacucgugacccuaau

SEQ ID NO: 1826078 - RNA, 19 nt, Artificial Sequence
  Description of Artificial Sequence: Synthetic oligonucleotide
  Antisense strand to SEQ ID NO: 1826077
auuagggucacgaguuucc

SEQ ID NO: 1826079 - RNA, 19 nt, Artificial Sequence
  Description of Artificial Sequence: Synthetic oligonucleotide
  Sense strand starting at position 968 of SEQ ID NO: 1563709
ugcgcauuucuggacuguu

SEQ ID NO: 1826080 - RNA, 19 nt, Artificial Sequence
  Description of Artificial Sequence: Synthetic oligonucleotide
  Antisense strand to SEQ ID NO: 1826079
aacaguccagaaaugcgca

SEQ ID NO: 1826081 - RNA, 19 nt, Artificial Sequence
  Description of Artificial Sequence: Synthetic oligonucleotide
  Sense strand starting at position 885 of SEQ ID NO: 1563710
aguggucuagguugcuaaa

SEQ ID NO: 1826082 - RNA, 19 nt, Artificial Sequence
  Description of Artificial Sequence: Synthetic oligonucleotide
  Antisense strand to SEQ ID NO: 1826081
uuuagcaaccuagaccacu

SEQ ID NO: 1826083 - RNA, 19 nt, Artificial Sequence
  Description of Artificial Sequence: Synthetic oligonucleotide
  Sense strand starting at position 941 of SEQ ID NO: 1563710
ggaaacucgugacccuaau

SEQ ID NO: 1826084 - RNA, 19 nt, Artificial Sequence
  Description of Artificial Sequence: Synthetic oligonucleotide
  Antisense strand to SEQ ID NO: 1826083
auuagggucacgaguuucc

SEQ ID NO: 1826085 - RNA, 19 nt, Artificial Sequence
  Description of Artificial Sequence: Synthetic oligonucleotide
  Sense strand starting at position 968 of SEQ ID NO: 1563710
ugcgcauuucuggacuguu

SEQ ID NO: 1826086 - RNA, 19 nt, Artificial Sequence
  Description of Artificial Sequence: Synthetic oligonucleotide
  Antisense strand to SEQ ID NO: 1826085
aacaguccagaaaugcgca

SEQ ID NO: 1826087 - RNA, 19 nt, Artificial Sequence
  Description of Artificial Sequence: Synthetic oligonucleotide
  Sense strand starting at position 1181 of SEQ ID NO: 1563710
ggcccugacuugcucagaa

SEQ ID NO: 1826088 - RNA, 19 nt, Artificial Sequence
  Description of Artificial Sequence: Synthetic oligonucleotide
  Antisense strand to SEQ ID NO: 1826087
uucugagcaagucagggcc

SEQ ID NO: 1826089 - RNA, 19 nt, Artificial Sequence
  Description of Artificial Sequence: Synthetic oligonucleotide
  Sense strand starting at position 1402 of SEQ ID NO: 1563710
gcagauggcuuccuugaaa

SEQ ID NO: 1826090 - RNA, 19 nt, Artificial Sequence
  Description of Artificial Sequence: Synthetic oligonucleotide
  Antisense strand to SEQ ID NO: 1826089
uuucaaggaagccaucugc

SEQ ID NO: 1826091 - RNA, 19 nt, Artificial Sequence
  Description of Artificial Sequence: Synthetic oligonucleotide
  Sense strand starting at position 1726 of SEQ ID NO: 1563710
gccgucagguacucaauaa

SEQ ID NO: 1826092 - RNA, 19 nt, Artificial Sequence
  Description of Artificial Sequence: Synthetic oligonucleotide
  Antisense strand to SEQ ID NO: 1826091
uuauugaguaccugacggc

SEQ ID NO: 1826093 - RNA, 19 nt, Artificial Sequence
  Description of Artificial Sequence: Synthetic oligonucleotide
  Sense strand starting at position 1930 of SEQ ID NO: 1563710
gagugugcuaucucggcuu

SEQ ID NO: 1826094 - RNA, 19 nt, Artificial Sequence
  Description of Artificial Sequence: Synthetic oligonucleotide
  Antisense strand to SEQ ID NO: 1826093
aagccgagauagcacacuc

SEQ ID NO: 1826095 - RNA, 19 nt, Artificial Sequence
  Description of Artificial Sequence: Synthetic oligonucleotide
  Sense strand starting at position 1979 of SEQ ID NO: 1563710
gacaguuaccgcguccagu

SEQ ID NO: 1826096 - RNA, 19 nt, Artificial Sequence
  Description of Artificial Sequence: Synthetic oligonucleotide
  Antisense strand to SEQ ID NO: 1826095
acuggacgcgguaacuguc

SEQ ID NO: 1826097 - RNA, 19 nt, Artificial Sequence
  Description of Artificial Sequence: Synthetic oligonucleotide
  Sense strand starting at position 1980 of SEQ ID NO: 1563710
acaguuaccgcguccagua

SEQ ID NO: 1826098 - RNA, 19 nt, Artificial Sequence
  Description of Artificial Sequence: Synthetic oligonucleotide
  Antisense strand to SEQ ID NO: 1826097
uacuggacgcgguaacugu

SEQ ID NO: 1826099 - RNA, 19 nt, Artificial Sequence
  Description of Artificial Sequence: Synthetic oligonucleotide
  Sense strand starting at position 1992 of SEQ ID NO: 1563710
uccaguacuguguauccua

SEQ ID NO: 1826100 - RNA, 19 nt, Artificial Sequence
  Description of Artificial Sequence: Synthetic oligonucleotide
  Antisense strand to SEQ ID NO: 1826099
uaggauacacaguacugga

SEQ ID NO: 1826101 - RNA, 19 nt, Artificial Sequence
  Description of Artificial Sequence: Synthetic oligonucleotide
  Sense strand starting at position 2236 of SEQ ID NO: 1563710
ucucuuugccagugggaac

SEQ ID NO: 1826102 - RNA, 19 nt, Artificial Sequence
  Description of Artificial Sequence: Synthetic oligonucleotide
  Antisense strand to SEQ ID NO: 1826101
guucccacuggcaaagaga

SEQ ID NO: 1826103 - RNA, 19 nt, Artificial Sequence
  Description of Artificial Sequence: Synthetic oligonucleotide
  Sense strand starting at position 2248 of SEQ ID NO: 1563710
ugggaacuuucccuuucua

SEQ ID NO: 1826104 - RNA, 19 nt, Artificial Sequence
  Description of Artificial Sequence: Synthetic oligonucleotide
  Antisense strand to SEQ ID NO: 1826103
uagaaagggaaaguuccca

SEQ ID NO: 1826105 - RNA, 19 nt, Artificial Sequence
  Description of Artificial Sequence: Synthetic oligonucleotide
  Sense strand starting at position 2506 of SEQ ID NO: 1563710
ucccgauagucccuggcaa

SEQ ID NO: 1826106 - RNA, 19 nt, Artificial Sequence
  Description of Artificial Sequence: Synthetic oligonucleotide
  Antisense strand to SEQ ID NO: 1826105
uugccagggacuaucggga

SEQ ID NO: 1826107 - RNA, 19 nt, Artificial Sequence
  Description of Artificial Sequence: Synthetic oligonucleotide
  Sense strand starting at position 2539 of SEQ ID NO: 1563710
gcuuucuguccauagaggu

SEQ ID NO: 1826108 - RNA, 19 nt, Artificial Sequence
  Description of Artificial Sequence: Synthetic oligonucleotide
  Antisense strand to SEQ ID NO: 1826107
accucuauggacagaaagc

SEQ ID NO: 1826109 - RNA, 19 nt, Artificial Sequence
  Description of Artificial Sequence: Synthetic oligonucleotide
  Sense strand starting at position 2574 of SEQ ID NO: 1563710
uuuccuauagauggaauua

SEQ ID NO: 1826110 - RNA, 19 nt, Artificial Sequence
  Description of Artificial Sequence: Synthetic oligonucleotide
  Antisense strand to SEQ ID NO: 1826109
uaauuccaucuauaggaaa

SEQ ID NO: 1826111 - RNA, 19 nt, Artificial Sequence
  Description of Artificial Sequence: Synthetic oligonucleotide
  Sense strand starting at position 2584 of SEQ ID NO: 1563710
auggaauuauacgaccaaa

SEQ ID NO: 1826112 - RNA, 19 nt, Artificial Sequence
  Description of Artificial Sequence: Synthetic oligonucleotide
  Antisense strand to SEQ ID NO: 1826111
uuuggucguauaauuccau

SEQ ID NO: 1826113 - RNA, 19 nt, Artificial Sequence
  Description of Artificial Sequence: Synthetic oligonucleotide
  Sense strand starting at position 2643 of SEQ ID NO: 1563710
ugguuucaucagggugcau

SEQ ID NO: 1826114 - RNA, 19 nt, Artificial Sequence
  Description of Artificial Sequence: Synthetic oligonucleotide
  Antisense strand to SEQ ID NO: 1826113
augcacccugaugaaacca

SEQ ID NO: 1826115 - RNA, 19 nt, Artificial Sequence
  Description of Artificial Sequence: Synthetic oligonucleotide
  Sense strand starting at position 2663 of SEQ ID NO: 1563710
cauguagaggcaugaauca

SEQ ID NO: 1826116 - RNA, 19 nt, Artificial Sequence
  Description of Artificial Sequence: Synthetic oligonucleotide
  Antisense strand to SEQ ID NO: 1826115
ugauucaugccucuacaug

SEQ ID NO: 1826117 - RNA, 19 nt, Artificial Sequence
  Description of Artificial Sequence: Synthetic oligonucleotide
  Sense strand starting at position 2688 of SEQ ID NO: 1563710
ccuuccuuugaaugacuga

SEQ ID NO: 1826118 - RNA, 19 nt, Artificial Sequence
  Description of Artificial Sequence: Synthetic oligonucleotide
  Antisense strand to SEQ ID NO: 1826117
ucagucauucaaaggaagg

SEQ ID NO: 1826119 - RNA, 19 nt, Artificial Sequence
  Description of Artificial Sequence: Synthetic oligonucleotide
  Sense strand starting at position 2691 of SEQ ID NO: 1563710
uccuuugaaugacugagua

SEQ ID NO: 1826120 - RNA, 19 nt, Artificial Sequence
  Description of Artificial Sequence: Synthetic oligonucleotide
  Antisense strand to SEQ ID NO: 1826119
uacucagucauucaaagga

SEQ ID NO: 1826121 - RNA, 19 nt, Artificial Sequence
  Description of Artificial Sequence: Synthetic oligonucleotide
  Sense strand starting at position 2695 of SEQ ID NO: 1563710
uugaaugacugaguacgau

SEQ ID NO: 1826122 - RNA, 19 nt, Artificial Sequence
  Description of Artificial Sequence: Synthetic oligonucleotide
  Antisense strand to SEQ ID NO: 1826121
aucguacucagucauucaa

SEQ ID NO: 1826123 - RNA, 19 nt, Artificial Sequence
  Description of Artificial Sequence: Synthetic oligonucleotide
  Sense strand starting at position 2705 of SEQ ID NO: 1563710
gaguacgauucuguuguau

SEQ ID NO: 1826124 - RNA, 19 nt, Artificial Sequence
  Description of Artificial Sequence: Synthetic oligonucleotide
  Antisense strand to SEQ ID NO: 1826123
auacaacagaaucguacuc

SEQ ID NO: 1826125 - RNA, 19 nt, Artificial Sequence
  Description of Artificial Sequence: Synthetic oligonucleotide
  Sense strand starting at position 2711 of SEQ ID NO: 1563710
gauucuguuguaugaauag

SEQ ID NO: 1826126 - RNA, 19 nt, Artificial Sequence
  Description of Artificial Sequence: Synthetic oligonucleotide
  Antisense strand to SEQ ID NO: 1826125
cuauucauacaacagaauc

SEQ ID NO: 1826127 - RNA, 19 nt, Artificial Sequence
  Description of Artificial Sequence: Synthetic oligonucleotide
  Sense strand starting at position 2749 of SEQ ID NO: 1563710
ccacucgucaguugaugga

SEQ ID NO: 1826128 - RNA, 19 nt, Artificial Sequence
  Description of Artificial Sequence: Synthetic oligonucleotide
  Antisense strand to SEQ ID NO: 1826127
uccaucaacugacgagugg

SEQ ID NO: 1826129 - RNA, 19 nt, Artificial Sequence
  Description of Artificial Sequence: Synthetic oligonucleotide
  Sense strand starting at position 2756 of SEQ ID NO: 1563710
ucaguugauggacagguua

SEQ ID NO: 1826130 - RNA, 19 nt, Artificial Sequence
  Description of Artificial Sequence: Synthetic oligonucleotide
  Antisense strand to SEQ ID NO: 1826129
uaaccuguccaucaacuga

SEQ ID NO: 1826131 - RNA, 19 nt, Artificial Sequence
  Description of Artificial Sequence: Synthetic oligonucleotide
  Sense strand starting at position 2758 of SEQ ID NO: 1563710
aguugauggacagguuauu

SEQ ID NO: 1826132 - RNA, 19 nt, Artificial Sequence
  Description of Artificial Sequence: Synthetic oligonucleotide
  Antisense strand to SEQ ID NO: 1826131
aauaaccuguccaucaacu

SEQ ID NO: 1826133 - RNA, 19 nt, Artificial Sequence
  Description of Artificial Sequence: Synthetic oligonucleotide
  Sense strand starting at position 2890 of SEQ ID NO: 1563710
ucgugugguaauucuguuu

SEQ ID NO: 1826134 - RNA, 19 nt, Artificial Sequence
  Description of Artificial Sequence: Synthetic oligonucleotide
  Antisense strand to SEQ ID NO: 1826133
aaacagaauuaccacacga

SEQ ID NO: 1826135 - RNA, 19 nt, Artificial Sequence
  Description of Artificial Sequence: Synthetic oligonucleotide
  Sense strand starting at position 2943 of SEQ ID NO: 1563710
gcagcuguaaucuuucgca

SEQ ID NO: 1826136 - RNA, 19 nt, Artificial Sequence
  Description of Artificial Sequence: Synthetic oligonucleotide
  Antisense strand to SEQ ID NO: 1826135
ugcgaaagauuacagcugc

SEQ ID NO: 1826137 - RNA, 19 nt, Artificial Sequence
  Description of Artificial Sequence: Synthetic oligonucleotide
  Sense strand starting at position 2957 of SEQ ID NO: 1563710
ucgcauucccaacaguagu

SEQ ID NO: 1826138 - RNA, 19 nt, Artificial Sequence
  Description of Artificial Sequence: Synthetic oligonucleotide
  Antisense strand to SEQ ID NO: 1826137
acuacuguugggaaugcga

SEQ ID NO: 1826139 - RNA, 19 nt, Artificial Sequence
  Description of Artificial Sequence: Synthetic oligonucleotide
  Sense strand starting at position 2967 of SEQ ID NO: 1563710
aacaguagugcaugagagu

SEQ ID NO: 1826140 - RNA, 19 nt, Artificial Sequence
  Description of Artificial Sequence: Synthetic oligonucleotide
  Antisense strand to SEQ ID NO: 1826139
acucucaugcacuacuguu

SEQ ID NO: 1826141 - RNA, 19 nt, Artificial Sequence
  Description of Artificial Sequence: Synthetic oligonucleotide
  Sense strand starting at position 2976 of SEQ ID NO: 1563710
gcaugagagucccaauuuc

SEQ ID NO: 1826142 - RNA, 19 nt, Artificial Sequence
  Description of Artificial Sequence: Synthetic oligonucleotide
  Antisense strand to SEQ ID NO: 1826141
gaaauugggacucucaugc

SEQ ID NO: 1826143 - RNA, 19 nt, Artificial Sequence
  Description of Artificial Sequence: Synthetic oligonucleotide
  Sense strand starting at position 3146 of SEQ ID NO: 1563710
caaauugugugucuuggaa

SEQ ID NO: 1826144 - RNA, 19 nt, Artificial Sequence
  Description of Artificial Sequence: Synthetic oligonucleotide
  Antisense strand to SEQ ID NO: 1826143
uuccaagacacacaauuug

SEQ ID NO: 1826145 - RNA, 19 nt, Artificial Sequence
  Description of Artificial Sequence: Synthetic oligonucleotide
  Sense strand starting at position 3201 of SEQ ID NO: 1563710
agccucugagacgguaauu

SEQ ID NO: 1826146 - RNA, 19 nt, Artificial Sequence
  Description of Artificial Sequence: Synthetic oligonucleotide
  Antisense strand to SEQ ID NO: 1826145
aauuaccgucucagaggcu

SEQ ID NO: 1826147 - RNA, 19 nt, Artificial Sequence
  Description of Artificial Sequence: Synthetic oligonucleotide
  Sense strand starting at position 3416 of SEQ ID NO: 1563710
agugucggguauucaauua

SEQ ID NO: 1826148 - RNA, 19 nt, Artificial Sequence
  Description of Artificial Sequence: Synthetic oligonucleotide
  Antisense strand to SEQ ID NO: 1826147
uaauugaauacccgacacu

SEQ ID NO: 1826149 - RNA, 19 nt, Artificial Sequence
  Description of Artificial Sequence: Synthetic oligonucleotide
  Sense strand starting at position 3486 of SEQ ID NO: 1563710
guaccucugcuuuggagga

SEQ ID NO: 1826150 - RNA, 19 nt, Artificial Sequence
  Description of Artificial Sequence: Synthetic oligonucleotide
  Antisense strand to SEQ ID NO: 1826149
uccuccaaagcagagguac

SEQ ID NO: 1826151 - RNA, 19 nt, Artificial Sequence
  Description of Artificial Sequence: Synthetic oligonucleotide
  Sense strand starting at position 3490 of SEQ ID NO: 1563710
cucugcuuuggaggaaugu

SEQ ID NO: 1826152 - RNA, 19 nt, Artificial Sequence
  Description of Artificial Sequence: Synthetic oligonucleotide
  Antisense strand to SEQ ID NO: 1826151
acauuccuccaaagcagag

SEQ ID NO: 1826153 - RNA, 19 nt, Artificial Sequence
  Description of Artificial Sequence: Synthetic oligonucleotide
  Sense strand starting at position 3532 of SEQ ID NO: 1563710
uuuaauucgguugauugua

SEQ ID NO: 1826154 - RNA, 19 nt, Artificial Sequence
  Description of Artificial Sequence: Synthetic oligonucleotide
  Antisense strand to SEQ ID NO: 1826153
uacaaucaaccgaauuaaa

SEQ ID NO: 1826155 - RNA, 19 nt, Artificial Sequence
  Description of Artificial Sequence: Synthetic oligonucleotide
  Sense strand starting at position 3534 of SEQ ID NO: 1563710
uaauucgguugauuguauu

SEQ ID NO: 1826156 - RNA, 19 nt, Artificial Sequence
  Description of Artificial Sequence: Synthetic oligonucleotide
  Antisense strand to SEQ ID NO: 1826155
aauacaaucaaccgaauua

SEQ ID NO: 1826157 - RNA, 19 nt, Artificial Sequence
  Description of Artificial Sequence: Synthetic oligonucleotide
  Sense strand starting at position 3745 of SEQ ID NO: 1563710
ggagcuguugccuaaucca

SEQ ID NO: 1826158 - RNA, 19 nt, Artificial Sequence
  Description of Artificial Sequence: Synthetic oligonucleotide
  Antisense strand to SEQ ID NO: 1826157
uggauuaggcaacagcucc

SEQ ID NO: 1826159 - RNA, 19 nt, Artificial Sequence
  Description of Artificial Sequence: Synthetic oligonucleotide
  Sense strand starting at position 3854 of SEQ ID NO: 1563710
cuuuacaugaugugaggua

SEQ ID NO: 1826160 - RNA, 19 nt, Artificial Sequence
  Description of Artificial Sequence: Synthetic oligonucleotide
  Antisense strand to SEQ ID NO: 1826159
uaccucacaucauguaaag

SEQ ID NO: 1826161 - RNA, 19 nt, Artificial Sequence
  Description of Artificial Sequence: Synthetic oligonucleotide
  Sense strand starting at position 1017 of SEQ ID NO: 1563711
cgaaacucgugacccuaau

SEQ ID NO: 1826162 - RNA, 19 nt, Artificial Sequence
  Description of Artificial Sequence: Synthetic oligonucleotide
  Antisense strand to SEQ ID NO: 1826161
auuagggucacgaguuucg

SEQ ID NO: 1826163 - RNA, 19 nt, Artificial Sequence
  Description of Artificial Sequence: Synthetic oligonucleotide
  Sense strand starting at position 1044 of SEQ ID NO: 1563711
ugcgcauuucuagacuguu

SEQ ID NO: 1826164 - RNA, 19 nt, Artificial Sequence
  Description of Artificial Sequence: Synthetic oligonucleotide
  Antisense strand to SEQ ID NO: 1826163
aacagucuagaaaugcgca

SEQ ID NO: 1826165 - RNA, 19 nt, Artificial Sequence
  Description of Artificial Sequence: Synthetic oligonucleotide
  Sense strand starting at position 1011 of SEQ ID NO: 1563712
aaaggaaacucgugacccu

SEQ ID NO: 1826166 - RNA, 19 nt, Artificial Sequence
  Description of Artificial Sequence: Synthetic oligonucleotide
  Antisense strand to SEQ ID NO: 1826165
agggucacgaguuuccuuu

SEQ ID NO: 1826167 - RNA, 19 nt, Artificial Sequence
  Description of Artificial Sequence: Synthetic oligonucleotide
  Sense strand starting at position 1014 of SEQ ID NO: 1563712
ggaaacucgugacccuaau

SEQ ID NO: 1826168 - RNA, 19 nt, Artificial Sequence
  Description of Artificial Sequence: Synthetic oligonucleotide
  Antisense strand to SEQ ID NO: 1826167
auuagggucacgaguuucc

SEQ ID NO: 1826169 - RNA, 19 nt, Artificial Sequence
  Description of Artificial Sequence: Synthetic oligonucleotide
  Sense strand starting at position 1041 of SEQ ID NO: 1563712
ugcgcauuucuggacuguu

SEQ ID NO: 1826170 - RNA, 19 nt, Artificial Sequence
  Description of Artificial Sequence: Synthetic oligonucleotide
  Antisense strand to SEQ ID NO: 1826169
aacaguccagaaaugcgca

SEQ ID NO: 1826171 - RNA, 19 nt, Artificial Sequence
  Description of Artificial Sequence: Synthetic oligonucleotide
  Sense strand starting at position 958 of SEQ ID NO: 1563713
aguggucuagguugcuaaa

SEQ ID NO: 1826172 - RNA, 19 nt, Artificial Sequence
  Description of Artificial Sequence: Synthetic oligonucleotide
  Antisense strand to SEQ ID NO: 1826171
uuuagcaaccuagaccacu

SEQ ID NO: 1826173 - RNA, 19 nt, Artificial Sequence
  Description of Artificial Sequence: Synthetic oligonucleotide
  Sense strand starting at position 1014 of SEQ ID NO: 1563713
ggaaacucgugacccuaau

SEQ ID NO: 1826174 - RNA, 19 nt, Artificial Sequence
  Description of Artificial Sequence: Synthetic oligonucleotide
  Antisense strand to SEQ ID NO: 1826173
auuagggucacgaguuucc

SEQ ID NO: 1826175 - RNA, 19 nt, Artificial Sequence
  Description of Artificial Sequence: Synthetic oligonucleotide
  Sense strand starting at position 1041 of SEQ ID NO: 1563713
ugcgcauuucuggacuguu

SEQ ID NO: 1826176 - RNA, 19 nt, Artificial Sequence
  Description of Artificial Sequence: Synthetic oligonucleotide
  Antisense strand to SEQ ID NO: 1826175
aacaguccagaaaugcgca

SEQ ID NO: 1826177 - RNA, 19 nt, Artificial Sequence
  Description of Artificial Sequence: Synthetic oligonucleotide
  Sense strand starting at position 1254 of SEQ ID NO: 1563713
ggcccugacuugcucagaa

SEQ ID NO: 1826178 - RNA, 19 nt, Artificial Sequence
  Description of Artificial Sequence: Synthetic oligonucleotide
  Antisense strand to SEQ ID NO: 1826177
uucugagcaagucagggcc

SEQ ID NO: 1826179 - RNA, 19 nt, Artificial Sequence
  Description of Artificial Sequence: Synthetic oligonucleotide
  Sense strand starting at position 1475 of SEQ ID NO: 1563713
gcagauggcuuccuugaaa

SEQ ID NO: 1826180 - RNA, 19 nt, Artificial Sequence
  Description of Artificial Sequence: Synthetic oligonucleotide
  Antisense strand to SEQ ID NO: 1826179
uuucaaggaagccaucugc

SEQ ID NO: 1826181 - RNA, 19 nt, Artificial Sequence
  Description of Artificial Sequence: Synthetic oligonucleotide
  Sense strand starting at position 1799 of SEQ ID NO: 1563713
gccgucagguacucaauaa

SEQ ID NO: 1826182 - RNA, 19 nt, Artificial Sequence
  Description of Artificial Sequence: Synthetic oligonucleotide
  Antisense strand to SEQ ID NO: 1826181
uuauugaguaccugacggc

SEQ ID NO: 1826183 - RNA, 19 nt, Artificial Sequence
  Description of Artificial Sequence: Synthetic oligonucleotide
  Sense strand starting at position 2003 of SEQ ID NO: 1563713
gagugugcuaucucggcuu

SEQ ID NO: 1826184 - RNA, 19 nt, Artificial Sequence
  Description of Artificial Sequence: Synthetic oligonucleotide
  Antisense strand to SEQ ID NO: 1826183
aagccgagauagcacacuc

SEQ ID NO: 1826185 - RNA, 19 nt, Artificial Sequence
  Description of Artificial Sequence: Synthetic oligonucleotide
  Sense strand starting at position 2052 of SEQ ID NO: 1563713
gacaguuaccgcguccagu

SEQ ID NO: 1826186 - RNA, 19 nt, Artificial Sequence
  Description of Artificial Sequence: Synthetic oligonucleotide
  Antisense strand to SEQ ID NO: 1826185
acuggacgcgguaacuguc

SEQ ID NO: 1826187 - RNA, 19 nt, Artificial Sequence
  Description of Artificial Sequence: Synthetic oligonucleotide
  Sense strand starting at position 2053 of SEQ ID NO: 1563713
acaguuaccgcguccagua

SEQ ID NO: 1826188 - RNA, 19 nt, Artificial Sequence
  Description of Artificial Sequence: Synthetic oligonucleotide
  Antisense strand to SEQ ID NO: 1826187
uacuggacgcgguaacugu

SEQ ID NO: 1826189 - RNA, 19 nt, Artificial Sequence
  Description of Artificial Sequence: Synthetic oligonucleotide
  Sense strand starting at position 2065 of SEQ ID NO: 1563713
uccaguacuguguauccua

SEQ ID NO: 1826190 - RNA, 19 nt, Artificial Sequence
  Description of Artificial Sequence: Synthetic oligonucleotide
  Antisense strand to SEQ ID NO: 1826189
uaggauacacaguacugga

SEQ ID NO: 1826191 - RNA, 19 nt, Artificial Sequence
  Description of Artificial Sequence: Synthetic oligonucleotide
  Sense strand starting at position 2309 of SEQ ID NO: 1563713
ucucuuugccagugggaac

SEQ ID NO: 1826192 - RNA, 19 nt, Artificial Sequence
  Description of Artificial Sequence: Synthetic oligonucleotide
  Antisense strand to SEQ ID NO: 1826191
guucccacuggcaaagaga

SEQ ID NO: 1826193 - RNA, 19 nt, Artificial Sequence
  Description of Artificial Sequence: Synthetic oligonucleotide
  Sense strand starting at position 2321 of SEQ ID NO: 1563713
ugggaacuuucccuuucua

SEQ ID NO: 1826194 - RNA, 19 nt, Artificial Sequence
  Description of Artificial Sequence: Synthetic oligonucleotide
  Antisense strand to SEQ ID NO: 1826193
uagaaagggaaaguuccca

SEQ ID NO: 1826195 - RNA, 19 nt, Artificial Sequence
  Description of Artificial Sequence: Synthetic oligonucleotide
  Sense strand starting at position 2579 of SEQ ID NO: 1563713
ucccgauagucccuggcaa

SEQ ID NO: 1826196 - RNA, 19 nt, Artificial Sequence
  Description of Artificial Sequence: Synthetic oligonucleotide
  Antisense strand to SEQ ID NO: 1826195
uugccagggacuaucggga

SEQ ID NO: 1826197 - RNA, 19 nt, Artificial Sequence
  Description of Artificial Sequence: Synthetic oligonucleotide
  Sense strand starting at position 2612 of SEQ ID NO: 1563713
gcuuucuguccauagaggu

SEQ ID NO: 1826198 - RNA, 19 nt, Artificial Sequence
  Description of Artificial Sequence: Synthetic oligonucleotide
  Antisense strand to SEQ ID NO: 1826197
accucuauggacagaaagc

SEQ ID NO: 1826199 - RNA, 19 nt, Artificial Sequence
  Description of Artificial Sequence: Synthetic oligonucleotide
  Sense strand starting at position 2647 of SEQ ID NO: 1563713
uuuccuauagauggaauua

SEQ ID NO: 1826200 - RNA, 19 nt, Artificial Sequence
  Description of Artificial Sequence: Synthetic oligonucleotide
  Antisense strand to SEQ ID NO: 1826199
uaauuccaucuauaggaaa

SEQ ID NO: 1826201 - RNA, 19 nt, Artificial Sequence
  Description of Artificial Sequence: Synthetic oligonucleotide
  Sense strand starting at position 2657 of SEQ ID NO: 1563713
auggaauuauacgaccaaa

SEQ ID NO: 1826202 - RNA, 19 nt, Artificial Sequence
  Description of Artificial Sequence: Synthetic oligonucleotide
  Antisense strand to SEQ ID NO: 1826201
uuuggucguauaauuccau

SEQ ID NO: 1826203 - RNA, 19 nt, Artificial Sequence
  Description of Artificial Sequence: Synthetic oligonucleotide
  Sense strand starting at position 2716 of SEQ ID NO: 1563713
ugguuucaucagggugcau

SEQ ID NO: 1826204 - RNA, 19 nt, Artificial Sequence
  Description of Artificial Sequence: Synthetic oligonucleotide
  Antisense strand to SEQ ID NO: 1826203
augcacccugaugaaacca

SEQ ID NO: 1826205 - RNA, 19 nt, Artificial Sequence
  Description of Artificial Sequence: Synthetic oligonucleotide
  Sense strand starting at position 2736 of SEQ ID NO: 1563713
cauguagaggcaugaauca

SEQ ID NO: 1826206 - RNA, 19 nt, Artificial Sequence
  Description of Artificial Sequence: Synthetic oligonucleotide
  Antisense strand to SEQ ID NO: 1826205
ugauucaugccucuacaug

SEQ ID NO: 1826207 - RNA, 19 nt, Artificial Sequence
  Description of Artificial Sequence: Synthetic oligonucleotide
  Sense strand starting at position 2761 of SEQ ID NO: 1563713
ccuuccuuugaaugacuga

SEQ ID NO: 1826208 - RNA, 19 nt, Artificial Sequence
  Description of Artificial Sequence: Synthetic oligonucleotide
  Antisense strand to SEQ ID NO: 1826207
ucagucauucaaaggaagg

SEQ ID NO: 1826209 - RNA, 19 nt, Artificial Sequence
  Description of Artificial Sequence: Synthetic oligonucleotide
  Sense strand starting at position 2764 of SEQ ID NO: 1563713
uccuuugaaugacugagua

SEQ ID NO: 1826210 - RNA, 19 nt, Artificial Sequence
  Description of Artificial Sequence: Synthetic oligonucleotide
  Antisense strand to SEQ ID NO: 1826209
uacucagucauucaaagga

SEQ ID NO: 1826211 - RNA, 19 nt, Artificial Sequence
  Description of Artificial Sequence: Synthetic oligonucleotide
  Sense strand starting at position 2768 of SEQ ID NO: 1563713
uugaaugacugaguacgau

SEQ ID NO: 1826212 - RNA, 19 nt, Artificial Sequence
  Description of Artificial Sequence: Synthetic oligonucleotide
  Antisense strand to SEQ ID NO: 1826211
aucguacucagucauucaa

SEQ ID NO: 1826213 - RNA, 19 nt, Artificial Sequence
  Description of Artificial Sequence: Synthetic oligonucleotide
  Sense strand starting at position 2778 of SEQ ID NO: 1563713
gaguacgauucuguuguau

SEQ ID NO: 1826214 - RNA, 19 nt, Artificial Sequence
  Description of Artificial Sequence: Synthetic oligonucleotide
  Antisense strand to SEQ ID NO: 1826213
auacaacagaaucguacuc

SEQ ID NO: 1826215 - RNA, 19 nt, Artificial Sequence
  Description of Artificial Sequence: Synthetic oligonucleotide
  Sense strand starting at position 2784 of SEQ ID NO: 1563713
gauucuguuguaugaauag

SEQ ID NO: 1826216 - RNA, 19 nt, Artificial Sequence
  Description of Artificial Sequence: Synthetic oligonucleotide
  Antisense strand to SEQ ID NO: 1826215
cuauucauacaacagaauc

SEQ ID NO: 1826217 - RNA, 19 nt, Artificial Sequence
  Description of Artificial Sequence: Synthetic oligonucleotide
  Sense strand starting at position 2822 of SEQ ID NO: 1563713
ccacucgucaguugaugga

SEQ ID NO: 1826218 - RNA, 19 nt, Artificial Sequence
  Description of Artificial Sequence: Synthetic oligonucleotide
  Antisense strand to SEQ ID NO: 1826217
uccaucaacugacgagugg

SEQ ID NO: 1826219 - RNA, 19 nt, Artificial Sequence
  Description of Artificial Sequence: Synthetic oligonucleotide
  Sense strand starting at position 2829 of SEQ ID NO: 1563713
ucaguugauggacagguua

SEQ ID NO: 1826220 - RNA, 19 nt, Artificial Sequence
  Description of Artificial Sequence: Synthetic oligonucleotide
  Antisense strand to SEQ ID NO: 1826219
uaaccuguccaucaacuga

SEQ ID NO: 1826221 - RNA, 19 nt, Artificial Sequence
  Description of Artificial Sequence: Synthetic oligonucleotide
  Sense strand starting at position 2831 of SEQ ID NO: 1563713
aguugauggacagguuauu

SEQ ID NO: 1826222 - RNA, 19 nt, Artificial Sequence
  Description of Artificial Sequence: Synthetic oligonucleotide
  Antisense strand to SEQ ID NO: 1826221
aauaaccuguccaucaacu

SEQ ID NO: 1826223 - RNA, 19 nt, Artificial Sequence
  Description of Artificial Sequence: Synthetic oligonucleotide
  Sense strand starting at position 2963 of SEQ ID NO: 1563713
ucgugugguaauucuguuu

SEQ ID NO: 1826224 - RNA, 19 nt, Artificial Sequence
  Description of Artificial Sequence: Synthetic oligonucleotide
  Antisense strand to SEQ ID NO: 1826223
aaacagaauuaccacacga

SEQ ID NO: 1826225 - RNA, 19 nt, Artificial Sequence
  Description of Artificial Sequence: Synthetic oligonucleotide
  Sense strand starting at position 3016 of SEQ ID NO: 1563713
gcagcuguaaucuuucgca

SEQ ID NO: 1826226 - RNA, 19 nt, Artificial Sequence
  Description of Artificial Sequence: Synthetic oligonucleotide
  Antisense strand to SEQ ID NO: 1826225
ugcgaaagauuacagcugc

SEQ ID NO: 1826227 - RNA, 19 nt, Artificial Sequence
  Description of Artificial Sequence: Synthetic oligonucleotide
  Sense strand starting at position 3030 of SEQ ID NO: 1563713
ucgcauucccaacaguagu

SEQ ID NO: 1826228 - RNA, 19 nt, Artificial Sequence
  Description of Artificial Sequence: Synthetic oligonucleotide
  Antisense strand to SEQ ID NO: 1826227
acuacuguugggaaugcga

SEQ ID NO: 1826229 - RNA, 19 nt, Artificial Sequence
  Description of Artificial Sequence: Synthetic oligonucleotide
  Sense strand starting at position 3040 of SEQ ID NO: 1563713
aacaguagugcaugagagu

SEQ ID NO: 1826230 - RNA, 19 nt, Artificial Sequence
  Description of Artificial Sequence: Synthetic oligonucleotide
  Antisense strand to SEQ ID NO: 1826229
acucucaugcacuacuguu

SEQ ID NO: 1826231 - RNA, 19 nt, Artificial Sequence
  Description of Artificial Sequence: Synthetic oligonucleotide
  Sense strand starting at position 3049 of SEQ ID NO: 1563713
gcaugagagucccaauuuc

SEQ ID NO: 1826232 - RNA, 19 nt, Artificial Sequence
  Description of Artificial Sequence: Synthetic oligonucleotide
  Antisense strand to SEQ ID NO: 1826231
gaaauugggacucucaugc

SEQ ID NO: 1826233 - RNA, 19 nt, Artificial Sequence
  Description of Artificial Sequence: Synthetic oligonucleotide
  Sense strand starting at position 3219 of SEQ ID NO: 1563713
caaauugugugucuuggaa

SEQ ID NO: 1826234 - RNA, 19 nt, Artificial Sequence
  Description of Artificial Sequence: Synthetic oligonucleotide
  Antisense strand to SEQ ID NO: 1826233
uuccaagacacacaauuug

SEQ ID NO: 1826235 - RNA, 19 nt, Artificial Sequence
  Description of Artificial Sequence: Synthetic oligonucleotide
  Sense strand starting at position 3274 of SEQ ID NO: 1563713
agccucugagacgguaauu

SEQ ID NO: 1826236 - RNA, 19 nt, Artificial Sequence
  Description of Artificial Sequence: Synthetic oligonucleotide
  Antisense strand to SEQ ID NO: 1826235
aauuaccgucucagaggcu

SEQ ID NO: 1826237 - RNA, 19 nt, Artificial Sequence
  Description of Artificial Sequence: Synthetic oligonucleotide
  Sense strand starting at position 3489 of SEQ ID NO: 1563713
agugucggguauucaauua

SEQ ID NO: 1826238 - RNA, 19 nt, Artificial Sequence
  Description of Artificial Sequence: Synthetic oligonucleotide
  Antisense strand to SEQ ID NO: 1826237
uaauugaauacccgacacu

SEQ ID NO: 1826239 - RNA, 19 nt, Artificial Sequence
  Description of Artificial Sequence: Synthetic oligonucleotide
  Sense strand starting at position 3559 of SEQ ID NO: 1563713
guaccucugcuuuggagga

SEQ ID NO: 1826240 - RNA, 19 nt, Artificial Sequence
  Description of Artificial Sequence: Synthetic oligonucleotide
  Antisense strand to SEQ ID NO: 1826239
uccuccaaagcagagguac

SEQ ID NO: 1826241 - RNA, 19 nt, Artificial Sequence
  Description of Artificial Sequence: Synthetic oligonucleotide
  Sense strand starting at position 3563 of SEQ ID NO: 1563713
cucugcuuuggaggaaugu

SEQ ID NO: 1826242 - RNA, 19 nt, Artificial Sequence
  Description of Artificial Sequence: Synthetic oligonucleotide
  Antisense strand to SEQ ID NO: 1826241
acauuccuccaaagcagag

SEQ ID NO: 1826243 - RNA, 19 nt, Artificial Sequence
  Description of Artificial Sequence: Synthetic oligonucleotide
  Sense strand starting at position 3605 of SEQ ID NO: 1563713
uuuaauucgguugauugua

SEQ ID NO: 1826244 - RNA, 19 nt, Artificial Sequence
  Description of Artificial Sequence: Synthetic oligonucleotide
  Antisense strand to SEQ ID NO: 1826243
uacaaucaaccgaauuaaa

SEQ ID NO: 1826245 - RNA, 19 nt, Artificial Sequence
  Description of Artificial Sequence: Synthetic oligonucleotide
  Sense strand starting at position 3607 of SEQ ID NO: 1563713
uaauucgguugauuguauu

SEQ ID NO: 1826246 - RNA, 19 nt, Artificial Sequence
  Description of Artificial Sequence: Synthetic oligonucleotide
  Antisense strand to SEQ ID NO: 1826245
aauacaaucaaccgaauua

SEQ ID NO: 1826247 - RNA, 19 nt, Artificial Sequence
  Description of Artificial Sequence: Synthetic oligonucleotide
  Sense strand starting at position 3818 of SEQ ID NO: 1563713
ggagcuguugccuaaucca

SEQ ID NO: 1826248 - RNA, 19 nt, Artificial Sequence
  Description of Artificial Sequence: Synthetic oligonucleotide
  Antisense strand to SEQ ID NO: 1826247
uggauuaggcaacagcucc

SEQ ID NO: 1826249 - RNA, 19 nt, Artificial Sequence
  Description of Artificial Sequence: Synthetic oligonucleotide
  Sense strand starting at position 3927 of SEQ ID NO: 1563713
cuuuacaugaugugaggua

SEQ ID NO: 1826250 - RNA, 19 nt, Artificial Sequence
  Description of Artificial Sequence: Synthetic oligonucleotide
  Antisense strand to SEQ ID NO: 1826249
uaccucacaucauguaaag

SEQ ID NO: 1826251 - RNA, 19 nt, Artificial Sequence
  Description of Artificial Sequence: Synthetic oligonucleotide
  Sense strand starting at position 913 of SEQ ID NO: 1563714
uuacaauaguggucucaga

SEQ ID NO: 1826252 - RNA, 19 nt, Artificial Sequence
  Description of Artificial Sequence: Synthetic oligonucleotide
  Antisense strand to SEQ ID NO: 1826251
ucugagaccacuauuguaa

SEQ ID NO: 1826253 - RNA, 19 nt, Artificial Sequence
  Description of Artificial Sequence: Synthetic oligonucleotide
  Sense strand starting at position 1137 of SEQ ID NO: 1563714
cauccagucguaggagaau

SEQ ID NO: 1826254 - RNA, 19 nt, Artificial Sequence
  Description of Artificial Sequence: Synthetic oligonucleotide
  Antisense strand to SEQ ID NO: 1826253
auucuccuacgacuggaug

SEQ ID NO: 1826255 - RNA, 19 nt, Artificial Sequence
  Description of Artificial Sequence: Synthetic oligonucleotide
  Sense strand starting at position 1167 of SEQ ID NO: 1563714
agguaaacaucaguacauu

SEQ ID NO: 1826256 - RNA, 19 nt, Artificial Sequence
  Description of Artificial Sequence: Synthetic oligonucleotide
  Antisense strand to SEQ ID NO: 1826255
aauguacugauguuuaccu

SEQ ID NO: 1826257 - RNA, 19 nt, Artificial Sequence
  Description of Artificial Sequence: Synthetic oligonucleotide
  Sense strand starting at position 1311 of SEQ ID NO: 1563714
auauauuggaguugacagu

SEQ ID NO: 1826258 - RNA, 19 nt, Artificial Sequence
  Description of Artificial Sequence: Synthetic oligonucleotide
  Antisense strand to SEQ ID NO: 1826257
acugucaacuccaauauau

SEQ ID NO: 1826259 - RNA, 19 nt, Artificial Sequence
  Description of Artificial Sequence: Synthetic oligonucleotide
  Sense strand starting at position 2063 of SEQ ID NO: 1563714
ucgacaucugauuggauga

SEQ ID NO: 1826260 - RNA, 19 nt, Artificial Sequence
  Description of Artificial Sequence: Synthetic oligonucleotide
  Antisense strand to SEQ ID NO: 1826259
ucauccaaucagaugucga

SEQ ID NO: 1826261 - RNA, 19 nt, Artificial Sequence
  Description of Artificial Sequence: Synthetic oligonucleotide
  Sense strand starting at position 2064 of SEQ ID NO: 1563714
cgacaucugauuggaugaa

SEQ ID NO: 1826262 - RNA, 19 nt, Artificial Sequence
  Description of Artificial Sequence: Synthetic oligonucleotide
  Antisense strand to SEQ ID NO: 1826261
uucauccaaucagaugucg

SEQ ID NO: 1826263 - RNA, 19 nt, Artificial Sequence
  Description of Artificial Sequence: Synthetic oligonucleotide
  Sense strand starting at position 2068 of SEQ ID NO: 1563714
aucugauuggaugaagugu

SEQ ID NO: 1826264 - RNA, 19 nt, Artificial Sequence
  Description of Artificial Sequence: Synthetic oligonucleotide
  Antisense strand to SEQ ID NO: 1826263
acacuucauccaaucagau

SEQ ID NO: 1826265 - RNA, 19 nt, Artificial Sequence
  Description of Artificial Sequence: Synthetic oligonucleotide
  Sense strand starting at position 2142 of SEQ ID NO: 1563714
guugcuuggaaucauguca

SEQ ID NO: 1826266 - RNA, 19 nt, Artificial Sequence
  Description of Artificial Sequence: Synthetic oligonucleotide
  Antisense strand to SEQ ID NO: 1826265
ugacaugauuccaagcaac

SEQ ID NO: 1826267 - RNA, 19 nt, Artificial Sequence
  Description of Artificial Sequence: Synthetic oligonucleotide
  Sense strand starting at position 2149 of SEQ ID NO: 1563714
ggaaucaugucagccaauc

SEQ ID NO: 1826268 - RNA, 19 nt, Artificial Sequence
  Description of Artificial Sequence: Synthetic oligonucleotide
  Antisense strand to SEQ ID NO: 1826267
gauuggcugacaugauucc

SEQ ID NO: 1826269 - RNA, 19 nt, Artificial Sequence
  Description of Artificial Sequence: Synthetic oligonucleotide
  Sense strand starting at position 2398 of SEQ ID NO: 1563714
gugugugagaaacaugguu

SEQ ID NO: 1826270 - RNA, 19 nt, Artificial Sequence
  Description of Artificial Sequence: Synthetic oligonucleotide
  Antisense strand to SEQ ID NO: 1826269
aaccauguuucucacacac

SEQ ID NO: 1826271 - RNA, 19 nt, Artificial Sequence
  Description of Artificial Sequence: Synthetic oligonucleotide
  Sense strand starting at position 2403 of SEQ ID NO: 1563714
ugagaaacaugguuucuuu

SEQ ID NO: 1826272 - RNA, 19 nt, Artificial Sequence
  Description of Artificial Sequence: Synthetic oligonucleotide
  Antisense strand to SEQ ID NO: 1826271
aaagaaaccauguuucuca

SEQ ID NO: 1826273 - RNA, 19 nt, Artificial Sequence
  Description of Artificial Sequence: Synthetic oligonucleotide
  Sense strand starting at position 2406 of SEQ ID NO: 1563714
gaaacaugguuucuuuaug

SEQ ID NO: 1826274 - RNA, 19 nt, Artificial Sequence
  Description of Artificial Sequence: Synthetic oligonucleotide
  Antisense strand to SEQ ID NO: 1826273
cauaaagaaaccauguuuc

SEQ ID NO: 1826275 - RNA, 19 nt, Artificial Sequence
  Description of Artificial Sequence: Synthetic oligonucleotide
  Sense strand starting at position 2696 of SEQ ID NO: 1563714
aguuuacugcuguaaauaa

SEQ ID NO: 1826276 - RNA, 19 nt, Artificial Sequence
  Description of Artificial Sequence: Synthetic oligonucleotide
  Antisense strand to SEQ ID NO: 1826275
uuauuuacagcaguaaacu

SEQ ID NO: 1826277 - RNA, 19 nt, Artificial Sequence
  Description of Artificial Sequence: Synthetic oligonucleotide
  Sense strand starting at position 2981 of SEQ ID NO: 1563714
gugaguaugcaucacuuac

SEQ ID NO: 1826278 - RNA, 19 nt, Artificial Sequence
  Description of Artificial Sequence: Synthetic oligonucleotide
  Antisense strand to SEQ ID NO: 1826277
guaagugaugcauacucac

SEQ ID NO: 1826279 - RNA, 19 nt, Artificial Sequence
  Description of Artificial Sequence: Synthetic oligonucleotide
  Sense strand starting at position 2990 of SEQ ID NO: 1563714
caucacuuacgauggaagu

SEQ ID NO: 1826280 - RNA, 19 nt, Artificial Sequence
  Description of Artificial Sequence: Synthetic oligonucleotide
  Antisense strand to SEQ ID NO: 1826279
acuuccaucguaagugaug

SEQ ID NO: 1826281 - RNA, 19 nt, Artificial Sequence
  Description of Artificial Sequence: Synthetic oligonucleotide
  Sense strand starting at position 2991 of SEQ ID NO: 1563714
aucacuuacgauggaagua

SEQ ID NO: 1826282 - RNA, 19 nt, Artificial Sequence
  Description of Artificial Sequence: Synthetic oligonucleotide
  Antisense strand to SEQ ID NO: 1826281
uacuuccaucguaagugau

SEQ ID NO: 1826283 - RNA, 19 nt, Artificial Sequence
  Description of Artificial Sequence: Synthetic oligonucleotide
  Sense strand starting at position 2992 of SEQ ID NO: 1563714
ucacuuacgauggaaguau

SEQ ID NO: 1826284 - RNA, 19 nt, Artificial Sequence
  Description of Artificial Sequence: Synthetic oligonucleotide
  Antisense strand to SEQ ID NO: 1826283
auacuuccaucguaaguga

SEQ ID NO: 1826285 - RNA, 19 nt, Artificial Sequence
  Description of Artificial Sequence: Synthetic oligonucleotide
  Sense strand starting at position 3003 of SEQ ID NO: 1563714
ggaaguauccaaugagagc

SEQ ID NO: 1826286 - RNA, 19 nt, Artificial Sequence
  Description of Artificial Sequence: Synthetic oligonucleotide
  Antisense strand to SEQ ID NO: 1826285
gcucucauuggauacuucc

SEQ ID NO: 1826287 - RNA, 19 nt, Artificial Sequence
  Description of Artificial Sequence: Synthetic oligonucleotide
  Sense strand starting at position 3104 of SEQ ID NO: 1563714
gugaccaguccugaaccaa

SEQ ID NO: 1826288 - RNA, 19 nt, Artificial Sequence
  Description of Artificial Sequence: Synthetic oligonucleotide
  Antisense strand to SEQ ID NO: 1826287
uugguucaggacuggucac

SEQ ID NO: 1826289 - RNA, 19 nt, Artificial Sequence
  Description of Artificial Sequence: Synthetic oligonucleotide
  Sense strand starting at position 3221 of SEQ ID NO: 1563714
uguaauuguggugaauuaa

SEQ ID NO: 1826290 - RNA, 19 nt, Artificial Sequence
  Description of Artificial Sequence: Synthetic oligonucleotide
  Antisense strand to SEQ ID NO: 1826289
uuaauucaccacaauuaca

SEQ ID NO: 1826291 - RNA, 19 nt, Artificial Sequence
  Description of Artificial Sequence: Synthetic oligonucleotide
  Sense strand starting at position 3247 of SEQ ID NO: 1563714
aauccaaagcugugaguaa

SEQ ID NO: 1826292 - RNA, 19 nt, Artificial Sequence
  Description of Artificial Sequence: Synthetic oligonucleotide
  Antisense strand to SEQ ID NO: 1826291
uuacucacagcuuuggauu

SEQ ID NO: 1826293 - RNA, 19 nt, Artificial Sequence
  Description of Artificial Sequence: Synthetic oligonucleotide
  Sense strand starting at position 3251 of SEQ ID NO: 1563714
caaagcugugaguaagcau

SEQ ID NO: 1826294 - RNA, 19 nt, Artificial Sequence
  Description of Artificial Sequence: Synthetic oligonucleotide
  Antisense strand to SEQ ID NO: 1826293
augcuuacucacagcuuug

SEQ ID NO: 1826295 - RNA, 19 nt, Artificial Sequence
  Description of Artificial Sequence: Synthetic oligonucleotide
  Sense strand starting at position 3287 of SEQ ID NO: 1563714
ucauauuaugaaggcaagu

SEQ ID NO: 1826296 - RNA, 19 nt, Artificial Sequence
  Description of Artificial Sequence: Synthetic oligonucleotide
  Antisense strand to SEQ ID NO: 1826295
acuugccuucauaauauga

SEQ ID NO: 1826297 - RNA, 19 nt, Artificial Sequence
  Description of Artificial Sequence: Synthetic oligonucleotide
  Sense strand starting at position 3296 of SEQ ID NO: 1563714
gaaggcaaguucucugaaa

SEQ ID NO: 1826298 - RNA, 19 nt, Artificial Sequence
  Description of Artificial Sequence: Synthetic oligonucleotide
  Antisense strand to SEQ ID NO: 1826297
uuucagagaacuugccuuc

SEQ ID NO: 1826299 - RNA, 19 nt, Artificial Sequence
  Description of Artificial Sequence: Synthetic oligonucleotide
  Sense strand starting at position 3329 of SEQ ID NO: 1563714
aagagacuauuccugugaa

SEQ ID NO: 1826300 - RNA, 19 nt, Artificial Sequence
  Description of Artificial Sequence: Synthetic oligonucleotide
  Antisense strand to SEQ ID NO: 1826299
uucacaggaauagucucuu

SEQ ID NO: 1826301 - RNA, 19 nt, Artificial Sequence
  Description of Artificial Sequence: Synthetic oligonucleotide
  Sense strand starting at position 3391 of SEQ ID NO: 1563714
ggcgaaguuccagagaacu

SEQ ID NO: 1826302 - RNA, 19 nt, Artificial Sequence
  Description of Artificial Sequence: Synthetic oligonucleotide
  Antisense strand to SEQ ID NO: 1826301
aguucucuggaacuucgcc

SEQ ID NO: 1826303 - RNA, 19 nt, Artificial Sequence
  Description of Artificial Sequence: Synthetic oligonucleotide
  Sense strand starting at position 3430 of SEQ ID NO: 1563714
uagagaaaguucccaucga

SEQ ID NO: 1826304 - RNA, 19 nt, Artificial Sequence
  Description of Artificial Sequence: Synthetic oligonucleotide
  Antisense strand to SEQ ID NO: 1826303
ucgaugggaacuuucucua

SEQ ID NO: 1826305 - RNA, 19 nt, Artificial Sequence
  Description of Artificial Sequence: Synthetic oligonucleotide
  Sense strand starting at position 3490 of SEQ ID NO: 1563714
auuaguucugauugguuga

SEQ ID NO: 1826306 - RNA, 19 nt, Artificial Sequence
  Description of Artificial Sequence: Synthetic oligonucleotide
  Antisense strand to SEQ ID NO: 1826305
ucaaccaaucagaacuaau

SEQ ID NO: 1826307 - RNA, 19 nt, Artificial Sequence
  Description of Artificial Sequence: Synthetic oligonucleotide
  Sense strand starting at position 3501 of SEQ ID NO: 1563714
uugguugacucaguugauc

SEQ ID NO: 1826308 - RNA, 19 nt, Artificial Sequence
  Description of Artificial Sequence: Synthetic oligonucleotide
  Antisense strand to SEQ ID NO: 1826307
gaucaacugagucaaccaa

SEQ ID NO: 1826309 - RNA, 19 nt, Artificial Sequence
  Description of Artificial Sequence: Synthetic oligonucleotide
  Sense strand starting at position 3506 of SEQ ID NO: 1563714
ugacucaguugaucucuga

SEQ ID NO: 1826310 - RNA, 19 nt, Artificial Sequence
  Description of Artificial Sequence: Synthetic oligonucleotide
  Antisense strand to SEQ ID NO: 1826309
ucagagaucaacugaguca

SEQ ID NO: 1826311 - RNA, 19 nt, Artificial Sequence
  Description of Artificial Sequence: Synthetic oligonucleotide
  Sense strand starting at position 3513 of SEQ ID NO: 1563714
guugaucucugauugguca

SEQ ID NO: 1826312 - RNA, 19 nt, Artificial Sequence
  Description of Artificial Sequence: Synthetic oligonucleotide
  Antisense strand to SEQ ID NO: 1826311
ugaccaaucagagaucaac

SEQ ID NO: 1826313 - RNA, 19 nt, Artificial Sequence
  Description of Artificial Sequence: Synthetic oligonucleotide
  Sense strand starting at position 3514 of SEQ ID NO: 1563714
uugaucucugauuggucaa

SEQ ID NO: 1826314 - RNA, 19 nt, Artificial Sequence
  Description of Artificial Sequence: Synthetic oligonucleotide
  Antisense strand to SEQ ID NO: 1826313
uugaccaaucagagaucaa

SEQ ID NO: 1826315 - RNA, 19 nt, Artificial Sequence
  Description of Artificial Sequence: Synthetic oligonucleotide
  Sense strand starting at position 3516 of SEQ ID NO: 1563714
gaucucugauuggucaaca

SEQ ID NO: 1826316 - RNA, 19 nt, Artificial Sequence
  Description of Artificial Sequence: Synthetic oligonucleotide
  Antisense strand to SEQ ID NO: 1826315
uguugaccaaucagagauc

SEQ ID NO: 1826317 - RNA, 19 nt, Artificial Sequence
  Description of Artificial Sequence: Synthetic oligonucleotide
  Sense strand starting at position 3521 of SEQ ID NO: 1563714
cugauuggucaacacgacu

SEQ ID NO: 1826318 - RNA, 19 nt, Artificial Sequence
  Description of Artificial Sequence: Synthetic oligonucleotide
  Antisense strand to SEQ ID NO: 1826317
agucguguugaccaaucag

SEQ ID NO: 1826319 - RNA, 19 nt, Artificial Sequence
  Description of Artificial Sequence: Synthetic oligonucleotide
  Sense strand starting at position 3601 of SEQ ID NO: 1563714
ugcagaguuagauagaggu

SEQ ID NO: 1826320 - RNA, 19 nt, Artificial Sequence
  Description of Artificial Sequence: Synthetic oligonucleotide
  Antisense strand to SEQ ID NO: 1826319
accucuaucuaacucugca

SEQ ID NO: 1826321 - RNA, 19 nt, Artificial Sequence
  Description of Artificial Sequence: Synthetic oligonucleotide
  Sense strand starting at position 3648 of SEQ ID NO: 1563714
gugugagcucuagucugca

SEQ ID NO: 1826322 - RNA, 19 nt, Artificial Sequence
  Description of Artificial Sequence: Synthetic oligonucleotide
  Antisense strand to SEQ ID NO: 1826321
ugcagacuagagcucacac

SEQ ID NO: 1826323 - RNA, 19 nt, Artificial Sequence
  Description of Artificial Sequence: Synthetic oligonucleotide
  Sense strand starting at position 3674 of SEQ ID NO: 1563714
gcuugcuuggcucuaguuu

SEQ ID NO: 1826324 - RNA, 19 nt, Artificial Sequence
  Description of Artificial Sequence: Synthetic oligonucleotide
  Antisense strand to SEQ ID NO: 1826323
aaacuagagccaagcaagc

SEQ ID NO: 1826325 - RNA, 19 nt, Artificial Sequence
  Description of Artificial Sequence: Synthetic oligonucleotide
  Sense strand starting at position 3850 of SEQ ID NO: 1563714
aggcacaugugucugacaa

SEQ ID NO: 1826326 - RNA, 19 nt, Artificial Sequence
  Description of Artificial Sequence: Synthetic oligonucleotide
  Antisense strand to SEQ ID NO: 1826325
uugucagacacaugugccu

SEQ ID NO: 1826327 - RNA, 19 nt, Artificial Sequence
  Description of Artificial Sequence: Synthetic oligonucleotide
  Sense strand starting at position 3881 of SEQ ID NO: 1563714
augguaauuugagacaaua

SEQ ID NO: 1826328 - RNA, 19 nt, Artificial Sequence
  Description of Artificial Sequence: Synthetic oligonucleotide
  Antisense strand to SEQ ID NO: 1826327
uauugucucaaauuaccau

SEQ ID NO: 1826329 - RNA, 19 nt, Artificial Sequence
  Description of Artificial Sequence: Synthetic oligonucleotide
  Sense strand starting at position 3936 of SEQ ID NO: 1563714
augauuggcccugauucuu

SEQ ID NO: 1826330 - RNA, 19 nt, Artificial Sequence
  Description of Artificial Sequence: Synthetic oligonucleotide
  Antisense strand to SEQ ID NO: 1826329
aagaaucagggccaaucau

SEQ ID NO: 1826331 - RNA, 19 nt, Artificial Sequence
  Description of Artificial Sequence: Synthetic oligonucleotide
  Sense strand starting at position 72 of SEQ ID NO: 1563715
caugguuugacugagagug

SEQ ID NO: 1826332 - RNA, 19 nt, Artificial Sequence
  Description of Artificial Sequence: Synthetic oligonucleotide
  Antisense strand to SEQ ID NO: 1826331
cacucucagucaaaccaug

SEQ ID NO: 1826333 - RNA, 19 nt, Artificial Sequence
  Description of Artificial Sequence: Synthetic oligonucleotide
  Sense strand starting at position 82 of SEQ ID NO: 1563715
cugagagugucacccuuua

SEQ ID NO: 1826334 - RNA, 19 nt, Artificial Sequence
  Description of Artificial Sequence: Synthetic oligonucleotide
  Antisense strand to SEQ ID NO: 1826333
uaaagggugacacucucag

SEQ ID NO: 1826335 - RNA, 19 nt, Artificial Sequence
  Description of Artificial Sequence: Synthetic oligonucleotide
  Sense strand starting at position 119 of SEQ ID NO: 1563715
ggagaaagguuguuuauga

SEQ ID NO: 1826336 - RNA, 19 nt, Artificial Sequence
  Description of Artificial Sequence: Synthetic oligonucleotide
  Antisense strand to SEQ ID NO: 1826335
ucauaaacaaccuuucucc

SEQ ID NO: 1826337 - RNA, 19 nt, Artificial Sequence
  Description of Artificial Sequence: Synthetic oligonucleotide
  Sense strand starting at position 120 of SEQ ID NO: 1563715
gagaaagguuguuuaugag

SEQ ID NO: 1826338 - RNA, 19 nt, Artificial Sequence
  Description of Artificial Sequence: Synthetic oligonucleotide
  Antisense strand to SEQ ID NO: 1826337
cucauaaacaaccuuucuc

SEQ ID NO: 1826339 - RNA, 19 nt, Artificial Sequence
  Description of Artificial Sequence: Synthetic oligonucleotide
  Sense strand starting at position 680 of SEQ ID NO: 1563715
aaugacuguugcucauaga

SEQ ID NO: 1826340 - RNA, 19 nt, Artificial Sequence
  Description of Artificial Sequence: Synthetic oligonucleotide
  Antisense strand to SEQ ID NO: 1826339
ucuaugagcaacagucauu

SEQ ID NO: 1826341 - RNA, 19 nt, Artificial Sequence
  Description of Artificial Sequence: Synthetic oligonucleotide
  Sense strand starting at position 785 of SEQ ID NO: 1563715
ggaaguaacgaagguuucu

SEQ ID NO: 1826342 - RNA, 19 nt, Artificial Sequence
  Description of Artificial Sequence: Synthetic oligonucleotide
  Antisense strand to SEQ ID NO: 1826341
agaaaccuucguuacuucc

SEQ ID NO: 1826343 - RNA, 19 nt, Artificial Sequence
  Description of Artificial Sequence: Synthetic oligonucleotide
  Sense strand starting at position 820 of SEQ ID NO: 1563715
aaagauuaucgucauggca

SEQ ID NO: 1826344 - RNA, 19 nt, Artificial Sequence
  Description of Artificial Sequence: Synthetic oligonucleotide
  Antisense strand to SEQ ID NO: 1826343
ugccaugacgauaaucuuu

SEQ ID NO: 1826345 - RNA, 19 nt, Artificial Sequence
  Description of Artificial Sequence: Synthetic oligonucleotide
  Sense strand starting at position 852 of SEQ ID NO: 1563715
cugcaauagugaucucaga

SEQ ID NO: 1826346 - RNA, 19 nt, Artificial Sequence
  Description of Artificial Sequence: Synthetic oligonucleotide
  Antisense strand to SEQ ID NO: 1826345
ucugagaucacuauugcag

SEQ ID NO: 1826347 - RNA, 19 nt, Artificial Sequence
  Description of Artificial Sequence: Synthetic oligonucleotide
  Sense strand starting at position 861 of SEQ ID NO: 1563715
ugaucucagagucgaggaa

SEQ ID NO: 1826348 - RNA, 19 nt, Artificial Sequence
  Description of Artificial Sequence: Synthetic oligonucleotide
  Antisense strand to SEQ ID NO: 1826347
uuccucgacucugagauca

SEQ ID NO: 1826349 - RNA, 19 nt, Artificial Sequence
  Description of Artificial Sequence: Synthetic oligonucleotide
  Sense strand starting at position 952 of SEQ ID NO: 1563715
uuuacauggauucgugaug

SEQ ID NO: 1826350 - RNA, 19 nt, Artificial Sequence
  Description of Artificial Sequence: Synthetic oligonucleotide
  Antisense strand to SEQ ID NO: 1826349
caucacgaauccauguaaa

SEQ ID NO: 1826351 - RNA, 19 nt, Artificial Sequence
  Description of Artificial Sequence: Synthetic oligonucleotide
  Sense strand starting at position 1043 of SEQ ID NO: 1563715
uauggcauacagugaaguu

SEQ ID NO: 1826352 - RNA, 19 nt, Artificial Sequence
  Description of Artificial Sequence: Synthetic oligonucleotide
  Antisense strand to SEQ ID NO: 1826351
aacuucacuguaugccaua

SEQ ID NO: 1826353 - RNA, 19 nt, Artificial Sequence
  Description of Artificial Sequence: Synthetic oligonucleotide
  Sense strand starting at position 1106 of SEQ ID NO: 1563715
agguaaagaucagugcagu

SEQ ID NO: 1826354 - RNA, 19 nt, Artificial Sequence
  Description of Artificial Sequence: Synthetic oligonucleotide
  Antisense strand to SEQ ID NO: 1826353
acugcacugaucuuuaccu

SEQ ID NO: 1826355 - RNA, 19 nt, Artificial Sequence
  Description of Artificial Sequence: Synthetic oligonucleotide
  Sense strand starting at position 1109 of SEQ ID NO: 1563715
uaaagaucagugcaguaau

SEQ ID NO: 1826356 - RNA, 19 nt, Artificial Sequence
  Description of Artificial Sequence: Synthetic oligonucleotide
  Antisense strand to SEQ ID NO: 1826355
auuacugcacugaucuuua

SEQ ID NO: 1826357 - RNA, 19 nt, Artificial Sequence
  Description of Artificial Sequence: Synthetic oligonucleotide
  Sense strand starting at position 1112 of SEQ ID NO: 1563715
agaucagugcaguaauaau

SEQ ID NO: 1826358 - RNA, 19 nt, Artificial Sequence
  Description of Artificial Sequence: Synthetic oligonucleotide
  Antisense strand to SEQ ID NO: 1826357
auuauuacugcacugaucu

SEQ ID NO: 1826359 - RNA, 19 nt, Artificial Sequence
  Description of Artificial Sequence: Synthetic oligonucleotide
  Sense strand starting at position 1135 of SEQ ID NO: 1563715
ccauauagauagccuagaa

SEQ ID NO: 1826360 - RNA, 19 nt, Artificial Sequence
  Description of Artificial Sequence: Synthetic oligonucleotide
  Antisense strand to SEQ ID NO: 1826359
uucuaggcuaucuauaugg

SEQ ID NO: 1826361 - RNA, 19 nt, Artificial Sequence
  Description of Artificial Sequence: Synthetic oligonucleotide
  Sense strand starting at position 1262 of SEQ ID NO: 1563715
ugacaauguuuaguacuga

SEQ ID NO: 1826362 - RNA, 19 nt, Artificial Sequence
  Description of Artificial Sequence: Synthetic oligonucleotide
  Antisense strand to SEQ ID NO: 1826361
ucaguacuaaacauuguca

SEQ ID NO: 1826363 - RNA, 19 nt, Artificial Sequence
  Description of Artificial Sequence: Synthetic oligonucleotide
  Sense strand starting at position 1618 of SEQ ID NO: 1563715
guggcgaugcgguccaaua

SEQ ID NO: 1826364 - RNA, 19 nt, Artificial Sequence
  Description of Artificial Sequence: Synthetic oligonucleotide
  Antisense strand to SEQ ID NO: 1826363
uauuggaccgcaucgccac

SEQ ID NO: 1826365 - RNA, 19 nt, Artificial Sequence
  Description of Artificial Sequence: Synthetic oligonucleotide
  Sense strand starting at position 1996 of SEQ ID NO: 1563715
ucacgucugauuggaugaa

SEQ ID NO: 1826366 - RNA, 19 nt, Artificial Sequence
  Description of Artificial Sequence: Synthetic oligonucleotide
  Antisense strand to SEQ ID NO: 1826365
uucauccaaucagacguga

SEQ ID NO: 1826367 - RNA, 19 nt, Artificial Sequence
  Description of Artificial Sequence: Synthetic oligonucleotide
  Sense strand starting at position 2000 of SEQ ID NO: 1563715
gucugauuggaugaagugu

SEQ ID NO: 1826368 - RNA, 19 nt, Artificial Sequence
  Description of Artificial Sequence: Synthetic oligonucleotide
  Antisense strand to SEQ ID NO: 1826367
acacuucauccaaucagac

SEQ ID NO: 1826369 - RNA, 19 nt, Artificial Sequence
  Description of Artificial Sequence: Synthetic oligonucleotide
  Sense strand starting at position 2268 of SEQ ID NO: 1563715
agcucaugaucccugagga

SEQ ID NO: 1826370 - RNA, 19 nt, Artificial Sequence
  Description of Artificial Sequence: Synthetic oligonucleotide
  Antisense strand to SEQ ID NO: 1826369
uccucagggaucaugagcu

SEQ ID NO: 1826371 - RNA, 19 nt, Artificial Sequence
  Description of Artificial Sequence: Synthetic oligonucleotide
  Sense strand starting at position 2269 of SEQ ID NO: 1563715
gcucaugaucccugaggag

SEQ ID NO: 1826372 - RNA, 19 nt, Artificial Sequence
  Description of Artificial Sequence: Synthetic oligonucleotide
  Antisense strand to SEQ ID NO: 1826371
cuccucagggaucaugagc

SEQ ID NO: 1826373 - RNA, 19 nt, Artificial Sequence
  Description of Artificial Sequence: Synthetic oligonucleotide
  Sense strand starting at position 2309 of SEQ ID NO: 1563715
guccauuaugccggaagaa

SEQ ID NO: 1826374 - RNA, 19 nt, Artificial Sequence
  Description of Artificial Sequence: Synthetic oligonucleotide
  Antisense strand to SEQ ID NO: 1826373
uucuuccggcauaauggac

SEQ ID NO: 1826375 - RNA, 19 nt, Artificial Sequence
  Description of Artificial Sequence: Synthetic oligonucleotide
  Sense strand starting at position 2310 of SEQ ID NO: 1563715
uccauuaugccggaagaau

SEQ ID NO: 1826376 - RNA, 19 nt, Artificial Sequence
  Description of Artificial Sequence: Synthetic oligonucleotide
  Antisense strand to SEQ ID NO: 1826375
auucuuccggcauaaugga

SEQ ID NO: 1826377 - RNA, 19 nt, Artificial Sequence
  Description of Artificial Sequence: Synthetic oligonucleotide
  Sense strand starting at position 2373 of SEQ ID NO: 1563715
acuguuauccugggcuaag

SEQ ID NO: 1826378 - RNA, 19 nt, Artificial Sequence
  Description of Artificial Sequence: Synthetic oligonucleotide
  Antisense strand to SEQ ID NO: 1826377
cuuagcccaggauaacagu

SEQ ID NO: 1826379 - RNA, 19 nt, Artificial Sequence
  Description of Artificial Sequence: Synthetic oligonucleotide
  Sense strand starting at position 2406 of SEQ ID NO: 1563715
gcaggaacucccugacaug

SEQ ID NO: 1826380 - RNA, 19 nt, Artificial Sequence
  Description of Artificial Sequence: Synthetic oligonucleotide
  Antisense strand to SEQ ID NO: 1826379
caugucagggaguuccugc

SEQ ID NO: 1826381 - RNA, 19 nt, Artificial Sequence
  Description of Artificial Sequence: Synthetic oligonucleotide
  Sense strand starting at position 2474 of SEQ ID NO: 1563715
ugaucaacaucuuccguga

SEQ ID NO: 1826382 - RNA, 19 nt, Artificial Sequence
  Description of Artificial Sequence: Synthetic oligonucleotide
  Antisense strand to SEQ ID NO: 1826381
ucacggaagauguugauca

SEQ ID NO: 1826383 - RNA, 19 nt, Artificial Sequence
  Description of Artificial Sequence: Synthetic oligonucleotide
  Sense strand starting at position 2477 of SEQ ID NO: 1563715
ucaacaucuuccgugaauc

SEQ ID NO: 1826384 - RNA, 19 nt, Artificial Sequence
  Description of Artificial Sequence: Synthetic oligonucleotide
  Antisense strand to SEQ ID NO: 1826383
gauucacggaagauguuga

SEQ ID NO: 1826385 - RNA, 19 nt, Artificial Sequence
  Description of Artificial Sequence: Synthetic oligonucleotide
  Sense strand starting at position 2479 of SEQ ID NO: 1563715
aacaucuuccgugaaucag

SEQ ID NO: 1826386 - RNA, 19 nt, Artificial Sequence
  Description of Artificial Sequence: Synthetic oligonucleotide
  Antisense strand to SEQ ID NO: 1826385
cugauucacggaagauguu

SEQ ID NO: 1826387 - RNA, 19 nt, Artificial Sequence
  Description of Artificial Sequence: Synthetic oligonucleotide
  Sense strand starting at position 2582 of SEQ ID NO: 1563715
cgacaucgaccagguuuaa

SEQ ID NO: 1826388 - RNA, 19 nt, Artificial Sequence
  Description of Artificial Sequence: Synthetic oligonucleotide
  Antisense strand to SEQ ID NO: 1826387
uuaaaccuggucgaugucg

SEQ ID NO: 1826389 - RNA, 19 nt, Artificial Sequence
  Description of Artificial Sequence: Synthetic oligonucleotide
  Sense strand starting at position 2893 of SEQ ID NO: 1563715
aauaaaggucaucgaugaa

SEQ ID NO: 1826390 - RNA, 19 nt, Artificial Sequence
  Description of Artificial Sequence: Synthetic oligonucleotide
  Antisense strand to SEQ ID NO: 1826389
uucaucgaugaccuuuauu

SEQ ID NO: 1826391 - RNA, 19 nt, Artificial Sequence
  Description of Artificial Sequence: Synthetic oligonucleotide
  Sense strand starting at position 2896 of SEQ ID NO: 1563715
aaaggucaucgaugaacug

SEQ ID NO: 1826392 - RNA, 19 nt, Artificial Sequence
  Description of Artificial Sequence: Synthetic oligonucleotide
  Antisense strand to SEQ ID NO: 1826391
caguucaucgaugaccuuu

SEQ ID NO: 1826393 - RNA, 19 nt, Artificial Sequence
  Description of Artificial Sequence: Synthetic oligonucleotide
  Sense strand starting at position 2935 of SEQ ID NO: 1563715
ucaaguguauuuccuguca

SEQ ID NO: 1826394 - RNA, 19 nt, Artificial Sequence
  Description of Artificial Sequence: Synthetic oligonucleotide
  Antisense strand to SEQ ID NO: 1826393
ugacaggaaauacacuuga

SEQ ID NO: 1826395 - RNA, 19 nt, Artificial Sequence
  Description of Artificial Sequence: Synthetic oligonucleotide
  Sense strand starting at position 2948 of SEQ ID NO: 1563715
cugucaugucuuuagcaaa

SEQ ID NO: 1826396 - RNA, 19 nt, Artificial Sequence
  Description of Artificial Sequence: Synthetic oligonucleotide
  Antisense strand to SEQ ID NO: 1826395
uuugcuaaagacaugacag

SEQ ID NO: 1826397 - RNA, 19 nt, Artificial Sequence
  Description of Artificial Sequence: Synthetic oligonucleotide
  Sense strand starting at position 3031 of SEQ ID NO: 1563715
guuagauaagaucguauau

SEQ ID NO: 1826398 - RNA, 19 nt, Artificial Sequence
  Description of Artificial Sequence: Synthetic oligonucleotide
  Antisense strand to SEQ ID NO: 1826397
auauacgaucuuaucuaac

SEQ ID NO: 1826399 - RNA, 19 nt, Artificial Sequence
  Description of Artificial Sequence: Synthetic oligonucleotide
  Sense strand starting at position 3060 of SEQ ID NO: 1563715
gugacugaacucuaguaca

SEQ ID NO: 1826400 - RNA, 19 nt, Artificial Sequence
  Description of Artificial Sequence: Synthetic oligonucleotide
  Antisense strand to SEQ ID NO: 1826399
uguacuagaguucagucac

SEQ ID NO: 1826401 - RNA, 19 nt, Artificial Sequence
  Description of Artificial Sequence: Synthetic oligonucleotide
  Sense strand starting at position 3207 of SEQ ID NO: 1563715
ucaguaagucagcaugaua

SEQ ID NO: 1826402 - RNA, 19 nt, Artificial Sequence
  Description of Artificial Sequence: Synthetic oligonucleotide
  Antisense strand to SEQ ID NO: 1826401
uaucaugcugacuuacuga

SEQ ID NO: 1826403 - RNA, 19 nt, Artificial Sequence
  Description of Artificial Sequence: Synthetic oligonucleotide
  Sense strand starting at position 3260 of SEQ ID NO: 1563715
gggaaagagccacaucguu

SEQ ID NO: 1826404 - RNA, 19 nt, Artificial Sequence
  Description of Artificial Sequence: Synthetic oligonucleotide
  Antisense strand to SEQ ID NO: 1826403
aacgauguggcucuuuccc

SEQ ID NO: 1826405 - RNA, 19 nt, Artificial Sequence
  Description of Artificial Sequence: Synthetic oligonucleotide
  Sense strand starting at position 3439 of SEQ ID NO: 1563715
ggauguucccaucaucuac

SEQ ID NO: 1826406 - RNA, 19 nt, Artificial Sequence
  Description of Artificial Sequence: Synthetic oligonucleotide
  Antisense strand to SEQ ID NO: 1826405
guagaugaugggaacaucc

SEQ ID NO: 1826407 - RNA, 19 nt, Artificial Sequence
  Description of Artificial Sequence: Synthetic oligonucleotide
  Sense strand starting at position 3448 of SEQ ID NO: 1563715
caucaucuacgugaugcaa

SEQ ID NO: 1826408 - RNA, 19 nt, Artificial Sequence
  Description of Artificial Sequence: Synthetic oligonucleotide
  Antisense strand to SEQ ID NO: 1826407
uugcaucacguagaugaug

SEQ ID NO: 1826409 - RNA, 19 nt, Artificial Sequence
  Description of Artificial Sequence: Synthetic oligonucleotide
  Sense strand starting at position 3955 of SEQ ID NO: 1563715
aggcauuaagccuaguaac

SEQ ID NO: 1826410 - RNA, 19 nt, Artificial Sequence
  Description of Artificial Sequence: Synthetic oligonucleotide
  Antisense strand to SEQ ID NO: 1826409
guuacuaggcuuaaugccu

SEQ ID NO: 1826411 - RNA, 19 nt, Artificial Sequence
  Description of Artificial Sequence: Synthetic oligonucleotide
  Sense strand starting at position 495 of SEQ ID NO: 1563716
ggaagaaacugaugcauua

SEQ ID NO: 1826412 - RNA, 19 nt, Artificial Sequence
  Description of Artificial Sequence: Synthetic oligonucleotide
  Antisense strand to SEQ ID NO: 1826411
uaaugcaucaguuucuucc

SEQ ID NO: 1826413 - RNA, 19 nt, Artificial Sequence
  Description of Artificial Sequence: Synthetic oligonucleotide
  Sense strand starting at position 504 of SEQ ID NO: 1563716
ugaugcauuaccggguaca

SEQ ID NO: 1826414 - RNA, 19 nt, Artificial Sequence
  Description of Artificial Sequence: Synthetic oligonucleotide
  Antisense strand to SEQ ID NO: 1826413
uguacccgguaaugcauca

SEQ ID NO: 1826415 - RNA, 19 nt, Artificial Sequence
  Description of Artificial Sequence: Synthetic oligonucleotide
  Sense strand starting at position 507 of SEQ ID NO: 1563716
ugcauuaccggguacacau

SEQ ID NO: 1826416 - RNA, 19 nt, Artificial Sequence
  Description of Artificial Sequence: Synthetic oligonucleotide
  Antisense strand to SEQ ID NO: 1826415
auguguacccgguaaugca

SEQ ID NO: 1826417 - RNA, 19 nt, Artificial Sequence
  Description of Artificial Sequence: Synthetic oligonucleotide
  Sense strand starting at position 564 of SEQ ID NO: 1563716
acagcaguuccugaauugu

SEQ ID NO: 1826418 - RNA, 19 nt, Artificial Sequence
  Description of Artificial Sequence: Synthetic oligonucleotide
  Antisense strand to SEQ ID NO: 1826417
acaauucaggaacugcugu

SEQ ID NO: 1826419 - RNA, 19 nt, Artificial Sequence
  Description of Artificial Sequence: Synthetic oligonucleotide
  Sense strand starting at position 573 of SEQ ID NO: 1563716
ccugaauugucuuuggcuc

SEQ ID NO: 1826420 - RNA, 19 nt, Artificial Sequence
  Description of Artificial Sequence: Synthetic oligonucleotide
  Antisense strand to SEQ ID NO: 1826419
gagccaaagacaauucagg

SEQ ID NO: 1826421 - RNA, 19 nt, Artificial Sequence
  Description of Artificial Sequence: Synthetic oligonucleotide
  Sense strand starting at position 574 of SEQ ID NO: 1563716
cugaauugucuuuggcucu

SEQ ID NO: 1826422 - RNA, 19 nt, Artificial Sequence
  Description of Artificial Sequence: Synthetic oligonucleotide
  Antisense strand to SEQ ID NO: 1826421
agagccaaagacaauucag

SEQ ID NO: 1826423 - RNA, 19 nt, Artificial Sequence
  Description of Artificial Sequence: Synthetic oligonucleotide
  Sense strand starting at position 580 of SEQ ID NO: 1563716
ugucuuuggcucugugaua

SEQ ID NO: 1826424 - RNA, 19 nt, Artificial Sequence
  Description of Artificial Sequence: Synthetic oligonucleotide
  Antisense strand to SEQ ID NO: 1826423
uaucacagagccaaagaca

SEQ ID NO: 1826425 - RNA, 19 nt, Artificial Sequence
  Description of Artificial Sequence: Synthetic oligonucleotide
  Sense strand starting at position 581 of SEQ ID NO: 1563716
gucuuuggcucugugauau

SEQ ID NO: 1826426 - RNA, 19 nt, Artificial Sequence
  Description of Artificial Sequence: Synthetic oligonucleotide
  Antisense strand to SEQ ID NO: 1826425
auaucacagagccaaagac

SEQ ID NO: 1826427 - RNA, 19 nt, Artificial Sequence
  Description of Artificial Sequence: Synthetic oligonucleotide
  Sense strand starting at position 587 of SEQ ID NO: 1563716
ggcucugugauauacagac

SEQ ID NO: 1826428 - RNA, 19 nt, Artificial Sequence
  Description of Artificial Sequence: Synthetic oligonucleotide
  Antisense strand to SEQ ID NO: 1826427
gucuguauaucacagagcc

SEQ ID NO: 1826429 - RNA, 19 nt, Artificial Sequence
  Description of Artificial Sequence: Synthetic oligonucleotide
  Sense strand starting at position 989 of SEQ ID NO: 1563716
cccaguccucaguguacau

SEQ ID NO: 1826430 - RNA, 19 nt, Artificial Sequence
  Description of Artificial Sequence: Synthetic oligonucleotide
  Antisense strand to SEQ ID NO: 1826429
auguacacugaggacuggg

SEQ ID NO: 1826431 - RNA, 19 nt, Artificial Sequence
  Description of Artificial Sequence: Synthetic oligonucleotide
  Sense strand starting at position 1160 of SEQ ID NO: 1563716
ggagcaacgccugagacua

SEQ ID NO: 1826432 - RNA, 19 nt, Artificial Sequence
  Description of Artificial Sequence: Synthetic oligonucleotide
  Antisense strand to SEQ ID NO: 1826431
uagucucaggcguugcucc

SEQ ID NO: 1826433 - RNA, 19 nt, Artificial Sequence
  Description of Artificial Sequence: Synthetic oligonucleotide
  Sense strand starting at position 1168 of SEQ ID NO: 1563716
gccugagacuaagacuuaa

SEQ ID NO: 1826434 - RNA, 19 nt, Artificial Sequence
  Description of Artificial Sequence: Synthetic oligonucleotide
  Antisense strand to SEQ ID NO: 1826433
uuaagucuuagucucaggc

SEQ ID NO: 1826435 - RNA, 19 nt, Artificial Sequence
  Description of Artificial Sequence: Synthetic oligonucleotide
  Sense strand starting at position 1796 of SEQ ID NO: 1563716
guggcuuucugggccaaca

SEQ ID NO: 1826436 - RNA, 19 nt, Artificial Sequence
  Description of Artificial Sequence: Synthetic oligonucleotide
  Antisense strand to SEQ ID NO: 1826435
uguuggcccagaaagccac

SEQ ID NO: 1826437 - RNA, 19 nt, Artificial Sequence
  Description of Artificial Sequence: Synthetic oligonucleotide
  Sense strand starting at position 2320 of SEQ ID NO: 1563716
gaaugaugaugcguugaag

SEQ ID NO: 1826438 - RNA, 19 nt, Artificial Sequence
  Description of Artificial Sequence: Synthetic oligonucleotide
  Antisense strand to SEQ ID NO: 1826437
cuucaacgcaucaucauuc

SEQ ID NO: 1826439 - RNA, 19 nt, Artificial Sequence
  Description of Artificial Sequence: Synthetic oligonucleotide
  Sense strand starting at position 2323 of SEQ ID NO: 1563716
ugaugaugcguugaagcga

SEQ ID NO: 1826440 - RNA, 19 nt, Artificial Sequence
  Description of Artificial Sequence: Synthetic oligonucleotide
  Antisense strand to SEQ ID NO: 1826439
ucgcuucaacgcaucauca

SEQ ID NO: 1826441 - RNA, 19 nt, Artificial Sequence
  Description of Artificial Sequence: Synthetic oligonucleotide
  Sense strand starting at position 2546 of SEQ ID NO: 1563716
ccagcugugugccuuugaa

SEQ ID NO: 1826442 - RNA, 19 nt, Artificial Sequence
  Description of Artificial Sequence: Synthetic oligonucleotide
  Antisense strand to SEQ ID NO: 1826441
uucaaaggcacacagcugg

SEQ ID NO: 1826443 - RNA, 19 nt, Artificial Sequence
  Description of Artificial Sequence: Synthetic oligonucleotide
  Sense strand starting at position 2648 of SEQ ID NO: 1563716
gauggcaggcgguaauaau

SEQ ID NO: 1826444 - RNA, 19 nt, Artificial Sequence
  Description of Artificial Sequence: Synthetic oligonucleotide
  Antisense strand to SEQ ID NO: 1826443
auuauuaccgccugccauc

SEQ ID NO: 1826445 - RNA, 19 nt, Artificial Sequence
  Description of Artificial Sequence: Synthetic oligonucleotide
  Sense strand starting at position 2657 of SEQ ID NO: 1563716
cgguaauaauuccugugga

SEQ ID NO: 1826446 - RNA, 19 nt, Artificial Sequence
  Description of Artificial Sequence: Synthetic oligonucleotide
  Antisense strand to SEQ ID NO: 1826445
uccacaggaauuauuaccg

SEQ ID NO: 1826447 - RNA, 19 nt, Artificial Sequence
  Description of Artificial Sequence: Synthetic oligonucleotide
  Sense strand starting at position 2700 of SEQ ID NO: 1563716
ugcgaagaaccacguaaau

SEQ ID NO: 1826448 - RNA, 19 nt, Artificial Sequence
  Description of Artificial Sequence: Synthetic oligonucleotide
  Antisense strand to SEQ ID NO: 1826447
auuuacgugguucuucgca

SEQ ID NO: 1826449 - RNA, 19 nt, Artificial Sequence
  Description of Artificial Sequence: Synthetic oligonucleotide
  Sense strand starting at position 2709 of SEQ ID NO: 1563716
ccacguaaaugcucacuau

SEQ ID NO: 1826450 - RNA, 19 nt, Artificial Sequence
  Description of Artificial Sequence: Synthetic oligonucleotide
  Antisense strand to SEQ ID NO: 1826449
auagugagcauuuacgugg

SEQ ID NO: 1826451 - RNA, 19 nt, Artificial Sequence
  Description of Artificial Sequence: Synthetic oligonucleotide
  Sense strand starting at position 2712 of SEQ ID NO: 1563716
cguaaaugcucacuauugu

SEQ ID NO: 1826452 - RNA, 19 nt, Artificial Sequence
  Description of Artificial Sequence: Synthetic oligonucleotide
  Antisense strand to SEQ ID NO: 1826451
acaauagugagcauuuacg

SEQ ID NO: 1826453 - RNA, 19 nt, Artificial Sequence
  Description of Artificial Sequence: Synthetic oligonucleotide
  Sense strand starting at position 2713 of SEQ ID NO: 1563716
guaaaugcucacuauugua

SEQ ID NO: 1826454 - RNA, 19 nt, Artificial Sequence
  Description of Artificial Sequence: Synthetic oligonucleotide
  Antisense strand to SEQ ID NO: 1826453
uacaauagugagcauuuac

SEQ ID NO: 1826455 - RNA, 19 nt, Artificial Sequence
  Description of Artificial Sequence: Synthetic oligonucleotide
  Sense strand starting at position 2835 of SEQ ID NO: 1563716
acucaaugcgucugcaaug

SEQ ID NO: 1826456 - RNA, 19 nt, Artificial Sequence
  Description of Artificial Sequence: Synthetic oligonucleotide
  Antisense strand to SEQ ID NO: 1826455
cauugcagacgcauugagu

SEQ ID NO: 1826457 - RNA, 19 nt, Artificial Sequence
  Description of Artificial Sequence: Synthetic oligonucleotide
  Sense strand starting at position 2836 of SEQ ID NO: 1563716
cucaaugcgucugcaauga

SEQ ID NO: 1826458 - RNA, 19 nt, Artificial Sequence
  Description of Artificial Sequence: Synthetic oligonucleotide
  Antisense strand to SEQ ID NO: 1826457
ucauugcagacgcauugag

SEQ ID NO: 1826459 - RNA, 19 nt, Artificial Sequence
  Description of Artificial Sequence: Synthetic oligonucleotide
  Sense strand starting at position 2840 of SEQ ID NO: 1563716
augcgucugcaaugaaaua

SEQ ID NO: 1826460 - RNA, 19 nt, Artificial Sequence
  Description of Artificial Sequence: Synthetic oligonucleotide
  Antisense strand to SEQ ID NO: 1826459
uauuucauugcagacgcau

SEQ ID NO: 1826461 - RNA, 19 nt, Artificial Sequence
  Description of Artificial Sequence: Synthetic oligonucleotide
  Sense strand starting at position 2841 of SEQ ID NO: 1563716
ugcgucugcaaugaaauau

SEQ ID NO: 1826462 - RNA, 19 nt, Artificial Sequence
  Description of Artificial Sequence: Synthetic oligonucleotide
  Antisense strand to SEQ ID NO: 1826461
auauuucauugcagacgca

SEQ ID NO: 1826463 - RNA, 19 nt, Artificial Sequence
  Description of Artificial Sequence: Synthetic oligonucleotide
  Sense strand starting at position 3057 of SEQ ID NO: 1563716
gcaagucuauagucaggga

SEQ ID NO: 1826464 - RNA, 19 nt, Artificial Sequence
  Description of Artificial Sequence: Synthetic oligonucleotide
  Antisense strand to SEQ ID NO: 1826463
ucccugacuauagacuugc

SEQ ID NO: 1826465 - RNA, 19 nt, Artificial Sequence
  Description of Artificial Sequence: Synthetic oligonucleotide
  Sense strand starting at position 3216 of SEQ ID NO: 1563716
agcgaagugccucaagguu

SEQ ID NO: 1826466 - RNA, 19 nt, Artificial Sequence
  Description of Artificial Sequence: Synthetic oligonucleotide
  Antisense strand to SEQ ID NO: 1826465
aaccuugaggcacuucgcu

SEQ ID NO: 1826467 - RNA, 19 nt, Artificial Sequence
  Description of Artificial Sequence: Synthetic oligonucleotide
  Sense strand starting at position 3277 of SEQ ID NO: 1563716
guagcugagggcugucaaa

SEQ ID NO: 1826468 - RNA, 19 nt, Artificial Sequence
  Description of Artificial Sequence: Synthetic oligonucleotide
  Antisense strand to SEQ ID NO: 1826467
uuugacagcccucagcuac

SEQ ID NO: 1826469 - RNA, 19 nt, Artificial Sequence
  Description of Artificial Sequence: Synthetic oligonucleotide
  Sense strand starting at position 3290 of SEQ ID NO: 1563716
gucaaaggcuuugggauuu

SEQ ID NO: 1826470 - RNA, 19 nt, Artificial Sequence
  Description of Artificial Sequence: Synthetic oligonucleotide
  Antisense strand to SEQ ID NO: 1826469
aaaucccaaagccuuugac

SEQ ID NO: 1826471 - RNA, 19 nt, Artificial Sequence
  Description of Artificial Sequence: Synthetic oligonucleotide
  Sense strand starting at position 3424 of SEQ ID NO: 1563716
guggaucuuuccuaggacu

SEQ ID NO: 1826472 - RNA, 19 nt, Artificial Sequence
  Description of Artificial Sequence: Synthetic oligonucleotide
  Antisense strand to SEQ ID NO: 1826471
aguccuaggaaagauccac

SEQ ID NO: 1826473 - RNA, 19 nt, Artificial Sequence
  Description of Artificial Sequence: Synthetic oligonucleotide
  Sense strand starting at position 3532 of SEQ ID NO: 1563716
gcuccuguguacucuggaa

SEQ ID NO: 1826474 - RNA, 19 nt, Artificial Sequence
  Description of Artificial Sequence: Synthetic oligonucleotide
  Antisense strand to SEQ ID NO: 1826473
uuccagaguacacaggagc

SEQ ID NO: 1826475 - RNA, 19 nt, Artificial Sequence
  Description of Artificial Sequence: Synthetic oligonucleotide
  Sense strand starting at position 3534 of SEQ ID NO: 1563716
uccuguguacucuggaaga

SEQ ID NO: 1826476 - RNA, 19 nt, Artificial Sequence
  Description of Artificial Sequence: Synthetic oligonucleotide
  Antisense strand to SEQ ID NO: 1826475
ucuuccagaguacacagga

SEQ ID NO: 1826477 - RNA, 19 nt, Artificial Sequence
  Description of Artificial Sequence: Synthetic oligonucleotide
  Sense strand starting at position 3650 of SEQ ID NO: 1563716
ggccuugagaggcgaagau

SEQ ID NO: 1826478 - RNA, 19 nt, Artificial Sequence
  Description of Artificial Sequence: Synthetic oligonucleotide
  Antisense strand to SEQ ID NO: 1826477
aucuucgccucucaaggcc

SEQ ID NO: 1826479 - RNA, 19 nt, Artificial Sequence
  Description of Artificial Sequence: Synthetic oligonucleotide
  Sense strand starting at position 3662 of SEQ ID NO: 1563716
cgaagaucaucuugagagg

SEQ ID NO: 1826480 - RNA, 19 nt, Artificial Sequence
  Description of Artificial Sequence: Synthetic oligonucleotide
  Antisense strand to SEQ ID NO: 1826479
ccucucaagaugaucuucg

SEQ ID NO: 1826481 - RNA, 19 nt, Artificial Sequence
  Description of Artificial Sequence: Synthetic oligonucleotide
  Sense strand starting at position 3665 of SEQ ID NO: 1563716
agaucaucuugagagguua

SEQ ID NO: 1826482 - RNA, 19 nt, Artificial Sequence
  Description of Artificial Sequence: Synthetic oligonucleotide
  Antisense strand to SEQ ID NO: 1826481
uaaccucucaagaugaucu

SEQ ID NO: 1826483 - RNA, 19 nt, Artificial Sequence
  Description of Artificial Sequence: Synthetic oligonucleotide
  Sense strand starting at position 3732 of SEQ ID NO: 1563716
uggagauggucgcugaaga

SEQ ID NO: 1826484 - RNA, 19 nt, Artificial Sequence
  Description of Artificial Sequence: Synthetic oligonucleotide
  Antisense strand to SEQ ID NO: 1826483
ucuucagcgaccaucucca

SEQ ID NO: 1826485 - RNA, 19 nt, Artificial Sequence
  Description of Artificial Sequence: Synthetic oligonucleotide
  Sense strand starting at position 3733 of SEQ ID NO: 1563716
ggagauggucgcugaagac

SEQ ID NO: 1826486 - RNA, 19 nt, Artificial Sequence
  Description of Artificial Sequence: Synthetic oligonucleotide
  Antisense strand to SEQ ID NO: 1826485
gucuucagcgaccaucucc

SEQ ID NO: 1826487 - RNA, 19 nt, Artificial Sequence
  Description of Artificial Sequence: Synthetic oligonucleotide
  Sense strand starting at position 3855 of SEQ ID NO: 1563716
caggcaucuuccuccggaa

SEQ ID NO: 1826488 - RNA, 19 nt, Artificial Sequence
  Description of Artificial Sequence: Synthetic oligonucleotide
  Antisense strand to SEQ ID NO: 1826487
uuccggaggaagaugccug

SEQ ID NO: 1826489 - RNA, 19 nt, Artificial Sequence
  Description of Artificial Sequence: Synthetic oligonucleotide
  Sense strand starting at position 3969 of SEQ ID NO: 1563716
ucaagcucaguccaagaaa

SEQ ID NO: 1826490 - RNA, 19 nt, Artificial Sequence
  Description of Artificial Sequence: Synthetic oligonucleotide
  Antisense strand to SEQ ID NO: 1826489
uuucuuggacugagcuuga

SEQ ID NO: 1826491 - RNA, 19 nt, Artificial Sequence
  Description of Artificial Sequence: Synthetic oligonucleotide
  Sense strand starting at position 59 of SEQ ID NO: 1563717
ugaauaacagcgcaaacau

SEQ ID NO: 1826492 - RNA, 19 nt, Artificial Sequence
  Description of Artificial Sequence: Synthetic oligonucleotide
  Antisense strand to SEQ ID NO: 1826491
auguuugcgcuguuauuca

SEQ ID NO: 1826493 - RNA, 19 nt, Artificial Sequence
  Description of Artificial Sequence: Synthetic oligonucleotide
  Sense strand starting at position 269 of SEQ ID NO: 1563717
uacugaaauggcuauacga

SEQ ID NO: 1826494 - RNA, 19 nt, Artificial Sequence
  Description of Artificial Sequence: Synthetic oligonucleotide
  Antisense strand to SEQ ID NO: 1826493
ucguauagccauuucagua

SEQ ID NO: 1826495 - RNA, 19 nt, Artificial Sequence
  Description of Artificial Sequence: Synthetic oligonucleotide
  Sense strand starting at position 564 of SEQ ID NO: 1563717
gguuuagaguacucacuac

SEQ ID NO: 1826496 - RNA, 19 nt, Artificial Sequence
  Description of Artificial Sequence: Synthetic oligonucleotide
  Antisense strand to SEQ ID NO: 1826495
guagugaguacucuaaacc

SEQ ID NO: 1826497 - RNA, 19 nt, Artificial Sequence
  Description of Artificial Sequence: Synthetic oligonucleotide
  Sense strand starting at position 606 of SEQ ID NO: 1563717
ucaugacaggccugugaaa

SEQ ID NO: 1826498 - RNA, 19 nt, Artificial Sequence
  Description of Artificial Sequence: Synthetic oligonucleotide
  Antisense strand to SEQ ID NO: 1826497
uuucacaggccugucauga

SEQ ID NO: 1826499 - RNA, 19 nt, Artificial Sequence
  Description of Artificial Sequence: Synthetic oligonucleotide
  Sense strand starting at position 608 of SEQ ID NO: 1563717
augacaggccugugaaaca

SEQ ID NO: 1826500 - RNA, 19 nt, Artificial Sequence
  Description of Artificial Sequence: Synthetic oligonucleotide
  Antisense strand to SEQ ID NO: 1826499
uguuucacaggccugucau

SEQ ID NO: 1826501 - RNA, 19 nt, Artificial Sequence
  Description of Artificial Sequence: Synthetic oligonucleotide
  Sense strand starting at position 661 of SEQ ID NO: 1563717
ggcuaacagaguuaacuug

SEQ ID NO: 1826502 - RNA, 19 nt, Artificial Sequence
  Description of Artificial Sequence: Synthetic oligonucleotide
  Antisense strand to SEQ ID NO: 1826501
caaguuaacucuguuagcc

SEQ ID NO: 1826503 - RNA, 19 nt, Artificial Sequence
  Description of Artificial Sequence: Synthetic oligonucleotide
  Sense strand starting at position 668 of SEQ ID NO: 1563717
agaguuaacuuguuuagag

SEQ ID NO: 1826504 - RNA, 19 nt, Artificial Sequence
  Description of Artificial Sequence: Synthetic oligonucleotide
  Antisense strand to SEQ ID NO: 1826503
cucuaaacaaguuaacucu

SEQ ID NO: 1826505 - RNA, 19 nt, Artificial Sequence
  Description of Artificial Sequence: Synthetic oligonucleotide
  Sense strand starting at position 669 of SEQ ID NO: 1563717
gaguuaacuuguuuagagu

SEQ ID NO: 1826506 - RNA, 19 nt, Artificial Sequence
  Description of Artificial Sequence: Synthetic oligonucleotide
  Antisense strand to SEQ ID NO: 1826505
acucuaaacaaguuaacuc

SEQ ID NO: 1826507 - RNA, 19 nt, Artificial Sequence
  Description of Artificial Sequence: Synthetic oligonucleotide
  Sense strand starting at position 782 of SEQ ID NO: 1563717
uuuagaggcuuuccagacu

SEQ ID NO: 1826508 - RNA, 19 nt, Artificial Sequence
  Description of Artificial Sequence: Synthetic oligonucleotide
  Antisense strand to SEQ ID NO: 1826507
agucuggaaagccucuaaa

SEQ ID NO: 1826509 - RNA, 19 nt, Artificial Sequence
  Description of Artificial Sequence: Synthetic oligonucleotide
  Sense strand starting at position 1285 of SEQ ID NO: 1563717
acagauuaaugucucugga

SEQ ID NO: 1826510 - RNA, 19 nt, Artificial Sequence
  Description of Artificial Sequence: Synthetic oligonucleotide
  Antisense strand to SEQ ID NO: 1826509
uccagagacauuaaucugu

SEQ ID NO: 1826511 - RNA, 19 nt, Artificial Sequence
  Description of Artificial Sequence: Synthetic oligonucleotide
  Sense strand starting at position 1287 of SEQ ID NO: 1563717
agauuaaugucucuggacu

SEQ ID NO: 1826512 - RNA, 19 nt, Artificial Sequence
  Description of Artificial Sequence: Synthetic oligonucleotide
  Antisense strand to SEQ ID NO: 1826511
aguccagagacauuaaucu

SEQ ID NO: 1826513 - RNA, 19 nt, Artificial Sequence
  Description of Artificial Sequence: Synthetic oligonucleotide
  Sense strand starting at position 1288 of SEQ ID NO: 1563717
gauuaaugucucuggacuc

SEQ ID NO: 1826514 - RNA, 19 nt, Artificial Sequence
  Description of Artificial Sequence: Synthetic oligonucleotide
  Antisense strand to SEQ ID NO: 1826513
gaguccagagacauuaauc

SEQ ID NO: 1826515 - RNA, 19 nt, Artificial Sequence
  Description of Artificial Sequence: Synthetic oligonucleotide
  Sense strand starting at position 1305 of SEQ ID NO: 1563717
ucagacuauucucucguua

SEQ ID NO: 1826516 - RNA, 19 nt, Artificial Sequence
  Description of Artificial Sequence: Synthetic oligonucleotide
  Antisense strand to SEQ ID NO: 1826515
uaacgagagaauagucuga

SEQ ID NO: 1826517 - RNA, 19 nt, Artificial Sequence
  Description of Artificial Sequence: Synthetic oligonucleotide
  Sense strand starting at position 1384 of SEQ ID NO: 1563717
ggguacuaacuucgaagga

SEQ ID NO: 1826518 - RNA, 19 nt, Artificial Sequence
  Description of Artificial Sequence: Synthetic oligonucleotide
  Antisense strand to SEQ ID NO: 1826517
uccuucgaaguuaguaccc

SEQ ID NO: 1826519 - RNA, 19 nt, Artificial Sequence
  Description of Artificial Sequence: Synthetic oligonucleotide
  Sense strand starting at position 1471 of SEQ ID NO: 1563717
uaucuaaggcagugaggau

SEQ ID NO: 1826520 - RNA, 19 nt, Artificial Sequence
  Description of Artificial Sequence: Synthetic oligonucleotide
  Antisense strand to SEQ ID NO: 1826519
auccucacugccuuagaua

SEQ ID NO: 1826521 - RNA, 19 nt, Artificial Sequence
  Description of Artificial Sequence: Synthetic oligonucleotide
  Sense strand starting at position 1504 of SEQ ID NO: 1563717
gaggcagucgcugagaaac

SEQ ID NO: 1826522 - RNA, 19 nt, Artificial Sequence
  Description of Artificial Sequence: Synthetic oligonucleotide
  Antisense strand to SEQ ID NO: 1826521
guuucucagcgacugccuc

SEQ ID NO: 1826523 - RNA, 19 nt, Artificial Sequence
  Description of Artificial Sequence: Synthetic oligonucleotide
  Sense strand starting at position 1607 of SEQ ID NO: 1563717
guccauugagccuagacuu

SEQ ID NO: 1826524 - RNA, 19 nt, Artificial Sequence
  Description of Artificial Sequence: Synthetic oligonucleotide
  Antisense strand to SEQ ID NO: 1826523
aagucuaggcucaauggac

SEQ ID NO: 1826525 - RNA, 19 nt, Artificial Sequence
  Description of Artificial Sequence: Synthetic oligonucleotide
  Sense strand starting at position 2032 of SEQ ID NO: 1563717
cgggcugaagaguaauauu

SEQ ID NO: 1826526 - RNA, 19 nt, Artificial Sequence
  Description of Artificial Sequence: Synthetic oligonucleotide
  Antisense strand to SEQ ID NO: 1826525
aauauuacucuucagcccg

SEQ ID NO: 1826527 - RNA, 19 nt, Artificial Sequence
  Description of Artificial Sequence: Synthetic oligonucleotide
  Sense strand starting at position 2192 of SEQ ID NO: 1563717
gaggcuucccuagagugaa

SEQ ID NO: 1826528 - RNA, 19 nt, Artificial Sequence
  Description of Artificial Sequence: Synthetic oligonucleotide
  Antisense strand to SEQ ID NO: 1826527
uucacucuagggaagccuc

SEQ ID NO: 1826529 - RNA, 19 nt, Artificial Sequence
  Description of Artificial Sequence: Synthetic oligonucleotide
  Sense strand starting at position 2205 of SEQ ID NO: 1563717
agugaagagcucuacuaug

SEQ ID NO: 1826530 - RNA, 19 nt, Artificial Sequence
  Description of Artificial Sequence: Synthetic oligonucleotide
  Antisense strand to SEQ ID NO: 1826529
cauaguagagcucuucacu

SEQ ID NO: 1826531 - RNA, 19 nt, Artificial Sequence
  Description of Artificial Sequence: Synthetic oligonucleotide
  Sense strand starting at position 2240 of SEQ ID NO: 1563717
gaaggagugcuuuggagga

SEQ ID NO: 1826532 - RNA, 19 nt, Artificial Sequence
  Description of Artificial Sequence: Synthetic oligonucleotide
  Antisense strand to SEQ ID NO: 1826531
uccuccaaagcacuccuuc

SEQ ID NO: 1826533 - RNA, 19 nt, Artificial Sequence
  Description of Artificial Sequence: Synthetic oligonucleotide
  Sense strand starting at position 2244 of SEQ ID NO: 1563717
gagugcuuuggaggaguuu

SEQ ID NO: 1826534 - RNA, 19 nt, Artificial Sequence
  Description of Artificial Sequence: Synthetic oligonucleotide
  Antisense strand to SEQ ID NO: 1826533
aaacuccuccaaagcacuc

SEQ ID NO: 1826535 - RNA, 19 nt, Artificial Sequence
  Description of Artificial Sequence: Synthetic oligonucleotide
  Sense strand starting at position 2323 of SEQ ID NO: 1563717
uuaguaggugcccauaacu

SEQ ID NO: 1826536 - RNA, 19 nt, Artificial Sequence
  Description of Artificial Sequence: Synthetic oligonucleotide
  Antisense strand to SEQ ID NO: 1826535
aguuaugggcaccuacuaa

SEQ ID NO: 1826537 - RNA, 19 nt, Artificial Sequence
  Description of Artificial Sequence: Synthetic oligonucleotide
  Sense strand starting at position 2334 of SEQ ID NO: 1563717
ccauaacuucgguggugga

SEQ ID NO: 1826538 - RNA, 19 nt, Artificial Sequence
  Description of Artificial Sequence: Synthetic oligonucleotide
  Antisense strand to SEQ ID NO: 1826537
uccaccaccgaaguuaugg

SEQ ID NO: 1826539 - RNA, 19 nt, Artificial Sequence
  Description of Artificial Sequence: Synthetic oligonucleotide
  Sense strand starting at position 2394 of SEQ ID NO: 1563717
uucuuaacuggguauguga

SEQ ID NO: 1826540 - RNA, 19 nt, Artificial Sequence
  Description of Artificial Sequence: Synthetic oligonucleotide
  Antisense strand to SEQ ID NO: 1826539
ucacauacccaguuaagaa

SEQ ID NO: 1826541 - RNA, 19 nt, Artificial Sequence
  Description of Artificial Sequence: Synthetic oligonucleotide
  Sense strand starting at position 2396 of SEQ ID NO: 1563717
cuuaacuggguaugugauu

SEQ ID NO: 1826542 - RNA, 19 nt, Artificial Sequence
  Description of Artificial Sequence: Synthetic oligonucleotide
  Antisense strand to SEQ ID NO: 1826541
aaucacauacccaguuaag

SEQ ID NO: 1826543 - RNA, 19 nt, Artificial Sequence
  Description of Artificial Sequence: Synthetic oligonucleotide
  Sense strand starting at position 2460 of SEQ ID NO: 1563717
uucuuccaucagggaugua

SEQ ID NO: 1826544 - RNA, 19 nt, Artificial Sequence
  Description of Artificial Sequence: Synthetic oligonucleotide
  Antisense strand to SEQ ID NO: 1826543
uacaucccugauggaagaa

SEQ ID NO: 1826545 - RNA, 19 nt, Artificial Sequence
  Description of Artificial Sequence: Synthetic oligonucleotide
  Sense strand starting at position 2550 of SEQ ID NO: 1563717
guuguugugccugucucaa

SEQ ID NO: 1826546 - RNA, 19 nt, Artificial Sequence
  Description of Artificial Sequence: Synthetic oligonucleotide
  Antisense strand to SEQ ID NO: 1826545
uugagacaggcacaacaac

SEQ ID NO: 1826547 - RNA, 19 nt, Artificial Sequence
  Description of Artificial Sequence: Synthetic oligonucleotide
  Sense strand starting at position 2606 of SEQ ID NO: 1563717
ugaucuuguuacuuaaagu

SEQ ID NO: 1826548 - RNA, 19 nt, Artificial Sequence
  Description of Artificial Sequence: Synthetic oligonucleotide
  Antisense strand to SEQ ID NO: 1826547
acuuuaaguaacaagauca

SEQ ID NO: 1826549 - RNA, 19 nt, Artificial Sequence
  Description of Artificial Sequence: Synthetic oligonucleotide
  Sense strand starting at position 2658 of SEQ ID NO: 1563717
uauaguggcucugugaaau

SEQ ID NO: 1826550 - RNA, 19 nt, Artificial Sequence
  Description of Artificial Sequence: Synthetic oligonucleotide
  Antisense strand to SEQ ID NO: 1826549
auuucacagagccacuaua

SEQ ID NO: 1826551 - RNA, 19 nt, Artificial Sequence
  Description of Artificial Sequence: Synthetic oligonucleotide
  Sense strand starting at position 2670 of SEQ ID NO: 1563717
gugaaauacguccagaugu

SEQ ID NO: 1826552 - RNA, 19 nt, Artificial Sequence
  Description of Artificial Sequence: Synthetic oligonucleotide
  Antisense strand to SEQ ID NO: 1826551
acaucuggacguauuucac

SEQ ID NO: 1826553 - RNA, 19 nt, Artificial Sequence
  Description of Artificial Sequence: Synthetic oligonucleotide
  Sense strand starting at position 2728 of SEQ ID NO: 1563717
cugagucuccaggaauugu

SEQ ID NO: 1826554 - RNA, 19 nt, Artificial Sequence
  Description of Artificial Sequence: Synthetic oligonucleotide
  Antisense strand to SEQ ID NO: 1826553
acaauuccuggagacucag

SEQ ID NO: 1826555 - RNA, 19 nt, Artificial Sequence
  Description of Artificial Sequence: Synthetic oligonucleotide
  Sense strand starting at position 2737 of SEQ ID NO: 1563717
caggaauuguccucugccu

SEQ ID NO: 1826556 - RNA, 19 nt, Artificial Sequence
  Description of Artificial Sequence: Synthetic oligonucleotide
  Antisense strand to SEQ ID NO: 1826555
aggcagaggacaauuccug

SEQ ID NO: 1826557 - RNA, 19 nt, Artificial Sequence
  Description of Artificial Sequence: Synthetic oligonucleotide
  Sense strand starting at position 2739 of SEQ ID NO: 1563717
ggaauuguccucugccuaa

SEQ ID NO: 1826558 - RNA, 19 nt, Artificial Sequence
  Description of Artificial Sequence: Synthetic oligonucleotide
  Antisense strand to SEQ ID NO: 1826557
uuaggcagaggacaauucc

SEQ ID NO: 1826559 - RNA, 19 nt, Artificial Sequence
  Description of Artificial Sequence: Synthetic oligonucleotide
  Sense strand starting at position 2743 of SEQ ID NO: 1563717
uuguccucugccuaagaga

SEQ ID NO: 1826560 - RNA, 19 nt, Artificial Sequence
  Description of Artificial Sequence: Synthetic oligonucleotide
  Antisense strand to SEQ ID NO: 1826559
ucucuuaggcagaggacaa

SEQ ID NO: 1826561 - RNA, 19 nt, Artificial Sequence
  Description of Artificial Sequence: Synthetic oligonucleotide
  Sense strand starting at position 2754 of SEQ ID NO: 1563717
cuaagagaauugccucaca

SEQ ID NO: 1826562 - RNA, 19 nt, Artificial Sequence
  Description of Artificial Sequence: Synthetic oligonucleotide
  Antisense strand to SEQ ID NO: 1826561
ugugaggcaauucucuuag

SEQ ID NO: 1826563 - RNA, 19 nt, Artificial Sequence
  Description of Artificial Sequence: Synthetic oligonucleotide
  Sense strand starting at position 2873 of SEQ ID NO: 1563717
gggccaucccagcaucaga

SEQ ID NO: 1826564 - RNA, 19 nt, Artificial Sequence
  Description of Artificial Sequence: Synthetic oligonucleotide
  Antisense strand to SEQ ID NO: 1826563
ucugaugcugggauggccc

SEQ ID NO: 1826565 - RNA, 19 nt, Artificial Sequence
  Description of Artificial Sequence: Synthetic oligonucleotide
  Sense strand starting at position 3168 of SEQ ID NO: 1563717
ucucuuguuucucccauga

SEQ ID NO: 1826566 - RNA, 19 nt, Artificial Sequence
  Description of Artificial Sequence: Synthetic oligonucleotide
  Antisense strand to SEQ ID NO: 1826565
ucaugggagaaacaagaga

SEQ ID NO: 1826567 - RNA, 19 nt, Artificial Sequence
  Description of Artificial Sequence: Synthetic oligonucleotide
  Sense strand starting at position 3381 of SEQ ID NO: 1563717
augacucugucugucacaa

SEQ ID NO: 1826568 - RNA, 19 nt, Artificial Sequence
  Description of Artificial Sequence: Synthetic oligonucleotide
  Antisense strand to SEQ ID NO: 1826567
uugugacagacagagucau

SEQ ID NO: 1826569 - RNA, 19 nt, Artificial Sequence
  Description of Artificial Sequence: Synthetic oligonucleotide
  Sense strand starting at position 3850 of SEQ ID NO: 1563717
cgcagaauucuccacucuu

SEQ ID NO: 1826570 - RNA, 19 nt, Artificial Sequence
  Description of Artificial Sequence: Synthetic oligonucleotide
  Antisense strand to SEQ ID NO: 1826569
aagaguggagaauucugcg

SEQ ID NO: 1826571 - RNA, 19 nt, Artificial Sequence
  Description of Artificial Sequence: Synthetic oligonucleotide
  Sense strand starting at position 192 of SEQ ID NO: 1563718
ggaacugacccuugugcua

SEQ ID NO: 1826572 - RNA, 19 nt, Artificial Sequence
  Description of Artificial Sequence: Synthetic oligonucleotide
  Antisense strand to SEQ ID NO: 1826571
uagcacaagggucaguucc

SEQ ID NO: 1826573 - RNA, 19 nt, Artificial Sequence
  Description of Artificial Sequence: Synthetic oligonucleotide
  Sense strand starting at position 278 of SEQ ID NO: 1563718
ggcuuucugcccuagagac

SEQ ID NO: 1826574 - RNA, 19 nt, Artificial Sequence
  Description of Artificial Sequence: Synthetic oligonucleotide
  Antisense strand to SEQ ID NO: 1826573
gucucuagggcagaaagcc

SEQ ID NO: 1826575 - RNA, 19 nt, Artificial Sequence
  Description of Artificial Sequence: Synthetic oligonucleotide
  Sense strand starting at position 280 of SEQ ID NO: 1563718
cuuucugcccuagagacua

SEQ ID NO: 1826576 - RNA, 19 nt, Artificial Sequence
  Description of Artificial Sequence: Synthetic oligonucleotide
  Antisense strand to SEQ ID NO: 1826575
uagucucuagggcagaaag

SEQ ID NO: 1826577 - RNA, 19 nt, Artificial Sequence
  Description of Artificial Sequence: Synthetic oligonucleotide
  Sense strand starting at position 707 of SEQ ID NO: 1563718
agagaacgaaucuguaauc

SEQ ID NO: 1826578 - RNA, 19 nt, Artificial Sequence
  Description of Artificial Sequence: Synthetic oligonucleotide
  Antisense strand to SEQ ID NO: 1826577
gauuacagauucguucucu

SEQ ID NO: 1826579 - RNA, 19 nt, Artificial Sequence
  Description of Artificial Sequence: Synthetic oligonucleotide
  Sense strand starting at position 708 of SEQ ID NO: 1563718
gagaacgaaucuguaaucu

SEQ ID NO: 1826580 - RNA, 19 nt, Artificial Sequence
  Description of Artificial Sequence: Synthetic oligonucleotide
  Antisense strand to SEQ ID NO: 1826579
agauuacagauucguucuc

SEQ ID NO: 1826581 - RNA, 19 nt, Artificial Sequence
  Description of Artificial Sequence: Synthetic oligonucleotide
  Sense strand starting at position 712 of SEQ ID NO: 1563718
acgaaucuguaaucuagaa

SEQ ID NO: 1826582 - RNA, 19 nt, Artificial Sequence
  Description of Artificial Sequence: Synthetic oligonucleotide
  Antisense strand to SEQ ID NO: 1826581
uucuagauuacagauucgu

SEQ ID NO: 1826583 - RNA, 19 nt, Artificial Sequence
  Description of Artificial Sequence: Synthetic oligonucleotide
  Sense strand starting at position 1271 of SEQ ID NO: 1563718
ugcacucacccguguugua

SEQ ID NO: 1826584 - RNA, 19 nt, Artificial Sequence
  Description of Artificial Sequence: Synthetic oligonucleotide
  Antisense strand to SEQ ID NO: 1826583
uacaacacgggugagugca

SEQ ID NO: 1826585 - RNA, 19 nt, Artificial Sequence
  Description of Artificial Sequence: Synthetic oligonucleotide
  Sense strand starting at position 1292 of SEQ ID NO: 1563718
cgugcaguucguccacuau

SEQ ID NO: 1826586 - RNA, 19 nt, Artificial Sequence
  Description of Artificial Sequence: Synthetic oligonucleotide
  Antisense strand to SEQ ID NO: 1826585
auaguggacgaacugcacg

SEQ ID NO: 1826587 - RNA, 19 nt, Artificial Sequence
  Description of Artificial Sequence: Synthetic oligonucleotide
  Sense strand starting at position 1466 of SEQ ID NO: 1563718
aagccauaguuccgggaaa

SEQ ID NO: 1826588 - RNA, 19 nt, Artificial Sequence
  Description of Artificial Sequence: Synthetic oligonucleotide
  Antisense strand to SEQ ID NO: 1826587
uuucccggaacuauggcuu

SEQ ID NO: 1826589 - RNA, 19 nt, Artificial Sequence
  Description of Artificial Sequence: Synthetic oligonucleotide
  Sense strand starting at position 1467 of SEQ ID NO: 1563718
agccauaguuccgggaaag

SEQ ID NO: 1826590 - RNA, 19 nt, Artificial Sequence
  Description of Artificial Sequence: Synthetic oligonucleotide
  Antisense strand to SEQ ID NO: 1826589
cuuucccggaacuauggcu

SEQ ID NO: 1826591 - RNA, 19 nt, Artificial Sequence
  Description of Artificial Sequence: Synthetic oligonucleotide
  Sense strand starting at position 1468 of SEQ ID NO: 1563718
gccauaguuccgggaaagg

SEQ ID NO: 1826592 - RNA, 19 nt, Artificial Sequence
  Description of Artificial Sequence: Synthetic oligonucleotide
  Antisense strand to SEQ ID NO: 1826591
ccuuucccggaacuauggc

SEQ ID NO: 1826593 - RNA, 19 nt, Artificial Sequence
  Description of Artificial Sequence: Synthetic oligonucleotide
  Sense strand starting at position 2436 of SEQ ID NO: 1563718
gccgccaucuugugugaag

SEQ ID NO: 1826594 - RNA, 19 nt, Artificial Sequence
  Description of Artificial Sequence: Synthetic oligonucleotide
  Antisense strand to SEQ ID NO: 1826593
cuucacacaagauggcggc

SEQ ID NO: 1826595 - RNA, 19 nt, Artificial Sequence
  Description of Artificial Sequence: Synthetic oligonucleotide
  Sense strand starting at position 2437 of SEQ ID NO: 1563718
ccgccaucuugugugaaga

SEQ ID NO: 1826596 - RNA, 19 nt, Artificial Sequence
  Description of Artificial Sequence: Synthetic oligonucleotide
  Antisense strand to SEQ ID NO: 1826595
ucuucacacaagauggcgg

SEQ ID NO: 1826597 - RNA, 19 nt, Artificial Sequence
  Description of Artificial Sequence: Synthetic oligonucleotide
  Sense strand starting at position 2438 of SEQ ID NO: 1563718
cgccaucuugugugaagaa

SEQ ID NO: 1826598 - RNA, 19 nt, Artificial Sequence
  Description of Artificial Sequence: Synthetic oligonucleotide
  Antisense strand to SEQ ID NO: 1826597
uucuucacacaagauggcg

SEQ ID NO: 1826599 - RNA, 19 nt, Artificial Sequence
  Description of Artificial Sequence: Synthetic oligonucleotide
  Sense strand starting at position 2439 of SEQ ID NO: 1563718
gccaucuugugugaagaag

SEQ ID NO: 1826600 - RNA, 19 nt, Artificial Sequence
  Description of Artificial Sequence: Synthetic oligonucleotide
  Antisense strand to SEQ ID NO: 1826599
cuucuucacacaagauggc

SEQ ID NO: 1826601 - RNA, 19 nt, Artificial Sequence
  Description of Artificial Sequence: Synthetic oligonucleotide
  Sense strand starting at position 2563 of SEQ ID NO: 1563718
gcccaagccucuuaaagga

SEQ ID NO: 1826602 - RNA, 19 nt, Artificial Sequence
  Description of Artificial Sequence: Synthetic oligonucleotide
  Antisense strand to SEQ ID NO: 1826601
uccuuuaagaggcuugggc

SEQ ID NO: 1826603 - RNA, 19 nt, Artificial Sequence
  Description of Artificial Sequence: Synthetic oligonucleotide
  Sense strand starting at position 2639 of SEQ ID NO: 1563718
gcucgagucgcgcucagau

SEQ ID NO: 1826604 - RNA, 19 nt, Artificial Sequence
  Description of Artificial Sequence: Synthetic oligonucleotide
  Antisense strand to SEQ ID NO: 1826603
aucugagcgcgacucgagc

SEQ ID NO: 1826605 - RNA, 19 nt, Artificial Sequence
  Description of Artificial Sequence: Synthetic oligonucleotide
  Sense strand starting at position 2820 of SEQ ID NO: 1563718
cggaaaugcccggaugaga

SEQ ID NO: 1826606 - RNA, 19 nt, Artificial Sequence
  Description of Artificial Sequence: Synthetic oligonucleotide
  Antisense strand to SEQ ID NO: 1826605
ucucauccgggcauuuccg

SEQ ID NO: 1826607 - RNA, 19 nt, Artificial Sequence
  Description of Artificial Sequence: Synthetic oligonucleotide
  Sense strand starting at position 2879 of SEQ ID NO: 1563718
aacggucucucggguugau

SEQ ID NO: 1826608 - RNA, 19 nt, Artificial Sequence
  Description of Artificial Sequence: Synthetic oligonucleotide
  Antisense strand to SEQ ID NO: 1826607
aucaacccgagagaccguu

SEQ ID NO: 1826609 - RNA, 19 nt, Artificial Sequence
  Description of Artificial Sequence: Synthetic oligonucleotide
  Sense strand starting at position 2882 of SEQ ID NO: 1563718
ggucucucggguugauaag

SEQ ID NO: 1826610 - RNA, 19 nt, Artificial Sequence
  Description of Artificial Sequence: Synthetic oligonucleotide
  Antisense strand to SEQ ID NO: 1826609
cuuaucaacccgagagacc

SEQ ID NO: 1826611 - RNA, 19 nt, Artificial Sequence
  Description of Artificial Sequence: Synthetic oligonucleotide
  Sense strand starting at position 3538 of SEQ ID NO: 1563718
ccacguuucgccuccucua

SEQ ID NO: 1826612 - RNA, 19 nt, Artificial Sequence
  Description of Artificial Sequence: Synthetic oligonucleotide
  Antisense strand to SEQ ID NO: 1826611
uagaggaggcgaaacgugg

SEQ ID NO: 1826613 - RNA, 19 nt, Artificial Sequence
  Description of Artificial Sequence: Synthetic oligonucleotide
  Sense strand starting at position 3652 of SEQ ID NO: 1563718
gcggcagucgccaguagaa

SEQ ID NO: 1826614 - RNA, 19 nt, Artificial Sequence
  Description of Artificial Sequence: Synthetic oligonucleotide
  Antisense strand to SEQ ID NO: 1826613
uucuacuggcgacugccgc

SEQ ID NO: 1826615 - RNA, 19 nt, Artificial Sequence
  Description of Artificial Sequence: Synthetic oligonucleotide
  Sense strand starting at position 3654 of SEQ ID NO: 1563718
ggcagucgccaguagaaau

SEQ ID NO: 1826616 - RNA, 19 nt, Artificial Sequence
  Description of Artificial Sequence: Synthetic oligonucleotide
  Antisense strand to SEQ ID NO: 1826615
auuucuacuggcgacugcc

SEQ ID NO: 1826617 - RNA, 19 nt, Artificial Sequence
  Description of Artificial Sequence: Synthetic oligonucleotide
  Sense strand starting at position 3707 of SEQ ID NO: 1563718
guuguaaacgucuagaagu

SEQ ID NO: 1826618 - RNA, 19 nt, Artificial Sequence
  Description of Artificial Sequence: Synthetic oligonucleotide
  Antisense strand to SEQ ID NO: 1826617
acuucuagacguuuacaac

SEQ ID NO: 1826619 - RNA, 19 nt, Artificial Sequence
  Description of Artificial Sequence: Synthetic oligonucleotide
  Sense strand starting at position 3760 of SEQ ID NO: 1563718
cgggcagaauuauuacuuu

SEQ ID NO: 1826620 - RNA, 19 nt, Artificial Sequence
  Description of Artificial Sequence: Synthetic oligonucleotide
  Antisense strand to SEQ ID NO: 1826619
aaaguaauaauucugcccg

SEQ ID NO: 1826621 - RNA, 19 nt, Artificial Sequence
  Description of Artificial Sequence: Synthetic oligonucleotide
  Sense strand starting at position 3763 of SEQ ID NO: 1563718
gcagaauuauuacuuugaa

SEQ ID NO: 1826622 - RNA, 19 nt, Artificial Sequence
  Description of Artificial Sequence: Synthetic oligonucleotide
  Antisense strand to SEQ ID NO: 1826621
uucaaaguaauaauucugc

SEQ ID NO: 1826623 - RNA, 19 nt, Artificial Sequence
  Description of Artificial Sequence: Synthetic oligonucleotide
  Sense strand starting at position 3775 of SEQ ID NO: 1563718
cuuugaaguuacugaaguu

SEQ ID NO: 1826624 - RNA, 19 nt, Artificial Sequence
  Description of Artificial Sequence: Synthetic oligonucleotide
  Antisense strand to SEQ ID NO: 1826623
aacuucaguaacuucaaag

SEQ ID NO: 1826625 - RNA, 19 nt, Artificial Sequence
  Description of Artificial Sequence: Synthetic oligonucleotide
  Sense strand starting at position 3787 of SEQ ID NO: 1563718
ugaaguuaugcguccugcu

SEQ ID NO: 1826626 - RNA, 19 nt, Artificial Sequence
  Description of Artificial Sequence: Synthetic oligonucleotide
  Antisense strand to SEQ ID NO: 1826625
agcaggacgcauaacuuca

SEQ ID NO: 1826627 - RNA, 19 nt, Artificial Sequence
  Description of Artificial Sequence: Synthetic oligonucleotide
  Sense strand starting at position 3790 of SEQ ID NO: 1563718
aguuaugcguccugcugga

SEQ ID NO: 1826628 - RNA, 19 nt, Artificial Sequence
  Description of Artificial Sequence: Synthetic oligonucleotide
  Antisense strand to SEQ ID NO: 1826627
uccagcaggacgcauaacu

SEQ ID NO: 1826629 - RNA, 19 nt, Artificial Sequence
  Description of Artificial Sequence: Synthetic oligonucleotide
  Sense strand starting at position 3813 of SEQ ID NO: 1563718
cuuguaauuuaaugcguua

SEQ ID NO: 1826630 - RNA, 19 nt, Artificial Sequence
  Description of Artificial Sequence: Synthetic oligonucleotide
  Antisense strand to SEQ ID NO: 1826629
uaacgcauuaaauuacaag

SEQ ID NO: 1826631 - RNA, 19 nt, Artificial Sequence
  Description of Artificial Sequence: Synthetic oligonucleotide
  Sense strand starting at position 3815 of SEQ ID NO: 1563718
uguaauuuaaugcguuagu

SEQ ID NO: 1826632 - RNA, 19 nt, Artificial Sequence
  Description of Artificial Sequence: Synthetic oligonucleotide
  Antisense strand to SEQ ID NO: 1826631
acuaacgcauuaaauuaca

SEQ ID NO: 1826633 - RNA, 19 nt, Artificial Sequence
  Description of Artificial Sequence: Synthetic oligonucleotide
  Sense strand starting at position 3816 of SEQ ID NO: 1563718
guaauuuaaugcguuagua

SEQ ID NO: 1826634 - RNA, 19 nt, Artificial Sequence
  Description of Artificial Sequence: Synthetic oligonucleotide
  Antisense strand to SEQ ID NO: 1826633
uacuaacgcauuaaauuac

SEQ ID NO: 1826635 - RNA, 19 nt, Artificial Sequence
  Description of Artificial Sequence: Synthetic oligonucleotide
  Sense strand starting at position 3820 of SEQ ID NO: 1563718
uuuaaugcguuaguaaaga

SEQ ID NO: 1826636 - RNA, 19 nt, Artificial Sequence
  Description of Artificial Sequence: Synthetic oligonucleotide
  Antisense strand to SEQ ID NO: 1826635
ucuuuacuaacgcauuaaa

SEQ ID NO: 1826637 - RNA, 19 nt, Artificial Sequence
  Description of Artificial Sequence: Synthetic oligonucleotide
  Sense strand starting at position 3882 of SEQ ID NO: 1563718
gucgccucucaacauauua

SEQ ID NO: 1826638 - RNA, 19 nt, Artificial Sequence
  Description of Artificial Sequence: Synthetic oligonucleotide
  Antisense strand to SEQ ID NO: 1826637
uaauauguugagaggcgac

SEQ ID NO: 1826639 - RNA, 19 nt, Artificial Sequence
  Description of Artificial Sequence: Synthetic oligonucleotide
  Sense strand starting at position 3908 of SEQ ID NO: 1563718
uuuguaaucgucuguguuu

SEQ ID NO: 1826640 - RNA, 19 nt, Artificial Sequence
  Description of Artificial Sequence: Synthetic oligonucleotide
  Antisense strand to SEQ ID NO: 1826639
aaacacagacgauuacaaa

SEQ ID NO: 1826641 - RNA, 19 nt, Artificial Sequence
  Description of Artificial Sequence: Synthetic oligonucleotide
  Sense strand starting at position 3945 of SEQ ID NO: 1563718
guauccauuugagaaggga

SEQ ID NO: 1826642 - RNA, 19 nt, Artificial Sequence
  Description of Artificial Sequence: Synthetic oligonucleotide
  Antisense strand to SEQ ID NO: 1826641
ucccuucucaaauggauac

SEQ ID NO: 1826643 - RNA, 19 nt, Artificial Sequence
  Description of Artificial Sequence: Synthetic oligonucleotide
  Sense strand starting at position 3970 of SEQ ID NO: 1563718
gaagaauucuugccugucu

SEQ ID NO: 1826644 - RNA, 19 nt, Artificial Sequence
  Description of Artificial Sequence: Synthetic oligonucleotide
  Antisense strand to SEQ ID NO: 1826643
agacaggcaagaauucuuc

SEQ ID NO: 1826645 - RNA, 19 nt, Artificial Sequence
  Description of Artificial Sequence: Synthetic oligonucleotide
  Sense strand starting at position 3972 of SEQ ID NO: 1563718
agaauucuugccugucugu

SEQ ID NO: 1826646 - RNA, 19 nt, Artificial Sequence
  Description of Artificial Sequence: Synthetic oligonucleotide
  Antisense strand to SEQ ID NO: 1826645
acagacaggcaagaauucu

SEQ ID NO: 1826647 - RNA, 19 nt, Artificial Sequence
  Description of Artificial Sequence: Synthetic oligonucleotide
  Sense strand starting at position 92 of SEQ ID NO: 1563719
uguuucaucgcguugguca

SEQ ID NO: 1826648 - RNA, 19 nt, Artificial Sequence
  Description of Artificial Sequence: Synthetic oligonucleotide
  Antisense strand to SEQ ID NO: 1826647
ugaccaacgcgaugaaaca

SEQ ID NO: 1826649 - RNA, 19 nt, Artificial Sequence
  Description of Artificial Sequence: Synthetic oligonucleotide
  Sense strand starting at position 264 of SEQ ID NO: 1563719
agauaauagaggugagguu

SEQ ID NO: 1826650 - RNA, 19 nt, Artificial Sequence
  Description of Artificial Sequence: Synthetic oligonucleotide
  Antisense strand to SEQ ID NO: 1826649
aaccucaccucuauuaucu

SEQ ID NO: 1826651 - RNA, 19 nt, Artificial Sequence
  Description of Artificial Sequence: Synthetic oligonucleotide
  Sense strand starting at position 271 of SEQ ID NO: 1563719
agaggugagguuggaagua

SEQ ID NO: 1826652 - RNA, 19 nt, Artificial Sequence
  Description of Artificial Sequence: Synthetic oligonucleotide
  Antisense strand to SEQ ID NO: 1826651
uacuuccaaccucaccucu

SEQ ID NO: 1826653 - RNA, 19 nt, Artificial Sequence
  Description of Artificial Sequence: Synthetic oligonucleotide
  Sense strand starting at position 299 of SEQ ID NO: 1563719
ggaggaggccucugcaagu

SEQ ID NO: 1826654 - RNA, 19 nt, Artificial Sequence
  Description of Artificial Sequence: Synthetic oligonucleotide
  Antisense strand to SEQ ID NO: 1826653
acuugcagaggccuccucc

SEQ ID NO: 1826655 - RNA, 19 nt, Artificial Sequence
  Description of Artificial Sequence: Synthetic oligonucleotide
  Sense strand starting at position 312 of SEQ ID NO: 1563719
gcaagucuaggugagugau

SEQ ID NO: 1826656 - RNA, 19 nt, Artificial Sequence
  Description of Artificial Sequence: Synthetic oligonucleotide
  Antisense strand to SEQ ID NO: 1826655
aucacucaccuagacuugc

SEQ ID NO: 1826657 - RNA, 19 nt, Artificial Sequence
  Description of Artificial Sequence: Synthetic oligonucleotide
  Sense strand starting at position 314 of SEQ ID NO: 1563719
aagucuaggugagugauga

SEQ ID NO: 1826658 - RNA, 19 nt, Artificial Sequence
  Description of Artificial Sequence: Synthetic oligonucleotide
  Antisense strand to SEQ ID NO: 1826657
ucaucacucaccuagacuu

SEQ ID NO: 1826659 - RNA, 19 nt, Artificial Sequence
  Description of Artificial Sequence: Synthetic oligonucleotide
  Sense strand starting at position 315 of SEQ ID NO: 1563719
agucuaggugagugaugau

SEQ ID NO: 1826660 - RNA, 19 nt, Artificial Sequence
  Description of Artificial Sequence: Synthetic oligonucleotide
  Antisense strand to SEQ ID NO: 1826659
aucaucacucaccuagacu

SEQ ID NO: 1826661 - RNA, 19 nt, Artificial Sequence
  Description of Artificial Sequence: Synthetic oligonucleotide
  Sense strand starting at position 466 of SEQ ID NO: 1563719
cgucucuuccucuauaaag

SEQ ID NO: 1826662 - RNA, 19 nt, Artificial Sequence
  Description of Artificial Sequence: Synthetic oligonucleotide
  Antisense strand to SEQ ID NO: 1826661
cuuuauagaggaagagacg

SEQ ID NO: 1826663 - RNA, 19 nt, Artificial Sequence
  Description of Artificial Sequence: Synthetic oligonucleotide
  Sense strand starting at position 489 of SEQ ID NO: 1563719
cugggaagcccggauacua

SEQ ID NO: 1826664 - RNA, 19 nt, Artificial Sequence
  Description of Artificial Sequence: Synthetic oligonucleotide
  Antisense strand to SEQ ID NO: 1826663
uaguauccgggcuucccag

SEQ ID NO: 1826665 - RNA, 19 nt, Artificial Sequence
  Description of Artificial Sequence: Synthetic oligonucleotide
  Sense strand starting at position 497 of SEQ ID NO: 1563719
cccggauacuaguuuagga

SEQ ID NO: 1826666 - RNA, 19 nt, Artificial Sequence
  Description of Artificial Sequence: Synthetic oligonucleotide
  Antisense strand to SEQ ID NO: 1826665
uccuaaacuaguauccggg

SEQ ID NO: 1826667 - RNA, 19 nt, Artificial Sequence
  Description of Artificial Sequence: Synthetic oligonucleotide
  Sense strand starting at position 507 of SEQ ID NO: 1563719
aguuuaggauccucuauua

SEQ ID NO: 1826668 - RNA, 19 nt, Artificial Sequence
  Description of Artificial Sequence: Synthetic oligonucleotide
  Antisense strand to SEQ ID NO: 1826667
uaauagaggauccuaaacu

SEQ ID NO: 1826669 - RNA, 19 nt, Artificial Sequence
  Description of Artificial Sequence: Synthetic oligonucleotide
  Sense strand starting at position 1042 of SEQ ID NO: 1563719
auugucauacgaggcuaaa

SEQ ID NO: 1826670 - RNA, 19 nt, Artificial Sequence
  Description of Artificial Sequence: Synthetic oligonucleotide
  Antisense strand to SEQ ID NO: 1826669
uuuagccucguaugacaau

SEQ ID NO: 1826671 - RNA, 19 nt, Artificial Sequence
  Description of Artificial Sequence: Synthetic oligonucleotide
  Sense strand starting at position 1196 of SEQ ID NO: 1563719
uuuaauauuucgcuucugu

SEQ ID NO: 1826672 - RNA, 19 nt, Artificial Sequence
  Description of Artificial Sequence: Synthetic oligonucleotide
  Antisense strand to SEQ ID NO: 1826671
acagaagcgaaauauuaaa

SEQ ID NO: 1826673 - RNA, 19 nt, Artificial Sequence
  Description of Artificial Sequence: Synthetic oligonucleotide
  Sense strand starting at position 1520 of SEQ ID NO: 1563719
cauuccuuacgcgaucuga

SEQ ID NO: 1826674 - RNA, 19 nt, Artificial Sequence
  Description of Artificial Sequence: Synthetic oligonucleotide
  Antisense strand to SEQ ID NO: 1826673
ucagaucgcguaaggaaug

SEQ ID NO: 1826675 - RNA, 19 nt, Artificial Sequence
  Description of Artificial Sequence: Synthetic oligonucleotide
  Sense strand starting at position 1819 of SEQ ID NO: 1563719
ggccuaucucccgggauaa

SEQ ID NO: 1826676 - RNA, 19 nt, Artificial Sequence
  Description of Artificial Sequence: Synthetic oligonucleotide
  Antisense strand to SEQ ID NO: 1826675
uuaucccgggagauaggcc

SEQ ID NO: 1826677 - RNA, 19 nt, Artificial Sequence
  Description of Artificial Sequence: Synthetic oligonucleotide
  Sense strand starting at position 1820 of SEQ ID NO: 1563719
gccuaucucccgggauaau

SEQ ID NO: 1826678 - RNA, 19 nt, Artificial Sequence
  Description of Artificial Sequence: Synthetic oligonucleotide
  Antisense strand to SEQ ID NO: 1826677
auuaucccgggagauaggc

SEQ ID NO: 1826679 - RNA, 19 nt, Artificial Sequence
  Description of Artificial Sequence: Synthetic oligonucleotide
  Sense strand starting at position 1821 of SEQ ID NO: 1563719
ccuaucucccgggauaauc

SEQ ID NO: 1826680 - RNA, 19 nt, Artificial Sequence
  Description of Artificial Sequence: Synthetic oligonucleotide
  Antisense strand to SEQ ID NO: 1826679
gauuaucccgggagauagg

SEQ ID NO: 1826681 - RNA, 19 nt, Artificial Sequence
  Description of Artificial Sequence: Synthetic oligonucleotide
  Sense strand starting at position 2039 of SEQ ID NO: 1563719
accgcuaacguuucgcuaa

SEQ ID NO: 1826682 - RNA, 19 nt, Artificial Sequence
  Description of Artificial Sequence: Synthetic oligonucleotide
  Antisense strand to SEQ ID NO: 1826681
uuagcgaaacguuagcggu

SEQ ID NO: 1826683 - RNA, 19 nt, Artificial Sequence
  Description of Artificial Sequence: Synthetic oligonucleotide
  Sense strand starting at position 2774 of SEQ ID NO: 1563719
cgaugcuaaaugugaggau

SEQ ID NO: 1826684 - RNA, 19 nt, Artificial Sequence
  Description of Artificial Sequence: Synthetic oligonucleotide
  Antisense strand to SEQ ID NO: 1826683
auccucacauuuagcaucg

SEQ ID NO: 1826685 - RNA, 19 nt, Artificial Sequence
  Description of Artificial Sequence: Synthetic oligonucleotide
  Sense strand starting at position 2825 of SEQ ID NO: 1563719
aggaaacacuggccgaaua

SEQ ID NO: 1826686 - RNA, 19 nt, Artificial Sequence
  Description of Artificial Sequence: Synthetic oligonucleotide
  Antisense strand to SEQ ID NO: 1826685
uauucggccaguguuuccu

SEQ ID NO: 1826687 - RNA, 19 nt, Artificial Sequence
  Description of Artificial Sequence: Synthetic oligonucleotide
  Sense strand starting at position 2826 of SEQ ID NO: 1563719
ggaaacacuggccgaauau

SEQ ID NO: 1826688 - RNA, 19 nt, Artificial Sequence
  Description of Artificial Sequence: Synthetic oligonucleotide
  Antisense strand to SEQ ID NO: 1826687
auauucggccaguguuucc

SEQ ID NO: 1826689 - RNA, 19 nt, Artificial Sequence
  Description of Artificial Sequence: Synthetic oligonucleotide
  Sense strand starting at position 2827 of SEQ ID NO: 1563719
gaaacacuggccgaauauu

SEQ ID NO: 1826690 - RNA, 19 nt, Artificial Sequence
  Description of Artificial Sequence: Synthetic oligonucleotide
  Antisense strand to SEQ ID NO: 1826689
aauauucggccaguguuuc

SEQ ID NO: 1826691 - RNA, 19 nt, Artificial Sequence
  Description of Artificial Sequence: Synthetic oligonucleotide
  Sense strand starting at position 2835 of SEQ ID NO: 1563719
ggccgaauauuagcuauua

SEQ ID NO: 1826692 - RNA, 19 nt, Artificial Sequence
  Description of Artificial Sequence: Synthetic oligonucleotide
  Antisense strand to SEQ ID NO: 1826691
uaauagcuaauauucggcc

SEQ ID NO: 1826693 - RNA, 19 nt, Artificial Sequence
  Description of Artificial Sequence: Synthetic oligonucleotide
  Sense strand starting at position 2836 of SEQ ID NO: 1563719
gccgaauauuagcuauuaa

SEQ ID NO: 1826694 - RNA, 19 nt, Artificial Sequence
  Description of Artificial Sequence: Synthetic oligonucleotide
  Antisense strand to SEQ ID NO: 1826693
uuaauagcuaauauucggc

SEQ ID NO: 1826695 - RNA, 19 nt, Artificial Sequence
  Description of Artificial Sequence: Synthetic oligonucleotide
  Sense strand starting at position 2864 of SEQ ID NO: 1563719
gcaauauucugaguggaag

SEQ ID NO: 1826696 - RNA, 19 nt, Artificial Sequence
  Description of Artificial Sequence: Synthetic oligonucleotide
  Antisense strand to SEQ ID NO: 1826695
cuuccacucagaauauugc

SEQ ID NO: 1826697 - RNA, 19 nt, Artificial Sequence
  Description of Artificial Sequence: Synthetic oligonucleotide
  Sense strand starting at position 2916 of SEQ ID NO: 1563719
gcaaguauuaugugacagg

SEQ ID NO: 1826698 - RNA, 19 nt, Artificial Sequence
  Description of Artificial Sequence: Synthetic oligonucleotide
  Antisense strand to SEQ ID NO: 1826697
ccugucacauaauacuugc

SEQ ID NO: 1826699 - RNA, 19 nt, Artificial Sequence
  Description of Artificial Sequence: Synthetic oligonucleotide
  Sense strand starting at position 2923 of SEQ ID NO: 1563719
uuaugugacaggcaucguu

SEQ ID NO: 1826700 - RNA, 19 nt, Artificial Sequence
  Description of Artificial Sequence: Synthetic oligonucleotide
  Antisense strand to SEQ ID NO: 1826699
aacgaugccugucacauaa

SEQ ID NO: 1826701 - RNA, 19 nt, Artificial Sequence
  Description of Artificial Sequence: Synthetic oligonucleotide
  Sense strand starting at position 2938 of SEQ ID NO: 1563719
cguuguaaaccacaauucu

SEQ ID NO: 1826702 - RNA, 19 nt, Artificial Sequence
  Description of Artificial Sequence: Synthetic oligonucleotide
  Antisense strand to SEQ ID NO: 1826701
agaauugugguuuacaacg

SEQ ID NO: 1826703 - RNA, 19 nt, Artificial Sequence
  Description of Artificial Sequence: Synthetic oligonucleotide
  Sense strand starting at position 2946 of SEQ ID NO: 1563719
accacaauucuaugaggua

SEQ ID NO: 1826704 - RNA, 19 nt, Artificial Sequence
  Description of Artificial Sequence: Synthetic oligonucleotide
  Antisense strand to SEQ ID NO: 1826703
uaccucauagaauuguggu

SEQ ID NO: 1826705 - RNA, 19 nt, Artificial Sequence
  Description of Artificial Sequence: Synthetic oligonucleotide
  Sense strand starting at position 2961 of SEQ ID NO: 1563719
gguaguucccauuauuaag

SEQ ID NO: 1826706 - RNA, 19 nt, Artificial Sequence
  Description of Artificial Sequence: Synthetic oligonucleotide
  Antisense strand to SEQ ID NO: 1826705
cuuaauaaugggaacuacc

SEQ ID NO: 1826707 - RNA, 19 nt, Artificial Sequence
  Description of Artificial Sequence: Synthetic oligonucleotide
  Sense strand starting at position 3005 of SEQ ID NO: 1563719
gguuacgggacuuaaccau

SEQ ID NO: 1826708 - RNA, 19 nt, Artificial Sequence
  Description of Artificial Sequence: Synthetic oligonucleotide
  Antisense strand to SEQ ID NO: 1826707
augguuaagucccguaacc

SEQ ID NO: 1826709 - RNA, 19 nt, Artificial Sequence
  Description of Artificial Sequence: Synthetic oligonucleotide
  Sense strand starting at position 3011 of SEQ ID NO: 1563719
gggacuuaaccaugugacu

SEQ ID NO: 1826710 - RNA, 19 nt, Artificial Sequence
  Description of Artificial Sequence: Synthetic oligonucleotide
  Antisense strand to SEQ ID NO: 1826709
agucacaugguuaaguccc

SEQ ID NO: 1826711 - RNA, 19 nt, Artificial Sequence
  Description of Artificial Sequence: Synthetic oligonucleotide
  Sense strand starting at position 3032 of SEQ ID NO: 1563719
gggcaaguugcugaacagu

SEQ ID NO: 1826712 - RNA, 19 nt, Artificial Sequence
  Description of Artificial Sequence: Synthetic oligonucleotide
  Antisense strand to SEQ ID NO: 1826711
acuguucagcaacuugccc

SEQ ID NO: 1826713 - RNA, 19 nt, Artificial Sequence
  Description of Artificial Sequence: Synthetic oligonucleotide
  Sense strand starting at position 3062 of SEQ ID NO: 1563719
uuuccucaucuggaaaguu

SEQ ID NO: 1826714 - RNA, 19 nt, Artificial Sequence
  Description of Artificial Sequence: Synthetic oligonucleotide
  Antisense strand to SEQ ID NO: 1826713
aacuuuccagaugaggaaa

SEQ ID NO: 1826715 - RNA, 19 nt, Artificial Sequence
  Description of Artificial Sequence: Synthetic oligonucleotide
  Sense strand starting at position 3103 of SEQ ID NO: 1563719
ccagaauggccuugaggau

SEQ ID NO: 1826716 - RNA, 19 nt, Artificial Sequence
  Description of Artificial Sequence: Synthetic oligonucleotide
  Antisense strand to SEQ ID NO: 1826715
auccucaaggccauucugg

SEQ ID NO: 1826717 - RNA, 19 nt, Artificial Sequence
  Description of Artificial Sequence: Synthetic oligonucleotide
  Sense strand starting at position 3178 of SEQ ID NO: 1563719
gcucccaagcaguaauaga

SEQ ID NO: 1826718 - RNA, 19 nt, Artificial Sequence
  Description of Artificial Sequence: Synthetic oligonucleotide
  Antisense strand to SEQ ID NO: 1826717
ucuauuacugcuugggagc

SEQ ID NO: 1826719 - RNA, 19 nt, Artificial Sequence
  Description of Artificial Sequence: Synthetic oligonucleotide
  Sense strand starting at position 3422 of SEQ ID NO: 1563719
gcccucugauccucuugaa

SEQ ID NO: 1826720 - RNA, 19 nt, Artificial Sequence
  Description of Artificial Sequence: Synthetic oligonucleotide
  Antisense strand to SEQ ID NO: 1826719
uucaagaggaucagagggc

SEQ ID NO: 1826721 - RNA, 19 nt, Artificial Sequence
  Description of Artificial Sequence: Synthetic oligonucleotide
  Sense strand starting at position 3596 of SEQ ID NO: 1563719
auaccugcagccugauaga

SEQ ID NO: 1826722 - RNA, 19 nt, Artificial Sequence
  Description of Artificial Sequence: Synthetic oligonucleotide
  Antisense strand to SEQ ID NO: 1826721
ucuaucaggcugcagguau

SEQ ID NO: 1826723 - RNA, 19 nt, Artificial Sequence
  Description of Artificial Sequence: Synthetic oligonucleotide
  Sense strand starting at position 3826 of SEQ ID NO: 1563719
gcuugaaugccauaguuug

SEQ ID NO: 1826724 - RNA, 19 nt, Artificial Sequence
  Description of Artificial Sequence: Synthetic oligonucleotide
  Antisense strand to SEQ ID NO: 1826723
caaacuauggcauucaagc

SEQ ID NO: 1826725 - RNA, 19 nt, Artificial Sequence
  Description of Artificial Sequence: Synthetic oligonucleotide
  Sense strand starting at position 3843 of SEQ ID NO: 1563719
ugccgaucugugcuguagu

SEQ ID NO: 1826726 - RNA, 19 nt, Artificial Sequence
  Description of Artificial Sequence: Synthetic oligonucleotide
  Antisense strand to SEQ ID NO: 1826725
acuacagcacagaucggca

SEQ ID NO: 1826727 - RNA, 19 nt, Artificial Sequence
  Description of Artificial Sequence: Synthetic oligonucleotide
  Sense strand starting at position 187 of SEQ ID NO: 1563720
aagucuuagguugaacuca

SEQ ID NO: 1826728 - RNA, 19 nt, Artificial Sequence
  Description of Artificial Sequence: Synthetic oligonucleotide
  Antisense strand to SEQ ID NO: 1826727
ugaguucaaccuaagacuu

SEQ ID NO: 1826729 - RNA, 19 nt, Artificial Sequence
  Description of Artificial Sequence: Synthetic oligonucleotide
  Sense strand starting at position 209 of SEQ ID NO: 1563720
ccucaaaucuggcuuagaa

SEQ ID NO: 1826730 - RNA, 19 nt, Artificial Sequence
  Description of Artificial Sequence: Synthetic oligonucleotide
  Antisense strand to SEQ ID NO: 1826729
uucuaagccagauuugagg

SEQ ID NO: 1826731 - RNA, 19 nt, Artificial Sequence
  Description of Artificial Sequence: Synthetic oligonucleotide
  Sense strand starting at position 358 of SEQ ID NO: 1563720
gcaaucgagcuguauuucu

SEQ ID NO: 1826732 - RNA, 19 nt, Artificial Sequence
  Description of Artificial Sequence: Synthetic oligonucleotide
  Antisense strand to SEQ ID NO: 1826731
agaaauacagcucgauugc

SEQ ID NO: 1826733 - RNA, 19 nt, Artificial Sequence
  Description of Artificial Sequence: Synthetic oligonucleotide
  Sense strand starting at position 363 of SEQ ID NO: 1563720
cgagcuguauuucuaauga

SEQ ID NO: 1826734 - RNA, 19 nt, Artificial Sequence
  Description of Artificial Sequence: Synthetic oligonucleotide
  Antisense strand to SEQ ID NO: 1826733
ucauuagaaauacagcucg

SEQ ID NO: 1826735 - RNA, 19 nt, Artificial Sequence
  Description of Artificial Sequence: Synthetic oligonucleotide
  Sense strand starting at position 785 of SEQ ID NO: 1563720
ucaagagcuuucuugggau

SEQ ID NO: 1826736 - RNA, 19 nt, Artificial Sequence
  Description of Artificial Sequence: Synthetic oligonucleotide
  Antisense strand to SEQ ID NO: 1826735
aucccaagaaagcucuuga

SEQ ID NO: 1826737 - RNA, 19 nt, Artificial Sequence
  Description of Artificial Sequence: Synthetic oligonucleotide
  Sense strand starting at position 787 of SEQ ID NO: 1563720
aagagcuuucuugggauua

SEQ ID NO: 1826738 - RNA, 19 nt, Artificial Sequence
  Description of Artificial Sequence: Synthetic oligonucleotide
  Antisense strand to SEQ ID NO: 1826737
uaaucccaagaaagcucuu

SEQ ID NO: 1826739 - RNA, 19 nt, Artificial Sequence
  Description of Artificial Sequence: Synthetic oligonucleotide
  Sense strand starting at position 885 of SEQ ID NO: 1563720
cacugugaagcaggauauu

SEQ ID NO: 1826740 - RNA, 19 nt, Artificial Sequence
  Description of Artificial Sequence: Synthetic oligonucleotide
  Antisense strand to SEQ ID NO: 1826739
aauauccugcuucacagug

SEQ ID NO: 1826741 - RNA, 19 nt, Artificial Sequence
  Description of Artificial Sequence: Synthetic oligonucleotide
  Sense strand starting at position 1340 of SEQ ID NO: 1563720
auuggacgucccgaagaga

SEQ ID NO: 1826742 - RNA, 19 nt, Artificial Sequence
  Description of Artificial Sequence: Synthetic oligonucleotide
  Antisense strand to SEQ ID NO: 1826741
ucucuucgggacguccaau

SEQ ID NO: 1826743 - RNA, 19 nt, Artificial Sequence
  Description of Artificial Sequence: Synthetic oligonucleotide
  Sense strand starting at position 1343 of SEQ ID NO: 1563720
ggacgucccgaagagacau

SEQ ID NO: 1826744 - RNA, 19 nt, Artificial Sequence
  Description of Artificial Sequence: Synthetic oligonucleotide
  Antisense strand to SEQ ID NO: 1826743
augucucuucgggacgucc

SEQ ID NO: 1826745 - RNA, 19 nt, Artificial Sequence
  Description of Artificial Sequence: Synthetic oligonucleotide
  Sense strand starting at position 1367 of SEQ ID NO: 1563720
gcucucagaaacgauauga

SEQ ID NO: 1826746 - RNA, 19 nt, Artificial Sequence
  Description of Artificial Sequence: Synthetic oligonucleotide
  Antisense strand to SEQ ID NO: 1826745
ucauaucguuucugagagc

SEQ ID NO: 1826747 - RNA, 19 nt, Artificial Sequence
  Description of Artificial Sequence: Synthetic oligonucleotide
  Sense strand starting at position 1383 of SEQ ID NO: 1563720
ugagaacacuuccuucuga

SEQ ID NO: 1826748 - RNA, 19 nt, Artificial Sequence
  Description of Artificial Sequence: Synthetic oligonucleotide
  Antisense strand to SEQ ID NO: 1826747
ucagaaggaaguguucuca

SEQ ID NO: 1826749 - RNA, 19 nt, Artificial Sequence
  Description of Artificial Sequence: Synthetic oligonucleotide
  Sense strand starting at position 1398 of SEQ ID NO: 1563720
cugauacagcuuuagguau

SEQ ID NO: 1826750 - RNA, 19 nt, Artificial Sequence
  Description of Artificial Sequence: Synthetic oligonucleotide
  Antisense strand to SEQ ID NO: 1826749
auaccuaaagcuguaucag

SEQ ID NO: 1826751 - RNA, 19 nt, Artificial Sequence
  Description of Artificial Sequence: Synthetic oligonucleotide
  Sense strand starting at position 1418 of SEQ ID NO: 1563720
ugauacagcuacucgaaau

SEQ ID NO: 1826752 - RNA, 19 nt, Artificial Sequence
  Description of Artificial Sequence: Synthetic oligonucleotide
  Antisense strand to SEQ ID NO: 1826751
auuucgaguagcuguauca

SEQ ID NO: 1826753 - RNA, 19 nt, Artificial Sequence
  Description of Artificial Sequence: Synthetic oligonucleotide
  Sense strand starting at position 1888 of SEQ ID NO: 1563720
aaggguuuggcagauguaa

SEQ ID NO: 1826754 - RNA, 19 nt, Artificial Sequence
  Description of Artificial Sequence: Synthetic oligonucleotide
  Antisense strand to SEQ ID NO: 1826753
uuacaucugccaaacccuu

SEQ ID NO: 1826755 - RNA, 19 nt, Artificial Sequence
  Description of Artificial Sequence: Synthetic oligonucleotide
  Sense strand starting at position 1922 of SEQ ID NO: 1563720
ucaauuaggaucgauuguu

SEQ ID NO: 1826756 - RNA, 19 nt, Artificial Sequence
  Description of Artificial Sequence: Synthetic oligonucleotide
  Antisense strand to SEQ ID NO: 1826755
aacaaucgauccuaauuga

SEQ ID NO: 1826757 - RNA, 19 nt, Artificial Sequence
  Description of Artificial Sequence: Synthetic oligonucleotide
  Sense strand starting at position 2039 of SEQ ID NO: 1563720
uguaguuuccggagguuug

SEQ ID NO: 1826758 - RNA, 19 nt, Artificial Sequence
  Description of Artificial Sequence: Synthetic oligonucleotide
  Antisense strand to SEQ ID NO: 1826757
caaaccuccggaaacuaca

SEQ ID NO: 1826759 - RNA, 19 nt, Artificial Sequence
  Description of Artificial Sequence: Synthetic oligonucleotide
  Sense strand starting at position 2051 of SEQ ID NO: 1563720
agguuugagcaacggaaga

SEQ ID NO: 1826760 - RNA, 19 nt, Artificial Sequence
  Description of Artificial Sequence: Synthetic oligonucleotide
  Antisense strand to SEQ ID NO: 1826759
ucuuccguugcucaaaccu

SEQ ID NO: 1826761 - RNA, 19 nt, Artificial Sequence
  Description of Artificial Sequence: Synthetic oligonucleotide
  Sense strand starting at position 2322 of SEQ ID NO: 1563720
uggcacaaaugguuugaaa

SEQ ID NO: 1826762 - RNA, 19 nt, Artificial Sequence
  Description of Artificial Sequence: Synthetic oligonucleotide
  Antisense strand to SEQ ID NO: 1826761
uuucaaaccauuugugcca

SEQ ID NO: 1826763 - RNA, 19 nt, Artificial Sequence
  Description of Artificial Sequence: Synthetic oligonucleotide
  Sense strand starting at position 2402 of SEQ ID NO: 1563720
ccauguccacaugagaguu

SEQ ID NO: 1826764 - RNA, 19 nt, Artificial Sequence
  Description of Artificial Sequence: Synthetic oligonucleotide
  Antisense strand to SEQ ID NO: 1826763
aacucucauguggacaugg

SEQ ID NO: 1826765 - RNA, 19 nt, Artificial Sequence
  Description of Artificial Sequence: Synthetic oligonucleotide
  Sense strand starting at position 2448 of SEQ ID NO: 1563720
aucugauaguacuuuccca

SEQ ID NO: 1826766 - RNA, 19 nt, Artificial Sequence
  Description of Artificial Sequence: Synthetic oligonucleotide
  Antisense strand to SEQ ID NO: 1826765
ugggaaaguacuaucagau

SEQ ID NO: 1826767 - RNA, 19 nt, Artificial Sequence
  Description of Artificial Sequence: Synthetic oligonucleotide
  Sense strand starting at position 2452 of SEQ ID NO: 1563720
gauaguacuuucccaagag

SEQ ID NO: 1826768 - RNA, 19 nt, Artificial Sequence
  Description of Artificial Sequence: Synthetic oligonucleotide
  Antisense strand to SEQ ID NO: 1826767
cucuugggaaaguacuauc

SEQ ID NO: 1826769 - RNA, 19 nt, Artificial Sequence
  Description of Artificial Sequence: Synthetic oligonucleotide
  Sense strand starting at position 2486 of SEQ ID NO: 1563720
ggaaauugcuugguagauu

SEQ ID NO: 1826770 - RNA, 19 nt, Artificial Sequence
  Description of Artificial Sequence: Synthetic oligonucleotide
  Antisense strand to SEQ ID NO: 1826769
aaucuaccaagcaauuucc

SEQ ID NO: 1826771 - RNA, 19 nt, Artificial Sequence
  Description of Artificial Sequence: Synthetic oligonucleotide
  Sense strand starting at position 2498 of SEQ ID NO: 1563720
guagauuccgaucaagcaa

SEQ ID NO: 1826772 - RNA, 19 nt, Artificial Sequence
  Description of Artificial Sequence: Synthetic oligonucleotide
  Antisense strand to SEQ ID NO: 1826771
uugcuugaucggaaucuac

SEQ ID NO: 1826773 - RNA, 19 nt, Artificial Sequence
  Description of Artificial Sequence: Synthetic oligonucleotide
  Sense strand starting at position 2506 of SEQ ID NO: 1563720
cgaucaagcaaugauguca

SEQ ID NO: 1826774 - RNA, 19 nt, Artificial Sequence
  Description of Artificial Sequence: Synthetic oligonucleotide
  Antisense strand to SEQ ID NO: 1826773
ugacaucauugcuugaucg

SEQ ID NO: 1826775 - RNA, 19 nt, Artificial Sequence
  Description of Artificial Sequence: Synthetic oligonucleotide
  Sense strand starting at position 2659 of SEQ ID NO: 1563720
gaggguccaguuuaagacu

SEQ ID NO: 1826776 - RNA, 19 nt, Artificial Sequence
  Description of Artificial Sequence: Synthetic oligonucleotide
  Antisense strand to SEQ ID NO: 1826775
agucuuaaacuggacccuc

SEQ ID NO: 1826777 - RNA, 19 nt, Artificial Sequence
  Description of Artificial Sequence: Synthetic oligonucleotide
  Sense strand starting at position 2866 of SEQ ID NO: 1563720
uuuauugaagauugugaca

SEQ ID NO: 1826778 - RNA, 19 nt, Artificial Sequence
  Description of Artificial Sequence: Synthetic oligonucleotide
  Antisense strand to SEQ ID NO: 1826777
ugucacaaucuucaauaaa

SEQ ID NO: 1826779 - RNA, 19 nt, Artificial Sequence
  Description of Artificial Sequence: Synthetic oligonucleotide
  Sense strand starting at position 2884 of SEQ ID NO: 1563720
augcacauuggccauauua

SEQ ID NO: 1826780 - RNA, 19 nt, Artificial Sequence
  Description of Artificial Sequence: Synthetic oligonucleotide
  Antisense strand to SEQ ID NO: 1826779
uaauauggccaaugugcau

SEQ ID NO: 1826781 - RNA, 19 nt, Artificial Sequence
  Description of Artificial Sequence: Synthetic oligonucleotide
  Sense strand starting at position 2928 of SEQ ID NO: 1563720
uauaaaggagguugcaaua

SEQ ID NO: 1826782 - RNA, 19 nt, Artificial Sequence
  Description of Artificial Sequence: Synthetic oligonucleotide
  Antisense strand to SEQ ID NO: 1826781
uauugcaaccuccuuuaua

SEQ ID NO: 1826783 - RNA, 19 nt, Artificial Sequence
  Description of Artificial Sequence: Synthetic oligonucleotide
  Sense strand starting at position 3073 of SEQ ID NO: 1563720
aaacuugauucguccagga

SEQ ID NO: 1826784 - RNA, 19 nt, Artificial Sequence
  Description of Artificial Sequence: Synthetic oligonucleotide
  Antisense strand to SEQ ID NO: 1826783
uccuggacgaaucaaguuu

SEQ ID NO: 1826785 - RNA, 19 nt, Artificial Sequence
  Description of Artificial Sequence: Synthetic oligonucleotide
  Sense strand starting at position 3075 of SEQ ID NO: 1563720
acuugauucguccaggaug

SEQ ID NO: 1826786 - RNA, 19 nt, Artificial Sequence
  Description of Artificial Sequence: Synthetic oligonucleotide
  Antisense strand to SEQ ID NO: 1826785
cauccuggacgaaucaagu

SEQ ID NO: 1826787 - RNA, 19 nt, Artificial Sequence
  Description of Artificial Sequence: Synthetic oligonucleotide
  Sense strand starting at position 3078 of SEQ ID NO: 1563720
ugauucguccaggaugacu

SEQ ID NO: 1826788 - RNA, 19 nt, Artificial Sequence
  Description of Artificial Sequence: Synthetic oligonucleotide
  Antisense strand to SEQ ID NO: 1826787
agucauccuggacgaauca

SEQ ID NO: 1826789 - RNA, 19 nt, Artificial Sequence
  Description of Artificial Sequence: Synthetic oligonucleotide
  Sense strand starting at position 3089 of SEQ ID NO: 1563720
ggaugacuuuguguuauga

SEQ ID NO: 1826790 - RNA, 19 nt, Artificial Sequence
  Description of Artificial Sequence: Synthetic oligonucleotide
  Antisense strand to SEQ ID NO: 1826789
ucauaacacaaagucaucc

SEQ ID NO: 1826791 - RNA, 19 nt, Artificial Sequence
  Description of Artificial Sequence: Synthetic oligonucleotide
  Sense strand starting at position 3181 of SEQ ID NO: 1563720
gugcucuguaacuagaaug

SEQ ID NO: 1826792 - RNA, 19 nt, Artificial Sequence
  Description of Artificial Sequence: Synthetic oligonucleotide
  Antisense strand to SEQ ID NO: 1826791
cauucuaguuacagagcac

SEQ ID NO: 1826793 - RNA, 19 nt, Artificial Sequence
  Description of Artificial Sequence: Synthetic oligonucleotide
  Sense strand starting at position 3186 of SEQ ID NO: 1563720
cuguaacuagaauguaaga

SEQ ID NO: 1826794 - RNA, 19 nt, Artificial Sequence
  Description of Artificial Sequence: Synthetic oligonucleotide
  Antisense strand to SEQ ID NO: 1826793
ucuuacauucuaguuacag

SEQ ID NO: 1826795 - RNA, 19 nt, Artificial Sequence
  Description of Artificial Sequence: Synthetic oligonucleotide
  Sense strand starting at position 3281 of SEQ ID NO: 1563720
aucugauauuaaguguaca

SEQ ID NO: 1826796 - RNA, 19 nt, Artificial Sequence
  Description of Artificial Sequence: Synthetic oligonucleotide
  Antisense strand to SEQ ID NO: 1826795
uguacacuuaauaucagau

SEQ ID NO: 1826797 - RNA, 19 nt, Artificial Sequence
  Description of Artificial Sequence: Synthetic oligonucleotide
  Sense strand starting at position 3284 of SEQ ID NO: 1563720
ugauauuaaguguacagua

SEQ ID NO: 1826798 - RNA, 19 nt, Artificial Sequence
  Description of Artificial Sequence: Synthetic oligonucleotide
  Antisense strand to SEQ ID NO: 1826797
uacuguacacuuaauauca

SEQ ID NO: 1826799 - RNA, 19 nt, Artificial Sequence
  Description of Artificial Sequence: Synthetic oligonucleotide
  Sense strand starting at position 3712 of SEQ ID NO: 1563720
ugcagagucaaugaaugua

SEQ ID NO: 1826800 - RNA, 19 nt, Artificial Sequence
  Description of Artificial Sequence: Synthetic oligonucleotide
  Antisense strand to SEQ ID NO: 1826799
uacauucauugacucugca

SEQ ID NO: 1826801 - RNA, 19 nt, Artificial Sequence
  Description of Artificial Sequence: Synthetic oligonucleotide
  Sense strand starting at position 3876 of SEQ ID NO: 1563720
agggcaugcugacuagaau

SEQ ID NO: 1826802 - RNA, 19 nt, Artificial Sequence
  Description of Artificial Sequence: Synthetic oligonucleotide
  Antisense strand to SEQ ID NO: 1826801
auucuagucagcaugcccu

SEQ ID NO: 1826803 - RNA, 19 nt, Artificial Sequence
  Description of Artificial Sequence: Synthetic oligonucleotide
  Sense strand starting at position 3877 of SEQ ID NO: 1563720
gggcaugcugacuagaaug

SEQ ID NO: 1826804 - RNA, 19 nt, Artificial Sequence
  Description of Artificial Sequence: Synthetic oligonucleotide
  Antisense strand to SEQ ID NO: 1826803
cauucuagucagcaugccc

SEQ ID NO: 1826805 - RNA, 19 nt, Artificial Sequence
  Description of Artificial Sequence: Synthetic oligonucleotide
  Sense strand starting at position 3879 of SEQ ID NO: 1563720
gcaugcugacuagaaugaa

SEQ ID NO: 1826806 - RNA, 19 nt, Artificial Sequence
  Description of Artificial Sequence: Synthetic oligonucleotide
  Antisense strand to SEQ ID NO: 1826805
uucauucuagucagcaugc

SEQ ID NO: 1826807 - RNA, 19 nt, Artificial Sequence
  Description of Artificial Sequence: Synthetic oligonucleotide
  Sense strand starting at position 33 of SEQ ID NO: 1563721
gaggucaaugcuuguaaug

SEQ ID NO: 1826808 - RNA, 19 nt, Artificial Sequence
  Description of Artificial Sequence: Synthetic oligonucleotide
  Antisense strand to SEQ ID NO: 1826807
cauuacaagcauugaccuc

SEQ ID NO: 1826809 - RNA, 19 nt, Artificial Sequence
  Description of Artificial Sequence: Synthetic oligonucleotide
  Sense strand starting at position 154 of SEQ ID NO: 1563721
ugagacaucuuguuuggua

SEQ ID NO: 1826810 - RNA, 19 nt, Artificial Sequence
  Description of Artificial Sequence: Synthetic oligonucleotide
  Antisense strand to SEQ ID NO: 1826809
uaccaaacaagaugucuca

SEQ ID NO: 1826811 - RNA, 19 nt, Artificial Sequence
  Description of Artificial Sequence: Synthetic oligonucleotide
  Sense strand starting at position 155 of SEQ ID NO: 1563721
gagacaucuuguuugguau

SEQ ID NO: 1826812 - RNA, 19 nt, Artificial Sequence
  Description of Artificial Sequence: Synthetic oligonucleotide
  Antisense strand to SEQ ID NO: 1826811
auaccaaacaagaugucuc

SEQ ID NO: 1826813 - RNA, 19 nt, Artificial Sequence
  Description of Artificial Sequence: Synthetic oligonucleotide
  Sense strand starting at position 156 of SEQ ID NO: 1563721
agacaucuuguuugguauu

SEQ ID NO: 1826814 - RNA, 19 nt, Artificial Sequence
  Description of Artificial Sequence: Synthetic oligonucleotide
  Antisense strand to SEQ ID NO: 1826813
aauaccaaacaagaugucu

SEQ ID NO: 1826815 - RNA, 19 nt, Artificial Sequence
  Description of Artificial Sequence: Synthetic oligonucleotide
  Sense strand starting at position 158 of SEQ ID NO: 1563721
acaucuuguuugguauuaa

SEQ ID NO: 1826816 - RNA, 19 nt, Artificial Sequence
  Description of Artificial Sequence: Synthetic oligonucleotide
  Antisense strand to SEQ ID NO: 1826815
uuaauaccaaacaagaugu

SEQ ID NO: 1826817 - RNA, 19 nt, Artificial Sequence
  Description of Artificial Sequence: Synthetic oligonucleotide
  Sense strand starting at position 436 of SEQ ID NO: 1563721
agagaaugguuucugcaug

SEQ ID NO: 1826818 - RNA, 19 nt, Artificial Sequence
  Description of Artificial Sequence: Synthetic oligonucleotide
  Antisense strand to SEQ ID NO: 1826817
caugcagaaaccauucucu

SEQ ID NO: 1826819 - RNA, 19 nt, Artificial Sequence
  Description of Artificial Sequence: Synthetic oligonucleotide
  Sense strand starting at position 467 of SEQ ID NO: 1563721
gaaacacugcuagggaauu

SEQ ID NO: 1826820 - RNA, 19 nt, Artificial Sequence
  Description of Artificial Sequence: Synthetic oligonucleotide
  Antisense strand to SEQ ID NO: 1826819
aauucccuagcaguguuuc

SEQ ID NO: 1826821 - RNA, 19 nt, Artificial Sequence
  Description of Artificial Sequence: Synthetic oligonucleotide
  Sense strand starting at position 491 of SEQ ID NO: 1563721
gcaauaugaugagcagaaa

SEQ ID NO: 1826822 - RNA, 19 nt, Artificial Sequence
  Description of Artificial Sequence: Synthetic oligonucleotide
  Antisense strand to SEQ ID NO: 1826821
uuucugcucaucauauugc

SEQ ID NO: 1826823 - RNA, 19 nt, Artificial Sequence
  Description of Artificial Sequence: Synthetic oligonucleotide
  Sense strand starting at position 562 of SEQ ID NO: 1563721
uggaucaauccagaaucgu

SEQ ID NO: 1826824 - RNA, 19 nt, Artificial Sequence
  Description of Artificial Sequence: Synthetic oligonucleotide
  Antisense strand to SEQ ID NO: 1826823
acgauucuggauugaucca

SEQ ID NO: 1826825 - RNA, 19 nt, Artificial Sequence
  Description of Artificial Sequence: Synthetic oligonucleotide
  Sense strand starting at position 740 of SEQ ID NO: 1563721
caggucagcugucuacaaa

SEQ ID NO: 1826826 - RNA, 19 nt, Artificial Sequence
  Description of Artificial Sequence: Synthetic oligonucleotide
  Antisense strand to SEQ ID NO: 1826825
uuuguagacagcugaccug

SEQ ID NO: 1826827 - RNA, 19 nt, Artificial Sequence
  Description of Artificial Sequence: Synthetic oligonucleotide
  Sense strand starting at position 758 of SEQ ID NO: 1563721
agaguaugcagacauguuu

SEQ ID NO: 1826828 - RNA, 19 nt, Artificial Sequence
  Description of Artificial Sequence: Synthetic oligonucleotide
  Antisense strand to SEQ ID NO: 1826827
aaacaugucugcauacucu

SEQ ID NO: 1826829 - RNA, 19 nt, Artificial Sequence
  Description of Artificial Sequence: Synthetic oligonucleotide
  Sense strand starting at position 764 of SEQ ID NO: 1563721
ugcagacauguuuauagau

SEQ ID NO: 1826830 - RNA, 19 nt, Artificial Sequence
  Description of Artificial Sequence: Synthetic oligonucleotide
  Antisense strand to SEQ ID NO: 1826829
aucuauaaacaugucugca

SEQ ID NO: 1826831 - RNA, 19 nt, Artificial Sequence
  Description of Artificial Sequence: Synthetic oligonucleotide
  Sense strand starting at position 796 of SEQ ID NO: 1563721
uggugauuaugugucauag

SEQ ID NO: 1826832 - RNA, 19 nt, Artificial Sequence
  Description of Artificial Sequence: Synthetic oligonucleotide
  Antisense strand to SEQ ID NO: 1826831
cuaugacacauaaucacca

SEQ ID NO: 1826833 - RNA, 19 nt, Artificial Sequence
  Description of Artificial Sequence: Synthetic oligonucleotide
  Sense strand starting at position 837 of SEQ ID NO: 1563721
gguagagcucagcauaguu

SEQ ID NO: 1826834 - RNA, 19 nt, Artificial Sequence
  Description of Artificial Sequence: Synthetic oligonucleotide
  Antisense strand to SEQ ID NO: 1826833
aacuaugcugagcucuacc

SEQ ID NO: 1826835 - RNA, 19 nt, Artificial Sequence
  Description of Artificial Sequence: Synthetic oligonucleotide
  Sense strand starting at position 851 of SEQ ID NO: 1563721
uaguucugucuugaguuaa

SEQ ID NO: 1826836 - RNA, 19 nt, Artificial Sequence
  Description of Artificial Sequence: Synthetic oligonucleotide
  Antisense strand to SEQ ID NO: 1826835
uuaacucaagacagaacua

SEQ ID NO: 1826837 - RNA, 19 nt, Artificial Sequence
  Description of Artificial Sequence: Synthetic oligonucleotide
  Sense strand starting at position 971 of SEQ ID NO: 1563721
aaugccucggauugauaga

SEQ ID NO: 1826838 - RNA, 19 nt, Artificial Sequence
  Description of Artificial Sequence: Synthetic oligonucleotide
  Antisense strand to SEQ ID NO: 1826837
ucuaucaauccgaggcauu

SEQ ID NO: 1826839 - RNA, 19 nt, Artificial Sequence
  Description of Artificial Sequence: Synthetic oligonucleotide
  Sense strand starting at position 1165 of SEQ ID NO: 1563721
cgggauaauuccuuauggu

SEQ ID NO: 1826840 - RNA, 19 nt, Artificial Sequence
  Description of Artificial Sequence: Synthetic oligonucleotide
  Antisense strand to SEQ ID NO: 1826839
accauaaggaauuaucccg

SEQ ID NO: 1826841 - RNA, 19 nt, Artificial Sequence
  Description of Artificial Sequence: Synthetic oligonucleotide
  Sense strand starting at position 1413 of SEQ ID NO: 1563721
gcaaguauccuccaggcua

SEQ ID NO: 1826842 - RNA, 19 nt, Artificial Sequence
  Description of Artificial Sequence: Synthetic oligonucleotide
  Antisense strand to SEQ ID NO: 1826841
uagccuggaggauacuugc

SEQ ID NO: 1826843 - RNA, 19 nt, Artificial Sequence
  Description of Artificial Sequence: Synthetic oligonucleotide
  Sense strand starting at position 2393 of SEQ ID NO: 1563721
gacaaauggccuuggucag

SEQ ID NO: 1826844 - RNA, 19 nt, Artificial Sequence
  Description of Artificial Sequence: Synthetic oligonucleotide
  Antisense strand to SEQ ID NO: 1826843
cugaccaaggccauuuguc

SEQ ID NO: 1826845 - RNA, 19 nt, Artificial Sequence
  Description of Artificial Sequence: Synthetic oligonucleotide
  Sense strand starting at position 2593 of SEQ ID NO: 1563721
ugcauugucccagagcaaa

SEQ ID NO: 1826846 - RNA, 19 nt, Artificial Sequence
  Description of Artificial Sequence: Synthetic oligonucleotide
  Antisense strand to SEQ ID NO: 1826845
uuugcucugggacaaugca

SEQ ID NO: 1826847 - RNA, 19 nt, Artificial Sequence
  Description of Artificial Sequence: Synthetic oligonucleotide
  Sense strand starting at position 2768 of SEQ ID NO: 1563721
ucccguuugccaucgucaa

SEQ ID NO: 1826848 - RNA, 19 nt, Artificial Sequence
  Description of Artificial Sequence: Synthetic oligonucleotide
  Antisense strand to SEQ ID NO: 1826847
uugacgauggcaaacggga

SEQ ID NO: 1826849 - RNA, 19 nt, Artificial Sequence
  Description of Artificial Sequence: Synthetic oligonucleotide
  Sense strand starting at position 2979 of SEQ ID NO: 1563721
ggaauaguuugagcccaga

SEQ ID NO: 1826850 - RNA, 19 nt, Artificial Sequence
  Description of Artificial Sequence: Synthetic oligonucleotide
  Antisense strand to SEQ ID NO: 1826849
ucugggcucaaacuauucc

SEQ ID NO: 1826851 - RNA, 19 nt, Artificial Sequence
  Description of Artificial Sequence: Synthetic oligonucleotide
  Sense strand starting at position 3001 of SEQ ID NO: 1563721
uuaagaacugccugggcaa

SEQ ID NO: 1826852 - RNA, 19 nt, Artificial Sequence
  Description of Artificial Sequence: Synthetic oligonucleotide
  Antisense strand to SEQ ID NO: 1826851
uugcccaggcaguucuuaa

SEQ ID NO: 1826853 - RNA, 19 nt, Artificial Sequence
  Description of Artificial Sequence: Synthetic oligonucleotide
  Sense strand starting at position 3002 of SEQ ID NO: 1563721
uaagaacugccugggcaau

SEQ ID NO: 1826854 - RNA, 19 nt, Artificial Sequence
  Description of Artificial Sequence: Synthetic oligonucleotide
  Antisense strand to SEQ ID NO: 1826853
auugcccaggcaguucuua

SEQ ID NO: 1826855 - RNA, 19 nt, Artificial Sequence
  Description of Artificial Sequence: Synthetic oligonucleotide
  Sense strand starting at position 3085 of SEQ ID NO: 1563721
guguauuucuaguuuagug

SEQ ID NO: 1826856 - RNA, 19 nt, Artificial Sequence
  Description of Artificial Sequence: Synthetic oligonucleotide
  Antisense strand to SEQ ID NO: 1826855
cacuaaacuagaaauacac

SEQ ID NO: 1826857 - RNA, 19 nt, Artificial Sequence
  Description of Artificial Sequence: Synthetic oligonucleotide
  Sense strand starting at position 3092 of SEQ ID NO: 1563721
ucuaguuuagugcagacau

SEQ ID NO: 1826858 - RNA, 19 nt, Artificial Sequence
  Description of Artificial Sequence: Synthetic oligonucleotide
  Antisense strand to SEQ ID NO: 1826857
augucugcacuaaacuaga

SEQ ID NO: 1826859 - RNA, 19 nt, Artificial Sequence
  Description of Artificial Sequence: Synthetic oligonucleotide
  Sense strand starting at position 3094 of SEQ ID NO: 1563721
uaguuuagugcagacauag

SEQ ID NO: 1826860 - RNA, 19 nt, Artificial Sequence
  Description of Artificial Sequence: Synthetic oligonucleotide
  Antisense strand to SEQ ID NO: 1826859
cuaugucugcacuaaacua

SEQ ID NO: 1826861 - RNA, 19 nt, Artificial Sequence
  Description of Artificial Sequence: Synthetic oligonucleotide
  Sense strand starting at position 3232 of SEQ ID NO: 1563721
uuaguaccagugcauaaua

SEQ ID NO: 1826862 - RNA, 19 nt, Artificial Sequence
  Description of Artificial Sequence: Synthetic oligonucleotide
  Antisense strand to SEQ ID NO: 1826861
uauuaugcacugguacuaa

SEQ ID NO: 1826863 - RNA, 19 nt, Artificial Sequence
  Description of Artificial Sequence: Synthetic oligonucleotide
  Sense strand starting at position 3234 of SEQ ID NO: 1563721
aguaccagugcauaauaua

SEQ ID NO: 1826864 - RNA, 19 nt, Artificial Sequence
  Description of Artificial Sequence: Synthetic oligonucleotide
  Antisense strand to SEQ ID NO: 1826863
uauauuaugcacugguacu

SEQ ID NO: 1826865 - RNA, 19 nt, Artificial Sequence
  Description of Artificial Sequence: Synthetic oligonucleotide
  Sense strand starting at position 3263 of SEQ ID NO: 1563721
aauuauguguucuuagagg

SEQ ID NO: 1826866 - RNA, 19 nt, Artificial Sequence
  Description of Artificial Sequence: Synthetic oligonucleotide
  Antisense strand to SEQ ID NO: 1826865
ccucuaagaacacauaauu

SEQ ID NO: 1826867 - RNA, 19 nt, Artificial Sequence
  Description of Artificial Sequence: Synthetic oligonucleotide
  Sense strand starting at position 3311 of SEQ ID NO: 1563721
augcaaucgugauuucccu

SEQ ID NO: 1826868 - RNA, 19 nt, Artificial Sequence
  Description of Artificial Sequence: Synthetic oligonucleotide
  Antisense strand to SEQ ID NO: 1826867
agggaaaucacgauugcau

SEQ ID NO: 1826869 - RNA, 19 nt, Artificial Sequence
  Description of Artificial Sequence: Synthetic oligonucleotide
  Sense strand starting at position 3320 of SEQ ID NO: 1563721
ugauuucccuuugaggaca

SEQ ID NO: 1826870 - RNA, 19 nt, Artificial Sequence
  Description of Artificial Sequence: Synthetic oligonucleotide
  Antisense strand to SEQ ID NO: 1826869
uguccucaaagggaaauca

SEQ ID NO: 1826871 - RNA, 19 nt, Artificial Sequence
  Description of Artificial Sequence: Synthetic oligonucleotide
  Sense strand starting at position 3379 of SEQ ID NO: 1563721
ggacuugcgccucaaauac

SEQ ID NO: 1826872 - RNA, 19 nt, Artificial Sequence
  Description of Artificial Sequence: Synthetic oligonucleotide
  Antisense strand to SEQ ID NO: 1826871
guauuugaggcgcaagucc

SEQ ID NO: 1826873 - RNA, 19 nt, Artificial Sequence
  Description of Artificial Sequence: Synthetic oligonucleotide
  Sense strand starting at position 3412 of SEQ ID NO: 1563721
ucuguauuaguuuacuaca

SEQ ID NO: 1826874 - RNA, 19 nt, Artificial Sequence
  Description of Artificial Sequence: Synthetic oligonucleotide
  Antisense strand to SEQ ID NO: 1826873
uguaguaaacuaauacaga

SEQ ID NO: 1826875 - RNA, 19 nt, Artificial Sequence
  Description of Artificial Sequence: Synthetic oligonucleotide
  Sense strand starting at position 3516 of SEQ ID NO: 1563721
ucaagaugucagcagucuu

SEQ ID NO: 1826876 - RNA, 19 nt, Artificial Sequence
  Description of Artificial Sequence: Synthetic oligonucleotide
  Antisense strand to SEQ ID NO: 1826875
aagacugcugacaucuuga

SEQ ID NO: 1826877 - RNA, 19 nt, Artificial Sequence
  Description of Artificial Sequence: Synthetic oligonucleotide
  Sense strand starting at position 3561 of SEQ ID NO: 1563721
ggaccuauuccaggucuuu

SEQ ID NO: 1826878 - RNA, 19 nt, Artificial Sequence
  Description of Artificial Sequence: Synthetic oligonucleotide
  Antisense strand to SEQ ID NO: 1826877
aaagaccuggaauaggucc

SEQ ID NO: 1826879 - RNA, 19 nt, Artificial Sequence
  Description of Artificial Sequence: Synthetic oligonucleotide
  Sense strand starting at position 3676 of SEQ ID NO: 1563721
acacgauucuuauuggacu

SEQ ID NO: 1826880 - RNA, 19 nt, Artificial Sequence
  Description of Artificial Sequence: Synthetic oligonucleotide
  Antisense strand to SEQ ID NO: 1826879
aguccaauaagaaucgugu

SEQ ID NO: 1826881 - RNA, 19 nt, Artificial Sequence
  Description of Artificial Sequence: Synthetic oligonucleotide
  Sense strand starting at position 3844 of SEQ ID NO: 1563721
agcugugguaccuacagua

SEQ ID NO: 1826882 - RNA, 19 nt, Artificial Sequence
  Description of Artificial Sequence: Synthetic oligonucleotide
  Antisense strand to SEQ ID NO: 1826881
uacuguagguaccacagcu

SEQ ID NO: 1826883 - RNA, 19 nt, Artificial Sequence
  Description of Artificial Sequence: Synthetic oligonucleotide
  Sense strand starting at position 3879 of SEQ ID NO: 1563721
ccaccuggagucuguagaa

SEQ ID NO: 1826884 - RNA, 19 nt, Artificial Sequence
  Description of Artificial Sequence: Synthetic oligonucleotide
  Antisense strand to SEQ ID NO: 1826883
uucuacagacuccaggugg

SEQ ID NO: 1826885 - RNA, 19 nt, Artificial Sequence
  Description of Artificial Sequence: Synthetic oligonucleotide
  Sense strand starting at position 3892 of SEQ ID NO: 1563721
guagaauucucccucccag

SEQ ID NO: 1826886 - RNA, 19 nt, Artificial Sequence
  Description of Artificial Sequence: Synthetic oligonucleotide
  Antisense strand to SEQ ID NO: 1826885
cugggagggagaauucuac

SEQ ID NO: 1826887 - RNA, 19 nt, Artificial Sequence
  Description of Artificial Sequence: Synthetic oligonucleotide
  Sense strand starting at position 60 of SEQ ID NO: 1563722
aauaauugacgugggaauu

SEQ ID NO: 1826888 - RNA, 19 nt, Artificial Sequence
  Description of Artificial Sequence: Synthetic oligonucleotide
  Antisense strand to SEQ ID NO: 1826887
aauucccacgucaauuauu

SEQ ID NO: 1826889 - RNA, 19 nt, Artificial Sequence
  Description of Artificial Sequence: Synthetic oligonucleotide
  Sense strand starting at position 61 of SEQ ID NO: 1563722
auaauugacgugggaauuc

SEQ ID NO: 1826890 - RNA, 19 nt, Artificial Sequence
  Description of Artificial Sequence: Synthetic oligonucleotide
  Antisense strand to SEQ ID NO: 1826889
gaauucccacgucaauuau

SEQ ID NO: 1826891 - RNA, 19 nt, Artificial Sequence
  Description of Artificial Sequence: Synthetic oligonucleotide
  Sense strand starting at position 86 of SEQ ID NO: 1563722
aagugaggucaguaacacu

SEQ ID NO: 1826892 - RNA, 19 nt, Artificial Sequence
  Description of Artificial Sequence: Synthetic oligonucleotide
  Antisense strand to SEQ ID NO: 1826891
aguguuacugaccucacuu

SEQ ID NO: 1826893 - RNA, 19 nt, Artificial Sequence
  Description of Artificial Sequence: Synthetic oligonucleotide
  Sense strand starting at position 110 of SEQ ID NO: 1563722
uagauuaauuuggaaggca

SEQ ID NO: 1826894 - RNA, 19 nt, Artificial Sequence
  Description of Artificial Sequence: Synthetic oligonucleotide
  Antisense strand to SEQ ID NO: 1826893
ugccuuccaaauuaaucua

SEQ ID NO: 1826895 - RNA, 19 nt, Artificial Sequence
  Description of Artificial Sequence: Synthetic oligonucleotide
  Sense strand starting at position 157 of SEQ ID NO: 1563722
uuuccaaaguggguaagau

SEQ ID NO: 1826896 - RNA, 19 nt, Artificial Sequence
  Description of Artificial Sequence: Synthetic oligonucleotide
  Antisense strand to SEQ ID NO: 1826895
aucuuacccacuuuggaaa

SEQ ID NO: 1826897 - RNA, 19 nt, Artificial Sequence
  Description of Artificial Sequence: Synthetic oligonucleotide
  Sense strand starting at position 165 of SEQ ID NO: 1563722
guggguaagaugugaauua

SEQ ID NO: 1826898 - RNA, 19 nt, Artificial Sequence
  Description of Artificial Sequence: Synthetic oligonucleotide
  Antisense strand to SEQ ID NO: 1826897
uaauucacaucuuacccac

SEQ ID NO: 1826899 - RNA, 19 nt, Artificial Sequence
  Description of Artificial Sequence: Synthetic oligonucleotide
  Sense strand starting at position 281 of SEQ ID NO: 1563722
uugugcccugaagaauaaa

SEQ ID NO: 1826900 - RNA, 19 nt, Artificial Sequence
  Description of Artificial Sequence: Synthetic oligonucleotide
  Antisense strand to SEQ ID NO: 1826899
uuuauucuucagggcacaa

SEQ ID NO: 1826901 - RNA, 19 nt, Artificial Sequence
  Description of Artificial Sequence: Synthetic oligonucleotide
  Sense strand starting at position 359 of SEQ ID NO: 1563722
uggaauuaggcuugaaaca

SEQ ID NO: 1826902 - RNA, 19 nt, Artificial Sequence
  Description of Artificial Sequence: Synthetic oligonucleotide
  Antisense strand to SEQ ID NO: 1826901
uguuucaagccuaauucca

SEQ ID NO: 1826903 - RNA, 19 nt, Artificial Sequence
  Description of Artificial Sequence: Synthetic oligonucleotide
  Sense strand starting at position 394 of SEQ ID NO: 1563722
caagaauauguugguuaaa

SEQ ID NO: 1826904 - RNA, 19 nt, Artificial Sequence
  Description of Artificial Sequence: Synthetic oligonucleotide
  Antisense strand to SEQ ID NO: 1826903
uuuaaccaacauauucuug

SEQ ID NO: 1826905 - RNA, 19 nt, Artificial Sequence
  Description of Artificial Sequence: Synthetic oligonucleotide
  Sense strand starting at position 395 of SEQ ID NO: 1563722
aagaauauguugguuaaag

SEQ ID NO: 1826906 - RNA, 19 nt, Artificial Sequence
  Description of Artificial Sequence: Synthetic oligonucleotide
  Antisense strand to SEQ ID NO: 1826905
cuuuaaccaacauauucuu

SEQ ID NO: 1826907 - RNA, 19 nt, Artificial Sequence
  Description of Artificial Sequence: Synthetic oligonucleotide
  Sense strand starting at position 396 of SEQ ID NO: 1563722
agaauauguugguuaaaga

SEQ ID NO: 1826908 - RNA, 19 nt, Artificial Sequence
  Description of Artificial Sequence: Synthetic oligonucleotide
  Antisense strand to SEQ ID NO: 1826907
ucuuuaaccaacauauucu

SEQ ID NO: 1826909 - RNA, 19 nt, Artificial Sequence
  Description of Artificial Sequence: Synthetic oligonucleotide
  Sense strand starting at position 466 of SEQ ID NO: 1563722
ggugaagacugccuaggaa

SEQ ID NO: 1826910 - RNA, 19 nt, Artificial Sequence
  Description of Artificial Sequence: Synthetic oligonucleotide
  Antisense strand to SEQ ID NO: 1826909
uuccuaggcagucuucacc

SEQ ID NO: 1826911 - RNA, 19 nt, Artificial Sequence
  Description of Artificial Sequence: Synthetic oligonucleotide
  Sense strand starting at position 502 of SEQ ID NO: 1563722
augggugcugaugagaauu

SEQ ID NO: 1826912 - RNA, 19 nt, Artificial Sequence
  Description of Artificial Sequence: Synthetic oligonucleotide
  Antisense strand to SEQ ID NO: 1826911
aauucucaucagcacccau

SEQ ID NO: 1826913 - RNA, 19 nt, Artificial Sequence
  Description of Artificial Sequence: Synthetic oligonucleotide
  Sense strand starting at position 516 of SEQ ID NO: 1563722
gaauuuagauuguaaagga

SEQ ID NO: 1826914 - RNA, 19 nt, Artificial Sequence
  Description of Artificial Sequence: Synthetic oligonucleotide
  Antisense strand to SEQ ID NO: 1826913
uccuuuacaaucuaaauuc

SEQ ID NO: 1826915 - RNA, 19 nt, Artificial Sequence
  Description of Artificial Sequence: Synthetic oligonucleotide
  Sense strand starting at position 630 of SEQ ID NO: 1563722
uugucaggagucuaugauc

SEQ ID NO: 1826916 - RNA, 19 nt, Artificial Sequence
  Description of Artificial Sequence: Synthetic oligonucleotide
  Antisense strand to SEQ ID NO: 1826915
gaucauagacuccugacaa

SEQ ID NO: 1826917 - RNA, 19 nt, Artificial Sequence
  Description of Artificial Sequence: Synthetic oligonucleotide
  Sense strand starting at position 635 of SEQ ID NO: 1563722
aggagucuaugaucagacu

SEQ ID NO: 1826918 - RNA, 19 nt, Artificial Sequence
  Description of Artificial Sequence: Synthetic oligonucleotide
  Antisense strand to SEQ ID NO: 1826917
agucugaucauagacuccu

SEQ ID NO: 1826919 - RNA, 19 nt, Artificial Sequence
  Description of Artificial Sequence: Synthetic oligonucleotide
  Sense strand starting at position 728 of SEQ ID NO: 1563722
cccacaacugcugaguaau

SEQ ID NO: 1826920 - RNA, 19 nt, Artificial Sequence
  Description of Artificial Sequence: Synthetic oligonucleotide
  Antisense strand to SEQ ID NO: 1826919
auuacucagcaguuguggg

SEQ ID NO: 1826921 - RNA, 19 nt, Artificial Sequence
  Description of Artificial Sequence: Synthetic oligonucleotide
  Sense strand starting at position 896 of SEQ ID NO: 1563722
uuuauaagagauuguccca

SEQ ID NO: 1826922 - RNA, 19 nt, Artificial Sequence
  Description of Artificial Sequence: Synthetic oligonucleotide
  Antisense strand to SEQ ID NO: 1826921
ugggacaaucucuuauaaa

SEQ ID NO: 1826923 - RNA, 19 nt, Artificial Sequence
  Description of Artificial Sequence: Synthetic oligonucleotide
  Sense strand starting at position 974 of SEQ ID NO: 1563722
uucugagucuuuccaaaga

SEQ ID NO: 1826924 - RNA, 19 nt, Artificial Sequence
  Description of Artificial Sequence: Synthetic oligonucleotide
  Antisense strand to SEQ ID NO: 1826923
ucuuuggaaagacucagaa

SEQ ID NO: 1826925 - RNA, 19 nt, Artificial Sequence
  Description of Artificial Sequence: Synthetic oligonucleotide
  Sense strand starting at position 1460 of SEQ ID NO: 1563722
ugaguagggcugugagaaa

SEQ ID NO: 1826926 - RNA, 19 nt, Artificial Sequence
  Description of Artificial Sequence: Synthetic oligonucleotide
  Antisense strand to SEQ ID NO: 1826925
uuucucacagcccuacuca

SEQ ID NO: 1826927 - RNA, 19 nt, Artificial Sequence
  Description of Artificial Sequence: Synthetic oligonucleotide
  Sense strand starting at position 1475 of SEQ ID NO: 1563722
gaaaucuacuguccaguga

SEQ ID NO: 1826928 - RNA, 19 nt, Artificial Sequence
  Description of Artificial Sequence: Synthetic oligonucleotide
  Antisense strand to SEQ ID NO: 1826927
ucacuggacaguagauuuc

SEQ ID NO: 1826929 - RNA, 19 nt, Artificial Sequence
  Description of Artificial Sequence: Synthetic oligonucleotide
  Sense strand starting at position 1642 of SEQ ID NO: 1563722
uccgcagcucguuucuaau

SEQ ID NO: 1826930 - RNA, 19 nt, Artificial Sequence
  Description of Artificial Sequence: Synthetic oligonucleotide
  Antisense strand to SEQ ID NO: 1826929
auuagaaacgagcugcgga

SEQ ID NO: 1826931 - RNA, 19 nt, Artificial Sequence
  Description of Artificial Sequence: Synthetic oligonucleotide
  Sense strand starting at position 1797 of SEQ ID NO: 1563722
agcauuaucccggugcuuu

SEQ ID NO: 1826932 - RNA, 19 nt, Artificial Sequence
  Description of Artificial Sequence: Synthetic oligonucleotide
  Antisense strand to SEQ ID NO: 1826931
aaagcaccgggauaaugcu

SEQ ID NO: 1826933 - RNA, 19 nt, Artificial Sequence
  Description of Artificial Sequence: Synthetic oligonucleotide
  Sense strand starting at position 1867 of SEQ ID NO: 1563722
gguguggugcgguuacgaa

SEQ ID NO: 1826934 - RNA, 19 nt, Artificial Sequence
  Description of Artificial Sequence: Synthetic oligonucleotide
  Antisense strand to SEQ ID NO: 1826933
uucguaaccgcaccacacc

SEQ ID NO: 1826935 - RNA, 19 nt, Artificial Sequence
  Description of Artificial Sequence: Synthetic oligonucleotide
  Sense strand starting at position 2218 of SEQ ID NO: 1563722
ugacuauaguaguuacaug

SEQ ID NO: 1826936 - RNA, 19 nt, Artificial Sequence
  Description of Artificial Sequence: Synthetic oligonucleotide
  Antisense strand to SEQ ID NO: 1826935
cauguaacuacuauaguca

SEQ ID NO: 1826937 - RNA, 19 nt, Artificial Sequence
  Description of Artificial Sequence: Synthetic oligonucleotide
  Sense strand starting at position 2461 of SEQ ID NO: 1563722
ggcucugaugacugaggaa

SEQ ID NO: 1826938 - RNA, 19 nt, Artificial Sequence
  Description of Artificial Sequence: Synthetic oligonucleotide
  Antisense strand to SEQ ID NO: 1826937
uuccucagucaucagagcc

SEQ ID NO: 1826939 - RNA, 19 nt, Artificial Sequence
  Description of Artificial Sequence: Synthetic oligonucleotide
  Sense strand starting at position 2566 of SEQ ID NO: 1563722
gaagucaagccacauguua

SEQ ID NO: 1826940 - RNA, 19 nt, Artificial Sequence
  Description of Artificial Sequence: Synthetic oligonucleotide
  Antisense strand to SEQ ID NO: 1826939
uaacauguggcuugacuuc

SEQ ID NO: 1826941 - RNA, 19 nt, Artificial Sequence
  Description of Artificial Sequence: Synthetic oligonucleotide
  Sense strand starting at position 2622 of SEQ ID NO: 1563722
gcuggaugccaugagagau

SEQ ID NO: 1826942 - RNA, 19 nt, Artificial Sequence
  Description of Artificial Sequence: Synthetic oligonucleotide
  Antisense strand to SEQ ID NO: 1826941
aucucucauggcauccagc

SEQ ID NO: 1826943 - RNA, 19 nt, Artificial Sequence
  Description of Artificial Sequence: Synthetic oligonucleotide
  Sense strand starting at position 2844 of SEQ ID NO: 1563722
uugagaugguucuugaaug

SEQ ID NO: 1826944 - RNA, 19 nt, Artificial Sequence
  Description of Artificial Sequence: Synthetic oligonucleotide
  Antisense strand to SEQ ID NO: 1826943
cauucaagaaccaucucaa

SEQ ID NO: 1826945 - RNA, 19 nt, Artificial Sequence
  Description of Artificial Sequence: Synthetic oligonucleotide
  Sense strand starting at position 2914 of SEQ ID NO: 1563722
gguagagacguauaaauuc

SEQ ID NO: 1826946 - RNA, 19 nt, Artificial Sequence
  Description of Artificial Sequence: Synthetic oligonucleotide
  Antisense strand to SEQ ID NO: 1826945
gaauuuauacgucucuacc

SEQ ID NO: 1826947 - RNA, 19 nt, Artificial Sequence
  Description of Artificial Sequence: Synthetic oligonucleotide
  Sense strand starting at position 2993 of SEQ ID NO: 1563722
acuagugguagauggaauu

SEQ ID NO: 1826948 - RNA, 19 nt, Artificial Sequence
  Description of Artificial Sequence: Synthetic oligonucleotide
  Antisense strand to SEQ ID NO: 1826947
aauuccaucuaccacuagu

SEQ ID NO: 1826949 - RNA, 19 nt, Artificial Sequence
  Description of Artificial Sequence: Synthetic oligonucleotide
  Sense strand starting at position 2999 of SEQ ID NO: 1563722
gguagauggaauuggcuaa

SEQ ID NO: 1826950 - RNA, 19 nt, Artificial Sequence
  Description of Artificial Sequence: Synthetic oligonucleotide
  Antisense strand to SEQ ID NO: 1826949
uuagccaauuccaucuacc

SEQ ID NO: 1826951 - RNA, 19 nt, Artificial Sequence
  Description of Artificial Sequence: Synthetic oligonucleotide
  Sense strand starting at position 3209 of SEQ ID NO: 1563722
gcagauuucuuaccauguc

SEQ ID NO: 1826952 - RNA, 19 nt, Artificial Sequence
  Description of Artificial Sequence: Synthetic oligonucleotide
  Antisense strand to SEQ ID NO: 1826951
gacaugguaagaaaucugc

SEQ ID NO: 1826953 - RNA, 19 nt, Artificial Sequence
  Description of Artificial Sequence: Synthetic oligonucleotide
  Sense strand starting at position 3370 of SEQ ID NO: 1563722
cugucugaucuuuauauga

SEQ ID NO: 1826954 - RNA, 19 nt, Artificial Sequence
  Description of Artificial Sequence: Synthetic oligonucleotide
  Antisense strand to SEQ ID NO: 1826953
ucauauaaagaucagacag

SEQ ID NO: 1826955 - RNA, 19 nt, Artificial Sequence
  Description of Artificial Sequence: Synthetic oligonucleotide
  Sense strand starting at position 3407 of SEQ ID NO: 1563722
ugaaaucuuugcucaaaug

SEQ ID NO: 1826956 - RNA, 19 nt, Artificial Sequence
  Description of Artificial Sequence: Synthetic oligonucleotide
  Antisense strand to SEQ ID NO: 1826955
cauuugagcaaagauuuca

SEQ ID NO: 1826957 - RNA, 19 nt, Artificial Sequence
  Description of Artificial Sequence: Synthetic oligonucleotide
  Sense strand starting at position 3657 of SEQ ID NO: 1563722
guacguauugaaugaauga

SEQ ID NO: 1826958 - RNA, 19 nt, Artificial Sequence
  Description of Artificial Sequence: Synthetic oligonucleotide
  Antisense strand to SEQ ID NO: 1826957
ucauucauucaauacguac

SEQ ID NO: 1826959 - RNA, 19 nt, Artificial Sequence
  Description of Artificial Sequence: Synthetic oligonucleotide
  Sense strand starting at position 3792 of SEQ ID NO: 1563722
ccuagauuaggguguuaaa

SEQ ID NO: 1826960 - RNA, 19 nt, Artificial Sequence
  Description of Artificial Sequence: Synthetic oligonucleotide
  Antisense strand to SEQ ID NO: 1826959
uuuaacacccuaaucuagg

SEQ ID NO: 1826961 - RNA, 19 nt, Artificial Sequence
  Description of Artificial Sequence: Synthetic oligonucleotide
  Sense strand starting at position 3839 of SEQ ID NO: 1563722
ggaauuauauggguaaagu

SEQ ID NO: 1826962 - RNA, 19 nt, Artificial Sequence
  Description of Artificial Sequence: Synthetic oligonucleotide
  Antisense strand to SEQ ID NO: 1826961
acuuuacccauauaauucc

SEQ ID NO: 1826963 - RNA, 19 nt, Artificial Sequence
  Description of Artificial Sequence: Synthetic oligonucleotide
  Sense strand starting at position 3849 of SEQ ID NO: 1563722
ggguaaaguggaggauuca

SEQ ID NO: 1826964 - RNA, 19 nt, Artificial Sequence
  Description of Artificial Sequence: Synthetic oligonucleotide
  Antisense strand to SEQ ID NO: 1826963
ugaauccuccacuuuaccc

SEQ ID NO: 1826965 - RNA, 19 nt, Artificial Sequence
  Description of Artificial Sequence: Synthetic oligonucleotide
  Sense strand starting at position 3910 of SEQ ID NO: 1563722
guuuaugaauuaccugaaa

SEQ ID NO: 1826966 - RNA, 19 nt, Artificial Sequence
  Description of Artificial Sequence: Synthetic oligonucleotide
  Antisense strand to SEQ ID NO: 1826965
uuucagguaauucauaaac

SEQ ID NO: 1826967 - RNA, 19 nt, Artificial Sequence
  Description of Artificial Sequence: Synthetic oligonucleotide
  Sense strand starting at position 4 of SEQ ID NO: 1563723
gagugaaacacgggucuca

SEQ ID NO: 1826968 - RNA, 19 nt, Artificial Sequence
  Description of Artificial Sequence: Synthetic oligonucleotide
  Antisense strand to SEQ ID NO: 1826967
ugagacccguguuucacuc

SEQ ID NO: 1826969 - RNA, 19 nt, Artificial Sequence
  Description of Artificial Sequence: Synthetic oligonucleotide
  Sense strand starting at position 131 of SEQ ID NO: 1563723
uugguuauauaaccuugaa

SEQ ID NO: 1826970 - RNA, 19 nt, Artificial Sequence
  Description of Artificial Sequence: Synthetic oligonucleotide
  Antisense strand to SEQ ID NO: 1826969
uucaagguuauauaaccaa

SEQ ID NO: 1826971 - RNA, 19 nt, Artificial Sequence
  Description of Artificial Sequence: Synthetic oligonucleotide
  Sense strand starting at position 185 of SEQ ID NO: 1563723
gucuuaaaugaggauuguc

SEQ ID NO: 1826972 - RNA, 19 nt, Artificial Sequence
  Description of Artificial Sequence: Synthetic oligonucleotide
  Antisense strand to SEQ ID NO: 1826971
gacaauccucauuuaagac

SEQ ID NO: 1826973 - RNA, 19 nt, Artificial Sequence
  Description of Artificial Sequence: Synthetic oligonucleotide
  Sense strand starting at position 190 of SEQ ID NO: 1563723
aaaugaggauugucucuac

SEQ ID NO: 1826974 - RNA, 19 nt, Artificial Sequence
  Description of Artificial Sequence: Synthetic oligonucleotide
  Antisense strand to SEQ ID NO: 1826973
guagagacaauccucauuu

SEQ ID NO: 1826975 - RNA, 19 nt, Artificial Sequence
  Description of Artificial Sequence: Synthetic oligonucleotide
  Sense strand starting at position 194 of SEQ ID NO: 1563723
gaggauugucucuacuuug

SEQ ID NO: 1826976 - RNA, 19 nt, Artificial Sequence
  Description of Artificial Sequence: Synthetic oligonucleotide
  Antisense strand to SEQ ID NO: 1826975
caaaguagagacaauccuc

SEQ ID NO: 1826977 - RNA, 19 nt, Artificial Sequence
  Description of Artificial Sequence: Synthetic oligonucleotide
  Sense strand starting at position 279 of SEQ ID NO: 1563723
ucacuugggcaaggauauu

SEQ ID NO: 1826978 - RNA, 19 nt, Artificial Sequence
  Description of Artificial Sequence: Synthetic oligonucleotide
  Antisense strand to SEQ ID NO: 1826977
aauauccuugcccaaguga

SEQ ID NO: 1826979 - RNA, 19 nt, Artificial Sequence
  Description of Artificial Sequence: Synthetic oligonucleotide
  Sense strand starting at position 489 of SEQ ID NO: 1563723
uuggauaguuuaguuaaga

SEQ ID NO: 1826980 - RNA, 19 nt, Artificial Sequence
  Description of Artificial Sequence: Synthetic oligonucleotide
  Antisense strand to SEQ ID NO: 1826979
ucuuaacuaaacuauccaa

SEQ ID NO: 1826981 - RNA, 19 nt, Artificial Sequence
  Description of Artificial Sequence: Synthetic oligonucleotide
  Sense strand starting at position 490 of SEQ ID NO: 1563723
uggauaguuuaguuaagau

SEQ ID NO: 1826982 - RNA, 19 nt, Artificial Sequence
  Description of Artificial Sequence: Synthetic oligonucleotide
  Antisense strand to SEQ ID NO: 1826981
aucuuaacuaaacuaucca

SEQ ID NO: 1826983 - RNA, 19 nt, Artificial Sequence
  Description of Artificial Sequence: Synthetic oligonucleotide
  Sense strand starting at position 607 of SEQ ID NO: 1563723
gggucuggucccuauuauu

SEQ ID NO: 1826984 - RNA, 19 nt, Artificial Sequence
  Description of Artificial Sequence: Synthetic oligonucleotide
  Antisense strand to SEQ ID NO: 1826983
aauaauagggaccagaccc

SEQ ID NO: 1826985 - RNA, 19 nt, Artificial Sequence
  Description of Artificial Sequence: Synthetic oligonucleotide
  Sense strand starting at position 871 of SEQ ID NO: 1563723
uuucuuaacucugugauag

SEQ ID NO: 1826986 - RNA, 19 nt, Artificial Sequence
  Description of Artificial Sequence: Synthetic oligonucleotide
  Antisense strand to SEQ ID NO: 1826985
cuaucacagaguuaagaaa

SEQ ID NO: 1826987 - RNA, 19 nt, Artificial Sequence
  Description of Artificial Sequence: Synthetic oligonucleotide
  Sense strand starting at position 872 of SEQ ID NO: 1563723
uucuuaacucugugauaga

SEQ ID NO: 1826988 - RNA, 19 nt, Artificial Sequence
  Description of Artificial Sequence: Synthetic oligonucleotide
  Antisense strand to SEQ ID NO: 1826987
ucuaucacagaguuaagaa

SEQ ID NO: 1826989 - RNA, 19 nt, Artificial Sequence
  Description of Artificial Sequence: Synthetic oligonucleotide
  Sense strand starting at position 1027 of SEQ ID NO: 1563723
ugucuugaggcccaaauaa

SEQ ID NO: 1826990 - RNA, 19 nt, Artificial Sequence
  Description of Artificial Sequence: Synthetic oligonucleotide
  Antisense strand to SEQ ID NO: 1826989
uuauuugggccucaagaca

SEQ ID NO: 1826991 - RNA, 19 nt, Artificial Sequence
  Description of Artificial Sequence: Synthetic oligonucleotide
  Sense strand starting at position 1073 of SEQ ID NO: 1563723
aaggauugcuugucauaua

SEQ ID NO: 1826992 - RNA, 19 nt, Artificial Sequence
  Description of Artificial Sequence: Synthetic oligonucleotide
  Antisense strand to SEQ ID NO: 1826991
uauaugacaagcaauccuu

SEQ ID NO: 1826993 - RNA, 19 nt, Artificial Sequence
  Description of Artificial Sequence: Synthetic oligonucleotide
  Sense strand starting at position 1091 of SEQ ID NO: 1563723
aauagaugcugaguaauga

SEQ ID NO: 1826994 - RNA, 19 nt, Artificial Sequence
  Description of Artificial Sequence: Synthetic oligonucleotide
  Antisense strand to SEQ ID NO: 1826993
ucauuacucagcaucuauu

SEQ ID NO: 1826995 - RNA, 19 nt, Artificial Sequence
  Description of Artificial Sequence: Synthetic oligonucleotide
  Sense strand starting at position 1229 of SEQ ID NO: 1563723
ucacgcagccaguuguuaa

SEQ ID NO: 1826996 - RNA, 19 nt, Artificial Sequence
  Description of Artificial Sequence: Synthetic oligonucleotide
  Antisense strand to SEQ ID NO: 1826995
uuaacaacuggcugcguga

SEQ ID NO: 1826997 - RNA, 19 nt, Artificial Sequence
  Description of Artificial Sequence: Synthetic oligonucleotide
  Sense strand starting at position 1319 of SEQ ID NO: 1563723
agauguuuagcuuaguuaa

SEQ ID NO: 1826998 - RNA, 19 nt, Artificial Sequence
  Description of Artificial Sequence: Synthetic oligonucleotide
  Antisense strand to SEQ ID NO: 1826997
uuaacuaagcuaaacaucu

SEQ ID NO: 1826999 - RNA, 19 nt, Artificial Sequence
  Description of Artificial Sequence: Synthetic oligonucleotide
  Sense strand starting at position 1481 of SEQ ID NO: 1563723
ugagcaagcuauuucgaca

SEQ ID NO: 1827000 - RNA, 19 nt, Artificial Sequence
  Description of Artificial Sequence: Synthetic oligonucleotide
  Antisense strand to SEQ ID NO: 1826999
ugucgaaauagcuugcuca

SEQ ID NO: 1827001 - RNA, 19 nt, Artificial Sequence
  Description of Artificial Sequence: Synthetic oligonucleotide
  Sense strand starting at position 1506 of SEQ ID NO: 1563723
ugaacuauucuguauggcu

SEQ ID NO: 1827002 - RNA, 19 nt, Artificial Sequence
  Description of Artificial Sequence: Synthetic oligonucleotide
  Antisense strand to SEQ ID NO: 1827001
agccauacagaauaguuca

SEQ ID NO: 1827003 - RNA, 19 nt, Artificial Sequence
  Description of Artificial Sequence: Synthetic oligonucleotide
  Sense strand starting at position 1514 of SEQ ID NO: 1563723
ucuguauggcuccaggauu

SEQ ID NO: 1827004 - RNA, 19 nt, Artificial Sequence
  Description of Artificial Sequence: Synthetic oligonucleotide
  Antisense strand to SEQ ID NO: 1827003
aauccuggagccauacaga

SEQ ID NO: 1827005 - RNA, 19 nt, Artificial Sequence
  Description of Artificial Sequence: Synthetic oligonucleotide
  Sense strand starting at position 1526 of SEQ ID NO: 1563723
caggauuggcccugaaaca

SEQ ID NO: 1827006 - RNA, 19 nt, Artificial Sequence
  Description of Artificial Sequence: Synthetic oligonucleotide
  Antisense strand to SEQ ID NO: 1827005
uguuucagggccaauccug

SEQ ID NO: 1827007 - RNA, 19 nt, Artificial Sequence
  Description of Artificial Sequence: Synthetic oligonucleotide
  Sense strand starting at position 1550 of SEQ ID NO: 1563723
gccaguguaguccuggcua

SEQ ID NO: 1827008 - RNA, 19 nt, Artificial Sequence
  Description of Artificial Sequence: Synthetic oligonucleotide
  Antisense strand to SEQ ID NO: 1827007
uagccaggacuacacuggc

SEQ ID NO: 1827009 - RNA, 19 nt, Artificial Sequence
  Description of Artificial Sequence: Synthetic oligonucleotide
  Sense strand starting at position 2053 of SEQ ID NO: 1563723
uacaaauccugguuaggau

SEQ ID NO: 1827010 - RNA, 19 nt, Artificial Sequence
  Description of Artificial Sequence: Synthetic oligonucleotide
  Antisense strand to SEQ ID NO: 1827009
auccuaaccaggauuugua

SEQ ID NO: 1827011 - RNA, 19 nt, Artificial Sequence
  Description of Artificial Sequence: Synthetic oligonucleotide
  Sense strand starting at position 2126 of SEQ ID NO: 1563723
uuggucuuugcugagagga

SEQ ID NO: 1827012 - RNA, 19 nt, Artificial Sequence
  Description of Artificial Sequence: Synthetic oligonucleotide
  Antisense strand to SEQ ID NO: 1827011
uccucucagcaaagaccaa

SEQ ID NO: 1827013 - RNA, 19 nt, Artificial Sequence
  Description of Artificial Sequence: Synthetic oligonucleotide
  Sense strand starting at position 2139 of SEQ ID NO: 1563723
agaggagaacacugucagu

SEQ ID NO: 1827014 - RNA, 19 nt, Artificial Sequence
  Description of Artificial Sequence: Synthetic oligonucleotide
  Antisense strand to SEQ ID NO: 1827013
acugacaguguucuccucu

SEQ ID NO: 1827015 - RNA, 19 nt, Artificial Sequence
  Description of Artificial Sequence: Synthetic oligonucleotide
  Sense strand starting at position 2167 of SEQ ID NO: 1563723
caaagcucauggguagauu

SEQ ID NO: 1827016 - RNA, 19 nt, Artificial Sequence
  Description of Artificial Sequence: Synthetic oligonucleotide
  Antisense strand to SEQ ID NO: 1827015
aaucuacccaugagcuuug

SEQ ID NO: 1827017 - RNA, 19 nt, Artificial Sequence
  Description of Artificial Sequence: Synthetic oligonucleotide
  Sense strand starting at position 2191 of SEQ ID NO: 1563723
agcuccauuuaagaaauga

SEQ ID NO: 1827018 - RNA, 19 nt, Artificial Sequence
  Description of Artificial Sequence: Synthetic oligonucleotide
  Antisense strand to SEQ ID NO: 1827017
ucauuucuuaaauggagcu

SEQ ID NO: 1827019 - RNA, 19 nt, Artificial Sequence
  Description of Artificial Sequence: Synthetic oligonucleotide
  Sense strand starting at position 2411 of SEQ ID NO: 1563723
acaauuauccugugagaug

SEQ ID NO: 1827020 - RNA, 19 nt, Artificial Sequence
  Description of Artificial Sequence: Synthetic oligonucleotide
  Antisense strand to SEQ ID NO: 1827019
caucucacaggauaauugu

SEQ ID NO: 1827021 - RNA, 19 nt, Artificial Sequence
  Description of Artificial Sequence: Synthetic oligonucleotide
  Sense strand starting at position 2528 of SEQ ID NO: 1563723
agagauuugcugggucugu

SEQ ID NO: 1827022 - RNA, 19 nt, Artificial Sequence
  Description of Artificial Sequence: Synthetic oligonucleotide
  Antisense strand to SEQ ID NO: 1827021
acagacccagcaaaucucu

SEQ ID NO: 1827023 - RNA, 19 nt, Artificial Sequence
  Description of Artificial Sequence: Synthetic oligonucleotide
  Sense strand starting at position 2713 of SEQ ID NO: 1563723
cagauucuagagugaaauu

SEQ ID NO: 1827024 - RNA, 19 nt, Artificial Sequence
  Description of Artificial Sequence: Synthetic oligonucleotide
  Antisense strand to SEQ ID NO: 1827023
aauuucacucuagaaucug

SEQ ID NO: 1827025 - RNA, 19 nt, Artificial Sequence
  Description of Artificial Sequence: Synthetic oligonucleotide
  Sense strand starting at position 2917 of SEQ ID NO: 1563723
agucaaaggucauucccau

SEQ ID NO: 1827026 - RNA, 19 nt, Artificial Sequence
  Description of Artificial Sequence: Synthetic oligonucleotide
  Antisense strand to SEQ ID NO: 1827025
augggaaugaccuuugacu

SEQ ID NO: 1827027 - RNA, 19 nt, Artificial Sequence
  Description of Artificial Sequence: Synthetic oligonucleotide
  Sense strand starting at position 2928 of SEQ ID NO: 1563723
auucccauuccugguggaa

SEQ ID NO: 1827028 - RNA, 19 nt, Artificial Sequence
  Description of Artificial Sequence: Synthetic oligonucleotide
  Antisense strand to SEQ ID NO: 1827027
uuccaccaggaaugggaau

SEQ ID NO: 1827029 - RNA, 19 nt, Artificial Sequence
  Description of Artificial Sequence: Synthetic oligonucleotide
  Sense strand starting at position 2931 of SEQ ID NO: 1563723
cccauuccugguggaaaga

SEQ ID NO: 1827030 - RNA, 19 nt, Artificial Sequence
  Description of Artificial Sequence: Synthetic oligonucleotide
  Antisense strand to SEQ ID NO: 1827029
ucuuuccaccaggaauggg

SEQ ID NO: 1827031 - RNA, 19 nt, Artificial Sequence
  Description of Artificial Sequence: Synthetic oligonucleotide
  Sense strand starting at position 2963 of SEQ ID NO: 1563723
agucacuguccugagucaa

SEQ ID NO: 1827032 - RNA, 19 nt, Artificial Sequence
  Description of Artificial Sequence: Synthetic oligonucleotide
  Antisense strand to SEQ ID NO: 1827031
uugacucaggacagugacu

SEQ ID NO: 1827033 - RNA, 19 nt, Artificial Sequence
  Description of Artificial Sequence: Synthetic oligonucleotide
  Sense strand starting at position 2975 of SEQ ID NO: 1563723
gagucaagugaccaagguu

SEQ ID NO: 1827034 - RNA, 19 nt, Artificial Sequence
  Description of Artificial Sequence: Synthetic oligonucleotide
  Antisense strand to SEQ ID NO: 1827033
aaccuuggucacuugacuc

SEQ ID NO: 1827035 - RNA, 19 nt, Artificial Sequence
  Description of Artificial Sequence: Synthetic oligonucleotide
  Sense strand starting at position 3012 of SEQ ID NO: 1563723
ggaguaaucagcuaugugg

SEQ ID NO: 1827036 - RNA, 19 nt, Artificial Sequence
  Description of Artificial Sequence: Synthetic oligonucleotide
  Antisense strand to SEQ ID NO: 1827035
ccacauagcugauuacucc

SEQ ID NO: 1827037 - RNA, 19 nt, Artificial Sequence
  Description of Artificial Sequence: Synthetic oligonucleotide
  Sense strand starting at position 3233 of SEQ ID NO: 1563723
gcaauuuguggcgacaggu

SEQ ID NO: 1827038 - RNA, 19 nt, Artificial Sequence
  Description of Artificial Sequence: Synthetic oligonucleotide
  Antisense strand to SEQ ID NO: 1827037
accugucgccacaaauugc

SEQ ID NO: 1827039 - RNA, 19 nt, Artificial Sequence
  Description of Artificial Sequence: Synthetic oligonucleotide
  Sense strand starting at position 3252 of SEQ ID NO: 1563723
cugagaauacuaugccucu

SEQ ID NO: 1827040 - RNA, 19 nt, Artificial Sequence
  Description of Artificial Sequence: Synthetic oligonucleotide
  Antisense strand to SEQ ID NO: 1827039
agaggcauaguauucucag

SEQ ID NO: 1827041 - RNA, 19 nt, Artificial Sequence
  Description of Artificial Sequence: Synthetic oligonucleotide
  Sense strand starting at position 3343 of SEQ ID NO: 1563723
ugauauucuuacuuuguga

SEQ ID NO: 1827042 - RNA, 19 nt, Artificial Sequence
  Description of Artificial Sequence: Synthetic oligonucleotide
  Antisense strand to SEQ ID NO: 1827041
ucacaaaguaagaauauca

SEQ ID NO: 1827043 - RNA, 19 nt, Artificial Sequence
  Description of Artificial Sequence: Synthetic oligonucleotide
  Sense strand starting at position 3345 of SEQ ID NO: 1563723
auauucuuacuuugugaug

SEQ ID NO: 1827044 - RNA, 19 nt, Artificial Sequence
  Description of Artificial Sequence: Synthetic oligonucleotide
  Antisense strand to SEQ ID NO: 1827043
caucacaaaguaagaauau

SEQ ID NO: 1827045 - RNA, 19 nt, Artificial Sequence
  Description of Artificial Sequence: Synthetic oligonucleotide
  Sense strand starting at position 3696 of SEQ ID NO: 1563723
acaugugaaccuugaagca

SEQ ID NO: 1827046 - RNA, 19 nt, Artificial Sequence
  Description of Artificial Sequence: Synthetic oligonucleotide
  Antisense strand to SEQ ID NO: 1827045
ugcuucaagguucacaugu

SEQ ID NO: 1827047 - RNA, 19 nt, Artificial Sequence
  Description of Artificial Sequence: Synthetic oligonucleotide
  Sense strand starting at position 372 of SEQ ID NO: 1563724
uacaaauccugguuaggau

SEQ ID NO: 1827048 - RNA, 19 nt, Artificial Sequence
  Description of Artificial Sequence: Synthetic oligonucleotide
  Antisense strand to SEQ ID NO: 1827047
auccuaaccaggauuugua

SEQ ID NO: 1827049 - RNA, 19 nt, Artificial Sequence
  Description of Artificial Sequence: Synthetic oligonucleotide
  Sense strand starting at position 419 of SEQ ID NO: 1563724
guacuucuguuaucaggac

SEQ ID NO: 1827050 - RNA, 19 nt, Artificial Sequence
  Description of Artificial Sequence: Synthetic oligonucleotide
  Antisense strand to SEQ ID NO: 1827049
guccugauaacagaaguac

SEQ ID NO: 1827051 - RNA, 19 nt, Artificial Sequence
  Description of Artificial Sequence: Synthetic oligonucleotide
  Sense strand starting at position 445 of SEQ ID NO: 1563724
uuggucuuugcugagagga

SEQ ID NO: 1827052 - RNA, 19 nt, Artificial Sequence
  Description of Artificial Sequence: Synthetic oligonucleotide
  Antisense strand to SEQ ID NO: 1827051
uccucucagcaaagaccaa

SEQ ID NO: 1827053 - RNA, 19 nt, Artificial Sequence
  Description of Artificial Sequence: Synthetic oligonucleotide
  Sense strand starting at position 458 of SEQ ID NO: 1563724
agaggagaacacugucagu

SEQ ID NO: 1827054 - RNA, 19 nt, Artificial Sequence
  Description of Artificial Sequence: Synthetic oligonucleotide
  Antisense strand to SEQ ID NO: 1827053
acugacaguguucuccucu

SEQ ID NO: 1827055 - RNA, 19 nt, Artificial Sequence
  Description of Artificial Sequence: Synthetic oligonucleotide
  Sense strand starting at position 486 of SEQ ID NO: 1563724
caaagcucauggguagauu

SEQ ID NO: 1827056 - RNA, 19 nt, Artificial Sequence
  Description of Artificial Sequence: Synthetic oligonucleotide
  Antisense strand to SEQ ID NO: 1827055
aaucuacccaugagcuuug

SEQ ID NO: 1827057 - RNA, 19 nt, Artificial Sequence
  Description of Artificial Sequence: Synthetic oligonucleotide
  Sense strand starting at position 510 of SEQ ID NO: 1563724
agcuccauuuaagaaauga

SEQ ID NO: 1827058 - RNA, 19 nt, Artificial Sequence
  Description of Artificial Sequence: Synthetic oligonucleotide
  Antisense strand to SEQ ID NO: 1827057
ucauuucuuaaauggagcu

SEQ ID NO: 1827059 - RNA, 19 nt, Artificial Sequence
  Description of Artificial Sequence: Synthetic oligonucleotide
  Sense strand starting at position 588 of SEQ ID NO: 1563724
auugucagcccugacuauu

SEQ ID NO: 1827060 - RNA, 19 nt, Artificial Sequence
  Description of Artificial Sequence: Synthetic oligonucleotide
  Antisense strand to SEQ ID NO: 1827059
aauagucagggcugacaau

SEQ ID NO: 1827061 - RNA, 19 nt, Artificial Sequence
  Description of Artificial Sequence: Synthetic oligonucleotide
  Sense strand starting at position 591 of SEQ ID NO: 1563724
gucagcccugacuauuauu

SEQ ID NO: 1827062 - RNA, 19 nt, Artificial Sequence
  Description of Artificial Sequence: Synthetic oligonucleotide
  Antisense strand to SEQ ID NO: 1827061
aauaauagucagggcugac

SEQ ID NO: 1827063 - RNA, 19 nt, Artificial Sequence
  Description of Artificial Sequence: Synthetic oligonucleotide
  Sense strand starting at position 730 of SEQ ID NO: 1563724
acaauuauccugugagaug

SEQ ID NO: 1827064 - RNA, 19 nt, Artificial Sequence
  Description of Artificial Sequence: Synthetic oligonucleotide
  Antisense strand to SEQ ID NO: 1827063
caucucacaggauaauugu

SEQ ID NO: 1827065 - RNA, 19 nt, Artificial Sequence
  Description of Artificial Sequence: Synthetic oligonucleotide
  Sense strand starting at position 847 of SEQ ID NO: 1563724
agagauuugcugggucugu

SEQ ID NO: 1827066 - RNA, 19 nt, Artificial Sequence
  Description of Artificial Sequence: Synthetic oligonucleotide
  Antisense strand to SEQ ID NO: 1827065
acagacccagcaaaucucu

SEQ ID NO: 1827067 - RNA, 19 nt, Artificial Sequence
  Description of Artificial Sequence: Synthetic oligonucleotide
  Sense strand starting at position 973 of SEQ ID NO: 1563724
ccaccagucacugguggau

SEQ ID NO: 1827068 - RNA, 19 nt, Artificial Sequence
  Description of Artificial Sequence: Synthetic oligonucleotide
  Antisense strand to SEQ ID NO: 1827067
auccaccagugacuggugg

SEQ ID NO: 1827069 - RNA, 19 nt, Artificial Sequence
  Description of Artificial Sequence: Synthetic oligonucleotide
  Sense strand starting at position 1032 of SEQ ID NO: 1563724
cagauucuagagugaaauu

SEQ ID NO: 1827070 - RNA, 19 nt, Artificial Sequence
  Description of Artificial Sequence: Synthetic oligonucleotide
  Antisense strand to SEQ ID NO: 1827069
aauuucacucuagaaucug

SEQ ID NO: 1827071 - RNA, 19 nt, Artificial Sequence
  Description of Artificial Sequence: Synthetic oligonucleotide
  Sense strand starting at position 1236 of SEQ ID NO: 1563724
agucaaaggucauucccau

SEQ ID NO: 1827072 - RNA, 19 nt, Artificial Sequence
  Description of Artificial Sequence: Synthetic oligonucleotide
  Antisense strand to SEQ ID NO: 1827071
augggaaugaccuuugacu

SEQ ID NO: 1827073 - RNA, 19 nt, Artificial Sequence
  Description of Artificial Sequence: Synthetic oligonucleotide
  Sense strand starting at position 1247 of SEQ ID NO: 1563724
auucccauuccugguggaa

SEQ ID NO: 1827074 - RNA, 19 nt, Artificial Sequence
  Description of Artificial Sequence: Synthetic oligonucleotide
  Antisense strand to SEQ ID NO: 1827073
uuccaccaggaaugggaau

SEQ ID NO: 1827075 - RNA, 19 nt, Artificial Sequence
  Description of Artificial Sequence: Synthetic oligonucleotide
  Sense strand starting at position 1250 of SEQ ID NO: 1563724
cccauuccugguggaaaga

SEQ ID NO: 1827076 - RNA, 19 nt, Artificial Sequence
  Description of Artificial Sequence: Synthetic oligonucleotide
  Antisense strand to SEQ ID NO: 1827075
ucuuuccaccaggaauggg

SEQ ID NO: 1827077 - RNA, 19 nt, Artificial Sequence
  Description of Artificial Sequence: Synthetic oligonucleotide
  Sense strand starting at position 1282 of SEQ ID NO: 1563724
agucacuguccugagucaa

SEQ ID NO: 1827078 - RNA, 19 nt, Artificial Sequence
  Description of Artificial Sequence: Synthetic oligonucleotide
  Antisense strand to SEQ ID NO: 1827077
uugacucaggacagugacu

SEQ ID NO: 1827079 - RNA, 19 nt, Artificial Sequence
  Description of Artificial Sequence: Synthetic oligonucleotide
  Sense strand starting at position 1294 of SEQ ID NO: 1563724
gagucaagugaccaagguu

SEQ ID NO: 1827080 - RNA, 19 nt, Artificial Sequence
  Description of Artificial Sequence: Synthetic oligonucleotide
  Antisense strand to SEQ ID NO: 1827079
aaccuuggucacuugacuc

SEQ ID NO: 1827081 - RNA, 19 nt, Artificial Sequence
  Description of Artificial Sequence: Synthetic oligonucleotide
  Sense strand starting at position 1319 of SEQ ID NO: 1563724
ccacuugcucuaggaguaa

SEQ ID NO: 1827082 - RNA, 19 nt, Artificial Sequence
  Description of Artificial Sequence: Synthetic oligonucleotide
  Antisense strand to SEQ ID NO: 1827081
uuacuccuagagcaagugg

SEQ ID NO: 1827083 - RNA, 19 nt, Artificial Sequence
  Description of Artificial Sequence: Synthetic oligonucleotide
  Sense strand starting at position 1331 of SEQ ID NO: 1563724
ggaguaaucagcuaugugg

SEQ ID NO: 1827084 - RNA, 19 nt, Artificial Sequence
  Description of Artificial Sequence: Synthetic oligonucleotide
  Antisense strand to SEQ ID NO: 1827083
ccacauagcugauuacucc

SEQ ID NO: 1827085 - RNA, 19 nt, Artificial Sequence
  Description of Artificial Sequence: Synthetic oligonucleotide
  Sense strand starting at position 1333 of SEQ ID NO: 1563724
aguaaucagcuauguggau

SEQ ID NO: 1827086 - RNA, 19 nt, Artificial Sequence
  Description of Artificial Sequence: Synthetic oligonucleotide
  Antisense strand to SEQ ID NO: 1827085
auccacauagcugauuacu

SEQ ID NO: 1827087 - RNA, 19 nt, Artificial Sequence
  Description of Artificial Sequence: Synthetic oligonucleotide
  Sense strand starting at position 1552 of SEQ ID NO: 1563724
gcaauuuguggcgacaggu

SEQ ID NO: 1827088 - RNA, 19 nt, Artificial Sequence
  Description of Artificial Sequence: Synthetic oligonucleotide
  Antisense strand to SEQ ID NO: 1827087
accugucgccacaaauugc

SEQ ID NO: 1827089 - RNA, 19 nt, Artificial Sequence
  Description of Artificial Sequence: Synthetic oligonucleotide
  Sense strand starting at position 1560 of SEQ ID NO: 1563724
uggcgacaggucugagaau

SEQ ID NO: 1827090 - RNA, 19 nt, Artificial Sequence
  Description of Artificial Sequence: Synthetic oligonucleotide
  Antisense strand to SEQ ID NO: 1827089
auucucagaccugucgcca

SEQ ID NO: 1827091 - RNA, 19 nt, Artificial Sequence
  Description of Artificial Sequence: Synthetic oligonucleotide
  Sense strand starting at position 1571 of SEQ ID NO: 1563724
cugagaauacuaugccucu

SEQ ID NO: 1827092 - RNA, 19 nt, Artificial Sequence
  Description of Artificial Sequence: Synthetic oligonucleotide
  Antisense strand to SEQ ID NO: 1827091
agaggcauaguauucucag

SEQ ID NO: 1827093 - RNA, 19 nt, Artificial Sequence
  Description of Artificial Sequence: Synthetic oligonucleotide
  Sense strand starting at position 1662 of SEQ ID NO: 1563724
ugauauucuuacuuuguga

SEQ ID NO: 1827094 - RNA, 19 nt, Artificial Sequence
  Description of Artificial Sequence: Synthetic oligonucleotide
  Antisense strand to SEQ ID NO: 1827093
ucacaaaguaagaauauca

SEQ ID NO: 1827095 - RNA, 19 nt, Artificial Sequence
  Description of Artificial Sequence: Synthetic oligonucleotide
  Sense strand starting at position 1664 of SEQ ID NO: 1563724
auauucuuacuuugugaug

SEQ ID NO: 1827096 - RNA, 19 nt, Artificial Sequence
  Description of Artificial Sequence: Synthetic oligonucleotide
  Antisense strand to SEQ ID NO: 1827095
caucacaaaguaagaauau

SEQ ID NO: 1827097 - RNA, 19 nt, Artificial Sequence
  Description of Artificial Sequence: Synthetic oligonucleotide
  Sense strand starting at position 2015 of SEQ ID NO: 1563724
acaugugaaccuugaagca

SEQ ID NO: 1827098 - RNA, 19 nt, Artificial Sequence
  Description of Artificial Sequence: Synthetic oligonucleotide
  Antisense strand to SEQ ID NO: 1827097
ugcuucaagguucacaugu

SEQ ID NO: 1827099 - RNA, 19 nt, Artificial Sequence
  Description of Artificial Sequence: Synthetic oligonucleotide
  Sense strand starting at position 2333 of SEQ ID NO: 1563724
uaaaguuggugucuacaga

SEQ ID NO: 1827100 - RNA, 19 nt, Artificial Sequence
  Description of Artificial Sequence: Synthetic oligonucleotide
  Antisense strand to SEQ ID NO: 1827099
ucuguagacaccaacuuua

SEQ ID NO: 1827101 - RNA, 19 nt, Artificial Sequence
  Description of Artificial Sequence: Synthetic oligonucleotide
  Sense strand starting at position 2455 of SEQ ID NO: 1563724
gcucucaagguauaucauu

SEQ ID NO: 1827102 - RNA, 19 nt, Artificial Sequence
  Description of Artificial Sequence: Synthetic oligonucleotide
  Antisense strand to SEQ ID NO: 1827101
aaugauauaccuugagagc

SEQ ID NO: 1827103 - RNA, 19 nt, Artificial Sequence
  Description of Artificial Sequence: Synthetic oligonucleotide
  Sense strand starting at position 2543 of SEQ ID NO: 1563724
gcaauauggcaucacuguu

SEQ ID NO: 1827104 - RNA, 19 nt, Artificial Sequence
  Description of Artificial Sequence: Synthetic oligonucleotide
  Antisense strand to SEQ ID NO: 1827103
aacagugaugccauauugc

SEQ ID NO: 1827105 - RNA, 19 nt, Artificial Sequence
  Description of Artificial Sequence: Synthetic oligonucleotide
  Sense strand starting at position 2619 of SEQ ID NO: 1563724
cugauucuaugauuaaagu

SEQ ID NO: 1827106 - RNA, 19 nt, Artificial Sequence
  Description of Artificial Sequence: Synthetic oligonucleotide
  Antisense strand to SEQ ID NO: 1827105
acuuuaaucauagaaucag

SEQ ID NO: 1827107 - RNA, 19 nt, Artificial Sequence
  Description of Artificial Sequence: Synthetic oligonucleotide
  Sense strand starting at position 2714 of SEQ ID NO: 1563724
uaaauaaggcuauacguau

SEQ ID NO: 1827108 - RNA, 19 nt, Artificial Sequence
  Description of Artificial Sequence: Synthetic oligonucleotide
  Antisense strand to SEQ ID NO: 1827107
auacguauagccuuauuua

SEQ ID NO: 1827109 - RNA, 19 nt, Artificial Sequence
  Description of Artificial Sequence: Synthetic oligonucleotide
  Sense strand starting at position 3156 of SEQ ID NO: 1563724
gaaccuguccacuggguau

SEQ ID NO: 1827110 - RNA, 19 nt, Artificial Sequence
  Description of Artificial Sequence: Synthetic oligonucleotide
  Antisense strand to SEQ ID NO: 1827109
auacccaguggacagguuc

SEQ ID NO: 1827111 - RNA, 19 nt, Artificial Sequence
  Description of Artificial Sequence: Synthetic oligonucleotide
  Sense strand starting at position 3169 of SEQ ID NO: 1563724
ggguaugacugguuuccua

SEQ ID NO: 1827112 - RNA, 19 nt, Artificial Sequence
  Description of Artificial Sequence: Synthetic oligonucleotide
  Antisense strand to SEQ ID NO: 1827111
uaggaaaccagucauaccc

SEQ ID NO: 1827113 - RNA, 19 nt, Artificial Sequence
  Description of Artificial Sequence: Synthetic oligonucleotide
  Sense strand starting at position 3173 of SEQ ID NO: 1563724
augacugguuuccuagaca

SEQ ID NO: 1827114 - RNA, 19 nt, Artificial Sequence
  Description of Artificial Sequence: Synthetic oligonucleotide
  Antisense strand to SEQ ID NO: 1827113
ugucuaggaaaccagucau

SEQ ID NO: 1827115 - RNA, 19 nt, Artificial Sequence
  Description of Artificial Sequence: Synthetic oligonucleotide
  Sense strand starting at position 3181 of SEQ ID NO: 1563724
uuuccuagacaaugugauu

SEQ ID NO: 1827116 - RNA, 19 nt, Artificial Sequence
  Description of Artificial Sequence: Synthetic oligonucleotide
  Antisense strand to SEQ ID NO: 1827115
aaucacauugucuaggaaa

SEQ ID NO: 1827117 - RNA, 19 nt, Artificial Sequence
  Description of Artificial Sequence: Synthetic oligonucleotide
  Sense strand starting at position 3338 of SEQ ID NO: 1563724
uuuccagguuacucaucua

SEQ ID NO: 1827118 - RNA, 19 nt, Artificial Sequence
  Description of Artificial Sequence: Synthetic oligonucleotide
  Antisense strand to SEQ ID NO: 1827117
uagaugaguaaccuggaaa

SEQ ID NO: 1827119 - RNA, 19 nt, Artificial Sequence
  Description of Artificial Sequence: Synthetic oligonucleotide
  Sense strand starting at position 3350 of SEQ ID NO: 1563724
ucaucuaugggccaucaau

SEQ ID NO: 1827120 - RNA, 19 nt, Artificial Sequence
  Description of Artificial Sequence: Synthetic oligonucleotide
  Antisense strand to SEQ ID NO: 1827119
auugauggcccauagauga

SEQ ID NO: 1827121 - RNA, 19 nt, Artificial Sequence
  Description of Artificial Sequence: Synthetic oligonucleotide
  Sense strand starting at position 3442 of SEQ ID NO: 1563724
gggugagaagcauggcauu

SEQ ID NO: 1827122 - RNA, 19 nt, Artificial Sequence
  Description of Artificial Sequence: Synthetic oligonucleotide
  Antisense strand to SEQ ID NO: 1827121
aaugccaugcuucucaccc

SEQ ID NO: 1827123 - RNA, 19 nt, Artificial Sequence
  Description of Artificial Sequence: Synthetic oligonucleotide
  Sense strand starting at position 3471 of SEQ ID NO: 1563724
aagacuaaggauuguaucu

SEQ ID NO: 1827124 - RNA, 19 nt, Artificial Sequence
  Description of Artificial Sequence: Synthetic oligonucleotide
  Antisense strand to SEQ ID NO: 1827123
agauacaauccuuagucuu

SEQ ID NO: 1827125 - RNA, 19 nt, Artificial Sequence
  Description of Artificial Sequence: Synthetic oligonucleotide
  Sense strand starting at position 3604 of SEQ ID NO: 1563724
aggauuaaaucagcuggca

SEQ ID NO: 1827126 - RNA, 19 nt, Artificial Sequence
  Description of Artificial Sequence: Synthetic oligonucleotide
  Antisense strand to SEQ ID NO: 1827125
ugccagcugauuuaauccu

SEQ ID NO: 1827127 - RNA, 19 nt, Artificial Sequence
  Description of Artificial Sequence: Synthetic oligonucleotide
  Sense strand starting at position 8 of SEQ ID NO: 1563725
gcugguuugcgaguuacuu

SEQ ID NO: 1827128 - RNA, 19 nt, Artificial Sequence
  Description of Artificial Sequence: Synthetic oligonucleotide
  Antisense strand to SEQ ID NO: 1827127
aaguaacucgcaaaccagc

SEQ ID NO: 1827129 - RNA, 19 nt, Artificial Sequence
  Description of Artificial Sequence: Synthetic oligonucleotide
  Sense strand starting at position 76 of SEQ ID NO: 1563725
caguguuacguuuacagaa

SEQ ID NO: 1827130 - RNA, 19 nt, Artificial Sequence
  Description of Artificial Sequence: Synthetic oligonucleotide
  Antisense strand to SEQ ID NO: 1827129
uucuguaaacguaacacug

SEQ ID NO: 1827131 - RNA, 19 nt, Artificial Sequence
  Description of Artificial Sequence: Synthetic oligonucleotide
  Sense strand starting at position 160 of SEQ ID NO: 1563725
gugauagaagcuugaaauc

SEQ ID NO: 1827132 - RNA, 19 nt, Artificial Sequence
  Description of Artificial Sequence: Synthetic oligonucleotide
  Antisense strand to SEQ ID NO: 1827131
gauuucaagcuucuaucac

SEQ ID NO: 1827133 - RNA, 19 nt, Artificial Sequence
  Description of Artificial Sequence: Synthetic oligonucleotide
  Sense strand starting at position 169 of SEQ ID NO: 1563725
gcuugaaaucuaugacuua

SEQ ID NO: 1827134 - RNA, 19 nt, Artificial Sequence
  Description of Artificial Sequence: Synthetic oligonucleotide
  Antisense strand to SEQ ID NO: 1827133
uaagucauagauuucaagc

SEQ ID NO: 1827135 - RNA, 19 nt, Artificial Sequence
  Description of Artificial Sequence: Synthetic oligonucleotide
  Sense strand starting at position 198 of SEQ ID NO: 1563725
gucaucugcuaacuguuaa

SEQ ID NO: 1827136 - RNA, 19 nt, Artificial Sequence
  Description of Artificial Sequence: Synthetic oligonucleotide
  Antisense strand to SEQ ID NO: 1827135
uuaacaguuagcagaugac

SEQ ID NO: 1827137 - RNA, 19 nt, Artificial Sequence
  Description of Artificial Sequence: Synthetic oligonucleotide
  Sense strand starting at position 290 of SEQ ID NO: 1563725
cugaaauugucacuauugu

SEQ ID NO: 1827138 - RNA, 19 nt, Artificial Sequence
  Description of Artificial Sequence: Synthetic oligonucleotide
  Antisense strand to SEQ ID NO: 1827137
acaauagugacaauuucag

SEQ ID NO: 1827139 - RNA, 19 nt, Artificial Sequence
  Description of Artificial Sequence: Synthetic oligonucleotide
  Sense strand starting at position 291 of SEQ ID NO: 1563725
ugaaauugucacuauuguu

SEQ ID NO: 1827140 - RNA, 19 nt, Artificial Sequence
  Description of Artificial Sequence: Synthetic oligonucleotide
  Antisense strand to SEQ ID NO: 1827139
aacaauagugacaauuuca

SEQ ID NO: 1827141 - RNA, 19 nt, Artificial Sequence
  Description of Artificial Sequence: Synthetic oligonucleotide
  Sense strand starting at position 397 of SEQ ID NO: 1563725
aucacuucgucacuaucua

SEQ ID NO: 1827142 - RNA, 19 nt, Artificial Sequence
  Description of Artificial Sequence: Synthetic oligonucleotide
  Antisense strand to SEQ ID NO: 1827141
uagauagugacgaagugau

SEQ ID NO: 1827143 - RNA, 19 nt, Artificial Sequence
  Description of Artificial Sequence: Synthetic oligonucleotide
  Sense strand starting at position 445 of SEQ ID NO: 1563725
cgugcucaucuguaaccca

SEQ ID NO: 1827144 - RNA, 19 nt, Artificial Sequence
  Description of Artificial Sequence: Synthetic oligonucleotide
  Antisense strand to SEQ ID NO: 1827143
uggguuacagaugagcacg

SEQ ID NO: 1827145 - RNA, 19 nt, Artificial Sequence
  Description of Artificial Sequence: Synthetic oligonucleotide
  Sense strand starting at position 448 of SEQ ID NO: 1563725
gcucaucuguaacccagaa

SEQ ID NO: 1827146 - RNA, 19 nt, Artificial Sequence
  Description of Artificial Sequence: Synthetic oligonucleotide
  Antisense strand to SEQ ID NO: 1827145
uucuggguuacagaugagc

SEQ ID NO: 1827147 - RNA, 19 nt, Artificial Sequence
  Description of Artificial Sequence: Synthetic oligonucleotide
  Sense strand starting at position 452 of SEQ ID NO: 1563725
aucuguaacccagaaugca

SEQ ID NO: 1827148 - RNA, 19 nt, Artificial Sequence
  Description of Artificial Sequence: Synthetic oligonucleotide
  Antisense strand to SEQ ID NO: 1827147
ugcauucuggguuacagau

SEQ ID NO: 1827149 - RNA, 19 nt, Artificial Sequence
  Description of Artificial Sequence: Synthetic oligonucleotide
  Sense strand starting at position 479 of SEQ ID NO: 1563725
cgagaacacuuucuccaaa

SEQ ID NO: 1827150 - RNA, 19 nt, Artificial Sequence
  Description of Artificial Sequence: Synthetic oligonucleotide
  Antisense strand to SEQ ID NO: 1827149
uuuggagaaaguguucucg

SEQ ID NO: 1827151 - RNA, 19 nt, Artificial Sequence
  Description of Artificial Sequence: Synthetic oligonucleotide
  Sense strand starting at position 580 of SEQ ID NO: 1563725
acccaaggucaucauguaa

SEQ ID NO: 1827152 - RNA, 19 nt, Artificial Sequence
  Description of Artificial Sequence: Synthetic oligonucleotide
  Antisense strand to SEQ ID NO: 1827151
uuacaugaugaccuugggu

SEQ ID NO: 1827153 - RNA, 19 nt, Artificial Sequence
  Description of Artificial Sequence: Synthetic oligonucleotide
  Sense strand starting at position 741 of SEQ ID NO: 1563725
ccgggacacccguaauuca

SEQ ID NO: 1827154 - RNA, 19 nt, Artificial Sequence
  Description of Artificial Sequence: Synthetic oligonucleotide
  Antisense strand to SEQ ID NO: 1827153
ugaauuacgggugucccgg

SEQ ID NO: 1827155 - RNA, 19 nt, Artificial Sequence
  Description of Artificial Sequence: Synthetic oligonucleotide
  Sense strand starting at position 1120 of SEQ ID NO: 1563725
cgcacuccucgggauaaca

SEQ ID NO: 1827156 - RNA, 19 nt, Artificial Sequence
  Description of Artificial Sequence: Synthetic oligonucleotide
  Antisense strand to SEQ ID NO: 1827155
uguuaucccgaggagugcg

SEQ ID NO: 1827157 - RNA, 19 nt, Artificial Sequence
  Description of Artificial Sequence: Synthetic oligonucleotide
  Sense strand starting at position 1997 of SEQ ID NO: 1563725
gugcgagacguaccuguau

SEQ ID NO: 1827158 - RNA, 19 nt, Artificial Sequence
  Description of Artificial Sequence: Synthetic oligonucleotide
  Antisense strand to SEQ ID NO: 1827157
auacagguacgucucgcac

SEQ ID NO: 1827159 - RNA, 19 nt, Artificial Sequence
  Description of Artificial Sequence: Synthetic oligonucleotide
  Sense strand starting at position 2110 of SEQ ID NO: 1563725
gcgggcucugccguuuaaa

SEQ ID NO: 1827160 - RNA, 19 nt, Artificial Sequence
  Description of Artificial Sequence: Synthetic oligonucleotide
  Antisense strand to SEQ ID NO: 1827159
uuuaaacggcagagcccgc

SEQ ID NO: 1827161 - RNA, 19 nt, Artificial Sequence
  Description of Artificial Sequence: Synthetic oligonucleotide
  Sense strand starting at position 2155 of SEQ ID NO: 1563725
gcgggccucaugcauauua

SEQ ID NO: 1827162 - RNA, 19 nt, Artificial Sequence
  Description of Artificial Sequence: Synthetic oligonucleotide
  Antisense strand to SEQ ID NO: 1827161
uaauaugcaugaggcccgc

SEQ ID NO: 1827163 - RNA, 19 nt, Artificial Sequence
  Description of Artificial Sequence: Synthetic oligonucleotide
  Sense strand starting at position 2157 of SEQ ID NO: 1563725
gggccucaugcauauuaag

SEQ ID NO: 1827164 - RNA, 19 nt, Artificial Sequence
  Description of Artificial Sequence: Synthetic oligonucleotide
  Antisense strand to SEQ ID NO: 1827163
cuuaauaugcaugaggccc

SEQ ID NO: 1827165 - RNA, 19 nt, Artificial Sequence
  Description of Artificial Sequence: Synthetic oligonucleotide
  Sense strand starting at position 2608 of SEQ ID NO: 1563725
ucgccaagaccucgggauu

SEQ ID NO: 1827166 - RNA, 19 nt, Artificial Sequence
  Description of Artificial Sequence: Synthetic oligonucleotide
  Antisense strand to SEQ ID NO: 1827165
aaucccgaggucuuggcga

SEQ ID NO: 1827167 - RNA, 19 nt, Artificial Sequence
  Description of Artificial Sequence: Synthetic oligonucleotide
  Sense strand starting at position 2609 of SEQ ID NO: 1563725
cgccaagaccucgggauuu

SEQ ID NO: 1827168 - RNA, 19 nt, Artificial Sequence
  Description of Artificial Sequence: Synthetic oligonucleotide
  Antisense strand to SEQ ID NO: 1827167
aaaucccgaggucuuggcg

SEQ ID NO: 1827169 - RNA, 19 nt, Artificial Sequence
  Description of Artificial Sequence: Synthetic oligonucleotide
  Sense strand starting at position 2719 of SEQ ID NO: 1563725
gucuuuauuugcgcccgaa

SEQ ID NO: 1827170 - RNA, 19 nt, Artificial Sequence
  Description of Artificial Sequence: Synthetic oligonucleotide
  Antisense strand to SEQ ID NO: 1827169
uucgggcgcaaauaaagac

SEQ ID NO: 1827171 - RNA, 19 nt, Artificial Sequence
  Description of Artificial Sequence: Synthetic oligonucleotide
  Sense strand starting at position 2722 of SEQ ID NO: 1563725
uuuauuugcgcccgaaauu

SEQ ID NO: 1827172 - RNA, 19 nt, Artificial Sequence
  Description of Artificial Sequence: Synthetic oligonucleotide
  Antisense strand to SEQ ID NO: 1827171
aauuucgggcgcaaauaaa

SEQ ID NO: 1827173 - RNA, 19 nt, Artificial Sequence
  Description of Artificial Sequence: Synthetic oligonucleotide
  Sense strand starting at position 2723 of SEQ ID NO: 1563725
uuauuugcgcccgaaauug

SEQ ID NO: 1827174 - RNA, 19 nt, Artificial Sequence
  Description of Artificial Sequence: Synthetic oligonucleotide
  Antisense strand to SEQ ID NO: 1827173
caauuucgggcgcaaauaa

SEQ ID NO: 1827175 - RNA, 19 nt, Artificial Sequence
  Description of Artificial Sequence: Synthetic oligonucleotide
  Sense strand starting at position 2785 of SEQ ID NO: 1563725
cagagaauuugugagaaau

SEQ ID NO: 1827176 - RNA, 19 nt, Artificial Sequence
  Description of Artificial Sequence: Synthetic oligonucleotide
  Antisense strand to SEQ ID NO: 1827175
auuucucacaaauucucug

SEQ ID NO: 1827177 - RNA, 19 nt, Artificial Sequence
  Description of Artificial Sequence: Synthetic oligonucleotide
  Sense strand starting at position 2787 of SEQ ID NO: 1563725
gagaauuugugagaaauug

SEQ ID NO: 1827178 - RNA, 19 nt, Artificial Sequence
  Description of Artificial Sequence: Synthetic oligonucleotide
  Antisense strand to SEQ ID NO: 1827177
caauuucucacaaauucuc

SEQ ID NO: 1827179 - RNA, 19 nt, Artificial Sequence
  Description of Artificial Sequence: Synthetic oligonucleotide
  Sense strand starting at position 2907 of SEQ ID NO: 1563725
gaauuaaagcuucgggaau

SEQ ID NO: 1827180 - RNA, 19 nt, Artificial Sequence
  Description of Artificial Sequence: Synthetic oligonucleotide
  Antisense strand to SEQ ID NO: 1827179
auucccgaagcuuuaauuc

SEQ ID NO: 1827181 - RNA, 19 nt, Artificial Sequence
  Description of Artificial Sequence: Synthetic oligonucleotide
  Sense strand starting at position 2913 of SEQ ID NO: 1563725
aagcuucgggaaugaauga

SEQ ID NO: 1827182 - RNA, 19 nt, Artificial Sequence
  Description of Artificial Sequence: Synthetic oligonucleotide
  Antisense strand to SEQ ID NO: 1827181
ucauucauucccgaagcuu

SEQ ID NO: 1827183 - RNA, 19 nt, Artificial Sequence
  Description of Artificial Sequence: Synthetic oligonucleotide
  Sense strand starting at position 2996 of SEQ ID NO: 1563725
uugagcuagucacuucuuu

SEQ ID NO: 1827184 - RNA, 19 nt, Artificial Sequence
  Description of Artificial Sequence: Synthetic oligonucleotide
  Antisense strand to SEQ ID NO: 1827183
aaagaagugacuagcucaa

SEQ ID NO: 1827185 - RNA, 19 nt, Artificial Sequence
  Description of Artificial Sequence: Synthetic oligonucleotide
  Sense strand starting at position 3050 of SEQ ID NO: 1563725
cgcagugucacuucuguaa

SEQ ID NO: 1827186 - RNA, 19 nt, Artificial Sequence
  Description of Artificial Sequence: Synthetic oligonucleotide
  Antisense strand to SEQ ID NO: 1827185
uuacagaagugacacugcg

SEQ ID NO: 1827187 - RNA, 19 nt, Artificial Sequence
  Description of Artificial Sequence: Synthetic oligonucleotide
  Sense strand starting at position 3054 of SEQ ID NO: 1563725
gugucacuucuguaaggga

SEQ ID NO: 1827188 - RNA, 19 nt, Artificial Sequence
  Description of Artificial Sequence: Synthetic oligonucleotide
  Antisense strand to SEQ ID NO: 1827187
ucccuuacagaagugacac

SEQ ID NO: 1827189 - RNA, 19 nt, Artificial Sequence
  Description of Artificial Sequence: Synthetic oligonucleotide
  Sense strand starting at position 3252 of SEQ ID NO: 1563725
gggcccuugccuggaaaga

SEQ ID NO: 1827190 - RNA, 19 nt, Artificial Sequence
  Description of Artificial Sequence: Synthetic oligonucleotide
  Antisense strand to SEQ ID NO: 1827189
ucuuuccaggcaagggccc

SEQ ID NO: 1827191 - RNA, 19 nt, Artificial Sequence
  Description of Artificial Sequence: Synthetic oligonucleotide
  Sense strand starting at position 3253 of SEQ ID NO: 1563725
ggcccuugccuggaaagaa

SEQ ID NO: 1827192 - RNA, 19 nt, Artificial Sequence
  Description of Artificial Sequence: Synthetic oligonucleotide
  Antisense strand to SEQ ID NO: 1827191
uucuuuccaggcaagggcc

SEQ ID NO: 1827193 - RNA, 19 nt, Artificial Sequence
  Description of Artificial Sequence: Synthetic oligonucleotide
  Sense strand starting at position 3292 of SEQ ID NO: 1563725
caguuuaaagauugacagu

SEQ ID NO: 1827194 - RNA, 19 nt, Artificial Sequence
  Description of Artificial Sequence: Synthetic oligonucleotide
  Antisense strand to SEQ ID NO: 1827193
acugucaaucuuuaaacug

SEQ ID NO: 1827195 - RNA, 19 nt, Artificial Sequence
  Description of Artificial Sequence: Synthetic oligonucleotide
  Sense strand starting at position 3369 of SEQ ID NO: 1563725
ggccaagagauccagcuau

SEQ ID NO: 1827196 - RNA, 19 nt, Artificial Sequence
  Description of Artificial Sequence: Synthetic oligonucleotide
  Antisense strand to SEQ ID NO: 1827195
auagcuggaucucuuggcc

SEQ ID NO: 1827197 - RNA, 19 nt, Artificial Sequence
  Description of Artificial Sequence: Synthetic oligonucleotide
  Sense strand starting at position 3386 of SEQ ID NO: 1563725
auuuaugaguccuauauuc

SEQ ID NO: 1827198 - RNA, 19 nt, Artificial Sequence
  Description of Artificial Sequence: Synthetic oligonucleotide
  Antisense strand to SEQ ID NO: 1827197
gaauauaggacucauaaau

SEQ ID NO: 1827199 - RNA, 19 nt, Artificial Sequence
  Description of Artificial Sequence: Synthetic oligonucleotide
  Sense strand starting at position 3434 of SEQ ID NO: 1563725
uccaaaugcugcuuccaga

SEQ ID NO: 1827200 - RNA, 19 nt, Artificial Sequence
  Description of Artificial Sequence: Synthetic oligonucleotide
  Antisense strand to SEQ ID NO: 1827199
ucuggaagcagcauuugga

SEQ ID NO: 1827201 - RNA, 19 nt, Artificial Sequence
  Description of Artificial Sequence: Synthetic oligonucleotide
  Sense strand starting at position 3461 of SEQ ID NO: 1563725
cugaguuugaggugugcaa

SEQ ID NO: 1827202 - RNA, 19 nt, Artificial Sequence
  Description of Artificial Sequence: Synthetic oligonucleotide
  Antisense strand to SEQ ID NO: 1827201
uugcacaccucaaacucag

SEQ ID NO: 1827203 - RNA, 19 nt, Artificial Sequence
  Description of Artificial Sequence: Synthetic oligonucleotide
  Sense strand starting at position 3463 of SEQ ID NO: 1563725
gaguuugaggugugcaaag

SEQ ID NO: 1827204 - RNA, 19 nt, Artificial Sequence
  Description of Artificial Sequence: Synthetic oligonucleotide
  Antisense strand to SEQ ID NO: 1827203
cuuugcacaccucaaacuc

SEQ ID NO: 1827205 - RNA, 19 nt, Artificial Sequence
  Description of Artificial Sequence: Synthetic oligonucleotide
  Sense strand starting at position 3465 of SEQ ID NO: 1563725
guuugaggugugcaaagga

SEQ ID NO: 1827206 - RNA, 19 nt, Artificial Sequence
  Description of Artificial Sequence: Synthetic oligonucleotide
  Antisense strand to SEQ ID NO: 1827205
uccuuugcacaccucaaac

SEQ ID NO: 1827207 - RNA, 19 nt, Artificial Sequence
  Description of Artificial Sequence: Synthetic oligonucleotide
  Sense strand starting at position 50 of SEQ ID NO: 1563726
gugauagaagcuugaaauc

SEQ ID NO: 1827208 - RNA, 19 nt, Artificial Sequence
  Description of Artificial Sequence: Synthetic oligonucleotide
  Antisense strand to SEQ ID NO: 1827207
gauuucaagcuucuaucac

SEQ ID NO: 1827209 - RNA, 19 nt, Artificial Sequence
  Description of Artificial Sequence: Synthetic oligonucleotide
  Sense strand starting at position 59 of SEQ ID NO: 1563726
gcuugaaaucuaugacuua

SEQ ID NO: 1827210 - RNA, 19 nt, Artificial Sequence
  Description of Artificial Sequence: Synthetic oligonucleotide
  Antisense strand to SEQ ID NO: 1827209
uaagucauagauuucaagc

SEQ ID NO: 1827211 - RNA, 19 nt, Artificial Sequence
  Description of Artificial Sequence: Synthetic oligonucleotide
  Sense strand starting at position 88 of SEQ ID NO: 1563726
gucaucugcuaacuguuaa

SEQ ID NO: 1827212 - RNA, 19 nt, Artificial Sequence
  Description of Artificial Sequence: Synthetic oligonucleotide
  Antisense strand to SEQ ID NO: 1827211
uuaacaguuagcagaugac

SEQ ID NO: 1827213 - RNA, 19 nt, Artificial Sequence
  Description of Artificial Sequence: Synthetic oligonucleotide
  Sense strand starting at position 180 of SEQ ID NO: 1563726
cugaaauugucacuauugu

SEQ ID NO: 1827214 - RNA, 19 nt, Artificial Sequence
  Description of Artificial Sequence: Synthetic oligonucleotide
  Antisense strand to SEQ ID NO: 1827213
acaauagugacaauuucag

SEQ ID NO: 1827215 - RNA, 19 nt, Artificial Sequence
  Description of Artificial Sequence: Synthetic oligonucleotide
  Sense strand starting at position 181 of SEQ ID NO: 1563726
ugaaauugucacuauuguu

SEQ ID NO: 1827216 - RNA, 19 nt, Artificial Sequence
  Description of Artificial Sequence: Synthetic oligonucleotide
  Antisense strand to SEQ ID NO: 1827215
aacaauagugacaauuuca

SEQ ID NO: 1827217 - RNA, 19 nt, Artificial Sequence
  Description of Artificial Sequence: Synthetic oligonucleotide
  Sense strand starting at position 287 of SEQ ID NO: 1563726
aucacuucgucacuaucua

SEQ ID NO: 1827218 - RNA, 19 nt, Artificial Sequence
  Description of Artificial Sequence: Synthetic oligonucleotide
  Antisense strand to SEQ ID NO: 1827217
uagauagugacgaagugau

SEQ ID NO: 1827219 - RNA, 19 nt, Artificial Sequence
  Description of Artificial Sequence: Synthetic oligonucleotide
  Sense strand starting at position 335 of SEQ ID NO: 1563726
cgugcucaucuguaaccca

SEQ ID NO: 1827220 - RNA, 19 nt, Artificial Sequence
  Description of Artificial Sequence: Synthetic oligonucleotide
  Antisense strand to SEQ ID NO: 1827219
uggguuacagaugagcacg

SEQ ID NO: 1827221 - RNA, 19 nt, Artificial Sequence
  Description of Artificial Sequence: Synthetic oligonucleotide
  Sense strand starting at position 338 of SEQ ID NO: 1563726
gcucaucuguaacccagaa

SEQ ID NO: 1827222 - RNA, 19 nt, Artificial Sequence
  Description of Artificial Sequence: Synthetic oligonucleotide
  Antisense strand to SEQ ID NO: 1827221
uucuggguuacagaugagc

SEQ ID NO: 1827223 - RNA, 19 nt, Artificial Sequence
  Description of Artificial Sequence: Synthetic oligonucleotide
  Sense strand starting at position 342 of SEQ ID NO: 1563726
aucuguaacccagaaugca

SEQ ID NO: 1827224 - RNA, 19 nt, Artificial Sequence
  Description of Artificial Sequence: Synthetic oligonucleotide
  Antisense strand to SEQ ID NO: 1827223
ugcauucuggguuacagau

SEQ ID NO: 1827225 - RNA, 19 nt, Artificial Sequence
  Description of Artificial Sequence: Synthetic oligonucleotide
  Sense strand starting at position 369 of SEQ ID NO: 1563726
cgagaacacuuucuccaaa

SEQ ID NO: 1827226 - RNA, 19 nt, Artificial Sequence
  Description of Artificial Sequence: Synthetic oligonucleotide
  Antisense strand to SEQ ID NO: 1827225
uuuggagaaaguguucucg

SEQ ID NO: 1827227 - RNA, 19 nt, Artificial Sequence
  Description of Artificial Sequence: Synthetic oligonucleotide
  Sense strand starting at position 470 of SEQ ID NO: 1563726
acccaaggucaucauguaa

SEQ ID NO: 1827228 - RNA, 19 nt, Artificial Sequence
  Description of Artificial Sequence: Synthetic oligonucleotide
  Antisense strand to SEQ ID NO: 1827227
uuacaugaugaccuugggu

SEQ ID NO: 1827229 - RNA, 19 nt, Artificial Sequence
  Description of Artificial Sequence: Synthetic oligonucleotide
  Sense strand starting at position 631 of SEQ ID NO: 1563726
ccgggacacccguaauuca

SEQ ID NO: 1827230 - RNA, 19 nt, Artificial Sequence
  Description of Artificial Sequence: Synthetic oligonucleotide
  Antisense strand to SEQ ID NO: 1827229
ugaauuacgggugucccgg

SEQ ID NO: 1827231 - RNA, 19 nt, Artificial Sequence
  Description of Artificial Sequence: Synthetic oligonucleotide
  Sense strand starting at position 818 of SEQ ID NO: 1563726
cggagucccacucgcuaaa

SEQ ID NO: 1827232 - RNA, 19 nt, Artificial Sequence
  Description of Artificial Sequence: Synthetic oligonucleotide
  Antisense strand to SEQ ID NO: 1827231
uuuagcgagugggacuccg

SEQ ID NO: 1827233 - RNA, 19 nt, Artificial Sequence
  Description of Artificial Sequence: Synthetic oligonucleotide
  Sense strand starting at position 1010 of SEQ ID NO: 1563726
cgcacuccucgggauaaca

SEQ ID NO: 1827234 - RNA, 19 nt, Artificial Sequence
  Description of Artificial Sequence: Synthetic oligonucleotide
  Antisense strand to SEQ ID NO: 1827233
uguuaucccgaggagugcg

SEQ ID NO: 1827235 - RNA, 19 nt, Artificial Sequence
  Description of Artificial Sequence: Synthetic oligonucleotide
  Sense strand starting at position 1887 of SEQ ID NO: 1563726
gugcgagacguaccuguau

SEQ ID NO: 1827236 - RNA, 19 nt, Artificial Sequence
  Description of Artificial Sequence: Synthetic oligonucleotide
  Antisense strand to SEQ ID NO: 1827235
auacagguacgucucgcac

SEQ ID NO: 1827237 - RNA, 19 nt, Artificial Sequence
  Description of Artificial Sequence: Synthetic oligonucleotide
  Sense strand starting at position 2000 of SEQ ID NO: 1563726
gcgggcucugccguuuaaa

SEQ ID NO: 1827238 - RNA, 19 nt, Artificial Sequence
  Description of Artificial Sequence: Synthetic oligonucleotide
  Antisense strand to SEQ ID NO: 1827237
uuuaaacggcagagcccgc

SEQ ID NO: 1827239 - RNA, 19 nt, Artificial Sequence
  Description of Artificial Sequence: Synthetic oligonucleotide
  Sense strand starting at position 2045 of SEQ ID NO: 1563726
gcgggccucaugcauauua

SEQ ID NO: 1827240 - RNA, 19 nt, Artificial Sequence
  Description of Artificial Sequence: Synthetic oligonucleotide
  Antisense strand to SEQ ID NO: 1827239
uaauaugcaugaggcccgc

SEQ ID NO: 1827241 - RNA, 19 nt, Artificial Sequence
  Description of Artificial Sequence: Synthetic oligonucleotide
  Sense strand starting at position 2047 of SEQ ID NO: 1563726
gggccucaugcauauuaag

SEQ ID NO: 1827242 - RNA, 19 nt, Artificial Sequence
  Description of Artificial Sequence: Synthetic oligonucleotide
  Antisense strand to SEQ ID NO: 1827241
cuuaauaugcaugaggccc

SEQ ID NO: 1827243 - RNA, 19 nt, Artificial Sequence
  Description of Artificial Sequence: Synthetic oligonucleotide
  Sense strand starting at position 2498 of SEQ ID NO: 1563726
ucgccaagaccucgggauu

SEQ ID NO: 1827244 - RNA, 19 nt, Artificial Sequence
  Description of Artificial Sequence: Synthetic oligonucleotide
  Antisense strand to SEQ ID NO: 1827243
aaucccgaggucuuggcga

SEQ ID NO: 1827245 - RNA, 19 nt, Artificial Sequence
  Description of Artificial Sequence: Synthetic oligonucleotide
  Sense strand starting at position 2499 of SEQ ID NO: 1563726
cgccaagaccucgggauuu

SEQ ID NO: 1827246 - RNA, 19 nt, Artificial Sequence
  Description of Artificial Sequence: Synthetic oligonucleotide
  Antisense strand to SEQ ID NO: 1827245
aaaucccgaggucuuggcg

SEQ ID NO: 1827247 - RNA, 19 nt, Artificial Sequence
  Description of Artificial Sequence: Synthetic oligonucleotide
  Sense strand starting at position 2609 of SEQ ID NO: 1563726
gucuuuauuugcgcccgaa

SEQ ID NO: 1827248 - RNA, 19 nt, Artificial Sequence
  Description of Artificial Sequence: Synthetic oligonucleotide
  Antisense strand to SEQ ID NO: 1827247
uucgggcgcaaauaaagac

SEQ ID NO: 1827249 - RNA, 19 nt, Artificial Sequence
  Description of Artificial Sequence: Synthetic oligonucleotide
  Sense strand starting at position 2612 of SEQ ID NO: 1563726
uuuauuugcgcccgaaauu

SEQ ID NO: 1827250 - RNA, 19 nt, Artificial Sequence
  Description of Artificial Sequence: Synthetic oligonucleotide
  Antisense strand to SEQ ID NO: 1827249
aauuucgggcgcaaauaaa

SEQ ID NO: 1827251 - RNA, 19 nt, Artificial Sequence
  Description of Artificial Sequence: Synthetic oligonucleotide
  Sense strand starting at position 2613 of SEQ ID NO: 1563726
uuauuugcgcccgaaauug

SEQ ID NO: 1827252 - RNA, 19 nt, Artificial Sequence
  Description of Artificial Sequence: Synthetic oligonucleotide
  Antisense strand to SEQ ID NO: 1827251
caauuucgggcgcaaauaa

SEQ ID NO: 1827253 - RNA, 19 nt, Artificial Sequence
  Description of Artificial Sequence: Synthetic oligonucleotide
  Sense strand starting at position 2675 of SEQ ID NO: 1563726
cagagaauuugugagaaau

SEQ ID NO: 1827254 - RNA, 19 nt, Artificial Sequence
  Description of Artificial Sequence: Synthetic oligonucleotide
  Antisense strand to SEQ ID NO: 1827253
auuucucacaaauucucug

SEQ ID NO: 1827255 - RNA, 19 nt, Artificial Sequence
  Description of Artificial Sequence: Synthetic oligonucleotide
  Sense strand starting at position 2677 of SEQ ID NO: 1563726
gagaauuugugagaaauug

SEQ ID NO: 1827256 - RNA, 19 nt, Artificial Sequence
  Description of Artificial Sequence: Synthetic oligonucleotide
  Antisense strand to SEQ ID NO: 1827255
caauuucucacaaauucuc

SEQ ID NO: 1827257 - RNA, 19 nt, Artificial Sequence
  Description of Artificial Sequence: Synthetic oligonucleotide
  Sense strand starting at position 2797 of SEQ ID NO: 1563726
gaauuaaagcuucgggaau

SEQ ID NO: 1827258 - RNA, 19 nt, Artificial Sequence
  Description of Artificial Sequence: Synthetic oligonucleotide
  Antisense strand to SEQ ID NO: 1827257
auucccgaagcuuuaauuc

SEQ ID NO: 1827259 - RNA, 19 nt, Artificial Sequence
  Description of Artificial Sequence: Synthetic oligonucleotide
  Sense strand starting at position 2803 of SEQ ID NO: 1563726
aagcuucgggaaugaauga

SEQ ID NO: 1827260 - RNA, 19 nt, Artificial Sequence
  Description of Artificial Sequence: Synthetic oligonucleotide
  Antisense strand to SEQ ID NO: 1827259
ucauucauucccgaagcuu

SEQ ID NO: 1827261 - RNA, 19 nt, Artificial Sequence
  Description of Artificial Sequence: Synthetic oligonucleotide
  Sense strand starting at position 2886 of SEQ ID NO: 1563726
uugagcuagucacuucuuu

SEQ ID NO: 1827262 - RNA, 19 nt, Artificial Sequence
  Description of Artificial Sequence: Synthetic oligonucleotide
  Antisense strand to SEQ ID NO: 1827261
aaagaagugacuagcucaa

SEQ ID NO: 1827263 - RNA, 19 nt, Artificial Sequence
  Description of Artificial Sequence: Synthetic oligonucleotide
  Sense strand starting at position 2940 of SEQ ID NO: 1563726
cgcagugucacuucuguaa

SEQ ID NO: 1827264 - RNA, 19 nt, Artificial Sequence
  Description of Artificial Sequence: Synthetic oligonucleotide
  Antisense strand to SEQ ID NO: 1827263
uuacagaagugacacugcg

SEQ ID NO: 1827265 - RNA, 19 nt, Artificial Sequence
  Description of Artificial Sequence: Synthetic oligonucleotide
  Sense strand starting at position 2944 of SEQ ID NO: 1563726
gugucacuucuguaaggga

SEQ ID NO: 1827266 - RNA, 19 nt, Artificial Sequence
  Description of Artificial Sequence: Synthetic oligonucleotide
  Antisense strand to SEQ ID NO: 1827265
ucccuuacagaagugacac

SEQ ID NO: 1827267 - RNA, 19 nt, Artificial Sequence
  Description of Artificial Sequence: Synthetic oligonucleotide
  Sense strand starting at position 2957 of SEQ ID NO: 1563726
aagggauguucugaaauuc

SEQ ID NO: 1827268 - RNA, 19 nt, Artificial Sequence
  Description of Artificial Sequence: Synthetic oligonucleotide
  Antisense strand to SEQ ID NO: 1827267
gaauuucagaacaucccuu

SEQ ID NO: 1827269 - RNA, 19 nt, Artificial Sequence
  Description of Artificial Sequence: Synthetic oligonucleotide
  Sense strand starting at position 3142 of SEQ ID NO: 1563726
gggcccuugccuggaaaga

SEQ ID NO: 1827270 - RNA, 19 nt, Artificial Sequence
  Description of Artificial Sequence: Synthetic oligonucleotide
  Antisense strand to SEQ ID NO: 1827269
ucuuuccaggcaagggccc

SEQ ID NO: 1827271 - RNA, 19 nt, Artificial Sequence
  Description of Artificial Sequence: Synthetic oligonucleotide
  Sense strand starting at position 3143 of SEQ ID NO: 1563726
ggcccuugccuggaaagaa

SEQ ID NO: 1827272 - RNA, 19 nt, Artificial Sequence
  Description of Artificial Sequence: Synthetic oligonucleotide
  Antisense strand to SEQ ID NO: 1827271
uucuuuccaggcaagggcc

SEQ ID NO: 1827273 - RNA, 19 nt, Artificial Sequence
  Description of Artificial Sequence: Synthetic oligonucleotide
  Sense strand starting at position 3182 of SEQ ID NO: 1563726
caguuuaaagauugacagu

SEQ ID NO: 1827274 - RNA, 19 nt, Artificial Sequence
  Description of Artificial Sequence: Synthetic oligonucleotide
  Antisense strand to SEQ ID NO: 1827273
acugucaaucuuuaaacug

SEQ ID NO: 1827275 - RNA, 19 nt, Artificial Sequence
  Description of Artificial Sequence: Synthetic oligonucleotide
  Sense strand starting at position 3259 of SEQ ID NO: 1563726
ggccaagagauccagcuau

SEQ ID NO: 1827276 - RNA, 19 nt, Artificial Sequence
  Description of Artificial Sequence: Synthetic oligonucleotide
  Antisense strand to SEQ ID NO: 1827275
auagcuggaucucuuggcc

SEQ ID NO: 1827277 - RNA, 19 nt, Artificial Sequence
  Description of Artificial Sequence: Synthetic oligonucleotide
  Sense strand starting at position 3276 of SEQ ID NO: 1563726
auuuaugaguccuauauuc

SEQ ID NO: 1827278 - RNA, 19 nt, Artificial Sequence
  Description of Artificial Sequence: Synthetic oligonucleotide
  Antisense strand to SEQ ID NO: 1827277
gaauauaggacucauaaau

SEQ ID NO: 1827279 - RNA, 19 nt, Artificial Sequence
  Description of Artificial Sequence: Synthetic oligonucleotide
  Sense strand starting at position 3324 of SEQ ID NO: 1563726
uccaaaugcugcuuccaga

SEQ ID NO: 1827280 - RNA, 19 nt, Artificial Sequence
  Description of Artificial Sequence: Synthetic oligonucleotide
  Antisense strand to SEQ ID NO: 1827279
ucuggaagcagcauuugga

SEQ ID NO: 1827281 - RNA, 19 nt, Artificial Sequence
  Description of Artificial Sequence: Synthetic oligonucleotide
  Sense strand starting at position 3351 of SEQ ID NO: 1563726
cugaguuugaggugugcaa

SEQ ID NO: 1827282 - RNA, 19 nt, Artificial Sequence
  Description of Artificial Sequence: Synthetic oligonucleotide
  Antisense strand to SEQ ID NO: 1827281
uugcacaccucaaacucag

SEQ ID NO: 1827283 - RNA, 19 nt, Artificial Sequence
  Description of Artificial Sequence: Synthetic oligonucleotide
  Sense strand starting at position 3353 of SEQ ID NO: 1563726
gaguuugaggugugcaaag

SEQ ID NO: 1827284 - RNA, 19 nt, Artificial Sequence
  Description of Artificial Sequence: Synthetic oligonucleotide
  Antisense strand to SEQ ID NO: 1827283
cuuugcacaccucaaacuc

SEQ ID NO: 1827285 - RNA, 19 nt, Artificial Sequence
  Description of Artificial Sequence: Synthetic oligonucleotide
  Sense strand starting at position 3355 of SEQ ID NO: 1563726
guuugaggugugcaaagga

SEQ ID NO: 1827286 - RNA, 19 nt, Artificial Sequence
  Description of Artificial Sequence: Synthetic oligonucleotide
  Antisense strand to SEQ ID NO: 1827285
uccuuugcacaccucaaac

SEQ ID NO: 1827287 - RNA, 19 nt, Artificial Sequence
  Description of Artificial Sequence: Synthetic oligonucleotide
  Sense strand starting at position 30 of SEQ ID NO: 1563727
gaauuaaagcuucgggaau

SEQ ID NO: 1827288 - RNA, 19 nt, Artificial Sequence
  Description of Artificial Sequence: Synthetic oligonucleotide
  Antisense strand to SEQ ID NO: 1827287
auucccgaagcuuuaauuc

SEQ ID NO: 1827289 - RNA, 19 nt, Artificial Sequence
  Description of Artificial Sequence: Synthetic oligonucleotide
  Sense strand starting at position 36 of SEQ ID NO: 1563727
aagcuucgggaaugaauga

SEQ ID NO: 1827290 - RNA, 19 nt, Artificial Sequence
  Description of Artificial Sequence: Synthetic oligonucleotide
  Antisense strand to SEQ ID NO: 1827289
ucauucauucccgaagcuu

SEQ ID NO: 1827291 - RNA, 19 nt, Artificial Sequence
  Description of Artificial Sequence: Synthetic oligonucleotide
  Sense strand starting at position 108 of SEQ ID NO: 1563727
gugguauggccuugagcua

SEQ ID NO: 1827292 - RNA, 19 nt, Artificial Sequence
  Description of Artificial Sequence: Synthetic oligonucleotide
  Antisense strand to SEQ ID NO: 1827291
uagcucaaggccauaccac

SEQ ID NO: 1827293 - RNA, 19 nt, Artificial Sequence
  Description of Artificial Sequence: Synthetic oligonucleotide
  Sense strand starting at position 119 of SEQ ID NO: 1563727
uugagcuagucacuucuuu

SEQ ID NO: 1827294 - RNA, 19 nt, Artificial Sequence
  Description of Artificial Sequence: Synthetic oligonucleotide
  Antisense strand to SEQ ID NO: 1827293
aaagaagugacuagcucaa

SEQ ID NO: 1827295 - RNA, 19 nt, Artificial Sequence
  Description of Artificial Sequence: Synthetic oligonucleotide
  Sense strand starting at position 173 of SEQ ID NO: 1563727
cgcagugucacuucuguaa

SEQ ID NO: 1827296 - RNA, 19 nt, Artificial Sequence
  Description of Artificial Sequence: Synthetic oligonucleotide
  Antisense strand to SEQ ID NO: 1827295
uuacagaagugacacugcg

SEQ ID NO: 1827297 - RNA, 19 nt, Artificial Sequence
  Description of Artificial Sequence: Synthetic oligonucleotide
  Sense strand starting at position 177 of SEQ ID NO: 1563727
gugucacuucuguaaggga

SEQ ID NO: 1827298 - RNA, 19 nt, Artificial Sequence
  Description of Artificial Sequence: Synthetic oligonucleotide
  Antisense strand to SEQ ID NO: 1827297
ucccuuacagaagugacac

SEQ ID NO: 1827299 - RNA, 19 nt, Artificial Sequence
  Description of Artificial Sequence: Synthetic oligonucleotide
  Sense strand starting at position 190 of SEQ ID NO: 1563727
aagggauguucugaaauuc

SEQ ID NO: 1827300 - RNA, 19 nt, Artificial Sequence
  Description of Artificial Sequence: Synthetic oligonucleotide
  Antisense strand to SEQ ID NO: 1827299
gaauuucagaacaucccuu

SEQ ID NO: 1827301 - RNA, 19 nt, Artificial Sequence
  Description of Artificial Sequence: Synthetic oligonucleotide
  Sense strand starting at position 233 of SEQ ID NO: 1563727
gcagguguugcuggaauuc

SEQ ID NO: 1827302 - RNA, 19 nt, Artificial Sequence
  Description of Artificial Sequence: Synthetic oligonucleotide
  Antisense strand to SEQ ID NO: 1827301
gaauuccagcaacaccugc

SEQ ID NO: 1827303 - RNA, 19 nt, Artificial Sequence
  Description of Artificial Sequence: Synthetic oligonucleotide
  Sense strand starting at position 375 of SEQ ID NO: 1563727
gggcccuugccuggaaaga

SEQ ID NO: 1827304 - RNA, 19 nt, Artificial Sequence
  Description of Artificial Sequence: Synthetic oligonucleotide
  Antisense strand to SEQ ID NO: 1827303
ucuuuccaggcaagggccc

SEQ ID NO: 1827305 - RNA, 19 nt, Artificial Sequence
  Description of Artificial Sequence: Synthetic oligonucleotide
  Sense strand starting at position 376 of SEQ ID NO: 1563727
ggcccuugccuggaaagaa

SEQ ID NO: 1827306 - RNA, 19 nt, Artificial Sequence
  Description of Artificial Sequence: Synthetic oligonucleotide
  Antisense strand to SEQ ID NO: 1827305
uucuuuccaggcaagggcc

SEQ ID NO: 1827307 - RNA, 19 nt, Artificial Sequence
  Description of Artificial Sequence: Synthetic oligonucleotide
  Sense strand starting at position 415 of SEQ ID NO: 1563727
caguuuaaagauugacagu

SEQ ID NO: 1827308 - RNA, 19 nt, Artificial Sequence
  Description of Artificial Sequence: Synthetic oligonucleotide
  Antisense strand to SEQ ID NO: 1827307
acugucaaucuuuaaacug

SEQ ID NO: 1827309 - RNA, 19 nt, Artificial Sequence
  Description of Artificial Sequence: Synthetic oligonucleotide
  Sense strand starting at position 492 of SEQ ID NO: 1563727
ggccaagagauccagcuau

SEQ ID NO: 1827310 - RNA, 19 nt, Artificial Sequence
  Description of Artificial Sequence: Synthetic oligonucleotide
  Antisense strand to SEQ ID NO: 1827309
auagcuggaucucuuggcc

SEQ ID NO: 1827311 - RNA, 19 nt, Artificial Sequence
  Description of Artificial Sequence: Synthetic oligonucleotide
  Sense strand starting at position 509 of SEQ ID NO: 1563727
auuuaugaguccuauauuc

SEQ ID NO: 1827312 - RNA, 19 nt, Artificial Sequence
  Description of Artificial Sequence: Synthetic oligonucleotide
  Antisense strand to SEQ ID NO: 1827311
gaauauaggacucauaaau

SEQ ID NO: 1827313 - RNA, 19 nt, Artificial Sequence
  Description of Artificial Sequence: Synthetic oligonucleotide
  Sense strand starting at position 557 of SEQ ID NO: 1563727
uccaaaugcugcuuccaga

SEQ ID NO: 1827314 - RNA, 19 nt, Artificial Sequence
  Description of Artificial Sequence: Synthetic oligonucleotide
  Antisense strand to SEQ ID NO: 1827313
ucuggaagcagcauuugga

SEQ ID NO: 1827315 - RNA, 19 nt, Artificial Sequence
  Description of Artificial Sequence: Synthetic oligonucleotide
  Sense strand starting at position 584 of SEQ ID NO: 1563727
cugaguuugaggugugcaa

SEQ ID NO: 1827316 - RNA, 19 nt, Artificial Sequence
  Description of Artificial Sequence: Synthetic oligonucleotide
  Antisense strand to SEQ ID NO: 1827315
uugcacaccucaaacucag

SEQ ID NO: 1827317 - RNA, 19 nt, Artificial Sequence
  Description of Artificial Sequence: Synthetic oligonucleotide
  Sense strand starting at position 586 of SEQ ID NO: 1563727
gaguuugaggugugcaaag

SEQ ID NO: 1827318 - RNA, 19 nt, Artificial Sequence
  Description of Artificial Sequence: Synthetic oligonucleotide
  Antisense strand to SEQ ID NO: 1827317
cuuugcacaccucaaacuc

SEQ ID NO: 1827319 - RNA, 19 nt, Artificial Sequence
  Description of Artificial Sequence: Synthetic oligonucleotide
  Sense strand starting at position 588 of SEQ ID NO: 1563727
guuugaggugugcaaagga

SEQ ID NO: 1827320 - RNA, 19 nt, Artificial Sequence
  Description of Artificial Sequence: Synthetic oligonucleotide
  Antisense strand to SEQ ID NO: 1827319
uccuuugcacaccucaaac

SEQ ID NO: 1827321 - RNA, 19 nt, Artificial Sequence
  Description of Artificial Sequence: Synthetic oligonucleotide
  Sense strand starting at position 1174 of SEQ ID NO: 1563727
ccugccuucugcuugcaua

SEQ ID NO: 1827322 - RNA, 19 nt, Artificial Sequence
  Description of Artificial Sequence: Synthetic oligonucleotide
  Antisense strand to SEQ ID NO: 1827321
uaugcaagcagaaggcagg

SEQ ID NO: 1827323 - RNA, 19 nt, Artificial Sequence
  Description of Artificial Sequence: Synthetic oligonucleotide
  Sense strand starting at position 1283 of SEQ ID NO: 1563727
aggguaaucccucacccuu

SEQ ID NO: 1827324 - RNA, 19 nt, Artificial Sequence
  Description of Artificial Sequence: Synthetic oligonucleotide
  Antisense strand to SEQ ID NO: 1827323
aagggugagggauuacccu

SEQ ID NO: 1827325 - RNA, 19 nt, Artificial Sequence
  Description of Artificial Sequence: Synthetic oligonucleotide
  Sense strand starting at position 1508 of SEQ ID NO: 1563727
gccuuucuagaccagagau

SEQ ID NO: 1827326 - RNA, 19 nt, Artificial Sequence
  Description of Artificial Sequence: Synthetic oligonucleotide
  Antisense strand to SEQ ID NO: 1827325
aucucuggucuagaaaggc

SEQ ID NO: 1827327 - RNA, 19 nt, Artificial Sequence
  Description of Artificial Sequence: Synthetic oligonucleotide
  Sense strand starting at position 1856 of SEQ ID NO: 1563727
cccacauacuucgaaugau

SEQ ID NO: 1827328 - RNA, 19 nt, Artificial Sequence
  Description of Artificial Sequence: Synthetic oligonucleotide
  Antisense strand to SEQ ID NO: 1827327
aucauucgaaguauguggg

SEQ ID NO: 1827329 - RNA, 19 nt, Artificial Sequence
  Description of Artificial Sequence: Synthetic oligonucleotide
  Sense strand starting at position 1997 of SEQ ID NO: 1563727
caaacuggucaucgucaga

SEQ ID NO: 1827330 - RNA, 19 nt, Artificial Sequence
  Description of Artificial Sequence: Synthetic oligonucleotide
  Antisense strand to SEQ ID NO: 1827329
ucugacgaugaccaguuug

SEQ ID NO: 1827331 - RNA, 19 nt, Artificial Sequence
  Description of Artificial Sequence: Synthetic oligonucleotide
  Sense strand starting at position 2000 of SEQ ID NO: 1563727
acuggucaucgucagaaca

SEQ ID NO: 1827332 - RNA, 19 nt, Artificial Sequence
  Description of Artificial Sequence: Synthetic oligonucleotide
  Antisense strand to SEQ ID NO: 1827331
uguucugacgaugaccagu

SEQ ID NO: 1827333 - RNA, 19 nt, Artificial Sequence
  Description of Artificial Sequence: Synthetic oligonucleotide
  Sense strand starting at position 2161 of SEQ ID NO: 1563727
cggcgacaugccugagcaa

SEQ ID NO: 1827334 - RNA, 19 nt, Artificial Sequence
  Description of Artificial Sequence: Synthetic oligonucleotide
  Antisense strand to SEQ ID NO: 1827333
uugcucaggcaugucgccg

SEQ ID NO: 1827335 - RNA, 19 nt, Artificial Sequence
  Description of Artificial Sequence: Synthetic oligonucleotide
  Sense strand starting at position 2197 of SEQ ID NO: 1563727
gcuccugccuuagcagaaa

SEQ ID NO: 1827336 - RNA, 19 nt, Artificial Sequence
  Description of Artificial Sequence: Synthetic oligonucleotide
  Antisense strand to SEQ ID NO: 1827335
uuucugcuaaggcaggagc

SEQ ID NO: 1827337 - RNA, 19 nt, Artificial Sequence
  Description of Artificial Sequence: Synthetic oligonucleotide
  Sense strand starting at position 2228 of SEQ ID NO: 1563727
uguauugcaugucuacuaa

SEQ ID NO: 1827338 - RNA, 19 nt, Artificial Sequence
  Description of Artificial Sequence: Synthetic oligonucleotide
  Antisense strand to SEQ ID NO: 1827337
uuaguagacaugcaauaca

SEQ ID NO: 1827339 - RNA, 19 nt, Artificial Sequence
  Description of Artificial Sequence: Synthetic oligonucleotide
  Sense strand starting at position 2315 of SEQ ID NO: 1563727
ugggcucugucacugauuu

SEQ ID NO: 1827340 - RNA, 19 nt, Artificial Sequence
  Description of Artificial Sequence: Synthetic oligonucleotide
  Antisense strand to SEQ ID NO: 1827339
aaaucagugacagagccca

SEQ ID NO: 1827341 - RNA, 19 nt, Artificial Sequence
  Description of Artificial Sequence: Synthetic oligonucleotide
  Sense strand starting at position 2372 of SEQ ID NO: 1563727
gccucaguguccucuauca

SEQ ID NO: 1827342 - RNA, 19 nt, Artificial Sequence
  Description of Artificial Sequence: Synthetic oligonucleotide
  Antisense strand to SEQ ID NO: 1827341
ugauagaggacacugaggc

SEQ ID NO: 1827343 - RNA, 19 nt, Artificial Sequence
  Description of Artificial Sequence: Synthetic oligonucleotide
  Sense strand starting at position 2374 of SEQ ID NO: 1563727
cucaguguccucuaucaaa

SEQ ID NO: 1827344 - RNA, 19 nt, Artificial Sequence
  Description of Artificial Sequence: Synthetic oligonucleotide
  Antisense strand to SEQ ID NO: 1827343
uuugauagaggacacugag

SEQ ID NO: 1827345 - RNA, 19 nt, Artificial Sequence
  Description of Artificial Sequence: Synthetic oligonucleotide
  Sense strand starting at position 2463 of SEQ ID NO: 1563727
gucugcuugucaccaguca

SEQ ID NO: 1827346 - RNA, 19 nt, Artificial Sequence
  Description of Artificial Sequence: Synthetic oligonucleotide
  Antisense strand to SEQ ID NO: 1827345
ugacuggugacaagcagac

SEQ ID NO: 1827347 - RNA, 19 nt, Artificial Sequence
  Description of Artificial Sequence: Synthetic oligonucleotide
  Sense strand starting at position 2464 of SEQ ID NO: 1563727
ucugcuugucaccagucaa

SEQ ID NO: 1827348 - RNA, 19 nt, Artificial Sequence
  Description of Artificial Sequence: Synthetic oligonucleotide
  Antisense strand to SEQ ID NO: 1827347
uugacuggugacaagcaga

SEQ ID NO: 1827349 - RNA, 19 nt, Artificial Sequence
  Description of Artificial Sequence: Synthetic oligonucleotide
  Sense strand starting at position 2500 of SEQ ID NO: 1563727
ccuaaagacuaguuuggaa

SEQ ID NO: 1827350 - RNA, 19 nt, Artificial Sequence
  Description of Artificial Sequence: Synthetic oligonucleotide
  Antisense strand to SEQ ID NO: 1827349
uuccaaacuagucuuuagg

SEQ ID NO: 1827351 - RNA, 19 nt, Artificial Sequence
  Description of Artificial Sequence: Synthetic oligonucleotide
  Sense strand starting at position 2507 of SEQ ID NO: 1563727
acuaguuuggaaggugaaa

SEQ ID NO: 1827352 - RNA, 19 nt, Artificial Sequence
  Description of Artificial Sequence: Synthetic oligonucleotide
  Antisense strand to SEQ ID NO: 1827351
uuucaccuuccaaacuagu

SEQ ID NO: 1827353 - RNA, 19 nt, Artificial Sequence
  Description of Artificial Sequence: Synthetic oligonucleotide
  Sense strand starting at position 2616 of SEQ ID NO: 1563727
gcucaaugcccguuagcuu

SEQ ID NO: 1827354 - RNA, 19 nt, Artificial Sequence
  Description of Artificial Sequence: Synthetic oligonucleotide
  Antisense strand to SEQ ID NO: 1827353
aagcuaacgggcauugagc

SEQ ID NO: 1827355 - RNA, 19 nt, Artificial Sequence
  Description of Artificial Sequence: Synthetic oligonucleotide
  Sense strand starting at position 2623 of SEQ ID NO: 1563727
gcccguuagcuugaggaua

SEQ ID NO: 1827356 - RNA, 19 nt, Artificial Sequence
  Description of Artificial Sequence: Synthetic oligonucleotide
  Antisense strand to SEQ ID NO: 1827355
uauccucaagcuaacgggc

SEQ ID NO: 1827357 - RNA, 19 nt, Artificial Sequence
  Description of Artificial Sequence: Synthetic oligonucleotide
  Sense strand starting at position 2821 of SEQ ID NO: 1563727
ugggaugaaguguggcaaa

SEQ ID NO: 1827358 - RNA, 19 nt, Artificial Sequence
  Description of Artificial Sequence: Synthetic oligonucleotide
  Antisense strand to SEQ ID NO: 1827357
uuugccacacuucauccca

SEQ ID NO: 1827359 - RNA, 19 nt, Artificial Sequence
  Description of Artificial Sequence: Synthetic oligonucleotide
  Sense strand starting at position 2831 of SEQ ID NO: 1563727
uguggcaaaugcuauuuaa

SEQ ID NO: 1827360 - RNA, 19 nt, Artificial Sequence
  Description of Artificial Sequence: Synthetic oligonucleotide
  Antisense strand to SEQ ID NO: 1827359
uuaaauagcauuugccaca

SEQ ID NO: 1827361 - RNA, 19 nt, Artificial Sequence
  Description of Artificial Sequence: Synthetic oligonucleotide
  Sense strand starting at position 3343 of SEQ ID NO: 1563727
gaaucaugccuguaggcca

SEQ ID NO: 1827362 - RNA, 19 nt, Artificial Sequence
  Description of Artificial Sequence: Synthetic oligonucleotide
  Antisense strand to SEQ ID NO: 1827361
uggccuacaggcaugauuc

SEQ ID NO: 1827363 - RNA, 19 nt, Artificial Sequence
  Description of Artificial Sequence: Synthetic oligonucleotide
  Sense strand starting at position 3663 of SEQ ID NO: 1563727
aggaaucacgccuguaaac

SEQ ID NO: 1827364 - RNA, 19 nt, Artificial Sequence
  Description of Artificial Sequence: Synthetic oligonucleotide
  Antisense strand to SEQ ID NO: 1827363
guuuacaggcgugauuccu

SEQ ID NO: 1827365 - RNA, 19 nt, Artificial Sequence
  Description of Artificial Sequence: Synthetic oligonucleotide
  Sense strand starting at position 3814 of SEQ ID NO: 1563727
guggaaugggauuguugaa

SEQ ID NO: 1827366 - RNA, 19 nt, Artificial Sequence
  Description of Artificial Sequence: Synthetic oligonucleotide
  Antisense strand to SEQ ID NO: 1827365
uucaacaaucccauuccac

SEQ ID NO: 1827367 - RNA, 19 nt, Artificial Sequence
  Description of Artificial Sequence: Synthetic oligonucleotide
  Sense strand starting at position 783 of SEQ ID NO: 1563728
gagugauagcauuagguga

SEQ ID NO: 1827368 - RNA, 19 nt, Artificial Sequence
  Description of Artificial Sequence: Synthetic oligonucleotide
  Antisense strand to SEQ ID NO: 1827367
ucaccuaaugcuaucacuc

SEQ ID NO: 1827369 - RNA, 19 nt, Artificial Sequence
  Description of Artificial Sequence: Synthetic oligonucleotide
  Sense strand starting at position 940 of SEQ ID NO: 1563728
uggaguuccuaacucugga

SEQ ID NO: 1827370 - RNA, 19 nt, Artificial Sequence
  Description of Artificial Sequence: Synthetic oligonucleotide
  Antisense strand to SEQ ID NO: 1827369
uccagaguuaggaacucca

SEQ ID NO: 1827371 - RNA, 19 nt, Artificial Sequence
  Description of Artificial Sequence: Synthetic oligonucleotide
  Sense strand starting at position 948 of SEQ ID NO: 1563728
cuaacucuggaauguacua

SEQ ID NO: 1827372 - RNA, 19 nt, Artificial Sequence
  Description of Artificial Sequence: Synthetic oligonucleotide
  Antisense strand to SEQ ID NO: 1827371
uaguacauuccagaguuag

SEQ ID NO: 1827373 - RNA, 19 nt, Artificial Sequence
  Description of Artificial Sequence: Synthetic oligonucleotide
  Sense strand starting at position 1145 of SEQ ID NO: 1563728
aagcuauuguaagcacuga

SEQ ID NO: 1827374 - RNA, 19 nt, Artificial Sequence
  Description of Artificial Sequence: Synthetic oligonucleotide
  Antisense strand to SEQ ID NO: 1827373
ucagugcuuacaauagcuu

SEQ ID NO: 1827375 - RNA, 19 nt, Artificial Sequence
  Description of Artificial Sequence: Synthetic oligonucleotide
  Sense strand starting at position 1331 of SEQ ID NO: 1563728
auggucugucucuggacau

SEQ ID NO: 1827376 - RNA, 19 nt, Artificial Sequence
  Description of Artificial Sequence: Synthetic oligonucleotide
  Antisense strand to SEQ ID NO: 1827375
auguccagagacagaccau

SEQ ID NO: 1827377 - RNA, 19 nt, Artificial Sequence
  Description of Artificial Sequence: Synthetic oligonucleotide
  Sense strand starting at position 1338 of SEQ ID NO: 1563728
gucucuggacauuauuaac

SEQ ID NO: 1827378 - RNA, 19 nt, Artificial Sequence
  Description of Artificial Sequence: Synthetic oligonucleotide
  Antisense strand to SEQ ID NO: 1827377
guuaauaauguccagagac

SEQ ID NO: 1827379 - RNA, 19 nt, Artificial Sequence
  Description of Artificial Sequence: Synthetic oligonucleotide
  Sense strand starting at position 1358 of SEQ ID NO: 1563728
guuugcucauuuccuuaga

SEQ ID NO: 1827380 - RNA, 19 nt, Artificial Sequence
  Description of Artificial Sequence: Synthetic oligonucleotide
  Antisense strand to SEQ ID NO: 1827379
ucuaaggaaaugagcaaac

SEQ ID NO: 1827381 - RNA, 19 nt, Artificial Sequence
  Description of Artificial Sequence: Synthetic oligonucleotide
  Sense strand starting at position 1576 of SEQ ID NO: 1563728
gaagcaggguucccuaauu

SEQ ID NO: 1827382 - RNA, 19 nt, Artificial Sequence
  Description of Artificial Sequence: Synthetic oligonucleotide
  Antisense strand to SEQ ID NO: 1827381
aauuagggaacccugcuuc

SEQ ID NO: 1827383 - RNA, 19 nt, Artificial Sequence
  Description of Artificial Sequence: Synthetic oligonucleotide
  Sense strand starting at position 1629 of SEQ ID NO: 1563728
cugccauuucugggcuuaa

SEQ ID NO: 1827384 - RNA, 19 nt, Artificial Sequence
  Description of Artificial Sequence: Synthetic oligonucleotide
  Antisense strand to SEQ ID NO: 1827383
uuaagcccagaaauggcag

SEQ ID NO: 1827385 - RNA, 19 nt, Artificial Sequence
  Description of Artificial Sequence: Synthetic oligonucleotide
  Sense strand starting at position 1630 of SEQ ID NO: 1563728
ugccauuucugggcuuaag

SEQ ID NO: 1827386 - RNA, 19 nt, Artificial Sequence
  Description of Artificial Sequence: Synthetic oligonucleotide
  Antisense strand to SEQ ID NO: 1827385
cuuaagcccagaaauggca

SEQ ID NO: 1827387 - RNA, 19 nt, Artificial Sequence
  Description of Artificial Sequence: Synthetic oligonucleotide
  Sense strand starting at position 1700 of SEQ ID NO: 1563728
gccuaauuccuacaacgag

SEQ ID NO: 1827388 - RNA, 19 nt, Artificial Sequence
  Description of Artificial Sequence: Synthetic oligonucleotide
  Antisense strand to SEQ ID NO: 1827387
cucguuguaggaauuaggc

SEQ ID NO: 1827389 - RNA, 19 nt, Artificial Sequence
  Description of Artificial Sequence: Synthetic oligonucleotide
  Sense strand starting at position 1813 of SEQ ID NO: 1563728
cugucuucuuauuugcaua

SEQ ID NO: 1827390 - RNA, 19 nt, Artificial Sequence
  Description of Artificial Sequence: Synthetic oligonucleotide
  Antisense strand to SEQ ID NO: 1827389
uaugcaaauaagaagacag

SEQ ID NO: 1827391 - RNA, 19 nt, Artificial Sequence
  Description of Artificial Sequence: Synthetic oligonucleotide
  Sense strand starting at position 1815 of SEQ ID NO: 1563728
gucuucuuauuugcauaua

SEQ ID NO: 1827392 - RNA, 19 nt, Artificial Sequence
  Description of Artificial Sequence: Synthetic oligonucleotide
  Antisense strand to SEQ ID NO: 1827391
uauaugcaaauaagaagac

SEQ ID NO: 1827393 - RNA, 19 nt, Artificial Sequence
  Description of Artificial Sequence: Synthetic oligonucleotide
  Sense strand starting at position 1846 of SEQ ID NO: 1563728
aaguuaugcgcaguacuuu

SEQ ID NO: 1827394 - RNA, 19 nt, Artificial Sequence
  Description of Artificial Sequence: Synthetic oligonucleotide
  Antisense strand to SEQ ID NO: 1827393
aaaguacugcgcauaacuu

SEQ ID NO: 1827395 - RNA, 19 nt, Artificial Sequence
  Description of Artificial Sequence: Synthetic oligonucleotide
  Sense strand starting at position 2526 of SEQ ID NO: 1563728
gggcacauuucugcuuuga

SEQ ID NO: 1827396 - RNA, 19 nt, Artificial Sequence
  Description of Artificial Sequence: Synthetic oligonucleotide
  Antisense strand to SEQ ID NO: 1827395
ucaaagcagaaaugugccc

SEQ ID NO: 1827397 - RNA, 19 nt, Artificial Sequence
  Description of Artificial Sequence: Synthetic oligonucleotide
  Sense strand starting at position 2528 of SEQ ID NO: 1563728
gcacauuucugcuuugaag

SEQ ID NO: 1827398 - RNA, 19 nt, Artificial Sequence
  Description of Artificial Sequence: Synthetic oligonucleotide
  Antisense strand to SEQ ID NO: 1827397
cuucaaagcagaaaugugc

SEQ ID NO: 1827399 - RNA, 19 nt, Artificial Sequence
  Description of Artificial Sequence: Synthetic oligonucleotide
  Sense strand starting at position 2594 of SEQ ID NO: 1563728
ggucuuuaggguuacguga

SEQ ID NO: 1827400 - RNA, 19 nt, Artificial Sequence
  Description of Artificial Sequence: Synthetic oligonucleotide
  Antisense strand to SEQ ID NO: 1827399
ucacguaacccuaaagacc

SEQ ID NO: 1827401 - RNA, 19 nt, Artificial Sequence
  Description of Artificial Sequence: Synthetic oligonucleotide
  Sense strand starting at position 2649 of SEQ ID NO: 1563728
ugagacauuugaugaauac

SEQ ID NO: 1827402 - RNA, 19 nt, Artificial Sequence
  Description of Artificial Sequence: Synthetic oligonucleotide
  Antisense strand to SEQ ID NO: 1827401
guauucaucaaaugucuca

SEQ ID NO: 1827403 - RNA, 19 nt, Artificial Sequence
  Description of Artificial Sequence: Synthetic oligonucleotide
  Sense strand starting at position 2692 of SEQ ID NO: 1563728
agugcacuucuguaaagga

SEQ ID NO: 1827404 - RNA, 19 nt, Artificial Sequence
  Description of Artificial Sequence: Synthetic oligonucleotide
  Antisense strand to SEQ ID NO: 1827403
uccuuuacagaagugcacu

SEQ ID NO: 1827405 - RNA, 19 nt, Artificial Sequence
  Description of Artificial Sequence: Synthetic oligonucleotide
  Sense strand starting at position 2758 of SEQ ID NO: 1563728
gaggcauuguaauuauucu

SEQ ID NO: 1827406 - RNA, 19 nt, Artificial Sequence
  Description of Artificial Sequence: Synthetic oligonucleotide
  Antisense strand to SEQ ID NO: 1827405
agaauaauuacaaugccuc

SEQ ID NO: 1827407 - RNA, 19 nt, Artificial Sequence
  Description of Artificial Sequence: Synthetic oligonucleotide
  Sense strand starting at position 2767 of SEQ ID NO: 1563728
uaauuauucugggugagug

SEQ ID NO: 1827408 - RNA, 19 nt, Artificial Sequence
  Description of Artificial Sequence: Synthetic oligonucleotide
  Antisense strand to SEQ ID NO: 1827407
cacucacccagaauaauua

SEQ ID NO: 1827409 - RNA, 19 nt, Artificial Sequence
  Description of Artificial Sequence: Synthetic oligonucleotide
  Sense strand starting at position 2768 of SEQ ID NO: 1563728
aauuauucugggugaguga

SEQ ID NO: 1827410 - RNA, 19 nt, Artificial Sequence
  Description of Artificial Sequence: Synthetic oligonucleotide
  Antisense strand to SEQ ID NO: 1827409
ucacucacccagaauaauu

SEQ ID NO: 1827411 - RNA, 19 nt, Artificial Sequence
  Description of Artificial Sequence: Synthetic oligonucleotide
  Sense strand starting at position 2781 of SEQ ID NO: 1563728
gagugagacccugguaaua

SEQ ID NO: 1827412 - RNA, 19 nt, Artificial Sequence
  Description of Artificial Sequence: Synthetic oligonucleotide
  Antisense strand to SEQ ID NO: 1827411
uauuaccagggucucacuc

SEQ ID NO: 1827413 - RNA, 19 nt, Artificial Sequence
  Description of Artificial Sequence: Synthetic oligonucleotide
  Sense strand starting at position 2817 of SEQ ID NO: 1563728
uguagaagaaagugguuaa

SEQ ID NO: 1827414 - RNA, 19 nt, Artificial Sequence
  Description of Artificial Sequence: Synthetic oligonucleotide
  Antisense strand to SEQ ID NO: 1827413
uuaaccacuuucuucuaca

SEQ ID NO: 1827415 - RNA, 19 nt, Artificial Sequence
  Description of Artificial Sequence: Synthetic oligonucleotide
  Sense strand starting at position 2820 of SEQ ID NO: 1563728
agaagaaagugguuaacuu

SEQ ID NO: 1827416 - RNA, 19 nt, Artificial Sequence
  Description of Artificial Sequence: Synthetic oligonucleotide
  Antisense strand to SEQ ID NO: 1827415
aaguuaaccacuuucuucu

SEQ ID NO: 1827417 - RNA, 19 nt, Artificial Sequence
  Description of Artificial Sequence: Synthetic oligonucleotide
  Sense strand starting at position 2829 of SEQ ID NO: 1563728
ugguuaacuugagcuugaa

SEQ ID NO: 1827418 - RNA, 19 nt, Artificial Sequence
  Description of Artificial Sequence: Synthetic oligonucleotide
  Antisense strand to SEQ ID NO: 1827417
uucaagcucaaguuaacca

SEQ ID NO: 1827419 - RNA, 19 nt, Artificial Sequence
  Description of Artificial Sequence: Synthetic oligonucleotide
  Sense strand starting at position 2881 of SEQ ID NO: 1563728
guugguaacaaugacguaa

SEQ ID NO: 1827420 - RNA, 19 nt, Artificial Sequence
  Description of Artificial Sequence: Synthetic oligonucleotide
  Antisense strand to SEQ ID NO: 1827419
uuacgucauuguuaccaac

SEQ ID NO: 1827421 - RNA, 19 nt, Artificial Sequence
  Description of Artificial Sequence: Synthetic oligonucleotide
  Sense strand starting at position 3146 of SEQ ID NO: 1563728
agcagcugucgggagaaua

SEQ ID NO: 1827422 - RNA, 19 nt, Artificial Sequence
  Description of Artificial Sequence: Synthetic oligonucleotide
  Antisense strand to SEQ ID NO: 1827421
uauucucccgacagcugcu

SEQ ID NO: 1827423 - RNA, 19 nt, Artificial Sequence
  Description of Artificial Sequence: Synthetic oligonucleotide
  Sense strand starting at position 3176 of SEQ ID NO: 1563728
ggugcaagaugaguguaua

SEQ ID NO: 1827424 - RNA, 19 nt, Artificial Sequence
  Description of Artificial Sequence: Synthetic oligonucleotide
  Antisense strand to SEQ ID NO: 1827423
uauacacucaucuugcacc

SEQ ID NO: 1827425 - RNA, 19 nt, Artificial Sequence
  Description of Artificial Sequence: Synthetic oligonucleotide
  Sense strand starting at position 3184 of SEQ ID NO: 1563728
augaguguauauccaugau

SEQ ID NO: 1827426 - RNA, 19 nt, Artificial Sequence
  Description of Artificial Sequence: Synthetic oligonucleotide
  Antisense strand to SEQ ID NO: 1827425
aucauggauauacacucau

SEQ ID NO: 1827427 - RNA, 19 nt, Artificial Sequence
  Description of Artificial Sequence: Synthetic oligonucleotide
  Sense strand starting at position 3187 of SEQ ID NO: 1563728
aguguauauccaugauaaa

SEQ ID NO: 1827428 - RNA, 19 nt, Artificial Sequence
  Description of Artificial Sequence: Synthetic oligonucleotide
  Antisense strand to SEQ ID NO: 1827427
uuuaucauggauauacacu

SEQ ID NO: 1827429 - RNA, 19 nt, Artificial Sequence
  Description of Artificial Sequence: Synthetic oligonucleotide
  Sense strand starting at position 3188 of SEQ ID NO: 1563728
guguauauccaugauaaau

SEQ ID NO: 1827430 - RNA, 19 nt, Artificial Sequence
  Description of Artificial Sequence: Synthetic oligonucleotide
  Antisense strand to SEQ ID NO: 1827429
auuuaucauggauauacac

SEQ ID NO: 1827431 - RNA, 19 nt, Artificial Sequence
  Description of Artificial Sequence: Synthetic oligonucleotide
  Sense strand starting at position 3258 of SEQ ID NO: 1563728
acagauguguggguucaga

SEQ ID NO: 1827432 - RNA, 19 nt, Artificial Sequence
  Description of Artificial Sequence: Synthetic oligonucleotide
  Antisense strand to SEQ ID NO: 1827431
ucugaacccacacaucugu

SEQ ID NO: 1827433 - RNA, 19 nt, Artificial Sequence
  Description of Artificial Sequence: Synthetic oligonucleotide
  Sense strand starting at position 3303 of SEQ ID NO: 1563728
cuucuugagcuuuagagca

SEQ ID NO: 1827434 - RNA, 19 nt, Artificial Sequence
  Description of Artificial Sequence: Synthetic oligonucleotide
  Antisense strand to SEQ ID NO: 1827433
ugcucuaaagcucaagaag

SEQ ID NO: 1827435 - RNA, 19 nt, Artificial Sequence
  Description of Artificial Sequence: Synthetic oligonucleotide
  Sense strand starting at position 3392 of SEQ ID NO: 1563728
ggaaguggagguuauguua

SEQ ID NO: 1827436 - RNA, 19 nt, Artificial Sequence
  Description of Artificial Sequence: Synthetic oligonucleotide
  Antisense strand to SEQ ID NO: 1827435
uaacauaaccuccacuucc

SEQ ID NO: 1827437 - RNA, 19 nt, Artificial Sequence
  Description of Artificial Sequence: Synthetic oligonucleotide
  Sense strand starting at position 3395 of SEQ ID NO: 1563728
aguggagguuauguuaaau

SEQ ID NO: 1827438 - RNA, 19 nt, Artificial Sequence
  Description of Artificial Sequence: Synthetic oligonucleotide
  Antisense strand to SEQ ID NO: 1827437
auuuaacauaaccuccacu

SEQ ID NO: 1827439 - RNA, 19 nt, Artificial Sequence
  Description of Artificial Sequence: Synthetic oligonucleotide
  Sense strand starting at position 3459 of SEQ ID NO: 1563728
uguggauauguuuaugcaa

SEQ ID NO: 1827440 - RNA, 19 nt, Artificial Sequence
  Description of Artificial Sequence: Synthetic oligonucleotide
  Antisense strand to SEQ ID NO: 1827439
uugcauaaacauauccaca

SEQ ID NO: 1827441 - RNA, 19 nt, Artificial Sequence
  Description of Artificial Sequence: Synthetic oligonucleotide
  Sense strand starting at position 3595 of SEQ ID NO: 1563728
ccauacauguugucuaaua

SEQ ID NO: 1827442 - RNA, 19 nt, Artificial Sequence
  Description of Artificial Sequence: Synthetic oligonucleotide
  Antisense strand to SEQ ID NO: 1827441
uauuagacaacauguaugg

SEQ ID NO: 1827443 - RNA, 19 nt, Artificial Sequence
  Description of Artificial Sequence: Synthetic oligonucleotide
  Sense strand starting at position 3872 of SEQ ID NO: 1563728
agucuuaaguuuccaagag

SEQ ID NO: 1827444 - RNA, 19 nt, Artificial Sequence
  Description of Artificial Sequence: Synthetic oligonucleotide
  Antisense strand to SEQ ID NO: 1827443
cucuuggaaacuuaagacu

SEQ ID NO: 1827445 - RNA, 19 nt, Artificial Sequence
  Description of Artificial Sequence: Synthetic oligonucleotide
  Sense strand starting at position 3876 of SEQ ID NO: 1563728
uuaaguuuccaagagccuu

SEQ ID NO: 1827446 - RNA, 19 nt, Artificial Sequence
  Description of Artificial Sequence: Synthetic oligonucleotide
  Antisense strand to SEQ ID NO: 1827445
aaggcucuuggaaacuuaa

SEQ ID NO: 1827447 - RNA, 19 nt, Artificial Sequence
  Description of Artificial Sequence: Synthetic oligonucleotide
  Sense strand starting at position 14 of SEQ ID NO: 1563729
augagaaauuacuuaugcu

SEQ ID NO: 1827448 - RNA, 19 nt, Artificial Sequence
  Description of Artificial Sequence: Synthetic oligonucleotide
  Antisense strand to SEQ ID NO: 1827447
agcauaaguaauuucucau

SEQ ID NO: 1827449 - RNA, 19 nt, Artificial Sequence
  Description of Artificial Sequence: Synthetic oligonucleotide
  Sense strand starting at position 35 of SEQ ID NO: 1563729
aauuguaagugacccaaga

SEQ ID NO: 1827450 - RNA, 19 nt, Artificial Sequence
  Description of Artificial Sequence: Synthetic oligonucleotide
  Antisense strand to SEQ ID NO: 1827449
ucuugggucacuuacaauu

SEQ ID NO: 1827451 - RNA, 19 nt, Artificial Sequence
  Description of Artificial Sequence: Synthetic oligonucleotide
  Sense strand starting at position 102 of SEQ ID NO: 1563729
acccuuugacacugcuaga

SEQ ID NO: 1827452 - RNA, 19 nt, Artificial Sequence
  Description of Artificial Sequence: Synthetic oligonucleotide
  Antisense strand to SEQ ID NO: 1827451
ucuagcagugucaaagggu

SEQ ID NO: 1827453 - RNA, 19 nt, Artificial Sequence
  Description of Artificial Sequence: Synthetic oligonucleotide
  Sense strand starting at position 118 of SEQ ID NO: 1563729
agaauccuuccaggaaucu

SEQ ID NO: 1827454 - RNA, 19 nt, Artificial Sequence
  Description of Artificial Sequence: Synthetic oligonucleotide
  Antisense strand to SEQ ID NO: 1827453
agauuccuggaaggauucu

SEQ ID NO: 1827455 - RNA, 19 nt, Artificial Sequence
  Description of Artificial Sequence: Synthetic oligonucleotide
  Sense strand starting at position 127 of SEQ ID NO: 1563729
ccaggaaucuagucaacag

SEQ ID NO: 1827456 - RNA, 19 nt, Artificial Sequence
  Description of Artificial Sequence: Synthetic oligonucleotide
  Antisense strand to SEQ ID NO: 1827455
cuguugacuagauuccugg

SEQ ID NO: 1827457 - RNA, 19 nt, Artificial Sequence
  Description of Artificial Sequence: Synthetic oligonucleotide
  Sense strand starting at position 543 of SEQ ID NO: 1563729
aagaacauauuagugguua

SEQ ID NO: 1827458 - RNA, 19 nt, Artificial Sequence
  Description of Artificial Sequence: Synthetic oligonucleotide
  Antisense strand to SEQ ID NO: 1827457
uaaccacuaauauguucuu

SEQ ID NO: 1827459 - RNA, 19 nt, Artificial Sequence
  Description of Artificial Sequence: Synthetic oligonucleotide
  Sense strand starting at position 562 of SEQ ID NO: 1563729
cucugagugggagguuuau

SEQ ID NO: 1827460 - RNA, 19 nt, Artificial Sequence
  Description of Artificial Sequence: Synthetic oligonucleotide
  Antisense strand to SEQ ID NO: 1827459
auaaaccucccacucagag

SEQ ID NO: 1827461 - RNA, 19 nt, Artificial Sequence
  Description of Artificial Sequence: Synthetic oligonucleotide
  Sense strand starting at position 741 of SEQ ID NO: 1563729
guggaugguuuaucugaaa

SEQ ID NO: 1827462 - RNA, 19 nt, Artificial Sequence
  Description of Artificial Sequence: Synthetic oligonucleotide
  Antisense strand to SEQ ID NO: 1827461
uuucagauaaaccauccac

SEQ ID NO: 1827463 - RNA, 19 nt, Artificial Sequence
  Description of Artificial Sequence: Synthetic oligonucleotide
  Sense strand starting at position 858 of SEQ ID NO: 1563729
gccgauuaugugccuagca

SEQ ID NO: 1827464 - RNA, 19 nt, Artificial Sequence
  Description of Artificial Sequence: Synthetic oligonucleotide
  Antisense strand to SEQ ID NO: 1827463
ugcuaggcacauaaucggc

SEQ ID NO: 1827465 - RNA, 19 nt, Artificial Sequence
  Description of Artificial Sequence: Synthetic oligonucleotide
  Sense strand starting at position 990 of SEQ ID NO: 1563729
ugccuuaucccugggauaa

SEQ ID NO: 1827466 - RNA, 19 nt, Artificial Sequence
  Description of Artificial Sequence: Synthetic oligonucleotide
  Antisense strand to SEQ ID NO: 1827465
uuaucccagggauaaggca

SEQ ID NO: 1827467 - RNA, 19 nt, Artificial Sequence
  Description of Artificial Sequence: Synthetic oligonucleotide
  Sense strand starting at position 991 of SEQ ID NO: 1563729
gccuuaucccugggauaac

SEQ ID NO: 1827468 - RNA, 19 nt, Artificial Sequence
  Description of Artificial Sequence: Synthetic oligonucleotide
  Antisense strand to SEQ ID NO: 1827467
guuaucccagggauaaggc

SEQ ID NO: 1827469 - RNA, 19 nt, Artificial Sequence
  Description of Artificial Sequence: Synthetic oligonucleotide
  Sense strand starting at position 1232 of SEQ ID NO: 1563729
uggugaauuauguguauuu

SEQ ID NO: 1827470 - RNA, 19 nt, Artificial Sequence
  Description of Artificial Sequence: Synthetic oligonucleotide
  Antisense strand to SEQ ID NO: 1827469
aaauacacauaauucacca

SEQ ID NO: 1827471 - RNA, 19 nt, Artificial Sequence
  Description of Artificial Sequence: Synthetic oligonucleotide
  Sense strand starting at position 1287 of SEQ ID NO: 1563729
cgaaauugaauauguagau

SEQ ID NO: 1827472 - RNA, 19 nt, Artificial Sequence
  Description of Artificial Sequence: Synthetic oligonucleotide
  Antisense strand to SEQ ID NO: 1827471
aucuacauauucaauuucg

SEQ ID NO: 1827473 - RNA, 19 nt, Artificial Sequence
  Description of Artificial Sequence: Synthetic oligonucleotide
  Sense strand starting at position 1383 of SEQ ID NO: 1563729
cacgcauuugccuagaugu

SEQ ID NO: 1827474 - RNA, 19 nt, Artificial Sequence
  Description of Artificial Sequence: Synthetic oligonucleotide
  Antisense strand to SEQ ID NO: 1827473
acaucuaggcaaaugcgug

SEQ ID NO: 1827475 - RNA, 19 nt, Artificial Sequence
  Description of Artificial Sequence: Synthetic oligonucleotide
  Sense strand starting at position 1385 of SEQ ID NO: 1563729
cgcauuugccuagauguga

SEQ ID NO: 1827476 - RNA, 19 nt, Artificial Sequence
  Description of Artificial Sequence: Synthetic oligonucleotide
  Antisense strand to SEQ ID NO: 1827475
ucacaucuaggcaaaugcg

SEQ ID NO: 1827477 - RNA, 19 nt, Artificial Sequence
  Description of Artificial Sequence: Synthetic oligonucleotide
  Sense strand starting at position 1458 of SEQ ID NO: 1563729
gacugagugccugaaugga

SEQ ID NO: 1827478 - RNA, 19 nt, Artificial Sequence
  Description of Artificial Sequence: Synthetic oligonucleotide
  Antisense strand to SEQ ID NO: 1827477
uccauucaggcacucaguc

SEQ ID NO: 1827479 - RNA, 19 nt, Artificial Sequence
  Description of Artificial Sequence: Synthetic oligonucleotide
  Sense strand starting at position 1990 of SEQ ID NO: 1563729
gccgcacuuccuucuggua

SEQ ID NO: 1827480 - RNA, 19 nt, Artificial Sequence
  Description of Artificial Sequence: Synthetic oligonucleotide
  Antisense strand to SEQ ID NO: 1827479
uaccagaaggaagugcggc

SEQ ID NO: 1827481 - RNA, 19 nt, Artificial Sequence
  Description of Artificial Sequence: Synthetic oligonucleotide
  Sense strand starting at position 1997 of SEQ ID NO: 1563729
uuccuucugguauggaaau

SEQ ID NO: 1827482 - RNA, 19 nt, Artificial Sequence
  Description of Artificial Sequence: Synthetic oligonucleotide
  Antisense strand to SEQ ID NO: 1827481
auuuccauaccagaaggaa

SEQ ID NO: 1827483 - RNA, 19 nt, Artificial Sequence
  Description of Artificial Sequence: Synthetic oligonucleotide
  Sense strand starting at position 2010 of SEQ ID NO: 1563729
ggaaauagggcgggucaau

SEQ ID NO: 1827484 - RNA, 19 nt, Artificial Sequence
  Description of Artificial Sequence: Synthetic oligonucleotide
  Antisense strand to SEQ ID NO: 1827483
auugacccgcccuauuucc

SEQ ID NO: 1827485 - RNA, 19 nt, Artificial Sequence
  Description of Artificial Sequence: Synthetic oligonucleotide
  Sense strand starting at position 2038 of SEQ ID NO: 1563729
ggaagagggugauugguua

SEQ ID NO: 1827486 - RNA, 19 nt, Artificial Sequence
  Description of Artificial Sequence: Synthetic oligonucleotide
  Antisense strand to SEQ ID NO: 1827485
uaaccaaucacccucuucc

SEQ ID NO: 1827487 - RNA, 19 nt, Artificial Sequence
  Description of Artificial Sequence: Synthetic oligonucleotide
  Sense strand starting at position 2074 of SEQ ID NO: 1563729
acugauuauuggucuaccu

SEQ ID NO: 1827488 - RNA, 19 nt, Artificial Sequence
  Description of Artificial Sequence: Synthetic oligonucleotide
  Antisense strand to SEQ ID NO: 1827487
agguagaccaauaaucagu

SEQ ID NO: 1827489 - RNA, 19 nt, Artificial Sequence
  Description of Artificial Sequence: Synthetic oligonucleotide
  Sense strand starting at position 2076 of SEQ ID NO: 1563729
ugauuauuggucuaccucu

SEQ ID NO: 1827490 - RNA, 19 nt, Artificial Sequence
  Description of Artificial Sequence: Synthetic oligonucleotide
  Antisense strand to SEQ ID NO: 1827489
agagguagaccaauaauca

SEQ ID NO: 1827491 - RNA, 19 nt, Artificial Sequence
  Description of Artificial Sequence: Synthetic oligonucleotide
  Sense strand starting at position 2166 of SEQ ID NO: 1563729
cccugagguuaaucuuaaa

SEQ ID NO: 1827492 - RNA, 19 nt, Artificial Sequence
  Description of Artificial Sequence: Synthetic oligonucleotide
  Antisense strand to SEQ ID NO: 1827491
uuuaagauuaaccucaggg

SEQ ID NO: 1827493 - RNA, 19 nt, Artificial Sequence
  Description of Artificial Sequence: Synthetic oligonucleotide
  Sense strand starting at position 2204 of SEQ ID NO: 1563729
aauuuaugcuguccgguca

SEQ ID NO: 1827494 - RNA, 19 nt, Artificial Sequence
  Description of Artificial Sequence: Synthetic oligonucleotide
  Antisense strand to SEQ ID NO: 1827493
ugaccggacagcauaaauu

SEQ ID NO: 1827495 - RNA, 19 nt, Artificial Sequence
  Description of Artificial Sequence: Synthetic oligonucleotide
  Sense strand starting at position 2407 of SEQ ID NO: 1563729
gccagauuccugcaucagg

SEQ ID NO: 1827496 - RNA, 19 nt, Artificial Sequence
  Description of Artificial Sequence: Synthetic oligonucleotide
  Antisense strand to SEQ ID NO: 1827495
ccugaugcaggaaucuggc

SEQ ID NO: 1827497 - RNA, 19 nt, Artificial Sequence
  Description of Artificial Sequence: Synthetic oligonucleotide
  Sense strand starting at position 2410 of SEQ ID NO: 1563729
agauuccugcaucagguau

SEQ ID NO: 1827498 - RNA, 19 nt, Artificial Sequence
  Description of Artificial Sequence: Synthetic oligonucleotide
  Antisense strand to SEQ ID NO: 1827497
auaccugaugcaggaaucu

SEQ ID NO: 1827499 - RNA, 19 nt, Artificial Sequence
  Description of Artificial Sequence: Synthetic oligonucleotide
  Sense strand starting at position 2425 of SEQ ID NO: 1563729
guaucagauauuggguacu

SEQ ID NO: 1827500 - RNA, 19 nt, Artificial Sequence
  Description of Artificial Sequence: Synthetic oligonucleotide
  Antisense strand to SEQ ID NO: 1827499
aguacccaauaucugauac

SEQ ID NO: 1827501 - RNA, 19 nt, Artificial Sequence
  Description of Artificial Sequence: Synthetic oligonucleotide
  Sense strand starting at position 2490 of SEQ ID NO: 1563729
gagagucucaacgggaaca

SEQ ID NO: 1827502 - RNA, 19 nt, Artificial Sequence
  Description of Artificial Sequence: Synthetic oligonucleotide
  Antisense strand to SEQ ID NO: 1827501
uguucccguugagacucuc

SEQ ID NO: 1827503 - RNA, 19 nt, Artificial Sequence
  Description of Artificial Sequence: Synthetic oligonucleotide
  Sense strand starting at position 2929 of SEQ ID NO: 1563729
guggauuucucggcaguau

SEQ ID NO: 1827504 - RNA, 19 nt, Artificial Sequence
  Description of Artificial Sequence: Synthetic oligonucleotide
  Antisense strand to SEQ ID NO: 1827503
auacugccgagaaauccac

SEQ ID NO: 1827505 - RNA, 19 nt, Artificial Sequence
  Description of Artificial Sequence: Synthetic oligonucleotide
  Sense strand starting at position 3033 of SEQ ID NO: 1563729
ggaggaacuuuauacauuu

SEQ ID NO: 1827506 - RNA, 19 nt, Artificial Sequence
  Description of Artificial Sequence: Synthetic oligonucleotide
  Antisense strand to SEQ ID NO: 1827505
aaauguauaaaguuccucc

SEQ ID NO: 1827507 - RNA, 19 nt, Artificial Sequence
  Description of Artificial Sequence: Synthetic oligonucleotide
  Sense strand starting at position 3064 of SEQ ID NO: 1563729
gaggguugaggcuggauua

SEQ ID NO: 1827508 - RNA, 19 nt, Artificial Sequence
  Description of Artificial Sequence: Synthetic oligonucleotide
  Antisense strand to SEQ ID NO: 1827507
uaauccagccucaacccuc

SEQ ID NO: 1827509 - RNA, 19 nt, Artificial Sequence
  Description of Artificial Sequence: Synthetic oligonucleotide
  Sense strand starting at position 3309 of SEQ ID NO: 1563729
cugaaugaauauguguauu

SEQ ID NO: 1827510 - RNA, 19 nt, Artificial Sequence
  Description of Artificial Sequence: Synthetic oligonucleotide
  Antisense strand to SEQ ID NO: 1827509
aauacacauauucauucag

SEQ ID NO: 1827511 - RNA, 19 nt, Artificial Sequence
  Description of Artificial Sequence: Synthetic oligonucleotide
  Sense strand starting at position 3432 of SEQ ID NO: 1563729
aguacauuucuguguccau

SEQ ID NO: 1827512 - RNA, 19 nt, Artificial Sequence
  Description of Artificial Sequence: Synthetic oligonucleotide
  Antisense strand to SEQ ID NO: 1827511
auggacacagaaauguacu

SEQ ID NO: 1827513 - RNA, 19 nt, Artificial Sequence
  Description of Artificial Sequence: Synthetic oligonucleotide
  Sense strand starting at position 3433 of SEQ ID NO: 1563729
guacauuucuguguccaua

SEQ ID NO: 1827514 - RNA, 19 nt, Artificial Sequence
  Description of Artificial Sequence: Synthetic oligonucleotide
  Antisense strand to SEQ ID NO: 1827513
uauggacacagaaauguac

SEQ ID NO: 1827515 - RNA, 19 nt, Artificial Sequence
  Description of Artificial Sequence: Synthetic oligonucleotide
  Sense strand starting at position 3484 of SEQ ID NO: 1563729
ucaggauguuggucagaca

SEQ ID NO: 1827516 - RNA, 19 nt, Artificial Sequence
  Description of Artificial Sequence: Synthetic oligonucleotide
  Antisense strand to SEQ ID NO: 1827515
ugucugaccaacauccuga

SEQ ID NO: 1827517 - RNA, 19 nt, Artificial Sequence
  Description of Artificial Sequence: Synthetic oligonucleotide
  Sense strand starting at position 3485 of SEQ ID NO: 1563729
caggauguuggucagacau

SEQ ID NO: 1827518 - RNA, 19 nt, Artificial Sequence
  Description of Artificial Sequence: Synthetic oligonucleotide
  Antisense strand to SEQ ID NO: 1827517
augucugaccaacauccug

SEQ ID NO: 1827519 - RNA, 19 nt, Artificial Sequence
  Description of Artificial Sequence: Synthetic oligonucleotide
  Sense strand starting at position 3507 of SEQ ID NO: 1563729
agaagaaauuggccuugua

SEQ ID NO: 1827520 - RNA, 19 nt, Artificial Sequence
  Description of Artificial Sequence: Synthetic oligonucleotide
  Antisense strand to SEQ ID NO: 1827519
uacaaggccaauuucuucu

SEQ ID NO: 1827521 - RNA, 19 nt, Artificial Sequence
  Description of Artificial Sequence: Synthetic oligonucleotide
  Sense strand starting at position 3793 of SEQ ID NO: 1563729
auggaucauguuuauguca

SEQ ID NO: 1827522 - RNA, 19 nt, Artificial Sequence
  Description of Artificial Sequence: Synthetic oligonucleotide
  Antisense strand to SEQ ID NO: 1827521
ugacauaaacaugauccau

SEQ ID NO: 1827523 - RNA, 19 nt, Artificial Sequence
  Description of Artificial Sequence: Synthetic oligonucleotide
  Sense strand starting at position 3877 of SEQ ID NO: 1563729
cccugugacauuggguaaa

SEQ ID NO: 1827524 - RNA, 19 nt, Artificial Sequence
  Description of Artificial Sequence: Synthetic oligonucleotide
  Antisense strand to SEQ ID NO: 1827523
uuuacccaaugucacaggg

SEQ ID NO: 1827525 - RNA, 19 nt, Artificial Sequence
  Description of Artificial Sequence: Synthetic oligonucleotide
  Sense strand starting at position 3879 of SEQ ID NO: 1563729
cugugacauuggguaaauu

SEQ ID NO: 1827526 - RNA, 19 nt, Artificial Sequence
  Description of Artificial Sequence: Synthetic oligonucleotide
  Antisense strand to SEQ ID NO: 1827525
aauuuacccaaugucacag

SEQ ID NO: 1827527 - RNA, 19 nt, Artificial Sequence
  Description of Artificial Sequence: Synthetic oligonucleotide
  Sense strand starting at position 172 of SEQ ID NO: 1563730
ggcagaauuaaguaaguug

SEQ ID NO: 1827528 - RNA, 19 nt, Artificial Sequence
  Description of Artificial Sequence: Synthetic oligonucleotide
  Antisense strand to SEQ ID NO: 1827527
caacuuacuuaauucugcc

SEQ ID NO: 1827529 - RNA, 19 nt, Artificial Sequence
  Description of Artificial Sequence: Synthetic oligonucleotide
  Sense strand starting at position 183 of SEQ ID NO: 1563730
guaaguugauguuuagaga

SEQ ID NO: 1827530 - RNA, 19 nt, Artificial Sequence
  Description of Artificial Sequence: Synthetic oligonucleotide
  Antisense strand to SEQ ID NO: 1827529
ucucuaaacaucaacuuac

SEQ ID NO: 1827531 - RNA, 19 nt, Artificial Sequence
  Description of Artificial Sequence: Synthetic oligonucleotide
  Sense strand starting at position 290 of SEQ ID NO: 1563730
acugguauuacucgagaga

SEQ ID NO: 1827532 - RNA, 19 nt, Artificial Sequence
  Description of Artificial Sequence: Synthetic oligonucleotide
  Antisense strand to SEQ ID NO: 1827531
ucucucgaguaauaccagu

SEQ ID NO: 1827533 - RNA, 19 nt, Artificial Sequence
  Description of Artificial Sequence: Synthetic oligonucleotide
  Sense strand starting at position 291 of SEQ ID NO: 1563730
cugguauuacucgagagag

SEQ ID NO: 1827534 - RNA, 19 nt, Artificial Sequence
  Description of Artificial Sequence: Synthetic oligonucleotide
  Antisense strand to SEQ ID NO: 1827533
cucucucgaguaauaccag

SEQ ID NO: 1827535 - RNA, 19 nt, Artificial Sequence
  Description of Artificial Sequence: Synthetic oligonucleotide
  Sense strand starting at position 311 of SEQ ID NO: 1563730
gagagcuagguucgagaca

SEQ ID NO: 1827536 - RNA, 19 nt, Artificial Sequence
  Description of Artificial Sequence: Synthetic oligonucleotide
  Antisense strand to SEQ ID NO: 1827535
ugucucgaaccuagcucuc

SEQ ID NO: 1827537 - RNA, 19 nt, Artificial Sequence
  Description of Artificial Sequence: Synthetic oligonucleotide
  Sense strand starting at position 453 of SEQ ID NO: 1563730
uaauuaggacuauguaagu

SEQ ID NO: 1827538 - RNA, 19 nt, Artificial Sequence
  Description of Artificial Sequence: Synthetic oligonucleotide
  Antisense strand to SEQ ID NO: 1827537
acuuacauaguccuaauua

SEQ ID NO: 1827539 - RNA, 19 nt, Artificial Sequence
  Description of Artificial Sequence: Synthetic oligonucleotide
  Sense strand starting at position 474 of SEQ ID NO: 1563730
acaugaugauggcuauuau

SEQ ID NO: 1827540 - RNA, 19 nt, Artificial Sequence
  Description of Artificial Sequence: Synthetic oligonucleotide
  Antisense strand to SEQ ID NO: 1827539
auaauagccaucaucaugu

SEQ ID NO: 1827541 - RNA, 19 nt, Artificial Sequence
  Description of Artificial Sequence: Synthetic oligonucleotide
  Sense strand starting at position 475 of SEQ ID NO: 1563730
caugaugauggcuauuauu

SEQ ID NO: 1827542 - RNA, 19 nt, Artificial Sequence
  Description of Artificial Sequence: Synthetic oligonucleotide
  Antisense strand to SEQ ID NO: 1827541
aauaauagccaucaucaug

SEQ ID NO: 1827543 - RNA, 19 nt, Artificial Sequence
  Description of Artificial Sequence: Synthetic oligonucleotide
  Sense strand starting at position 676 of SEQ ID NO: 1563730
caguuagacuccguuaaua

SEQ ID NO: 1827544 - RNA, 19 nt, Artificial Sequence
  Description of Artificial Sequence: Synthetic oligonucleotide
  Antisense strand to SEQ ID NO: 1827543
uauuaacggagucuaacug

SEQ ID NO: 1827545 - RNA, 19 nt, Artificial Sequence
  Description of Artificial Sequence: Synthetic oligonucleotide
  Sense strand starting at position 678 of SEQ ID NO: 1563730
guuagacuccguuaauagc

SEQ ID NO: 1827546 - RNA, 19 nt, Artificial Sequence
  Description of Artificial Sequence: Synthetic oligonucleotide
  Antisense strand to SEQ ID NO: 1827545
gcuauuaacggagucuaac

SEQ ID NO: 1827547 - RNA, 19 nt, Artificial Sequence
  Description of Artificial Sequence: Synthetic oligonucleotide
  Sense strand starting at position 757 of SEQ ID NO: 1563730
ggguucaagugguuaauua

SEQ ID NO: 1827548 - RNA, 19 nt, Artificial Sequence
  Description of Artificial Sequence: Synthetic oligonucleotide
  Antisense strand to SEQ ID NO: 1827547
uaauuaaccacuugaaccc

SEQ ID NO: 1827549 - RNA, 19 nt, Artificial Sequence
  Description of Artificial Sequence: Synthetic oligonucleotide
  Sense strand starting at position 832 of SEQ ID NO: 1563730
ugcuaagugcuagaguuac

SEQ ID NO: 1827550 - RNA, 19 nt, Artificial Sequence
  Description of Artificial Sequence: Synthetic oligonucleotide
  Antisense strand to SEQ ID NO: 1827549
guaacucuagcacuuagca

SEQ ID NO: 1827551 - RNA, 19 nt, Artificial Sequence
  Description of Artificial Sequence: Synthetic oligonucleotide
  Sense strand starting at position 854 of SEQ ID NO: 1563730
ggugauuccugcccuuaaa

SEQ ID NO: 1827552 - RNA, 19 nt, Artificial Sequence
  Description of Artificial Sequence: Synthetic oligonucleotide
  Antisense strand to SEQ ID NO: 1827551
uuuaagggcaggaaucacc

SEQ ID NO: 1827553 - RNA, 19 nt, Artificial Sequence
  Description of Artificial Sequence: Synthetic oligonucleotide
  Sense strand starting at position 980 of SEQ ID NO: 1563730
uuuagcaagcaugaucaga

SEQ ID NO: 1827554 - RNA, 19 nt, Artificial Sequence
  Description of Artificial Sequence: Synthetic oligonucleotide
  Antisense strand to SEQ ID NO: 1827553
ucugaucaugcuugcuaaa

SEQ ID NO: 1827555 - RNA, 19 nt, Artificial Sequence
  Description of Artificial Sequence: Synthetic oligonucleotide
  Sense strand starting at position 988 of SEQ ID NO: 1563730
gcaugaucagaacgguuga

SEQ ID NO: 1827556 - RNA, 19 nt, Artificial Sequence
  Description of Artificial Sequence: Synthetic oligonucleotide
  Antisense strand to SEQ ID NO: 1827555
ucaaccguucugaucaugc

SEQ ID NO: 1827557 - RNA, 19 nt, Artificial Sequence
  Description of Artificial Sequence: Synthetic oligonucleotide
  Sense strand starting at position 1080 of SEQ ID NO: 1563730
gcugauuacgguuaagaau

SEQ ID NO: 1827558 - RNA, 19 nt, Artificial Sequence
  Description of Artificial Sequence: Synthetic oligonucleotide
  Antisense strand to SEQ ID NO: 1827557
auucuuaaccguaaucagc

SEQ ID NO: 1827559 - RNA, 19 nt, Artificial Sequence
  Description of Artificial Sequence: Synthetic oligonucleotide
  Sense strand starting at position 1086 of SEQ ID NO: 1563730
uacgguuaagaauguucuu

SEQ ID NO: 1827560 - RNA, 19 nt, Artificial Sequence
  Description of Artificial Sequence: Synthetic oligonucleotide
  Antisense strand to SEQ ID NO: 1827559
aagaacauucuuaaccgua

SEQ ID NO: 1827561 - RNA, 19 nt, Artificial Sequence
  Description of Artificial Sequence: Synthetic oligonucleotide
  Sense strand starting at position 1089 of SEQ ID NO: 1563730
gguuaagaauguucuugaa

SEQ ID NO: 1827562 - RNA, 19 nt, Artificial Sequence
  Description of Artificial Sequence: Synthetic oligonucleotide
  Antisense strand to SEQ ID NO: 1827561
uucaagaacauucuuaacc

SEQ ID NO: 1827563 - RNA, 19 nt, Artificial Sequence
  Description of Artificial Sequence: Synthetic oligonucleotide
  Sense strand starting at position 1091 of SEQ ID NO: 1563730
uuaagaauguucuugaagg

SEQ ID NO: 1827564 - RNA, 19 nt, Artificial Sequence
  Description of Artificial Sequence: Synthetic oligonucleotide
  Antisense strand to SEQ ID NO: 1827563
ccuucaagaacauucuuaa

SEQ ID NO: 1827565 - RNA, 19 nt, Artificial Sequence
  Description of Artificial Sequence: Synthetic oligonucleotide
  Sense strand starting at position 1163 of SEQ ID NO: 1563730
uggauucuagcacauguga

SEQ ID NO: 1827566 - RNA, 19 nt, Artificial Sequence
  Description of Artificial Sequence: Synthetic oligonucleotide
  Antisense strand to SEQ ID NO: 1827565
ucacaugugcuagaaucca

SEQ ID NO: 1827567 - RNA, 19 nt, Artificial Sequence
  Description of Artificial Sequence: Synthetic oligonucleotide
  Sense strand starting at position 1215 of SEQ ID NO: 1563730
uaguuccuucgugugucaa

SEQ ID NO: 1827568 - RNA, 19 nt, Artificial Sequence
  Description of Artificial Sequence: Synthetic oligonucleotide
  Antisense strand to SEQ ID NO: 1827567
uugacacacgaaggaacua

SEQ ID NO: 1827569 - RNA, 19 nt, Artificial Sequence
  Description of Artificial Sequence: Synthetic oligonucleotide
  Sense strand starting at position 1239 of SEQ ID NO: 1563730
caugguuaccgcuaccaga

SEQ ID NO: 1827570 - RNA, 19 nt, Artificial Sequence
  Description of Artificial Sequence: Synthetic oligonucleotide
  Antisense strand to SEQ ID NO: 1827569
ucugguagcgguaaccaug

SEQ ID NO: 1827571 - RNA, 19 nt, Artificial Sequence
  Description of Artificial Sequence: Synthetic oligonucleotide
  Sense strand starting at position 2088 of SEQ ID NO: 1563730
uagguagccgugggaauuu

SEQ ID NO: 1827572 - RNA, 19 nt, Artificial Sequence
  Description of Artificial Sequence: Synthetic oligonucleotide
  Antisense strand to SEQ ID NO: 1827571
aaauucccacggcuaccua

SEQ ID NO: 1827573 - RNA, 19 nt, Artificial Sequence
  Description of Artificial Sequence: Synthetic oligonucleotide
  Sense strand starting at position 2210 of SEQ ID NO: 1563730
gcuucauggcggccguaaa

SEQ ID NO: 1827574 - RNA, 19 nt, Artificial Sequence
  Description of Artificial Sequence: Synthetic oligonucleotide
  Antisense strand to SEQ ID NO: 1827573
uuuacggccgccaugaagc

SEQ ID NO: 1827575 - RNA, 19 nt, Artificial Sequence
  Description of Artificial Sequence: Synthetic oligonucleotide
  Sense strand starting at position 2248 of SEQ ID NO: 1563730
guuccagucaucgcgugaa

SEQ ID NO: 1827576 - RNA, 19 nt, Artificial Sequence
  Description of Artificial Sequence: Synthetic oligonucleotide
  Antisense strand to SEQ ID NO: 1827575
uucacgcgaugacuggaac

SEQ ID NO: 1827577 - RNA, 19 nt, Artificial Sequence
  Description of Artificial Sequence: Synthetic oligonucleotide
  Sense strand starting at position 2250 of SEQ ID NO: 1563730
uccagucaucgcgugaauc

SEQ ID NO: 1827578 - RNA, 19 nt, Artificial Sequence
  Description of Artificial Sequence: Synthetic oligonucleotide
  Antisense strand to SEQ ID NO: 1827577
gauucacgcgaugacugga

SEQ ID NO: 1827579 - RNA, 19 nt, Artificial Sequence
  Description of Artificial Sequence: Synthetic oligonucleotide
  Sense strand starting at position 2260 of SEQ ID NO: 1563730
gcgugaauccuuggaccag

SEQ ID NO: 1827580 - RNA, 19 nt, Artificial Sequence
  Description of Artificial Sequence: Synthetic oligonucleotide
  Antisense strand to SEQ ID NO: 1827579
cugguccaaggauucacgc

SEQ ID NO: 1827581 - RNA, 19 nt, Artificial Sequence
  Description of Artificial Sequence: Synthetic oligonucleotide
  Sense strand starting at position 2384 of SEQ ID NO: 1563730
guccuagagucacccagau

SEQ ID NO: 1827582 - RNA, 19 nt, Artificial Sequence
  Description of Artificial Sequence: Synthetic oligonucleotide
  Antisense strand to SEQ ID NO: 1827581
aucugggugacucuaggac

SEQ ID NO: 1827583 - RNA, 19 nt, Artificial Sequence
  Description of Artificial Sequence: Synthetic oligonucleotide
  Sense strand starting at position 2857 of SEQ ID NO: 1563730
uugaguauuagaggaguau

SEQ ID NO: 1827584 - RNA, 19 nt, Artificial Sequence
  Description of Artificial Sequence: Synthetic oligonucleotide
  Antisense strand to SEQ ID NO: 1827583
auacuccucuaauacucaa

SEQ ID NO: 1827585 - RNA, 19 nt, Artificial Sequence
  Description of Artificial Sequence: Synthetic oligonucleotide
  Sense strand starting at position 2861 of SEQ ID NO: 1563730
guauuagaggaguauaggu

SEQ ID NO: 1827586 - RNA, 19 nt, Artificial Sequence
  Description of Artificial Sequence: Synthetic oligonucleotide
  Antisense strand to SEQ ID NO: 1827585
accuauacuccucuaauac

SEQ ID NO: 1827587 - RNA, 19 nt, Artificial Sequence
  Description of Artificial Sequence: Synthetic oligonucleotide
  Sense strand starting at position 3481 of SEQ ID NO: 1563730
aacuacugccaugaagagu

SEQ ID NO: 1827588 - RNA, 19 nt, Artificial Sequence
  Description of Artificial Sequence: Synthetic oligonucleotide
  Antisense strand to SEQ ID NO: 1827587
acucuucauggcaguaguu

SEQ ID NO: 1827589 - RNA, 19 nt, Artificial Sequence
  Description of Artificial Sequence: Synthetic oligonucleotide
  Sense strand starting at position 3526 of SEQ ID NO: 1563730
uguaaaguaccucauauag

SEQ ID NO: 1827590 - RNA, 19 nt, Artificial Sequence
  Description of Artificial Sequence: Synthetic oligonucleotide
  Antisense strand to SEQ ID NO: 1827589
cuauaugagguacuuuaca

SEQ ID NO: 1827591 - RNA, 19 nt, Artificial Sequence
  Description of Artificial Sequence: Synthetic oligonucleotide
  Sense strand starting at position 3766 of SEQ ID NO: 1563730
gcgugcuugguuucuuaua

SEQ ID NO: 1827592 - RNA, 19 nt, Artificial Sequence
  Description of Artificial Sequence: Synthetic oligonucleotide
  Antisense strand to SEQ ID NO: 1827591
uauaagaaaccaagcacgc

SEQ ID NO: 1827593 - RNA, 19 nt, Artificial Sequence
  Description of Artificial Sequence: Synthetic oligonucleotide
  Sense strand starting at position 3774 of SEQ ID NO: 1563730
gguuucuuauacgucaaau

SEQ ID NO: 1827594 - RNA, 19 nt, Artificial Sequence
  Description of Artificial Sequence: Synthetic oligonucleotide
  Antisense strand to SEQ ID NO: 1827593
auuugacguauaagaaacc

SEQ ID NO: 1827595 - RNA, 19 nt, Artificial Sequence
  Description of Artificial Sequence: Synthetic oligonucleotide
  Sense strand starting at position 3776 of SEQ ID NO: 1563730
uuucuuauacgucaaauga

SEQ ID NO: 1827596 - RNA, 19 nt, Artificial Sequence
  Description of Artificial Sequence: Synthetic oligonucleotide
  Antisense strand to SEQ ID NO: 1827595
ucauuugacguauaagaaa

SEQ ID NO: 1827597 - RNA, 19 nt, Artificial Sequence
  Description of Artificial Sequence: Synthetic oligonucleotide
  Sense strand starting at position 3780 of SEQ ID NO: 1563730
uuauacgucaaaugagguu

SEQ ID NO: 1827598 - RNA, 19 nt, Artificial Sequence
  Description of Artificial Sequence: Synthetic oligonucleotide
  Antisense strand to SEQ ID NO: 1827597
aaccucauuugacguauaa

SEQ ID NO: 1827599 - RNA, 19 nt, Artificial Sequence
  Description of Artificial Sequence: Synthetic oligonucleotide
  Sense strand starting at position 3794 of SEQ ID NO: 1563730
agguuaauaucucugucac

SEQ ID NO: 1827600 - RNA, 19 nt, Artificial Sequence
  Description of Artificial Sequence: Synthetic oligonucleotide
  Antisense strand to SEQ ID NO: 1827599
gugacagagauauuaaccu

SEQ ID NO: 1827601 - RNA, 19 nt, Artificial Sequence
  Description of Artificial Sequence: Synthetic oligonucleotide
  Sense strand starting at position 3795 of SEQ ID NO: 1563730
gguuaauaucucugucaca

SEQ ID NO: 1827602 - RNA, 19 nt, Artificial Sequence
  Description of Artificial Sequence: Synthetic oligonucleotide
  Antisense strand to SEQ ID NO: 1827601
ugugacagagauauuaacc

SEQ ID NO: 1827603 - RNA, 19 nt, Artificial Sequence
  Description of Artificial Sequence: Synthetic oligonucleotide
  Sense strand starting at position 3796 of SEQ ID NO: 1563730
guuaauaucucugucacag

SEQ ID NO: 1827604 - RNA, 19 nt, Artificial Sequence
  Description of Artificial Sequence: Synthetic oligonucleotide
  Antisense strand to SEQ ID NO: 1827603
cugugacagagauauuaac

SEQ ID NO: 1827605 - RNA, 19 nt, Artificial Sequence
  Description of Artificial Sequence: Synthetic oligonucleotide
  Sense strand starting at position 3895 of SEQ ID NO: 1563730
uuacguguuccauaauaau

SEQ ID NO: 1827606 - RNA, 19 nt, Artificial Sequence
  Description of Artificial Sequence: Synthetic oligonucleotide
  Antisense strand to SEQ ID NO: 1827605
auuauuauggaacacguaa

SEQ ID NO: 1827607 - RNA, 19 nt, Artificial Sequence
  Description of Artificial Sequence: Synthetic oligonucleotide
  Sense strand starting at position 6 of SEQ ID NO: 1563731
ugguguuuccgugacugag

SEQ ID NO: 1827608 - RNA, 19 nt, Artificial Sequence
  Description of Artificial Sequence: Synthetic oligonucleotide
  Antisense strand to SEQ ID NO: 1827607
cucagucacggaaacacca

SEQ ID NO: 1827609 - RNA, 19 nt, Artificial Sequence
  Description of Artificial Sequence: Synthetic oligonucleotide
  Sense strand starting at position 221 of SEQ ID NO: 1563731
uguucuaucuaugccauga

SEQ ID NO: 1827610 - RNA, 19 nt, Artificial Sequence
  Description of Artificial Sequence: Synthetic oligonucleotide
  Antisense strand to SEQ ID NO: 1827609
ucauggcauagauagaaca

SEQ ID NO: 1827611 - RNA, 19 nt, Artificial Sequence
  Description of Artificial Sequence: Synthetic oligonucleotide
  Sense strand starting at position 248 of SEQ ID NO: 1563731
gccuaagaauaguccagaa

SEQ ID NO: 1827612 - RNA, 19 nt, Artificial Sequence
  Description of Artificial Sequence: Synthetic oligonucleotide
  Antisense strand to SEQ ID NO: 1827611
uucuggacuauucuuaggc

SEQ ID NO: 1827613 - RNA, 19 nt, Artificial Sequence
  Description of Artificial Sequence: Synthetic oligonucleotide
  Sense strand starting at position 260 of SEQ ID NO: 1563731
uccagaaguccugggaaau

SEQ ID NO: 1827614 - RNA, 19 nt, Artificial Sequence
  Description of Artificial Sequence: Synthetic oligonucleotide
  Antisense strand to SEQ ID NO: 1827613
auuucccaggacuucugga

SEQ ID NO: 1827615 - RNA, 19 nt, Artificial Sequence
  Description of Artificial Sequence: Synthetic oligonucleotide
  Sense strand starting at position 261 of SEQ ID NO: 1563731
ccagaaguccugggaaauc

SEQ ID NO: 1827616 - RNA, 19 nt, Artificial Sequence
  Description of Artificial Sequence: Synthetic oligonucleotide
  Antisense strand to SEQ ID NO: 1827615
gauuucccaggacuucugg

SEQ ID NO: 1827617 - RNA, 19 nt, Artificial Sequence
  Description of Artificial Sequence: Synthetic oligonucleotide
  Sense strand starting at position 273 of SEQ ID NO: 1563731
ggaaaucugucccugggca

SEQ ID NO: 1827618 - RNA, 19 nt, Artificial Sequence
  Description of Artificial Sequence: Synthetic oligonucleotide
  Antisense strand to SEQ ID NO: 1827617
ugcccagggacagauuucc

SEQ ID NO: 1827619 - RNA, 19 nt, Artificial Sequence
  Description of Artificial Sequence: Synthetic oligonucleotide
  Sense strand starting at position 398 of SEQ ID NO: 1563731
uguagaaaccuuuaggcca

SEQ ID NO: 1827620 - RNA, 19 nt, Artificial Sequence
  Description of Artificial Sequence: Synthetic oligonucleotide
  Antisense strand to SEQ ID NO: 1827619
uggccuaaagguuucuaca

SEQ ID NO: 1827621 - RNA, 19 nt, Artificial Sequence
  Description of Artificial Sequence: Synthetic oligonucleotide
  Sense strand starting at position 713 of SEQ ID NO: 1563731
caaugaacuugugcgaaga

SEQ ID NO: 1827622 - RNA, 19 nt, Artificial Sequence
  Description of Artificial Sequence: Synthetic oligonucleotide
  Antisense strand to SEQ ID NO: 1827621
ucuucgcacaaguucauug

SEQ ID NO: 1827623 - RNA, 19 nt, Artificial Sequence
  Description of Artificial Sequence: Synthetic oligonucleotide
  Sense strand starting at position 714 of SEQ ID NO: 1563731
aaugaacuugugcgaagaa

SEQ ID NO: 1827624 - RNA, 19 nt, Artificial Sequence
  Description of Artificial Sequence: Synthetic oligonucleotide
  Antisense strand to SEQ ID NO: 1827623
uucuucgcacaaguucauu

SEQ ID NO: 1827625 - RNA, 19 nt, Artificial Sequence
  Description of Artificial Sequence: Synthetic oligonucleotide
  Sense strand starting at position 963 of SEQ ID NO: 1563731
cauggugucgcauaaagau

SEQ ID NO: 1827626 - RNA, 19 nt, Artificial Sequence
  Description of Artificial Sequence: Synthetic oligonucleotide
  Antisense strand to SEQ ID NO: 1827625
aucuuuaugcgacaccaug

SEQ ID NO: 1827627 - RNA, 19 nt, Artificial Sequence
  Description of Artificial Sequence: Synthetic oligonucleotide
  Sense strand starting at position 972 of SEQ ID NO: 1563731
gcauaaagauucccugcca

SEQ ID NO: 1827628 - RNA, 19 nt, Artificial Sequence
  Description of Artificial Sequence: Synthetic oligonucleotide
  Antisense strand to SEQ ID NO: 1827627
uggcagggaaucuuuaugc

SEQ ID NO: 1827629 - RNA, 19 nt, Artificial Sequence
  Description of Artificial Sequence: Synthetic oligonucleotide
  Sense strand starting at position 1090 of SEQ ID NO: 1563731
gaguuucuacuguaagagg

SEQ ID NO: 1827630 - RNA, 19 nt, Artificial Sequence
  Description of Artificial Sequence: Synthetic oligonucleotide
  Antisense strand to SEQ ID NO: 1827629
ccucuuacaguagaaacuc

SEQ ID NO: 1827631 - RNA, 19 nt, Artificial Sequence
  Description of Artificial Sequence: Synthetic oligonucleotide
  Sense strand starting at position 1095 of SEQ ID NO: 1563731
ucuacuguaagagggauua

SEQ ID NO: 1827632 - RNA, 19 nt, Artificial Sequence
  Description of Artificial Sequence: Synthetic oligonucleotide
  Antisense strand to SEQ ID NO: 1827631
uaaucccucuuacaguaga

SEQ ID NO: 1827633 - RNA, 19 nt, Artificial Sequence
  Description of Artificial Sequence: Synthetic oligonucleotide
  Sense strand starting at position 1610 of SEQ ID NO: 1563731
ugaagaggcuucuuguaau

SEQ ID NO: 1827634 - RNA, 19 nt, Artificial Sequence
  Description of Artificial Sequence: Synthetic oligonucleotide
  Antisense strand to SEQ ID NO: 1827633
auuacaagaagccucuuca

SEQ ID NO: 1827635 - RNA, 19 nt, Artificial Sequence
  Description of Artificial Sequence: Synthetic oligonucleotide
  Sense strand starting at position 1657 of SEQ ID NO: 1563731
guuccucucaggcagugaa

SEQ ID NO: 1827636 - RNA, 19 nt, Artificial Sequence
  Description of Artificial Sequence: Synthetic oligonucleotide
  Antisense strand to SEQ ID NO: 1827635
uucacugccugagaggaac

SEQ ID NO: 1827637 - RNA, 19 nt, Artificial Sequence
  Description of Artificial Sequence: Synthetic oligonucleotide
  Sense strand starting at position 1682 of SEQ ID NO: 1563731
aggcucaaaugcucuagau

SEQ ID NO: 1827638 - RNA, 19 nt, Artificial Sequence
  Description of Artificial Sequence: Synthetic oligonucleotide
  Antisense strand to SEQ ID NO: 1827637
aucuagagcauuugagccu

SEQ ID NO: 1827639 - RNA, 19 nt, Artificial Sequence
  Description of Artificial Sequence: Synthetic oligonucleotide
  Sense strand starting at position 1859 of SEQ ID NO: 1563731
cgaggagaacucugucauc

SEQ ID NO: 1827640 - RNA, 19 nt, Artificial Sequence
  Description of Artificial Sequence: Synthetic oligonucleotide
  Antisense strand to SEQ ID NO: 1827639
gaugacagaguucuccucg

SEQ ID NO: 1827641 - RNA, 19 nt, Artificial Sequence
  Description of Artificial Sequence: Synthetic oligonucleotide
  Sense strand starting at position 1938 of SEQ ID NO: 1563731
guccuuccaugguuuccaa

SEQ ID NO: 1827642 - RNA, 19 nt, Artificial Sequence
  Description of Artificial Sequence: Synthetic oligonucleotide
  Antisense strand to SEQ ID NO: 1827641
uuggaaaccauggaaggac

SEQ ID NO: 1827643 - RNA, 19 nt, Artificial Sequence
  Description of Artificial Sequence: Synthetic oligonucleotide
  Sense strand starting at position 1941 of SEQ ID NO: 1563731
cuuccaugguuuccaauga

SEQ ID NO: 1827644 - RNA, 19 nt, Artificial Sequence
  Description of Artificial Sequence: Synthetic oligonucleotide
  Antisense strand to SEQ ID NO: 1827643
ucauuggaaaccauggaag

SEQ ID NO: 1827645 - RNA, 19 nt, Artificial Sequence
  Description of Artificial Sequence: Synthetic oligonucleotide
  Sense strand starting at position 2028 of SEQ ID NO: 1563731
ugcauuugguuccuguaau

SEQ ID NO: 1827646 - RNA, 19 nt, Artificial Sequence
  Description of Artificial Sequence: Synthetic oligonucleotide
  Antisense strand to SEQ ID NO: 1827645
auuacaggaaccaaaugca

SEQ ID NO: 1827647 - RNA, 19 nt, Artificial Sequence
  Description of Artificial Sequence: Synthetic oligonucleotide
  Sense strand starting at position 2034 of SEQ ID NO: 1563731
ugguuccuguaaucugaga

SEQ ID NO: 1827648 - RNA, 19 nt, Artificial Sequence
  Description of Artificial Sequence: Synthetic oligonucleotide
  Antisense strand to SEQ ID NO: 1827647
ucucagauuacaggaacca

SEQ ID NO: 1827649 - RNA, 19 nt, Artificial Sequence
  Description of Artificial Sequence: Synthetic oligonucleotide
  Sense strand starting at position 2109 of SEQ ID NO: 1563731
augucuugacucugacacu

SEQ ID NO: 1827650 - RNA, 19 nt, Artificial Sequence
  Description of Artificial Sequence: Synthetic oligonucleotide
  Antisense strand to SEQ ID NO: 1827649
agugucagagucaagacau

SEQ ID NO: 1827651 - RNA, 19 nt, Artificial Sequence
  Description of Artificial Sequence: Synthetic oligonucleotide
  Sense strand starting at position 2189 of SEQ ID NO: 1563731
acuuccuuaucugugagau

SEQ ID NO: 1827652 - RNA, 19 nt, Artificial Sequence
  Description of Artificial Sequence: Synthetic oligonucleotide
  Antisense strand to SEQ ID NO: 1827651
aucucacagauaaggaagu

SEQ ID NO: 1827653 - RNA, 19 nt, Artificial Sequence
  Description of Artificial Sequence: Synthetic oligonucleotide
  Sense strand starting at position 2190 of SEQ ID NO: 1563731
cuuccuuaucugugagaug

SEQ ID NO: 1827654 - RNA, 19 nt, Artificial Sequence
  Description of Artificial Sequence: Synthetic oligonucleotide
  Antisense strand to SEQ ID NO: 1827653
caucucacagauaaggaag

SEQ ID NO: 1827655 - RNA, 19 nt, Artificial Sequence
  Description of Artificial Sequence: Synthetic oligonucleotide
  Sense strand starting at position 2210 of SEQ ID NO: 1563731
caagguugacuuugugauu

SEQ ID NO: 1827656 - RNA, 19 nt, Artificial Sequence
  Description of Artificial Sequence: Synthetic oligonucleotide
  Antisense strand to SEQ ID NO: 1827655
aaucacaaagucaaccuug

SEQ ID NO: 1827657 - RNA, 19 nt, Artificial Sequence
  Description of Artificial Sequence: Synthetic oligonucleotide
  Sense strand starting at position 2233 of SEQ ID NO: 1563731
aggcacuucccugaucuga

SEQ ID NO: 1827658 - RNA, 19 nt, Artificial Sequence
  Description of Artificial Sequence: Synthetic oligonucleotide
  Antisense strand to SEQ ID NO: 1827657
ucagaucagggaagugccu

SEQ ID NO: 1827659 - RNA, 19 nt, Artificial Sequence
  Description of Artificial Sequence: Synthetic oligonucleotide
  Sense strand starting at position 2235 of SEQ ID NO: 1563731
gcacuucccugaucugaca

SEQ ID NO: 1827660 - RNA, 19 nt, Artificial Sequence
  Description of Artificial Sequence: Synthetic oligonucleotide
  Antisense strand to SEQ ID NO: 1827659
ugucagaucagggaagugc

SEQ ID NO: 1827661 - RNA, 19 nt, Artificial Sequence
  Description of Artificial Sequence: Synthetic oligonucleotide
  Sense strand starting at position 2247 of SEQ ID NO: 1563731
ucugacauuccuugucaca

SEQ ID NO: 1827662 - RNA, 19 nt, Artificial Sequence
  Description of Artificial Sequence: Synthetic oligonucleotide
  Antisense strand to SEQ ID NO: 1827661
ugugacaaggaaugucaga

SEQ ID NO: 1827663 - RNA, 19 nt, Artificial Sequence
  Description of Artificial Sequence: Synthetic oligonucleotide
  Sense strand starting at position 2249 of SEQ ID NO: 1563731
ugacauuccuugucacaug

SEQ ID NO: 1827664 - RNA, 19 nt, Artificial Sequence
  Description of Artificial Sequence: Synthetic oligonucleotide
  Antisense strand to SEQ ID NO: 1827663
caugugacaaggaauguca

SEQ ID NO: 1827665 - RNA, 19 nt, Artificial Sequence
  Description of Artificial Sequence: Synthetic oligonucleotide
  Sense strand starting at position 2336 of SEQ ID NO: 1563731
ugacuuagaccugguucua

SEQ ID NO: 1827666 - RNA, 19 nt, Artificial Sequence
  Description of Artificial Sequence: Synthetic oligonucleotide
  Antisense strand to SEQ ID NO: 1827665
uagaaccaggucuaaguca

SEQ ID NO: 1827667 - RNA, 19 nt, Artificial Sequence
  Description of Artificial Sequence: Synthetic oligonucleotide
  Sense strand starting at position 2411 of SEQ ID NO: 1563731
uuguucugggcccauauua

SEQ ID NO: 1827668 - RNA, 19 nt, Artificial Sequence
  Description of Artificial Sequence: Synthetic oligonucleotide
  Antisense strand to SEQ ID NO: 1827667
uaauaugggcccagaacaa

SEQ ID NO: 1827669 - RNA, 19 nt, Artificial Sequence
  Description of Artificial Sequence: Synthetic oligonucleotide
  Sense strand starting at position 2497 of SEQ ID NO: 1563731
gcaugacauucuuuccaga

SEQ ID NO: 1827670 - RNA, 19 nt, Artificial Sequence
  Description of Artificial Sequence: Synthetic oligonucleotide
  Antisense strand to SEQ ID NO: 1827669
ucuggaaagaaugucaugc

SEQ ID NO: 1827671 - RNA, 19 nt, Artificial Sequence
  Description of Artificial Sequence: Synthetic oligonucleotide
  Sense strand starting at position 2612 of SEQ ID NO: 1563731
auaggcaauucugucacaa

SEQ ID NO: 1827672 - RNA, 19 nt, Artificial Sequence
  Description of Artificial Sequence: Synthetic oligonucleotide
  Antisense strand to SEQ ID NO: 1827671
uugugacagaauugccuau

SEQ ID NO: 1827673 - RNA, 19 nt, Artificial Sequence
  Description of Artificial Sequence: Synthetic oligonucleotide
  Sense strand starting at position 2644 of SEQ ID NO: 1563731
gcaaacuacugaguugacu

SEQ ID NO: 1827674 - RNA, 19 nt, Artificial Sequence
  Description of Artificial Sequence: Synthetic oligonucleotide
  Antisense strand to SEQ ID NO: 1827673
agucaacucaguaguuugc

SEQ ID NO: 1827675 - RNA, 19 nt, Artificial Sequence
  Description of Artificial Sequence: Synthetic oligonucleotide
  Sense strand starting at position 2893 of SEQ ID NO: 1563731
aaaugaauaugugcugaga

SEQ ID NO: 1827676 - RNA, 19 nt, Artificial Sequence
  Description of Artificial Sequence: Synthetic oligonucleotide
  Antisense strand to SEQ ID NO: 1827675
ucucagcacauauucauuu

SEQ ID NO: 1827677 - RNA, 19 nt, Artificial Sequence
  Description of Artificial Sequence: Synthetic oligonucleotide
  Sense strand starting at position 2990 of SEQ ID NO: 1563731
gaugaaggguucccaccau

SEQ ID NO: 1827678 - RNA, 19 nt, Artificial Sequence
  Description of Artificial Sequence: Synthetic oligonucleotide
  Antisense strand to SEQ ID NO: 1827677
auggugggaacccuucauc

SEQ ID NO: 1827679 - RNA, 19 nt, Artificial Sequence
  Description of Artificial Sequence: Synthetic oligonucleotide
  Sense strand starting at position 3419 of SEQ ID NO: 1563731
gccagacuguuccuggaau

SEQ ID NO: 1827680 - RNA, 19 nt, Artificial Sequence
  Description of Artificial Sequence: Synthetic oligonucleotide
  Antisense strand to SEQ ID NO: 1827679
auuccaggaacagucuggc

SEQ ID NO: 1827681 - RNA, 19 nt, Artificial Sequence
  Description of Artificial Sequence: Synthetic oligonucleotide
  Sense strand starting at position 3421 of SEQ ID NO: 1563731
cagacuguuccuggaauag

SEQ ID NO: 1827682 - RNA, 19 nt, Artificial Sequence
  Description of Artificial Sequence: Synthetic oligonucleotide
  Antisense strand to SEQ ID NO: 1827681
cuauuccaggaacagucug

SEQ ID NO: 1827683 - RNA, 19 nt, Artificial Sequence
  Description of Artificial Sequence: Synthetic oligonucleotide
  Sense strand starting at position 3431 of SEQ ID NO: 1563731
cuggaauagucaucucacu

SEQ ID NO: 1827684 - RNA, 19 nt, Artificial Sequence
  Description of Artificial Sequence: Synthetic oligonucleotide
  Antisense strand to SEQ ID NO: 1827683
agugagaugacuauuccag

SEQ ID NO: 1827685 - RNA, 19 nt, Artificial Sequence
  Description of Artificial Sequence: Synthetic oligonucleotide
  Sense strand starting at position 3951 of SEQ ID NO: 1563731
uaauuagggcucugugagu

SEQ ID NO: 1827686 - RNA, 19 nt, Artificial Sequence
  Description of Artificial Sequence: Synthetic oligonucleotide
  Antisense strand to SEQ ID NO: 1827685
acucacagagcccuaauua

SEQ ID NO: 1827687 - RNA, 19 nt, Artificial Sequence
  Description of Artificial Sequence: Synthetic oligonucleotide
  Sense strand starting at position 120 of SEQ ID NO: 1563732
cccaguccuugggugagaa

SEQ ID NO: 1827688 - RNA, 19 nt, Artificial Sequence
  Description of Artificial Sequence: Synthetic oligonucleotide
  Antisense strand to SEQ ID NO: 1827687
uucucacccaaggacuggg

SEQ ID NO: 1827689 - RNA, 19 nt, Artificial Sequence
  Description of Artificial Sequence: Synthetic oligonucleotide
  Sense strand starting at position 135 of SEQ ID NO: 1563732
agaagagauuugugagaag

SEQ ID NO: 1827690 - RNA, 19 nt, Artificial Sequence
  Description of Artificial Sequence: Synthetic oligonucleotide
  Antisense strand to SEQ ID NO: 1827689
cuucucacaaaucucuucu

SEQ ID NO: 1827691 - RNA, 19 nt, Artificial Sequence
  Description of Artificial Sequence: Synthetic oligonucleotide
  Sense strand starting at position 512 of SEQ ID NO: 1563732
gguaauauagagcaguguu

SEQ ID NO: 1827692 - RNA, 19 nt, Artificial Sequence
  Description of Artificial Sequence: Synthetic oligonucleotide
  Antisense strand to SEQ ID NO: 1827691
aacacugcucuauauuacc

SEQ ID NO: 1827693 - RNA, 19 nt, Artificial Sequence
  Description of Artificial Sequence: Synthetic oligonucleotide
  Sense strand starting at position 569 of SEQ ID NO: 1563732
ucacaugcuccugaagauu

SEQ ID NO: 1827694 - RNA, 19 nt, Artificial Sequence
  Description of Artificial Sequence: Synthetic oligonucleotide
  Antisense strand to SEQ ID NO: 1827693
aaucuucaggagcauguga

SEQ ID NO: 1827695 - RNA, 19 nt, Artificial Sequence
  Description of Artificial Sequence: Synthetic oligonucleotide
  Sense strand starting at position 577 of SEQ ID NO: 1563732
uccugaagauucuuaauug

SEQ ID NO: 1827696 - RNA, 19 nt, Artificial Sequence
  Description of Artificial Sequence: Synthetic oligonucleotide
  Antisense strand to SEQ ID NO: 1827695
caauuaagaaucuucagga

SEQ ID NO: 1827697 - RNA, 19 nt, Artificial Sequence
  Description of Artificial Sequence: Synthetic oligonucleotide
  Sense strand starting at position 581 of SEQ ID NO: 1563732
gaagauucuuaauugcugu

SEQ ID NO: 1827698 - RNA, 19 nt, Artificial Sequence
  Description of Artificial Sequence: Synthetic oligonucleotide
  Antisense strand to SEQ ID NO: 1827697
acagcaauuaagaaucuuc

SEQ ID NO: 1827699 - RNA, 19 nt, Artificial Sequence
  Description of Artificial Sequence: Synthetic oligonucleotide
  Sense strand starting at position 587 of SEQ ID NO: 1563732
ucuuaauugcuguggauca

SEQ ID NO: 1827700 - RNA, 19 nt, Artificial Sequence
  Description of Artificial Sequence: Synthetic oligonucleotide
  Antisense strand to SEQ ID NO: 1827699
ugauccacagcaauuaaga

SEQ ID NO: 1827701 - RNA, 19 nt, Artificial Sequence
  Description of Artificial Sequence: Synthetic oligonucleotide
  Sense strand starting at position 589 of SEQ ID NO: 1563732
uuaauugcuguggaucaga

SEQ ID NO: 1827702 - RNA, 19 nt, Artificial Sequence
  Description of Artificial Sequence: Synthetic oligonucleotide
  Antisense strand to SEQ ID NO: 1827701
ucugauccacagcaauuaa

SEQ ID NO: 1827703 - RNA, 19 nt, Artificial Sequence
  Description of Artificial Sequence: Synthetic oligonucleotide
  Sense strand starting at position 597 of SEQ ID NO: 1563732
uguggaucagagcacuaau

SEQ ID NO: 1827704 - RNA, 19 nt, Artificial Sequence
  Description of Artificial Sequence: Synthetic oligonucleotide
  Antisense strand to SEQ ID NO: 1827703
auuagugcucugauccaca

SEQ ID NO: 1827705 - RNA, 19 nt, Artificial Sequence
  Description of Artificial Sequence: Synthetic oligonucleotide
  Sense strand starting at position 600 of SEQ ID NO: 1563732
ggaucagagcacuaaugca

SEQ ID NO: 1827706 - RNA, 19 nt, Artificial Sequence
  Description of Artificial Sequence: Synthetic oligonucleotide
  Antisense strand to SEQ ID NO: 1827705
ugcauuagugcucugaucc

SEQ ID NO: 1827707 - RNA, 19 nt, Artificial Sequence
  Description of Artificial Sequence: Synthetic oligonucleotide
  Sense strand starting at position 945 of SEQ ID NO: 1563732
uugugagaauuauugauag

SEQ ID NO: 1827708 - RNA, 19 nt, Artificial Sequence
  Description of Artificial Sequence: Synthetic oligonucleotide
  Antisense strand to SEQ ID NO: 1827707
cuaucaauaauucucacaa

SEQ ID NO: 1827709 - RNA, 19 nt, Artificial Sequence
  Description of Artificial Sequence: Synthetic oligonucleotide
  Sense strand starting at position 949 of SEQ ID NO: 1563732
gagaauuauugauaggaag

SEQ ID NO: 1827710 - RNA, 19 nt, Artificial Sequence
  Description of Artificial Sequence: Synthetic oligonucleotide
  Antisense strand to SEQ ID NO: 1827709
cuuccuaucaauaauucuc

SEQ ID NO: 1827711 - RNA, 19 nt, Artificial Sequence
  Description of Artificial Sequence: Synthetic oligonucleotide
  Sense strand starting at position 1107 of SEQ ID NO: 1563732
auaacuccuccaggagauu

SEQ ID NO: 1827712 - RNA, 19 nt, Artificial Sequence
  Description of Artificial Sequence: Synthetic oligonucleotide
  Antisense strand to SEQ ID NO: 1827711
aaucuccuggaggaguuau

SEQ ID NO: 1827713 - RNA, 19 nt, Artificial Sequence
  Description of Artificial Sequence: Synthetic oligonucleotide
  Sense strand starting at position 1119 of SEQ ID NO: 1563732
ggagauuguuacguccaau

SEQ ID NO: 1827714 - RNA, 19 nt, Artificial Sequence
  Description of Artificial Sequence: Synthetic oligonucleotide
  Antisense strand to SEQ ID NO: 1827713
auuggacguaacaaucucc

SEQ ID NO: 1827715 - RNA, 19 nt, Artificial Sequence
  Description of Artificial Sequence: Synthetic oligonucleotide
  Sense strand starting at position 2017 of SEQ ID NO: 1563732
guugauuggccgaggcgaa

SEQ ID NO: 1827716 - RNA, 19 nt, Artificial Sequence
  Description of Artificial Sequence: Synthetic oligonucleotide
  Antisense strand to SEQ ID NO: 1827715
uucgccucggccaaucaac

SEQ ID NO: 1827717 - RNA, 19 nt, Artificial Sequence
  Description of Artificial Sequence: Synthetic oligonucleotide
  Sense strand starting at position 2130 of SEQ ID NO: 1563732
ggcggauuccgccugcuaa

SEQ ID NO: 1827718 - RNA, 19 nt, Artificial Sequence
  Description of Artificial Sequence: Synthetic oligonucleotide
  Antisense strand to SEQ ID NO: 1827717
uuagcaggcggaauccgcc

SEQ ID NO: 1827719 - RNA, 19 nt, Artificial Sequence
  Description of Artificial Sequence: Synthetic oligonucleotide
  Sense strand starting at position 2329 of SEQ ID NO: 1563732
gaauguauuugagacuccu

SEQ ID NO: 1827720 - RNA, 19 nt, Artificial Sequence
  Description of Artificial Sequence: Synthetic oligonucleotide
  Antisense strand to SEQ ID NO: 1827719
aggagucucaaauacauuc

SEQ ID NO: 1827721 - RNA, 19 nt, Artificial Sequence
  Description of Artificial Sequence: Synthetic oligonucleotide
  Sense strand starting at position 2337 of SEQ ID NO: 1563732
uugagacuccuauaugcua

SEQ ID NO: 1827722 - RNA, 19 nt, Artificial Sequence
  Description of Artificial Sequence: Synthetic oligonucleotide
  Antisense strand to SEQ ID NO: 1827721
uagcauauaggagucucaa

SEQ ID NO: 1827723 - RNA, 19 nt, Artificial Sequence
  Description of Artificial Sequence: Synthetic oligonucleotide
  Sense strand starting at position 2374 of SEQ ID NO: 1563732
ugggauacccagcggaaua

SEQ ID NO: 1827724 - RNA, 19 nt, Artificial Sequence
  Description of Artificial Sequence: Synthetic oligonucleotide
  Antisense strand to SEQ ID NO: 1827723
uauuccgcuggguauccca

SEQ ID NO: 1827725 - RNA, 19 nt, Artificial Sequence
  Description of Artificial Sequence: Synthetic oligonucleotide
  Sense strand starting at position 2375 of SEQ ID NO: 1563732
gggauacccagcggaauaa

SEQ ID NO: 1827726 - RNA, 19 nt, Artificial Sequence
  Description of Artificial Sequence: Synthetic oligonucleotide
  Antisense strand to SEQ ID NO: 1827725
uuauuccgcuggguauccc

SEQ ID NO: 1827727 - RNA, 19 nt, Artificial Sequence
  Description of Artificial Sequence: Synthetic oligonucleotide
  Sense strand starting at position 2509 of SEQ ID NO: 1563732
agaugaggagucugaguua

SEQ ID NO: 1827728 - RNA, 19 nt, Artificial Sequence
  Description of Artificial Sequence: Synthetic oligonucleotide
  Antisense strand to SEQ ID NO: 1827727
uaacucagacuccucaucu

SEQ ID NO: 1827729 - RNA, 19 nt, Artificial Sequence
  Description of Artificial Sequence: Synthetic oligonucleotide
  Sense strand starting at position 2512 of SEQ ID NO: 1563732
ugaggagucugaguuagag

SEQ ID NO: 1827730 - RNA, 19 nt, Artificial Sequence
  Description of Artificial Sequence: Synthetic oligonucleotide
  Antisense strand to SEQ ID NO: 1827729
cucuaacucagacuccuca

SEQ ID NO: 1827731 - RNA, 19 nt, Artificial Sequence
  Description of Artificial Sequence: Synthetic oligonucleotide
  Sense strand starting at position 2555 of SEQ ID NO: 1563732
auauguugaggccgagaua

SEQ ID NO: 1827732 - RNA, 19 nt, Artificial Sequence
  Description of Artificial Sequence: Synthetic oligonucleotide
  Antisense strand to SEQ ID NO: 1827731
uaucucggccucaacauau

SEQ ID NO: 1827733 - RNA, 19 nt, Artificial Sequence
  Description of Artificial Sequence: Synthetic oligonucleotide
  Sense strand starting at position 2612 of SEQ ID NO: 1563732
guggaaagccgcuaagaga

SEQ ID NO: 1827734 - RNA, 19 nt, Artificial Sequence
  Description of Artificial Sequence: Synthetic oligonucleotide
  Antisense strand to SEQ ID NO: 1827733
ucucuuagcggcuuuccac

SEQ ID NO: 1827735 - RNA, 19 nt, Artificial Sequence
  Description of Artificial Sequence: Synthetic oligonucleotide
  Sense strand starting at position 2804 of SEQ ID NO: 1563732
gacccaggucuuugucauc

SEQ ID NO: 1827736 - RNA, 19 nt, Artificial Sequence
  Description of Artificial Sequence: Synthetic oligonucleotide
  Antisense strand to SEQ ID NO: 1827735
gaugacaaagaccuggguc

SEQ ID NO: 1827737 - RNA, 19 nt, Artificial Sequence
  Description of Artificial Sequence: Synthetic oligonucleotide
  Sense strand starting at position 2809 of SEQ ID NO: 1563732
aggucuuugucauccuaga

SEQ ID NO: 1827738 - RNA, 19 nt, Artificial Sequence
  Description of Artificial Sequence: Synthetic oligonucleotide
  Antisense strand to SEQ ID NO: 1827737
ucuaggaugacaaagaccu

SEQ ID NO: 1827739 - RNA, 19 nt, Artificial Sequence
  Description of Artificial Sequence: Synthetic oligonucleotide
  Sense strand starting at position 2845 of SEQ ID NO: 1563732
uccagaagcuaugucauua

SEQ ID NO: 1827740 - RNA, 19 nt, Artificial Sequence
  Description of Artificial Sequence: Synthetic oligonucleotide
  Antisense strand to SEQ ID NO: 1827739
uaaugacauagcuucugga

SEQ ID NO: 1827741 - RNA, 19 nt, Artificial Sequence
  Description of Artificial Sequence: Synthetic oligonucleotide
  Sense strand starting at position 2849 of SEQ ID NO: 1563732
gaagcuaugucauuagagu

SEQ ID NO: 1827742 - RNA, 19 nt, Artificial Sequence
  Description of Artificial Sequence: Synthetic oligonucleotide
  Antisense strand to SEQ ID NO: 1827741
acucuaaugacauagcuuc

SEQ ID NO: 1827743 - RNA, 19 nt, Artificial Sequence
  Description of Artificial Sequence: Synthetic oligonucleotide
  Sense strand starting at position 2850 of SEQ ID NO: 1563732
aagcuaugucauuagaguc

SEQ ID NO: 1827744 - RNA, 19 nt, Artificial Sequence
  Description of Artificial Sequence: Synthetic oligonucleotide
  Antisense strand to SEQ ID NO: 1827743
gacucuaaugacauagcuu

SEQ ID NO: 1827745 - RNA, 19 nt, Artificial Sequence
  Description of Artificial Sequence: Synthetic oligonucleotide
  Sense strand starting at position 2864 of SEQ ID NO: 1563732
gagucuugagcccagauau

SEQ ID NO: 1827746 - RNA, 19 nt, Artificial Sequence
  Description of Artificial Sequence: Synthetic oligonucleotide
  Antisense strand to SEQ ID NO: 1827745
auaucugggcucaagacuc

SEQ ID NO: 1827747 - RNA, 19 nt, Artificial Sequence
  Description of Artificial Sequence: Synthetic oligonucleotide
  Sense strand starting at position 2958 of SEQ ID NO: 1563732
ucagaacugcuuuauguuu

SEQ ID NO: 1827748 - RNA, 19 nt, Artificial Sequence
  Description of Artificial Sequence: Synthetic oligonucleotide
  Antisense strand to SEQ ID NO: 1827747
aaacauaaagcaguucuga

SEQ ID NO: 1827749 - RNA, 19 nt, Artificial Sequence
  Description of Artificial Sequence: Synthetic oligonucleotide
  Sense strand starting at position 3006 of SEQ ID NO: 1563732
cuuucucacccaggaagau

SEQ ID NO: 1827750 - RNA, 19 nt, Artificial Sequence
  Description of Artificial Sequence: Synthetic oligonucleotide
  Antisense strand to SEQ ID NO: 1827749
aucuuccugggugagaaag

SEQ ID NO: 1827751 - RNA, 19 nt, Artificial Sequence
  Description of Artificial Sequence: Synthetic oligonucleotide
  Sense strand starting at position 3075 of SEQ ID NO: 1563732
caccguauuuaccaaagga

SEQ ID NO: 1827752 - RNA, 19 nt, Artificial Sequence
  Description of Artificial Sequence: Synthetic oligonucleotide
  Antisense strand to SEQ ID NO: 1827751
uccuuugguaaauacggug

SEQ ID NO: 1827753 - RNA, 19 nt, Artificial Sequence
  Description of Artificial Sequence: Synthetic oligonucleotide
  Sense strand starting at position 3391 of SEQ ID NO: 1563732
gcauguccguaauccauuu

SEQ ID NO: 1827754 - RNA, 19 nt, Artificial Sequence
  Description of Artificial Sequence: Synthetic oligonucleotide
  Antisense strand to SEQ ID NO: 1827753
aaauggauuacggacaugc

SEQ ID NO: 1827755 - RNA, 19 nt, Artificial Sequence
  Description of Artificial Sequence: Synthetic oligonucleotide
  Sense strand starting at position 3425 of SEQ ID NO: 1563732
agaugugcuguggaauuca

SEQ ID NO: 1827756 - RNA, 19 nt, Artificial Sequence
  Description of Artificial Sequence: Synthetic oligonucleotide
  Antisense strand to SEQ ID NO: 1827755
ugaauuccacagcacaucu

SEQ ID NO: 1827757 - RNA, 19 nt, Artificial Sequence
  Description of Artificial Sequence: Synthetic oligonucleotide
  Sense strand starting at position 3676 of SEQ ID NO: 1563732
uauugaguuugggcuccaa

SEQ ID NO: 1827758 - RNA, 19 nt, Artificial Sequence
  Description of Artificial Sequence: Synthetic oligonucleotide
  Antisense strand to SEQ ID NO: 1827757
uuggagcccaaacucaaua

SEQ ID NO: 1827759 - RNA, 19 nt, Artificial Sequence
  Description of Artificial Sequence: Synthetic oligonucleotide
  Sense strand starting at position 3680 of SEQ ID NO: 1563732
gaguuugggcuccaaagua

SEQ ID NO: 1827760 - RNA, 19 nt, Artificial Sequence
  Description of Artificial Sequence: Synthetic oligonucleotide
  Antisense strand to SEQ ID NO: 1827759
uacuuuggagcccaaacuc

SEQ ID NO: 1827761 - RNA, 19 nt, Artificial Sequence
  Description of Artificial Sequence: Synthetic oligonucleotide
  Sense strand starting at position 3855 of SEQ ID NO: 1563732
ucaccuaaugccgagaaca

SEQ ID NO: 1827762 - RNA, 19 nt, Artificial Sequence
  Description of Artificial Sequence: Synthetic oligonucleotide
  Antisense strand to SEQ ID NO: 1827761
uguucucggcauuagguga

SEQ ID NO: 1827763 - RNA, 19 nt, Artificial Sequence
  Description of Artificial Sequence: Synthetic oligonucleotide
  Sense strand starting at position 3857 of SEQ ID NO: 1563732
accuaaugccgagaacacu

SEQ ID NO: 1827764 - RNA, 19 nt, Artificial Sequence
  Description of Artificial Sequence: Synthetic oligonucleotide
  Antisense strand to SEQ ID NO: 1827763
aguguucucggcauuaggu

SEQ ID NO: 1827765 - RNA, 19 nt, Artificial Sequence
  Description of Artificial Sequence: Synthetic oligonucleotide
  Sense strand starting at position 3881 of SEQ ID NO: 1563732
gcguguacaagacacuuaa

SEQ ID NO: 1827766 - RNA, 19 nt, Artificial Sequence
  Description of Artificial Sequence: Synthetic oligonucleotide
  Antisense strand to SEQ ID NO: 1827765
uuaagugucuuguacacgc

SEQ ID NO: 1827767 - RNA, 19 nt, Artificial Sequence
  Description of Artificial Sequence: Synthetic oligonucleotide
  Sense strand starting at position 140 of SEQ ID NO: 1563733
cguucacaucgucaagguu

SEQ ID NO: 1827768 - RNA, 19 nt, Artificial Sequence
  Description of Artificial Sequence: Synthetic oligonucleotide
  Antisense strand to SEQ ID NO: 1827767
aaccuugacgaugugaacg

SEQ ID NO: 1827769 - RNA, 19 nt, Artificial Sequence
  Description of Artificial Sequence: Synthetic oligonucleotide
  Sense strand starting at position 205 of SEQ ID NO: 1563733
ggcagauuaggguguccau

SEQ ID NO: 1827770 - RNA, 19 nt, Artificial Sequence
  Description of Artificial Sequence: Synthetic oligonucleotide
  Antisense strand to SEQ ID NO: 1827769
auggacacccuaaucugcc

SEQ ID NO: 1827771 - RNA, 19 nt, Artificial Sequence
  Description of Artificial Sequence: Synthetic oligonucleotide
  Sense strand starting at position 230 of SEQ ID NO: 1563733
cggaaagggucuuugaagu

SEQ ID NO: 1827772 - RNA, 19 nt, Artificial Sequence
  Description of Artificial Sequence: Synthetic oligonucleotide
  Antisense strand to SEQ ID NO: 1827771
acuucaaagacccuuuccg

SEQ ID NO: 1827773 - RNA, 19 nt, Artificial Sequence
  Description of Artificial Sequence: Synthetic oligonucleotide
  Sense strand starting at position 803 of SEQ ID NO: 1563733
agaggcuugucguucauua

SEQ ID NO: 1827774 - RNA, 19 nt, Artificial Sequence
  Description of Artificial Sequence: Synthetic oligonucleotide
  Antisense strand to SEQ ID NO: 1827773
uaaugaacgacaagccucu

SEQ ID NO: 1827775 - RNA, 19 nt, Artificial Sequence
  Description of Artificial Sequence: Synthetic oligonucleotide
  Sense strand starting at position 865 of SEQ ID NO: 1563733
ggugaagguccugaaagug

SEQ ID NO: 1827776 - RNA, 19 nt, Artificial Sequence
  Description of Artificial Sequence: Synthetic oligonucleotide
  Antisense strand to SEQ ID NO: 1827775
cacuuucaggaccuucacc

SEQ ID NO: 1827777 - RNA, 19 nt, Artificial Sequence
  Description of Artificial Sequence: Synthetic oligonucleotide
  Sense strand starting at position 909 of SEQ ID NO: 1563733
acaaguuuagcuggcggaa

SEQ ID NO: 1827778 - RNA, 19 nt, Artificial Sequence
  Description of Artificial Sequence: Synthetic oligonucleotide
  Antisense strand to SEQ ID NO: 1827777
uuccgccagcuaaacuugu

SEQ ID NO: 1827779 - RNA, 19 nt, Artificial Sequence
  Description of Artificial Sequence: Synthetic oligonucleotide
  Sense strand starting at position 912 of SEQ ID NO: 1563733
aguuuagcuggcggaagaa

SEQ ID NO: 1827780 - RNA, 19 nt, Artificial Sequence
  Description of Artificial Sequence: Synthetic oligonucleotide
  Antisense strand to SEQ ID NO: 1827779
uucuuccgccagcuaaacu

SEQ ID NO: 1827781 - RNA, 19 nt, Artificial Sequence
  Description of Artificial Sequence: Synthetic oligonucleotide
  Sense strand starting at position 924 of SEQ ID NO: 1563733
ggaagaagcucuuuaucga

SEQ ID NO: 1827782 - RNA, 19 nt, Artificial Sequence
  Description of Artificial Sequence: Synthetic oligonucleotide
  Antisense strand to SEQ ID NO: 1827781
ucgauaaagagcuucuucc

SEQ ID NO: 1827783 - RNA, 19 nt, Artificial Sequence
  Description of Artificial Sequence: Synthetic oligonucleotide
  Sense strand starting at position 927 of SEQ ID NO: 1563733
agaagcucuuuaucgaagu

SEQ ID NO: 1827784 - RNA, 19 nt, Artificial Sequence
  Description of Artificial Sequence: Synthetic oligonucleotide
  Antisense strand to SEQ ID NO: 1827783
acuucgauaaagagcuucu

SEQ ID NO: 1827785 - RNA, 19 nt, Artificial Sequence
  Description of Artificial Sequence: Synthetic oligonucleotide
  Sense strand starting at position 1074 of SEQ ID NO: 1563733
uccacaguuucuguggaaa

SEQ ID NO: 1827786 - RNA, 19 nt, Artificial Sequence
  Description of Artificial Sequence: Synthetic oligonucleotide
  Antisense strand to SEQ ID NO: 1827785
uuuccacagaaacugugga

SEQ ID NO: 1827787 - RNA, 19 nt, Artificial Sequence
  Description of Artificial Sequence: Synthetic oligonucleotide
  Sense strand starting at position 1103 of SEQ ID NO: 1563733
aggagauuaucuucucccu

SEQ ID NO: 1827788 - RNA, 19 nt, Artificial Sequence
  Description of Artificial Sequence: Synthetic oligonucleotide
  Antisense strand to SEQ ID NO: 1827787
agggagaagauaaucuccu

SEQ ID NO: 1827789 - RNA, 19 nt, Artificial Sequence
  Description of Artificial Sequence: Synthetic oligonucleotide
  Sense strand starting at position 1148 of SEQ ID NO: 1563733
ggccuucugaacgaagcuu

SEQ ID NO: 1827790 - RNA, 19 nt, Artificial Sequence
  Description of Artificial Sequence: Synthetic oligonucleotide
  Antisense strand to SEQ ID NO: 1827789
aagcuucguucagaaggcc

SEQ ID NO: 1827791 - RNA, 19 nt, Artificial Sequence
  Description of Artificial Sequence: Synthetic oligonucleotide
  Sense strand starting at position 1187 of SEQ ID NO: 1563733
gcgauuucuucugucagca

SEQ ID NO: 1827792 - RNA, 19 nt, Artificial Sequence
  Description of Artificial Sequence: Synthetic oligonucleotide
  Antisense strand to SEQ ID NO: 1827791
ugcugacagaagaaaucgc

SEQ ID NO: 1827793 - RNA, 19 nt, Artificial Sequence
  Description of Artificial Sequence: Synthetic oligonucleotide
  Sense strand starting at position 1253 of SEQ ID NO: 1563733
gaaggaucugcugggugaa

SEQ ID NO: 1827794 - RNA, 19 nt, Artificial Sequence
  Description of Artificial Sequence: Synthetic oligonucleotide
  Antisense strand to SEQ ID NO: 1827793
uucacccagcagauccuuc

SEQ ID NO: 1827795 - RNA, 19 nt, Artificial Sequence
  Description of Artificial Sequence: Synthetic oligonucleotide
  Sense strand starting at position 1354 of SEQ ID NO: 1563733
gcgagccauacucaaugau

SEQ ID NO: 1827796 - RNA, 19 nt, Artificial Sequence
  Description of Artificial Sequence: Synthetic oligonucleotide
  Antisense strand to SEQ ID NO: 1827795
aucauugaguauggcucgc

SEQ ID NO: 1827797 - RNA, 19 nt, Artificial Sequence
  Description of Artificial Sequence: Synthetic oligonucleotide
  Sense strand starting at position 1497 of SEQ ID NO: 1563733
ccagcaaguuguguaauaa

SEQ ID NO: 1827798 - RNA, 19 nt, Artificial Sequence
  Description of Artificial Sequence: Synthetic oligonucleotide
  Antisense strand to SEQ ID NO: 1827797
uuauuacacaacuugcugg

SEQ ID NO: 1827799 - RNA, 19 nt, Artificial Sequence
  Description of Artificial Sequence: Synthetic oligonucleotide
  Sense strand starting at position 1498 of SEQ ID NO: 1563733
cagcaaguuguguaauaaa

SEQ ID NO: 1827800 - RNA, 19 nt, Artificial Sequence
  Description of Artificial Sequence: Synthetic oligonucleotide
  Antisense strand to SEQ ID NO: 1827799
uuuauuacacaacuugcug

SEQ ID NO: 1827801 - RNA, 19 nt, Artificial Sequence
  Description of Artificial Sequence: Synthetic oligonucleotide
  Sense strand starting at position 1592 of SEQ ID NO: 1563733
gacacuagugcacaagagu

SEQ ID NO: 1827802 - RNA, 19 nt, Artificial Sequence
  Description of Artificial Sequence: Synthetic oligonucleotide
  Antisense strand to SEQ ID NO: 1827801
acucuugugcacuaguguc

SEQ ID NO: 1827803 - RNA, 19 nt, Artificial Sequence
  Description of Artificial Sequence: Synthetic oligonucleotide
  Sense strand starting at position 2065 of SEQ ID NO: 1563733
cgggugucugcggucacau

SEQ ID NO: 1827804 - RNA, 19 nt, Artificial Sequence
  Description of Artificial Sequence: Synthetic oligonucleotide
  Antisense strand to SEQ ID NO: 1827803
augugaccgcagacacccg

SEQ ID NO: 1827805 - RNA, 19 nt, Artificial Sequence
  Description of Artificial Sequence: Synthetic oligonucleotide
  Sense strand starting at position 2132 of SEQ ID NO: 1563733
uggccagugucuccagaga

SEQ ID NO: 1827806 - RNA, 19 nt, Artificial Sequence
  Description of Artificial Sequence: Synthetic oligonucleotide
  Antisense strand to SEQ ID NO: 1827805
ucucuggagacacuggcca

SEQ ID NO: 1827807 - RNA, 19 nt, Artificial Sequence
  Description of Artificial Sequence: Synthetic oligonucleotide
  Sense strand starting at position 2175 of SEQ ID NO: 1563733
gguccaucucugcaacagu

SEQ ID NO: 1827808 - RNA, 19 nt, Artificial Sequence
  Description of Artificial Sequence: Synthetic oligonucleotide
  Antisense strand to SEQ ID NO: 1827807
acuguugcagagauggacc

SEQ ID NO: 1827809 - RNA, 19 nt, Artificial Sequence
  Description of Artificial Sequence: Synthetic oligonucleotide
  Sense strand starting at position 2188 of SEQ ID NO: 1563733
aacaguuguuccuuuggga

SEQ ID NO: 1827810 - RNA, 19 nt, Artificial Sequence
  Description of Artificial Sequence: Synthetic oligonucleotide
  Antisense strand to SEQ ID NO: 1827809
ucccaaaggaacaacuguu

SEQ ID NO: 1827811 - RNA, 19 nt, Artificial Sequence
  Description of Artificial Sequence: Synthetic oligonucleotide
  Sense strand starting at position 2306 of SEQ ID NO: 1563733
acucgauucugggcacaga

SEQ ID NO: 1827812 - RNA, 19 nt, Artificial Sequence
  Description of Artificial Sequence: Synthetic oligonucleotide
  Antisense strand to SEQ ID NO: 1827811
ucugugcccagaaucgagu

SEQ ID NO: 1827813 - RNA, 19 nt, Artificial Sequence
  Description of Artificial Sequence: Synthetic oligonucleotide
  Sense strand starting at position 2319 of SEQ ID NO: 1563733
cacagagcucagugaccuu

SEQ ID NO: 1827814 - RNA, 19 nt, Artificial Sequence
  Description of Artificial Sequence: Synthetic oligonucleotide
  Antisense strand to SEQ ID NO: 1827813
aaggucacugagcucugug

SEQ ID NO: 1827815 - RNA, 19 nt, Artificial Sequence
  Description of Artificial Sequence: Synthetic oligonucleotide
  Sense strand starting at position 2363 of SEQ ID NO: 1563733
gccuccacgcuugagacau

SEQ ID NO: 1827816 - RNA, 19 nt, Artificial Sequence
  Description of Artificial Sequence: Synthetic oligonucleotide
  Antisense strand to SEQ ID NO: 1827815
augucucaagcguggaggc

SEQ ID NO: 1827817 - RNA, 19 nt, Artificial Sequence
  Description of Artificial Sequence: Synthetic oligonucleotide
  Sense strand starting at position 2600 of SEQ ID NO: 1563733
ggcaguugggucagagcua

SEQ ID NO: 1827818 - RNA, 19 nt, Artificial Sequence
  Description of Artificial Sequence: Synthetic oligonucleotide
  Antisense strand to SEQ ID NO: 1827817
uagcucugacccaacugcc

SEQ ID NO: 1827819 - RNA, 19 nt, Artificial Sequence
  Description of Artificial Sequence: Synthetic oligonucleotide
  Sense strand starting at position 2658 of SEQ ID NO: 1563733
cggaaaucucaugagccua

SEQ ID NO: 1827820 - RNA, 19 nt, Artificial Sequence
  Description of Artificial Sequence: Synthetic oligonucleotide
  Antisense strand to SEQ ID NO: 1827819
uaggcucaugagauuuccg

SEQ ID NO: 1827821 - RNA, 19 nt, Artificial Sequence
  Description of Artificial Sequence: Synthetic oligonucleotide
  Sense strand starting at position 2735 of SEQ ID NO: 1563733
cacagcaacuggugaauuu

SEQ ID NO: 1827822 - RNA, 19 nt, Artificial Sequence
  Description of Artificial Sequence: Synthetic oligonucleotide
  Antisense strand to SEQ ID NO: 1827821
aaauucaccaguugcugug

SEQ ID NO: 1827823 - RNA, 19 nt, Artificial Sequence
  Description of Artificial Sequence: Synthetic oligonucleotide
  Sense strand starting at position 2757 of SEQ ID NO: 1563733
ggucaauugccacaaguca

SEQ ID NO: 1827824 - RNA, 19 nt, Artificial Sequence
  Description of Artificial Sequence: Synthetic oligonucleotide
  Antisense strand to SEQ ID NO: 1827823
ugacuuguggcaauugacc

SEQ ID NO: 1827825 - RNA, 19 nt, Artificial Sequence
  Description of Artificial Sequence: Synthetic oligonucleotide
  Sense strand starting at position 3143 of SEQ ID NO: 1563733
gccugugccagcuagagau

SEQ ID NO: 1827826 - RNA, 19 nt, Artificial Sequence
  Description of Artificial Sequence: Synthetic oligonucleotide
  Antisense strand to SEQ ID NO: 1827825
aucucuagcuggcacaggc

SEQ ID NO: 1827827 - RNA, 19 nt, Artificial Sequence
  Description of Artificial Sequence: Synthetic oligonucleotide
  Sense strand starting at position 3226 of SEQ ID NO: 1563733
acacaucaugcacguguaa

SEQ ID NO: 1827828 - RNA, 19 nt, Artificial Sequence
  Description of Artificial Sequence: Synthetic oligonucleotide
  Antisense strand to SEQ ID NO: 1827827
uuacacgugcaugaugugu

SEQ ID NO: 1827829 - RNA, 19 nt, Artificial Sequence
  Description of Artificial Sequence: Synthetic oligonucleotide
  Sense strand starting at position 3255 of SEQ ID NO: 1563733
cgguuuauugaacagcuua

SEQ ID NO: 1827830 - RNA, 19 nt, Artificial Sequence
  Description of Artificial Sequence: Synthetic oligonucleotide
  Antisense strand to SEQ ID NO: 1827829
uaagcuguucaauaaaccg

SEQ ID NO: 1827831 - RNA, 19 nt, Artificial Sequence
  Description of Artificial Sequence: Synthetic oligonucleotide
  Sense strand starting at position 3405 of SEQ ID NO: 1563733
cgcagcagacuugaauuaa

SEQ ID NO: 1827832 - RNA, 19 nt, Artificial Sequence
  Description of Artificial Sequence: Synthetic oligonucleotide
  Antisense strand to SEQ ID NO: 1827831
uuaauucaagucugcugcg

SEQ ID NO: 1827833 - RNA, 19 nt, Artificial Sequence
  Description of Artificial Sequence: Synthetic oligonucleotide
  Sense strand starting at position 3468 of SEQ ID NO: 1563733
cucuucuccuggcugagaa

SEQ ID NO: 1827834 - RNA, 19 nt, Artificial Sequence
  Description of Artificial Sequence: Synthetic oligonucleotide
  Antisense strand to SEQ ID NO: 1827833
uucucagccaggagaagag

SEQ ID NO: 1827835 - RNA, 19 nt, Artificial Sequence
  Description of Artificial Sequence: Synthetic oligonucleotide
  Sense strand starting at position 3581 of SEQ ID NO: 1563733
accugcagugcuuggagaa

SEQ ID NO: 1827836 - RNA, 19 nt, Artificial Sequence
  Description of Artificial Sequence: Synthetic oligonucleotide
  Antisense strand to SEQ ID NO: 1827835
uucuccaagcacugcaggu

SEQ ID NO: 1827837 - RNA, 19 nt, Artificial Sequence
  Description of Artificial Sequence: Synthetic oligonucleotide
  Sense strand starting at position 3668 of SEQ ID NO: 1563733
gagacuuucccacgcauag

SEQ ID NO: 1827838 - RNA, 19 nt, Artificial Sequence
  Description of Artificial Sequence: Synthetic oligonucleotide
  Antisense strand to SEQ ID NO: 1827837
cuaugcgugggaaagucuc

SEQ ID NO: 1827839 - RNA, 19 nt, Artificial Sequence
  Description of Artificial Sequence: Synthetic oligonucleotide
  Sense strand starting at position 3702 of SEQ ID NO: 1563733
ccguuucugcucucagcaa

SEQ ID NO: 1827840 - RNA, 19 nt, Artificial Sequence
  Description of Artificial Sequence: Synthetic oligonucleotide
  Antisense strand to SEQ ID NO: 1827839
uugcugagagcagaaacgg

SEQ ID NO: 1827841 - RNA, 19 nt, Artificial Sequence
  Description of Artificial Sequence: Synthetic oligonucleotide
  Sense strand starting at position 3716 of SEQ ID NO: 1563733
agcaacauucucuaguguu

SEQ ID NO: 1827842 - RNA, 19 nt, Artificial Sequence
  Description of Artificial Sequence: Synthetic oligonucleotide
  Antisense strand to SEQ ID NO: 1827841
aacacuagagaauguugcu

SEQ ID NO: 1827843 - RNA, 19 nt, Artificial Sequence
  Description of Artificial Sequence: Synthetic oligonucleotide
  Sense strand starting at position 3766 of SEQ ID NO: 1563733
gcuagccacuauucugaga

SEQ ID NO: 1827844 - RNA, 19 nt, Artificial Sequence
  Description of Artificial Sequence: Synthetic oligonucleotide
  Antisense strand to SEQ ID NO: 1827843
ucucagaauaguggcuagc

SEQ ID NO: 1827845 - RNA, 19 nt, Artificial Sequence
  Description of Artificial Sequence: Synthetic oligonucleotide
  Sense strand starting at position 3774 of SEQ ID NO: 1563733
cuauucugagaacgucaga

SEQ ID NO: 1827846 - RNA, 19 nt, Artificial Sequence
  Description of Artificial Sequence: Synthetic oligonucleotide
  Antisense strand to SEQ ID NO: 1827845
ucugacguucucagaauag

SEQ ID NO: 1827847 - RNA, 19 nt, Artificial Sequence
  Description of Artificial Sequence: Synthetic oligonucleotide
  Sense strand starting at position 141 of SEQ ID NO: 1563734
cguucacaucgucaagguu

SEQ ID NO: 1827848 - RNA, 19 nt, Artificial Sequence
  Description of Artificial Sequence: Synthetic oligonucleotide
  Antisense strand to SEQ ID NO: 1827847
aaccuugacgaugugaacg

SEQ ID NO: 1827849 - RNA, 19 nt, Artificial Sequence
  Description of Artificial Sequence: Synthetic oligonucleotide
  Sense strand starting at position 206 of SEQ ID NO: 1563734
ggcagauuaggguguccau

SEQ ID NO: 1827850 - RNA, 19 nt, Artificial Sequence
  Description of Artificial Sequence: Synthetic oligonucleotide
  Antisense strand to SEQ ID NO: 1827849
auggacacccuaaucugcc

SEQ ID NO: 1827851 - RNA, 19 nt, Artificial Sequence
  Description of Artificial Sequence: Synthetic oligonucleotide
  Sense strand starting at position 231 of SEQ ID NO: 1563734
cggaaagggucuuugaagu

SEQ ID NO: 1827852 - RNA, 19 nt, Artificial Sequence
  Description of Artificial Sequence: Synthetic oligonucleotide
  Antisense strand to SEQ ID NO: 1827851
acuucaaagacccuuuccg

SEQ ID NO: 1827853 - RNA, 19 nt, Artificial Sequence
  Description of Artificial Sequence: Synthetic oligonucleotide
  Sense strand starting at position 454 of SEQ ID NO: 1563734
gggugacagugguacaaau

SEQ ID NO: 1827854 - RNA, 19 nt, Artificial Sequence
  Description of Artificial Sequence: Synthetic oligonucleotide
  Antisense strand to SEQ ID NO: 1827853
auuuguaccacugucaccc

SEQ ID NO: 1827855 - RNA, 19 nt, Artificial Sequence
  Description of Artificial Sequence: Synthetic oligonucleotide
  Sense strand starting at position 589 of SEQ ID NO: 1563734
cuuggcaccugugauauuu

SEQ ID NO: 1827856 - RNA, 19 nt, Artificial Sequence
  Description of Artificial Sequence: Synthetic oligonucleotide
  Antisense strand to SEQ ID NO: 1827855
aaauaucacaggugccaag

SEQ ID NO: 1827857 - RNA, 19 nt, Artificial Sequence
  Description of Artificial Sequence: Synthetic oligonucleotide
  Sense strand starting at position 804 of SEQ ID NO: 1563734
agaggcuugucguucauua

SEQ ID NO: 1827858 - RNA, 19 nt, Artificial Sequence
  Description of Artificial Sequence: Synthetic oligonucleotide
  Antisense strand to SEQ ID NO: 1827857
uaaugaacgacaagccucu

SEQ ID NO: 1827859 - RNA, 19 nt, Artificial Sequence
  Description of Artificial Sequence: Synthetic oligonucleotide
  Sense strand starting at position 2066 of SEQ ID NO: 1563734
cgggugucugcggucacau

SEQ ID NO: 1827860 - RNA, 19 nt, Artificial Sequence
  Description of Artificial Sequence: Synthetic oligonucleotide
  Antisense strand to SEQ ID NO: 1827859
augugaccgcagacacccg

SEQ ID NO: 1827861 - RNA, 19 nt, Artificial Sequence
  Description of Artificial Sequence: Synthetic oligonucleotide
  Sense strand starting at position 2101 of SEQ ID NO: 1563734
gcuguuggccuucgagcau

SEQ ID NO: 1827862 - RNA, 19 nt, Artificial Sequence
  Description of Artificial Sequence: Synthetic oligonucleotide
  Antisense strand to SEQ ID NO: 1827861
augcucgaaggccaacagc

SEQ ID NO: 1827863 - RNA, 19 nt, Artificial Sequence
  Description of Artificial Sequence: Synthetic oligonucleotide
  Sense strand starting at position 2133 of SEQ ID NO: 1563734
uggccagugucuccagaga

SEQ ID NO: 1827864 - RNA, 19 nt, Artificial Sequence
  Description of Artificial Sequence: Synthetic oligonucleotide
  Antisense strand to SEQ ID NO: 1827863
ucucuggagacacuggcca

SEQ ID NO: 1827865 - RNA, 19 nt, Artificial Sequence
  Description of Artificial Sequence: Synthetic oligonucleotide
  Sense strand starting at position 2176 of SEQ ID NO: 1563734
gguccaucucugcaacagu

SEQ ID NO: 1827866 - RNA, 19 nt, Artificial Sequence
  Description of Artificial Sequence: Synthetic oligonucleotide
  Antisense strand to SEQ ID NO: 1827865
acuguugcagagauggacc

SEQ ID NO: 1827867 - RNA, 19 nt, Artificial Sequence
  Description of Artificial Sequence: Synthetic oligonucleotide
  Sense strand starting at position 2189 of SEQ ID NO: 1563734
aacaguuguuccuuuggga

SEQ ID NO: 1827868 - RNA, 19 nt, Artificial Sequence
  Description of Artificial Sequence: Synthetic oligonucleotide
  Antisense strand to SEQ ID NO: 1827867
ucccaaaggaacaacuguu

SEQ ID NO: 1827869 - RNA, 19 nt, Artificial Sequence
  Description of Artificial Sequence: Synthetic oligonucleotide
  Sense strand starting at position 2307 of SEQ ID NO: 1563734
acucgauucugggcacaga

SEQ ID NO: 1827870 - RNA, 19 nt, Artificial Sequence
  Description of Artificial Sequence: Synthetic oligonucleotide
  Antisense strand to SEQ ID NO: 1827869
ucugugcccagaaucgagu

SEQ ID NO: 1827871 - RNA, 19 nt, Artificial Sequence
  Description of Artificial Sequence: Synthetic oligonucleotide
  Sense strand starting at position 2320 of SEQ ID NO: 1563734
cacagagcucagugaccuu

SEQ ID NO: 1827872 - RNA, 19 nt, Artificial Sequence
  Description of Artificial Sequence: Synthetic oligonucleotide
  Antisense strand to SEQ ID NO: 1827871
aaggucacugagcucugug

SEQ ID NO: 1827873 - RNA, 19 nt, Artificial Sequence
  Description of Artificial Sequence: Synthetic oligonucleotide
  Sense strand starting at position 2364 of SEQ ID NO: 1563734
gccuccacgcuugagacau

SEQ ID NO: 1827874 - RNA, 19 nt, Artificial Sequence
  Description of Artificial Sequence: Synthetic oligonucleotide
  Antisense strand to SEQ ID NO: 1827873
augucucaagcguggaggc

SEQ ID NO: 1827875 - RNA, 19 nt, Artificial Sequence
  Description of Artificial Sequence: Synthetic oligonucleotide
  Sense strand starting at position 2601 of SEQ ID NO: 1563734
ggcaguugggucagagcua

SEQ ID NO: 1827876 - RNA, 19 nt, Artificial Sequence
  Description of Artificial Sequence: Synthetic oligonucleotide
  Antisense strand to SEQ ID NO: 1827875
uagcucugacccaacugcc

SEQ ID NO: 1827877 - RNA, 19 nt, Artificial Sequence
  Description of Artificial Sequence: Synthetic oligonucleotide
  Sense strand starting at position 2612 of SEQ ID NO: 1563734
cagagcuacuguugucacu

SEQ ID NO: 1827878 - RNA, 19 nt, Artificial Sequence
  Description of Artificial Sequence: Synthetic oligonucleotide
  Antisense strand to SEQ ID NO: 1827877
agugacaacaguagcucug

SEQ ID NO: 1827879 - RNA, 19 nt, Artificial Sequence
  Description of Artificial Sequence: Synthetic oligonucleotide
  Sense strand starting at position 2658 of SEQ ID NO: 1563734
ucggaaaucucaugagccu

SEQ ID NO: 1827880 - RNA, 19 nt, Artificial Sequence
  Description of Artificial Sequence: Synthetic oligonucleotide
  Antisense strand to SEQ ID NO: 1827879
aggcucaugagauuuccga

SEQ ID NO: 1827881 - RNA, 19 nt, Artificial Sequence
  Description of Artificial Sequence: Synthetic oligonucleotide
  Sense strand starting at position 2659 of SEQ ID NO: 1563734
cggaaaucucaugagccua

SEQ ID NO: 1827882 - RNA, 19 nt, Artificial Sequence
  Description of Artificial Sequence: Synthetic oligonucleotide
  Antisense strand to SEQ ID NO: 1827881
uaggcucaugagauuuccg

SEQ ID NO: 1827883 - RNA, 19 nt, Artificial Sequence
  Description of Artificial Sequence: Synthetic oligonucleotide
  Sense strand starting at position 2736 of SEQ ID NO: 1563734
cacagcaacuggugaauuu

SEQ ID NO: 1827884 - RNA, 19 nt, Artificial Sequence
  Description of Artificial Sequence: Synthetic oligonucleotide
  Antisense strand to SEQ ID NO: 1827883
aaauucaccaguugcugug

SEQ ID NO: 1827885 - RNA, 19 nt, Artificial Sequence
  Description of Artificial Sequence: Synthetic oligonucleotide
  Sense strand starting at position 2745 of SEQ ID NO: 1563734
uggugaauuuccuggucaa

SEQ ID NO: 1827886 - RNA, 19 nt, Artificial Sequence
  Description of Artificial Sequence: Synthetic oligonucleotide
  Antisense strand to SEQ ID NO: 1827885
uugaccaggaaauucacca

SEQ ID NO: 1827887 - RNA, 19 nt, Artificial Sequence
  Description of Artificial Sequence: Synthetic oligonucleotide
  Sense strand starting at position 2758 of SEQ ID NO: 1563734
ggucaauugccacaaguca

SEQ ID NO: 1827888 - RNA, 19 nt, Artificial Sequence
  Description of Artificial Sequence: Synthetic oligonucleotide
  Antisense strand to SEQ ID NO: 1827887
ugacuuguggcaauugacc

SEQ ID NO: 1827889 - RNA, 19 nt, Artificial Sequence
  Description of Artificial Sequence: Synthetic oligonucleotide
  Sense strand starting at position 2930 of SEQ ID NO: 1563734
gacagugucugcugcagau

SEQ ID NO: 1827890 - RNA, 19 nt, Artificial Sequence
  Description of Artificial Sequence: Synthetic oligonucleotide
  Antisense strand to SEQ ID NO: 1827889
aucugcagcagacacuguc

SEQ ID NO: 1827891 - RNA, 19 nt, Artificial Sequence
  Description of Artificial Sequence: Synthetic oligonucleotide
  Sense strand starting at position 3144 of SEQ ID NO: 1563734
gccugugccagcuagagau

SEQ ID NO: 1827892 - RNA, 19 nt, Artificial Sequence
  Description of Artificial Sequence: Synthetic oligonucleotide
  Antisense strand to SEQ ID NO: 1827891
aucucuagcuggcacaggc

SEQ ID NO: 1827893 - RNA, 19 nt, Artificial Sequence
  Description of Artificial Sequence: Synthetic oligonucleotide
  Sense strand starting at position 3227 of SEQ ID NO: 1563734
acacaucaugcacguguaa

SEQ ID NO: 1827894 - RNA, 19 nt, Artificial Sequence
  Description of Artificial Sequence: Synthetic oligonucleotide
  Antisense strand to SEQ ID NO: 1827893
uuacacgugcaugaugugu

SEQ ID NO: 1827895 - RNA, 19 nt, Artificial Sequence
  Description of Artificial Sequence: Synthetic oligonucleotide
  Sense strand starting at position 144 of SEQ ID NO: 1563735
cguucacaucgucaagguu

SEQ ID NO: 1827896 - RNA, 19 nt, Artificial Sequence
  Description of Artificial Sequence: Synthetic oligonucleotide
  Antisense strand to SEQ ID NO: 1827895
aaccuugacgaugugaacg

SEQ ID NO: 1827897 - RNA, 19 nt, Artificial Sequence
  Description of Artificial Sequence: Synthetic oligonucleotide
  Sense strand starting at position 209 of SEQ ID NO: 1563735
ggcagauuaggguguccau

SEQ ID NO: 1827898 - RNA, 19 nt, Artificial Sequence
  Description of Artificial Sequence: Synthetic oligonucleotide
  Antisense strand to SEQ ID NO: 1827897
auggacacccuaaucugcc

SEQ ID NO: 1827899 - RNA, 19 nt, Artificial Sequence
  Description of Artificial Sequence: Synthetic oligonucleotide
  Sense strand starting at position 234 of SEQ ID NO: 1563735
cggaaagggucuuugaagu

SEQ ID NO: 1827900 - RNA, 19 nt, Artificial Sequence
  Description of Artificial Sequence: Synthetic oligonucleotide
  Antisense strand to SEQ ID NO: 1827899
acuucaaagacccuuuccg

SEQ ID NO: 1827901 - RNA, 19 nt, Artificial Sequence
  Description of Artificial Sequence: Synthetic oligonucleotide
  Sense strand starting at position 807 of SEQ ID NO: 1563735
agaggcuugucguucauua

SEQ ID NO: 1827902 - RNA, 19 nt, Artificial Sequence
  Description of Artificial Sequence: Synthetic oligonucleotide
  Antisense strand to SEQ ID NO: 1827901
uaaugaacgacaagccucu

SEQ ID NO: 1827903 - RNA, 19 nt, Artificial Sequence
  Description of Artificial Sequence: Synthetic oligonucleotide
  Sense strand starting at position 869 of SEQ ID NO: 1563735
ggugaagguccugaaagug

SEQ ID NO: 1827904 - RNA, 19 nt, Artificial Sequence
  Description of Artificial Sequence: Synthetic oligonucleotide
  Antisense strand to SEQ ID NO: 1827903
cacuuucaggaccuucacc

SEQ ID NO: 1827905 - RNA, 19 nt, Artificial Sequence
  Description of Artificial Sequence: Synthetic oligonucleotide
  Sense strand starting at position 913 of SEQ ID NO: 1563735
acaaguuuagcuggcggaa

SEQ ID NO: 1827906 - RNA, 19 nt, Artificial Sequence
  Description of Artificial Sequence: Synthetic oligonucleotide
  Antisense strand to SEQ ID NO: 1827905
uuccgccagcuaaacuugu

SEQ ID NO: 1827907 - RNA, 19 nt, Artificial Sequence
  Description of Artificial Sequence: Synthetic oligonucleotide
  Sense strand starting at position 916 of SEQ ID NO: 1563735
aguuuagcuggcggaagaa

SEQ ID NO: 1827908 - RNA, 19 nt, Artificial Sequence
  Description of Artificial Sequence: Synthetic oligonucleotide
  Antisense strand to SEQ ID NO: 1827907
uucuuccgccagcuaaacu

SEQ ID NO: 1827909 - RNA, 19 nt, Artificial Sequence
  Description of Artificial Sequence: Synthetic oligonucleotide
  Sense strand starting at position 928 of SEQ ID NO: 1563735
ggaagaagcucuuuaucga

SEQ ID NO: 1827910 - RNA, 19 nt, Artificial Sequence
  Description of Artificial Sequence: Synthetic oligonucleotide
  Antisense strand to SEQ ID NO: 1827909
ucgauaaagagcuucuucc

SEQ ID NO: 1827911 - RNA, 19 nt, Artificial Sequence
  Description of Artificial Sequence: Synthetic oligonucleotide
  Sense strand starting at position 931 of SEQ ID NO: 1563735
agaagcucuuuaucgaagu

SEQ ID NO: 1827912 - RNA, 19 nt, Artificial Sequence
  Description of Artificial Sequence: Synthetic oligonucleotide
  Antisense strand to SEQ ID NO: 1827911
acuucgauaaagagcuucu

SEQ ID NO: 1827913 - RNA, 19 nt, Artificial Sequence
  Description of Artificial Sequence: Synthetic oligonucleotide
  Sense strand starting at position 1078 of SEQ ID NO: 1563735
uccacaguuucuguggaaa

SEQ ID NO: 1827914 - RNA, 19 nt, Artificial Sequence
  Description of Artificial Sequence: Synthetic oligonucleotide
  Antisense strand to SEQ ID NO: 1827913
uuuccacagaaacugugga

SEQ ID NO: 1827915 - RNA, 19 nt, Artificial Sequence
  Description of Artificial Sequence: Synthetic oligonucleotide
  Sense strand starting at position 1107 of SEQ ID NO: 1563735
aggagauuaucuucucccu

SEQ ID NO: 1827916 - RNA, 19 nt, Artificial Sequence
  Description of Artificial Sequence: Synthetic oligonucleotide
  Antisense strand to SEQ ID NO: 1827915
agggagaagauaaucuccu

SEQ ID NO: 1827917 - RNA, 19 nt, Artificial Sequence
  Description of Artificial Sequence: Synthetic oligonucleotide
  Sense strand starting at position 1152 of SEQ ID NO: 1563735
ggccuucugaacgaagcuu

SEQ ID NO: 1827918 - RNA, 19 nt, Artificial Sequence
  Description of Artificial Sequence: Synthetic oligonucleotide
  Antisense strand to SEQ ID NO: 1827917
aagcuucguucagaaggcc

SEQ ID NO: 1827919 - RNA, 19 nt, Artificial Sequence
  Description of Artificial Sequence: Synthetic oligonucleotide
  Sense strand starting at position 1191 of SEQ ID NO: 1563735
gcgauuucuucugucagca

SEQ ID NO: 1827920 - RNA, 19 nt, Artificial Sequence
  Description of Artificial Sequence: Synthetic oligonucleotide
  Antisense strand to SEQ ID NO: 1827919
ugcugacagaagaaaucgc

SEQ ID NO: 1827921 - RNA, 19 nt, Artificial Sequence
  Description of Artificial Sequence: Synthetic oligonucleotide
  Sense strand starting at position 1257 of SEQ ID NO: 1563735
gaaggaucugcugggugaa

SEQ ID NO: 1827922 - RNA, 19 nt, Artificial Sequence
  Description of Artificial Sequence: Synthetic oligonucleotide
  Antisense strand to SEQ ID NO: 1827921
uucacccagcagauccuuc

SEQ ID NO: 1827923 - RNA, 19 nt, Artificial Sequence
  Description of Artificial Sequence: Synthetic oligonucleotide
  Sense strand starting at position 1358 of SEQ ID NO: 1563735
gcgagccauacucaaugau

SEQ ID NO: 1827924 - RNA, 19 nt, Artificial Sequence
  Description of Artificial Sequence: Synthetic oligonucleotide
  Antisense strand to SEQ ID NO: 1827923
aucauugaguauggcucgc

SEQ ID NO: 1827925 - RNA, 19 nt, Artificial Sequence
  Description of Artificial Sequence: Synthetic oligonucleotide
  Sense strand starting at position 1501 of SEQ ID NO: 1563735
ccagcaaguuguguaauaa

SEQ ID NO: 1827926 - RNA, 19 nt, Artificial Sequence
  Description of Artificial Sequence: Synthetic oligonucleotide
  Antisense strand to SEQ ID NO: 1827925
uuauuacacaacuugcugg

SEQ ID NO: 1827927 - RNA, 19 nt, Artificial Sequence
  Description of Artificial Sequence: Synthetic oligonucleotide
  Sense strand starting at position 1502 of SEQ ID NO: 1563735
cagcaaguuguguaauaaa

SEQ ID NO: 1827928 - RNA, 19 nt, Artificial Sequence
  Description of Artificial Sequence: Synthetic oligonucleotide
  Antisense strand to SEQ ID NO: 1827927
uuuauuacacaacuugcug

SEQ ID NO: 1827929 - RNA, 19 nt, Artificial Sequence
  Description of Artificial Sequence: Synthetic oligonucleotide
  Sense strand starting at position 1596 of SEQ ID NO: 1563735
gacacuagugcacaagagu

SEQ ID NO: 1827930 - RNA, 19 nt, Artificial Sequence
  Description of Artificial Sequence: Synthetic oligonucleotide
  Antisense strand to SEQ ID NO: 1827929
acucuugugcacuaguguc

SEQ ID NO: 1827931 - RNA, 19 nt, Artificial Sequence
  Description of Artificial Sequence: Synthetic oligonucleotide
  Sense strand starting at position 2069 of SEQ ID NO: 1563735
cgggugucugcggucacau

SEQ ID NO: 1827932 - RNA, 19 nt, Artificial Sequence
  Description of Artificial Sequence: Synthetic oligonucleotide
  Antisense strand to SEQ ID NO: 1827931
augugaccgcagacacccg

SEQ ID NO: 1827933 - RNA, 19 nt, Artificial Sequence
  Description of Artificial Sequence: Synthetic oligonucleotide
  Sense strand starting at position 2136 of SEQ ID NO: 1563735
uggccagugucuccagaga

SEQ ID NO: 1827934 - RNA, 19 nt, Artificial Sequence
  Description of Artificial Sequence: Synthetic oligonucleotide
  Antisense strand to SEQ ID NO: 1827933
ucucuggagacacuggcca

SEQ ID NO: 1827935 - RNA, 19 nt, Artificial Sequence
  Description of Artificial Sequence: Synthetic oligonucleotide
  Sense strand starting at position 2179 of SEQ ID NO: 1563735
gguccaucucugcaacagu

SEQ ID NO: 1827936 - RNA, 19 nt, Artificial Sequence
  Description of Artificial Sequence: Synthetic oligonucleotide
  Antisense strand to SEQ ID NO: 1827935
acuguugcagagauggacc

SEQ ID NO: 1827937 - RNA, 19 nt, Artificial Sequence
  Description of Artificial Sequence: Synthetic oligonucleotide
  Sense strand starting at position 2192 of SEQ ID NO: 1563735
aacaguuguuccuuuggga

SEQ ID NO: 1827938 - RNA, 19 nt, Artificial Sequence
  Description of Artificial Sequence: Synthetic oligonucleotide
  Antisense strand to SEQ ID NO: 1827937
ucccaaaggaacaacuguu

SEQ ID NO: 1827939 - RNA, 19 nt, Artificial Sequence
  Description of Artificial Sequence: Synthetic oligonucleotide
  Sense strand starting at position 2310 of SEQ ID NO: 1563735
acucgauucugggcacaga

SEQ ID NO: 1827940 - RNA, 19 nt, Artificial Sequence
  Description of Artificial Sequence: Synthetic oligonucleotide
  Antisense strand to SEQ ID NO: 1827939
ucugugcccagaaucgagu

SEQ ID NO: 1827941 - RNA, 19 nt, Artificial Sequence
  Description of Artificial Sequence: Synthetic oligonucleotide
  Sense strand starting at position 2323 of SEQ ID NO: 1563735
cacagagcucagugaccuu

SEQ ID NO: 1827942 - RNA, 19 nt, Artificial Sequence
  Description of Artificial Sequence: Synthetic oligonucleotide
  Antisense strand to SEQ ID NO: 1827941
aaggucacugagcucugug

SEQ ID NO: 1827943 - RNA, 19 nt, Artificial Sequence
  Description of Artificial Sequence: Synthetic oligonucleotide
  Sense strand starting at position 2367 of SEQ ID NO: 1563735
gccuccacgcuugagacau

SEQ ID NO: 1827944 - RNA, 19 nt, Artificial Sequence
  Description of Artificial Sequence: Synthetic oligonucleotide
  Antisense strand to SEQ ID NO: 1827943
augucucaagcguggaggc

SEQ ID NO: 1827945 - RNA, 19 nt, Artificial Sequence
  Description of Artificial Sequence: Synthetic oligonucleotide
  Sense strand starting at position 2604 of SEQ ID NO: 1563735
ggcaguugggucagagcua

SEQ ID NO: 1827946 - RNA, 19 nt, Artificial Sequence
  Description of Artificial Sequence: Synthetic oligonucleotide
  Antisense strand to SEQ ID NO: 1827945
uagcucugacccaacugcc

SEQ ID NO: 1827947 - RNA, 19 nt, Artificial Sequence
  Description of Artificial Sequence: Synthetic oligonucleotide
  Sense strand starting at position 2662 of SEQ ID NO: 1563735
cggaaaucucaugagccua

SEQ ID NO: 1827948 - RNA, 19 nt, Artificial Sequence
  Description of Artificial Sequence: Synthetic oligonucleotide
  Antisense strand to SEQ ID NO: 1827947
uaggcucaugagauuuccg

SEQ ID NO: 1827949 - RNA, 19 nt, Artificial Sequence
  Description of Artificial Sequence: Synthetic oligonucleotide
  Sense strand starting at position 2739 of SEQ ID NO: 1563735
cacagcaacuggugaauuu

SEQ ID NO: 1827950 - RNA, 19 nt, Artificial Sequence
  Description of Artificial Sequence: Synthetic oligonucleotide
  Antisense strand to SEQ ID NO: 1827949
aaauucaccaguugcugug

SEQ ID NO: 1827951 - RNA, 19 nt, Artificial Sequence
  Description of Artificial Sequence: Synthetic oligonucleotide
  Sense strand starting at position 2761 of SEQ ID NO: 1563735
ggucaauugccacaaguca

SEQ ID NO: 1827952 - RNA, 19 nt, Artificial Sequence
  Description of Artificial Sequence: Synthetic oligonucleotide
  Antisense strand to SEQ ID NO: 1827951
ugacuuguggcaauugacc

SEQ ID NO: 1827953 - RNA, 19 nt, Artificial Sequence
  Description of Artificial Sequence: Synthetic oligonucleotide
  Sense strand starting at position 3147 of SEQ ID NO: 1563735
gccugugccagcuagagau

SEQ ID NO: 1827954 - RNA, 19 nt, Artificial Sequence
  Description of Artificial Sequence: Synthetic oligonucleotide
  Antisense strand to SEQ ID NO: 1827953
aucucuagcuggcacaggc

SEQ ID NO: 1827955 - RNA, 19 nt, Artificial Sequence
  Description of Artificial Sequence: Synthetic oligonucleotide
  Sense strand starting at position 3230 of SEQ ID NO: 1563735
acacaucaugcacguguaa

SEQ ID NO: 1827956 - RNA, 19 nt, Artificial Sequence
  Description of Artificial Sequence: Synthetic oligonucleotide
  Antisense strand to SEQ ID NO: 1827955
uuacacgugcaugaugugu

SEQ ID NO: 1827957 - RNA, 19 nt, Artificial Sequence
  Description of Artificial Sequence: Synthetic oligonucleotide
  Sense strand starting at position 3259 of SEQ ID NO: 1563735
cgguuuauugaacagcuua

SEQ ID NO: 1827958 - RNA, 19 nt, Artificial Sequence
  Description of Artificial Sequence: Synthetic oligonucleotide
  Antisense strand to SEQ ID NO: 1827957
uaagcuguucaauaaaccg

SEQ ID NO: 1827959 - RNA, 19 nt, Artificial Sequence
  Description of Artificial Sequence: Synthetic oligonucleotide
  Sense strand starting at position 3409 of SEQ ID NO: 1563735
cgcagcagacuugaauuaa

SEQ ID NO: 1827960 - RNA, 19 nt, Artificial Sequence
  Description of Artificial Sequence: Synthetic oligonucleotide
  Antisense strand to SEQ ID NO: 1827959
uuaauucaagucugcugcg

SEQ ID NO: 1827961 - RNA, 19 nt, Artificial Sequence
  Description of Artificial Sequence: Synthetic oligonucleotide
  Sense strand starting at position 3472 of SEQ ID NO: 1563735
cucuucuccuggcugagaa

SEQ ID NO: 1827962 - RNA, 19 nt, Artificial Sequence
  Description of Artificial Sequence: Synthetic oligonucleotide
  Antisense strand to SEQ ID NO: 1827961
uucucagccaggagaagag

SEQ ID NO: 1827963 - RNA, 19 nt, Artificial Sequence
  Description of Artificial Sequence: Synthetic oligonucleotide
  Sense strand starting at position 3585 of SEQ ID NO: 1563735
accugcagugcuuggagaa

SEQ ID NO: 1827964 - RNA, 19 nt, Artificial Sequence
  Description of Artificial Sequence: Synthetic oligonucleotide
  Antisense strand to SEQ ID NO: 1827963
uucuccaagcacugcaggu

SEQ ID NO: 1827965 - RNA, 19 nt, Artificial Sequence
  Description of Artificial Sequence: Synthetic oligonucleotide
  Sense strand starting at position 3672 of SEQ ID NO: 1563735
gagacuuucccacgcauag

SEQ ID NO: 1827966 - RNA, 19 nt, Artificial Sequence
  Description of Artificial Sequence: Synthetic oligonucleotide
  Antisense strand to SEQ ID NO: 1827965
cuaugcgugggaaagucuc

SEQ ID NO: 1827967 - RNA, 19 nt, Artificial Sequence
  Description of Artificial Sequence: Synthetic oligonucleotide
  Sense strand starting at position 3706 of SEQ ID NO: 1563735
ccguuucugcucucagcaa

SEQ ID NO: 1827968 - RNA, 19 nt, Artificial Sequence
  Description of Artificial Sequence: Synthetic oligonucleotide
  Antisense strand to SEQ ID NO: 1827967
uugcugagagcagaaacgg

SEQ ID NO: 1827969 - RNA, 19 nt, Artificial Sequence
  Description of Artificial Sequence: Synthetic oligonucleotide
  Sense strand starting at position 3720 of SEQ ID NO: 1563735
agcaacauucucuaguguu

SEQ ID NO: 1827970 - RNA, 19 nt, Artificial Sequence
  Description of Artificial Sequence: Synthetic oligonucleotide
  Antisense strand to SEQ ID NO: 1827969
aacacuagagaauguugcu

SEQ ID NO: 1827971 - RNA, 19 nt, Artificial Sequence
  Description of Artificial Sequence: Synthetic oligonucleotide
  Sense strand starting at position 3770 of SEQ ID NO: 1563735
gcuagccacuauucugaga

SEQ ID NO: 1827972 - RNA, 19 nt, Artificial Sequence
  Description of Artificial Sequence: Synthetic oligonucleotide
  Antisense strand to SEQ ID NO: 1827971
ucucagaauaguggcuagc

SEQ ID NO: 1827973 - RNA, 19 nt, Artificial Sequence
  Description of Artificial Sequence: Synthetic oligonucleotide
  Sense strand starting at position 3778 of SEQ ID NO: 1563735
cuauucugagaacgucaga

SEQ ID NO: 1827974 - RNA, 19 nt, Artificial Sequence
  Description of Artificial Sequence: Synthetic oligonucleotide
  Antisense strand to SEQ ID NO: 1827973
ucugacguucucagaauag

SEQ ID NO: 1827975 - RNA, 19 nt, Artificial Sequence
  Description of Artificial Sequence: Synthetic oligonucleotide
  Sense strand starting at position 145 of SEQ ID NO: 1563736
cguucacaucgucaagguu

SEQ ID NO: 1827976 - RNA, 19 nt, Artificial Sequence
  Description of Artificial Sequence: Synthetic oligonucleotide
  Antisense strand to SEQ ID NO: 1827975
aaccuugacgaugugaacg

SEQ ID NO: 1827977 - RNA, 19 nt, Artificial Sequence
  Description of Artificial Sequence: Synthetic oligonucleotide
  Sense strand starting at position 210 of SEQ ID NO: 1563736
ggcagauuaggguguccau

SEQ ID NO: 1827978 - RNA, 19 nt, Artificial Sequence
  Description of Artificial Sequence: Synthetic oligonucleotide
  Antisense strand to SEQ ID NO: 1827977
auggacacccuaaucugcc

SEQ ID NO: 1827979 - RNA, 19 nt, Artificial Sequence
  Description of Artificial Sequence: Synthetic oligonucleotide
  Sense strand starting at position 235 of SEQ ID NO: 1563736
cggaaagggucuuugaagu

SEQ ID NO: 1827980 - RNA, 19 nt, Artificial Sequence
  Description of Artificial Sequence: Synthetic oligonucleotide
  Antisense strand to SEQ ID NO: 1827979
acuucaaagacccuuuccg

SEQ ID NO: 1827981 - RNA, 19 nt, Artificial Sequence
  Description of Artificial Sequence: Synthetic oligonucleotide
  Sense strand starting at position 458 of SEQ ID NO: 1563736
gggugacagugguacaaau

SEQ ID NO: 1827982 - RNA, 19 nt, Artificial Sequence
  Description of Artificial Sequence: Synthetic oligonucleotide
  Antisense strand to SEQ ID NO: 1827981
auuuguaccacugucaccc

SEQ ID NO: 1827983 - RNA, 19 nt, Artificial Sequence
  Description of Artificial Sequence: Synthetic oligonucleotide
  Sense strand starting at position 593 of SEQ ID NO: 1563736
cuuggcaccugugauauuu

SEQ ID NO: 1827984 - RNA, 19 nt, Artificial Sequence
  Description of Artificial Sequence: Synthetic oligonucleotide
  Antisense strand to SEQ ID NO: 1827983
aaauaucacaggugccaag

SEQ ID NO: 1827985 - RNA, 19 nt, Artificial Sequence
  Description of Artificial Sequence: Synthetic oligonucleotide
  Sense strand starting at position 808 of SEQ ID NO: 1563736
agaggcuugucguucauua

SEQ ID NO: 1827986 - RNA, 19 nt, Artificial Sequence
  Description of Artificial Sequence: Synthetic oligonucleotide
  Antisense strand to SEQ ID NO: 1827985
uaaugaacgacaagccucu

SEQ ID NO: 1827987 - RNA, 19 nt, Artificial Sequence
  Description of Artificial Sequence: Synthetic oligonucleotide
  Sense strand starting at position 2070 of SEQ ID NO: 1563736
cgggugucugcggucacau

SEQ ID NO: 1827988 - RNA, 19 nt, Artificial Sequence
  Description of Artificial Sequence: Synthetic oligonucleotide
  Antisense strand to SEQ ID NO: 1827987
augugaccgcagacacccg

SEQ ID NO: 1827989 - RNA, 19 nt, Artificial Sequence
  Description of Artificial Sequence: Synthetic oligonucleotide
  Sense strand starting at position 2105 of SEQ ID NO: 1563736
gcuguuggccuucgagcau

SEQ ID NO: 1827990 - RNA, 19 nt, Artificial Sequence
  Description of Artificial Sequence: Synthetic oligonucleotide
  Antisense strand to SEQ ID NO: 1827989
augcucgaaggccaacagc

SEQ ID NO: 1827991 - RNA, 19 nt, Artificial Sequence
  Description of Artificial Sequence: Synthetic oligonucleotide
  Sense strand starting at position 2137 of SEQ ID NO: 1563736
uggccagugucuccagaga

SEQ ID NO: 1827992 - RNA, 19 nt, Artificial Sequence
  Description of Artificial Sequence: Synthetic oligonucleotide
  Antisense strand to SEQ ID NO: 1827991
ucucuggagacacuggcca

SEQ ID NO: 1827993 - RNA, 19 nt, Artificial Sequence
  Description of Artificial Sequence: Synthetic oligonucleotide
  Sense strand starting at position 2180 of SEQ ID NO: 1563736
gguccaucucugcaacagu

SEQ ID NO: 1827994 - RNA, 19 nt, Artificial Sequence
  Description of Artificial Sequence: Synthetic oligonucleotide
  Antisense strand to SEQ ID NO: 1827993
acuguugcagagauggacc

SEQ ID NO: 1827995 - RNA, 19 nt, Artificial Sequence
  Description of Artificial Sequence: Synthetic oligonucleotide
  Sense strand starting at position 2193 of SEQ ID NO: 1563736
aacaguuguuccuuuggga

SEQ ID NO: 1827996 - RNA, 19 nt, Artificial Sequence
  Description of Artificial Sequence: Synthetic oligonucleotide
  Antisense strand to SEQ ID NO: 1827995
ucccaaaggaacaacuguu

SEQ ID NO: 1827997 - RNA, 19 nt, Artificial Sequence
  Description of Artificial Sequence: Synthetic oligonucleotide
  Sense strand starting at position 2311 of SEQ ID NO: 1563736
acucgauucugggcacaga

SEQ ID NO: 1827998 - RNA, 19 nt, Artificial Sequence
  Description of Artificial Sequence: Synthetic oligonucleotide
  Antisense strand to SEQ ID NO: 1827997
ucugugcccagaaucgagu

SEQ ID NO: 1827999 - RNA, 19 nt, Artificial Sequence
  Description of Artificial Sequence: Synthetic oligonucleotide
  Sense strand starting at position 2324 of SEQ ID NO: 1563736
cacagagcucagugaccuu

SEQ ID NO: 1828000 - RNA, 19 nt, Artificial Sequence
  Description of Artificial Sequence: Synthetic oligonucleotide
  Antisense strand to SEQ ID NO: 1827999
aaggucacugagcucugug

SEQ ID NO: 1828001 - RNA, 19 nt, Artificial Sequence
  Description of Artificial Sequence: Synthetic oligonucleotide
  Sense strand starting at position 2368 of SEQ ID NO: 1563736
gccuccacgcuugagacau

SEQ ID NO: 1828002 - RNA, 19 nt, Artificial Sequence
  Description of Artificial Sequence: Synthetic oligonucleotide
  Antisense strand to SEQ ID NO: 1828001
augucucaagcguggaggc

SEQ ID NO: 1828003 - RNA, 19 nt, Artificial Sequence
  Description of Artificial Sequence: Synthetic oligonucleotide
  Sense strand starting at position 2605 of SEQ ID NO: 1563736
ggcaguugggucagagcua

SEQ ID NO: 1828004 - RNA, 19 nt, Artificial Sequence
  Description of Artificial Sequence: Synthetic oligonucleotide
  Antisense strand to SEQ ID NO: 1828003
uagcucugacccaacugcc

SEQ ID NO: 1828005 - RNA, 19 nt, Artificial Sequence
  Description of Artificial Sequence: Synthetic oligonucleotide
  Sense strand starting at position 2616 of SEQ ID NO: 1563736
cagagcuacuguugucacu

SEQ ID NO: 1828006 - RNA, 19 nt, Artificial Sequence
  Description of Artificial Sequence: Synthetic oligonucleotide
  Antisense strand to SEQ ID NO: 1828005
agugacaacaguagcucug

SEQ ID NO: 1828007 - RNA, 19 nt, Artificial Sequence
  Description of Artificial Sequence: Synthetic oligonucleotide
  Sense strand starting at position 2662 of SEQ ID NO: 1563736
ucggaaaucucaugagccu

SEQ ID NO: 1828008 - RNA, 19 nt, Artificial Sequence
  Description of Artificial Sequence: Synthetic oligonucleotide
  Antisense strand to SEQ ID NO: 1828007
aggcucaugagauuuccga

SEQ ID NO: 1828009 - RNA, 19 nt, Artificial Sequence
  Description of Artificial Sequence: Synthetic oligonucleotide
  Sense strand starting at position 2663 of SEQ ID NO: 1563736
cggaaaucucaugagccua

SEQ ID NO: 1828010 - RNA, 19 nt, Artificial Sequence
  Description of Artificial Sequence: Synthetic oligonucleotide
  Antisense strand to SEQ ID NO: 1828009
uaggcucaugagauuuccg

SEQ ID NO: 1828011 - RNA, 19 nt, Artificial Sequence
  Description of Artificial Sequence: Synthetic oligonucleotide
  Sense strand starting at position 2740 of SEQ ID NO: 1563736
cacagcaacuggugaauuu

SEQ ID NO: 1828012 - RNA, 19 nt, Artificial Sequence
  Description of Artificial Sequence: Synthetic oligonucleotide
  Antisense strand to SEQ ID NO: 1828011
aaauucaccaguugcugug

SEQ ID NO: 1828013 - RNA, 19 nt, Artificial Sequence
  Description of Artificial Sequence: Synthetic oligonucleotide
  Sense strand starting at position 2749 of SEQ ID NO: 1563736
uggugaauuuccuggucaa

SEQ ID NO: 1828014 - RNA, 19 nt, Artificial Sequence
  Description of Artificial Sequence: Synthetic oligonucleotide
  Antisense strand to SEQ ID NO: 1828013
uugaccaggaaauucacca

SEQ ID NO: 1828015 - RNA, 19 nt, Artificial Sequence
  Description of Artificial Sequence: Synthetic oligonucleotide
  Sense strand starting at position 2762 of SEQ ID NO: 1563736
ggucaauugccacaaguca

SEQ ID NO: 1828016 - RNA, 19 nt, Artificial Sequence
  Description of Artificial Sequence: Synthetic oligonucleotide
  Antisense strand to SEQ ID NO: 1828015
ugacuuguggcaauugacc

SEQ ID NO: 1828017 - RNA, 19 nt, Artificial Sequence
  Description of Artificial Sequence: Synthetic oligonucleotide
  Sense strand starting at position 2934 of SEQ ID NO: 1563736
gacagugucugcugcagau

SEQ ID NO: 1828018 - RNA, 19 nt, Artificial Sequence
  Description of Artificial Sequence: Synthetic oligonucleotide
  Antisense strand to SEQ ID NO: 1828017
aucugcagcagacacuguc

SEQ ID NO: 1828019 - RNA, 19 nt, Artificial Sequence
  Description of Artificial Sequence: Synthetic oligonucleotide
  Sense strand starting at position 3148 of SEQ ID NO: 1563736
gccugugccagcuagagau

SEQ ID NO: 1828020 - RNA, 19 nt, Artificial Sequence
  Description of Artificial Sequence: Synthetic oligonucleotide
  Antisense strand to SEQ ID NO: 1828019
aucucuagcuggcacaggc

SEQ ID NO: 1828021 - RNA, 19 nt, Artificial Sequence
  Description of Artificial Sequence: Synthetic oligonucleotide
  Sense strand starting at position 3231 of SEQ ID NO: 1563736
acacaucaugcacguguaa

SEQ ID NO: 1828022 - RNA, 19 nt, Artificial Sequence
  Description of Artificial Sequence: Synthetic oligonucleotide
  Antisense strand to SEQ ID NO: 1828021
uuacacgugcaugaugugu

SEQ ID NO: 1828023 - RNA, 19 nt, Artificial Sequence
  Description of Artificial Sequence: Synthetic oligonucleotide
  Sense strand starting at position 474 of SEQ ID NO: 1563737
uuguaucauugacuugcaa

SEQ ID NO: 1828024 - RNA, 19 nt, Artificial Sequence
  Description of Artificial Sequence: Synthetic oligonucleotide
  Antisense strand to SEQ ID NO: 1828023
uugcaagucaaugauacaa

SEQ ID NO: 1828025 - RNA, 19 nt, Artificial Sequence
  Description of Artificial Sequence: Synthetic oligonucleotide
  Sense strand starting at position 491 of SEQ ID NO: 1563737
aagucaauuugugugcuau

SEQ ID NO: 1828026 - RNA, 19 nt, Artificial Sequence
  Description of Artificial Sequence: Synthetic oligonucleotide
  Antisense strand to SEQ ID NO: 1828025
auagcacacaaauugacuu

SEQ ID NO: 1828027 - RNA, 19 nt, Artificial Sequence
  Description of Artificial Sequence: Synthetic oligonucleotide
  Sense strand starting at position 492 of SEQ ID NO: 1563737
agucaauuugugugcuauu

SEQ ID NO: 1828028 - RNA, 19 nt, Artificial Sequence
  Description of Artificial Sequence: Synthetic oligonucleotide
  Antisense strand to SEQ ID NO: 1828027
aauagcacacaaauugacu

SEQ ID NO: 1828029 - RNA, 19 nt, Artificial Sequence
  Description of Artificial Sequence: Synthetic oligonucleotide
  Sense strand starting at position 493 of SEQ ID NO: 1563737
gucaauuugugugcuauua

SEQ ID NO: 1828030 - RNA, 19 nt, Artificial Sequence
  Description of Artificial Sequence: Synthetic oligonucleotide
  Antisense strand to SEQ ID NO: 1828029
uaauagcacacaaauugac

SEQ ID NO: 1828031 - RNA, 19 nt, Artificial Sequence
  Description of Artificial Sequence: Synthetic oligonucleotide
  Sense strand starting at position 517 of SEQ ID NO: 1563737
cccuuuccugcucaugaga

SEQ ID NO: 1828032 - RNA, 19 nt, Artificial Sequence
  Description of Artificial Sequence: Synthetic oligonucleotide
  Antisense strand to SEQ ID NO: 1828031
ucucaugagcaggaaaggg

SEQ ID NO: 1828033 - RNA, 19 nt, Artificial Sequence
  Description of Artificial Sequence: Synthetic oligonucleotide
  Sense strand starting at position 526 of SEQ ID NO: 1563737
gcucaugagagccagauua

SEQ ID NO: 1828034 - RNA, 19 nt, Artificial Sequence
  Description of Artificial Sequence: Synthetic oligonucleotide
  Antisense strand to SEQ ID NO: 1828033
uaaucuggcucucaugagc

SEQ ID NO: 1828035 - RNA, 19 nt, Artificial Sequence
  Description of Artificial Sequence: Synthetic oligonucleotide
  Sense strand starting at position 692 of SEQ ID NO: 1563737
uuauuccugugguuauaug

SEQ ID NO: 1828036 - RNA, 19 nt, Artificial Sequence
  Description of Artificial Sequence: Synthetic oligonucleotide
  Antisense strand to SEQ ID NO: 1828035
cauauaaccacaggaauaa

SEQ ID NO: 1828037 - RNA, 19 nt, Artificial Sequence
  Description of Artificial Sequence: Synthetic oligonucleotide
  Sense strand starting at position 976 of SEQ ID NO: 1563737
agacaagauuaauaaagca

SEQ ID NO: 1828038 - RNA, 19 nt, Artificial Sequence
  Description of Artificial Sequence: Synthetic oligonucleotide
  Antisense strand to SEQ ID NO: 1828037
ugcuuuauuaaucuugucu

SEQ ID NO: 1828039 - RNA, 19 nt, Artificial Sequence
  Description of Artificial Sequence: Synthetic oligonucleotide
  Sense strand starting at position 2076 of SEQ ID NO: 1563737
gaaggaaggcgugggaaua

SEQ ID NO: 1828040 - RNA, 19 nt, Artificial Sequence
  Description of Artificial Sequence: Synthetic oligonucleotide
  Antisense strand to SEQ ID NO: 1828039
uauucccacgccuuccuuc

SEQ ID NO: 1828041 - RNA, 19 nt, Artificial Sequence
  Description of Artificial Sequence: Synthetic oligonucleotide
  Sense strand starting at position 2170 of SEQ ID NO: 1563737
uuucucuggcuucgagaaa

SEQ ID NO: 1828042 - RNA, 19 nt, Artificial Sequence
  Description of Artificial Sequence: Synthetic oligonucleotide
  Antisense strand to SEQ ID NO: 1828041
uuucucgaagccagagaaa

SEQ ID NO: 1828043 - RNA, 19 nt, Artificial Sequence
  Description of Artificial Sequence: Synthetic oligonucleotide
  Sense strand starting at position 2266 of SEQ ID NO: 1563737
gggauagacaccggaucuu

SEQ ID NO: 1828044 - RNA, 19 nt, Artificial Sequence
  Description of Artificial Sequence: Synthetic oligonucleotide
  Antisense strand to SEQ ID NO: 1828043
aagauccggugucuauccc

SEQ ID NO: 1828045 - RNA, 19 nt, Artificial Sequence
  Description of Artificial Sequence: Synthetic oligonucleotide
  Sense strand starting at position 2331 of SEQ ID NO: 1563737
ugcggaaugagcgaaugaa

SEQ ID NO: 1828046 - RNA, 19 nt, Artificial Sequence
  Description of Artificial Sequence: Synthetic oligonucleotide
  Antisense strand to SEQ ID NO: 1828045
uucauucgcucauuccgca

SEQ ID NO: 1828047 - RNA, 19 nt, Artificial Sequence
  Description of Artificial Sequence: Synthetic oligonucleotide
  Sense strand starting at position 2561 of SEQ ID NO: 1563737
agcuuuauuggccgggaaa

SEQ ID NO: 1828048 - RNA, 19 nt, Artificial Sequence
  Description of Artificial Sequence: Synthetic oligonucleotide
  Antisense strand to SEQ ID NO: 1828047
uuucccggccaauaaagcu

SEQ ID NO: 1828049 - RNA, 19 nt, Artificial Sequence
  Description of Artificial Sequence: Synthetic oligonucleotide
  Sense strand starting at position 2563 of SEQ ID NO: 1563737
cuuuauuggccgggaaacu

SEQ ID NO: 1828050 - RNA, 19 nt, Artificial Sequence
  Description of Artificial Sequence: Synthetic oligonucleotide
  Antisense strand to SEQ ID NO: 1828049
aguuucccggccaauaaag

SEQ ID NO: 1828051 - RNA, 19 nt, Artificial Sequence
  Description of Artificial Sequence: Synthetic oligonucleotide
  Sense strand starting at position 2800 of SEQ ID NO: 1563737
augguuggcaccugacaga

SEQ ID NO: 1828052 - RNA, 19 nt, Artificial Sequence
  Description of Artificial Sequence: Synthetic oligonucleotide
  Antisense strand to SEQ ID NO: 1828051
ucugucaggugccaaccau

SEQ ID NO: 1828053 - RNA, 19 nt, Artificial Sequence
  Description of Artificial Sequence: Synthetic oligonucleotide
  Sense strand starting at position 2860 of SEQ ID NO: 1563737
ccagguccucuuuacacua

SEQ ID NO: 1828054 - RNA, 19 nt, Artificial Sequence
  Description of Artificial Sequence: Synthetic oligonucleotide
  Antisense strand to SEQ ID NO: 1828053
uaguguaaagaggaccugg

SEQ ID NO: 1828055 - RNA, 19 nt, Artificial Sequence
  Description of Artificial Sequence: Synthetic oligonucleotide
  Sense strand starting at position 2904 of SEQ ID NO: 1563737
uuguuugugguuuauacuu

SEQ ID NO: 1828056 - RNA, 19 nt, Artificial Sequence
  Description of Artificial Sequence: Synthetic oligonucleotide
  Antisense strand to SEQ ID NO: 1828055
aaguauaaaccacaaacaa

SEQ ID NO: 1828057 - RNA, 19 nt, Artificial Sequence
  Description of Artificial Sequence: Synthetic oligonucleotide
  Sense strand starting at position 2909 of SEQ ID NO: 1563737
ugugguuuauacuuaccaa

SEQ ID NO: 1828058 - RNA, 19 nt, Artificial Sequence
  Description of Artificial Sequence: Synthetic oligonucleotide
  Antisense strand to SEQ ID NO: 1828057
uugguaaguauaaaccaca

SEQ ID NO: 1828059 - RNA, 19 nt, Artificial Sequence
  Description of Artificial Sequence: Synthetic oligonucleotide
  Sense strand starting at position 2942 of SEQ ID NO: 1563737
aaugaaagcggcuguuaaa

SEQ ID NO: 1828060 - RNA, 19 nt, Artificial Sequence
  Description of Artificial Sequence: Synthetic oligonucleotide
  Antisense strand to SEQ ID NO: 1828059
uuuaacagccgcuuucauu

SEQ ID NO: 1828061 - RNA, 19 nt, Artificial Sequence
  Description of Artificial Sequence: Synthetic oligonucleotide
  Sense strand starting at position 3021 of SEQ ID NO: 1563737
gggcuugagguccgggaaa

SEQ ID NO: 1828062 - RNA, 19 nt, Artificial Sequence
  Description of Artificial Sequence: Synthetic oligonucleotide
  Antisense strand to SEQ ID NO: 1828061
uuucccggaccucaagccc

SEQ ID NO: 1828063 - RNA, 19 nt, Artificial Sequence
  Description of Artificial Sequence: Synthetic oligonucleotide
  Sense strand starting at position 3061 of SEQ ID NO: 1563737
ucacuauuccagugaccuu

SEQ ID NO: 1828064 - RNA, 19 nt, Artificial Sequence
  Description of Artificial Sequence: Synthetic oligonucleotide
  Antisense strand to SEQ ID NO: 1828063
aaggucacuggaauaguga

SEQ ID NO: 1828065 - RNA, 19 nt, Artificial Sequence
  Description of Artificial Sequence: Synthetic oligonucleotide
  Sense strand starting at position 3133 of SEQ ID NO: 1563737
acaccaguugugugaaucu

SEQ ID NO: 1828066 - RNA, 19 nt, Artificial Sequence
  Description of Artificial Sequence: Synthetic oligonucleotide
  Antisense strand to SEQ ID NO: 1828065
agauucacacaacuggugu

SEQ ID NO: 1828067 - RNA, 19 nt, Artificial Sequence
  Description of Artificial Sequence: Synthetic oligonucleotide
  Sense strand starting at position 3177 of SEQ ID NO: 1563737
uuaauaguuuggguuaguu

SEQ ID NO: 1828068 - RNA, 19 nt, Artificial Sequence
  Description of Artificial Sequence: Synthetic oligonucleotide
  Antisense strand to SEQ ID NO: 1828067
aacuaacccaaacuauuaa

SEQ ID NO: 1828069 - RNA, 19 nt, Artificial Sequence
  Description of Artificial Sequence: Synthetic oligonucleotide
  Sense strand starting at position 3238 of SEQ ID NO: 1563737
gcaggaacucuuggagaac

SEQ ID NO: 1828070 - RNA, 19 nt, Artificial Sequence
  Description of Artificial Sequence: Synthetic oligonucleotide
  Antisense strand to SEQ ID NO: 1828069
guucuccaagaguuccugc

SEQ ID NO: 1828071 - RNA, 19 nt, Artificial Sequence
  Description of Artificial Sequence: Synthetic oligonucleotide
  Sense strand starting at position 3254 of SEQ ID NO: 1563737
aacugaauuugugugcacu

SEQ ID NO: 1828072 - RNA, 19 nt, Artificial Sequence
  Description of Artificial Sequence: Synthetic oligonucleotide
  Antisense strand to SEQ ID NO: 1828071
agugcacacaaauucaguu

SEQ ID NO: 1828073 - RNA, 19 nt, Artificial Sequence
  Description of Artificial Sequence: Synthetic oligonucleotide
  Sense strand starting at position 3255 of SEQ ID NO: 1563737
acugaauuugugugcacuu

SEQ ID NO: 1828074 - RNA, 19 nt, Artificial Sequence
  Description of Artificial Sequence: Synthetic oligonucleotide
  Antisense strand to SEQ ID NO: 1828073
aagugcacacaaauucagu

SEQ ID NO: 1828075 - RNA, 19 nt, Artificial Sequence
  Description of Artificial Sequence: Synthetic oligonucleotide
  Sense strand starting at position 3256 of SEQ ID NO: 1563737
cugaauuugugugcacuuu

SEQ ID NO: 1828076 - RNA, 19 nt, Artificial Sequence
  Description of Artificial Sequence: Synthetic oligonucleotide
  Antisense strand to SEQ ID NO: 1828075
aaagugcacacaaauucag

SEQ ID NO: 1828077 - RNA, 19 nt, Artificial Sequence
  Description of Artificial Sequence: Synthetic oligonucleotide
  Sense strand starting at position 3302 of SEQ ID NO: 1563737
aggcuuaaacuuugcuaaa

SEQ ID NO: 1828078 - RNA, 19 nt, Artificial Sequence
  Description of Artificial Sequence: Synthetic oligonucleotide
  Antisense strand to SEQ ID NO: 1828077
uuuagcaaaguuuaagccu

SEQ ID NO: 1828079 - RNA, 19 nt, Artificial Sequence
  Description of Artificial Sequence: Synthetic oligonucleotide
  Sense strand starting at position 3303 of SEQ ID NO: 1563737
ggcuuaaacuuugcuaaau

SEQ ID NO: 1828080 - RNA, 19 nt, Artificial Sequence
  Description of Artificial Sequence: Synthetic oligonucleotide
  Antisense strand to SEQ ID NO: 1828079
auuuagcaaaguuuaagcc

SEQ ID NO: 1828081 - RNA, 19 nt, Artificial Sequence
  Description of Artificial Sequence: Synthetic oligonucleotide
  Sense strand starting at position 3392 of SEQ ID NO: 1563737
ccgaguucacagcauaggu

SEQ ID NO: 1828082 - RNA, 19 nt, Artificial Sequence
  Description of Artificial Sequence: Synthetic oligonucleotide
  Antisense strand to SEQ ID NO: 1828081
accuaugcugugaacucgg

SEQ ID NO: 1828083 - RNA, 19 nt, Artificial Sequence
  Description of Artificial Sequence: Synthetic oligonucleotide
  Sense strand starting at position 3608 of SEQ ID NO: 1563737
guaagaaccucucccagaa

SEQ ID NO: 1828084 - RNA, 19 nt, Artificial Sequence
  Description of Artificial Sequence: Synthetic oligonucleotide
  Antisense strand to SEQ ID NO: 1828083
uucugggagagguucuuac

SEQ ID NO: 1828085 - RNA, 19 nt, Artificial Sequence
  Description of Artificial Sequence: Synthetic oligonucleotide
  Sense strand starting at position 3622 of SEQ ID NO: 1563737
cagaaaguuugaguaugga

SEQ ID NO: 1828086 - RNA, 19 nt, Artificial Sequence
  Description of Artificial Sequence: Synthetic oligonucleotide
  Antisense strand to SEQ ID NO: 1828085
uccauacucaaacuuucug

SEQ ID NO: 1828087 - RNA, 19 nt, Artificial Sequence
  Description of Artificial Sequence: Synthetic oligonucleotide
  Sense strand starting at position 3625 of SEQ ID NO: 1563737
aaaguuugaguauggaaca

SEQ ID NO: 1828088 - RNA, 19 nt, Artificial Sequence
  Description of Artificial Sequence: Synthetic oligonucleotide
  Antisense strand to SEQ ID NO: 1828087
uguuccauacucaaacuuu

SEQ ID NO: 1828089 - RNA, 19 nt, Artificial Sequence
  Description of Artificial Sequence: Synthetic oligonucleotide
  Sense strand starting at position 3646 of SEQ ID NO: 1563737
cagggauguggucagagua

SEQ ID NO: 1828090 - RNA, 19 nt, Artificial Sequence
  Description of Artificial Sequence: Synthetic oligonucleotide
  Antisense strand to SEQ ID NO: 1828089
uacucugaccacaucccug

SEQ ID NO: 1828091 - RNA, 19 nt, Artificial Sequence
  Description of Artificial Sequence: Synthetic oligonucleotide
  Sense strand starting at position 3676 of SEQ ID NO: 1563737
aggagauacucccagggaa

SEQ ID NO: 1828092 - RNA, 19 nt, Artificial Sequence
  Description of Artificial Sequence: Synthetic oligonucleotide
  Antisense strand to SEQ ID NO: 1828091
uucccugggaguaucuccu

SEQ ID NO: 1828093 - RNA, 19 nt, Artificial Sequence
  Description of Artificial Sequence: Synthetic oligonucleotide
  Sense strand starting at position 3769 of SEQ ID NO: 1563737
gggucacugagucacuaua

SEQ ID NO: 1828094 - RNA, 19 nt, Artificial Sequence
  Description of Artificial Sequence: Synthetic oligonucleotide
  Antisense strand to SEQ ID NO: 1828093
uauagugacucagugaccc

SEQ ID NO: 1828095 - RNA, 19 nt, Artificial Sequence
  Description of Artificial Sequence: Synthetic oligonucleotide
  Sense strand starting at position 3771 of SEQ ID NO: 1563737
gucacugagucacuauacu

SEQ ID NO: 1828096 - RNA, 19 nt, Artificial Sequence
  Description of Artificial Sequence: Synthetic oligonucleotide
  Antisense strand to SEQ ID NO: 1828095
aguauagugacucagugac

SEQ ID NO: 1828097 - RNA, 19 nt, Artificial Sequence
  Description of Artificial Sequence: Synthetic oligonucleotide
  Sense strand starting at position 3840 of SEQ ID NO: 1563737
cuguuuggucgugagaacu

SEQ ID NO: 1828098 - RNA, 19 nt, Artificial Sequence
  Description of Artificial Sequence: Synthetic oligonucleotide
  Antisense strand to SEQ ID NO: 1828097
aguucucacgaccaaacag

SEQ ID NO: 1828099 - RNA, 19 nt, Artificial Sequence
  Description of Artificial Sequence: Synthetic oligonucleotide
  Sense strand starting at position 3943 of SEQ ID NO: 1563737
cucccuaaugacugaggua

SEQ ID NO: 1828100 - RNA, 19 nt, Artificial Sequence
  Description of Artificial Sequence: Synthetic oligonucleotide
  Antisense strand to SEQ ID NO: 1828099
uaccucagucauuagggag

SEQ ID NO: 1828101 - RNA, 19 nt, Artificial Sequence
  Description of Artificial Sequence: Synthetic oligonucleotide
  Sense strand starting at position 3964 of SEQ ID NO: 1563737
cugaaagcaucucugucuu

SEQ ID NO: 1828102 - RNA, 19 nt, Artificial Sequence
  Description of Artificial Sequence: Synthetic oligonucleotide
  Antisense strand to SEQ ID NO: 1828101
aagacagagaugcuuucag

SEQ ID NO: 1828103 - RNA, 19 nt, Artificial Sequence
  Description of Artificial Sequence: Synthetic oligonucleotide
  Sense strand starting at position 22 of SEQ ID NO: 1563738
aguguuucuguggauaaua

SEQ ID NO: 1828104 - RNA, 19 nt, Artificial Sequence
  Description of Artificial Sequence: Synthetic oligonucleotide
  Antisense strand to SEQ ID NO: 1828103
uauuauccacagaaacacu

SEQ ID NO: 1828105 - RNA, 19 nt, Artificial Sequence
  Description of Artificial Sequence: Synthetic oligonucleotide
  Sense strand starting at position 24 of SEQ ID NO: 1563738
uguuucuguggauaauagu

SEQ ID NO: 1828106 - RNA, 19 nt, Artificial Sequence
  Description of Artificial Sequence: Synthetic oligonucleotide
  Antisense strand to SEQ ID NO: 1828105
acuauuauccacagaaaca

SEQ ID NO: 1828107 - RNA, 19 nt, Artificial Sequence
  Description of Artificial Sequence: Synthetic oligonucleotide
  Sense strand starting at position 30 of SEQ ID NO: 1563738
uguggauaauaguuguagu

SEQ ID NO: 1828108 - RNA, 19 nt, Artificial Sequence
  Description of Artificial Sequence: Synthetic oligonucleotide
  Antisense strand to SEQ ID NO: 1828107
acuacaacuauuauccaca

SEQ ID NO: 1828109 - RNA, 19 nt, Artificial Sequence
  Description of Artificial Sequence: Synthetic oligonucleotide
  Sense strand starting at position 56 of SEQ ID NO: 1563738
guauaaaugcaagaauagu

SEQ ID NO: 1828110 - RNA, 19 nt, Artificial Sequence
  Description of Artificial Sequence: Synthetic oligonucleotide
  Antisense strand to SEQ ID NO: 1828109
acuauucuugcauuuauac

SEQ ID NO: 1828111 - RNA, 19 nt, Artificial Sequence
  Description of Artificial Sequence: Synthetic oligonucleotide
  Sense strand starting at position 62 of SEQ ID NO: 1563738
augcaagaauagucaccuu

SEQ ID NO: 1828112 - RNA, 19 nt, Artificial Sequence
  Description of Artificial Sequence: Synthetic oligonucleotide
  Antisense strand to SEQ ID NO: 1828111
aaggugacuauucuugcau

SEQ ID NO: 1828113 - RNA, 19 nt, Artificial Sequence
  Description of Artificial Sequence: Synthetic oligonucleotide
  Sense strand starting at position 328 of SEQ ID NO: 1563738
uuucucuuacuguacagau

SEQ ID NO: 1828114 - RNA, 19 nt, Artificial Sequence
  Description of Artificial Sequence: Synthetic oligonucleotide
  Antisense strand to SEQ ID NO: 1828113
aucuguacaguaagagaaa

SEQ ID NO: 1828115 - RNA, 19 nt, Artificial Sequence
  Description of Artificial Sequence: Synthetic oligonucleotide
  Sense strand starting at position 373 of SEQ ID NO: 1563738
cuuaaauaucuguaugcag

SEQ ID NO: 1828116 - RNA, 19 nt, Artificial Sequence
  Description of Artificial Sequence: Synthetic oligonucleotide
  Antisense strand to SEQ ID NO: 1828115
cugcauacagauauuuaag

SEQ ID NO: 1828117 - RNA, 19 nt, Artificial Sequence
  Description of Artificial Sequence: Synthetic oligonucleotide
  Sense strand starting at position 375 of SEQ ID NO: 1563738
uaaauaucuguaugcagag

SEQ ID NO: 1828118 - RNA, 19 nt, Artificial Sequence
  Description of Artificial Sequence: Synthetic oligonucleotide
  Antisense strand to SEQ ID NO: 1828117
cucugcauacagauauuua

SEQ ID NO: 1828119 - RNA, 19 nt, Artificial Sequence
  Description of Artificial Sequence: Synthetic oligonucleotide
  Sense strand starting at position 376 of SEQ ID NO: 1563738
aaauaucuguaugcagaga

SEQ ID NO: 1828120 - RNA, 19 nt, Artificial Sequence
  Description of Artificial Sequence: Synthetic oligonucleotide
  Antisense strand to SEQ ID NO: 1828119
ucucugcauacagauauuu

SEQ ID NO: 1828121 - RNA, 19 nt, Artificial Sequence
  Description of Artificial Sequence: Synthetic oligonucleotide
  Sense strand starting at position 907 of SEQ ID NO: 1563738
uuguaucauugacuugcaa

SEQ ID NO: 1828122 - RNA, 19 nt, Artificial Sequence
  Description of Artificial Sequence: Synthetic oligonucleotide
  Antisense strand to SEQ ID NO: 1828121
uugcaagucaaugauacaa

SEQ ID NO: 1828123 - RNA, 19 nt, Artificial Sequence
  Description of Artificial Sequence: Synthetic oligonucleotide
  Sense strand starting at position 924 of SEQ ID NO: 1563738
aagucaauuugugugcuau

SEQ ID NO: 1828124 - RNA, 19 nt, Artificial Sequence
  Description of Artificial Sequence: Synthetic oligonucleotide
  Antisense strand to SEQ ID NO: 1828123
auagcacacaaauugacuu

SEQ ID NO: 1828125 - RNA, 19 nt, Artificial Sequence
  Description of Artificial Sequence: Synthetic oligonucleotide
  Sense strand starting at position 925 of SEQ ID NO: 1563738
agucaauuugugugcuauu

SEQ ID NO: 1828126 - RNA, 19 nt, Artificial Sequence
  Description of Artificial Sequence: Synthetic oligonucleotide
  Antisense strand to SEQ ID NO: 1828125
aauagcacacaaauugacu

SEQ ID NO: 1828127 - RNA, 19 nt, Artificial Sequence
  Description of Artificial Sequence: Synthetic oligonucleotide
  Sense strand starting at position 926 of SEQ ID NO: 1563738
gucaauuugugugcuauua

SEQ ID NO: 1828128 - RNA, 19 nt, Artificial Sequence
  Description of Artificial Sequence: Synthetic oligonucleotide
  Antisense strand to SEQ ID NO: 1828127
uaauagcacacaaauugac

SEQ ID NO: 1828129 - RNA, 19 nt, Artificial Sequence
  Description of Artificial Sequence: Synthetic oligonucleotide
  Sense strand starting at position 950 of SEQ ID NO: 1563738
cccuuuccugcucaugaga

SEQ ID NO: 1828130 - RNA, 19 nt, Artificial Sequence
  Description of Artificial Sequence: Synthetic oligonucleotide
  Antisense strand to SEQ ID NO: 1828129
ucucaugagcaggaaaggg

SEQ ID NO: 1828131 - RNA, 19 nt, Artificial Sequence
  Description of Artificial Sequence: Synthetic oligonucleotide
  Sense strand starting at position 959 of SEQ ID NO: 1563738
gcucaugagagccagauua

SEQ ID NO: 1828132 - RNA, 19 nt, Artificial Sequence
  Description of Artificial Sequence: Synthetic oligonucleotide
  Antisense strand to SEQ ID NO: 1828131
uaaucuggcucucaugagc

SEQ ID NO: 1828133 - RNA, 19 nt, Artificial Sequence
  Description of Artificial Sequence: Synthetic oligonucleotide
  Sense strand starting at position 1125 of SEQ ID NO: 1563738
uuauuccugugguuauaug

SEQ ID NO: 1828134 - RNA, 19 nt, Artificial Sequence
  Description of Artificial Sequence: Synthetic oligonucleotide
  Antisense strand to SEQ ID NO: 1828133
cauauaaccacaggaauaa

SEQ ID NO: 1828135 - RNA, 19 nt, Artificial Sequence
  Description of Artificial Sequence: Synthetic oligonucleotide
  Sense strand starting at position 1409 of SEQ ID NO: 1563738
agacaagauuaauaaagca

SEQ ID NO: 1828136 - RNA, 19 nt, Artificial Sequence
  Description of Artificial Sequence: Synthetic oligonucleotide
  Antisense strand to SEQ ID NO: 1828135
ugcuuuauuaaucuugucu

SEQ ID NO: 1828137 - RNA, 19 nt, Artificial Sequence
  Description of Artificial Sequence: Synthetic oligonucleotide
  Sense strand starting at position 2509 of SEQ ID NO: 1563738
gaaggaaggcgugggaaua

SEQ ID NO: 1828138 - RNA, 19 nt, Artificial Sequence
  Description of Artificial Sequence: Synthetic oligonucleotide
  Antisense strand to SEQ ID NO: 1828137
uauucccacgccuuccuuc

SEQ ID NO: 1828139 - RNA, 19 nt, Artificial Sequence
  Description of Artificial Sequence: Synthetic oligonucleotide
  Sense strand starting at position 2603 of SEQ ID NO: 1563738
uuucucuggcuucgagaaa

SEQ ID NO: 1828140 - RNA, 19 nt, Artificial Sequence
  Description of Artificial Sequence: Synthetic oligonucleotide
  Antisense strand to SEQ ID NO: 1828139
uuucucgaagccagagaaa

SEQ ID NO: 1828141 - RNA, 19 nt, Artificial Sequence
  Description of Artificial Sequence: Synthetic oligonucleotide
  Sense strand starting at position 2699 of SEQ ID NO: 1563738
gggauagacaccggaucuu

SEQ ID NO: 1828142 - RNA, 19 nt, Artificial Sequence
  Description of Artificial Sequence: Synthetic oligonucleotide
  Antisense strand to SEQ ID NO: 1828141
aagauccggugucuauccc

SEQ ID NO: 1828143 - RNA, 19 nt, Artificial Sequence
  Description of Artificial Sequence: Synthetic oligonucleotide
  Sense strand starting at position 2764 of SEQ ID NO: 1563738
ugcggaaugagcgaaugaa

SEQ ID NO: 1828144 - RNA, 19 nt, Artificial Sequence
  Description of Artificial Sequence: Synthetic oligonucleotide
  Antisense strand to SEQ ID NO: 1828143
uucauucgcucauuccgca

SEQ ID NO: 1828145 - RNA, 19 nt, Artificial Sequence
  Description of Artificial Sequence: Synthetic oligonucleotide
  Sense strand starting at position 2921 of SEQ ID NO: 1563738
ugcagauuucaguggcgcu

SEQ ID NO: 1828146 - RNA, 19 nt, Artificial Sequence
  Description of Artificial Sequence: Synthetic oligonucleotide
  Antisense strand to SEQ ID NO: 1828145
agcgccacugaaaucugca

SEQ ID NO: 1828147 - RNA, 19 nt, Artificial Sequence
  Description of Artificial Sequence: Synthetic oligonucleotide
  Sense strand starting at position 2994 of SEQ ID NO: 1563738
agcuuuauuggccgggaaa

SEQ ID NO: 1828148 - RNA, 19 nt, Artificial Sequence
  Description of Artificial Sequence: Synthetic oligonucleotide
  Antisense strand to SEQ ID NO: 1828147
uuucccggccaauaaagcu

SEQ ID NO: 1828149 - RNA, 19 nt, Artificial Sequence
  Description of Artificial Sequence: Synthetic oligonucleotide
  Sense strand starting at position 2996 of SEQ ID NO: 1563738
cuuuauuggccgggaaacu

SEQ ID NO: 1828150 - RNA, 19 nt, Artificial Sequence
  Description of Artificial Sequence: Synthetic oligonucleotide
  Antisense strand to SEQ ID NO: 1828149
aguuucccggccaauaaag

SEQ ID NO: 1828151 - RNA, 19 nt, Artificial Sequence
  Description of Artificial Sequence: Synthetic oligonucleotide
  Sense strand starting at position 3233 of SEQ ID NO: 1563738
augguuggcaccugacaga

SEQ ID NO: 1828152 - RNA, 19 nt, Artificial Sequence
  Description of Artificial Sequence: Synthetic oligonucleotide
  Antisense strand to SEQ ID NO: 1828151
ucugucaggugccaaccau

SEQ ID NO: 1828153 - RNA, 19 nt, Artificial Sequence
  Description of Artificial Sequence: Synthetic oligonucleotide
  Sense strand starting at position 3293 of SEQ ID NO: 1563738
ccagguccucuuuacacua

SEQ ID NO: 1828154 - RNA, 19 nt, Artificial Sequence
  Description of Artificial Sequence: Synthetic oligonucleotide
  Antisense strand to SEQ ID NO: 1828153
uaguguaaagaggaccugg

SEQ ID NO: 1828155 - RNA, 19 nt, Artificial Sequence
  Description of Artificial Sequence: Synthetic oligonucleotide
  Sense strand starting at position 3337 of SEQ ID NO: 1563738
uuguuugugguuuauacuu

SEQ ID NO: 1828156 - RNA, 19 nt, Artificial Sequence
  Description of Artificial Sequence: Synthetic oligonucleotide
  Antisense strand to SEQ ID NO: 1828155
aaguauaaaccacaaacaa

SEQ ID NO: 1828157 - RNA, 19 nt, Artificial Sequence
  Description of Artificial Sequence: Synthetic oligonucleotide
  Sense strand starting at position 3342 of SEQ ID NO: 1563738
ugugguuuauacuuaccaa

SEQ ID NO: 1828158 - RNA, 19 nt, Artificial Sequence
  Description of Artificial Sequence: Synthetic oligonucleotide
  Antisense strand to SEQ ID NO: 1828157
uugguaaguauaaaccaca

SEQ ID NO: 1828159 - RNA, 19 nt, Artificial Sequence
  Description of Artificial Sequence: Synthetic oligonucleotide
  Sense strand starting at position 3375 of SEQ ID NO: 1563738
aaugaaagcggcuguuaaa

SEQ ID NO: 1828160 - RNA, 19 nt, Artificial Sequence
  Description of Artificial Sequence: Synthetic oligonucleotide
  Antisense strand to SEQ ID NO: 1828159
uuuaacagccgcuuucauu

SEQ ID NO: 1828161 - RNA, 19 nt, Artificial Sequence
  Description of Artificial Sequence: Synthetic oligonucleotide
  Sense strand starting at position 3454 of SEQ ID NO: 1563738
gggcuugagguccgggaaa

SEQ ID NO: 1828162 - RNA, 19 nt, Artificial Sequence
  Description of Artificial Sequence: Synthetic oligonucleotide
  Antisense strand to SEQ ID NO: 1828161
uuucccggaccucaagccc

SEQ ID NO: 1828163 - RNA, 19 nt, Artificial Sequence
  Description of Artificial Sequence: Synthetic oligonucleotide
  Sense strand starting at position 3494 of SEQ ID NO: 1563738
ucacuauuccagugaccuu

SEQ ID NO: 1828164 - RNA, 19 nt, Artificial Sequence
  Description of Artificial Sequence: Synthetic oligonucleotide
  Antisense strand to SEQ ID NO: 1828163
aaggucacuggaauaguga

SEQ ID NO: 1828165 - RNA, 19 nt, Artificial Sequence
  Description of Artificial Sequence: Synthetic oligonucleotide
  Sense strand starting at position 3566 of SEQ ID NO: 1563738
acaccaguugugugaaucu

SEQ ID NO: 1828166 - RNA, 19 nt, Artificial Sequence
  Description of Artificial Sequence: Synthetic oligonucleotide
  Antisense strand to SEQ ID NO: 1828165
agauucacacaacuggugu

SEQ ID NO: 1828167 - RNA, 19 nt, Artificial Sequence
  Description of Artificial Sequence: Synthetic oligonucleotide
  Sense strand starting at position 3610 of SEQ ID NO: 1563738
uuaauaguuuggguuaguu

SEQ ID NO: 1828168 - RNA, 19 nt, Artificial Sequence
  Description of Artificial Sequence: Synthetic oligonucleotide
  Antisense strand to SEQ ID NO: 1828167
aacuaacccaaacuauuaa

SEQ ID NO: 1828169 - RNA, 19 nt, Artificial Sequence
  Description of Artificial Sequence: Synthetic oligonucleotide
  Sense strand starting at position 3671 of SEQ ID NO: 1563738
gcaggaacucuuggagaac

SEQ ID NO: 1828170 - RNA, 19 nt, Artificial Sequence
  Description of Artificial Sequence: Synthetic oligonucleotide
  Antisense strand to SEQ ID NO: 1828169
guucuccaagaguuccugc

SEQ ID NO: 1828171 - RNA, 19 nt, Artificial Sequence
  Description of Artificial Sequence: Synthetic oligonucleotide
  Sense strand starting at position 3687 of SEQ ID NO: 1563738
aacugaauuugugugcacu

SEQ ID NO: 1828172 - RNA, 19 nt, Artificial Sequence
  Description of Artificial Sequence: Synthetic oligonucleotide
  Antisense strand to SEQ ID NO: 1828171
agugcacacaaauucaguu

SEQ ID NO: 1828173 - RNA, 19 nt, Artificial Sequence
  Description of Artificial Sequence: Synthetic oligonucleotide
  Sense strand starting at position 3688 of SEQ ID NO: 1563738
acugaauuugugugcacuu

SEQ ID NO: 1828174 - RNA, 19 nt, Artificial Sequence
  Description of Artificial Sequence: Synthetic oligonucleotide
  Antisense strand to SEQ ID NO: 1828173
aagugcacacaaauucagu

SEQ ID NO: 1828175 - RNA, 19 nt, Artificial Sequence
  Description of Artificial Sequence: Synthetic oligonucleotide
  Sense strand starting at position 3689 of SEQ ID NO: 1563738
cugaauuugugugcacuuu

SEQ ID NO: 1828176 - RNA, 19 nt, Artificial Sequence
  Description of Artificial Sequence: Synthetic oligonucleotide
  Antisense strand to SEQ ID NO: 1828175
aaagugcacacaaauucag

SEQ ID NO: 1828177 - RNA, 19 nt, Artificial Sequence
  Description of Artificial Sequence: Synthetic oligonucleotide
  Sense strand starting at position 3735 of SEQ ID NO: 1563738
aggcuuaaacuuugcuaaa

SEQ ID NO: 1828178 - RNA, 19 nt, Artificial Sequence
  Description of Artificial Sequence: Synthetic oligonucleotide
  Antisense strand to SEQ ID NO: 1828177
uuuagcaaaguuuaagccu

SEQ ID NO: 1828179 - RNA, 19 nt, Artificial Sequence
  Description of Artificial Sequence: Synthetic oligonucleotide
  Sense strand starting at position 3736 of SEQ ID NO: 1563738
ggcuuaaacuuugcuaaau

SEQ ID NO: 1828180 - RNA, 19 nt, Artificial Sequence
  Description of Artificial Sequence: Synthetic oligonucleotide
  Antisense strand to SEQ ID NO: 1828179
auuuagcaaaguuuaagcc

SEQ ID NO: 1828181 - RNA, 19 nt, Artificial Sequence
  Description of Artificial Sequence: Synthetic oligonucleotide
  Sense strand starting at position 3825 of SEQ ID NO: 1563738
ccgaguucacagcauaggu

SEQ ID NO: 1828182 - RNA, 19 nt, Artificial Sequence
  Description of Artificial Sequence: Synthetic oligonucleotide
  Antisense strand to SEQ ID NO: 1828181
accuaugcugugaacucgg

SEQ ID NO: 1828183 - RNA, 19 nt, Artificial Sequence
  Description of Artificial Sequence: Synthetic oligonucleotide
  Sense strand starting at position 2 of SEQ ID NO: 1563739
uugucagaauggcugauau

SEQ ID NO: 1828184 - RNA, 19 nt, Artificial Sequence
  Description of Artificial Sequence: Synthetic oligonucleotide
  Antisense strand to SEQ ID NO: 1828183
auaucagccauucugacaa

SEQ ID NO: 1828185 - RNA, 19 nt, Artificial Sequence
  Description of Artificial Sequence: Synthetic oligonucleotide
  Sense strand starting at position 4 of SEQ ID NO: 1563739
gucagaauggcugauaugu

SEQ ID NO: 1828186 - RNA, 19 nt, Artificial Sequence
  Description of Artificial Sequence: Synthetic oligonucleotide
  Antisense strand to SEQ ID NO: 1828185
acauaucagccauucugac

SEQ ID NO: 1828187 - RNA, 19 nt, Artificial Sequence
  Description of Artificial Sequence: Synthetic oligonucleotide
  Sense strand starting at position 10 of SEQ ID NO: 1563739
auggcugauauguacguaa

SEQ ID NO: 1828188 - RNA, 19 nt, Artificial Sequence
  Description of Artificial Sequence: Synthetic oligonucleotide
  Antisense strand to SEQ ID NO: 1828187
uuacguacauaucagccau

SEQ ID NO: 1828189 - RNA, 19 nt, Artificial Sequence
  Description of Artificial Sequence: Synthetic oligonucleotide
  Sense strand starting at position 73 of SEQ ID NO: 1563739
uucauuaccguguauguga

SEQ ID NO: 1828190 - RNA, 19 nt, Artificial Sequence
  Description of Artificial Sequence: Synthetic oligonucleotide
  Antisense strand to SEQ ID NO: 1828189
ucacauacacgguaaugaa

SEQ ID NO: 1828191 - RNA, 19 nt, Artificial Sequence
  Description of Artificial Sequence: Synthetic oligonucleotide
  Sense strand starting at position 81 of SEQ ID NO: 1563739
cguguaugugaggucgcaa

SEQ ID NO: 1828192 - RNA, 19 nt, Artificial Sequence
  Description of Artificial Sequence: Synthetic oligonucleotide
  Antisense strand to SEQ ID NO: 1828191
uugcgaccucacauacacg

SEQ ID NO: 1828193 - RNA, 19 nt, Artificial Sequence
  Description of Artificial Sequence: Synthetic oligonucleotide
  Sense strand starting at position 82 of SEQ ID NO: 1563739
guguaugugaggucgcaau

SEQ ID NO: 1828194 - RNA, 19 nt, Artificial Sequence
  Description of Artificial Sequence: Synthetic oligonucleotide
  Antisense strand to SEQ ID NO: 1828193
auugcgaccucacauacac

SEQ ID NO: 1828195 - RNA, 19 nt, Artificial Sequence
  Description of Artificial Sequence: Synthetic oligonucleotide
  Sense strand starting at position 95 of SEQ ID NO: 1563739
cgcaauugucugcaaacug

SEQ ID NO: 1828196 - RNA, 19 nt, Artificial Sequence
  Description of Artificial Sequence: Synthetic oligonucleotide
  Antisense strand to SEQ ID NO: 1828195
caguuugcagacaauugcg

SEQ ID NO: 1828197 - RNA, 19 nt, Artificial Sequence
  Description of Artificial Sequence: Synthetic oligonucleotide
  Sense strand starting at position 240 of SEQ ID NO: 1563739
cacuuaguggcucagcaau

SEQ ID NO: 1828198 - RNA, 19 nt, Artificial Sequence
  Description of Artificial Sequence: Synthetic oligonucleotide
  Antisense strand to SEQ ID NO: 1828197
auugcugagccacuaagug

SEQ ID NO: 1828199 - RNA, 19 nt, Artificial Sequence
  Description of Artificial Sequence: Synthetic oligonucleotide
  Sense strand starting at position 257 of SEQ ID NO: 1563739
aucagaggcuuccuuggau

SEQ ID NO: 1828200 - RNA, 19 nt, Artificial Sequence
  Description of Artificial Sequence: Synthetic oligonucleotide
  Antisense strand to SEQ ID NO: 1828199
auccaaggaagccucugau

SEQ ID NO: 1828201 - RNA, 19 nt, Artificial Sequence
  Description of Artificial Sequence: Synthetic oligonucleotide
  Sense strand starting at position 276 of SEQ ID NO: 1563739
gggacuuauacugguaaua

SEQ ID NO: 1828202 - RNA, 19 nt, Artificial Sequence
  Description of Artificial Sequence: Synthetic oligonucleotide
  Antisense strand to SEQ ID NO: 1828201
uauuaccaguauaaguccc

SEQ ID NO: 1828203 - RNA, 19 nt, Artificial Sequence
  Description of Artificial Sequence: Synthetic oligonucleotide
  Sense strand starting at position 310 of SEQ ID NO: 1563739
cgcgguacuggcagugauu

SEQ ID NO: 1828204 - RNA, 19 nt, Artificial Sequence
  Description of Artificial Sequence: Synthetic oligonucleotide
  Antisense strand to SEQ ID NO: 1828203
aaucacugccaguaccgcg

SEQ ID NO: 1828205 - RNA, 19 nt, Artificial Sequence
  Description of Artificial Sequence: Synthetic oligonucleotide
  Sense strand starting at position 349 of SEQ ID NO: 1563739
gccgaaugucacucgcuga

SEQ ID NO: 1828206 - RNA, 19 nt, Artificial Sequence
  Description of Artificial Sequence: Synthetic oligonucleotide
  Antisense strand to SEQ ID NO: 1828205
ucagcgagugacauucggc

SEQ ID NO: 1828207 - RNA, 19 nt, Artificial Sequence
  Description of Artificial Sequence: Synthetic oligonucleotide
  Sense strand starting at position 352 of SEQ ID NO: 1563739
gaaugucacucgcugaauu

SEQ ID NO: 1828208 - RNA, 19 nt, Artificial Sequence
  Description of Artificial Sequence: Synthetic oligonucleotide
  Antisense strand to SEQ ID NO: 1828207
aauucagcgagugacauuc

SEQ ID NO: 1828209 - RNA, 19 nt, Artificial Sequence
  Description of Artificial Sequence: Synthetic oligonucleotide
  Sense strand starting at position 353 of SEQ ID NO: 1563739
aaugucacucgcugaauua

SEQ ID NO: 1828210 - RNA, 19 nt, Artificial Sequence
  Description of Artificial Sequence: Synthetic oligonucleotide
  Antisense strand to SEQ ID NO: 1828209
uaauucagcgagugacauu

SEQ ID NO: 1828211 - RNA, 19 nt, Artificial Sequence
  Description of Artificial Sequence: Synthetic oligonucleotide
  Sense strand starting at position 354 of SEQ ID NO: 1563739
augucacucgcugaauuau

SEQ ID NO: 1828212 - RNA, 19 nt, Artificial Sequence
  Description of Artificial Sequence: Synthetic oligonucleotide
  Antisense strand to SEQ ID NO: 1828211
auaauucagcgagugacau

SEQ ID NO: 1828213 - RNA, 19 nt, Artificial Sequence
  Description of Artificial Sequence: Synthetic oligonucleotide
  Sense strand starting at position 422 of SEQ ID NO: 1563739
aaguguuugucaccucaag

SEQ ID NO: 1828214 - RNA, 19 nt, Artificial Sequence
  Description of Artificial Sequence: Synthetic oligonucleotide
  Antisense strand to SEQ ID NO: 1828213
cuugaggugacaaacacuu

SEQ ID NO: 1828215 - RNA, 19 nt, Artificial Sequence
  Description of Artificial Sequence: Synthetic oligonucleotide
  Sense strand starting at position 520 of SEQ ID NO: 1563739
gacgaacuuuaugugacau

SEQ ID NO: 1828216 - RNA, 19 nt, Artificial Sequence
  Description of Artificial Sequence: Synthetic oligonucleotide
  Antisense strand to SEQ ID NO: 1828215
augucacauaaaguucguc

SEQ ID NO: 1828217 - RNA, 19 nt, Artificial Sequence
  Description of Artificial Sequence: Synthetic oligonucleotide
  Sense strand starting at position 553 of SEQ ID NO: 1563739
uguucucauguuuagcaau

SEQ ID NO: 1828218 - RNA, 19 nt, Artificial Sequence
  Description of Artificial Sequence: Synthetic oligonucleotide
  Antisense strand to SEQ ID NO: 1828217
auugcuaaacaugagaaca

SEQ ID NO: 1828219 - RNA, 19 nt, Artificial Sequence
  Description of Artificial Sequence: Synthetic oligonucleotide
  Sense strand starting at position 587 of SEQ ID NO: 1563739
aaagacugcuugucaggua

SEQ ID NO: 1828220 - RNA, 19 nt, Artificial Sequence
  Description of Artificial Sequence: Synthetic oligonucleotide
  Antisense strand to SEQ ID NO: 1828219
uaccugacaagcagucuuu

SEQ ID NO: 1828221 - RNA, 19 nt, Artificial Sequence
  Description of Artificial Sequence: Synthetic oligonucleotide
  Sense strand starting at position 682 of SEQ ID NO: 1563739
ugacuuagauaagcuaauu

SEQ ID NO: 1828222 - RNA, 19 nt, Artificial Sequence
  Description of Artificial Sequence: Synthetic oligonucleotide
  Antisense strand to SEQ ID NO: 1828221
aauuagcuuaucuaaguca

SEQ ID NO: 1828223 - RNA, 19 nt, Artificial Sequence
  Description of Artificial Sequence: Synthetic oligonucleotide
  Sense strand starting at position 740 of SEQ ID NO: 1563739
uccucuuaagcuuacguga

SEQ ID NO: 1828224 - RNA, 19 nt, Artificial Sequence
  Description of Artificial Sequence: Synthetic oligonucleotide
  Antisense strand to SEQ ID NO: 1828223
ucacguaagcuuaagagga

SEQ ID NO: 1828225 - RNA, 19 nt, Artificial Sequence
  Description of Artificial Sequence: Synthetic oligonucleotide
  Sense strand starting at position 1033 of SEQ ID NO: 1563739
agcgacauugcguucaguu

SEQ ID NO: 1828226 - RNA, 19 nt, Artificial Sequence
  Description of Artificial Sequence: Synthetic oligonucleotide
  Antisense strand to SEQ ID NO: 1828225
aacugaacgcaaugucgcu

SEQ ID NO: 1828227 - RNA, 19 nt, Artificial Sequence
  Description of Artificial Sequence: Synthetic oligonucleotide
  Sense strand starting at position 1034 of SEQ ID NO: 1563739
gcgacauugcguucaguuu

SEQ ID NO: 1828228 - RNA, 19 nt, Artificial Sequence
  Description of Artificial Sequence: Synthetic oligonucleotide
  Antisense strand to SEQ ID NO: 1828227
aaacugaacgcaaugucgc

SEQ ID NO: 1828229 - RNA, 19 nt, Artificial Sequence
  Description of Artificial Sequence: Synthetic oligonucleotide
  Sense strand starting at position 1261 of SEQ ID NO: 1563739
cgcgauuugcgcguucaga

SEQ ID NO: 1828230 - RNA, 19 nt, Artificial Sequence
  Description of Artificial Sequence: Synthetic oligonucleotide
  Antisense strand to SEQ ID NO: 1828229
ucugaacgcgcaaaucgcg

SEQ ID NO: 1828231 - RNA, 19 nt, Artificial Sequence
  Description of Artificial Sequence: Synthetic oligonucleotide
  Sense strand starting at position 2170 of SEQ ID NO: 1563739
ggugaugauuaaucugauu

SEQ ID NO: 1828232 - RNA, 19 nt, Artificial Sequence
  Description of Artificial Sequence: Synthetic oligonucleotide
  Antisense strand to SEQ ID NO: 1828231
aaucagauuaaucaucacc

SEQ ID NO: 1828233 - RNA, 19 nt, Artificial Sequence
  Description of Artificial Sequence: Synthetic oligonucleotide
  Sense strand starting at position 2246 of SEQ ID NO: 1563739
agggaaggcuuucucaaga

SEQ ID NO: 1828234 - RNA, 19 nt, Artificial Sequence
  Description of Artificial Sequence: Synthetic oligonucleotide
  Antisense strand to SEQ ID NO: 1828233
ucuugagaaagccuucccu

SEQ ID NO: 1828235 - RNA, 19 nt, Artificial Sequence
  Description of Artificial Sequence: Synthetic oligonucleotide
  Sense strand starting at position 2251 of SEQ ID NO: 1563739
aggcuuucucaagaaugua

SEQ ID NO: 1828236 - RNA, 19 nt, Artificial Sequence
  Description of Artificial Sequence: Synthetic oligonucleotide
  Antisense strand to SEQ ID NO: 1828235
uacauucuugagaaagccu

SEQ ID NO: 1828237 - RNA, 19 nt, Artificial Sequence
  Description of Artificial Sequence: Synthetic oligonucleotide
  Sense strand starting at position 3008 of SEQ ID NO: 1563739
agaagcagaucucuccuaa

SEQ ID NO: 1828238 - RNA, 19 nt, Artificial Sequence
  Description of Artificial Sequence: Synthetic oligonucleotide
  Antisense strand to SEQ ID NO: 1828237
uuaggagagaucugcuucu

SEQ ID NO: 1828239 - RNA, 19 nt, Artificial Sequence
  Description of Artificial Sequence: Synthetic oligonucleotide
  Sense strand starting at position 3295 of SEQ ID NO: 1563739
ggcuauucugaaggccgaa

SEQ ID NO: 1828240 - RNA, 19 nt, Artificial Sequence
  Description of Artificial Sequence: Synthetic oligonucleotide
  Antisense strand to SEQ ID NO: 1828239
uucggccuucagaauagcc

SEQ ID NO: 1828241 - RNA, 19 nt, Artificial Sequence
  Description of Artificial Sequence: Synthetic oligonucleotide
  Sense strand starting at position 3432 of SEQ ID NO: 1563739
uuuccauauuugugaaagg

SEQ ID NO: 1828242 - RNA, 19 nt, Artificial Sequence
  Description of Artificial Sequence: Synthetic oligonucleotide
  Antisense strand to SEQ ID NO: 1828241
ccuuucacaaauauggaaa

SEQ ID NO: 1828243 - RNA, 19 nt, Artificial Sequence
  Description of Artificial Sequence: Synthetic oligonucleotide
  Sense strand starting at position 3433 of SEQ ID NO: 1563739
uuccauauuugugaaagga

SEQ ID NO: 1828244 - RNA, 19 nt, Artificial Sequence
  Description of Artificial Sequence: Synthetic oligonucleotide
  Antisense strand to SEQ ID NO: 1828243
uccuuucacaaauauggaa

SEQ ID NO: 1828245 - RNA, 19 nt, Artificial Sequence
  Description of Artificial Sequence: Synthetic oligonucleotide
  Sense strand starting at position 3446 of SEQ ID NO: 1563739
aaaggagcuguccagucua

SEQ ID NO: 1828246 - RNA, 19 nt, Artificial Sequence
  Description of Artificial Sequence: Synthetic oligonucleotide
  Antisense strand to SEQ ID NO: 1828245
uagacuggacagcuccuuu

SEQ ID NO: 1828247 - RNA, 19 nt, Artificial Sequence
  Description of Artificial Sequence: Synthetic oligonucleotide
  Sense strand starting at position 3601 of SEQ ID NO: 1563739
cuugaagcaucuguugaau

SEQ ID NO: 1828248 - RNA, 19 nt, Artificial Sequence
  Description of Artificial Sequence: Synthetic oligonucleotide
  Antisense strand to SEQ ID NO: 1828247
auucaacagaugcuucaag

SEQ ID NO: 1828249 - RNA, 19 nt, Artificial Sequence
  Description of Artificial Sequence: Synthetic oligonucleotide
  Sense strand starting at position 3604 of SEQ ID NO: 1563739
gaagcaucuguugaaugcu

SEQ ID NO: 1828250 - RNA, 19 nt, Artificial Sequence
  Description of Artificial Sequence: Synthetic oligonucleotide
  Antisense strand to SEQ ID NO: 1828249
agcauucaacagaugcuuc

SEQ ID NO: 1828251 - RNA, 19 nt, Artificial Sequence
  Description of Artificial Sequence: Synthetic oligonucleotide
  Sense strand starting at position 3694 of SEQ ID NO: 1563739
agaaaugcuuugguagcga

SEQ ID NO: 1828252 - RNA, 19 nt, Artificial Sequence
  Description of Artificial Sequence: Synthetic oligonucleotide
  Antisense strand to SEQ ID NO: 1828251
ucgcuaccaaagcauuucu

SEQ ID NO: 1828253 - RNA, 19 nt, Artificial Sequence
  Description of Artificial Sequence: Synthetic oligonucleotide
  Sense strand starting at position 3702 of SEQ ID NO: 1563739
uuugguagcgaacaguaau

SEQ ID NO: 1828254 - RNA, 19 nt, Artificial Sequence
  Description of Artificial Sequence: Synthetic oligonucleotide
  Antisense strand to SEQ ID NO: 1828253
auuacuguucgcuaccaaa

SEQ ID NO: 1828255 - RNA, 19 nt, Artificial Sequence
  Description of Artificial Sequence: Synthetic oligonucleotide
  Sense strand starting at position 3801 of SEQ ID NO: 1563739
uuacucuaugaauguggaa

SEQ ID NO: 1828256 - RNA, 19 nt, Artificial Sequence
  Description of Artificial Sequence: Synthetic oligonucleotide
  Antisense strand to SEQ ID NO: 1828255
uuccacauucauagaguaa

SEQ ID NO: 1828257 - RNA, 19 nt, Artificial Sequence
  Description of Artificial Sequence: Synthetic oligonucleotide
  Sense strand starting at position 3803 of SEQ ID NO: 1563739
acucuaugaauguggaaug

SEQ ID NO: 1828258 - RNA, 19 nt, Artificial Sequence
  Description of Artificial Sequence: Synthetic oligonucleotide
  Antisense strand to SEQ ID NO: 1828257
cauuccacauucauagagu

SEQ ID NO: 1828259 - RNA, 19 nt, Artificial Sequence
  Description of Artificial Sequence: Synthetic oligonucleotide
  Sense strand starting at position 3859 of SEQ ID NO: 1563739
uugucagaggcugagacau

SEQ ID NO: 1828260 - RNA, 19 nt, Artificial Sequence
  Description of Artificial Sequence: Synthetic oligonucleotide
  Antisense strand to SEQ ID NO: 1828259
augucucagccucugacaa

SEQ ID NO: 1828261 - RNA, 19 nt, Artificial Sequence
  Description of Artificial Sequence: Synthetic oligonucleotide
  Sense strand starting at position 3861 of SEQ ID NO: 1563739
gucagaggcugagacauuu

SEQ ID NO: 1828262 - RNA, 19 nt, Artificial Sequence
  Description of Artificial Sequence: Synthetic oligonucleotide
  Antisense strand to SEQ ID NO: 1828261
aaaugucucagccucugac

SEQ ID NO: 1828263 - RNA, 19 nt, Artificial Sequence
  Description of Artificial Sequence: Synthetic oligonucleotide
  Sense strand starting at position 119 of SEQ ID NO: 1563740
aggccauaucauuaguucu

SEQ ID NO: 1828264 - RNA, 19 nt, Artificial Sequence
  Description of Artificial Sequence: Synthetic oligonucleotide
  Antisense strand to SEQ ID NO: 1828263
agaacuaaugauauggccu

SEQ ID NO: 1828265 - RNA, 19 nt, Artificial Sequence
  Description of Artificial Sequence: Synthetic oligonucleotide
  Sense strand starting at position 121 of SEQ ID NO: 1563740
gccauaucauuaguucuag

SEQ ID NO: 1828266 - RNA, 19 nt, Artificial Sequence
  Description of Artificial Sequence: Synthetic oligonucleotide
  Antisense strand to SEQ ID NO: 1828265
cuagaacuaaugauauggc

SEQ ID NO: 1828267 - RNA, 19 nt, Artificial Sequence
  Description of Artificial Sequence: Synthetic oligonucleotide
  Sense strand starting at position 122 of SEQ ID NO: 1563740
ccauaucauuaguucuagu

SEQ ID NO: 1828268 - RNA, 19 nt, Artificial Sequence
  Description of Artificial Sequence: Synthetic oligonucleotide
  Antisense strand to SEQ ID NO: 1828267
acuagaacuaaugauaugg

SEQ ID NO: 1828269 - RNA, 19 nt, Artificial Sequence
  Description of Artificial Sequence: Synthetic oligonucleotide
  Sense strand starting at position 220 of SEQ ID NO: 1563740
aaaggagucugcccucaaa

SEQ ID NO: 1828270 - RNA, 19 nt, Artificial Sequence
  Description of Artificial Sequence: Synthetic oligonucleotide
  Antisense strand to SEQ ID NO: 1828269
uuugagggcagacuccuuu

SEQ ID NO: 1828271 - RNA, 19 nt, Artificial Sequence
  Description of Artificial Sequence: Synthetic oligonucleotide
  Sense strand starting at position 223 of SEQ ID NO: 1563740
ggagucugcccucaaagga

SEQ ID NO: 1828272 - RNA, 19 nt, Artificial Sequence
  Description of Artificial Sequence: Synthetic oligonucleotide
  Antisense strand to SEQ ID NO: 1828271
uccuuugagggcagacucc

SEQ ID NO: 1828273 - RNA, 19 nt, Artificial Sequence
  Description of Artificial Sequence: Synthetic oligonucleotide
  Sense strand starting at position 309 of SEQ ID NO: 1563740
ccaacaguguuucuccaau

SEQ ID NO: 1828274 - RNA, 19 nt, Artificial Sequence
  Description of Artificial Sequence: Synthetic oligonucleotide
  Antisense strand to SEQ ID NO: 1828273
auuggagaaacacuguugg

SEQ ID NO: 1828275 - RNA, 19 nt, Artificial Sequence
  Description of Artificial Sequence: Synthetic oligonucleotide
  Sense strand starting at position 315 of SEQ ID NO: 1563740
guguuucuccaauaaaucu

SEQ ID NO: 1828276 - RNA, 19 nt, Artificial Sequence
  Description of Artificial Sequence: Synthetic oligonucleotide
  Antisense strand to SEQ ID NO: 1828275
agauuuauuggagaaacac

SEQ ID NO: 1828277 - RNA, 19 nt, Artificial Sequence
  Description of Artificial Sequence: Synthetic oligonucleotide
  Sense strand starting at position 380 of SEQ ID NO: 1563740
uuguucuguccguucuaau

SEQ ID NO: 1828278 - RNA, 19 nt, Artificial Sequence
  Description of Artificial Sequence: Synthetic oligonucleotide
  Antisense strand to SEQ ID NO: 1828277
auuagaacggacagaacaa

SEQ ID NO: 1828279 - RNA, 19 nt, Artificial Sequence
  Description of Artificial Sequence: Synthetic oligonucleotide
  Sense strand starting at position 381 of SEQ ID NO: 1563740
uguucuguccguucuaauu

SEQ ID NO: 1828280 - RNA, 19 nt, Artificial Sequence
  Description of Artificial Sequence: Synthetic oligonucleotide
  Antisense strand to SEQ ID NO: 1828279
aauuagaacggacagaaca

SEQ ID NO: 1828281 - RNA, 19 nt, Artificial Sequence
  Description of Artificial Sequence: Synthetic oligonucleotide
  Sense strand starting at position 399 of SEQ ID NO: 1563740
uuaaauaguuccuuuagag

SEQ ID NO: 1828282 - RNA, 19 nt, Artificial Sequence
  Description of Artificial Sequence: Synthetic oligonucleotide
  Antisense strand to SEQ ID NO: 1828281
cucuaaaggaacuauuuaa

SEQ ID NO: 1828283 - RNA, 19 nt, Artificial Sequence
  Description of Artificial Sequence: Synthetic oligonucleotide
  Sense strand starting at position 423 of SEQ ID NO: 1563740
uuuaauagccaguaguaca

SEQ ID NO: 1828284 - RNA, 19 nt, Artificial Sequence
  Description of Artificial Sequence: Synthetic oligonucleotide
  Antisense strand to SEQ ID NO: 1828283
uguacuacuggcuauuaaa

SEQ ID NO: 1828285 - RNA, 19 nt, Artificial Sequence
  Description of Artificial Sequence: Synthetic oligonucleotide
  Sense strand starting at position 559 of SEQ ID NO: 1563740
uugaaauugcaucaacugu

SEQ ID NO: 1828286 - RNA, 19 nt, Artificial Sequence
  Description of Artificial Sequence: Synthetic oligonucleotide
  Antisense strand to SEQ ID NO: 1828285
acaguugaugcaauuucaa

SEQ ID NO: 1828287 - RNA, 19 nt, Artificial Sequence
  Description of Artificial Sequence: Synthetic oligonucleotide
  Sense strand starting at position 672 of SEQ ID NO: 1563740
uaugguauucgucaauaaa

SEQ ID NO: 1828288 - RNA, 19 nt, Artificial Sequence
  Description of Artificial Sequence: Synthetic oligonucleotide
  Antisense strand to SEQ ID NO: 1828287
uuuauugacgaauaccaua

SEQ ID NO: 1828289 - RNA, 19 nt, Artificial Sequence
  Description of Artificial Sequence: Synthetic oligonucleotide
  Sense strand starting at position 675 of SEQ ID NO: 1563740
gguauucgucaauaaaguu

SEQ ID NO: 1828290 - RNA, 19 nt, Artificial Sequence
  Description of Artificial Sequence: Synthetic oligonucleotide
  Antisense strand to SEQ ID NO: 1828289
aacuuuauugacgaauacc

SEQ ID NO: 1828291 - RNA, 19 nt, Artificial Sequence
  Description of Artificial Sequence: Synthetic oligonucleotide
  Sense strand starting at position 770 of SEQ ID NO: 1563740
augcuuauugcuuauagau

SEQ ID NO: 1828292 - RNA, 19 nt, Artificial Sequence
  Description of Artificial Sequence: Synthetic oligonucleotide
  Antisense strand to SEQ ID NO: 1828291
aucuauaagcaauaagcau

SEQ ID NO: 1828293 - RNA, 19 nt, Artificial Sequence
  Description of Artificial Sequence: Synthetic oligonucleotide
  Sense strand starting at position 853 of SEQ ID NO: 1563740
gccaguaaucagggaaaug

SEQ ID NO: 1828294 - RNA, 19 nt, Artificial Sequence
  Description of Artificial Sequence: Synthetic oligonucleotide
  Antisense strand to SEQ ID NO: 1828293
cauuucccugauuacuggc

SEQ ID NO: 1828295 - RNA, 19 nt, Artificial Sequence
  Description of Artificial Sequence: Synthetic oligonucleotide
  Sense strand starting at position 966 of SEQ ID NO: 1563740
ggcacucucgcacaacauu

SEQ ID NO: 1828296 - RNA, 19 nt, Artificial Sequence
  Description of Artificial Sequence: Synthetic oligonucleotide
  Antisense strand to SEQ ID NO: 1828295
aauguugugcgagagugcc

SEQ ID NO: 1828297 - RNA, 19 nt, Artificial Sequence
  Description of Artificial Sequence: Synthetic oligonucleotide
  Sense strand starting at position 1014 of SEQ ID NO: 1563740
gaaggcaauuuggacaaau

SEQ ID NO: 1828298 - RNA, 19 nt, Artificial Sequence
  Description of Artificial Sequence: Synthetic oligonucleotide
  Antisense strand to SEQ ID NO: 1828297
auuuguccaaauugccuuc

SEQ ID NO: 1828299 - RNA, 19 nt, Artificial Sequence
  Description of Artificial Sequence: Synthetic oligonucleotide
  Sense strand starting at position 1106 of SEQ ID NO: 1563740
ucauacauggcaugauaca

SEQ ID NO: 1828300 - RNA, 19 nt, Artificial Sequence
  Description of Artificial Sequence: Synthetic oligonucleotide
  Antisense strand to SEQ ID NO: 1828299
uguaucaugccauguauga

SEQ ID NO: 1828301 - RNA, 19 nt, Artificial Sequence
  Description of Artificial Sequence: Synthetic oligonucleotide
  Sense strand starting at position 1196 of SEQ ID NO: 1563740
auguauaucaaucgggaaa

SEQ ID NO: 1828302 - RNA, 19 nt, Artificial Sequence
  Description of Artificial Sequence: Synthetic oligonucleotide
  Antisense strand to SEQ ID NO: 1828301
uuucccgauugauauacau

SEQ ID NO: 1828303 - RNA, 19 nt, Artificial Sequence
  Description of Artificial Sequence: Synthetic oligonucleotide
  Sense strand starting at position 1197 of SEQ ID NO: 1563740
uguauaucaaucgggaaau

SEQ ID NO: 1828304 - RNA, 19 nt, Artificial Sequence
  Description of Artificial Sequence: Synthetic oligonucleotide
  Antisense strand to SEQ ID NO: 1828303
auuucccgauugauauaca

SEQ ID NO: 1828305 - RNA, 19 nt, Artificial Sequence
  Description of Artificial Sequence: Synthetic oligonucleotide
  Sense strand starting at position 1324 of SEQ ID NO: 1563740
acaagcaguuagucgaaau

SEQ ID NO: 1828306 - RNA, 19 nt, Artificial Sequence
  Description of Artificial Sequence: Synthetic oligonucleotide
  Antisense strand to SEQ ID NO: 1828305
auuucgacuaacugcuugu

SEQ ID NO: 1828307 - RNA, 19 nt, Artificial Sequence
  Description of Artificial Sequence: Synthetic oligonucleotide
  Sense strand starting at position 2158 of SEQ ID NO: 1563740
ggaugauagggucgcuaag

SEQ ID NO: 1828308 - RNA, 19 nt, Artificial Sequence
  Description of Artificial Sequence: Synthetic oligonucleotide
  Antisense strand to SEQ ID NO: 1828307
cuuagcgacccuaucaucc

SEQ ID NO: 1828309 - RNA, 19 nt, Artificial Sequence
  Description of Artificial Sequence: Synthetic oligonucleotide
  Sense strand starting at position 2160 of SEQ ID NO: 1563740
augauagggucgcuaagaa

SEQ ID NO: 1828310 - RNA, 19 nt, Artificial Sequence
  Description of Artificial Sequence: Synthetic oligonucleotide
  Antisense strand to SEQ ID NO: 1828309
uucuuagcgacccuaucau

SEQ ID NO: 1828311 - RNA, 19 nt, Artificial Sequence
  Description of Artificial Sequence: Synthetic oligonucleotide
  Sense strand starting at position 2168 of SEQ ID NO: 1563740
gucgcuaagaauugggauu

SEQ ID NO: 1828312 - RNA, 19 nt, Artificial Sequence
  Description of Artificial Sequence: Synthetic oligonucleotide
  Antisense strand to SEQ ID NO: 1828311
aaucccaauucuuagcgac

SEQ ID NO: 1828313 - RNA, 19 nt, Artificial Sequence
  Description of Artificial Sequence: Synthetic oligonucleotide
  Sense strand starting at position 2217 of SEQ ID NO: 1563740
ggaacaugauuugaucuga

SEQ ID NO: 1828314 - RNA, 19 nt, Artificial Sequence
  Description of Artificial Sequence: Synthetic oligonucleotide
  Antisense strand to SEQ ID NO: 1828313
ucagaucaaaucauguucc

SEQ ID NO: 1828315 - RNA, 19 nt, Artificial Sequence
  Description of Artificial Sequence: Synthetic oligonucleotide
  Sense strand starting at position 2475 of SEQ ID NO: 1563740
ggaucugcaucuguaaaua

SEQ ID NO: 1828316 - RNA, 19 nt, Artificial Sequence
  Description of Artificial Sequence: Synthetic oligonucleotide
  Antisense strand to SEQ ID NO: 1828315
uauuuacagaugcagaucc

SEQ ID NO: 1828317 - RNA, 19 nt, Artificial Sequence
  Description of Artificial Sequence: Synthetic oligonucleotide
  Sense strand starting at position 2487 of SEQ ID NO: 1563740
guaaauacaugggaauaaa

SEQ ID NO: 1828318 - RNA, 19 nt, Artificial Sequence
  Description of Artificial Sequence: Synthetic oligonucleotide
  Antisense strand to SEQ ID NO: 1828317
uuuauucccauguauuuac

SEQ ID NO: 1828319 - RNA, 19 nt, Artificial Sequence
  Description of Artificial Sequence: Synthetic oligonucleotide
  Sense strand starting at position 2573 of SEQ ID NO: 1563740
ggcgaagaacuuugacuug

SEQ ID NO: 1828320 - RNA, 19 nt, Artificial Sequence
  Description of Artificial Sequence: Synthetic oligonucleotide
  Antisense strand to SEQ ID NO: 1828319
caagucaaaguucuucgcc

SEQ ID NO: 1828321 - RNA, 19 nt, Artificial Sequence
  Description of Artificial Sequence: Synthetic oligonucleotide
  Sense strand starting at position 2598 of SEQ ID NO: 1563740
uagcuacuucgauaagguu

SEQ ID NO: 1828322 - RNA, 19 nt, Artificial Sequence
  Description of Artificial Sequence: Synthetic oligonucleotide
  Antisense strand to SEQ ID NO: 1828321
aaccuuaucgaaguagcua

SEQ ID NO: 1828323 - RNA, 19 nt, Artificial Sequence
  Description of Artificial Sequence: Synthetic oligonucleotide
  Sense strand starting at position 3153 of SEQ ID NO: 1563740
ugggauuacaggcgaaaga

SEQ ID NO: 1828324 - RNA, 19 nt, Artificial Sequence
  Description of Artificial Sequence: Synthetic oligonucleotide
  Antisense strand to SEQ ID NO: 1828323
ucuuucgccuguaauccca

SEQ ID NO: 1828325 - RNA, 19 nt, Artificial Sequence
  Description of Artificial Sequence: Synthetic oligonucleotide
  Sense strand starting at position 3173 of SEQ ID NO: 1563740
ccggcccaucuguaacauu

SEQ ID NO: 1828326 - RNA, 19 nt, Artificial Sequence
  Description of Artificial Sequence: Synthetic oligonucleotide
  Antisense strand to SEQ ID NO: 1828325
aauguuacagaugggccgg

SEQ ID NO: 1828327 - RNA, 19 nt, Artificial Sequence
  Description of Artificial Sequence: Synthetic oligonucleotide
  Sense strand starting at position 3210 of SEQ ID NO: 1563740
auacuuucuuuagcaugua

SEQ ID NO: 1828328 - RNA, 19 nt, Artificial Sequence
  Description of Artificial Sequence: Synthetic oligonucleotide
  Antisense strand to SEQ ID NO: 1828327
uacaugcuaaagaaaguau

SEQ ID NO: 1828329 - RNA, 19 nt, Artificial Sequence
  Description of Artificial Sequence: Synthetic oligonucleotide
  Sense strand starting at position 3421 of SEQ ID NO: 1563740
cacuuaauguagcuugaag

SEQ ID NO: 1828330 - RNA, 19 nt, Artificial Sequence
  Description of Artificial Sequence: Synthetic oligonucleotide
  Antisense strand to SEQ ID NO: 1828329
cuucaagcuacauuaagug

SEQ ID NO: 1828331 - RNA, 19 nt, Artificial Sequence
  Description of Artificial Sequence: Synthetic oligonucleotide
  Sense strand starting at position 3423 of SEQ ID NO: 1563740
cuuaauguagcuugaagau

SEQ ID NO: 1828332 - RNA, 19 nt, Artificial Sequence
  Description of Artificial Sequence: Synthetic oligonucleotide
  Antisense strand to SEQ ID NO: 1828331
aucuucaagcuacauuaag

SEQ ID NO: 1828333 - RNA, 19 nt, Artificial Sequence
  Description of Artificial Sequence: Synthetic oligonucleotide
  Sense strand starting at position 3432 of SEQ ID NO: 1563740
gcuugaagaucuuuccaug

SEQ ID NO: 1828334 - RNA, 19 nt, Artificial Sequence
  Description of Artificial Sequence: Synthetic oligonucleotide
  Antisense strand to SEQ ID NO: 1828333
cauggaaagaucuucaagc

SEQ ID NO: 1828335 - RNA, 19 nt, Artificial Sequence
  Description of Artificial Sequence: Synthetic oligonucleotide
  Sense strand starting at position 3480 of SEQ ID NO: 1563740
uuaccuacugcauaguauu

SEQ ID NO: 1828336 - RNA, 19 nt, Artificial Sequence
  Description of Artificial Sequence: Synthetic oligonucleotide
  Antisense strand to SEQ ID NO: 1828335
aauacuaugcaguagguaa

SEQ ID NO: 1828337 - RNA, 19 nt, Artificial Sequence
  Description of Artificial Sequence: Synthetic oligonucleotide
  Sense strand starting at position 3645 of SEQ ID NO: 1563740
auauuucugugagauaaac

SEQ ID NO: 1828338 - RNA, 19 nt, Artificial Sequence
  Description of Artificial Sequence: Synthetic oligonucleotide
  Antisense strand to SEQ ID NO: 1828337
guuuaucucacagaaauau

SEQ ID NO: 1828339 - RNA, 19 nt, Artificial Sequence
  Description of Artificial Sequence: Synthetic oligonucleotide
  Sense strand starting at position 3672 of SEQ ID NO: 1563740
augaaauaguuggauaaag

SEQ ID NO: 1828340 - RNA, 19 nt, Artificial Sequence
  Description of Artificial Sequence: Synthetic oligonucleotide
  Antisense strand to SEQ ID NO: 1828339
cuuuauccaacuauuucau

SEQ ID NO: 1828341 - RNA, 19 nt, Artificial Sequence
  Description of Artificial Sequence: Synthetic oligonucleotide
  Sense strand starting at position 3827 of SEQ ID NO: 1563740
cagucuucccucgaguaac

SEQ ID NO: 1828342 - RNA, 19 nt, Artificial Sequence
  Description of Artificial Sequence: Synthetic oligonucleotide
  Antisense strand to SEQ ID NO: 1828341
guuacucgagggaagacug

SEQ ID NO: 1828343 - RNA, 19 nt, Artificial Sequence
  Description of Artificial Sequence: Synthetic oligonucleotide
  Sense strand starting at position 181 of SEQ ID NO: 1563741
aggagaugcaacuguuuau

SEQ ID NO: 1828344 - RNA, 19 nt, Artificial Sequence
  Description of Artificial Sequence: Synthetic oligonucleotide
  Antisense strand to SEQ ID NO: 1828343
auaaacaguugcaucuccu

SEQ ID NO: 1828345 - RNA, 19 nt, Artificial Sequence
  Description of Artificial Sequence: Synthetic oligonucleotide
  Sense strand starting at position 184 of SEQ ID NO: 1563741
agaugcaacuguuuauuaa

SEQ ID NO: 1828346 - RNA, 19 nt, Artificial Sequence
  Description of Artificial Sequence: Synthetic oligonucleotide
  Antisense strand to SEQ ID NO: 1828345
uuaauaaacaguugcaucu

SEQ ID NO: 1828347 - RNA, 19 nt, Artificial Sequence
  Description of Artificial Sequence: Synthetic oligonucleotide
  Sense strand starting at position 185 of SEQ ID NO: 1563741
gaugcaacuguuuauuaag

SEQ ID NO: 1828348 - RNA, 19 nt, Artificial Sequence
  Description of Artificial Sequence: Synthetic oligonucleotide
  Antisense strand to SEQ ID NO: 1828347
cuuaauaaacaguugcauc

SEQ ID NO: 1828349 - RNA, 19 nt, Artificial Sequence
  Description of Artificial Sequence: Synthetic oligonucleotide
  Sense strand starting at position 234 of SEQ ID NO: 1563741
gcaguuuacaggcacaagu

SEQ ID NO: 1828350 - RNA, 19 nt, Artificial Sequence
  Description of Artificial Sequence: Synthetic oligonucleotide
  Antisense strand to SEQ ID NO: 1828349
acuugugccuguaaacugc

SEQ ID NO: 1828351 - RNA, 19 nt, Artificial Sequence
  Description of Artificial Sequence: Synthetic oligonucleotide
  Sense strand starting at position 319 of SEQ ID NO: 1563741
gacugcucagagggaguaa

SEQ ID NO: 1828352 - RNA, 19 nt, Artificial Sequence
  Description of Artificial Sequence: Synthetic oligonucleotide
  Antisense strand to SEQ ID NO: 1828351
uuacucccucugagcaguc

SEQ ID NO: 1828353 - RNA, 19 nt, Artificial Sequence
  Description of Artificial Sequence: Synthetic oligonucleotide
  Sense strand starting at position 331 of SEQ ID NO: 1563741
ggaguaauugaaggucuaa

SEQ ID NO: 1828354 - RNA, 19 nt, Artificial Sequence
  Description of Artificial Sequence: Synthetic oligonucleotide
  Antisense strand to SEQ ID NO: 1828353
uuagaccuucaauuacucc

SEQ ID NO: 1828355 - RNA, 19 nt, Artificial Sequence
  Description of Artificial Sequence: Synthetic oligonucleotide
  Sense strand starting at position 432 of SEQ ID NO: 1563741
ugaccaacccucugugaaa

SEQ ID NO: 1828356 - RNA, 19 nt, Artificial Sequence
  Description of Artificial Sequence: Synthetic oligonucleotide
  Antisense strand to SEQ ID NO: 1828355
uuucacagaggguugguca

SEQ ID NO: 1828357 - RNA, 19 nt, Artificial Sequence
  Description of Artificial Sequence: Synthetic oligonucleotide
  Sense strand starting at position 433 of SEQ ID NO: 1563741
gaccaacccucugugaaag

SEQ ID NO: 1828358 - RNA, 19 nt, Artificial Sequence
  Description of Artificial Sequence: Synthetic oligonucleotide
  Antisense strand to SEQ ID NO: 1828357
cuuucacagaggguugguc

SEQ ID NO: 1828359 - RNA, 19 nt, Artificial Sequence
  Description of Artificial Sequence: Synthetic oligonucleotide
  Sense strand starting at position 622 of SEQ ID NO: 1563741
cgccacuugggacagaauu

SEQ ID NO: 1828360 - RNA, 19 nt, Artificial Sequence
  Description of Artificial Sequence: Synthetic oligonucleotide
  Antisense strand to SEQ ID NO: 1828359
aauucugucccaaguggcg

SEQ ID NO: 1828361 - RNA, 19 nt, Artificial Sequence
  Description of Artificial Sequence: Synthetic oligonucleotide
  Sense strand starting at position 662 of SEQ ID NO: 1563741
uggauugagucacuaauaa

SEQ ID NO: 1828362 - RNA, 19 nt, Artificial Sequence
  Description of Artificial Sequence: Synthetic oligonucleotide
  Antisense strand to SEQ ID NO: 1828361
uuauuagugacucaaucca

SEQ ID NO: 1828363 - RNA, 19 nt, Artificial Sequence
  Description of Artificial Sequence: Synthetic oligonucleotide
  Sense strand starting at position 2026 of SEQ ID NO: 1563741
ucaaguaggucucugagga

SEQ ID NO: 1828364 - RNA, 19 nt, Artificial Sequence
  Description of Artificial Sequence: Synthetic oligonucleotide
  Antisense strand to SEQ ID NO: 1828363
uccucagagaccuacuuga

SEQ ID NO: 1828365 - RNA, 19 nt, Artificial Sequence
  Description of Artificial Sequence: Synthetic oligonucleotide
  Sense strand starting at position 2027 of SEQ ID NO: 1563741
caaguaggucucugaggac

SEQ ID NO: 1828366 - RNA, 19 nt, Artificial Sequence
  Description of Artificial Sequence: Synthetic oligonucleotide
  Antisense strand to SEQ ID NO: 1828365
guccucagagaccuacuug

SEQ ID NO: 1828367 - RNA, 19 nt, Artificial Sequence
  Description of Artificial Sequence: Synthetic oligonucleotide
  Sense strand starting at position 2050 of SEQ ID NO: 1563741
gugcuuaguccugccuauu

SEQ ID NO: 1828368 - RNA, 19 nt, Artificial Sequence
  Description of Artificial Sequence: Synthetic oligonucleotide
  Antisense strand to SEQ ID NO: 1828367
aauaggcaggacuaagcac

SEQ ID NO: 1828369 - RNA, 19 nt, Artificial Sequence
  Description of Artificial Sequence: Synthetic oligonucleotide
  Sense strand starting at position 2085 of SEQ ID NO: 1563741
ggcccuuauuggucaggga

SEQ ID NO: 1828370 - RNA, 19 nt, Artificial Sequence
  Description of Artificial Sequence: Synthetic oligonucleotide
  Antisense strand to SEQ ID NO: 1828369
ucccugaccaauaagggcc

SEQ ID NO: 1828371 - RNA, 19 nt, Artificial Sequence
  Description of Artificial Sequence: Synthetic oligonucleotide
  Sense strand starting at position 2089 of SEQ ID NO: 1563741
cuuauuggucagggagcua

SEQ ID NO: 1828372 - RNA, 19 nt, Artificial Sequence
  Description of Artificial Sequence: Synthetic oligonucleotide
  Antisense strand to SEQ ID NO: 1828371
uagcucccugaccaauaag

SEQ ID NO: 1828373 - RNA, 19 nt, Artificial Sequence
  Description of Artificial Sequence: Synthetic oligonucleotide
  Sense strand starting at position 2115 of SEQ ID NO: 1563741
uugugacaucccuagacuu

SEQ ID NO: 1828374 - RNA, 19 nt, Artificial Sequence
  Description of Artificial Sequence: Synthetic oligonucleotide
  Antisense strand to SEQ ID NO: 1828373
aagucuagggaugucacaa

SEQ ID NO: 1828375 - RNA, 19 nt, Artificial Sequence
  Description of Artificial Sequence: Synthetic oligonucleotide
  Sense strand starting at position 2117 of SEQ ID NO: 1563741
gugacaucccuagacuuug

SEQ ID NO: 1828376 - RNA, 19 nt, Artificial Sequence
  Description of Artificial Sequence: Synthetic oligonucleotide
  Antisense strand to SEQ ID NO: 1828375
caaagucuagggaugucac

SEQ ID NO: 1828377 - RNA, 19 nt, Artificial Sequence
  Description of Artificial Sequence: Synthetic oligonucleotide
  Sense strand starting at position 2122 of SEQ ID NO: 1563741
aucccuagacuuugugauu

SEQ ID NO: 1828378 - RNA, 19 nt, Artificial Sequence
  Description of Artificial Sequence: Synthetic oligonucleotide
  Antisense strand to SEQ ID NO: 1828377
aaucacaaagucuagggau

SEQ ID NO: 1828379 - RNA, 19 nt, Artificial Sequence
  Description of Artificial Sequence: Synthetic oligonucleotide
  Sense strand starting at position 2168 of SEQ ID NO: 1563741
gaccucagccuagaaaugu

SEQ ID NO: 1828380 - RNA, 19 nt, Artificial Sequence
  Description of Artificial Sequence: Synthetic oligonucleotide
  Antisense strand to SEQ ID NO: 1828379
acauuucuaggcugagguc

SEQ ID NO: 1828381 - RNA, 19 nt, Artificial Sequence
  Description of Artificial Sequence: Synthetic oligonucleotide
  Sense strand starting at position 2184 of SEQ ID NO: 1563741
ugucuaugacacugaucua

SEQ ID NO: 1828382 - RNA, 19 nt, Artificial Sequence
  Description of Artificial Sequence: Synthetic oligonucleotide
  Antisense strand to SEQ ID NO: 1828381
uagaucagugucauagaca

SEQ ID NO: 1828383 - RNA, 19 nt, Artificial Sequence
  Description of Artificial Sequence: Synthetic oligonucleotide
  Sense strand starting at position 2298 of SEQ ID NO: 1563741
uugcucugucuuuaggaca

SEQ ID NO: 1828384 - RNA, 19 nt, Artificial Sequence
  Description of Artificial Sequence: Synthetic oligonucleotide
  Antisense strand to SEQ ID NO: 1828383
uguccuaaagacagagcaa

SEQ ID NO: 1828385 - RNA, 19 nt, Artificial Sequence
  Description of Artificial Sequence: Synthetic oligonucleotide
  Sense strand starting at position 2318 of SEQ ID NO: 1563741
cacugcagguuaucugauu

SEQ ID NO: 1828386 - RNA, 19 nt, Artificial Sequence
  Description of Artificial Sequence: Synthetic oligonucleotide
  Antisense strand to SEQ ID NO: 1828385
aaucagauaaccugcagug

SEQ ID NO: 1828387 - RNA, 19 nt, Artificial Sequence
  Description of Artificial Sequence: Synthetic oligonucleotide
  Sense strand starting at position 2339 of SEQ ID NO: 1563741
agccuuacauuaucuguga

SEQ ID NO: 1828388 - RNA, 19 nt, Artificial Sequence
  Description of Artificial Sequence: Synthetic oligonucleotide
  Antisense strand to SEQ ID NO: 1828387
ucacagauaauguaaggcu

SEQ ID NO: 1828389 - RNA, 19 nt, Artificial Sequence
  Description of Artificial Sequence: Synthetic oligonucleotide
  Sense strand starting at position 2340 of SEQ ID NO: 1563741
gccuuacauuaucugugaa

SEQ ID NO: 1828390 - RNA, 19 nt, Artificial Sequence
  Description of Artificial Sequence: Synthetic oligonucleotide
  Antisense strand to SEQ ID NO: 1828389
uucacagauaauguaaggc

SEQ ID NO: 1828391 - RNA, 19 nt, Artificial Sequence
  Description of Artificial Sequence: Synthetic oligonucleotide
  Sense strand starting at position 2342 of SEQ ID NO: 1563741
cuuacauuaucugugaagu

SEQ ID NO: 1828392 - RNA, 19 nt, Artificial Sequence
  Description of Artificial Sequence: Synthetic oligonucleotide
  Antisense strand to SEQ ID NO: 1828391
acuucacagauaauguaag

SEQ ID NO: 1828393 - RNA, 19 nt, Artificial Sequence
  Description of Artificial Sequence: Synthetic oligonucleotide
  Sense strand starting at position 2391 of SEQ ID NO: 1563741
cugauacauguacagcaua

SEQ ID NO: 1828394 - RNA, 19 nt, Artificial Sequence
  Description of Artificial Sequence: Synthetic oligonucleotide
  Antisense strand to SEQ ID NO: 1828393
uaugcuguacauguaucag

SEQ ID NO: 1828395 - RNA, 19 nt, Artificial Sequence
  Description of Artificial Sequence: Synthetic oligonucleotide
  Sense strand starting at position 2402 of SEQ ID NO: 1563741
acagcauauucuuuaguag

SEQ ID NO: 1828396 - RNA, 19 nt, Artificial Sequence
  Description of Artificial Sequence: Synthetic oligonucleotide
  Antisense strand to SEQ ID NO: 1828395
cuacuaaagaauaugcugu

SEQ ID NO: 1828397 - RNA, 19 nt, Artificial Sequence
  Description of Artificial Sequence: Synthetic oligonucleotide
  Sense strand starting at position 2953 of SEQ ID NO: 1563741
ucaauaaguuuaccuguca

SEQ ID NO: 1828398 - RNA, 19 nt, Artificial Sequence
  Description of Artificial Sequence: Synthetic oligonucleotide
  Antisense strand to SEQ ID NO: 1828397
ugacagguaaacuuauuga

SEQ ID NO: 1828399 - RNA, 19 nt, Artificial Sequence
  Description of Artificial Sequence: Synthetic oligonucleotide
  Sense strand starting at position 3011 of SEQ ID NO: 1563741
ucaguuuaagcccagaugu

SEQ ID NO: 1828400 - RNA, 19 nt, Artificial Sequence
  Description of Artificial Sequence: Synthetic oligonucleotide
  Antisense strand to SEQ ID NO: 1828399
acaucugggcuuaaacuga

SEQ ID NO: 1828401 - RNA, 19 nt, Artificial Sequence
  Description of Artificial Sequence: Synthetic oligonucleotide
  Sense strand starting at position 3013 of SEQ ID NO: 1563741
aguuuaagcccagaugugu

SEQ ID NO: 1828402 - RNA, 19 nt, Artificial Sequence
  Description of Artificial Sequence: Synthetic oligonucleotide
  Antisense strand to SEQ ID NO: 1828401
acacaucugggcuuaaacu

SEQ ID NO: 1828403 - RNA, 19 nt, Artificial Sequence
  Description of Artificial Sequence: Synthetic oligonucleotide
  Sense strand starting at position 3258 of SEQ ID NO: 1563741
ugagacuccucccuuugau

SEQ ID NO: 1828404 - RNA, 19 nt, Artificial Sequence
  Description of Artificial Sequence: Synthetic oligonucleotide
  Antisense strand to SEQ ID NO: 1828403
aucaaagggaggagucuca

SEQ ID NO: 1828405 - RNA, 19 nt, Artificial Sequence
  Description of Artificial Sequence: Synthetic oligonucleotide
  Sense strand starting at position 3270 of SEQ ID NO: 1563741
cuuugaugacucugauccu

SEQ ID NO: 1828406 - RNA, 19 nt, Artificial Sequence
  Description of Artificial Sequence: Synthetic oligonucleotide
  Antisense strand to SEQ ID NO: 1828405
aggaucagagucaucaaag

SEQ ID NO: 1828407 - RNA, 19 nt, Artificial Sequence
  Description of Artificial Sequence: Synthetic oligonucleotide
  Sense strand starting at position 3273 of SEQ ID NO: 1563741
ugaugacucugauccuaug

SEQ ID NO: 1828408 - RNA, 19 nt, Artificial Sequence
  Description of Artificial Sequence: Synthetic oligonucleotide
  Antisense strand to SEQ ID NO: 1828407
cauaggaucagagucauca

SEQ ID NO: 1828409 - RNA, 19 nt, Artificial Sequence
  Description of Artificial Sequence: Synthetic oligonucleotide
  Sense strand starting at position 3342 of SEQ ID NO: 1563741
agucauuguuccuuuauuu

SEQ ID NO: 1828410 - RNA, 19 nt, Artificial Sequence
  Description of Artificial Sequence: Synthetic oligonucleotide
  Antisense strand to SEQ ID NO: 1828409
aaauaaaggaacaaugacu

SEQ ID NO: 1828411 - RNA, 19 nt, Artificial Sequence
  Description of Artificial Sequence: Synthetic oligonucleotide
  Sense strand starting at position 3422 of SEQ ID NO: 1563741
uugagaguccuguagacuu

SEQ ID NO: 1828412 - RNA, 19 nt, Artificial Sequence
  Description of Artificial Sequence: Synthetic oligonucleotide
  Antisense strand to SEQ ID NO: 1828411
aagucuacaggacucucaa

SEQ ID NO: 1828413 - RNA, 19 nt, Artificial Sequence
  Description of Artificial Sequence: Synthetic oligonucleotide
  Sense strand starting at position 3484 of SEQ ID NO: 1563741
auuguuucugcugauauaa

SEQ ID NO: 1828414 - RNA, 19 nt, Artificial Sequence
  Description of Artificial Sequence: Synthetic oligonucleotide
  Antisense strand to SEQ ID NO: 1828413
uuauaucagcagaaacaau

SEQ ID NO: 1828415 - RNA, 19 nt, Artificial Sequence
  Description of Artificial Sequence: Synthetic oligonucleotide
  Sense strand starting at position 3647 of SEQ ID NO: 1563741
ccaucuaugugauugaaua

SEQ ID NO: 1828416 - RNA, 19 nt, Artificial Sequence
  Description of Artificial Sequence: Synthetic oligonucleotide
  Antisense strand to SEQ ID NO: 1828415
uauucaaucacauagaugg

SEQ ID NO: 1828417 - RNA, 19 nt, Artificial Sequence
  Description of Artificial Sequence: Synthetic oligonucleotide
  Sense strand starting at position 3655 of SEQ ID NO: 1563741
gugauugaauacuuugauc

SEQ ID NO: 1828418 - RNA, 19 nt, Artificial Sequence
  Description of Artificial Sequence: Synthetic oligonucleotide
  Antisense strand to SEQ ID NO: 1828417
gaucaaaguauucaaucac

SEQ ID NO: 1828419 - RNA, 19 nt, Artificial Sequence
  Description of Artificial Sequence: Synthetic oligonucleotide
  Sense strand starting at position 3812 of SEQ ID NO: 1563741
auugaauucugguuucuuu

SEQ ID NO: 1828420 - RNA, 19 nt, Artificial Sequence
  Description of Artificial Sequence: Synthetic oligonucleotide
  Antisense strand to SEQ ID NO: 1828419
aaagaaaccagaauucaau

SEQ ID NO: 1828421 - RNA, 19 nt, Artificial Sequence
  Description of Artificial Sequence: Synthetic oligonucleotide
  Sense strand starting at position 3980 of SEQ ID NO: 1563741
auaauuguagagcacaauu

SEQ ID NO: 1828422 - RNA, 19 nt, Artificial Sequence
  Description of Artificial Sequence: Synthetic oligonucleotide
  Antisense strand to SEQ ID NO: 1828421
aauugugcucuacaauuau

SEQ ID NO: 1828423 - RNA, 19 nt, Artificial Sequence
  Description of Artificial Sequence: Synthetic oligonucleotide
  Sense strand starting at position 84 of SEQ ID NO: 1563742
agccaaucuccugagagca

SEQ ID NO: 1828424 - RNA, 19 nt, Artificial Sequence
  Description of Artificial Sequence: Synthetic oligonucleotide
  Antisense strand to SEQ ID NO: 1828423
ugcucucaggagauuggcu

SEQ ID NO: 1828425 - RNA, 19 nt, Artificial Sequence
  Description of Artificial Sequence: Synthetic oligonucleotide
  Sense strand starting at position 182 of SEQ ID NO: 1563742
uccuuugggcuuuggcaaa

SEQ ID NO: 1828426 - RNA, 19 nt, Artificial Sequence
  Description of Artificial Sequence: Synthetic oligonucleotide
  Antisense strand to SEQ ID NO: 1828425
uuugccaaagcccaaagga

SEQ ID NO: 1828427 - RNA, 19 nt, Artificial Sequence
  Description of Artificial Sequence: Synthetic oligonucleotide
  Sense strand starting at position 220 of SEQ ID NO: 1563742
gauggacuucccugaccuu

SEQ ID NO: 1828428 - RNA, 19 nt, Artificial Sequence
  Description of Artificial Sequence: Synthetic oligonucleotide
  Antisense strand to SEQ ID NO: 1828427
aaggucagggaaguccauc

SEQ ID NO: 1828429 - RNA, 19 nt, Artificial Sequence
  Description of Artificial Sequence: Synthetic oligonucleotide
  Sense strand starting at position 231 of SEQ ID NO: 1563742
cugaccuuacuguacagau

SEQ ID NO: 1828430 - RNA, 19 nt, Artificial Sequence
  Description of Artificial Sequence: Synthetic oligonucleotide
  Antisense strand to SEQ ID NO: 1828429
aucuguacaguaaggucag

SEQ ID NO: 1828431 - RNA, 19 nt, Artificial Sequence
  Description of Artificial Sequence: Synthetic oligonucleotide
  Sense strand starting at position 304 of SEQ ID NO: 1563742
cugugaagccaccaaucaa

SEQ ID NO: 1828432 - RNA, 19 nt, Artificial Sequence
  Description of Artificial Sequence: Synthetic oligonucleotide
  Antisense strand to SEQ ID NO: 1828431
uugauugguggcuucacag

SEQ ID NO: 1828433 - RNA, 19 nt, Artificial Sequence
  Description of Artificial Sequence: Synthetic oligonucleotide
  Sense strand starting at position 437 of SEQ ID NO: 1563742
ggcuucugucuuuggcaua

SEQ ID NO: 1828434 - RNA, 19 nt, Artificial Sequence
  Description of Artificial Sequence: Synthetic oligonucleotide
  Antisense strand to SEQ ID NO: 1828433
uaugccaaagacagaagcc

SEQ ID NO: 1828435 - RNA, 19 nt, Artificial Sequence
  Description of Artificial Sequence: Synthetic oligonucleotide
  Sense strand starting at position 438 of SEQ ID NO: 1563742
gcuucugucuuuggcauau

SEQ ID NO: 1828436 - RNA, 19 nt, Artificial Sequence
  Description of Artificial Sequence: Synthetic oligonucleotide
  Antisense strand to SEQ ID NO: 1828435
auaugccaaagacagaagc

SEQ ID NO: 1828437 - RNA, 19 nt, Artificial Sequence
  Description of Artificial Sequence: Synthetic oligonucleotide
  Sense strand starting at position 440 of SEQ ID NO: 1563742
uucugucuuuggcauauuu

SEQ ID NO: 1828438 - RNA, 19 nt, Artificial Sequence
  Description of Artificial Sequence: Synthetic oligonucleotide
  Antisense strand to SEQ ID NO: 1828437
aaauaugccaaagacagaa

SEQ ID NO: 1828439 - RNA, 19 nt, Artificial Sequence
  Description of Artificial Sequence: Synthetic oligonucleotide
  Sense strand starting at position 448 of SEQ ID NO: 1563742
uuggcauauuucuguugga

SEQ ID NO: 1828440 - RNA, 19 nt, Artificial Sequence
  Description of Artificial Sequence: Synthetic oligonucleotide
  Antisense strand to SEQ ID NO: 1828439
uccaacagaaauaugccaa

SEQ ID NO: 1828441 - RNA, 19 nt, Artificial Sequence
  Description of Artificial Sequence: Synthetic oligonucleotide
  Sense strand starting at position 451 of SEQ ID NO: 1563742
gcauauuucuguuggacca

SEQ ID NO: 1828442 - RNA, 19 nt, Artificial Sequence
  Description of Artificial Sequence: Synthetic oligonucleotide
  Antisense strand to SEQ ID NO: 1828441
ugguccaacagaaauaugc

SEQ ID NO: 1828443 - RNA, 19 nt, Artificial Sequence
  Description of Artificial Sequence: Synthetic oligonucleotide
  Sense strand starting at position 502 of SEQ ID NO: 1563742
cguccaaaucagugggauu

SEQ ID NO: 1828444 - RNA, 19 nt, Artificial Sequence
  Description of Artificial Sequence: Synthetic oligonucleotide
  Antisense strand to SEQ ID NO: 1828443
aaucccacugauuuggacg

SEQ ID NO: 1828445 - RNA, 19 nt, Artificial Sequence
  Description of Artificial Sequence: Synthetic oligonucleotide
  Sense strand starting at position 503 of SEQ ID NO: 1563742
guccaaaucagugggauuc

SEQ ID NO: 1828446 - RNA, 19 nt, Artificial Sequence
  Description of Artificial Sequence: Synthetic oligonucleotide
  Antisense strand to SEQ ID NO: 1828445
gaaucccacugauuuggac

SEQ ID NO: 1828447 - RNA, 19 nt, Artificial Sequence
  Description of Artificial Sequence: Synthetic oligonucleotide
  Sense strand starting at position 777 of SEQ ID NO: 1563742
cagcaucgucaagagaauu

SEQ ID NO: 1828448 - RNA, 19 nt, Artificial Sequence
  Description of Artificial Sequence: Synthetic oligonucleotide
  Antisense strand to SEQ ID NO: 1828447
aauucucuugacgaugcug

SEQ ID NO: 1828449 - RNA, 19 nt, Artificial Sequence
  Description of Artificial Sequence: Synthetic oligonucleotide
  Sense strand starting at position 883 of SEQ ID NO: 1563742
ggaguucuggaaggucaga

SEQ ID NO: 1828450 - RNA, 19 nt, Artificial Sequence
  Description of Artificial Sequence: Synthetic oligonucleotide
  Antisense strand to SEQ ID NO: 1828449
ucugaccuuccagaacucc

SEQ ID NO: 1828451 - RNA, 19 nt, Artificial Sequence
  Description of Artificial Sequence: Synthetic oligonucleotide
  Sense strand starting at position 888 of SEQ ID NO: 1563742
ucuggaaggucagaguuga

SEQ ID NO: 1828452 - RNA, 19 nt, Artificial Sequence
  Description of Artificial Sequence: Synthetic oligonucleotide
  Antisense strand to SEQ ID NO: 1828451
ucaacucugaccuuccaga

SEQ ID NO: 1828453 - RNA, 19 nt, Artificial Sequence
  Description of Artificial Sequence: Synthetic oligonucleotide
  Sense strand starting at position 906 of SEQ ID NO: 1563742
acaggauccuuugagaaca

SEQ ID NO: 1828454 - RNA, 19 nt, Artificial Sequence
  Description of Artificial Sequence: Synthetic oligonucleotide
  Antisense strand to SEQ ID NO: 1828453
uguucucaaaggauccugu

SEQ ID NO: 1828455 - RNA, 19 nt, Artificial Sequence
  Description of Artificial Sequence: Synthetic oligonucleotide
  Sense strand starting at position 1121 of SEQ ID NO: 1563742
aaauaaguguaaggaaaga

SEQ ID NO: 1828456 - RNA, 19 nt, Artificial Sequence
  Description of Artificial Sequence: Synthetic oligonucleotide
  Antisense strand to SEQ ID NO: 1828455
ucuuuccuuacacuuauuu

SEQ ID NO: 1828457 - RNA, 19 nt, Artificial Sequence
  Description of Artificial Sequence: Synthetic oligonucleotide
  Sense strand starting at position 1300 of SEQ ID NO: 1563742
guucuuugccaccgggaua

SEQ ID NO: 1828458 - RNA, 19 nt, Artificial Sequence
  Description of Artificial Sequence: Synthetic oligonucleotide
  Antisense strand to SEQ ID NO: 1828457
uaucccgguggcaaagaac

SEQ ID NO: 1828459 - RNA, 19 nt, Artificial Sequence
  Description of Artificial Sequence: Synthetic oligonucleotide
  Sense strand starting at position 1380 of SEQ ID NO: 1563742
cccgaagcgguuugagaaa

SEQ ID NO: 1828460 - RNA, 19 nt, Artificial Sequence
  Description of Artificial Sequence: Synthetic oligonucleotide
  Antisense strand to SEQ ID NO: 1828459
uuucucaaaccgcuucggg

SEQ ID NO: 1828461 - RNA, 19 nt, Artificial Sequence
  Description of Artificial Sequence: Synthetic oligonucleotide
  Sense strand starting at position 1414 of SEQ ID NO: 1563742
gugagugacugccucagaa

SEQ ID NO: 1828462 - RNA, 19 nt, Artificial Sequence
  Description of Artificial Sequence: Synthetic oligonucleotide
  Antisense strand to SEQ ID NO: 1828461
uucugaggcagucacucac

SEQ ID NO: 1828463 - RNA, 19 nt, Artificial Sequence
  Description of Artificial Sequence: Synthetic oligonucleotide
  Sense strand starting at position 2975 of SEQ ID NO: 1563742
ucaggaauucccugaacua

SEQ ID NO: 1828464 - RNA, 19 nt, Artificial Sequence
  Description of Artificial Sequence: Synthetic oligonucleotide
  Antisense strand to SEQ ID NO: 1828463
uaguucagggaauuccuga

SEQ ID NO: 1828465 - RNA, 19 nt, Artificial Sequence
  Description of Artificial Sequence: Synthetic oligonucleotide
  Sense strand starting at position 2988 of SEQ ID NO: 1563742
gaacuauagucagggacgu

SEQ ID NO: 1828466 - RNA, 19 nt, Artificial Sequence
  Description of Artificial Sequence: Synthetic oligonucleotide
  Antisense strand to SEQ ID NO: 1828465
acgucccugacuauaguuc

SEQ ID NO: 1828467 - RNA, 19 nt, Artificial Sequence
  Description of Artificial Sequence: Synthetic oligonucleotide
  Sense strand starting at position 2989 of SEQ ID NO: 1563742
aacuauagucagggacgua

SEQ ID NO: 1828468 - RNA, 19 nt, Artificial Sequence
  Description of Artificial Sequence: Synthetic oligonucleotide
  Antisense strand to SEQ ID NO: 1828467
uacgucccugacuauaguu

SEQ ID NO: 1828469 - RNA, 19 nt, Artificial Sequence
  Description of Artificial Sequence: Synthetic oligonucleotide
  Sense strand starting at position 2990 of SEQ ID NO: 1563742
acuauagucagggacguau

SEQ ID NO: 1828470 - RNA, 19 nt, Artificial Sequence
  Description of Artificial Sequence: Synthetic oligonucleotide
  Antisense strand to SEQ ID NO: 1828469
auacgucccugacuauagu

SEQ ID NO: 1828471 - RNA, 19 nt, Artificial Sequence
  Description of Artificial Sequence: Synthetic oligonucleotide
  Sense strand starting at position 3002 of SEQ ID NO: 1563742
gacguauccagaggacaag

SEQ ID NO: 1828472 - RNA, 19 nt, Artificial Sequence
  Description of Artificial Sequence: Synthetic oligonucleotide
  Antisense strand to SEQ ID NO: 1828471
cuuguccucuggauacguc

SEQ ID NO: 1828473 - RNA, 19 nt, Artificial Sequence
  Description of Artificial Sequence: Synthetic oligonucleotide
  Sense strand starting at position 3014 of SEQ ID NO: 1563742
ggacaagccuggccauaaa

SEQ ID NO: 1828474 - RNA, 19 nt, Artificial Sequence
  Description of Artificial Sequence: Synthetic oligonucleotide
  Antisense strand to SEQ ID NO: 1828473
uuuauggccaggcuugucc

SEQ ID NO: 1828475 - RNA, 19 nt, Artificial Sequence
  Description of Artificial Sequence: Synthetic oligonucleotide
  Sense strand starting at position 3125 of SEQ ID NO: 1563742
ccacgcuguuccuagggau

SEQ ID NO: 1828476 - RNA, 19 nt, Artificial Sequence
  Description of Artificial Sequence: Synthetic oligonucleotide
  Antisense strand to SEQ ID NO: 1828475
aucccuaggaacagcgugg

SEQ ID NO: 1828477 - RNA, 19 nt, Artificial Sequence
  Description of Artificial Sequence: Synthetic oligonucleotide
  Sense strand starting at position 3361 of SEQ ID NO: 1563742
aguugugcuucuggaacca

SEQ ID NO: 1828478 - RNA, 19 nt, Artificial Sequence
  Description of Artificial Sequence: Synthetic oligonucleotide
  Antisense strand to SEQ ID NO: 1828477
ugguuccagaagcacaacu

SEQ ID NO: 1828479 - RNA, 19 nt, Artificial Sequence
  Description of Artificial Sequence: Synthetic oligonucleotide
  Sense strand starting at position 3510 of SEQ ID NO: 1563742
cgaugucucugcugaggau

SEQ ID NO: 1828480 - RNA, 19 nt, Artificial Sequence
  Description of Artificial Sequence: Synthetic oligonucleotide
  Antisense strand to SEQ ID NO: 1828479
auccucagcagagacaucg
